United States Patent Application Publication US 2008/0050393 A1 - sequence listing, part 13

SEQ ID NO: 50192 - DNA, 1354 bp, Homo sapiens
  misc_feature (1)...(1354): n = a,t,c or g
tttttttttttttttttttatgttacaaatattttattgcaattttttccctttaacaatgtctggatattttggaattaatatctcggacttctttctaatccacattggttcatcttgttcattatgaacagaggattctactttacaatgtactaaaatgttgttatgtatttcaggaccattgaacattcaagttgtttatcattttctttgaccaccaacattgctgtaatgaatagggatttaagagcaaaagtaacgagaatacttgcttaaccacttatgaaaacatatcataaaagtagaacaatcaaaatggtggatgccatagagaaagcaaggtaacaaaataggaagcctagggaccaataaagtatatatacaaggatttcctatatcacaaaagtaacacttcaggtacatggaaaaagaatttcagtaccaaaaggcacctcagtctcacatccacacattcaaaaataattaaaattttacatgaaaagttggaaacacaaaatgaactagaaaaacaatatataaattaggacaaacactgctttgcaatgggaggacctttgtaaatctgacagtaaaagtgaagaaggagtttactagggatctgtttgacattacagaagcattcatattcatacaccataaaacctcatatacaacatttataagacaaacaacagatttgggggaaaaacactccaccatccgtgaaagactgtatgtcaatagtcaaaaagacttaatcagaaaatgatagcacccaacagaagaaagaccttanatggcttggcccagttaaaaaataccaatcgatgcctaagatacctataaaaatatgtgcaaactggataactaaaataatgcaaattaaagcaatttaatgccattatttttcctgtatctgaaaggcaaagatttaaaagaaccataatccctggtgcaggcccaggcatagatcagcagcccctcatctgtggccggtgggagggagagttgcctggtctatctggaagagtggccacccgggccatttggaccaaaggccctaaagcatatatgcctttggggcattttcctttgtttggcagtttcccctgacttttccgcagtagacgtgggctctggactcctctcctgatgttccccagggtcccgccagcctgcccaccacttgggccgttaacttctctacatgacgtggggtctcaagggactggaggtcccacagacatcactgagacaactagcagggctccccagaagctcccaaacagtctctcatgtgcgtcccttgcaccgcccccccgacccccaataccatgcccatttctcggag

SEQ ID NO: 50193 - DNA, 765 bp, Homo sapiens
ttttttttttttttttcagaatccaaaaggactttattttctggcactgggaggcgccctgaggccacagccttttcccagggctgctggcagggtcccagggctgctggcaggggttgtggtcctgttgagcagaggagcgacgccgctgccctggcccccgctgtccctatgatcctgcactctggggtgggagctacatatcatccttggacaccaaggcagtagaagtctgtgcgggcactgtagtttcgcgagccgagatccgagacgtccacttcgctgctccggctctctcccagcgagaccccactggtgtgcggtggagctgatggctctccaaaaacaggcccccggacacccaggtcgccctcagggtccgggtccacctctgagtccagggcccggccctcagggactcggcctcgaagaatcagcatggggtccttgtcgtcctgcagctgcgtctgggggtctccttccacaggcctgtactgcaccttccgcggcagcgccagctgcacttctttccaaaaatcggaggaaggagtcacggagccgggcctccagagcagcaaggtcaccaggtggcgcgctgtggcgcagcaggcggaccgccgggtcggcggggtcgcgcctctggccctcgaaggtgatgaagatgggtctgcgggtgagctccagcagccggcacaggccctccctgaagctgtggctgcaccaggcccggctcaggaaggcgtccgaaagcaccacgatgaggcg

SEQ ID NO: 50194 - DNA, 961 bp, Homo sapiens
  misc_feature (1)...(961): n = a,t,c or g
aggagccaggccctgaggggacgcccccatctcggggcagctctggggaagggctgccgtttgcagaggaagggaacctgaccatcaaacagcgcccgaagcccgctggccccccgccccgagagacacccgtgccccccggcctcgatttcaacctcacggaatcagacactgttaagcggaggcccaagtgtcgtgagagagagccactgcaggaccgnactgctggccttcggagtggccagtgccacgcctggccccgctgccccactgccttccccaactcctggcgagtctcctccagcttctagccttccccagcccgagcccagcagccttccagcccaaggagttccaaccccccttgctcccagccccgccatgcagcctccagtgccgccctgcccaggccaggtctggaaagctcagcagctagtcggtggaatggggagacagaacccccggccgcccctgctgccctcctcaaggtgcccggagcaggaacagcccccaagcctgtgtcggtngcctgcacccagctggcattttctggccctaagctagcgccccggcttcggcccccgcccagtggcctcctccacggcctgagagcactgggattgtggggcccagggcagggcccagcagagattggagcagaccagctcgtccctgggcagctgcactgagagccgcagagaagagcattggcaccaaggagcaagagggcacccccagcgcctccacccaagcacattctggatgacatcagcaccatgttcgacgccctggctgaccagctggacgccatgctggactgagccctccancagtgcccactgngacctgccnaagaccantgactttgtcnnagcnctgaataggtccctgtcaacctnngnacnggccnaggnctggtcaanctgtnntagancttnttattgcacttttctnntttatg

SEQ ID NO: 50195 - DNA, 2783 bp, Homo sapiens
agaacattgacaacgtgcccctgctagtgccccttttcaccgactgcaccccagagaccatgtgtgagatgataaagatcatgcaagagtacggggaggtgacctgctgcctgggcagctctgccaacctgcggaacagctgcctcttcctccagagcgacatcagcattgccctggatcccctgtacccatcccgttgctcctgggagacctttggctacgccaccagcatcagcatggcccaggcctcggatggcctttctcccctgcagctgtcagggcagctcaacagcctgccctgttccctgacctttcgccaggaggagaccatcagcatcatccggcttatcgaacaggctcggcatgccacctatggcatccgtaagtgcttcctcttcctgctgcagtgccagctgactcttgtggtcatccagttcctttcttgcctggtccagctgccgccactcctgagtaccaccgacatcctgtggctgtcctgcttttgctaccctctgctcagcatctctctgctggggaagcccccccatagctccatcatgtctatggcaacggggaaaaacctccagtccattcccaagaagacccagcactacttcctgctctgcttcctgctcaagttcagcctcaccatcagctcctgcctcatctgctttggcttcacactgcagagcttctgtgacagctcccgggaccgcaacctcaccaactgctcctccgtcatgctgcccagcaacgacgacagggctccagcctggtttgaggactttgccaatggactgctgtcggctcagaagctcacggccgccctgattgtcctgcacactgtcttcatttccatcacccatgtgcatcgcaccaagcccctgtggagaaagagccccttgaccaacctctggtgggccgtgacagtgcctgtggtgctgctgggtcaggtggtccagacggctgtggacctgcagctgtggacacacaggggacagccacgtccactttggcctggaggacgtgcccctgctgacatggctcctgggctgcctgtccctggtccttgtggtggtgaccaatgagatcgtgaagctacatgagattcgggtccgagtccgctaccagaagcgacagaagctgcagtttgaaactaagctgggcatgaactctcccttctgagccactggctgtggtggctgtagttgcccccgtccctggggctaaagccagacccatttctgaacaggggagtttgtatcatgaatgtttccaggtttgctcctgcacccgtgggcactggaaacccagctccccgtgtcagaccccgctgtcttcctgagccctgggggtcacttgtggaggagctgacggcctgggcccttggccagttcctggctcttccctgggcctcaccagggacactcttgaatgtatggcctcaggcgctccctagaggggccctaaacccccttcacctgtgagctaccccctttagggatcccttgcccccttggagatcccttgccccccagtgcctctgctcgtgggtccctggacacggccttgaagccaaccttctttggaggagcaacagcagcagccttggccgacgcgtccaactcccaaggctgccgtggagggcaggggggtggtgcttgcctggatgtggccccgagtgcctcccctccctccctctgtgggggagtctcccgcctgaacctgaagatggagcagggcccccgcttcgccctggagcctcttcctgtgcctggctcaagctggctgcctgtcagtcttggggaatctggcccaggtctcctcagcctctgccccagttctgggagaagtttctactggtgtatattttttactggaaatgagccttttaggaatgaatgtagactggtttgtattaaaatgtgtcaattgctaagaaatacctgtggctggtctgtaaggccactccagtgtctgcccacccccggcggtggctggcaaagggaggcctaaaccttcctccatctacgcgggtgggtccctcaggtctggctcaggcgagacccctagggtcaggggtccccatgtcacagaggcaaacacacagcccagtcacgtggaatggtgttttcattggtgttagttgggggaagaggttaatggttacagagccagggcctgggccaatggggtcaggctctccctgccctcaggtgggcagtcggggctcctgctgtggtccgaagcccctcccccattgtgtcctctcaggcagttgatagaataaattccatttaaaatatatgcatttctctctgcttagaaaataacatttacaattgaaaagttaggacttgtgggatctgttaaccccactgcctcccacccctgctagccctgcctcagtgagggaaggcgggggcaggagctgcctgggcaccaccgctgtgtatttacatgtcctctgtacacctacggagaggggggcccggccagacacacgcctcctccagcctctcagggcctgggcaggatggtgggtggcaagaggcattcccttggcacaacttgggacatgggctggggggtacagagaaagcacccccaaagccccacccctacttcctccctgaggagagagctcttaccagggtccctgtccaggagcagggctgtcctgctcaatcgatcaaaccctgggaggggctttgctgagatgcagcggaggtccctcgctagtcaggttctaaggtgggctgccccacaagagctgtggtgcc

SEQ ID NO: 50196 - DNA, 859 bp, Homo sapiens
gcgaccgcagggcttaccccgcctggcgcctgccctccaggctggggcctccgcctgggcgggaccccgcaggcagccccggccccatccccgcccagagccgggcgtcgtgtgggtccgtgggtgataattgagagcgtcagacccaggactgttcagggaggagccccggtcagactcccacgtgtgaagaccgggccccaagtggcaagggctggcctggggcgggcagcttgggtcctggacgttgataggaagcggaaggggaatcgcgggaagctggcccaggtcaggtccgcaaaggcttctgaagaagaggaagggcgagtaggggcacctggacgctgatggtggccaggatgctcagctggccaggagggcagcacctgctggggacggtggccctgccttcatgcccaggacaccagctgggtccagctagcagccactgggaatcagaggaatggggcagagctgggcattcaggaccttgaggacaggtgaccccacccgcccaccgccactatcaggccccgggaccgcactgacaggaaaccttccgtcgtgagggagcacttcccaggggccgcagggacgacactctccagggaggccccagcaaccacaccatcttcttgctgtgagaggtctcaccccgggctacctcctgtcactactcactgccctggggtccgtgggcaagttgcccagggtgggggtgcctagccaggtgcagtccccgccccgcctagtcctcggcgtcacgcaatgctcacctcgcctcttccccactaacatcccagactttaaaattcagtaaatcagatgtacaccgagaaaaaaaaaaaaaaaagtcgac

SEQ ID NO: 50197 - DNA, 152 bp, Homo sapiens
aatagtaacagttggctctgtctccttattttgaagatttttgagttagaaggcaaaggttctactgcatttccaggacatacggccatctgattcactgcatctttatttctgataaaaattattttcactttagaaggggcacatttaat

SEQ ID NO: 50198 - DNA, 849 bp, Homo sapiens
gctttccacagagagaatgatacactaatcatcatcatcagaaatgaagatatatcatcacatttgcatcagattccttctttgctgaagctgaagcatttccccagtgtcatctttgctggagtagacagccctggagatgttcttgatcacacctaccaagaactgtttcgtgcaggaggctttgtgatatcagatgacaagatactagaagctgtaacattagttcaactgaaggaaattatcaaaatcctggaaaaactaaatggaaatggaagatggaagtggttgcttcactacagggaaaataaaaagctaaaagaagatgaaagagtggattcaactgcacataagaagaacataatgttgaagtcatttcagagtgcaaatatcattgaattgcttcattatcaccagtgtgactctcgatcatcaacaaaagcagaaattctgaaatgtttgctaaacctgcaaattcagcatattgatgccaggtttgctgtcctcctaacagacaagcctactatccccagagaagtctttgaaaataatggaatccttgttacagatgtaaataactttatagaaaacatagaaaaaatagcagctccatttaggagtagctattggtaagaacactttttatgtaactttcccatgtgagttggagttgttgatggcaaatattgacatttgtgtctaagggaaacagttgggaaactgttgtttacatacttcatgctataaatttaaagtgtttgtttaggggtggaattgctatttggcataaataggaattcctaaattatcactaaatgaagtaaccatctactaaaattacctattttc

SEQ ID NO: 50199 - DNA, 920 bp, Homo sapiens
atattttcatcttttatacgcaagaattaagcctatgaaaagctataatgtcaaatttgcaacaaatcaaatatacattctatgaagtgacaaatttgatactttataattgagagtgctataaaaaaaacccagcagaaattactaagcaaatgattcggcacaaacagaaaacaataacacctctagcacagtgagacttcattatcttaagaacgacccataaaagaaaaggaccccactcggcacagccttcatccccaagaaagaactggtgactcaataaaaccacatttttaacaacatggagattttgttattataaatttcaaaacaaaatgaaggaatttccacatatttataaccttcaaagtacaatattaatacatgtctgtcagttagaaagaacagcagtttgttaggctacaaggtttaacataaaaccaatttacaaatgtgaaaagcagtagtggtccaatattcaccattacacatgaatctgtttcttccagaattttttaaaattaaaattttagtatcgtgaaatattaaaataacaccccaaacatgccacaatcactattcacaaataaagttaaaatgaaatatacaaaaatccacttaatactgttaaataacaacaataaactacaagatttcctgaacagaaatggtaggacccctgaatgttttacagtgaatttcacgaaaagaaattaagttatgactattttcatgatatataaggcaaaaatttacacgaccatttcaaaatataccaattaagatttatagtttgtaagatgcactaaacaaatagtccttaaaagtgaacaaaaatgcttaaaatactgttaccaacaccaaagtgtgtttatgatgttcaaagagatgcataattaaaactaatatttagtatc

SEQ ID NO: 50200 - DNA, 373 bp, Homo sapiens
gtgaagtaggagaagaaactatatgtagacaagttattaggaagaagtgacattcagagtgggaagggatgagagggagttagctaagcaaagaaggtagagagaagagttcctgcagggagcaactgcagttgtgaaggtcctggagctgggagaggagatgtttgaggaactgagagaagattgaatgaggagggatgtgaaatgatgtggaggaatagatagagcctggcatgttggatgctttcagtaccgaagcagtgctatataatgcctgactatagaggataacccactaaaaatttgagaattttcctttagggagctgagccttgagtcagaggacttcctccttagaggaggtgaggtaaga

SEQ ID NO: 50201 - DNA, 675 bp, Homo sapiens
tttttttttttttttgggtattatacattttatttaaagacttcaaagtaaaaaaaaaaaaaaaaggtacagaaatagattacattatgatgaccacagtagtattctacatgacaaaaataaaaacagatttaagtaaatgtaccggcactgaacaagcatttacttaacatccaatccaggctgcatatgcacaaaatgatctgaccacatgcttatgcaaaataaagtttttcttagaaagccaaaattccaaccattctgactgtccgctgcctattcccctgttgagtattttgagcgaacttctatagaatataagaacaattggcatggcacttaaagactgcaaaaaacagaacacaattaaaaacatttataatgcatttctgtataaaatacacaccgtaaatcttattagttaaaaaaagatttaaaaacaaaagaccaccctgaataatggttaaaacctcatcatagaaaaatgctcatcattttgtacactgaaagaaactactgagaggttttttggggggctggtgggaaggtagatacctaacttaaagattcattcaaaatttgctttaaattgtgggtaataactcactgcttaccccttctcaaaatgttttatcatgaatactctaatatttaaccacaggacaaacataaaga

SEQ ID NO: 50202 - DNA, 1151 bp, Homo sapiens
  misc_feature (1)...(1151): n = a,t,c or g
ttttttttttccagtgtttttagttgcacatttaatagtcacaaatctttttacagatttttcacagatttattatttatagaaaaaaatcaagattaaaatggagtattgaaaaggaccaagaaattactagcagtgatggcaaagtacaaaggctctgaaagaacagagtaaacaagagcagcgcagtgcagcgtgtggccacttcccaccaggcagaacacttgacttcattaaggcaaagcctttactctgttactttttcctcccacatagtttaacccaaatagaaaggcattctattctcacactactgctctctaaggtcctaggaatataactggtactataagcaaacagatgcatcccttgactattaatacctgaatagacaagttaaattgtgatgcattaaccatccctctgggagaattaaaaagaaagaggcagaaattgtttgatgcttaagactgagaaaaaggggtatatatgtgtggtggtggtggaagcgggagagaaaagaggttcaaggagggatgagggcaacaaacctctttccaatgtccaactgttcttatgttctcagatgctgctgatacagtgttccattactctgaaaacaaatgttatctacatccagtcagttctagggtacaaaggctaacaatagggaaaataccttgggggaagggtgtattcatttcaggtacataacacaatagggaaaatacctatatttgtacctagggtacaaaggctaacaatagggaaaataccttgggggaggggtgtattcatttcaggtacataaaaatggaattccaaaattgtgtccctactgtgttcctcatcctaatgtgttattactgttgtaaatcaaattannnnnnnnnnnnnnnnnnnnnnnnnnnnnnnnnnnnnnnnnnnnnntccacataaaatgagaattgtagcactggtattacaggagatgcatgagaagcacagaagaatagtgtctggccaaatcaatagtgacagaaagcagattagtggttccagaggctgggatgaagggggaatggaactgactgctgacagacctggggtttcttggtgaagttacaaaatgatctaaaattagatgttagtgatagttgtgcaattttgtg

SEQ ID NO: 50203 - DNA, 467 bp, Homo sapiens
gcctggggggccggaaggggctgggaggatctgacggggagccagcctcagggagccccaaaggaggtacccccaaatctcaggcgcctctagacctcagcctcagcctcagcctcagcctcagccccgatgtcagcactaaggcctcaccccccagagcttcccaggacattccttgcttggacagcagtgcccctgagagtggcacacctatgggtgccctgggcgactggcctgccccctattgaggagcgtgagagcccggcagcccagcccctgctggaacaccagtactgagctacctgggcgcccactggaccacctcctaggattcagtaacggacctgctctgctgcctctctgctggaccacagaactgagtggctttggcctacatgtctgaaccctgacctttggctgccttggccagagtaccaaaattgagttgacccagacctctgaccttg

SEQ ID NO: 50204 - DNA, 545 bp, Homo sapiens
gagcaggtgtccgggctggagaagagtcctgctttctctggagtccagacctgtatcattccatgaggaactttccccttcagatcacctctgcgccacatctcatccatgcctcctccatgcactccagtccacactccccgtagcatcattccattgcccctcccatccatgctgggaccctcctggcccaccaaggcccaggcaccactgtgaatattctcctctgaaccactagagggcaggccaggcaggccaggcgggcccgtgcagcttgtgggcaagaaggagctggcaaggaccggcgctgctggagactgacccagccctctggctgaggacatgcagcagctcctaaatgtagagatgcctgtggctggagggggcctctctacctgtgtccccactcactccaggagcactggctttggtcacgtcttagcagcagggccttgctccgttgttcccttgccctggtggtggtggggccagaccgcctccggaatcctgccacctgtgactgtctgactgcttagtgcttcagc

SEQ ID NO: 50205 - DNA, 411 bp, Homo sapiens
atcaagtctgctccaacgtatccatgagcactatttgccagctgcagcagctcagcctcagtgagcaaatggggtacccttcgaagcagtttctggagaatatctagccggtcctgagcattgggaactccaatctcaatctctttatcaaatcgcccaggtcttcgaagagcagcatccaaggcatgagggcgatttgtggccccaagaaccaacacttgtccttcacttacttctgaaccaatgccatccatcagtgttaagagtgaagccacaactcttttttccacttcattctgggccccctctcttttcggacaaagtgcatccagctcatcaataaaaataattgatgggtgtcgtagagtggcttcagcaaatatctgacgtaactttgctcggacgcgtggg

SEQ ID NO: 50206 - DNA, 522 bp, Homo sapiens
gtcccgttcctcaaattcatgtgttctctcctttctaccagagggatagagcccatgcctcaacctatccagagttcaaatcaaagagtccccagtgtgattcaattgtttgcctttcacgtttcgcaaattttccaatctcccactcacgtttttacaaaacgaatgctctaaattctgaggattccaggcaggccatccatagagaaataactttttcttgctcattcccttacaaccccaatctatacatggatttttagaaagtcttcatggctatctatagttccctaccaataatttgaagcctttgctttaggcagggaggcatgtggctatggaataggggaacacgtaggatttgaccctggttctgcatccaacttaggctgtttcttgaaagagcctggatcctcagttttcccatctctgcaagcagggataacggtaatgagaatgataataatcattatatgcagaccttcctcttcatcttacagaggcttagtgaggcttaaatga

SEQ ID NO: 50207 - DNA, 267 bp, Homo sapiens
gccaatgaccagtgtccttctaagagacagaagaggagacacagacacagaggaaaaggtcacgtggagatggaggcagagaatgtagtgatgtggccacaagcccagaaatgtctgaagcccccaggaactgggagaggcaggaaggaccctcccctagagcctctggagggaaccagacacaattgcaaagacttgaatggtgatccccaaagagctgtccatgtcctaacccccagaatctgtgaaccggaccttatttgaact

SEQ ID NO: 50208 - DNA, 2427 bp, Homo sapiens
atgcaaaatccaaaacttcagtacagcagggagcaaggagcccggaagtgggcgcactggctgtgcacacgcctggacactttcacaagcacacagaacgaccacctaccacgtccataacgctccggatgtcctgagtggagagagttgtgtttattcaccatgtcatacgcgcatatagggaacctctatttaggagctggtggcctgcactcagcaccgcacagataaaaatatacgactttcaacacagatccaaataccctcacattttaaaagtcaggattccctacacaagttttaagctgacgggattcaagttctgagttttcatacatagctttaacttgtattaaacacatgtttatttacaacgtggagagagaataaggggcagttaaggccactttctcctgtgaaacactgcaaaatatgtacataagtacaacctaatataggcaaaggttctaaaaatcatctttcttggcttcacgtaattgagtatcagtcggggagtggagagcggctgccgatagcaccaggccatgccaggccacgccaacaagggcgtgtgcattcactttttcattgagctgccctcagagctgctgccgagctgagccctgcacgggcccaggtgtgcgccgcaccccagaccggtctgaagcacgtgtcaccggtccctcagttccatttccaaatccaccaaggtccagtcgacagacatttccaaaaagaatcctgttctaggaccacttgcgctgagagcacacccgggggtcaaagggcagccaccgggggtcaaagggcagccatcaggtactccccagggaagggcttgcggccaccagtcactgcaaccccgcctcacctccgatgcctgctgtgcccagggtggtcccgctcatagcgacggcctgtgcgttcatacgacctcgagcgctctcgtcgctgatctctgtagtaatgacttttcttcttgtattttcccggattatacggccgcttccgtgaactgccttcgagaaggggaagaaattcggctcggagacttgttgtggcttcttggggtacttgcagttcttggactttcgggaagccccgaatccaagaacctttgtagggagcgctgcggggggcctgtctcggtggggagtcactcctgctccgggagcggctctgcgacttggacccaccagatgtggagccgctgtcacttttcctcctcttaggagacgctgatcgggatggggacctcgagtagctctgctcacggctccggctccgactccgactctctcgcccctttggcaagccgttcacggggctgtccgccttggctttcttggcgccctccagcctcctcttggtgttcttcacagacagtggggaaggcttgctccctttaccttctttgggggattccaccagcttgggggcaggagagaaccccgaggtaccatccagcacctgtgtcccccaggaacaggccccgggcttgggcttttgctcttcgatagcgtgctttcttttttccacttcaccctccaggtgtgtgagatcaacctttttcccgagcataaagctgcaagatctttaagcagatttcctgaatttcttcttcagttgctccaaacaaaagaaaccaatggggacgattgggcaaagggatctccagcgtccgggcagcaagataaatgcaggcacaggcgatgctctctggctggaaccgcacgaagacgtcggtgcgaaggctgtcgttcatgtaattcctggaagccaaacacaggaagaactgcaatgccccacccgggaaccccaggtcttccgcctgcattatctagagaaaatctagataaacgtactactcctctaaggagtctattgctaggactcagagctagacagtcctgtgaatctcaagagttaatggagaaatattctagctgctttttctaaatacagtaaatacaggacagaaaggcacagaaattattagaaaaaaaaaaagctggctgaatgtcagacaatacgtgttgctatgaaagagaaccgactttaactttacttttcccctcaaccttggcctgctctcatgcaaagcacgatgcctcagaaagaaaatgtctactggagtcactaaaacgcttttgattaaagaaatctaaatgctcaaaatccatagtgcagagaaacatgcaaactcaaatgaactggctgagcacaaagccggtgtggctgctgggagacaagccatcctcttgggttcctcttcctcttcctccagggcgctggcggcaggccccttctctgctgaccgagctgcagcttccttgaaggagtccacttggaagagggaaaagccccttgggtgcaagttggacgcagtgggagcatcgtgcggagtcagactctgcaccgaatggc

SEQ ID NO: 50209 - DNA, 139 bp, Homo sapiens
gtgagtgagttccttcctaagccagccactaggtgctttatgtaattatctcatttaattctcgaaacaacactatgatggaaggactattaccatttccatgttactgaggaaaccgaggcacagagggtttaaggac

SEQ ID NO: 50210 - DNA, 448 bp, Homo sapiens
  misc_feature (1)...(448): n = a,t,c or g
ggctgcaggagaccgagggggagccgggccggtggggccgccgccgccgccatgcaggaaatcatcgccagcgtggaccacatcaagtttgacttggagatcgcggtggagcagcagctgggggcgcagccgctgcccttccccggcatggacagactcctgactcccaggcccccatttccaccgtctggggactccttttaccctcactcggactcaggagttcactgcctcggatctttggccctctgcggctgttcaaagagtcgggcgctgctgtctgtgaattctttttgaaagctgcctgcggcaaagggggcatgtgtccgtttcgccacatcagtggtgagaagacagttgtgtgcaaacactggctgcgtggcctatgcaagaaaggggaccaagtgngaagttcctgcatgagtatgacatgaccaagatgccccag

SEQ ID NO: 50211 - DNA, 391 bp, Homo sapiens
cgcccaaacaggaaaggacaaagatgcatgcataagtaaaaatatgacaggtcacaatcacgccggggtggtcctggggcgaggcccaagttccctgcacgcgtcggcacaagcacgctcactgtgacggggaggacgtttacgtaccatgtccacaccactccagacttggagaagcattagtgtgtccgactacgtgggtttcatagctgtggaaaagccaaaggggagactcctgaagaaaggcggtgaagactgtgtcaggaagatgagcacagcactgctactcctgtgggcacagggacagcatgtctccagccagtgccaccttgtttaatacatgggaactcactgaaattcattctgtattttgcccgcaaagttttaaaga

SEQ ID NO: 50212 - DNA, 419 bp, Homo sapiens
  misc_feature (1)...(419): n = a,t,c or g
cacanatgcacagtccccctcccactccgttacctaactgtacgtcttttcatgtttataaactatacagaaaactgtatttgctgaactaaggattgtattggtgatttctagcaaaacacacagtgatagaatttttgtctagaatcccaaactggcaacgatagtctccaagggacctgggccttgccaagggcctgggggcaaggtgtcggcgggacggtgaggaagggggaggcagcaaggagtcactttgggggaccaatattcttaggatatttaggagcatcaccttgtttttatatggcaacacaagcctgtctgccaccctggagcgccctgtcacccctgctgtcgtagctgttggcttcagggtgagaagtgagaagcagcttattgtatatgagggagccaggccc

SEQ ID NO: 50213 - DNA, 436 bp, Homo sapiens
ggaggctacttaagtgaagtagtagaagaaaatactccaccaaaaatggaaaaagaaggcttggagataatgattgggaagaagaaaggcatccagggtcattacaattcttgttacttagactcaaccttattctgcttatttgcttttagttctgttctggacactgtgttacttagacccaaagaaaagaacgatgtagaatattatagtgaaacccaagagctactgaggacagaaattgttaatcctctgagaatatatggatatgtgtgtgccacaaaaattatgaaactgaggaaaatacttgaaaaggtggaggctgcatcaggatttacctctgaagaaaaagatcagcaggtcaaaaggtcaagattgttacttctatcaaatttttatggaaaaaaatgagaaagttgccgttcccacaattcag

SEQ ID NO: 50214 - DNA, 673 bp, Homo sapiens
tttttttttcttggtccataaagaagacacatttatttacattctcaatggactaaaagaggctttaaacttccacaattaaaattgtatgcttccaaaaatatcatatgatcaatgcacttaacttaaagcttcaggtattaataacttcatttagacttcttaaaaaaccaacacaaacatactttctagagtgcaaaatgcttcttattaaatacttcagggacacaaaagcaatttgtttttaaacagaggcatccttttctgaaggatcatcaccacaaagacatccattgccgggcaatggacgtgaacagaactgccagctcgaataagatgcaacgttaggactctgccttcagtttctttgcctttcccgatgaccccagttatttgtacaaactcattgttggactctcctggagtccaaggaatgcaggtcttccagagacatcttcaagtactctcctacttctgggcatggggtgacttgaggaatgttgaagccattctgaccaccatcccgatcggccatgctgtcaaagaagagccaggcagaatcgtccttcccatacttcacaaaagcaacatagtggcttgtttctatgcagagaacagcaaataactccatattctggcaagggatgcagccgtgtctccagtcccagtcggc

SEQ ID NO: 50215 - DNA, 575 bp, Homo sapiens
tttttttttttttaaccataaaaatgtaattttaatgatacagaaatagtatatgtacatttctttccacagcagcacttcattcatctctaaaaaatttaacaaaattaaggctaaatcagagcgagctgataggaaggggtattctatgtggtggtcttcttaaagaatgttctcataaatataggatgttctgcagacaagaaataaaaataaaacatgctgaacaagataccaaaaatgggaaatgcagtagaaaatgagcccctttctaccaatctactaagaatcccaactcccctgggaagtttcagatgggatgtgagttcttttaatgaatgtttatgatctgatgctaagactttctaaaattaaaattccacagtactaggccattttataaactaaaaccaagggcagttgagtctccaatataatccctctagaattttttaagttaaagtggacaatatttgaaagtactaattttatctgaagctgtggtgcttgaaaggacaatccctccatttgtggcccttctccctaacccatgttataaaaataaatgaagactt

SEQ ID NO: 50216 - DNA, 1510 bp, Homo sapiens
cgcaggaaaggaggcctcccaaacttgcctttatgtcaagaggtgttggggacaaaggttcatccagtcataataaaccaaaggctacaggatctacctcagaccctggaaatagaaacagatctgaattattttataccttaaatgggtcttctgttgactcacaaccacaatccaaatcaaaaaatacatggtacattgatgaagttgcagaagaccctgcaaaatctcttacagagatatctacagactttgaccgttcttcaccaccactccagcctcctcctgtgaactcactgaccaccgagaacagattccactctttaccattcagtctcaccaagatgcccaataccaatggaagtattggccacagtccactttctctgtcagcccagtctgtaatggaagagctaaacactgcacccgtccaagagagtccacccttggccatgcctcctgggaactcacatggtctagaagtgggctcattggctgaagttaaggagaaccctcctttctatggggtaatccgttggatcggtcagccaccaggactgaatgaagtgctcgctggactggaactggaagatgagtgtgcaggctgtacggatggaaccttcagaggcactcggtatttcacctgtgccctgaagaaggcgctgtttgtgaaactgaagagctgcaggcctgactctaggtttgcatcattgcagccggtttccaatcagattgagcgctgtaactctttagcatttggaggctacttaagtgaagtagtagaagaaaatactccaccaaaaatggaaaaagaaggcttggagataatgattgggaagaagaaaggcatccagggtcattacaattcttgttacttagactcaaccttattctgcttatttgcttttagttctgttctggacactgtgttacttagacccaaagaaaagaacgatgtagaatattatagtgaaacccaagagctactgaggacagaaattgttaatcctctgagaatatatggatatgtgtgtgccacaaaaattatgaaactgaggaaaatacttgaaaaggtggaggctgcatcaggatttacctctgaagaaaaagatcctgaggaattcttgaatattctgtttcatcatattttaagggtagaacctttgctaaaaataagatcagcaggtcaaaaggtacaagattgttacttctatcaaatttttatggaaaaaaatgagaaagttggcgttcccacaattcagcagttgttagaatggtcttttatcaacagtaacctgaaatttgcagaggcaccatcatgtctgattattcaggatgcctcgatttggaaaagactttaaactatttaaaaaaatttttccttctctggaattagatataacagatttacttgaagacactcccagacagtgccggatatgtggaggggcttgcatgtatgagtgtaaagaatgctacgacgatcgcgacaacacgctggaaaaaacag

SEQ ID NO: 50217 - DNA, 648 bp, Homo sapiens
  misc_feature (1)...(648): n = a,t,c or g
gccccatggctgacagcccgagttgcttctgtggaccatcatgccgctcggcacgtcctgagacagaagttgctgcaggaaggagcttctggagaggtcctgtggcatgtgtgggggtgtgtgtgtgtatgtttccttcttgaacagacattccaactttagatgtgtttatagaactgacctttttactaacaaaatacaatgatatatgttggaaactacttaatatgcttttcctgcacaccttagcaataactgtaggggtctctgctagagttgtttgtatgtacagcaattttgaacaaattgttttaaatgtaatataagagaattagtttaaggaagtaaagaaaatcatttgcttgnggtacattttcagtgaggattcagtttaagagtcattcttaggacttccatttcctaatatttattcatgggtaatgaagaaatggtttgcattttgtggccagtcctaatttattttccagctgagccctaacttccggctcccacctacctccacggacttcctaacagagacttatgaataccaggatgtgtttttgttaagtcaggttcaattcgttgcccctgtcagttttatagagtgtgagggtcactccattaaagatctctcctgggtggatc

SEQ ID NO: 50218 - DNA, 108 bp, Homo sapiens
gtagcatgagggtgaggagtgtagcagagatagaaaatcccaggccggaagacagctgaaggagtaacatgagaagattctcctggccaacatggtgaaaccctgtct

SEQ ID NO: 50219 - DNA, 747 bp, Homo sapiens
ttgcagtgtgcttttagacaacagaacaaacagatgatatgggaaaagggctcggattcacctggcttcaaatcctggtgctgacacccatagctctgtggccttggtcacgcctcttatcctctctgaacctcagtctcttcttcaaaacatggaggatgaccctccctgagggccttgctctgaggcgtaaaataatgaatagaaggtctggcactggggctgatgtatagctggtgccccaaaccatcagcgtcactctgatgattgttgctaaaataaccagctcaccccatgggtgagtgcaggaacagaccccaaaaacatctttattccatttcccgggttcccgaagacccccggatgccatggtgtggggccatggaagaaatgttaaggcattcaggagtgtggcagcccctggcagcgagtcccagagccagggtggacctgttctctagcagtacccaggggcaaagggtggcggttgttggtactcctccgggagctggtcgttctcaggctctgcaagccctggtgctctggcttggactcctgggaggatagggctctcactaccatttggtgccaactcctgtcccctggggtcacctcaatgcagctgaccgacctctcggccttcctggtggggacctttctgtcttttggtgcctggggctgtgaggggcttttgagagatgtggccacacagggatccgtgtagcctctgtcccccgaggtgggatc

SEQ ID NO: 50220 - DNA, 413 bp, Homo sapiens
cgactggtgcaacttctaggtcgtccccagcatggaaaatgagccctgggcatggaagatgagccctggtcctgcagcggtgctctttcctcttctcacaagctggaatgtgcatgtgctcccacccagctttgaccatggggcgaaaacagtactctgcagtctggcagagcaacaaggtggaaagggcctgggtccttgagtgacgtcatgagccctctcactgtcccgactttgggactgttatatgataaggactttctgtgagtcactgtcttttagagtctctctgttttagctgcctggactttatcctgaataatatggctgttatcatgggtatagtgttactatgagcctcatctaagtaatttctactctgcctttgaccactaaactcatgttggacaaga

SEQ ID NO: 50221 - DNA, 956 bp, Homo sapiens
cgtttatatgttaacatttttctataatatgagtgcctttccaatgcacagatatttttttatggctgtaatttctctgtaaaaataatttttaagcatacattttattctttttttgcaacaaccgagatttttccaagattgttctgtttcccctcgccctcctagctcccgcccccgtcacttcggcgcttgtattttctaattattcatgggtgccatgttgagtgtttgtaatttgaccaccacaggtaagcttcctgtttacttgaacactcagcctcatctccggtgaatgaagggaaaagcacagatgggtttctcccaggcacagctcactccaaaggtgtcttcatagagccaacccagcctttctcaagggagcatttccccacttaatgtgtttatcagcatctttcttccgccaagaattcaagagcattttcaaaattgatagattttggtgcagttttgcaagtttccgtggaaggctgtctcccgcttctgggatccacccccatgtcgggacccagatcggctgcagggagtcatgtttatgaaatgttggtggtttttttttttttttcattcatactagaagtgtttttataacgaaaatctgcactttacaactctgcaggccatgcatgcaatggtgatttacagccttgtttacgtgtaattcctccaggtgatttatcccaatttatgcaaagatcctattttaaacagacacggagaagtggtaaccgtttcctaacagcagcaagaatgccccttccgtttgcctggtgaaaagaactgacattaacagcagcttggaggcttcgaggaggtggggacgtggcctgagctcgggacgggggcccagtgcgggttgtcggagcgtggctgcccggcgatgtctctgtatttatcaataaatctcccggttgctctgggaaaaaaaaaaaaaa

SEQ ID NO: 50222 - DNA, 346 bp, Homo sapiens
gggctcctcaaaggagatgctgtttgaaggaggtcccagaccttggatcctcgagccgtccaaattcttccagaacgtcaccgctgaggacactgacagcatcggcctggctctctttgccccccattcctcccggaattatcagcaacactggatccttgtgacctgtcaggccttgggtgagcaggtcatcgccctgtcggtggggaacaagcccagcctcaccaacccctttcctgcggtggagcctgccgtggtgaagttcgtctgcgccccaccgtccaggctcaccctcgcgcctgtctacaccagcccccagctggacatgtcctgtccgctgctgcat

SEQ ID NO: 50223 - DNA, 897 bp, Homo sapiens
ttttttttttcatcacagtatttaaacaattaggaattttactttatttcagaataagtttacagttgaaaaatgattatttactaaagccacattattcatacagacaaaacttttatagcaaaaccttggtacatgagcattaataatttgaatactatatggatatagaagatatttaaaaaatggaaacaatgtattccaaaggctgtaagaggcacaatatatatgcttgtactgggcctgcaagcattatactataattcattaaatatgatccaagaagttgcagatttttcagcactatgtactgaaaagataaaaaggaatatcatagctactcttacgctgaagaagcatctactatcaagactacaaaataggagcagcaagccaaaccaacagataatgccttaggttttaggagaaataatacatgtatggctttttcatgttcattttcgagcttggttagcaagtctggcaggtggaaaagaggaaattagtcctataagaaaacgttaaagacataatttacaaggcatctgatatttaacatgttcaaacttggaaaataataactgagcttgattttagagcaaagttgcgaggtattacatagcaaaaaaatgatttcttctgtttaatgtttttggcataagaatctcttatgcagaagaaaagcaagttttcaaatgacatggtggaaaaatatgtaagatgaataattagaattgactttcggttttcagtaactacagagaatataggtcttccaaggaccaaggaactgaatttggtccttaatataaactcttatgtcttttacaagcgtgggttgaaatatgtactcatgctgacagtatccacgctgataaaggtgaacatgtggtaaca

SEQ ID NO: 50224 - DNA, 109 bp, Homo sapiens
tgagaattctgcatctgccattggaggatggacagcctcaaatggaaggagtcccacgggagatgggtccgaggtccggctgtgggccatccagccccctgtggcttgt

SEQ ID NO: 50225 - DNA, 116 bp, Homo sapiens
gatcccttggagcaccttcatgcctggggtttctctcccaaaagcttcttgcagtctaagccttatcccttatgttccccattaaaggaatttcaaaagacatggagaaagttggg

SEQ ID NO: 50226 - DNA, 47 bp, Homo sapiens
gaaagtcaaaagcgaagaaagtctttgaaaaaggtttcaaagtcttc

SEQ ID NO: 50227 - DNA, 1967 bp, Homo sapiens
  misc_feature (1)...(1967): n = a,t,c or g
tttttttttcagttttgccaattttattgaaccaataaaattcctactaataacaatgaaataaatttctgcaagtataaatgtgatacagtttaacaaaacccattgttctgtacctataaatagattttcaaaatgtcataaaaagtgcagttatgaattgttaacatgttaatacacagttcctttatttcagatgtgtttgtcttgactcactaacagttccttctgcatctgtccaaataatgttaccctccctccaaagaaaaaaagagtcattaaagcactagaatattacacataaactgatccatttaggtcagctttagtcagaactgtaaaatcagcaaacataagaaaaacaaaacctagtaatacatacaaaagctttcatgggttctagaaccttcttaactgctgattcatgtggagggcattaagagttgaaaaggcttatatggttaactaccttagactatatctacagcagggtctggtttgccagaacaagtttaaagtggctgtttattaagtttgctattttcagaattgaaactataagaccgccatttgacactgaaacttgcgtgaatcctaaattgcatcaattatctatttgataaaagcttattctaatttaaaaccttatagagtaagagactgatatatatagcagtcttaaagatcacgtcatctgccttacattagtccagtcacgtgcttcgtaaaaaaaaaaaaaaaaattacagtaacaaagcacaggactacaaaggcaaaacatcacagcttctgattacattgaataaaaagtaccaagaaacgcaaatgataattctgtattaatactgatgaattaaagagctataacagacatttcacagcatgctacatatatcgctcacaacttaaggataaatgtctaacattgaaagtcaagaagttggcaatctgatttcatgtgcaattcagctacagtcttaatatatacattcattatgtagctgtcctgcaaaaccaggattttttaaaaagagttttcaagttcnaacttctatttcataagttaaaagatgcgtccagttcttccatgaccaggaaagttattttcaggcttaaaggagctaatccaagtagcaaggccatgttgcaagtggacctgacagggttctttataaccttgctgagactgtgtatgtgtatgtgcctatactagtagcactgagaagatgccaaactggctgtggtttgctttctatgtctcttattttgggttgaaaagagtaaatgtgaagagaaagaggaaggggaaactgtattttctctccagagaagactaaataatgcaaaggaaatatctgcactagatatatagtttggatcactttccttggtgaacaagggtactatttaactcttttaccttagagaaccagcgaaattcagaaagcggaagtctctcaacattacaaaggaaactccttggccacccaactaatacatttcttttttcttttaatccttccttatcagacttggggagcccagttgaaaatgtgtaaagatattaatttaagaaagagatgtataataagttttattctgtaagtttccataatgtatgcacttaactaatcaggatttgtgaacaatattttaacactataggcccagagagattctctctgatattcctttcggtagaaattatacattcatttttttaagaggttaacttgaggggtgcaagaaaatagactgttctagcaaaatttacataacaaaaattctattcatcttatttagacttactaatgtttgatgttgtcctatgaactgtaaaattgggtatctgttctaaaggctattttgtggtatgccctgcacgatctcaaagatttccacaagcattcaaaagaatcagatattcattctgtttcccccccatatatataatttttcattctgta

SEQ ID NO: 50228 - DNA, 966 bp, Homo sapiens
gtccgggtatcctaagcatgtggtgtgtatggtgtctgaaattgaatatgctgtgaaactgcctgtgtcgaaatgcagtgtttcccaagacctggaggctctctccagctgctgattgtgatcacctctcccgatcaccgctgagccctgcaggtcaccttctcctgacctattacaccactgattgcttatgctgggcacaattttatacccttgctgttgttcagtctaatcatccctataaccctatcggatcattcccatatgacagaggagaaaacctggggacacaggggctgtgtcctggccaaggccttgcttgcagcaaaaggcagagcctggggtctagccaggagccccagcacagtcctgttcttcccccactaaactgagctgtgaaatagatcatggcagtttggaaaacgggctaactgtatgctgtgggaggtggtgacggatacctacttcttttcatgggaagttgaggtgtctccctgcccccctcaggtctagcttctctctgtagctcagaaccttgggaaagtgggaggctcagaggaggaaagagatttacttgccccaagggccgcagctgctaagtggcaggtaagggactgttattctcctgtccctttcacagaggacaggaggaaagtgaggacaggtggtgtacatgcatcttttctgcagcaggcccagatcagctttgcacacggttggtgctgacctcaaattcagccttagaggggcctttctctgccctgagtgagtattgaagtgcaggcttcttcccctttgttctgtccatttccaaaaatgtgaacacacacctccaacatgtttctgtgtatattattgtgtgcatagatactaccattgtgaaatattatgcagattaataatgcactatgccattgaaaatttcaaaagaaatgtgtaataaacatttaaaattaaaaaaaaaaa

SEQ ID NO: 50229 - DNA, 394 bp, Homo sapiens
gtgagctaacacctatagcagttgacactacctctcaaagaaatgcatctccaaatagtgagccctgcagcagtgattctgtatccgagccagaatgtactactgattcttcatccagcaaagagcacacatcatcatctgctattccaggaggtgtggatattatggtcagtgaagatatgaaattaactgactcagagctaggaaagctggcaaataatatccaggaattattatatagtgcctcagatatatgccatgatcgagctgtcaaatttctcatgtcaagagcaaaggatggttttcttgagaagctaaattccatggaattcataacactttctagattaatggaaacattcattttagacaccgaacagatctgtggaagaaa

SEQ ID NO: 50230 - DNA, 6877 bp, Homo sapiens
ggttcccaggcacaggaaccaatcctggtctcagccaagaccatgctggagagttcatcgtacctcattcgcactgcacgctctctggccatcaaccccaaagacccacccacctggtctgtactggctggacattcccatacagtgtccgactccatcaagagtctcatcacttctatcagggacaaggcccctggacagagggagtgtgattactccatcgatggcatcaaccggtgcatccgggacatcgagcaggcctcgctggccgccgtcagccagagcctggccacgagggacgacatctctgtggaggccctgcaggagcagctgacttcggtggtccaggaaatcggacaccttatcgatcccatcgccacagcggctcggggagaagcagctcagctgggacataaggtgacacaactggcaagctattttgagcccttgatcttagccgcagttggtgtggcctccaagattcttgatcatcagcagcagatgacggtgctggaccagaccaagactctcgcagagtctgccttgcagatgttgtatgcagccaaagaaggtggcggaaaccccaaggcacaacacacccatgacgccatcacagaggccgcccagttgatgaaggaagccgtggatgacatcatggtgacgctgaacgaagctgccagtgaagtggggctggttgggggcatggtggacgccattgcagaagccatgagcaagctggatgaaggcactcctccagaaccaaagggaacatttgtcgactatcagacgactgtggttaaatactccaaagccattgcggtgacagctcaggaaatgatgactaagtcggttactaacccggaggagttgggaggactggcttcacaaatgaccagtgactatgggcacctggctttccagggccagatggcagcagccacggcggaaccagaggagatcggattccagattcgcactcgtgtgcaggacctgggccacggctgtatcttcctggtgcagaaggcaggggccctccaggtctgccccacagacagctacaccaagagggagctgatcgaatgcgcccgtgccgtcacggaaaaggtctccttggtgctctcggctctccaggccgggaacaaaggaacccaggcatgcattacagccgccaccgctgtgtctgggatcattgccgacctggacaccaccattatgtttgcaacagcggggacgctgaatgcagagaacagtgagaccttcgcagaccacagggagaacattctcaagacggccaaggccttggtagaagacacgaaactacttgtgtcaggagctgcgtccactcctgacaagctggcccaggcggcccagtcctcagcagccaccatcacccagctcgcagaagtggtcaagctgggggcagccagcctgggctccgacgaccccgagacccaggtggttttgatcaatgccatcaaagatgtggccaaggccctttctgatctcatcagtgctaccaagggagctgccagcaagccagtggacgacccttccatgtaccagctcaagggggctgccaaggtgatggtgaccaatgtcacctcgctcctcaagactgtaaaggcagtggaggatgaggccacccggggcaccagggcgcttgaggccacaattgaatgcataaagcaggagcttacggtgttccagtcaaaagacgtacctgaaaagacatcatcacctgaagaatccataaggatgacgaaaggcatcaccatggcaacagccaaagccgtggcagctgggaactcatgtagacaggaggacgtgattgctactgccaacctgagccggaaagccgtgtcagatatgttgacggcttgcaagcaagcatccttccaccccgatgtcagtgacgaggtgagaaccagagccttgcgtttcgggacggagtgcacccttggctacttggacctcctggagcacgtcttggtgattcttcagaaaccaaccccagaattcaagcagcagctggccgctttctccaagcgagtcgccggcgctgtgacagagctcatccaggcggcggaagccatgaaaggaacagagtgggtggatccagaagacccaactgtcattgcagaaacagagttactgggggctgcagcatccatcgaagctgctgctaagaagttagagcaactgaagccaagagcaaaaccaaaacaagcggatgagaccctggactttgaggaacagatcttggaagctgctaaatccattgctgctgccacaagcgccctggtcaaatcggcctcagcagcccagagggagctggtggcccaaggaaaggtgggctccatccctgccaatgctgcagacgacggacagtggtcacaggggctgatttctgctgcccggatggtggcggctgcgaccagcagtctctgtgaggcggccaatgcctccgttcagggacacgccagcgaggagaagctcatctcatctgccaagcaggtcgccgcttccacggctcagctgctggtggcctgcaaggtgaaggccgaccaggattcagaggccatgaggcggctacaggcggcaggaaatgctgtgaaaagagcctcagacaatcttgtccgtgcagcccagaaggcagcttttggcaaagctgatgacgacgatgttgtagtgaaaaccaagtttgtggggggcattgctcagatcatcgccgcccaggaagaaatgctaaagaaagagcgagaactggaagaagcaaggaaaaaactggcccaaatccgccagcagcagtataagtttttacccaccgagctgagggaagatgagggctaaaggtgcgagcccagatggcgagccccaggggatggccctggctgaactggacagacagtgttcctgagaggctgggcacttagctgggaaaccgcccacctccctcccgggtgagcctgggagccctgcgtgcttgttctcacatctctgtcccgtcggcactggctgcatgatcgtgatgtcacacggtacaatgtcctacccacaactcctctgccgcctcccctcatgcctcaccgtgtctcaggagagaggggtgcacgtttcatggactgttaccaacaaagaaaagtcagtattatgttgttctcagacactttggcttttgttggtccttctcttaggcctgctcctggacctctttatgatattgtgatagggaaaaaaatcattgacgtcatagaatattcttcttcctctcaggagaagacggaagctggagttggacatggttcataaaagccagaaacacaaacccgtgtggactccgggagggtgactcaggtcctccttccatgtcttgagcactggctcacccagggggtgaaaaattcccgcccctgtttgcacgctttcttgcctccgtgtgtaagctccttgtacaacccagacccatcttgtattttgtggcccagaaaactgaacgattattttgttcctccgtagtccaaagggcagagttgcggaaggccgtcggggcttggtgagcaggggctgtaatacagtctgtgggctccttaccctgcagaggctgtttcagctcacacagagtcatccacacaaacccacggctcccagttgacagtcagtggaatgctcgtctccttagcgtccagggtggggattctgctggaataaagagcttcctcagtgactcatctttaggtcccacgctggtttctgtgccttcagaatggtcacaagcccggattggaaaggatctgcttacaaacctgtcccctgtcctccaacccaaaacgcctttttttctgtcttaatatccagaaaatctaaatgcatcctaaaatcaatgtgaacctttaacaagatagttttacttattatcacataagacataagatgttttcattttctggatgtcacacttccagaatttcatatttttcccctcttttctttccccttttcagagccctcccataggaagggaagggcttgaatttacccttaatctgcacctttagccaaggcagtgcatggaagatgaatggctcgtgggacagaatctaatgccagggagcaggagtgtttgaaagaattcatagtggggaaggtaaaagttaatggaagtacatgattttcaaaactggtaacagttaaaggcactcaccctccgcctctctctctctctctctctctggtgtgctatcatgtcttggactccatccacactatagtttcaaagttccactgacgggggaaagttggtgctttggtcctccgaagatgtcacctttcgaccttgcccgatcttgtttcaccagactctagcccatgtcatggttttaaaatacataaacttctgacagcttcccatatttataagttacttataagtgctgcacgtattagaatttttttttttcagaccagtaaagttagagaaaagacgctgtaaaggaaaagcaagtgagagtatgtgtaggacactgacagtgtgtgggcaccagttctgaagaggaggggagctgctggagccctagcctgttggggaaaagctggcacactcttggctcgccctctttgagtggagctgatccaacacctcatgcctgccttggccggacactgagaggaggggcacacgtgcttccagagacactcaggagtcagaccccaatgctcagagtcacaatgtgttcatggcctcctgtaacaggactctggggatcccctctgtggcccagcccaccccaccctctgctcttctatgctgtgcccagggcagctgccctcttctgcctgtgccccatcccatcctgaaaacccaggaccaaggcaggggcaggcagccagttcttccaccttgcctcagagtcatttaaaacctttactgcatttgataccagaaaagcctccagagacaaaccaaatgcaaaggcctttcctttataactctaaagaacaggcatcgaaagtttatttttgtaggagctatataaatactcacctttctggagtcgtccagtgctgggagctttggggagtttggttctcagttatcacctggtatggtcccagtttctcatctgtcctttcctcatccaccctgcacatgtgtatgtgaacggcttcgtggccggtgtggtggtttctcatttcataagatagttgaagggccatgccttgtctggatgttatttaataggcactactgcggtgtcctcagatggtactgagggggccttctggtccttcaaaggaaaataacacaggcatgagttcatttgggagtgtgaactttcagaacacctaataagagagtggtgtcagagtaaaaacggccccaggtctggagcatagaagtgtatctctgtgaagagagagccggtgtgttgacatgtggttcttctcacacccctctactcctcgagggctttgaatccttgggctgatttttgtgccagaaattgctgttcccgatggccaaaaggggaacctgaactggatttcagaactgcccagtgatttgaaaatttagattttacttgggcctttcaggagtctttagatagggatgctgaggtcatatttagttcaatgaacagcccttgtttaagttttgccagtgtccagccagctgtggccctggccatctgtgcaggcaggttcctcaattcctggttggccctgcagtcggtcaacacagtccctccaggtcggctgcagaggcagctgcccagcctgcagtctatgcacgggccttaagaaatgagctgcctgtagccctcacggcatatgcttttatcagggaaaacccttcgagcttcttctgattctcacctgcttgctttctggctgtcttagtcagtgtgtttacaggcaactaaagcctgttcctaatttatcaaaaaattataaccaaaattcaccatagcctaagagagtaaaccccacctccaaagtgatgccaaggccaaaacctcatcaaggaaccagacacaggtcaaaagtggtgagcaagccatggtctctgctcctggggaactcacacgctgacccccgaggagccttggtttcctccctggcagatagtccccagaatcttctctcccagctttgaggttctgggctctggaaaggcctctgggatgctggccttaagatctcagcacagactatcagcatgttccattctcagattcctggaggaaagggtaccctctgttgacccaaggggctggctgcttctgagacttacccaacccaaagaaaatttggagacattcccctcaggctaaaaggcagcggtccccagagttcagaaagcaaaagatcttgacaactgtgccagtagtggctctggtcctatctctccacagtgctggcctctgctggggaaggcatctttcccaaaggtatccccaagtaccatgttgaaaatgtcctcagtctgttgctccatctttctgagcctctgcttggtatgtcatgtttatggtcactacggatgagtgtgtgcagagtttgggttgattcttttaaatgctacaaacaagagctatttcttttcaataaaaaaggtttggattcggcctcttcctctgagcccacctcccagccctccagggagcatcagtgtacctgagtcactttgtctgcatctcttcatcccacaaaacacgaggctgggtctcattcagcggcctctcaccaaccttcaagatccagaagaaaacaggaacgttcagctctgccctgtgtcgtatctaatcacatacattaatttatctaaccacataagttatttttttttatttgccagaaataaacctttaaaggaacg

SEQ ID NO: 50231 - DNA, 783 bp, Homo sapiens
tttgccacctagagatgataatttattgttttaccatgactcagaagagaaacaacataaagagaatatttcaaatccccacaatttccttcctcaacctcactactcttaacatttctttatcagacgccactggcttcctaaaatggaccactgactatgtatgtgtacacatttcattatgctgccttttctcttatgattaaaactttagccctcattcgaggtttccaatggttacttttagtggaggagttccctagcttttaaaaaaccacttttcctctaagattccattatttattgaaagaagtctttctagaaatgttaaggaggattttaaatgaacacattcaattaaaaaaaaaatcacgtattgaacatctaccaagcatctggactcttcggaacctagtaaaatgaaaaaatccagttttaacaacagtaacttcattctgcgggtatacagagacaagcacgtttcttcttttggtctaatttattctaaacgaagaagctgggaactgacaaaacaggacaggttgtttttaatccagtctacaaataaacaagacaatgcctgagttagccctctatatagatttaggcttatgctgacctcgttgtaaaatctgtatttaactaaaagttaataaaaatacatatgttcattttaaaataattactgattttgcttggctatcccaccccttacccccaaactcatatatttttaggacaagattttcctgcataaccacaacctgtctcctcccaccccac

SEQ ID NO: 50232 - DNA, 1326 bp, Homo sapiens
tttttttttttgtggttccaaatgtcgcctttactgctgagacaatggtggtgcaggaaggggagcctgcagtctgggcggggggccaaggaaggggagcgtgtgcttggcccagtgccgccaccactggggagtgggaggctcaggcagacctagggccctgggaccgtggcccttggctttgttctagggagggcacaagacagcctgcaggtctttgggcagggagccgatgaccgtctcgatgtacagctgtgcccgctgcagcgtagcctccttcacagggagctggtggccctgagcccgcaccagcttctcacgaagtttcaggaccaggtccacgacctccacctcggacttgtctttcatccaggtctcgatgttcgcctcacagatagcctccaggtgcagggcctccagcttcagggccatctccttgtgccgctgccggtaccagccatcaaaatggggggacttgaaaaaccgcctgtagagacccagccagtcgcccttgaggatgcaggtgagctggggcccagcatgctccagcgtacgcaggaagtcatcctggctgaagggctggatctgggggggagtcttccagggcgtgatgctcttctgcaggggcatgaggctggccatgtagtgctccagggggatgatgaagctctgggtgagctccaggaggtgccgccgcagcagggcgctctgcacatctgacggccgcttcttctgcacgcccttgagcagccgtttgagcagcgccttgtcgcggtggaggtgggccgtgtaagcggtgtagaggcctggcttggtgtccagggtcttcaaccttgaaggctttttcagcttgacttgctttaggcaggtctcctgacatcttgggctccccgaactcggaggatgtggggccagtgctggagtgttttgataaagaaagggtttgtgactcccaggaccacgtttggtggggcctgcgtgcgtgtggtgaactccttgaactcgctgtcatggatggtgaagtagggacggaagtcgcagcagaacctgaggggctgcaggcagctggtcaaggccagcaccatctccgaggacacgtcgggcgagggtgccaggactagcaggggctccccgaggagcatgagctcccacagtgtctgcatatgagtcagcacaggccggaagcacctgaacaggtccagctcgtggacgctagcaagaaccactggggctggcagcaggttctcttggtcaaactgcttcggaggactggactcggacttgtccaccctggatgggatgcgcacctggacaacaacgcccatg

SEQ ID NO: 50233 - DNA, 1003 bp, Homo sapiens
gtgttgtgtgttcagaaaagtacagtgttgacattttattttttatgtaaagaagccatatttacataatacattcatatttttaagtatgttacagctcctgtagaaaaccattccattaagacagcaacaagtgatctggattcaatctttaaaatattaagtcaaattaaaatgttcttatcaagactccaatttaatttcacagcccatctgcacaggggaactgaggagaaacaggaatgaagagtgggcgacaaagagaaagcatcccttcccacacgccaagagtccagtgcaacgatccctgccacacggtcagccgaccccacttggtgccacagggtccagcctcggccactctgggctcaacctttccagcacgtctgggagcccaatgaggctatgggacagtgtgcatttccctcaaggcctccggaaagtcacctgccacccactgtgacctctgaggctgaaaggactaaggactcctttccccatcatttcagctgggccagtggctggctaaaatcagcgcagcattcccattcttctgaaagccacagctgaaataatgcaccagctgaaaccacagtggacagactgagatggcctccctctgggcctctagttggcaactttctcacccgggggctcctctttctccttttcccgctccttgttccagtccttaaggccttctggaagtgaggtgtcctcatccaagctgccagtgccttccacaaattcttcataggtagatttttccgcaaatggtctggggcccaaaagttcaaccatatcattcttatctaatacttctttttctaacaacagaagagcaaccttctccacgtcagctttcttttctgtgagaagagctactgttcttttataagcatcattaataagtattcgtacttcatcatctatcaatcttgcagtggcttcactgtaaggtttctccaactaccactgctcccctgacgtgggaggtcaaagg

SEQ ID NO: 50234 - DNA, 630 bp, Homo sapiens
gttcctcccttccccctcgccgccgaccgagttcttccttttcagaccgggtcgccttgctgtcgtcgcggtgattttcctgctactgctactgctgctgctgccaccgccactaccactgggctcatttgccccgaccccttcccgccgccccgccccccagccccacacaagatgtcagaggatttagcaaagcagctggcaagctacaaagctcagctccagcaagttgaagctgcattatctggaaatggagaaaatgaagatttgctaaaattgaagaaagatttacaagaagttatagaactaaccaaagaccttctgtcaactcaaccttctgagacgcttgcaagttcagacagttttgcttctactcaacctactcattcatggaaagtaggagacaagtgtatggcagtctggagtgaagatggacagtgttatgaagcggagattgaggagatagatgaagaaaatggcaccgctgcaatcacctttgctggttatggcaatgctgaagtgactccactgttgaacctcaagcctgtagaagaaggaaggaaggcaaaggaggacagtggcaacaaacccatgtcaaaaaaagaaatgattgcccagcagcgtgaatat

SEQ ID NO: 50235 - DNA, 380 bp, Homo sapiens
gacacccaatcagcatagcgcactatagttcagcatgggatgaagcaataaaacgaatctaaattgcaggctccctttgggcaaacctatcctaagaataccctataaggcttaggaaggctcccagtatcacatttacaaactttacagtcaagtctgcaatctcaaaagcagaattgagaaccccagaattctcaccccaaccttgagacaggactcagcaaaccatctcaaactgagtatgtatacttgtggtttctctcagatgaggacattctggcgacttttttttaagagacaaggtctcactttgttgaagacatcctatctcaagttcctaccacaggaatatggttggaggtagatacggaagaagatgg

SEQ ID NO: 50236 - DNA, 931 bp, Homo sapiens
  misc_feature (1)...(931): n = a,t,c or g
gcatcattgggaatggagggaaataaatgactggatggtcgctgctttttaagtttcaaattgacattccagacaagcggtgcctgagcccgtgcctgtcttcagatcttcacagcacagttcctgggaaggtggagccaccagcctctccctgacaagcaaagtggatcagcaaaggctgcagtcaccagcatcttttccaaccttaatgaactgtatcctcaaaagaacactatcagactggtaagacaagcattattgtcccacttcacagatgaagagcttggggggccctgtggatgtgtaggagagtcggccttcctttttataggccttttgctgagctcagaggacagagcagaagacaaagccgaatgcagccctaagcagacactatcccagcccaagggagctatgcagacagctcctgcctagaggagaaacaattctctccttcagcccaggcatgtggcacagaggtgaacaggaaatgcttagggagacagttcacagatatatatgtacttcacagggcacaatttaatccataaatcaatcatggatcacgctaaagaaacaaaatatgctgcactaatttgccacaccgtgtgagcatgattggatgatgtgtatgttgataggagatgctcgattataatcttcatcatctgtcccctanaaggatctggtctttgagggtaaaaaaagagaaaaggtgttaatacggccgacggtatcataggtaggtattacgtgcatgcgcgtttaagcngcatgaacatgggtccataatgntgcatcgnttcgatgtaatggaagctcctactctatcgggagggagcgtgcgtagcggtggtcggnataccgggntttcttgggctcatacggtgttcgcgaaagtgcgnattggttgccacatgtggcaatccgt

SEQ ID NO: 50237 - DNA, 1296 bp, Homo sapiens
  misc_feature (1)...(1296): n = a,t,c or g
ggtcgaccagaataaatcaaggaccatcaaccaaaatgggaggtccaggactcaggaggacttaccagtttcaccagaggagaagctagaacttggtgaggtttcactgggcccctgctagtaccttagctagggttttaggcaactccttcagggtcctgagtcttctctgtggccccacgtgtttgggcaccagattattgttgaagagtcaaacactgtaaaatatttgaagagatttattctgagccaaatatgagtgaccatggcccgtgacacagccttcaggaggtcctgagaacatgtgcccaaggtggtcagggtgcagcttggttttatacattttagggaggcatgagacatcaatcaaatacatttaagaaatacatggttgagttccagaaaggtgggacaactcgaaggggagggtgggtgcttccaggctgtaggtaaatttaaacattttctggttgacaattggttgagcttagctgaagacctgggatcaatggaaaggaatgttcaggttaagataaaggattgtggaggccaagttttattgtgcaggggaagctctcagcagacttcagagagagagagagcaggttgtaaactgtttcttatcgacttaaaaggggtgcctggctcttacttagttgatgatctcctggactggatagaaaggaaggaaaaccataggggaaaggggcttctttataggatgtggattctcctcaccaagagactctgccagggcaagttcaaggtatggcaaagaaacatgttttggggtaaaatatttttattttcttccttgtctcataatgttatgccagccagagtcagactggaaagtaagtcacaatatataggattaaataaaacccatctgatgagaatttatggtttgtagggcatgactccccagaccccttagataggaatttgggcaagataaaaaaatcagagcttagtcctcgtgtggaggtgggtgccggccacagggtctcccacacgccagtcagaaccctgcccctgtgctttctggtcatctctgcttctgtcacatcctttttttctctataccaattttaaatgaaattccagggaaataaatggaaacagacactgggcttttgagccagatgtcagaaggcagtggcctccactttgtatcactgggatgcagtgaatagacctcagggtgtagctcgtgccgaattcttggcctcgagggccaaattccctatagtgagtcgtattaaattcgtaatcatgtcatancggntattnaaa

SEQ ID NO: 50238 - DNA, 223 bp, Homo sapiens
gaagaatcttaatgtacaaaaatgaataggtttttaatacatcagactatcccaattccatgaaagaagaaaatacacccattaaaacagaaactatggtgcctagaattaaactgcacaaaaaactacatgacccatataatttttttatgttgaaataattttaaacatgcaaaactagcaaagattcatataaatcctcaaccagcctatcctgatgtta

SEQ ID NO: 50239 - DNA, 409 bp, Homo sapiens
  misc_feature (1)...(409): n = a,t,c or g
attcggcacaggggtccgaattgtctgaatcatattccgttctatggccatactgcatgtcgtttgcccactcatctatggatggacctgtgagacgtcaccaccttttggctgttgtgaatcgtgctgctgtgaacatcgtgctcaagcttttgtgtggacctatgttttcagttctttgaggtctctgtcttcaacnnnnnnnnnnnnnnnnnnnnnnnnnnnnnnnnnnnnnnnnnnnnnnnnnnnnnnnnnnnnnnnnnnncggcctcagtcttctaagtagcttgggatgggcagcatatgtccatttggagaggccccatttcaagtgctcagtggctgctggtggctaccgaattgggatacgttgagctcaacggtgctctcagaagccgcggttggctca

SEQ ID NO: 50240 - DNA, 1437 bp, Homo sapiens
caaaacttttttttttcttttttttaacattgtaacaggtttatgcattttgaagtgccttctacacatccacccagaggctctgctgatttcacttatgcccaggctataaaatgcctttctctcatcccccagtagagcactgggatcaccactaggcctagggggcatatcaagggtttaatagactgggggaatgggcaacagaactggctaccttagaggctctggaatgccccccacccatccacccaccaatggaaggaaagtcaggcatcgcctaaaaggagtggtccctatctagccccaagtctggagcagaaagggcaggtccattctggcccaagtgacattgttagatcctgtcccctcccccaatcactgctgcttgccagggtgcctcttcacagttcccatgtggcagcagtagtggcagaggcagaagtggacttattgtagattgcagtacagatacatggacacaatcatggcagccagctcgaggcccccaattccagctgccacaccacccacggtgactgcattagttcggatgtcatacaaaagctgattgaagcaaccctctactttttggtcgtgagccttttgcttggtgcaggtttcattggctgtgttggtgacgttgtcattgcaacagaatgggggaaaggcactgttctctttgaagtagggtgagtcctcaaaatccgtatagttggtgaagccacagcacttgagccctttcatggtggtgttccacacttgagtgaagtcttcctgggaaccataatctttcttgatggcaggcactaccagcaacgtcaggaagtgctcagccattgtggtgtacaccaaggcgaccacagcagctgcaacctcagcaatgaagatgaggaggaggatgaagaagaacgtcacgagggcacacttgctctcagtcttagcaccatagcagcccaggaaaccaagagcaaagaccacaacgccggctgcgatgaggaagtagcccacgttgacaaactgcatggcactggacgacagtggcccgaagatcttcagaaaggatgccccatcgattgacacccagatgcccactgccaacagggctgcaccacacagaaagatgagcaaattgaagaggatcatcatggtcttaatgaagctgaagcactgcatggtggctcctgttcagggctcttggcagtgagttctgaaagagggaactgctgaggctccacaaaggacaaaacagctcccgggtgttgccactgagtgggcaggcagagggacgcctggctctcacacaccactgctcacctgcaggcagggtaggcgctttaaagcctccttctgcccgcctgctggccccacccgtggccagttagcctctccttgaccctgctgccccctgctgcctggagaccgatccgtcgtacc

SEQ ID NO: 50241 - DNA, 1342 bp, Homo sapiens
tttttttttttcaaattagttttttaaaaaataaatgtttatttcaagtatgaaaagtaatgtttaaacgttgtcccaaaattgtgttcagtttcacaagtataaaataagacttctgaaaaaaagtttacaattagttataaaacacttaagaatatattttgacattcacatcacagtgggcatttttgaaaaataaattttgctaatatagcttagaaaccaaaacatatttacagtcccatttaaataaacaagtccttaactgaggaacggtcctccctcaagatgggtagaatttcaaattgatttgtataagcattccttttaaaataatggtaaatctggttcaataaagtagaaattcaaataccttgtttccccggtgaataccatccatttcttacacatggctacccaaagttctcaagccattttaattaagcactttcaatgaaatacaatgaaagtgggaaccaaactctgagaaatctttatcatggcatttctcattagtttcagcgaaatattttgaacagaaaaggaaagaaatttcccagtggcaattacaaaaccacatcttgtaattattttacaggactgctaccaaggcttctgcttctcttctccaggtacatctgtttgtaggtttgaaacatttcttttgaatcttttactgggttttgtagcatctcaaatccatctgcactgaagcttctcttcgagagtcttgaattaacattatctctctcttggctgtctttctgtgtccttttctttgtagcaacaaattttaaccagtcttcttttgtactttttattcctgaaacttgcagaggggcttgctccttcctaggatgaggctttacatccttccgttcttccacagagtttgtattctttagtaagatatctggacataatttaaactccagcatgtttgatttttctgtgttacctttcaccggtaaaaaggtcttatgtttattttcctgtctcttatctttatgaagcttcctgggtgaactttctaatttggtgagagaaatgctttcacgttcagtgcatttaaacccaactctattcagatataatttcttttgatcctttacttggggaggcatttggctgaattgagcttcgttgcttatattggttaatttgtctaatttagtcttatcaatccatattttatcaggctgcttcccaccaactttttctttaacattccttagaatgttgtatgttttagactcctgagaatggtggattttgaggtttttaccatggcttgtcaagccatttaatgattctttagaggtctgcacgccgctgctgtgtt

SEQ ID NO: 50242 - DNA, 688 bp, Homo sapiens
tttttttttagtttaataaacataagagtggttttattgattacatacaattttagctatattaatatatattataaactttaagaattagaaataagtgacttttattttttaaccaagaataatctaagttatggcagcatgttcaacgaaaattatttaagtccgacacaatttttctatatctgtttctcagataatcaggaacatcatccaagctttacattacgataccataatgaccctcagaacacaagttccattaagtagaaatgaagcatcatatgttttcttttttaggaaagacccccccttttgttgtatagacatacccctaataatcttactctactgtacaaataacttttcacccacaagagctgcctcaagtaactttcattttggaaagctatcaaggcatgagacagagtagcaaaatgccactctggactttgcatcttggagtttcaattttgctttaggatttagaccccagtttataattaaaaccaaatcattcccacattattatacttatgtaggaaaggccttggcggtgtccactgttaacacaaagatagaaaatgtcaaatagtttaagcaagtatttggcagaccacagacatgaaacagtgccgtcggaaacggaaacactttagtgttttagaggtgaagagattgatgggtg

SEQ ID NO: 50243 - DNA, 2018 bp, Homo sapiens
  misc_feature (1)...(2018): n = a,t,c or g
gtttcgtcttcccggaagcgttggaggacattccctgttgactgcgtcgcgatgtgtggcgactgtgtggagaaggaatatcccaaccggggtaatacctgcctggagaatggatctttcttactgaactttacaggctgtgcagtgtgcagtaagcgggattttatgctgatcacaaacaaatccttgaaagaagaagatggagaagaaatagttacctatgatcatttgtgtaagaattgtcatcatgtaatagccagacatgagtatacattcagtatcatggatgaatttcaggagtataccatgctgtgtctgttatgccgggcaaagccgaagatactatcagtattctccctgatgacccccgacaaatgactctcttattctaaggatccttctacagatctgttataactatattgtgttggtttacaatacagcaagcctgatggtttgtcttatttcattcatactgaaaattctttgcatattttttttctgcttagacttacttattctttgaggaaaaaaggtaatgtaggagcctcattgttctctagagctgagctcttctgctaaagttcaaagttcacatcagtgtagccagagtgaagcatctttgttagcagttatgtggtcagaaaacaactagaatgggagcacacctggtgcccagattttggtttccaataaaagcaacccagggctccttagaaaatgaactgattctagagctgggatatgaacttatacaagatgagcctagagtatcttgtgccacagaaaaatgaagtactgaaattaaaaaaaaaaaaatcatagtgattgggagtatgtcagcatgatcgnnnnnnnnnnnnnnnnnnnnnnnnnnnnnnnnnnnnnnnnnnnnnnnnnnnnnngtagtattgggttataacccaaactatataataaatatttacaagcccaaactaatataaatgattgaatgggaacaaatctcttgtgcagaaggaatttcaaataatttatggtaggatacctncccccacttagtgggctctgcatagtgacttccttgcagagtataatatggaaaggggggaaaagagtaactttacagtggagaaatctgacagacacccagctcagcccaggtgattgaggttaacatcatccatgataagcccttttgatagcatgtatccttgatagcatcacatcatacagannnnnnnnnnnnnnnnnnnnnnnnnnnnnnnnnnnnnnnnnnnnnnnnnnnnnnnnnnnnnnnnnnnnnnnnnnnnnnnnnnnnnnnnnnnnnnnnnnnnnnnnnnnnnnnnnnnnnnnnnnnnnnnnnnnnnnnnnnnnnnnnnnnnnnnnnnnnnnnnnnnnnnnnnnnnnnnnnnnnnnnnnnnnnnnnnnnnnnnnnnnnnnnnnnnnnnnnnnnnnnnnnnnnnnnacatggaattatataccacgaaaagaaaaaaaggtcatttggtagaaactagggaaatctgaatacagtgtggacttcagttaatataaatgagaaaatggtttcattggctttaaagggattttagaatatcttactttgcatagtttcatgagcactggccaggaggttataaactggcatttaggcctctctgccatttagtagcagtatagtcattaagcaaagcattactctggactttattgtcctgtttctatcaaattggactaacaaaaattgatataatacattcatcacagtattgttaggagatttaaatgaattagtgaatgtaagatactttagaaagcatgtaaagtactagaaacaatgaggtggcttcaattagtgctcattctgagacctaaatttaaagggtcaggcattagaaacaaaagtgtttcttcatatctaggagatttggaaattctgaactaaggtcttataagaacaagaaatgagcaaagtgttcattgtagatactagggaaaagctttgttgaataacagtaatgatgataatatctgag

SEQ ID NO: 50244 - DNA, 432 bp, Homo sapiens
  misc_feature (1)...(432): n = a,t,c or g
ccacgctgcgtctgacccctgggcccccacggccctggctgccctgctctccccagcgctaggagaccaggccagcccaggaaccagggaggtgaccctgctctctggcctcctggctgatgtcacagcactgagctcagcccaggccttcgtccactcatgtccaagaggcggggcatcccccacccagccagagcccctgacatgggctgcactcgctgaggccaggcagcgctgcggagaggagcggcagagtgggttgtctgccgcaggcaaccaggcaagtgtgtcggggctggggtgtgaatgccacctgtgagtcccggaactatgtgggtacccctacccctacagaaaccaagggcantggangaggcccttcacagtgacaacggtgtggggtannnngggagttttangacaccaccaggg

SEQ ID NO: 50245 - DNA, 2429 bp, Homo sapiens
  misc_feature (1)...(2429): n = a,t,c or g
cggacgcgtgggcggacgcgtgggtagggcaggatgaacgctgctttccaagatggcgacggagggaggagggaaggagatgaacgagattaagacccaattcaccacccgggaaggtctgtacaagctgctgccgcactcggagtacagccggcccaaccgggtgcccttcaactcgcagggatccaaccctgtccgcgtctccttcgtaaacctcaacgaccagtctggcaacggcgaccgcctctgcttcaatgtgggccgggagctgtacttctatatctacaagggggtccgcaaggctgctgacttgagtaaaccaatagataaaaggatatacaaaggaacacagcctacttgtcatgacttcaaccacctaacagccacagcagaaagtgtctctctcctagtgggcttttccgcaggccaagtccagcttatagacccaatcaaaaaagaaactagcaaactttttaatgaggaagcttttgaggggaggtatgctacattttcaccatttgtatgaatgcagccacggaaaacttcacatcagctcagccctcggtttagttttcttcggaggagacattagttacagcttgagttctcagcctgccccactcgaaggcgccagcagggactctggatcacggggccatgaactatggagtgagtcnnnnnnnnnnnnnnnnnnnnnnnnnnnnnnnnnnnnnnnnnnnnnnnnnnnnnnnnnnnnnnnnnnnnnnnnnnnnnnnnnnnnnnnnnnnnnnnnnnnnnnnnnnnnnnnnnnnnnnnnnnnnnnnnnnnnnnnnnnnnnnnnnnnnnnnnnnnnnnnnnnnnnnnnnnnnnnnnnnnnnnnnnnnnnnnnnnnnnnnnnnnnnnnnnnnnnnnnnnnnnnnnnnnnnnnnnnnnnnnnnnnnnnnnnnnnnnnnnnnnnnnnnnnnnntctagaattcttaatccagccatcttcctggtcatctccttattctgtctcctgtttgttggaagtggcaggtgaaagtttaataccaggacaataattgtgtaaagatttgagcagtttggtcagatgatccagccgtgtccaaaacttttgttggccccgagatggcatcactcgagatggttagtcctagctctgcctcagcccagtctgtcacccttcgctggttctggaatgcagtttgcatttggccatcactgtactaacgctgtcagatacgccccagtttactctagatgcatgtgtgtcaggaataagtctttatttttaatggtgctgttcctaagactgctctgtaggcaagtgggccaacatgacttccaaaatctaactgcctcgtaaacgtttccaacactgtcaccatggactcaagcattcagcaggccctggcagattggtagcgaagcaggcgtcaaggctgttctggcctcaactcaggtgccctggaaagaactagcttcccgggtacgatttgggtttgctcttctcacttgttgccttgcactttcttacacttctggcgttggagaatgcaccggggattaggcccagaagaagccaggaagaagttcggccgtgccaggggtgggtctagctggactctagctgccttgtggcaggctggctgcaccgcaggtgtggggacagcagagcagatgggaggtcacggtcgcactgctgccgcctgtcacacgaagacgtgcacgtctgagtgccagatggaaatggctgatggagatggctgcttactgcttctccctgcaaggcctgcccccgccagtgtggggtgtgactgggctcccctgtgcttctgcccggtgtcttctttaaggtcaggagggtgaggtgggtggatgagggtaggctcacacaagaagggtgacactgcggccgggcagcatgcaggtgctcagcagagggttgagggatgaacgtgtttgaatggggaggaggacggctgaggccttcatcctcgcttccgttctgggttctctgttcttggaagtaggggtgctgcagggcctggtgggcggcgattctctcatcgggatcataggccaccattgcgtgcaggagggagaggcattgtggggacaaattggttgttagtagaggtattcctgatccctttttaaaaggaaaatcaaaattcatagctctcgactgtttgaacttggtgaggatcttctgagcgggtgtgccgatgacatcgtggatttttgagatttggtccagttcatttactccaggaaagaggggctgcagacaatttcaaatcaggtaagcggtcttttcactctcttctccagcctctcttgctacccttcagtctccctgttcttccaattccagttctttttcctctctagtagagacgaaggagacacattttatctgtggactcaaaactccagcaccagtc

SEQ ID NO: 50246 - DNA, 1472 bp, Homo sapiens
ttttttttatattcaagatagttttaatattaacttttgtgaattagaaatatcactcttaaatgatgaaaattactagtgaagtaactattttccccaattgcagaattacaatatttatacatataatacagagttgattgcattggaaacaacagtttattttacgtaaaataaacgtcaacgggtaaaaagggcatcttcacgccgcacctcagagggccatgagtccttacacccatctgcaaagtaactttccaccagcattcaactatttttaagtgcaaacaattttttaaaatctgtgattgcagcgtctgtcttcctgaattacattacgtcagaaagtaacagttttctctatgagtgcattcaaggttgtcttctgaccacctaaggtatagaaaaatcagtgcaaaaacagtgaagcactataacagctgaatttcaggggatttcttgtccaagaaacattttattttacactatgtatatatgtatatattatatatatatgaaatttaattacattgaattttagagtaaaaagcaagaaaactccatttcttattttttactgcagccccaaaagaccggtttaaaatggaaacaacttctttgggtgagcagcgggagcacggcgccgcagagtgagccggtcaccgtccgaccagtatcgccgacgtccaccgcctgaggttccgccggctggcacggctcaggcgcagctcggagctcctcctcgtcactccctcgagtccaagtcccgggagactgtgcgcgcagcagtgaggtcgctacactacagttccacctggagaactggcctggcttggggatgacaatgagccctgcaaacaaagcagtctacattaatccagcaaaacaccggacggcaacagccaccatgcgcgccctccgccagcagctccacgtggtcaaaactggtgctgttgatgtggaagccagtgtgggagcaaaccctccacttcatctatttaattcctatccagagtactgcgttccattcctagagaattggaaccctgctgggtgcaatactgtggcctcaataccgtccaaaagaagggcgggcagggctggccttgcccttgggggagacagtggtttctcagcacctgagaacaggttctttggagctttgctgacccaaaggtgcaggtgcctcgtgggaggtgttcagcgccttcagccagggttgagcccagggcaccgcagttttggaccgcacacccagtccctcggagccaggggttgtctccaaggatagagttcagtggcacctttgaaagggcattctctgctggggggttcttgctttgttgggtggtgtgaccgtggcaccccctggctgtagctgtccacatgtgtaggccccacaggtagagacagcagggcccaggccgaggtcgggggagccccagaacaaagtagtcttgccgtgaggctgc

SEQ ID NO: 50247 - DNA, 124 bp, Homo sapiens
tctcaacagctttgcagatggtattaagaaacagggcatctgtgtctccctgtggaaaaacccaggctcttctggaactgtgggctccttgtgttgctgtcatgtaatcaagaagctagagggg

SEQ ID NO: 50248 - DNA, 555 bp, Homo sapiens
gctttggtgggtgtcagtaaactcccagttgactttccttttttcataacatcaaacactttagttaacgaaggtgcttctttctcattcttggcatctcctagacttccactatctgacttgaatctagctgattttttcctggaaagagtatcacattcgatgagtttatgggaactgaagagctgtctccggctatctaaacttgatgttaaacttccctcggtgcaacttaattcacttccttcagaatttctccggctgctcttagtcacttcttgcagttttcctcggaaaagcctctctgaagtcaaggctgtggggaacacgggaaactcgctctcgctgtcggtttccacaggccgcccttcactgatgagttcgcttctctcgtcatctgcctcgtcccccttgctctctgccacgactgcacctcagggctcagtctactggagtccaggctagtcaagtatgtagcagacgatgtggtggaataatctgaggtgatggtgctgacgttggccaaaaactcgctatgtttcgtttctggactgg

SEQ ID NO: 50249 - DNA, 1578 bp, Homo sapiens
gtactgaaagttctgatgaagaagctcttcagaataaaaagatttctacttcatgttccgtcatccctgaaacatcaaattctgatatgcaaaccaaaaaggaatatgtagtttcaggtgaacacaaacagaaaggcaaagttaaaagaaaattgaaaaatcagaataaaaataaagagaaccaagagctaaagcaagaaaaggaaggaaaagaaaatacaagaataacaaacttgacagtaaatactggactagattgttcagaaaagaccagagaggaggggaactttaggaaatcttttagcccaaaagatgatacttcattacatttaatttcatatttccactggtaaatctcccaaacattcttgtgggttaagtggaaaaacagtcaacaccactaaaacaagaacatactaaaacatgtttatcaccaggaagttctgaaatgtcattacagcctgatcttgttcggtatgataatacagaatctgaattcttgccagaaagttcaagtgtaaaatcttgtaagcataaggaaaaaagcaaacatcagaaagatttccacttagaatttggtgaaaaatcaaatgccaaaataaaggatgaagatcatagtccaacaatttgaaaattcacgattgcacactgaaaaaaatggataaagaaggtaaaacattaaaaaaacataaattgaagcataaagagagggaaaaagaaaagcataaaaaagaaattgaaggtgaaaaggaaaaatacaaaactaaggatagtgccaaagaactgcagaggagtgtggaatttgatagagaattttggaaagagaatttttttaaaagtgatgaaactgaagatctctttttaaatatggaacatgaatccttaacattagaaaaaaaatcaaaattggaaaaaaacatcaaagatgataaatcaaccaaggaaaagcatgtgtcaaaagagaggaactttaaagaggaacgagacaagattaaaaaggaaagcgagaaatcttttagggaggaaaaaataaaagatctaaaagaagagagagaaaacatacccacagataaagactcagaatttacttctttgggtatgagtgccattgaggaatctatagggcttcatttagtggaaaaggaaatagacattgaaaaacaagaaaagcatataaaggaaagtaaagaaaaacctgagaagcgatctcaaattaaagaaaaggacattgagaagatggaaagaaaaacctttgaaaaagaaaagaagataaaacatgagcataagtcagaaaaagacaaattagatcttagtgaatgtgttgataaaataaaagaaaaggacaagctatattcgcatcacacagaaaaatgccataaagaaggtgagaagagcaaaaatactgctgctattaaaaaaactgacgacagagagaaaagtagagaaaagatggataggaaacatgacaaagaaaagcctgaaaaagagaggcatctagcagaaagcaaagaaaagcacttgatggagaaaaaaaataaacaatcagataatagtgaatacagtaaatcagaaaaaggc

SEQ ID NO: 50250 - DNA, 135 bp, Homo sapiens
ggcacatgggtggggacggagccacatccaagtctagccctctgattaggaggatgacagtcttggaatttcttgttctctttcttcctagggttctcgttctcccagctccagcctttctagtttcgaggtatt

SEQ ID NO: 50251 - DNA, 726 bp, Homo sapiens
actaactgacccacttgaagctttaaaagagaaatacttgaggccttctccaggattcttgtttcacccacaaatgtcagctattgaaaacatggcagaaaagctagagagcttcagtgccctgaaacctgaggccagtgagctcttacagtcagtgccctctatgttcaacttcagggcgcctcccaatgccctgccagagaaccttctgcggaagggaaaggagcgctatacctgcagatactgtggcaagatttttccaaggtctgcaaacctaacacggcacttgagaacccacacaggagagcagccttacagatgcaaatactgtgacagatcatttagcatatcttctaacttgcaaaggcatgttcgcaacatccacaataaagagaagccatttaagtgtcacttatgtgataggtgttttggtcaacaaaccaatttagacagacacctaaagaaacatgagaatgggaacatgtccggtacagcaacatcgtcgcctcattctgaactggaaagtacaggtgcgattctggatgacaaagaagatgcttacttcacagaaattcgaaatttcattgggaacagcaaccatggcagccaatctcccaggaatgtggaggagagaatgaatggcagtcattttaaagatgaaaaggctttggtgaccagtccaaattcagacttgctgggatgatgaagaagttgaagatgaggtgg

SEQ ID NO: 50252 - DNA, 755 bp, Homo sapiens
cagtttctatggagtgttcattcatatcaatgctgccatctcaactgcccttctcacccacccatacactaaggtggggtaaactggaagatgccttcagcccaccaagttttttgttttcactgaatcactttaagtcgcattgattgatcttccagaagtcagcagctgcctttgctgtgcaaaacaaaatatcgagaataaatagtttcttttttctttcttttcttttttaaatcattcagtttaaggtcactagactttagatgagtgaccctgcaggtttataaggcattctgctcagcagtcttgtaaatagtcctatatgaaagagccatgctactgttggacttggtcccactctggtcaaccttgataacgtcatacgtggcttatggactggatagcactggattccgccgcagccctggccatactgtgccacacgttggaagaactgtgggatgtagaatggagggactccttgtcagacagtgacagcatcatagcatatgcctgcgatttggactttctgtgtaacggctgcttaagttcctctggcacatgggaagtactaaaagaagacagctcagcttcagaatattgattatcttccattttcctcattttgaggctatctgtgaagtgccttatatgatctagagcagaaagtccacttttatattcttcctctttatacctcactggggatgtcttgcaactcatctccagggcactggtttcttcatagtcat

SEQ ID NO: 50253 - DNA, 563 bp, Homo sapiens
gagatcgcaacgtcaacttgtgggacctgcggcagctggggacggagtccaaccaggttctgatcaagaccttaggcactaagcgaaatagtacccatgagggctgggtgtggtcactggcagcgcaggaccaccgcgtgtgctccggctcctgggacagcacagtgaagctctgggacatggcagcggatgggcagcagttcggcgagataaaggccagctcagccgtgctgtgcctctcctacctgcctgacatcctggtgactggcacctatgacaagaaggtgaccatctacgaccccagagcccggcccagccctgttgaagcaccagcaactacactccagacccgtgctgaccctgctggcggatgaccggcacatcatctcaggcagcgaggaccacaccctggtggtggtggaccgccgagccaacagcgtccttgcagcgtctgcagctggactcctacctgctctgcatgtcctaccaggaaccccagctctgggctggtgacaaccaggggcctgctgcacgtcttcgccaaccgcaacggctgcttccag

SEQ ID NO: 50254 - DNA, 558 bp, Homo sapiens
aatacgactcactatagggaatttggccctcgaggccaagaattcggcacgagcgaggcccaggaagcacgctgaaaccctgggcggcggcaagctgtgcgacctcttctgcggccggcctgggcaggtgtcttcctcgagaggcaggcaggggatcccggacccttatacaggatgctgtgttctttgctcctttgtgaatgtctgttgctggtagctggttatgctcatgatgatgactggattgaccccacagacatgcttaactatgatgctgcttcaggaacaatgagaaaatctcaggcaaaatatggtatttcaggggaaaaggatgtcagtcctgacttgtcatgtgctgatgaaatatcagaatgttatcacaaacttgattctttaacttataagattgatgagtgtgaaaagaaaaagagggaagactatgaaagtcaaagcaatcctgtttttaggagatacttaaataagattttaattgaagctggaaagcttggacttcctgatgaaaacaaaggcgatatgcattatgatgctgagattatc

SEQ ID NO: 50255 - DNA, 364 bp, Homo sapiens
gaaacggaggcttcacctggtgtttgaatattgtgaccacacagttctccatgagttggacagataccaaagaggggtaccagaacatctcgtgaagagcataacttggcagacactgcaagctgtaaatttttgccataaacacaattgcatacatagagacgtgaagccagaaaatatcctcatcacgaaacattccgtgattaagctttgtgactttggatttgctcggcttttgactggaccgagtgactactatacagactaccgtggctaccaggtggtaccgctcccctgagctgctggtgggggacacgcagtaccggccccccggtgggatgtttggggcaattggctgtgtctt

SEQ ID NO: 50256 - DNA, 858 bp, Homo sapiens
ttgggatctcattgggagaaagtctaggcagattcctgctctgctgggccttctcttacgccagtgtggacttcacgggatagggcagacagagtattcgttgcatttatttgttctatcactacagaagaagcatttcaaaatgtgtacaaaaggatactctattcctccagtggtacatcccttgttcacagctaaacagcaataatttaacatcatcatagaggcagactggaaatatgactgcatttctcatttacaatcctgtgcatgtactcgccagaagggcagctgaagacctaaagctgtactggatacaacagattcgacctgaacaatcaccacacacaacattataaaaaactgtattagaaagtattggaaacaatattgcatattaatatgtggttacacatgttcacagtgagtgccatcgcaccaaaagcattatgtgcttcttttttctgatgcctgtacatcttaaataagtctaataattttggttcatcttaaagtaaaaatacattgaaatgaatgagagagatctagattttaaaaaagttgaccattcattattgctggaactgaagaaaggaaggatacactggcatcacgatttgtctacataagtccagttcatctcgcgtttgttttggcaagaagaggacactacaaaactcacagtgcagtcaaaacaaaacaaaacaagaaaaaagcacaaaaatggtcggtggggaaccatataacaaaactacatctcaggcagctctttctcaaggaagattctaagattttattatgtggctaattctaaattggaaatggaacatgctggtatgtgaagcaattggtgctagg

SEQ ID NO: 50257 - DNA, 665 bp, Homo sapiens
tttttttttattccaacaaacaatatatgacaacaacaaaaaaacaaaaccctatatagctaaactaatacaaacttgttaaactactacaaatttgtggtatctatcccttcacgttacttatcaaactctctgaaggactaacagttaaatacataaatatgacaatctaagattctgaaacaacaacggccaggttacttcatagtccaacgtgcccacacatctatccagatcatgacatttttatccatatgaacagcacacaacattcaataatgcatgttgacaattttagtgacaagtcactctttagtcataacataatttactagaattcaaaagcagaagcaaaactacctttacttttttataaaacccacactggtgtaattcagtgaaacaatttagggttctacatatagcaatcaattaccaagaattgtttatcatatatcttaggaaatttcaaaagaaaaaatcctcattctcagtaatttctcacaaaatttcatttcaaaaatgttctggtaaaaacaatgcatgtgcactttgttactttgaattagaaaagtaaaagaacaaaaataaacagatgacggtgatttcacatttacatccaacgcagcagcccaatcagacttctttagaattttgtgattggc

SEQ ID NO: 50258 - DNA, 487 bp, Homo sapiens
caacacatcttttttatgtataaatgggtcagtggtacagagggagttactttttataaatatctgcagcaaatcccctaaaaaagatgtgaataaaaactctctctcagcacaaagggcctattccttccccaaaagtgttaaattcccgagagcctgtgcttagccaaacacttgtggggcctcctgggaagaacaggaggactttgggaccgagaggagagccttcccatctccccggagagcggaggtgacttgaaggtcatctgttgcccaggacttgggagtgattaaactgtttcttcccaagacttgaggtcttctttgtcaagctgctgattaagcggtctctctgtttcctggcagtggcccagagggagggaggagaggaacctacaatcgcgtgaggaagtaaaaaactctgggtattttgataaaaaaaaacacttggtaatcactgtaaccctgtaaagccgatgtatcgaat

SEQ ID NO: 50259 - DNA, 514 bp, Homo sapiens
agagaggaaggaagagtgtttgtgtacatcaactctggctcgggagcagtaatgaatgcaatggaaacaaacctcgttggaagtgacaaatatgctgcaagatttggggaatctatagttaatcttggcgacattgacaatgatggctttgaaggtaattaaaattatcaaattggtgcttgatttctgcttttaaaatggtttatggaagaaaatatgattaaagttttgtattgttttccttcctatagaagatggagccagaatggcatggctaagttttttcttttctttagtgttatatatgacttctcctcaattgtcacccattgatctttaccactgttaataatggatgatattcaaaataccttatttcagtgattctaaggcaccattgattagaaactgcattattatttatgtgtccctaaaagctacctattaagctgttacacccaccatttttctgttaaggaagatcctgatttcagaaataataaaatatgggcag

SEQ ID NO: 50260 - DNA, 4147 bp, Homo sapiens
gaattccgggccgcttagtgttgaatgttccccaccgagagcgcatggcttgggaagcgaggcgcgaacccgggccccgaagccgccgtccgggagacggtgatgctgttgctgtgcctgggggtcccgaccggccgcccctacaacgtggacactgagagcgcgctgctttaccagggcccccacaacacgctgttcggctactcggtcgtgctgcacagccacggggcgaaccgatggctcctagtgggtgcgcccactgccaactggctcgccaacgcttcagtgatcaatcccggggcgatttacagatgcaggatcggaaagaatcccggccagacgtgcgaacagctccagctgggtagccctaatggagaaccttgtggaaagacttgtttggaagagagagacaatcagtggttgggggtcacactttccagacagccaggagaaaatggatccatcgtgacttgtgggcatagatggaaaaatatattttacataaagaatgaaaataagctccccactggtggttgctatggagtgccccctgatttacgaacagaactgagtaaaagaatagctccgtgttatcaagattatgtgaaaaaatttggagaaaattttgcatcatgtcaagctggaatatccagtttttacacaaaggatttaattgtgatgggggccccaggatcatcttactggactggctctctttttgtctacaatataactacaaataaatacaaggcttttttagacaaacaaaatcaagtaaaatttggaagttatttaggatattcagtcggagctggtcatttccggagccagcatactaccgaagtagtcggaggagctcctcaacatgagcagattggtaaggcatatatattcagcattgatgaaaaagaactaaatatcttacatgaaatgaaaggtaaaaagcttggatcgtactttggagcttctgtctgtgctgtggacctcaatgcagatggcttctcagatctgctcgtgggagcacccatgcagagcaccatcagagaggaaggaagagtgtttgtgtacatcaactctggctcgggagcagtaatgaatgcaatggaaacaaacctcgttggaagtgacaaatatgctgcaagatttggggaatctatagttaatcttggcgacattgacaatgatggctttgaagatgttgctatcggagctccacaagaagatgacttgcaaggtgctatttatatttacaatggccgtgcagatgggatctcgtcaaccttctcacagagaattgaaggacttcagatcagcaaatcgttaagtatgtttggacagtctatatcaggacaaattgatgcagataataatggctatgtagatgtagcagttggtgcttttcggtctgattctgctgtcttgctaaggacaagacctgtagtaattgttgacgcttctttaagccaccctgagtcagtaaatagaacgaaatttgactgtgttgaaaatggatggccttctgtgtgcatagatctaacactttgtttctcatataagggcaaggaagttccaggttacattgttttgttttataacatgagtttggatgtgaacagaaaggcagagtctccaccaagattctatttctcttctaatggaacttctgacgtgattacaggaagcatacaggtgtccagcagagaagctaactgtagaacacatcaagcatttatgcggaaagatgtgcgggacatcctcaccccaattcagattgaagctgcttaccaccttggtcctcatgtcatcagtaaacgaagtacagaggaattcccaccacttcagccaattcttcagcagaagaaagaaaaagacataatgaaaaaaacaataaactttgcaaggttttgtgcccatgaaaattgttctgctgatttacaggtttctgcaaagattgggtttttgaagccccatgaaaataaaacatatcttgctgttgggagtatgaagacattgatgttgaatgtgtccttgtttaatgctggagatgatgcatatgaaacgactctacatgtcaaactacccgtgggtctttatttcattaagattttagagctggaagagaagcaaataaactgtgaagtcacagataactctggcgtggtacaacttgactgcagtattggctatatatatgtagatcatctctcaaggatagatattagctttctcctggatgtgagctcactcagcagagcggaagaggacctcagtatcacagtgcatgctacctgtgaaaatgaagaggaaatggacaatctaaagcacagcagagtgactgtagcaatacctttaaaatatgaggttaagctgactgttcatgggtttgtaaacccaacttcatttgtgtatggatcaaatgatgaaaatgagcctgaaacgtgcatggtggagaaaatgaacttaactttccatgttatcaacactggcaatagtatggctcccaatgttagtgtggaaataatggtaccaaattcttttagcccccaaactgataagctgttcaacattttggatgtccagactactactggagaatgccactttgaaaattatcaaagagtgtgtgcattagagcagcaaaagagtgcaatgcagaccttgaaaggcatagtccagttcttgtccaagactgataagaggctattgtactgcataaaagctgatccacattgtttaaatttcttgtgtaattttgggaaaatggaaagtggaaaagaagccagtgttcatatccaactggaaggccggccatccattttagaaatggatgagacttcagcactcaagtttgaaataagagcaacaggttttccagagccaaatccaagagtaattgaactaaacaaggatgagaatgttgcgcatgttctactggaaggactacatcatcaaagacccaaacgttatttcaccatagtgattatttcaagtagcttgctacttggacttattgtacttctgttgatctcatatgttatgtggaaggctggcttctttaaaagacaatacaaatctatcctacaagaagaaaacagaagagacagttggagttatatcaacagtaaaagcaatgatgattaaggacttctttcaaattgagagaatggaaaacagactcaggttgtagtaaagaaatttaaaagacactgtttacaagaaaaaatgaattttgtttggacttcttttactcatgatcttgtgacatattatgtcttcatgcaaggggaaaatctcagcaatgattactctttgagatagaagaactgcaaaggtaataatacagccaaagataatctctcagcttttaaatgggtagagaaacactaaagcattcaatttattcaagaaaagtaagcccttgaagatatcttgaaatgaaagtataactgagttaaattatactggagaagtcttagacttgaaatactacttaccatatgtgcttgcctcagtaaaatgaaccccactgggtgggcagaggttcatttcaaatacatctttgatacttgttcaaaatatgttctttaaaaatataattttttagagagctgttcccaaattttctaacgagtggaccattatcactttaaagccctttatttataatacatttcctacgggctgtgttccaacaaccattttttttcagcagactatgaatattatagtattataggccaaactggcaaacttcagactgaacatgtacactggtttgagcttagtgaaatgacttctggataattatttttttataattatggatttcaccatctttctttctgtatatatacatgtgtttttatgtaggtatatatttaccattcttcctatctattcttcctataacacacctttatcaagcatacccaggagtaatcttcaaatcttttgttatattctgaaacaaaagattgtgagtgttgcactttacctgatacagatacacgctgatttagaaaatacagaaaccatacctcactaataactttaaaatcaaagctgtgcaaagactagggggcctatacttcatatgtattatgtactatgtaaaatattgactatcacacaactatttccttggatg

SEQ ID NO: 50261 - DNA, 89 bp, Homo sapiens
  misc_feature (1)...(89): n = a,t,c or g
agctgcagcaaagggagactagagagagatttggtaaaggatacaaagttacagcttggtaggaggaataatttctggngttctatacc

SEQ ID NO: 50262 - DNA, 270 bp, Homo sapiens
gaacattatattccatttagtttcaaatagctaaaaggagattttgtccccaacaaaaagaaatgataaatatttgaaaccatggatactctaatttctctgatctgaccactataaattatatgtattgaaacattattatgtatctcccaaatatgttcaattcttatgtcgctcaaaaaataaaatttaatttaaaaagtatctgatttttaaagtaaatattttttaaagttttgacatttaaattacttgaatctcattattttg

SEQ ID NO: 50263 - DNA, 3293 bp, Homo sapiens
tttcaccaaaaacaatgttatttaattgtaaaatctccaccccctgagcatatgttttcaggtctgggtgactaattagactgggaaacaagggcaggaacgatggccctgtgcttgctctgcccgctgcctctgtggatgtgtgggccgctggcttcagtcctgcttttttgatggccgttgtttacgctatgtatttttgcaggaggcctgaggtgggctgggttctcctcctatggcagggcttcactctcctcctccgttggggcttcgctgtcccttgagaatccttcttcatcttcttgtaatgaccttcggtgacaacagatctcaatgaggcagagaagtataatcaaaatcgttagtattccagtcacaattaacgccaagatgagttttttggtatagccatatcctggaagttcttttgtgaactcaagcgacttctctttctgttcactctgggcttctgtgctttcattaatgtagttcttagttttccactggtccgtatcccattctgccttggacgcctttacttcctgctgcccactgagaagcttcatcaggtggcctgtcctggagatgagcttggcacaggtcacttgcacatgggccccagagcagtccatcttcaaggtccggataacatgagaaatgagccttctcacattgttgttggggataagggactgtagctgctgggttagctgaatttcaaactgatcacctggggacgagagcaatgggtaattgaagcttttgggctcgggggacaggtcagtgcccacgttgttgtattcccattttgtctcagtttgtttaacagttggccctaagttgaatgcagtcctagtgggaatctgcctcaggaagatgattgtagtttgtgttttcagagatggttccttctggcatgttagtgttttccataaaaacattttcttcaaaggcatttcttgcagttgtgtcttttgtattattgttttctataaaatgttctgaaggagcagatacttccagaaaagggttttcttgaggactcaggtctcctaaggatgaaaaagccccttgtgaaggggaatttatgaggctcttcgctgcagagaacggaggcctgtttgcgagcatcagtctactcagataacttttctttctgacctttggactctttttgaccttgggtgttctgtgggtcatgcgggagcgagttttgtgaaagcggtatttttttctggaatgtgaaattggtttagaagccttcatatttgtaactctagcctttgcactttctaaaatggaaatagcgtgggttaagtctttccatctgtctctcacctgtggtagggcttttgcagggctggaggtagaaggcgcgcccttggagaagggtttcagcacagagactgctgccttatgctcttgggtgaaggaaggcttggtgtagacggcgtttcccgctaacttctcaggcccctgctgtgtgtggggctgttccacctcccttggggctggactcccgagccttttttcttcggcagcgttctccacagatgcctgggcaccctgttccctcctgatgctctgccttcctacctctttgaagtgccttttctggatgctccttgggcccatgaggactctcttcactctctgccggttttggcctacagtttgaatctttgccaggctgtttcctggggttggcagtttaatgaacggtagtaacagtgatttcacatctaggtttaccgctgagaaataaggcaagatgtaacttagtgcactgataaaatcactctcgtcattggtgtctagctgctcactcccaaagcctgacaagttgatgccactgctgtctgagggctcctctggctcaacagtcagctcagtgcttgtgtaattcttccgggcttgtaacgtcttcatgaatgctccttctggattccctacagatgcttcttcagctgtcaaaaaagaagagactgctttgatcatgaaagatgatgggatgggatgcatcagtccatagctgtacaccccagtcacacagagtaggagtcagcaaacattcgagtgccattcagagaggagaaacacacacccaatcctaaacctatgaaatggcaacaacaaaaggagaaaatacatcttttgaaaacacggccacctacttggaacattccatagtgtgacatagagtaactctgtttaggattatttcgttgatccccagaggccaattgcccagtgctcagtcaaagcccaaggtggaagacaagtgcttccctgatgagctggcctctctgcagactgctccgtaccctgtgctgtcctgcctcagatgcagagagagcacaaggctcctgctctcctcgtcctcggtgcacctgtgttcgtgctaccatcacagctgaatgcaatgaaaggcggtcctctgagaggagcagggtggagatgctaaagtggaggccccgtcccattgctgatagatcctcatctggcatgcgctccacccacccaccccattctctgctcccacatatcgtaccccccatcacagaaagatgcgacatggaaaaacgcactgtgtccaccctagttcttaaatttgggcagggatttggggtgtatgttaagagtttttcaaatttgccagattgcatgcctatgttgttaaatacacagtgaatctctggtatgatagcagtttctggataaacattacttgaggtcctaaaatgcagaagggaaaaagcaacttttgtcagatgcctactttgctttcatttcatctctaatattttggatggggaatcagccaaagcttctgactgcatgaaggtcaggtgtgccagtgtgcagctgggtttcttttctagaattaaaagtactttgggtggtggtgagggtcagaggaagaagtaaagattgtgagaaagtggaagaagcatgggcttggggagaacccagaattggggacagaagacctggcactaagctatagcacttagcacctctgatcttgtttttcctcgtccgtaaaaggagattaacaatgcttttctgcccacctcttggggagaagggaataatttagttggtaaaaaaaaaacttttgaataataagcaactctgtctttatataagtagccaagcattattaattatccaccccatatcactggtagatacctgtattcaagctatgtggacataaaagcagtcacattttagaagtcatgaagttggtgctaataaacctaatctacagaaaaaaaaaaaaaaaaaaa

SEQ ID NO: 50264 - DNA, 457 bp, Homo sapiens
gggatttttcattattagcatttgaaacttatgcttttagcatttaagcaaaaccaaaattatttgcccttttttctagttctgtacaatcatcagtaaatacggctctagagttttgcttgataagctctccctttctgggttttttcttacagtatagaaatctatattcagagtgctcaaaaatatttttcctattagtataacgtgaaaatttagtattagttcttaaacatatagagaaggcacaggatcttctggtgcatttttgctgcgtgggaatatttatttagacatttaaatttgtgtgtgattgtgaaaggagatagctagctgtaaggtaagtttattctcaggaatagaagatagtggtttccgaatgctcagattttccttaatgcagaggaattttaatatgctgtctcttgaagaattgagtcagtatgacttatagttc

SEQ ID NO: 50265 - DNA, 926 bp, Homo sapiens
tttttttttttacagagcgtcaaaggactagcagtgagtgttgaagccaattacacacagagagttggtctaaaacaattgtttaactatggttacaagacagaatatgtgtcaaaaatacccaagaaccaagagacatacaacatcaaaaaataatgcatgaataatccgatcccaagtccacaaactaataaactttcaaataggaaaggagaacagagggaaataaaagtgtacagaattcatcctacacagttgcgagcttaaaaataccattttattcttgactttaacaaccagagaaatattgattggtgctcacatccatttttagaaactcattacgtaggagagtaggggcctgtcctttaaaagataaaaacctcactcctgcctcaaggtatttacagtttgaagatctctaaccaacacacaggataggttttaatttgttacaagaataaacaaatgtcaaagtccttgaagaatttaaggttttgtgcagaaccagtcctcagatgctgtttcaatcttactgcccaccagcattttccattccttctggtaaagcctcctaaaacctggtatgaaaggacagcagttcctggtcactgtggtgccctctgtacctgacggcagggtctgcttgatgtcagcgtgcgttgtcacaatccatgaaccggattgtccttgtttaacagcatcactggtgtcacttattgagacagtggttcctcatctggtgccgaggaccgtggctcacctcggtgtcacccaacttaacgtcttgccccgccacaaatcacgggtacagaataaccagggcgtgccatgcccgggagactggtccaaccccggcgcccaggcctgcaatccctgggaggcgttgggtgccgctgccagcaccccgagtctgtcgctgcggc

SEQ ID NO: 50266 - DNA, 2927 bp, Homo sapiens
ggcttctggttcggcccacctctgaaggttccagaatcgatagtgaattcgtggttccaagtttggagcttttagctgccagccctggcccatcatgtagctgcagcacagccttccctaacgttgcaactgggggaaaaatcactttccagtctgttttgcaaggtgtgcatttccatcttgattccctgaaagtccatctgctgcatcggtcaagagaaactccacttgcatgaagattgcacgcctgcagcttgcatctttgttgcaaaactagctacagaagagaagcaaggcaaagtcttttgtgctcccctcccccatcaaaggaaaggggaaaatgtctcagtcgaaaggcaagaagcgaaaccctgggccttaaaattccaaaagaagcatttgaacaacctcagaccagtttccacaccacctcgagatttagactccaaggcttggcatttctattggaaatcagaactttgaggtgaaggcagatgacctggagcctataatggaactgggacgaggtgcgtacggggtggtggagaagatgcggcacgtgcccagcgggcagatcatggcagtgaagcggatccgagccacagtaaatagccaggaacagaaacggctactgatggatttggatatttccatgaggacggtggactgtccattcactgtcaccttttatggcgcactgtttcgggagggtgatgtgtggatctgcatggagctcatggatacatcactagataaattctacaaacaagttattgataaaggccagacaattccagaggacatcttagggaaaatagcagtttctattgtaaaagcattagaacatttacatagtaagctgtctgtcattcacagagacgtcaagccttctaatgtactcatcaatgctctcggtcaagtgaagatgtgcgattttggaatcagtggctacttggtggactctgttgctaaaacaattgatgcaggttgcaaaccatacatggcccctgaaagaataaacccagagctcaaccagaagggatacagtgtgaagtctgacatttggagtctgggcatcacgatgattgagttggccatccttcgatttccctatgattcatggggaactccatttcagcagctcaaacaggtggtagaggagccatcgccacaactcccagcagacaagttctctgcagagtttgttgactttacctcacagtgcttaaagaagaattccaaagaacggcctacatacccagagctaatgcaacatccatttttcaccctacatgaatccaaaggaacagatgtggcatcttttgtaaaactgattcttggagactaaaaagcagtggacttaatcggttgaccctactgtggattggtgggtttcggggtgaagcaagttcactacagcatcaatagaaagtcatctttgagataatttaaccctgcctctcagagggttttctctcccaattttctttttactccccctcttaagggggccttggaatctatagtatagaatgaactgtctagatggatgaattatgataaaggcttaggacttcaaaaggtgattaaatatttaatgatgtgtcatatgagtcctcaagcttctcagacttctcttattctttacaaaatgaatgcattggccctgacaaaaaggtgctacggtagtgatgaaattataagtagatttgtagtttgtcccatttattattttaatatttatgtttaagtgcttggttgaaaagattccattttatacaagaagggagattcaaaaaaaaaatataaggttgggttagcaatatttatagggcttttattttttaagttcaattgtgtctgtggtccagaagaaattatttaatatgcatctttgagaatattataaaaatatcaaaaaggagctcttcttgtgaaatgtctgttccagctgttgtgactgctgccatttttggaaacatctgcccaatcctgggtgatcaccacatcttttaggggaagtgacaagatgctctggtcatactctttttcccaactttggaaaacataaaaatcactcatataacagctcaaagagtaaaacatttggttcttctgacacttgtggtatagtattagtggaaagtgatttgtaatatgattttatatccacctacctattcatctacctgtgtgtatgtgtgtgtttgtgtgtctatttggcaattcacaagtcctgccaagtggtttctatgagcatctctgtttggtaaggaggacaattgtcagttttgagggggacatgtgttaaatcacagaaaaaaatggtgccttcttctgcgtttgtccctcctgccatgtgtaagttgtaaggattgcctttgtagttaatgtactctttggctttgtttgtttgttttcttcttcagtgaagcagccttactattcatagaagggctagaataggagaaaatgaaaggtagtgagtaattctttgataagatgaggaaataatgggaaaggttgaattaattcctgggcatggactaccagatgaccacaagttgcgttgaggccgcatctttcttcagcagcgtgcaatagctggctcctctataggagatgagcttcattgggagttcctagcaagttgactaaacagcaaaagttctttctcgtgggtaaatatacccacaggttctatgatttgtagctctaggtttcttgatgatcaaggagtgaagtaattgacagggaaaatatagacctatgataaataaccaggaagcattgcttttggacaaggaagaacagagggttttgattttaaaaagaagaaaaaaaaaccttattttttctttcttggcctcaagttcaatatggagaggattgcttccctgaatcctctcttccttccccttttagag

SEQ ID NO: 50267 - DNA, 2059 bp, Homo sapiens
tcaatgagatcaagacacaagtggaactggccacagggcagctggggcttaggcgggccgcccagaagcacagctttcctcgaatgttgcaccagagagaacggggcctctgccatcggggaagcttctcccttggagaacagtctcgagtgatatctcacttcttgcccaatgatctgggcttcactgatagctactctcagaaggctttctgtggcatctacagcaaagatggtcaaatattcatgtctgcttgccaagaccagacaatccgactctatgactgccgatatggccgtttccgtaaattcaagagcatcaaggcccgcgacgtaggctggagcgtcttggatgtggccttcacccctgatgggaaccacttcctctactctagctggtctgattacattcatatctgcaatatctatggtgagggagatacacacactgccctggatctcaggccagatgagcgtcgttttgctgtcttctccattgctgtctcctcagatggacgagaagtactaggaggggccaatgatggctgcctgtatgtctttgaccgagaacagaaccgggcgcacccttcagattgagtcccatgagggatgatgtgaatgcagtggcctttgcttgatattaagcttcccaaatcctgtttctcttgggggggagatgatgccatctggcaaagtgtgggatcgacgcaccatgcggggagggattgaccccaagcctgtgggttgcactggctggacaccaggatggcatcaccttcattgacagcaagggtgatgcccggtatctgatctccaactctaaagaccagaccatcaaactctgggatatccgacgcttttccagccgggaaggcatggaagcttcacgccaggctgccacacagcaaaactgggactatcggtggcagcaagtgcccaaaaaagcctggcggaagctgaagctcccaggggacagctccttgatgacctaccggggccacggagtgctgcacaccctcatccgctgccggttctcccccattcatagcactggccagcagttcatctacagtggctgctccactggcaaagtggttgtgtacgaccttctaagtggccacattgtgaagaagctgaccaaccacaaggcctgtgtgcgtgacgtcagttggcacccctttgaagagaagattgtcagcagttcgtgggacgggaacctgcgtctgtggcagtaccgccaggctgagtacttccaggatgacatgccagaatctgaggaatgtgccagcgcccctgccccagtgccccaatcctctacacccttttcctcaccccagtagatccaacctccagccccatatagggtgaacctcttgataagctctctgcctcctcctccctttctcccttgtggggaatgtttggaggaatcactggcatttgatggggaataacataagcctggggctctgagcctcagctgagccctggaagattctccccatggggcagagtggtctccttacgtgctcacacccagtcagcttgggtccctatctctggccagagtttggcaggactgccattatctggggtgtggcctctgccagcaagagaagtgtcctgggtgtttttaatcatgtttgaatgttaggggttggatcctagagtagatgcctgaggccacatctgaacagacctgtcagccaggcctgccaggtcttcacgttgaggattcaactggccaatcacaggacaggtgtcctggcctttcttcctgaggtctctaggggaggggcatgggtaagggtgtttcctcagcaccctccctggggtggggattatgtctgctgtcatgtctgggtctttagggtaggacaggctgtggtatgagaggcaggagtctccacaaggcttcatgtggccccttaatagggcaggccctgccctctgggaaggtcccttcatgctggaggcacacagcttttaaggaagtaggttgaagtaggactccttcgtcctctcactggctttggctccctcaataaactgtgtgggaa

SEQ ID NO: 50268 - DNA, 584 bp, Homo sapiens
  misc_feature (1)...(584): n = a,t,c or g
tcttcataatcataggtagctaggttataaactatttaaagacaagatcacgtgataagcttataatcttctcataattccccttacttagcattgtgttagacatactaataggtgcacagtgaaatacttattgttgattgtttaaaaataaagttttagaaaaccttttcaaaagtcagagtttaggccaggggcacaggctgacacctataatccccagcactttggggagnccccnggcgggcagatcacttgggtcaagagttacnaaggccagccctggccaacatggcaaaacccccatctcctactaaataaaatacaaaaattatcccannnnnnnnnnnnnnnnnnnnnnnnnnnnnnctacttcnnnnnnnnnnnnnnnnnnnnnnnnnnnnnnnnnnnnnnnnnnnnnnnnnnnnnnnnnnnnnnnnnnnnnnnnnnnnnnnnnnnnnnnnnnnnntcaaatctattttggtcttatatcttcttatgtttgtgttatttcatgtgtgccagtttctctttttttcacaacaatttatcaatttgtggcaataaaaatgatttacctttta

SEQ ID NO: 50269 - DNA, 2655 bp, Homo sapiens
cagactcctcccctggtcaccactagtgatccaccttatggatctcccaaggccacctctgcctctgctctgtgttgtattatttgggggacctgtggtctggcatgcattgtacttggtgccccaaaggggtggtggcatctgataagtgatttatcctcaggcacagatttgcactatgtcacccacttacttgtatgtagaagtgagtcaccggctggcaaatgggcatagctgctgggcagtggatgcagctccatgcatgttattctcatttgatacaggatctcattggcttctcacagcaatcctgtgcactataggtattgctcccgggaacagatgaggaaacaggagagtgcgaagattacagtaatttttgtaaatggggaggatttgtgaaggtttccagacatacaccctctctcatatgtcaaggatatgaagtctaatgaaatccccctaaagcagcaggggttggcaagcttgtgccctggggccaaatccagcctgcagcctgtttttgtaaataaagttttattggaacatagccatgttcatttgttacatattgtctatggctgctttcacactgcaacagcagagaccatgtgtcctgcaaagcctaaaatatgttctgtcttatcctttacaaaaacagtttactgacccctgctctagacctccaaagacctggtatcctctttcctggtgttcaagttcagagaggtgtctggagtaggggctgagcctggcctggatgggcagtgctgtgacaagtgtctaggatggccgggtatcctgcacagagctagaaggctgcctggcacgggtgaaagcagagctgctccctgaccctctgcccctccctcctccaccctggcctgctttagctttccccagacatggccaacaagggtccttcctatggcatgagccgcgaagtgcagtccaaaatcgagaagaagtatgacgaggagctggaggagcggctggtggagtggatcatagtgcagtgtggccctgatgtgggccgcccagaccgtgggcgctttgggcttccaggtctggctgaagaatggcgtggtgagtggcaccctgggctagggcgctggggggctggggtgtgccaccctgtgagtcctgggccaatccctgagctgactgctaagctgcgtcctatgccctatgcctggtagattctgagcaagctggtgaacagcctgtaccctgatggctccaagccggtgaaggtgcccgagaacccaccctccatggtcttcaagcagatggagcaggtggctcagttcctgaaggcggctgaggactatggggtcatcaagactgacatgttccagactgttgacctctttgaaggtagagaggaagaggctgggggaggaggtgggcaggaggacagggtgctgggacagggagagggaatgaccagaatatgccacaactaggggtgtgcttgcccgcacacagcagggatgggatatgccgagaataacacgccacgctcacagggcccactgagaggcctcccttgaattggggacaactcttggccctggtttggccatttttttgtgagagacgggggcaggccctggcttggagtcttgtttatacgttcttgatgttcatctcctctctcctgtcttctcacaggcaaagacatggcagcagtgcagaggaccctgatggctttgggcagcttggcagtgaccaagaatgatgggcactaccgtggagatcccaactggtttatgaagtatgtggcccccagggagcttgggtctccgcatggggtgggaggtggcttgttctaaggagcttgcgggaaggattaggggaagcagatagccaagaaaggataaagtgagggtctgggatggggaataatgggtccttaatactccttgacccctccctttccaccctcctgcgctcagtctccctagcctatgaggcaagctagattagggaaaaaaagtgcaacaggaaggcaatgggattgggctaggacgtaacagagggatcagaaaacgggtggaaaacacacagttctaccaagtctttatcctggttcctcctcttctaggaaagcgcaggagcataagagggaattcacagagagccagctgcaggagggaaagcatgtcattggccttcagatgggcagcaacagaggggcctcccaggccggcatgacaggctacggacgacctcggcagatcatcagttagagcggagagggctagccctgagcccggccctcccccagctccttggctgcagccatcccgcttagcctgcctcacccacacccgtgtggtaccttcagccctggccaagctttgaggctctgtcactgagcaatggtaactgcacctgggcagctcctccctgtgcccccagcctcagcccaacttcttacccgaaagcatcactgccttggcccctccctcccggctgcccccatcacctctactgtctcctccctgggctaagcaggggagaagcgggctgggggtagcctggatgtgggccaagtccactgtcctccttggcggcaaaagcccattgaagaagaaccagcccagcctgccccctatcttgtcctggaatatttttggggttggaactctc

SEQ ID NO: 50270 - DNA, 1007 bp, Homo sapiens
tttttttttttttgagttggaaacaactttattgatacctgagaaaaagtgcaggaaaaatattcctcctgaccaggtggcctgtcccctgaggccagatcattctctcgcctctcccttaagccctgggtcatttgggacctcactggccagcacccagaggctgaagacatccacagccagagcctggaagccagacccagagaccaggagagggaatgtctacagcgtggctcctgaggtcagggccaaggtcagcgtgggaccctcatcggtcaagggccagcgcctcttggatcactgtccggagtccgatggaaaacagctcctcccatggttcccggatccaggcaagcagggctgtcagctgctcctgacacaccacacggagtgcccaaaagctctccagccgggacacctcatcgtagaagagcagccgcaagtcctcaggggctgagcggtagagcagcacggagctcaggctgctgagtggctgctgctccctgacacgcacagccagggcccggccccgagggaggcaccttctccagagttcgccagatgctgctggaggagaggctctgccggggaccctgcagcatcctcatctaacaggaacagggtggacggagtcagcaacagggatacgaggcaggtggaagggccttcaaccaggaacgcccgaaggtagaagaactggcgagcctccaaggatgagtctttttccagcaatggccagagccggtgctggggggtgacctcctcctctgtggcactgacacagttcctccaggcagggggcagagactgcaagacatcaaggagctcctctaggaaggcccggcaatcctggcatctcggggcagcagcacatcagcggcccgccccagctgcccactctagcccgaggctctgcctgccaggcccagctctatgccactcagatcctgcaggggaacagccagggtcagctgcagccagctagctggaggcacgcatctccccag

SEQ ID NO: 50271 - DNA, 473 bp, Homo sapiens
  misc_feature (1)...(473): n = a,t,c or g
ggnggntnnnntttnnnatctnnaanccctttnnttggataacnnttgacatgattacgaatttaatacgactcactatagggaatttggccctcgaggccaagaattcggcacgagccaaagctccaccagcgccttcgggaagaaagggacttggtcctgaccattgctcagtgtggcctggatagccaagacccagtgcatggccgagtcctccagaccatctataagaagctgaccggctccaagtttgactgtgcccttcatggaaaccactgggaggacctgggctttcagggagcgaatccagccacagacctgagaggcgcaggcttccttgccctcctgcatctgctctacctggtgatggactcaaagaccttgccgatggcgcaggagattttccgcctgtctcgtcaccacatccagcaattccctttctgtttgatgtccgtgaacatcacccacattgc

SEQ ID NO: 50272 - DNA, 628 bp, Homo sapiens
ttaattttgaagctacctgaggtttagaattccttcagccctagctgcttttattctgctttttatttaaacaaaaagagggggaggatctgaaggaaactagttttctgtacaaaggctttgaggtccatggactatacttgtcccatttatcatcccaggtggtgctttgaccctgccataccctggctattaagataaaaagatttgtggacattaaaattatgaatatgtcagtaataatccagcacacattgaaatattgacacagattaccataatttgtgcaacatcttataaacaatgtcatttccatagtagtctaaggcttcaccagcctggcccactgtatctagactttaggttcattttaataattatgctttccttctctgtatcatttgggaagttgataaatatcacttccttagataccttcattcagtgatatatctggcttttacaattaaattggaaaaggtaagtttctctttggtgggttgagagttggaccatcaattctaatctacaaaaggaaattcatgatttcactctgacgcctaggatctagccaaggctggtctgcagtatcagatgtccaaactcatctactattagccatattttg

SEQ ID NO: 50273 - DNA, 415 bp, Homo sapiens
ccaagactgtcttttctccattgtattgcgtttgcttccttgtcaaagatcagttgactatatttgtgtggggctatttctgggctccctatttggttccagtgattatgtctattatttcaccattaccaccctatcttaattactgtagctttatagtgagtcttaaagttgggtaatatcagtcttctgacctttttctctttcaatattgtgccagctattctgggtcttttgcctttccatgtaaactttagaaccagtttgtcaggatccacaaaatactttgctgggttttgattgggattgcattgaatccacaggtcaagttggcaaaaactgacatacagcaatgccagtttattgttttgtgatagccttaatccagctagtttcttcacagggatgattgttg

SEQ ID NO: 50274 - DNA, 188 bp, Homo sapiens
aaattgcaacgtcatgacttgtggcgttattaaaacttcctgtattcctggttggctggatataatcttgaacaaaaggcatgcacttaaacaggaaaggtgaaaggcggaatgcaggttttcagctaaggagcttcccttttaaagaattgatgaaagtggcattattgggggtgggtgtgaaaagg

SEQ ID NO: 50275 - DNA, 422 bp, Homo sapiens
gtccagcactgagtaaatgcttaacgaatgactgtgttactaccaagaattattgtttcactctccctccttccctctcctctgctgccccaaactactcagcatcctggcactgcaggctcgcacttagccctggatacccagattcatcctcctcccctgggatggcatagaagagactttaaaaccaaatgagccaagactccaagctctgaccacacctcccaccccaccagtcttctctatgcaccccctctatctggagcccccagccaggtcctggacccaggtagctacatggcagagcatttaatgtgtgcctggcagccatgggcaccattctccacacagaaggcaggggacaggtgcacaaggcgctgagaccccagcagggctaactgtccttgtctcaggagccctac

SEQ ID NO: 50276 - DNA, 282 bp, Homo sapiens
  misc_feature (1)...(282): n = a,t,c or g
acaggacgcatggctgaggaggctcaggaaacttacaatcatagcagaaaggtgaaggggaaacaagcacatctacacatggccagagcaaggagagatgagagangggggaaagtgccacacactttcanacaaccagatctcctgagaactcactgtcacgggaacagcaaggggggaaatccacncccctgaattcagtcatctgccaacaaggcctnttcccctcaganatggggattattatacaattcgggntgagatttngggtgggacacagag

SEQ ID NO: 50277 - DNA, 332 bp, Homo sapiens
  misc_feature (1)...(332): n = a,t,c or g
aaactgctttttttcgacatactggattttctttctgtttttcttctctttcttctatttcttgtggatattatggctaataacacaacaagtttagggagtccatggccagaaaacttttgggggtcttgatccgtcgcccaggcgggagtnnnnnnnnnnnnnnnnnnnnnnnnnnnnnnnnnnnnnnnnnnnnnnnnnnnnnnnnnnnnnnnnnnnnnnnnnnnnnnnnnnnnnnnnnnnnnnnnnnnnnnnnnnnnnnnnnnnnnnnnnnnnnnnnnnnnnnnnnnntgaagtgncactatgttaccaaggctggctcaaactcctag

SEQ ID NO: 50278 - DNA, 588 bp, Homo sapiens
caggtaatgcaagtcctcgccgagtatttattaagctgattatcactgtaccctggaaacgtagggtctgttgaaagatggctggtattcagcttagtaaccaaagtttcagtctgaacaatcagtgtcactaatagtattagaatagaggctacaagtgaagaatctcacagaagtctaagccagtgtactcagtgatacgtgctgaggtcagtttgacttaatcaccgtctggacttttttgtcctttctcttacattgatagcgaacataaagattatatttcgaccaggatataatttgttcagtgtttcttaaatatcataatttaaaccactgtataattcatatttttaccaaaatttacatgaattcagtgatagtgtttcaaaattgtggaattcttttcaaaaaatctgtgaagccttgtaaccaatttgctgcctcatttttatttatatgcagattctacttcaaagaaatcctgccacccgatgattaaacagtgaataaaatgtcatggctctttcctgcgacaattctatttgaggaaaagatttgtttttcccttttcccaaggaagctcgt

SEQ ID NO: 50279 - DNA, 5649 bp, Homo sapiens
ggcgccgctggatggagaggttgagttgttacaacaaaagttgagagaaaagttggatgaatttaatgaattggctatacagaaagagtcggcagatagacaagtgttaatgcaggaagaagaaattaaacgtctggaggagatgaacatcaacatcaggaaaaaagtggcccagctccaggaagaagtggaaaaacagaaaaacatcgtgaaagggctggaacaggataaagaggtgttaaagaaacagcagatgagtagcttgcttctggcgtccacgttgcagtctacactagatgcaggcagatgtcccgagcctccttcgggcagccctcctgagggtccagaaatacagttagaggtgacacagagagcactcctgcggcgcgagagcgaggttttggacttaaaagaacagctagaaaagatgaaaggtgacttagaaagtaaaaatgaagaaatactacatctgaacttaaaattggacatgcagaacagccagactgctgtcagcctcagagaacttgaggaagagaacacgagcttgaaggtcatatataccagaagttctgagattgaagagctgaaagccactattgaaaatctgcaagagaatcagaaacgattacaaaaggagaaagcagaggaaattgaacaactccatgaagtcattgagaagctgcagcacgagctgtccctcatggggcctgtggtgcacgaagtcagcgacagtcaggctggcagtctgcagagcgagctgctctgctcccaggccgggggccctcgtgggcaggccctacagggcgagctcgaggctgcgctggaagccaaggaggccctgagccggctgctggctgaccaggagcgcaggcacagccaggccctggaggccctgcagcagcgcctccagggcgcagaggaggctgcggagctacagctggctgagctggagcgcaatgtagccctcagggaggctgaggtcgaagacatggcctcccggatccaggagttcgaagcggccctgaaagcaaaggaagcgacgattgccgagagaaatttagaaatcgacgctctgaaccagcggaaggcggcccactctgccgagctggaggccgtcctgttggccttggcccgcatccgccgcgccctggagcagcagcccctggcagccggggcggcgcctcccgagctgcagtggctccgagcgcagtgtgcccgcctcagccgccagctgcaggtgctgcaccagcggttcctgaggtgccaggtggagctggacaggcggcaggcccgcagagccacagctcacacacgggtgcccggggcccacccacagcctcgcatggatggtggcgccaaggcccaggtcaccggcgacgtggaggcctcccatgatgctgctttggagccggttgtccctgacccacagggtgatctgcagcctgtcctggtgacgttgaaggatgcacctctctgcaagcaagaaggcgtgatgtcagtgctcaccgtctgccagaggcagctgcagtcggagctgctcttggtgaaaaatgaaatgcgcctgagtctggaggacggcggcaagggtaaagaaaaagtactggaagattgtcagctgccgaaggtcgatctcgtagctcaggtgaaacagcttcaggaaaaactgaaccgtttgctgtattccatgaccttccagaatgtggatgctgccgacaccaaatctctgtggcccatggcctcagcacacctgttggagagcagctggagtgatgattcctgtgacggagaagagcctgacatatcaccccacatagacacatgtgatgccaatacagccacggggggtgtaactgatgttatcaaaaatcaggccatagacgcgtgtgatgccaatacaaccccagggggtgtaactgatgttatcaaaaattgggattccttgataccagatgaaatgccagattctcccattcaagaaaaatcagaatgtcaggacatgtctctttcttcaccgaccagcgtacttggtggctcccgccaccagagccacactgcagaggctgggccccggaagagcccggtcgggatgctggacctgtcttcctggagctcccctgaggtcctcaggaaggactggaccctggagccctggcccagcctccccgtgacaccccactcaggagccctgagcctgtgcagtgccgacacatccctgggggacagggcggacacctcgctgccacagacccaggggccggggctgctttgttccccaggcgtgtctgcagcagcgctggcactgcagtgggccgagtctccgccggctgacgaccaccatgtgcagaggacggctgtggagaaagatgtcgaagattttatcacaacatcctttgattctcaagaaacattaagttcacctcctcctggattagaaggaaaagctgatagaagtgagaaaagtgacggctcgggttttggagcaagactgagcccggggtcaggaggccctgaggctcaaactgctggtcctgtgacccctgcttccatctctggaaggtttcagccgctgccggaagccatgaaggagaaggaagtgcgtccgaagcacgtgaaggctttactgcagatggtgcgtgacgagagccaccagatcctggcgctgtcagaaggccttgcacccccaagcggcgagccacacccaccccggaaggaagacgagatacaggacatctcgctccatgggggaaagacgcaggaagtgcccaccgcgtgccccgattggagaggggaccttctgcaggttgtgcaagaggcctttgaaaaagagcaggagatgcagggggttgagctgcagccccgactcagtggctcagatctggggggtcacagctccctgctcgaaaggctggagaagatcatccgtgagcagggagacctgcaggaaaagtccctggagcatcttcgcttgccggaccggagcagcctgctgtccgagatccaggcgctgcgtgcccagctgcgcatgacgcacctgcagaaccaggagaagctgcagcacttgcgcacggcgctgacaagcgcagaggcgcgcgggagccagcaggagcaccagctgcgcaggcaggttgaactgctggcttataaagtagagcaggagaagtgcattgctggtgacttgcagaagacgctgagtgaagagcaagagaaggcaaacagcgtgcagaagctcctggcggcggagcagactgtagtgcgagatttgaagtccgacctctgtgagagcaggcagaagagcgaacagctgtcccggtccctctgcgaggtgcagcaggaggtcctccagctgagatccatgctgagcagtaaggagaacgagctgaaggccgcgcttcaggagctggagagtgagcaggggaaggggcgtgccctgcagagccagctggaggaggagcagctgcggcacctgcagagggagagccagagtgccaaggccctggaggagctgcgggcgtctttggagacacagcgtgctcagagcagtcgactctgcgtggcactgaaacacgagcagacggccaaggacaacctgcagaaggagctgcgtatcgagcactcacgctgcgaggccttgctggctcaggagcggagccagctctctgagctccagaaggaccttgcggctgagaagagccgcaccctggagctgtcagaggccttgcggcacgagcggctcctgaccgagcagctgagccagaggacacaggaggcttgcgtgcaccaggacacacaggcccatcacgctctgctgcagaagctgaaggaggagaagtcccgggtggtggacttgcaagcgatgcttgaaaaggtgcagcagcaagccctgcattctcagcagcagcttgaggctgaggctcagaagcactgtgaggcgctcaggagagagaaggagcgagaattagaactgcagcgtcagcgtgacttgcataagatcaagcagcttcagcagacagtgagagacctggagtcgaaggacgaggtgcctggcagccgcctccacctaggttctgcccgcagggctgccggctcggatgcggaccacctccgggaacagcagcgagagctggaggcgatgaggcagcggctgctctctgccgcccggcttctcaccagcttcaccagccaggccgtggacaggacagttaatgattggacgtcatccaatgagaaagcagtgatgtctttactgcacacgttggaggagctggagtctgacttgagcaggcccacctcctcccagaaaaaaatggcagcagagctgcagttccagtttgtggacgtcctgctgaaagacaatgtttccctcacaaaagcgctcagcacggtgacccaggagaagctggagctgagcagagccgtgtctaagcttgagaagttgctgaagcaccatctgcagaagggctgcagcccaagcaggtcggaaaggtctgcttggaagccagacgaaacggctccacagagttccctgaggcgcccagaccccggccggcttccaccagctgccagcgaggaagcacacaccagcaatgtcaagatggaaaaattgtacctgcattacttgagagcagagagctttagaaaagctctgatttatcaaaagaagtatcttttgctgttgattggtggattccaggattctgaacaagaaacactctccatgattgcccatttgggggtatttccttccaaagcagaacggaaaatcacatctcgtcctttcaccaggttccgcacggccgtcagggtggtcattgcaatattaagattacgttttttggttaagaaatggcaagaagtagatcggaaaggagctctggcacaaggcaaagcccctcgcccagggccccgagcacgacagccgcagtctccacccagaaccagagagtcccccccaacccgggatgtaccctctggccacaccagggaccctgccagaggccgcagactggcagcagcagcctccccacacagtgggggaagagccactccatccccaaattcaagattagaaagatccctgactgcttctcaagatccagaacattccttgacagagtatattcaccatttagaagtgatccagcaaagattgggaggggtactaccagattctacttcaaagaaatcctgccacccgatgattaaacagtgaataaaatgtcatggctctttcctgcgacaattctatttgaggaaaagatttgtttttcccttttcccaaggaagctcgtgggacagcatgggcactactcttcatgtgcggtgacaccagcccccagatgccttgaattaagtgtcctcacctttatgcatgactgcaaagccagctggagcattttctatggagcctccgtatgttttaggcccatgaccttcgtgaggtgacgggcactcactcccatgagccctggctgtgtgctgttgtgtcgctatcggcagatccatccttcctgcctccaaggaggatacacagagaatggcttcctgttgttttgtttattttcttaacgtgtacagatggaaacttcatttaaaaataaaaacaaaacaactcaaaaaggaataaaatttaatcactgttttgtttgtgaa

SEQ ID NO: 50280 - DNA, 115 bp, Homo sapiens
ctaccagaagtacatttagaagctgaagataaggcaatagtgatacacatctctcctggaacaaaagatagtgttatgtgggctttggatggtttaagctttacatatagcttag

SEQ ID NO: 50281 - DNA, 447 bp, Homo sapiens
tgctgatctgtgctgtttacatgacctctctcccacactatttgaatcagtctgttcagaactgtgtgtttcacctgcagtgctctgtcccagtcccatgcccattcccatcacttcactgtgatggaaatagagtttatgttcaacagtggggcatgacctctgcaatttgcttgggaaagtcttccaagcaagatggacatgatgaatacaaataagatctactcaaagtacttcaaacaaaaaataaataattcattggctcatgtatcttggccacccagggaaggtctgacattgttagttagatccagagtttcaaatgtcatcaccatggatgtgtctttttctctctctcatttcccctccccatatcttgtcttttatttattatagggttgtctcattccctggcaggctctctccctgtgataggaagagagtccc

SEQ ID NO: 50282 - DNA, 1476 bp, Homo sapiens
aataagtccaatgagtgagtagtagctagatgactagtatgtagttttatattttggtaaaattatttgccctttcagaaatgcctcatctaaagatacatgataattttggagttggaaggggccttaaaggctctccagctctgcttcttgcccattgccaaatactgaaatggaagcccgtcttacctggggtcactaactggttggttaactgagctaagaatagactgtgggtctcctcacttgtggcccagtgctctttctgctatacaaaatgtctaatctcagatttttcttctgctgcttgactgcttcatctggatgaactacaaaaaacccatgattaaggtttatgaattcaagtaataattagattttttttgcacagacttacttaacttccttattggatatgtttgtaacacataaacacaaagcacttttcaaacatgatgcacttttatctttgtgaataatttactgtcctttcctcctgggatatgagaaacattttaaaaaacgtatttaacagaagagagcaaataaagatatatcaggaaggatgtattagttatttacttaaatgtttataatatctgggattttttttgttttgttactcataggaactggtgttgtttgctgtttttatttctctaattgttgcagagttctgccccgttacaaagctacaggaactgtattgtttttattttccttcttgaggcacatgtttaacaaactaaggcttcacattagggtgatgtcataatgtaaaatgtttgcattgtggttaggtattgaagtttatgtcctgtctgtgtaaagattcatcttttattgtaaatatttagactttaccacagaaatattggaacagtttgctttataagattaaaaagcatccttcagaatggagcttgccttgtgcttagaaataatatgttgaactattttgcaatatactattttaaatctaaattctgtcacttcgctgcctttttaaaatagtgtggtatttcaaatattgctagagctattttcctgaaatacatttgcaaaataaggctgctttgtaatcaaggaatatttttattgattgaaggaaatgactgtactgcgattcaaaagtaaacttattttattatacagattatttcttaaaaactctatttataccttaacatgaaatccatgaccacaccaaacttggttattcataatttttcctgttaaatataaaacactgtaagttaaaaacagtaatgccaacattgaatttatttttgaggtcaaagaaccagttgttctctttatatttagatgaggatgattgagtccatatactatgtatgtttacatatactatacatgcacattaggtgttttcatttgtgttttgcttatgaaatgtcatttaaagttcacttcttgagcatcaataaaaagggaagctgtgtggttttggaaaaa

SEQ ID NO: 50283 - DNA, 887 bp, Homo sapiens
ggaaagcgtggcggctgctgctagagcctttccctttaccgcacccaaggagctggagcgacaacaacgacgtcgtttccgtttccaccacctcttcctgttcccgtccttgaggacgccgtgccggttcaagtgttagcctccagccctggttgtggaaggcgacagaagtcatggcgatgtttgagcagatgagagccaacgtgggcaagttgctcaagggtatcgacaggtacaatcctgagaacctggccaccctggagcgctatgtagagacgcaggccaaggaaaatgcctatgatctggaagccaacctggctgtcctgaagctgtaccagttcaacccagccttctttcagaccacggtcaccgcccagatcctgctgaaggccctcaccaacttgccgcacacagacttcaccctgtgcaagtgcatgatcgaccaggcacatcaagaagaacggccaatccgacagattttgtacctcggggacctgcttggagaccttgccatttcccaggccttctggcaagccctgggatgaaaacatggacctctttggaaggtataactggcttttgaagactctgtccgaaagtttatcttgccatgttgtgggtatcacttaccagcacattgaccgcttggctgctggccgagatgctcggggatctgtcggacagccagctaaaggtgtggatgagcaaatacggctggagtgccgacgagtcggggcagatcttcatctgtagccaagaagagagcattaaacccaagaacattgtggagaagattgactttgacagtgtgtccagcatcatggcctcctcccagtaacttcaggtgtttaataaagatgtgttgactcagcaaaaaaaaaaaaaaa

SEQ ID NO: 50284 - DNA, 1098 bp, Homo sapiens
gcggccgcccgggcaagcccagcagatgccccgtcaggagtactcgcagagggtggccgcagcctgcgggacagtgggagctgccttccagccacttcatgatgtgctgcaggtggccgccgtggctgcagccctggcaccacacgaagagacccttgactacgtggtggcagacggcacacatgctggcgcagcggtggcacctgtcgcagacccagccccggctgctcatgggccgcttgcagtggctgcagttgacgtgcagggtggtggaggcctggttgaggcagctgacggcgcggctggtgctcagcttgaccacctcgttggacacgttccagaggcggaagcgctgcagcaggtcgatgtaggaagtgtaccagtgctcctgggtctgctcgtcgatgtccttgcgcacccgttcacccaggacgatgagcacagacacagccatctgcacgtcgccctgctcagcgtagaagtgcagcatgtcgcgcaccagcacgccgaagaagtcgggcggcaggcggctgtcgtagagcgcgtgtgagacagacaggagcgagaaggaggagtccacgggggccagggaggccacatccgcctcgctgccgctcacgtgcggggagtcggccttgtcctgcaggtgctcgggcccgggaggcgtgtccacgatctcgtggcgcagcggaaaggcctcctgcggcagcacgcactcagggtcctcggggtgcgcgtgttccggatccagcaggtacagctcgtcctcctcaccttccacgtcacccagcaggtagtcggcaggtacgtcgctgccctcggtttcctcgttatcctcattggtgatgagtgtggccgaggagtcgagcagaactgtgtcgctccgtgcatctcctttgctcggtccagccgcgtctcactgcccaaccctggggccatatccttcaggttgaaactgttcatgagcgggaggccacaggagccacccttgcccacactgtggttgaggtttgcagtgggcactaggccagggctgcagtagatgatccgcagcatggtccacgtttgcgccacctggttgcggccaagctctcgagc

SEQ ID NO: 50285 - DNA, 401 bp, Homo sapiens
ttttttttttttttggtaacacaaaattacccaaggtatagtaaacaaagaagacacagacaataaaaactaacagatgccacattttgcaaacatagcatttggctagaggcagaattataaggtatacatattaaaacatacatccaagactctcctcctcaatttgaaaccatgtttatcaagtttttacttcattgtatataagccaaaaaattaagagaaccttgatttgttcctgaaatacaagatttgcttgtattattactggaccaggtagactggatatgtgaatgtttaattcatagttagctagctttaccatcatctcctgaatcagctgctgaggatgcctgtgcctctgcccgtaactatatatagagtatgctttcaaaacaata

SEQ ID NO: 50286 - DNA, 743 bp, Homo sapiens
  misc_feature (1)...(743): n = a,t,c or g
aagtttgctgtatattttatttcaattttaaaacttttttcagatttgttcagtattcatagtctactgctcatagctcaagagctcacaattaaaaaaaaatcagtaaattaacattaaaaactttggnggaggtgaagggcttccatcagcaatatacatttaaaaatggcagcatgcatctgtccttcctgcccttgcttgtcacacctcaatctatggacactaggtggaaaaagtagaacactggtggtcttcccacttcttttggtcattatgactaagtcagttggcacacaagtgaagatctcccatagtctgtttccactgaatgccgtttaagtcaaacaaggttgctgacccctcttggctaggctcaattctcttgctccagaagaaggaagatagggataaaagagaagaactttttcagtggaccagtaggaagacaggcgaggtatagcaagtctagtgcaaagacaggtgatcacagtgttgtagagaggtagctgtgtagtgaagaagccagctattcaaaagcttcatcactatcattatcttcatctgaactgatttcagcatattttggcttttcattaactgtgctacgcttgcgtttgttcattttcacacgttcacaaagtggcatggtggactcaatttctgccaggagttcagggggtaattcttttaacactgattgatctatactacctttatttgactttgatggtttattcttg

SEQ ID NO: 50287 - DNA, 678 bp, Homo sapiens
gatcccggtgccagggaccctgcccagttccaggcgtcgcctaacccagaaacgactgggcgccgcgtcctggaaaggccccagcgcacggacatctgaggagctgtttccgttcctctgcccgccatgccgttcctggagctggacacgaatttgcccgccaaccgagtgcccgcggggctggagaaacgactctgcgccgccgctgcctccatcctgggcaaacctgcggaccgcgtgaacgtgacggtacggccgggcctggccatggcgctgagcgggtccaccgagccctgcgcgcagctgtccatctcctccatcggcgtagtgggcaccgccgaggacaaccgcagccacagcgcccacttctttgagtttctcaccaaggagctagccctgggccaggaccggatacttatccgctttttccccttggagtcctggcagattggcaagatagggacggtcatgacttttttatgattgggcacggagggatccagggcatctgtgaactggctgcttcttccagagagatctcttggcagagtgagggcctggagataaccagctttggattatcccgcatgcaacattcctgtgatcacataatcctcttcttcatcctcatatgaaataaatgaagagagcttcctcattcaaaaaaaaaaaaaaaaa

SEQ ID NO: 50288 - DNA, 488 bp, Homo sapiens
attaccatatcatagaaatttacttttttaacacaaaaatggaatattgtgcactactcagtagcttgttttttttcgctcagtggtatctcatgaataaccttccatatttttttaatggctgcataatatttcaagtatgaatatagcataatttataggcagtctcctcttgaaaaaatgtataaatgggaaaatgctttccccaaataatgtggatgtgaaaattcttatacttctatacttggtatttctgttgagcaggttcctataatgggtatttctaggtcctagttcatgtgcattttaaattttgatcacttctgccaaactaccctcagaaaaggtttgaccaaagttgccatctcattaacaaattatgacctgtttctcttgtccgttgtcactggatagtgtcttttttttctccctgagacggggtcttgctttgttgcactccagcctgggcgacagaggaaaagctccgt

SEQ ID NO: 50289 - DNA, 521 bp, Homo sapiens
agaggttgcagtaagtctggatgccacatcaaactgttttgtgggtactcctaaacttcgtggaggagccctctttcataaatctgagacagccttggtctgagggagcaaagacagagaattcacgtgctgcccaggcatagccacatagcaggtggacatccctggacacttttctgagattttatgtcatagaccctcattggattttcctggaagtacggagagttacatccagagaactctgaacattttggaaggaccccaatcctgcaaacaatgaatggcaataaatcctgggactggaaaggggcttctcaaccccaaggcaaccataaagtcctatacaaagaaagatacagcagtgtgaaagaggcctggatgaaaaaacaaagacagagccagtgagccagagccagagccagaggacaagagagaaaggcagagaatggaaaacacagacagagaaggcagatgcgtagagagacagagattcaatgagaaaataaggaaggaagaaa

SEQ ID NO: 50290 - DNA, 567 bp, Homo sapiens
tttttggtatgggaagaagttctttattttatcatgtgacaccacataacagatgcctaaccacacaatgtagatatgaataaagaagatggctcagaagagtgtactagtatttgtgactcagctagtgaccattatgataaaaagaataaagttttgacttatttacagttttaaaatgcattttatattgagtagttatttcatgttttcttaaaacaattattgtattgaactaaaaataaactaggtagtttgttcacataacaaatctacattcaaagtcatgcttacaaattttccacttagtccatttttctgttctcagcattactacaaatgcctcattccgtcatcacattgaattcttcaacatcctctatatcatttccaggggcatctctgggaagtagtgatgcctatcttccctcggaagcactaataaccctaatatacccacaattcacaccttttcccttctttgaggtgtgctgctttttggcaagacagaaaaaacacactactaggatttgaaaaactaaattctgggcctgtttaagtcataac

SEQ ID NO: 50291 - DNA, 2314 bp, Homo sapiens
gtggcgctggcggttgctgtcagctgattcccggggttggtggcagcggcggtacagcaatggactttctcctggggaacccgttcagctctccagtgggacagcgcatcgagaaagccacagatggctccctgcagagcgaggactgggccctcaacatggagatctgcgacatcatcaacgagacggaggaaggtcccaaagatgccctccgagcagtaaagaagagaatcgtggggaataagaacttccacgaggtgatgctggctctcacagtcttagaaacctgtgtcaagaactgcgggcaccgtttccacgtgctggtggccagccaggacttcgtggagagtgtgctggtgaggaccatcctgcccaagaacaacccacccaccatcgtgcatgacaaagtgctcaacctcatccagtgcctggggctgacgcgttccgcagcctcgcccgatctgacaggtgtggtcaccatctatgaggacctgcggaggaaaggcctggagttccccatgactgacctggacatgctgtcacccatccacacaccccagaggaccgtgttcaactcagagacacaatcaggacaggattctgtgggcactgactccagccagcaagaggactctggccagcatgctgcccctctgcccgccccgcccatactctccggtgacacgcccatagcaccaaccccggaacagattgggaagctgcgcagtgagctggagatggtgagtgggaacgtgagggtgatgtcggagatgctgacggagctggtgcccacccaggccgagcccgcagacctggagctgctgcaggagctcaaccgcacgtgccgagccatgcagcagcgggtcctggagctcatccctcagatcgccaatgagcagctgacagaggagctgctcatcgtcaatgacaatctcaacaatgtgttcctgcgccatgaacggtttgaacggttccgaacaggccagaccaccaaggccccaagtgaggccgagccggcagctgacctgatcgacatgggccctgacccaggcagccaccggcaacctctcatcccagctggcaggaatgaacctgggctccagcagtgtgagagctggcctgcagtctctggaggcctctggtcgactggaagatgagtttgacatgtttgcgctgacacggggcagctcactggctgaccaacggaaagaggtaaaatacgaagccccccaagcaacagacggcctggctggagccctggacgcccggcagcagagcactggcgcgatcccagtcacccaggcctgtcctcatggaggacatcgagcagtggctgtccactgacgtgggtaatgatgcggaagagcctaagggggtcaccagcgaagaatttgacaaattcctggaagaacgggccaaagccgcggaccgattgcccaacctctccagcccctcagctgagggccccccgggtcccccatctggcccagcgccccggaagaagacccaggagaaagatgatgacatgctgtttgccttatgagtgtggggtctggcaccctgcagcccaggtccccactgctctcacacccttaggctgggacctccctccctcctctggtgttaaggctgctttgggggtggcttgttacccccttttcctcctctttgaagacggagctgccccagctgtggctgggggtgtggaggcagtgggatgaactgggggacaggtctgcgctgcagtgggatctggctgctctgcctcctttcccaccccagctgaccatgagactttgctgagaagtggaggccccaggacaggctggctggctggctggctgcttgacccagtgtgactctccttcactgagtgataccctgctccgggcccatgccccaaggagcccttcagagcccacactgccagtcgaggcctggctggaggctggccacagtggaaattctgccgagcctcttgtcccttccctgctctgctgcatggggccccatggctttggctggccactgagggtagggtgtggaggtgtggaggccccctgaggagctgcggcggcccaggtacgaagctgcaactctgcgcgcagtgggcgagatctcatcagccccaggctgcaggtgaggcttcaggggatgctggggccccactgcccctccgctgccttgccctccatccttcctctgttccttctggccgggcaccacagcactggggctcacctcttggttgatcctcttgtactgggagaggtgccttttgtatccccaattaaaggtagaaaaccaccctgct

SEQ ID NO: 50292 - DNA, 422 bp, Homo sapiens
cgcaggcggtggcgagtggatatctccggagcatttggataatgtgacagttggaatgcagtgatgtcgactctttgcccaccgccatctccagctgttgccaagacagagattgctttaagtggcaaatcacctttattagcagctacttttgcttactgggacaatattcttggtcctagagtaaggcacatttgggctccaaagacagaacaggtacttctcagtgatggagaaataacttttcttgccaaccacactctaaatggagaaatccttcgaaatgcagagagtggtgctatagatgtaaagttttttgtcttgtctgaaaagggagtgattattgtttcattaatctttgatggaaactggaatggggatcgcagcacatatggactatcaattatacttccacagacaga

SEQ ID NO: 50293 - DNA, 634 bp, Homo sapiens
tttttttttttttttttccattatttttaggcagaagggaaaaaagccctttaaatctcttcggaacctgaagatagaccttgatttaacagcagagggcgatcttaacataataatggctctggctgagaaaattaaaccaggcctacactcttttatctttggaagacctttctacactagtgtgcaagaacgagatgttctaatgactttttaaatgtgtaacttaataagcctattccatcacaatcatgatcgctggtaaagtagctcagtggtgtggggaaacgttcccctggatcatactccagaattctgctctcagcaattgcagttaagtaagttacactacagttctcacaagagcctgtgaggggatgtcaggtgcatcattacattgggtgtctcttttcctagatttatgcttttgggatacagacctatgtttacaatataataaatattattgctatcttttaaagatataataataggatgtaaacttgaccacaactactgtttttttgaaatacatgattcatggtttacatgtgtcaaggtgaaatctgagttggcttttacagatagttgactttctatcttttggcattctttggtgtgtagaattactgta

SEQ ID NO: 50294 - DNA, 1038 bp, Homo sapiens
tttttttattgttcttgctattgttgatattctatgtagttgagctctgtaaaaggaaattgtattttatgttttagtaattgttgccaactttttaaattaattttcattatttttgagccaaattgaaatgtgcacctcctgtgccttttttctccttagaaaatctaattacttggaacaagttcagatttcactggtcagtcattttcatcttgttttcttcttgctaagtcttaccatgtacctgctttggcaatcattgcaactctgagattataaaatgccttagagaatatactaactaataagatctttttttcagaaacagaaaatagttccttgagtacttccttcttgcatttctgcctatgtttttgaagttgttgctgtttgcctgcaataggctataaggaatagcaggagaaattttactgaagtgctgttttcctaggtgctactttggcagagctaagttatcttttgttttcttaatgcgtttggaccattttgctggctataaaataactgattaatataattctaacacaatgttgacattgtagttacacaaacacaaataaatattttatttaaaattctggaagtaatataaaagggaaaatatatttataagaaagggataaaggtaatagagcccttctgccccccacccaccaaatttacacaacaaaatgacatgttcgaatgtgaaaggtcataatagctttcccatcatgaatcagaaagatgtggacagcttgatgttttagacaaccactgaactagatgactgttgtactgtagctcagtcatttaaaaaatatataaatactaccttgtagtgtcccatactgtgttttttacatggtagattcttatttaagtgctaactggttattttctttggctggtttattgtactgttatacagaatgtaagttgtacagtgaaataagttattaaagcatgtgtaaacattgttatatatcttttctcctaaatggagaattttgaataaaatatatttgaaatttt

SEQ ID NO: 50295 - DNA, 249 bp, Homo sapiens
gaagcaagattcttttacgatacccctgattcagtttgatacatgctattgattgcttaaaatttcctactaaaaaattaatattctcaactaaattgaacttgtgccaaaatcagcatgttctcctatgcctcagccagttctaatgtaataggagatgcagtttatttaagctatttgcaagtgtaataacagttgttgttttaagaaattatttttatttttagccttttgtctgtgggaaaagca

SEQ ID NO: 50296 - DNA, 496 bp, Homo sapiens
tgtcttttctatctccatgcctggctttttctaattatatcctagagaaaaagactaatggtatttcaaagctgtgtatttgtgacgagataaagaagagtcttaaacatcttgtttgggagaatgcacaggccagtcaggagacccacctcctcctgtgccctgagctgctgagacccgacagatcatgaaggctagtaaagggcagagaaggccctgagccatcagtttacactcgaattgttgactcccctttgtggtgtttttgaaggctgcttataccaacagctaatgtggattagtgcttatgatcttgaaaaagtcttgaccaagaatcctaaactccaccactcctcccattccagcttaacactatcagaataatatccaaattccagatttttttcttttttacttttttttcttccttttttaaggagagacagtgtcttgctcgggtcacctagggtgggagtgtagtgggcgcaatcgttgg

SEQ ID NO: 50297 - DNA, 369 bp, Homo sapiens
atgacttccctgtatgggcagctggctggcctgaaggagctgggcctcttggattgcgtctcctacatcaccggggcctcgggctccacctggggccttggccaacctttatgaggacccagagtggtctcagaaggacctggcagggcccactgagttgctgaagacccaggtgaccaagaacaagctgggtgtgctggcccccagccagctggcagcggtaccggcaggagctggccgagcgtgcccgcttgggctacccaagctgcttcaccaacctgtgggccctcatcaacgaggcgctgctgcatgatgagccccatgatcacaagctctcagatcaacggggaggccctgagtcaatggcca

SEQ ID NO: 50298 - DNA, 372 bp, Homo sapiens
  misc_feature (1)...(372): n = a,t,c or g
aacttaattaaattcctcatctttcacttagtttttggtgtcatgatgacatagccattggtgctagctgaattgattccggtattattctatatacaaaacagagcttgagtatcctaaactgaaatccaaaatactgcagaatttgaaaccttttgagccacgaacatgatgctaaaaggaaatgttcnnnnnnnnnnnnnnnnnnnnnnnnnnnnnnnnnnnnnnnnnnnnnnnnnnnnnnnnnnnnnnnnntagaaaaaatttaaaacctgaaacacttctgttcctaaggcattttggggtaagggaatacttcaacctgtaggtaacttagctgcatttttgagatcttatatcttaatttatttc

SEQ ID NO: 50299 - DNA, 1124 bp, Homo sapiens
ttttttttttttttgttttacttctcatttattgttgttttgacctcagagagtcaaagatgtaaatggagatgtatattaagtatgaagaaatagggatacctctgagaaatatcaaccaacatatgatatgcaaaaaaaaaaaagggggaaattgtgtggtgagaaggtccatcaacccaaaaataatggccataaagtgccagataatctagttccagatgcaaacctaaatataaattctgcctgcatttggtgaaaatgacatgcattaggttgtaagaatatgaaccaaatatcaattatctgcttgaagaagttgaacgtgtttattatattaataaattcaacctttactattatagaatgttataataatttctaaagtgaatattgcttgaattttaaaatattgataattatatatattaaaccttgaagtgatttcagagataatctggtacaatattttatagacgaaagacaccaaggcccagggaaactaagtgactttgttcaagatcatacaggtagttagaatgaccaggactgttttactgctaaattcagttttccttctggtacatactgccctgggagggaatttcattaattttcttctaaaacatattcatgagatttgcatccaatctcaataataatatcatattagaagaaaattacttcagtgaaaataaacttttattcaatttcataaactatgctaaaattatgggaaatttacttagaaataccaacatcatttctggggggaaaattactgatcattaaaatattttaatttgcatactacattagttaacgaggactgacttttgctcttctcagtcattattgtgtcaccattcagaaacctaatgagccaatttataatctctacaattaacagtaataaaacttacaagtaattaactatttcactacaattactatcatttttaactatcttactcaatggaataaggtcattgcctttgtagcattttctaattattttttaatattttattttactgttattttttcaaggctagtcaagtcaagcagtgggagtaaagaaacaccactgcacttgtgccagcctcgtttcggacgcgtgggtc

SEQ ID NO: 50300 - DNA, 461 bp, Homo sapiens
gacaatatattagcagaatgataccacacaaaagtattacaggattaaggcatgtaacttctatggtagtccttatgtatcagcgtatacccaagttcagaaaccacaggtgcatttttagacctttacttagagaactaaaggcagttccaaccatcagcccatatggcgggattaatgcatgaaaaccctcagagggtgttgggacatcctacttccctgtcctcacccagtggaactctggtgtgtgccttgaggataaggaagtagagtggaaactcatcctatcattgagtattctcaatattttggccttccctctggaattatgagaaatttaacaaagtctcaggaacctttagaatccattgtccaacactgctagaaaaactgtaggaggtacatggagaattcctatagttcttagctaagtgcaagacatgacacagggatccctatcc

SEQ ID NO: 50301 - DNA, 1115 bp, Homo sapiens
tttttttttttttttttttagagagagtggagctgctttattgcccttggagcccgcgctctcggaggctgtcttctgtcgccaagggtcccggaccgagtacacagtggcagctggcttagttggtggacggcttggcccactcgacgttgaggatgaggtggtcgtagccaaagccggacaccccggcaatggcacgcgcagcatcctcgcggcggtggaagctgatgaaggcgaagcccttggattggccagtggtcttgtccttagccaggtagatgcgggagatggagccgaaaggccggaagagctcctgcaggtcggtctcacgcgtgtcctctgacaagttggtgacacggatggtggcgttgtcgtcggctctgcggttgggctgcatggactccccgcggcggctggccccgtcgcgcaggctcggcggcacatacttccctgtcttgttctgcgtggcctgcaccggctctagctctcccggcagcttctccttctcgccagtagacaggcccagctgctcggccagctccttctgcatgggccccagcgtatccttgtaggggcagcgggtggtccagtggtcgcccttgcagatgcggcaggacacgatcttctggcccttgagtttgttcatagggtcctcctcctcctggcagttcaggtcctctttgctggtgatgaacgtcatagagacatcgtcactgacagtggtggtggccacattgggtccgggggggtcaaactctgagttcccgaacttcttccagttcttcctccttgcgacagcctttgaagccttccgggtctcaatcctgaaggtgcggacaatcttgaacttcttgccatcctcatctatcttgtactctgtcactgtctttatgtttccgttgatgacctccttgggaggcggcagtggagctcccggcagtagctctggctctgggctggtgtcacctgtggccagagggatccccttgaggagctcgctggtgacacatttgtcgtcctccccctcctcctccacctggtcggcccaactgggcttcgaatcaaagtctccagtaggcatcgcaaaaagtattctccacgcagcccaagcccgg

SEQ ID NO: 50302 - DNA, 590 bp, Homo sapiens
tttttttttgtgtcaggtaatttgccaggcattttcatgtatgcctttatttaaccctcaaaatcaacttgcaggttaggttaaacaattgcccaagttcaaaagctggagctggcacctgtgctgactccaaagcccgtgtgcttcccattaaggcacactccctgcccagagccagcgcagtcagctgcttctcgggtcggcgtggaggagggacaggatacagaagggatatggcaaggctaactccaaaactaaactccaagactaaactaaagcgtgtgtttgtaaagagggtaaaaatgaaatttggaagcaaacttgcctaatttccaggtactcctcctcgtggaataaaaattggtctgttatgcggcttgacagcggcaggcaatttggtagggattacagcagggagttactgaagggtcctgagtgtaatctgcgctggagatgttgtccgttggcaaatgtcttggaggacgtctgcaagaacctttctgacctcgggcagcacagccctggtactccgcaccacctctttctaggggcacagcttctgcggtatcgtcttccagttctcgtgccgc

SEQ ID NO: 50303 - DNA, 820 bp, Homo sapiens
ttttttttttttttgaagtttaaaggagtttattcaaaagttgaacatttttaaaatttcacataactaaccagcaaagacagtaagccaatcctccatttaccccctttctgtcttggttaagggcagagacacatgtcagagggagactgcgtcccatgtagggagctaatgtgttcactagctattgcttctcgcagggtcgcagcatctacactcacttgcctcatccacactgtcacgttcaaagacaagaaataatcctgaaagtagatcccaaggccagaatgcaaaggaatagccagaagcccagaccagatcagtgggctaagggtttgtcaaaggcagaatctggtgacagctagggtgaggggggctttgtcattggaagcgaatccatcgcccattcttcgttgtcatcacggtttatgttttccttggcccttaggatccagaagttgccacggctgctagttgcgtcatccagtggacacctttatatgtacaatttggatcctcaggatggaggagagtgtgtcttaatcaaaacccacaggtgaagagactgcttttcaaaagacagcctttcgagagctggtcgcgtagagttgtcccttcgccaagaacgacaagcttcagtgcccttgcattgatttgttcttcactggcagtctcagtggcaaacctctagtgggcaagtgctctgcaccgggctctgtgtcaggtgccctcagcatgtggtaatcatctggaaaagtgccaggattaataacacacaagatggctacccctcagcctatgctcctaacacagccctgag

SEQ ID NO: 50304 - DNA, 470 bp, Homo sapiens
ttctttgtctctctgttcttcaacttcttgctctgtttgggttcttgtttggcctctaacttccttttcttgtcacttttcaggctgatgatcgaggcgttcggcccagctttgttcaaaacttcattccactcttcatcgtccccacggattatgtattcagagaggtccatgctcttcagcttccctacttccttcttgtgtttctcctgaaattcctttgctgcttcatctaggtcgtcactgagggtcttcatcgtgggctccatgaccacatccttcgctgccaccatctgctcctcaatggccttttcctgaacttcattaaatagcttcacaactttgcggatgatccggttgaaaagtcccatcaactggcccgagggaggctcaatctccttttccagctggtccacagacttatgctgcaggccaatccccaagagaagagccgactgagccgcagacag

SEQ ID NO: 50305 - DNA, 1576 bp, Homo sapiens
gtgctgccgagcggatcccagtgtgcggcggcacggcggcggcggcgctcgccgggctccggctccggcttctgctgttgctcttctccgccgcggcactgatccccacaggtgatgggcagaatctgtttacgaaagacgtgacagtgatcgagggagaggttgcgaccatcagttgccaagtcaataagagtgacgactctgtgattcagctacttgaatcccaacaggcagaccatttatttcagggacttcaggccttttgaaggacagcaggtttcagtttgcttgaatttttcttagcagttgaacttcaaagtatcattgacaaacgtctcaatttctgatgaaggaagatacttttgccagctctataccgatcccccacaggaaagttacaccaccatcacagtcctggtcccaccacgtaatctgatgatcgatatccagaaagacactgcggtggaaggtgaggagattgaagtcaactgcactgctatggccagcaagccagccacgactatcaggtggttcaaagggaacacagagcctaaaaggcaaatcggaggtggaagagtggtcagacatgtacactgtgaccagtcagctgatgctgaaggtgcacaaggaggacgatggggtcccagtgatctgccaggtggagcaccctgcggtcactggaaacctgcagacccagcggtatctagaagtacagtataagcctcaagtgcacattcagatgacttatcctctacaaggcttaacccgggaaggggacgcgcttgagttaacatgtgaagccatcgggaagccccagcctgtgatggtaacttgggtgagagtcgatgatgaaatgcctcaacacgccgtactgtctgggcccaacctgttcatcaataacctaaacaaaacagataatggtacataccgctgtgaagcttcaaacatagtggggaaagctcactcggattatatgctgtatgtatacgatccccccacaactatccctcctcccacaacaaccaccaccaccaccaccaccaccaccaccaccatccttaccatcatcacagacacaacggcgacgacagaaccagcagttcacgattcccgagcaggtgaagaaggctcgatcagggcagtggatcatgccgtgatcggtggcgtcgtggcggtggtggtgttcgccatgctgtgcttgctcatcattctggggcgctattttgccagacataaaggtacatacttcactcatgaagccaaaggagccgatgacgcagcagacgcagacacagctataatcaatgcagaaggaggacagaacaactccgaagaaaagaaagagtacttcatctagatcagcctttttgtttcaatgaggtgtccaactggccctatttagatgataaagagacagtgatattggaacttgcgagaaattcgtgtgtttttttatgaatgggtggaaaggtgtgagactgggaaggcttgggatttgctgtgtaaaaaaaaaaaaaaaatgttctttggaaagtacactctgctgtttgacacctcttttttcgtttgtttggtt

SEQ ID NO: 50306 - DNA, 289 bp, Homo sapiens
agctggtcaagtttttctcttgccttctagtcacaagaacatggctttggagtgtgacactggcctaggaatccatgactcccaaaggacggggctaggggtagaggaggttcaggcaaagcccttagattttggagacatcaggcagatgtctccaaaaatgattgtgatcaagaatctgaattataagattcacagtctgctccccaacccagtgctgccaactgtacagctgcgcctccacgaaggggcatatgccaggctcgtctgaccctgggaatgaggatgt

SEQ ID NO: 50307 - DNA, 1788 bp, Homo sapiens
ggagtattggtactctgtgtagaaagaaatggggagggggaaatggggtggcctcagcatctccctaagtcccagcctttaagtcctcctgttgcagttcgtcgcctgcagcttcgagaggagttggatcgatcttcttgtggaaacgtcctcttcaatggttacctgccgccaccagtgttcccagtgaagcggcggaaccggcacagcctagtggggcctcagcagctaggaggacggccagcccctgtccgacggagcaacacgatgccccccaaccttggcaatgcagggctgctgggccgaatgctggatgagaaaacccctccctcaccctcaggacaacctgaggagcccggggatggtgcccctggtgtgcggacaccataattggatcgctgtggcctatacccagtttctagtctgctacaggttgaaggaagcctctggctggcagctggtgttttccagcccccgcctggactggcccatcgaacgactggcgctcacagcccgggtgcatggaggggctttgggtgaacatgacatgatggtggcagcagccaccggcagcgagatcctgctatgggctctgcaggcggaaggcggtggctccgagataggtgacagtgggaactggatcgagatcgcctatggcaccagctcagggggcgtgcgggtcatcgtgcagcacccggagactgtgggctcggggcctcagctcttccagaccttcactgtgcaccgcagccctgtcaccaagatcatgctgtcggagaagcacctcatctcagtctgtgccgacaacaaccacgtgcggacatggtctgtgactcgcttccgcggcatgatttccacccagcccggctccaccccactcgcttcctttaagatcctggctctggagtcggcagatgggcatggcggctgcagtgctggcaatgacattggcccctacggtgagcgggacgaccagcaagtgttcatccagaaggtggtgcccagtgccagccagctcttcgtgcgtctctcatctactgggcagcgggtgtgctccgtgcgctccgtggacggctcacccacgacagccttcacagtgctggagtgcgagggctcccggcggctcggctctcggccccggcgctacctgctcactggccaggccaacggagcttggcatgtgggacctaaccaccgccatggacggcctcggcaggcccctgcaggtggcctgacggagcaagagctgatggaacagctggaacactgtgagctggccccgccggctccttcagctccctcatgggctgtctccccagcccctcaccccgcatctccctcaccagcctccactcagcctccagcaacacctccttgtctggccaccgtgggagcccaagccccccgcaggctgaggcccggcgccgtggtgggggcagctttgtggaacgctgccaggaactggtgcggagtgggccagacctccgacggccacccacaccagccccgtggccctccagcggtctcggcactcccctcacacctcccaagatgaagctcaatgaaacttccttttgaacaacgcagctgccatgatgccttgggatgccctggtcctgggggactcaggtgcctccctgattcctgtgggaaccccgggttcagggccagggcctccttggaataaatggttattgttactaggtccccaccttccctcttttctggaagccaaagtcaccctccccaataaagtcctcactgccaaaaaaaaaaaaaaaaaaaccg

SEQ ID NO: 50308 - DNA, 1294 bp, Homo sapiens
cttggaatccaagtattcctgtttcacatttgccccaaatctttgctgtggaattgggaaatcaaaccagagtcctcctcgcctgatttccagctcaggaagggcctgctggcttgccctgttcccagttacactttcagatccctttgtgctcaagatctcagagggggtggctttttgttaaagagccttcagtcgcaatgctacccagcaccccatgtgccaaaagaaaccagctcctgtgtcaaagggcttccaaacctgatctcactctcaacaggcgatggtgctgatgtttcaagaattgtgtttttataaaacagaggtctcagcatagtcactcttcacatagtgccttacccatgggtatcgtcatatccgggtcccagttcagtttgtctgcacagcagccaccctgcctggcaacagagaccccaagacctacacagtgaaccctactgccccaaaggcgttctccaggtgacttgtgaaaacagacctccggggaagtgatttattgggggtgtacactgggggcaatatggtttagcactgaattcaatttgtccttaggtctatgagtgagtccgatcttttcttgtgaaaggttttgggcatcgtacaacccactctgcctagaaggtgtggaggactcaccacgggcagggtcgccctggcccacagcacgtgagcctgcactcactgcggcctttgtaacaaaaccagttgtggtcctcagcatttgaagcagctgcatacttcagagtaaactatttttcattatttagttttgtcacaagaaatcgaccattgtactactctcacttacagcagttaaacagcatagaactaaaaacctgtctgcatttccattttttctttctgtatggttgtgggttttaggacatagggggttaggagaaggggtttcttgatcatgtcatgaattctcctttgtcctgtttctcctgtttcatttctcctccgcctgctgtatattacctgagctggtgttgtatcttcaagtccatatgcgtatttgcagacctttcctgttcccactcttgttggctcttctgatttatgcacagatggttcccagcatgtgtccagtgcttcatggatgggaccatcccagcaactaatcagacttcctgccagtgtcctaacccccagggcaccctgttcaaccatatttaaaaattggaatttgtataaagttgcttccaagttttataatgcatcattttacatcttttgtaattaaaagcatcacaatgaggttgtctctgca

SEQ ID NO: 50309 - DNA, 416 bp, Homo sapiens
ttgggagctagtgctctataactaatttggtctttctcagaaaccccatctgctgaggagcaaaaatttcagtttcaaagcttagtgtgaagtaaaaatataaatacagacagtccctgagttatggtggctcaacttaatgattttttgacataatgatggtgtaaaactgtcacaaattctatgtaatgtacagtattcaataaattatttgagctattcaatgctctattataaaataggcttccgtgttaggtgattttgcccaaatgtaggctgagggaagtggtcctgatcaccgttttaaaggtaggctagcctaagctacaatgttccagtggggttaaggctggtaggtaaatgcattttcggccttataagatactttcaacttatgacacatttatcaggatgta

SEQ ID NO: 50310 - DNA, 1519 bp, Homo sapiens
atacccactttcaactatatgcaaatttaggggtggattatgccaaaatttctagaaaaaaggtcgtaacttccaggtcgtgggattgttgctatggaaaggagccaaaacttccagctgttgccttagcaatggtaacctgacgtggcactggtgagtgtgttttatggagagactctttcacctcttccctttcagcttgtcttcagtgtggtctggagcccaatccccacctccagagtctagtcctgcctcctacctcagtaataaaaagtagtgggatatggttaattgtcaaatacatttgcaaagtgtaatcaaagatacattaccaatctgaatctcaaaatgtgctatgatctttgaatttgaataatgtattgttaaagaagttgcagttttcctttacattcaataacatttctttagtggttttctttttcagatactttgattatgatcttttttttttcatctttgaatccccgtaatacaacccagtgcctggcataaaaagggggatcaacaaatgtttggaaaatgaattgtaaagttgactttcctgtccctttttaatattagatttctagctaccagacttttgaccattttttaaattttctaccatagataacagaaaattctttcgcgcaagcatgcattggattaatgatattctcctgcctaaggaaatttacttcctttcaagcacagggcccccaaataactggatttcccccctttcagcttattttatccttttctcctgctacagaacagttggcattcaccattcccttcggtaaagtctttttttaggctgtggcttaaaggttgcttttcccccatagctcaaggttaggccttgtgacctcacttatgtaatttgagtgatttgatagcacaaatcaattttatacttaaattacagcataaaacagcactgcctcctgttggaaaaacttgcttgctaattttaaccagacacagtaaaaatactgtccaatacctcaaaaattgtgtaaatatatatccatttcaattgtcccccttcctctcctctccttttatctcttggaagataaaaatgtatgggtcctgtgctgataatgtttctgttcatatttctatgccctggtacctggatcagcttttgttctacacaaaaagacttgtatctggcttatttctgaaagctactgttggccatgatgaacttttagagcaaaagatttcaggcagagtacattcttacatattcttacacaatcaatattcagttccagcccgcacagtagccctagcaaatgccagtgctccttccagagattcacctatggattcagtaccccagaagagaatttctgtaaattcttggggaagctatagctagactatggctcaacactcatttttcccccatgattcttaatctaacagtggcaatgttggcctcttcttaggcaactagattcggttcttgcttattctgccaataaaatactttattgagatgctt

SEQ ID NO: 50311 - DNA, 791 bp, Homo sapiens
  misc_feature (1)...(791): n = a,t,c or g
ttttataaactcttgtttttactcaaccaaagcaatgtagtaacttattacataaccagtgctttctaatttagtagtaaaatacagaaagggaaactgaaaaaaatcaggcaaatagaggaatggagagggcaactatatcaaacagtccccactaaacacgttttatagggtcttagttaattaagcacagacacatggcatcagaatatgtgcagcagaattaaaaaaaaaaaaaccttactcttttcaatattttcatgaagaaacatttgcaacattggacagttaagtctatgaaaaatgacttcaaactatttcctacctacttatactaatgattctgagcaacaagtgatcaattcataaactatccttaagactcaatcagttcacaagtaaaacaaaacatccattaaaataatgtggctctattcattttaagttcaaatcaaatgttgcagttttaaaacatagttgattgcccntgttttttcagcatcctatgatgtcagcaaaagtttaatttgaaaagcactgcttcaaatttccaaccatgagctgaacgcaggcgaaacaccaaacatgtattttcagtgctagtaagttacagttaattcttgatcaacatttaaatctaattaaacactgaatcagctttctgattatattaagagaatgcaaatgatccttaatatgaaaatgaggacttcaaaattggtaattctatttgaaaagttgaaaataaaaacaagaaataaaaccctcccaaacaaacacccacgcgtccg

SEQ ID NO: 50312 - DNA, 280 bp, Homo sapiens
agaagggttacggtgttcaagttctggttgttggagtttttagcccagagtgacatactgaaatcagtaaataattattttataatgacacagcacaactgccttgttatgaatttttcttaaatgcatatatactgtatttaagaaaaattcataacaaggcagttgtgaatttttcttaaatgcatatatactgtatttaaaattaaaatataggataccaatttaccaaaggatacatattactaattctaaggcaaaacttaaaaaaaaaacccaa

SEQ ID NO: 50313 - DNA, 824 bp, Homo sapiens
tttttttttttacatcaaaaaccatactttattttatgtatagcaatacaatttacatattaaataacactataatagaatgatttgatatagtttaaacagaagaaaaagggaaaaatttcaggttacaaaacccctccccctgaacaaatttaaaaaaaaaaaaaaagcacactttttccaaatgggtcaatgtgacgaatgttttccagtggactaattatgtctaattcctattgcacaaatggtcaatggaattaaaaagaaaacccaactttcacaatcactgcctcaaagaaataacacatgttggattcttttggaatgtaaagatggtttttgctacttcaatacacagaaagttgaattcacatatccaccacaaaaaggaaaaaaaactatgacggagttgaaactagaaaaaaattagctttatatgaaaatataaaattctatgattatataccatagatacaaagttcccagaagatgcttacccaagcaacaaaatatttacagttttaatgatttttagctatttcaaaatggagtgaaagaaacatgagtcaatgtgaagccagaattctttagaaacaatggctgcttgctagtttcaaatgtcctaacaaaaaaggagtcactaccccaaatgttggagagttgcgacattttataaaatcgactttctccttttctggagatgtttatttcttaaaactcaagatatttttcttgaaattaattatcctctgtagaaaatgcttccctttgcaaatatttaacaaaaatactaaaaacagtttaacagctaagacaaagtagag

SEQ ID NO: 50314 - DNA, 594 bp, Homo sapiens
cttactgaagcagtattccattttatagaatgagatgctgcccaattctggaatcactaataaaagccaattagatctttacatttgttgaaattttgtctttgacaacattactagttatattattctgggtatccttttccccatctgtaaaatggacatagcgatatccttcccatcagatttttctcattaatagaagtaatacattcaaaacactgagccaggctcacaccagtgagcaacttgttaatattactcagaagcatattatagatattgacagaaagcaatactgttcctaattaggggaagaaattctaagagagtacctaagagtttgaatttagattataacatttgctctgagtattttacattacagcctttggggggaaaagtacaaatgagatctgagaacagtggtactcatctttgaggaattatggaaaacgtaatagaacactaaacatgggaaaacatcggccttcaggttgaaaagtggaaatctcaatccctgaattttttttttttttttactaagtaacttttttgcccattggtgtcatttaaccaaaagaagaagaaattcca

SEQ ID NO: 50315 - DNA, 522 bp, Homo sapiens
  misc_feature (1)...(522): n = a,t,c or g
ttttttttaaatgaactatcttaaatgtttactgaactaaaagaaaacatggacaaataactaaaaacaaataaggaaaacaatgtncaaacaaaatgagaatctcagtaaagagaaagaaattgtaaaaaggaaccaaacagaaattctagaattgaaaagtagaataactgaaatgaaaaatctgctgttgaaacctttgagcagggggaagtaaggatcagcaaacttgaaggcaagataattcaaactgtccattctgaggagtagaaagagagagagaaaaaaaagagnaaatgaacagagcctgagagactggtggcccntccaagtgtccnatacntgaatcccctgggagtccccgnaaggaaaagggggcnggaaaaaattntttggaaaaataaactcccccaaatcnggatgaagaccttggatttgcccancccaagaagcncggtaattcccaatccggccaacccccggaatccccccngggggcccccttatagtcccaattggttt

SEQ ID NO: 50316 - DNA, 638 bp, Homo sapiens
tcgtggagggcgaggtctacgcggtagacgagcggatgtgcgctttctggatgacttcgagagttgcccggccctgtaccagcgcacggtgctgcgggtacagctgctggaggaccgggccccgggcgcagcaggagccgccagcgcccaccgcggtgcagtgcttcgtgtacagcagggccaccttcccgccggagtgggcccagctcccgcaccatgacagctacgactccgaggggccgcacgggctgcgctacaacccccgggagaacagataagggggacgggcagggtgggcctaggtttgagagccctggggctctcaagatgcgcccagcccatgctgggtgaaggcggaagccgaacagggccctttccaatgaatctgccggaaaggaaccaatctttcagtggcagctgattttacaaataatgttgagatacgaatagcaaggtgcttccctcccatctttctacctggtaagaaaaatttaggattttaactcccctaaatgacatttagagaactcgtgttatgcctaattcttcttcctcctcgtgttgtttctgctgttggctctgctttgagctcaagataatatttaggatcagtgtaaagaatggtgttgccgctagat

SEQ ID NO: 50317 - DNA, 371 bp, Homo sapiens
aaagagcagagctaccatgtcctcttggagcagacagcgaccaaaaagcccagggggcattcaaccccatgtttctagaactctgttcctgctgctgctgttggcagcctcagcctggggggtcaccctgagccccaaagactgccaggtgttccgctcagaccatggcagctccatctcctgtcaaccacctgccgaaatccccggctacctgccagccgacaccgtgcacctggccgtggaattcttcaacctgacccacctgccagccaacctcctccagggcgcctctaagctccaagaattgcacctctccagcaatgggctggaaagcctctcgcccgaattcctgcggcagtgccgcagctgag

SEQ ID NO: 50318 - DNA, 508 bp, Homo sapiens
tataaaccattaaatgcttttatttttcagattataattggagcataagcattaacttgtcttagaaaacatcattttaaatgacaacatagtattccattatcttggtgaacctaaatttacttaaatgctctttttagtagacgtttataatgtatcaatactttattatcccagtgctaccatgaccattgttgtatattacatatgtttttgcatgtttcctcaggcctcttatgattaattgctggagggtagctgagacgcaagaaggcatatgaattaacaaataaatgactcatagggacaaaggtaattaggccttgagggctttttaaaggggcaacattgggcagaatgtgacatgttagtgtcttaactcatccttgtagggtccatgctgccttaccaataggaggcacttcctaaaagaagggtgggagtgaggcctctggacaggcaggctgtgacacatgctgcgccctgcctgctattaacaggccaccca

SEQ ID NO: 50319 - DNA, 654 bp, Homo sapiens
gtcttggctacttccctacagctgctaatcttagcggtgtccctccacagcctggcacggtggtcagaatgcagggcctggcctacaatactggagttaaggaaattcttaacttcttccaaggttaccagtgtttgaaagatgtatggtgatcttgaaacctccagacacaagaaaacttctagcaaatttcaggggaagtttgtctacactgcagggctggcagtattttcagcaaacttgattggacaaacggggcctgtgccttatcttttggtggagtgaaaaaatttgagctagtgaagccaaatcgtaacttacagcaagcagcatgcagcatacctggctctttgctgattgcaaataggcatttaaaatgtgaatttggaatcagatgtctccattacttccagttaaagtggcatcatagggcgtttcctaagttttaagtcttggataaaaactccaccagtgtctaccatctccaccatgaactctgttaaggaagcttcattttcgtatattccccgctcttttctcttcatttccctgtcttctggcataatcatgccttcttgctaagtaattcaagcataagatcttggaataataaaatcacaatcttaggagaaagaataaaattgttattttccc

SEQ ID NO: 50320 - DNA, 759 bp, Homo sapiens
gagattaaacaggcaagttttattatcaaatgttaactctacaaaaactcagtagtattgtagtaagcattactgcctatcttaaagtctttcagagctttgggcagctttgggcatcttaaggcatcaagtatacagaaatttcttttcgatcttaagtgccagttatcaccaattttcacacaaacctttttttttttcttcctattgcagttaaagggccattgccagtcagctgaagaaggaaatgtttgcttctccctttaaggtgttaaagtaatgcacagaaaataaaaatagcagcctcataaatctgcacggcattgcattcaagcaaaggacaatatgagtaacttagagaaatatccacattcaatgcacttaatgaaatcctgttttctttggagttacatgaggcagcagtactagctagtgtctaatattgcacttttatagcataaacacagctaaacatagtgttaaacactgacagcatcagtacctgttctaattgcatcagtgtttacctctcagtctagcatgctgactatagtcctatgctttaaaaggttataattatttgacagttaaggcattagaggaaaaaggtttaaggctatcataatatatataagcattcacttctgttcagttagtgtattgttttctagaatacactgttcaaattgtctcacttctgggatattaaaaactatggaatttctcttattaaagtccaaaccatcaataatgaaaaaa

SEQ ID NO: 50321 - DNA, 2263 bp, Homo sapiens
  misc_feature (1)...(2263): n = a,t,c or g
cggaaggtgtgagccgcaaacccagcggagggcgggaagaaggaggaggcctctagggtggtcgggggactgggggccccgccggcagaggtccctcggcctcctgactgactgactgcggccgcctccggccaggacgctgggagctgcctgcgggaaggtgcggggagcggagccatggcctccggtgcgtataacccgtatatagagataattgaacaacccaggcagaggggaatgcgttttagatacaaatgtgaagggcgatcagcaggcagcattccaggggagcacagcacagacaacaaccgaacatacccttctatccagattatgaactattatggaaaaggaaaagtgagaattacattagtaacaaagaatgacccatataaacctcatcctcatgatttagttggaaaagactgcagagacggctactatgaagcagaatttggacaagaacgcagacctttgtttttccaaaatttgggtattcgatgtgtgaagaaaaaagaagtaaaagaagctattattacaagaataaaggcaggaatcaatccattcaatgtccctgaaaaacagctgaatgatattgaagattgtgacctcaatgtggtgagactgtgttttcaagtttttctccctgatgaacatggtaatttgagcgactgctcttcctcctgttgtctcgaacccaatttatgacaaccgtgctccaaatactgcagaattaagggtctgtcgtgtaaacaagaattgtggaagtgtcaggagaggagatgaaatatttctactttgtgacaaagttcagaaagatgacatagaagttcgttttgtgttgaacgattgggaagcaaaaggcatcttttcacaagctgatgtacaccgtcaagtagccattgttttcaaaactccaccatattgcaaagctatcacagaacccgtaacagtaaaaatgcagttgcggagaccttctgaccaggaagttagtgaatctatggattttagatatctgccagatgaaaaagatacttacggcaataaagcaaagaaacaaaagacaactctgcttttccagaaactgtgccaggatcacnnnnnnnnnnnnnnnnnnnnnnnnnnnnnnnnnnnnnnnnnnnnnnnnnnnnnnnnnnnnnnnnnnnnnnnnnnnnnnnnnnnnnnnnnnnnnnnnnnnaattttcctgagagaccaagacctggtctcctcggttcaattggagaaggaagatacttcaaaaaagaaccaaacttgttttctcatgatgcagttgtgagagaaatgcctacaggggtttcaagtcaagcagaatcctactatccctcacctgggcccatctcaagtggattgtcacatcatgcctcaatggcacctctgccttcttcaagctggtcatcagtggcccaccccaccccacgctcaggcaatacaaacccactgagtagtttttcaacaaggacacttccttctaattcgcaaggtatcccaccattcctgagaatacctgttgggaatgatttaaatgcttctaatgcttgcatttacaacaatgccgatgacatagtcggaatggaagcgtcatccatgccatcagcagatttatatggtatttctgatcccaacatgctgtctaattgttctgtgaatatgatgacaaccagcagtgacagcatgggagagactgataatccaagacttctgagcatgaatcttgaaaacccctcatgtaattcagtgttagacccaagagacttgagacagctccatcagatgtcctcttccagtatgtcagcaggcgccaattccaatactactgtttttgtttcacaatcagatgcatttgagggatctgacttcagttgtgcagataacagcatgataaatgagtcgggaccatcaaacagtactaatccaaacagtcatggttttgttcaagatagtcagtattcaggtattggcagtatgcaaaatgagcaattgagtgactcctttccatatgaattttttcaagtataacttgcaagatttaaatccttttaaatcttgataccacctatatagatgcagcattttgtatttgtctaactggggatataatactatatttatactgtatatataatactgactgagaatataatactgtatttgagaatataaaaaacttttttcagggaagaagcatacaactttggacatagcgaatacaaaattggaagctgtcataaaaagacaactcag

SEQ ID NO: 50322 - DNA, 494 bp, Homo sapiens
cgtcgactttttttttttttttgtgcgctggctgctttatttaagggcttgtgattgacagctgtccccatcccagcccttgcttcctctacaaaagcaactgaacatgaaacgggcttcctggttaccatggggaggggggcggctccctgtcagggcccagcccagggacctggggaacggcggctttgaatccccggccacgggcactagaaggtggagaaggagggcgggaagtccagttgagatgggcacggtgctggtgaggaggctggagaggtcctgttccagcctctagtgggcttcccttgtccaggatgtcaggaaacagtcccccaattccgccggggggagccagagccccaaggctgggggggccaggggctgcagggaacacagcaaaggctttcggagccaagtgagatcagttcaggcccctcaggcccaggaacccgacaccaccgcgtacctgtgagcacacactcacggccacc

SEQ ID NO: 50323 - DNA, 453 bp, Homo sapiens
agcaaagagatcctcttccgagagctggaggtgcgacaggttgccctgagacatcttattcacttccttaaggaaataggggatcaaaagttgcttttagacctcttcaggttcctagatagaacagaagagcttgcgctatctcattatcgagagcatttgaacattcaggaccctgacaaacgaaaagaatttcttaaaacctgtgttggtttgccattttcagcagaagattccgcacacatacaggaccattacacgctcctggaacgtcagatcattattgaggcaaatgatcgccatctagaatcagcaggacagactgagatcttccgaaagcacccccgcaaaggcctccatcctcaacatgccactagtgacaacacttttctactcctgcttctatcactacacagaggctgaggggacattcagcagtcccgtcaacctgaa

SEQ ID NO: 50324 - DNA, 1067 bp, Homo sapiens
aaggatcgtcaacagttgctagcatacaggagtaaggtagataaaggatcagcagaggaggagaagattgatgctcttctcagcagctcgcaaattcgatggaaggaattaagtggcattgactaccttgaagcctgcctcatttcctcctctcctgcctgtgaaagcagagagagctcttctttgggagagctgcggcatcacatcgcttgggcccattacccatgggcagtgccagctactcttgacacagataacttcagactgatcttctgtccaaggaacatcatctgaggatcgagatctaaagctttgagtcatgagaatgattctctccacctggtgctcatatgaaggtgggagtgatttctagattggggcccctactgggtaagatctcacttggtctgagaaaagtgactgctccagaaaggaagaggtatgggagtcatagggtggctactgcattccactcagctaattatgatccaggacttggcgctggacattggcagttctgctctgaatgaagtcagaacagaaccaaaatggcctcaggaaggaatgccagtgtttcccaagacctcctggagatgcactcacaccagactgcacagacccctccacattatgccacacacggcctagacgttgtgtttcctcagccattttccctctgctgccccagtttactctgtccaaaaccctaaggttcttctctcacttgaacacagacgaccttgcttgggtgatgagacatcccctttatctcttcctctactgctggccaagacccgtcactttataagaagctcagatgcagcagtgctggagagctctctctttatgcaaaaatctcatttcaccaggagctttcagaagtttcacctgggctaaattcagcagcatttctgttaggatatttagatggaggttttattttcacacttggattcttgctctgtaccaatatttgcctccttttctgtgactgaactgggtttttctgacatgcctagactcctaataaaggtatttcttccttggtgccttcaaaaaaaaaaaaa

SEQ ID NO: 50325 - DNA, 321 bp, Homo sapiens
ccaggggcaaggagagccctggggtcagtgacactgtcaggccaaccatgcactccacaaaggggagcatttggaaatgaaggactagctcctatgtatcaggttaagagcaagggagagctggccagggacagcagtttgcacagcagaggggaatgtagcaacagcagggcctcctaggccccatcttccatttcttaggtaagaagagcatttcctcagactcccaggcggaggactgagcctagccttcagcaaccaaggttctcctgggacccaaagtttatgggagaagggcaaagacttcatgggaagagagaa

SEQ ID NO: 50326 - DNA, 446 bp, Homo sapiens
tagctataagcatgcaataataaatctcaaacactgatttggagtacagtagcattttgtcttttatgtaaatatctctatatctgtttggaatttcaaaagtctgatctctagggctgacatgagaactccatgtcacctcctcagatctttaatctggaagtgacaaaaggtaacacagtgcacggacctttgagctatcatacttttgccttctgctcatgaggggtgtatcaatttccactcccacaccctcactgttatgtgggaccaaaatgtctggtatactatttggcgattaaaatatttaagcccagttttcaggtactacatctgtaactagtgaatactctgttgattagaaagttaatttaccactcaaaatggctaacttgaatggaggaagtagtaaactcttctattaggatttgggccagtgttttttg

SEQ ID NO: 50327 - DNA, 656 bp, Homo sapiens
tttttttttttttttttacaaagcacagtgtttactaaaggcacaaagtgaggggtcggagggcagctgctcttccggcagtgacccctcccgcttctggcagcccccgcgctcacaccacctggtggagagctattagcaccaaagtggggggtgcccacctgtgggagagccgaggaccaggctgcggggtggacctcctgccatctgagtcccaaaaaggcaggcctgagcacccccaggaccagttgcctcagatgaggagcttcccgaacccctcaagcatgtccttcactggtaatgaggggctcgggctcagaagacagggaatctccaccaggccctcttctcacctctagaacaccctgcccctccctgccccgcgattccatctccgggagaggggctgaaggcctcttcccactgcgccagtcaaaagggctgccctgggggtgcttctcctgaccccacaggctgccagacaggcattaagtccaaacaggggccaacggggaggagggaggcagggcaggtggctacttcacacacagtgcagcctgaagggtgggagggaggtgcccctggccctcccagcccccaggccggcccctgttccctggcacaggggcagccagggtcacagcacatcgccctcc

SEQ ID NO: 50328 - DNA, 544 bp, Homo sapiens
tttttttttgtcgttgaaatttggattcaattgcctgttgcacttttacattaagtgttgcttaaataaacaaaaatagagcataaattcaatattctactgtctaaacattttaaagcaatggttatgccatcataaacaagtaaaatgcacctaatttgggtcttttgacacctcttgttttaagtttcctgtatgataaagttcttcacagtttaaaatattgtgaagaaatatatttaactatattcacatacatattatgtacatgtactatgtctttgttgtacccataaactttgaatacgtgtgtatcagtaggataccccacacatatggcaggaaccctggaataatatggttggtgtggactgaaatgatttcccagaaaggcttagaaataagaaaagaatattattatgaataattgtaataacagaaattttaccttatttacatagtggcctatctcccaagagggtaaaatatgccttacagacattttttaggtaactccgtgaggtggggcatgggggacaccatc

SEQ ID NO: 50329 - DNA, 925 bp, Homo sapiens
agttacatatttataatattttttttctacatttattaaccccacattggcagaagatttccttctcaggcacagtcccagcttcatagccataatcccatgttagctctgttcttgctttcacatacctgttggtgaagaatgccaccaatggaaaattcctgttgtgtgtttctacaaaaacattctgtaccaagagatttgggcaacaactatgattaaggaagcggccgacatttccttcttttgtggcatccaataaaaacacattccctttattgaactttgttagagaatcagatgaagtattcttggtttcacttagcaactcttcatcacaaaatacctgctgtctttgacatgctgtagatcgtccctcttggggtttctgaatttgaacctcaattgcctttttaatattctgattatccaatgtggtcgcctggttacatctgctccttggtggagtttcttctctatatttagttatatctatcacatctgattcaatcagcagattatcttcaaactcatcaacatggtttgaacttgagtccttttgtgctcccttggttttagagttcagatgctctcggggtggtttaaatccatcattatcttctggagtgacagactccgaggaaacaaattccatttttttcccattgtgttgaaaaatggctgtcttggattcaggatctctaataactgaatgatactgaattcttgaaatattatcatatttcgtttccatagtaagctccttgggattattactgaactttggtggacatttctcagttttagcagttctaggatgtgtttccaatcctaatgggagaacttcaacttcacaatctgaacatgcaacttctaatttcctcttttttgaaaatatatttttcatagtattctcatctctccc

SEQ ID NO: 50330 - DNA, 747 bp, Homo sapiens
ttttttttttttcaaattttattattttttatttctgaacttatttgttaaagagttgtggcctattacctccaaataagatgccaataaattaattcatgaatactaaataaaattaaagatgctaatggactcttgtgtgaaatagtttagaattcacttaataaatttttagacttaaatctctatctggaaaatctgaacatatcaaagagactacagctggctccttcaaacgctgtagcactaacacctaaaaaaaaaaaaaaaaccaccaaaaaaacaaaaaacacgaggaggttctgggattaggagaacactctttaatgataaagcctgtccaagtactaaggacaattagagtaggcaggtgacctgtacaaagtattagtgataacacaacattcagcttcctaagagttaaaacgtgctgcttacatgaagggagatgatactgagctaagaagtcctggtatagagaagcagagagaccaacctacttcatattatttataaaatagagaatattctcagctaacatgctgggagaaaaaattcttccaaaaaggcagaattacaatcaatgccaagatttacaaattccatcatgtttaaatataaggacaaaaataaacatttcttatttaaaaaaaacccacaaatttccccaactatagcttatctgttagcacttctttatcagtctgactattctttaaaggccttaaaacatgaatttggggataa

SEQ ID NO: 50331 - DNA, 288 bp, Homo sapiens
gcctcagggcatgggatatacttccttggttaaatattcaggaaaacaaactgcctggaggttttttgttgttatttgtttgttttggttttgattttgctttggtacaaaaaaagattttggacatttagaaatgtttctgtgttgattgtgcccttgtattagcaggagttttcttgagcacctgtcatgtgctaagccctctgctgagcactggatacacaaactgtgtttaggatttagcaacaagtcacagatttccctgggcattttttcatgcttaaattc

SEQ ID NO: 50332 - DNA, 1713 bp, Homo sapiens
  misc_feature (1)...(1713): n = a,t,c or g
gactttttttttttttttttaaaaacttttaacaatttattagtcttattttccagtaaaatattcacataatgtcaaaagaatgaaatgatagcgatatagccaactacctttaattaattccacataaatatttaaaatctaaaaacctcagatcagcagaccgagtcgaaatgtgattcttcaaagcaagtattgctttacccttgtcctgaatgcagtccgtcatatgaccactaacttgcatgtgaccaaatgtttgcagagtgttttttagatatgctctcagtgagccgtcatccgtcaatccaagaagaagatgttgttgaactgcgttgcacaaagtttcttgacctcttcatttactttcaatcaggtttgcattttttttgattcaaaataacatagagctcccgccgatcagacttctttccaacaacccagtaatcactcatggccttcacaatgatctcctcatcttcatccactctgggtaaagtcactggttgatggtcaccgagaatcctcattaaatccgggtgcacggaagtgagcgacacgctgggcgttttcctcatgtgaactgtgctcttctcggcgagattcatgtggttgaagtagataaacttaaactggggttcttttctcagaccccggacatcctcttgttgatgttaaactgtttcacagatgtccagaggcccagccactgtgagctggggccccaacgatgctgtccagtccttcggcaaaaatcccaacgttgggtggacagaggcgtcgatcataaagcacacagccgcactcatggccttataaacggattaaatggagctcttcataagtgtcatctgtatttacaaaaattttggggaatctgcattttgcatctggatcattgaggttcaagggtccggtaagaaatcttccatagtgttgaagatttcctggcatttctgctcttattggagaatcccttcctgctaactcaggttcgatgtgccttgggaaaagggaggtggtaaggtatttgtataaaattctcatgtcatcttgttctaatccactccagatgagctgatcgttatagagaaaagcagtgtatttgactatattcaggctttcctccattctattaataaaggactggattttcaaataagtcattttatccaacgggaagaagctgattccaccaaaaatgtcaagtaggtcacatgactgcaaatgtagcgtttgcaaataccgatggaagaatttctctaatctttctttcagaanttggaccctccgtcttccatggctttcagaaatgtaccattaaaaagcttgtacatgctgtagcactgccgcagcaccgagctataaaccttgtccaacaactcctcctcttgatattcaataactggttttccatctttactctgtttttcaattataggattccgaacaaccatgaccatccagaaattttcttctggttcattgaagaactgtctgttcttctgtgtatgtaaagattttgcaggttttgatgggctaaatgtccttgtaaactgtacaatagcttcacacaatccgacatttctaatcttctcattcttttctacctcatttggatgataaaataaaatcttattttcctcctgtccttcgcgcggcccgaagcgcgggttgtagatgaagaaactcagcagcgccggcgggaactgc

SEQ ID NO: 50333 - DNA, 57 bp, Homo sapiens
cctatttaaaaattggcatttaatgactgcccatttgatgggtttggttaatattct

SEQ ID NO: 50334 - DNA, 507 bp, Homo sapiens
ttttttttgggagccaacattttattgaagaagccacagaggctgaaattcaataaacacaagttttatgagtaccttgaagctccagaatgtgctggggaaaggggttgtgatggccaggaggaggatacccttcaaaacgggctgttccctaaccagatagaaatgggaaagggaaaaaattggcagagaaagtctagactctctggcctaccatggagcctaggcccaggcccccaagatcccaccttccccaacccccatgggactggagatttttgtagcttccattggaccatgaggggcatgatgggaggcctgagttagggtgaccttttttgtgagcgtctcatttgaattttatcttcactgggtcatagatgtagcagcccacatcgccagtgttcacacctcagcatgactcccagcagtcagggtcttgtggcaacgctggcacctcagacacggtcggtgcaaatttctgcctaatgacatcaccttctcagc

SEQ ID NO: 50335 - DNA, 409 bp, Homo sapiens
attagaatctttcaaactaattgaaaacaggaagactatcatctaagtagccagataatctgggtttcaaaaagttattccatggtactggtttaaaaaatacttttcaagtgttttaatttttaaagtgtaactaattcttcaaatatgttatgctgttaaaatatgtattccataagtactttttgtatatgtattcttaaattttaaaaagtcaactgaatgcgcaaagatgatataattttggatgtagacatttaaactagattcccagtcctctccttcaaaagcttggtctttgtttttcctatagggaaaaaagtccaaaattaagtttccaaaaactatccccaaagtaagtattgtgcttgtagtaaatgaaggttggatggatggatactgacaatgg

SEQ ID NO: 50336 - DNA, 869 bp, Homo sapiens
tccttgcagctgggttgcacagcagtactgcccaaatgagatgcccctgcccgggctggtgccaacattcagaccacatggaaggaaaagtgttctgtttattggtctggcttggtctcctgtgcgtctctcagaatgctgctctgcccttgtgggctcaggggtcgcagtggtggtcacactggggcctgcctctgctgcccacctggaagtggcctcagtcagtcttcctgaaccctgtcagcctaaacttctggaagagggggatgaagccttggaggacgctgtggatacggtacactagtccgaagtagatgccaacggtttccaggggaggcgaaggtgagcaggccgaccccaagagacatgaaccagtctgcgtaatagtgataacacaccagcaaggccccgatggcaaagcacaggaggacgaaatggaaaaactcatctccatagagttgaagctcatccttcaaaacgtcaggctccccatgcccaggacctgaggaggaggaggatgaagaagatgaggaggatgaggaggaagaggaggaggaggaagaagacttgtttctctcatattgttcttgggaaaagagtccagccttcccatcttgcttgtggaaatctgtctctccatagtctacatcttctgtttctctgtggacttgactgttgtcctgaggctgggaggaggatgctgaagtctccatggcttttctcttagtttagctgcattaccacattggaaagagcaatggaaaggagtccgacacatgaaacaactgtttcctgtgtatttgagttcctgtggtccttcagcttgtctgggcagcaaggggagctctgtgtagactatgtggatgctg

SEQ ID NO: 50337 - DNA, 404 bp, Homo sapiens
aaagaactaagtaaatcaataaagataatcggttctttaaccttcttaaggagtcaacaggaattagaaattatttgcagtttcagacagaatagtattttgtggtatcctcaggagcaatcttgttagataattaaatcttaagcatcaatatcatttcctgctctgagttcaaataatatggagaaaataaagaaaagggatataagccaggcagcatactatgccagaggctgttgctgggcagataagtgtggtgaaatataatgctgatttaaaattgtatagaaattgtgaaaaatatttgtaatattcttgcttattcacaaaacactttgttttagggacttaagttctggttactttaaatcatcctcaggccatacttaacatgtgaaaatgct

SEQ ID NO: 50338 - DNA, 521 bp, Homo sapiens
cggacgcgtgggctccggcgggcatcggaggcagcttcttggcctctgctgctgtgtcccccagtccccccagcccgcattaatgtcctctggaataagagcctgtggctgaagcagagggccttctgggagagctctccaaggtctggaaggagggtcccccagaaggagctccggggtagccccactgtggcccccctggactccaccagcttcatgcttctcagatgctacccaggggccggcccggggagaccagggcagatttctcccgcaccaggctgtggaggtttggagggctgcctgagcagacactgtgccattgctggggctggggaaagaatatctgagacgacgtttgggagcaatgctctttaccacgttcaccaaatcgtctggggcaggggttgtgagctgcagcagttgctggtgccttgtgggaaggtggggcagggaggaggctgcccgccacctctgcccccagtcacttcctgcttgacctgactcttcacatgtggctg

SEQ ID NO: 50339 - DNA, 355 bp, Homo sapiens
  misc_feature (1)...(355): n = a,t,c or g
aagcgatctgaacagacatttcccaaaggaagacatatacatggtcaataagtatatttttaaaatgctcaacattaactattcatacnnnnnnnnnnnnnnnnnnnnnnnnnnnnnnnnnnnnnnnnnnnnnnnnnnnnnnnnnnnnnnnnnnnnnnnnnnnnntgacagccgtggtggttcatatctgtaatcctaacactttgacaggccaaggcaggggaattgcttgagttcagaggtttgagatctgggcaacatattgagactctgtctctaaaaagcatattgagactctgtctctacaaaaaaattttaaaaagtaaaaattagctgggcgtggtggcacatgcca

SEQ ID NO: 50340 - DNA, 1614 bp, Homo sapiens
  misc_feature (1)...(1614): n = a,t,c or g
agctgtcttggcttgaggtctgtttgtgtttaatcagacaatatgcaaagtatttacaaccaattctggatacccccccaccccccgcaagtctgggccttggaatttcggagccccaggcccggcccagagccaggggtcccccaggcctctgcatagtcatctgaaatctacaaaacactgttaaaaaaaaaaaaaggacagtattaagacaccttacacaaagggccttaggcagttggagagggatttgagagctcgctggggtgagtgagcccagatttgactggaatggacgggagaagacttgggtaataaagacgtatgaaaggaaaagttgaaatttcataggcaggcactgctttggcctccttccccactggcagggcctggctggctcaagaacccctggcagtgggaatgttattgctatgatgagggggccatggtgaaatgtacaacatgtttgggggacggagcgggggggacatttttacatgttagatattgacgcacatggagacacgcacacatgcacacacatacacacacacagggacccttggcaagatgccacaaactgtcagctgcccctttacagatgggcacactgaggcccagggagaatccaccacacacccaaaggccgaacagagccagagcccagtctcctgatgtcccagggctaggctcaccatgtgtgtcctgccacagggcctggaccagagctgagcagttgcagagccatggccacatgtggggcagactctgcagcccagagagacagcaggggccacccaaggttacacagccagtcctggtgcatggcagtgggtaacacgtcctctttcacccccgcttaggcactcttttccctcctcatgagttaaagggtgccgacttggggaggagaacagggccaggaattgaaatgccacgggacaaagtacggggaaggaggccaggaccagggcctcctggactcttggctcttctatgtctgcttgattgcctccagagccgaggggctcgctccctttcatagccggctggctctgaaggtcaaacatcacccacaagccgattgaagcctctctctccacacctgcaccttttaccctgattccccagctcagccccacatctgcctccatgctgttcccaacagctgggctgagcgggcagcggcagtgggaatctgccatctcgaatgcatcctcagaccccttgtttcctgggctgtcccagtctttccatgatgcctccagacggaattgttggttcctgaggatgacagagggagcaccgggttccaagcccgcctccactctgaactgctccgtggccttgggcatgtcacatccccgctctcaactgtctccccatgggtgaaatgggggcaaggaagtgatgatctcgaagggtccctcaggtctaaggagggcagggtttgagggggtactcatcccacccacccaccatcatcaggccaggcaaggccttgtgctgcccagcctggaagcagcggcagagggtctgtcntcgcagcctctgcctacaggtgtttccagaatggntggcaaggggcagggtggcaggcantgcngncagggc

SEQ ID NO: 50341 - DNA, 1032 bp, Homo sapiens
ttttttttttttttcaaaaatatgaaaatttatgaaaagacgaccaggagtggttattttccatttctactaagatgcaaacaagaagaaatgtttaaactgcaatgagtcaacatcagacataataattatttgctgcagaatgaactagcaacagagtttcggaaatctcctctcactacagagcatgaaatattgtcaatcacaaaaccaggatcagttaagaacagctcagactgcaggtaacttataagctaaaaaacttgctaaataaatggcttttcccccaatttttaaaattctgaattcataattatgtgtagaataacaatcaatttataaactgaatacaacatactttaaaaacagatggcccatatctgctgatcctacctcagcatcacttttctaggtattttgcagaaacaattacatttacaaaaggcccatttcataatgcaatctggttactaaaccaaatcaaactactcgaagagcagaaggtctgctgttgaaatattgtaaaatacctttggaaaaacggtatttatagattagcttttttaaaaagggataaatatgtggaagtaattctagcatatccctgaaaataattatactgccacctatgcattttttatgaggtggaaggataaatcaacagactgctagattatacaagccaattattcctgttgaaatttgggcataagacaaagggactttctccatatgaattcttactgtatcccagaattaactggtgcccagcagtatcaatgcaactattactggtgatgatgtcatgttatgctgttttgattatgaggacaaaaatgggaatggaaaaaagaggcttggaaaggttttcggtatggtttccttataataagatttagcagttaaaaaaaaaaaacaaaaaaaaacaaaaaaccacaaaaagaatgactgtttaagccccactgaacacattaaggtcaaggatttcaaaagttaatccacttttcttcccccaagagtttatttttggta

SEQ ID NO: 50342 - DNA, 418 bp, Homo sapiens
  misc_feature (1)...(418): n = a,t,c or g
ttgaacnacanctatgacatgattacgaatttaatacgactcactatagggaatttggccctcgaggccaagaattcggcacgagagtaggtagagtggccaagagatcagcacaacctttgcaggctgacttgctaagtctgacagtgacaaacttgtgagcttactgcagtcagtcacagaggctgttctttttcacacaccccttcatgcccggctttccccatatccacatgcagagggcgagctcataaaactacagggaagcgtgaaatgatggctttggtagctgtttactgggtaaccccactgtgacactgcccttttcatgtgatgtggaaacctacttcngccttcaaaccatgaaatgtgcatctanactgganaagtacttgagtgctttgccttccganatgcc

SEQ ID NO: 50343 - DNA, 552 bp, Homo sapiens
tttttttttttttgactcagcaagtttttattatgcacctgtgggtttgtgacgatgccaagggatcagaggaacaaagagagaggatgttgctcagatgggggtctcaacctccagagcaaggtggacacaaagctccagccagctgcccagcccctggggtgggagggaaggatcgaggggtagctgttgtcagataaggccaaaggtatcagtggccaaaagggagacaaagatctcctgggtgcagcctcctccaccactgtggtgaagggttttgggctggagggttggccgacctctcctgagagcacgttccccctgctgctcctgctgcatgggcattcaacctggggtttcagttacattacccagggaggatttccaaatccagaggcaatgtggccttccatttcctgaggtgccttggttggctctggatcagtggtggggactcaagagacagcctccctgtggcttccagcccctcacattccctttgtcgctttctccttcatgatgtggttttacacagaaaaacactctgggtaa

SEQ ID NO: 50344 - DNA, 281 bp, Homo sapiens
tgagacagtagaaatcatgactcacaggccagcaagtatacatgtttttagagatgaaacaagtgattgcaaacaggccgggtacatgagacagcctgctgcaggcacatgggggtcatctctggctggcaggaaggtgagggagtcctctcttctctggtcctggctgactctgcctcagcaggacttcacttgaccattctcaccttctgtcacctcatccttaaagtgacagagtaaattaactctaaggccccatccaggactcaagctgtgtgatt

SEQ ID NO: 50345 - DNA, 343 bp, Homo sapiens
gagacattgagaaagactctgcaaaaacaggaagccaagccacttggctggcttttcaaaatcagctgggcttctgtgcgcaggatctccaggctgctgggccctgggagctgggggtgtttgcagtcctctgggttcaggtgctggtgactgaagaggacacacgtccccttgctgccagccgtcttcctgtgtttcctgtgtctggtccctgaggggcgtctcccgttctgtgcagccacccagggatgatgtggtgttaagtacccttttgaggtggggaaactgaggctcagaatgctgtgctttctcttggggatttcagctgccgtggtggaattgg

SEQ ID NO: 50346 - DNA, 795 bp, Homo sapiens
ttgtaaacgtgggaaaattttaattagtgttggaggtcattagattggacccaggtttaaatataatgatctcttcacagcttatttgatgtttaagagcaacttgtgtgatcttagctttgcaggttttctgtaatttatgtagcacaataaaggataaccagttgactgtgttactggactctgagttctcacagctagtttcatctaagcttggtttattatcatttctgctttggatttttttgtgcatcacatgaatacttagaaatccatttgttttcagtgtagtacctagggtgaagtagatgctgcacaagtaagtttaagggaataaaagtcccgacactttatatacatgttgaggggcacgatttaagagactgaaacagtttaccattaaactgtttttattttctgccagtagactctatctgcttaaaaaaataaaaattgttcaacccagtgttctccagcatcaggacattacagttgtaatctatgttgtaatcttttcaaataagaaaagctactccttattctctacagtgtaggcttaattttagaaccgataatttactatatctgcattattgatatttttaagtagtagttttaaaaataattatttctatgtggagggtgttttaatttgggattttttttttcttgtaacaggtgctatttgtaaatatgaaggggaaaagtcacttagttaaaagtctagcttatgtcataattaagatacaattattcatttcatgtttgattctattaaactagtggcaaaacaga

SEQ ID NO: 50347 - DNA, 2747 bp, Homo sapiens
  misc_feature (1)...(2747): n = a,t,c or g
cgccaccgcccatcagctgagaattgcagctgagggctccggggtaggtgggtgacggcggtcggaggtgtaggagggagccgtggaggtccaggtgactgcttagaaaactgcacagcatctgatgaaattagcgaataagaacatcaaccatgtcttacactccaggagttggtggtgaccccgcccagttggcccagaggatctcttctaacatccagaagatcacacagtgttctgtggaaatacaaagaactctgaatcaacttggaacacctcaagattcacctgaattgaggcaacagttgcaacagaagcagcagtatactaaccagcttgccaaagaaacagataagtacattaaagagtttggatctctgcccaccacccccagtgaacagcgtcaaaggaaaatacagaaggatcgcttagtggcagagttcacaacatcactgacaaacttccagaaggtccagaggcaggctgctgagcgagagaaagagtttgttgctcgagtaagagccagttccagagtgtctggcagttttcctgaggacagctcaaaagaaaggaatcttgtatcctgggaaagccaaactcaacctcaagtgcaggtgcaggatgaagaaattacagaggatgacctccgtcttattcatgagagagaatcttctatcaggcaacttgaagctgatattatggatattaatgaaatatttaaagatttgggaatgatgattcatgaacaaggagatgtaatagatagcatagaagccaatgtggaaaatgcagaggtgcacgttcagcaagcaaatcagcagctgtcaagggcagcagattatcagcgcaaatccagaaaaaccctgtgcatcatcattcttatccttgtcattggagttgcgattatcagtctcatcatatggggattgaaccactgaagttataaaggagcacactgtcgcactacattgtctaaattatgtaggaagattcctgtaatcatgtttttttaattattattttaaagctattgtataaaggatggttcccatactttgttatttttattgggggggttggggtggttcctttggattaaatctgatattttctaatactgaaagattttctaaatgtcactgctgacataactcccttggtcttcaatttaatagttgttaagtttctgcccacattgcatatgcctttcatttataatttatttaccctgcttgacttagtttggggaattcggaaatttaaggtgtgtgtattctgttgggatctccctgccacgtgaacacaccaagatgtgtgttacttcaagttaaaactccccaaaatttaatttttgatttgcttccaccaggggaaaatattctccaataatgtaaaataattaaggtccaatacatgggttgtatttttctggttcacaacagcacaaagtgtctttcatttttttgttggatttcctttaagatcttttttaccctgaagtcggtgaatacttttctagtttatttgatactctttctgtgtatatattaagcttttgctgtagattgcctagtaaaattactaaggataggttgtttttacatatggtctatttaagtctgatgtttacgggggaaagtgtagttactaaaaatgtttaacataatttggaagaagagtatgaacaaccaataccaatacctattgcgtttggattcttaagaccccagtttgttattccactaaactagttatcttaaccatatcatctggttttgtgggccattatttaccttcccttatgtcttatagaataatggttaatatttttaggtcaaaattacttttggaaagtaactttcccacaattaactgtttttgagcacctgacaaaatttagtgtttaccttgcgtgccattttgtgtcatccttcattaaaaaagcaattggaggtttgccagttatctcacttccctttttaaatcaatgttgttttaatgcactaatctgaattctgtaaagaggattatcttagtttatactttgtattttataatgttcttgtatagcagttcggtactgaaggcggtgtttaacttggcaagctctgagacttcaaatgggaacaaatagtaagtagctaagtaaaccacatctttgcaaccaaaataaagatgagttaaaaggtatctggttaggcctatttcatgaggactatgctctgggtggggaccacaggtcacctggatacttagtgctgtgctgcctgaaacctcaggcatggagacatcaccacatgcactgtggccattcagcatctttctggagcaccagttcactccaggtttttattttagggtgtcatcgattttacctactttgtcagactggtagaagttgctttgcatatccaggaaaaactccatttttttccacaaaaggcattacagaaaactcttttgtgagtgagtgattgggaacttaggagactcctgttgccagaattcagactgccctaggaacaggatgggacaatggcaggggagggagaatttcacacaaacaggcacctgttctgagggctgtgccagcccaccagggctgctcaaatgtgggtctttacttcaagtgcacaggggccctgagggttctggtgataaaccagcgtcntaccnttgttttaaagtcccttcccatggttttcacattcagttccntttttttngtcgatcttgtaaaatgtttt

SEQ ID NO: 50348 - DNA, 310 bp, Homo sapiens
  misc_feature (1)...(310): n = a,t,c or g
gacgaatgctgcaatacctaactgtgaacgatttactcttcttaaaagtcaccagccaactacatcatctcagcatcaaatgtgccattcacgtgctgcatgtcaacaagttcaacccccactgcctgcaccggcggccagctgatgagagtaacctttctccttcagaagttgtacagtggtccaaccacagggtgatggagtggttacgatctgtggacctggcagagtatgcacccaatcttcgagggagtggagtccatggaggcctcatttgtnagtgggctctctggcctagnccacctgcctt

SEQ ID NO: 50349 - DNA, 619 bp, Homo sapiens
gatgtttttaaagattgaaactttattctgaaacatcaggctctaaaaaattccatcattaagatgaataaatgggaaatggtttatttgttacttcgtaagcataaatgggaaatgttggctgttagaaaatgtgcccagttctttaaaggtggatgttctagtaacactggattaacaagcaaacaaaactgcatgaagtgaacgaatatttcattggataaagttagcataggttttatctgctgggtttaattctcaatcccagaaaaaaatattcttcaaggggtatcagttatagtttcaaagaacaaaatatgaaaatattgtccagcaaagcaaatcattgatcttttttcaaaattacttatattttggaaagtctatatagaatatccacaaatttcttcagccctcttgttgatttcatattttcatgaaactttttcccctaataatttgtcttcgctctttaatcagtgctttactacattactcagcctgaaaaaatatcttttccttcatctgacaatgtggaaataaagaactccatttctgtcattctggttctcttcagtgtccattgagaaagtttctcaactgtttgtaaaatacgggg

SEQ ID NO: 50350 - DNA, 1046 bp, Homo sapiens
taacagttacccattaacagtcgactcctgtatttctgagagtcttgtactcacctctgaaatttaaaaacgtataaagagagcctgggttaatcagttctgcagcccctacgtgacactgtgctagttctccttcttctgtctcctccttaccctggccctgcacccctgtacttaagagggagaggtgggaggtgctgtctggtatcatttgctgcctcgccagtagagggtgccgctgtgcagggtaactgcccgcctgctcccttcctgacctcccctgaccccgaagatcactacctctgtcattcaggcattggggtacatcctgataagtcgtgtcagaactgccaatttcaggactgagatgtgtttttaaaaaacaaatccttataaactccactttgtactttagattttaaaactggggaaaaatgtgatattctttggaccacttttttaatttatataagccttaatgaacagtgtctatacatttgcatacacacacccccaccccagagtgttctcagtatgtcagagaaagtgccacagcattaggacgggagcttggagaacgttttctagaaaagggttagcttcctgttggcatgaaattttccaagcaaacctcattaaacatctgttgtttgttaaagatgttccactgaaagcaacgcatgtttcaaaggcacgtctttccgttcgttggttttctgtgtgtaaggagtagcattgctgttggcgcctaacctcgcgtgcactgcattctcaaccccgtaccagtgcatcatcagaagccttcctcgtgaccataactctgtgtctgcagatatgtgttcccgtgtaagccagttttccccttttactcagactgatttcacctagattgtcacggtttccttcatgttaactttgcgtgactttgttcttcctttactactctgtatgtaatatatatacatatatacgtacatatgctgtccaatatatttgtatatatttgtatagcatttttacacctttattgagtaatctggtttcga

SEQ ID NO: 50351 - DNA, 2144 bp, Homo sapiens
  misc_feature (1)...(2144): n = a,t,c or g
tttttttttgtcattacctttacgattcctatttattaaaaaaaagactggtaaataagcctgtgatacagaaaaactggtatattgttgagtttcttggcatttaggtaattaaatttttttattgttgaaccaaaaaaagatccaatgacaaatccatataaatgtgataccatttacaatttttaataaccataaaagcaccattatataagacacttaaaataatttttcacagaacattagaaagaagctgttggccaacaagaaatagagcatacgtcctctgtggtcttgtctatcatgatctcacattaaatctgattccaacctgttggaaattaatttggattcataaattcagcatcagtataagaagacattccagagttgtgaggacttgattgtcttaatgccacataaaacatcaactgctcattttgtaatgagcatggcttttatatatccctgtatgacctatatcctggggtgcctaatttcttgcactcccaaacatttgagctgccgactaattacacatgttaataggcataattttagaagtcgtttattccttttaaaagttagtgttttatgaaggcaggcttattttatttacactattagcacaacagccaaaagttattcaggtttaatcctgctgaataaagtagtaaaaacacaaggcgtgactttaaataatgacactgatttccctcagtagctcctgtagctattaaggatttgacagcatttttaacaatgatacatcattaaaataaagaaataacttcccaaagtgtctactttgaaggacaatgttcccttagatgtatgctttctggcatattaacattaaaggaaaatcagtatcataagagtcgcacatctcacatttttagatacatagattatcaaagtagcaatggcactttgataagtagcaatgcccccccaccacttctctccaccttcccaacgtttaccgatggagatgaatttcctgaaaaaataaatagatcacttcagagctaaatggtactgaagcttatatataatataaacactttatttcatctatgaacctatgtaaatatattcttgggtgtgttctcaagttttggtttcaaattcttaccctagagaaagagactgtttactcaaatctgcagaattcccagcatcagaccatgcatatagaagcactttaacaaattttggtgaagaaagtgaatataatgactttgctcagaaacttttgagttcagctatttacactggaattggagctctgactaaaatgcaacaaaaaataacaaaaactgaagtagaaactgacttaggaaaattctgcctggctgtaagataggcctctaatatccatggtgacaaccgccccttctgtgataggagctctcatttgtaaatccaccgtgggccctccggtttggaaactctgtgtaggaattccagtatctggcattgttggaaggcaatgcattattcctgtcctggtttctgttcattctgcttggcttttctgcatgaagcacactgtgaaaagtaacatcgtgttcataccgttctttcattcggtggattttttctcttgagacaccatgaatgtttcttcatttctggcctgaaaactaccatgtccatttccagcctgaaaagattcttttgttcggtctgaaataccatgactgcatagggcttcatttcccaggcgtggaggttggtattatcaataataatgggggatatnccattcctcattgcttttcttgctcttttttggttccattcatgagcttcctccaggaagtcaggattgaactcataggcaccatcttccctgaagaaaaaatcatccgtgctgaaaatcagggccctgggaaagtcatgctgcaattgtctggccagtgtagttttcccggagcccggnaggcctcgcaggaggtagaggtgtttcctaaagctgtggcggcgaggaggtgtcccccgcgggggcgccggggcggcnctgncgctgctgctgctgctggggctgggctcagcctcccaaaagattgaaggaaactgtcctccatgggcaggagggctggctgcgagagccccgggttcccnttactgaagtcacg

SEQ ID NO: 50352 - DNA, 2364 bp, Homo sapiens
ctgtagagaattatgaggagcaatagatctgcaaataatgaggactgatgtaaaaatcaatagaaagcattttgaatatgatttaagagcatgtgaatgcttttagatggaatgctgttcccttgaagttatggctgagctgttcttagaactggtctactcaattcacagaaaacataggtcatgccttatctatgggggaacaccctcccagaatttacctgtgattacctgtgctgcatattactttgcaatggcctcatctcagagaatgaaagagggtcacattgttctgaaactctctgcagtcttccaaccaccacaaggccatggatgtgggggtctattccagacagacttaagggctcaagtggaacctgccatctcccattccactgaaggactgtccaagagatttagtgcaaggtacactgcagtagtgaattcccaggcacttgaaagtgactgcctaatccctacaattactagccttgttggagattatgcagcccacaagtacagactagtataaagcaaaaggacaaaggaacccccaccctccaccccacccattaatgacttgagtgggcaagaagaagtgatggccttccttgcctaaaacagtagctttgtttttagggggtgggaaggtaggatgtggagtgacatggttctatcctttacttatgagactcagaaatatatctacaaagccagatgctctgtcttcatatttgcagacatctagaccccttgctaaaaacccactgaagttttttttttatgttctttgacccacaccatcaacactaccctcaaatctaattgccctacagcatattctatcatgtggactaggttcctggaaagccggaactcatgattctttttcaaactgccagaatagaagggagagagaaaacatttctaccctttgatcaccagtgtgaacagaatccggaatgcagtttcagcgtgacctgcagtcattcatgttcattggatttgacagatggaaacccaaggttatcgaagattggaaggttatcattgtgaagaagtagctcaaaggactccggtttctgtctacaagtgtgatgtctccatgaagaagacttagtatggatttgggtgggtaagaaagcatttaaacgcccaggaaaggacatgattaaagttgaccttttaatactgtagtaccttgctgttaagtaaccccactattgtatctgcatttatcttttgttcatctactttcacttacatacagtattatataagtagagaaaaatgggaaaatgcaagcaaattcaactttattttatacattgtatatatgtacaccctacactattcatttgggttttattaaagagatagtcacaaagggcttacgaaaatcatttttgaattgataattagaatattgaataaggcaatcctatgatccactaatttgttttatcagttaataatattaatcaaagacatttactgtatattctagtcattttgatttgagttaaccccaaatataaaattacctgtagtgatgtctctctcccagcccttatatgtggatattttttaagtggacttgtatgctgataattctagaccaaagtaaatatggcagaatatttatacatgaaaaaataattttgcaaatattttctataattgtattcatttaaaatgttgatagcttgtgttagtttcagggaggggtgtatattttgataaaaaaatacttgactttgtaattctgtatattctatacaatttatagcagagccgttttaagacagccttgtcacatttttttgttaattgtgaaaattttattgagtgatgtttaagtatgcattgagtacatgaccaactagaattaaagtaagtgtaaacagtgaacatactgtatgctgtacaagatataatgtaacttgctgttttagcatctgtattttggttagaagatattattaaatgcagatgttaaggattggaaaagtctaattttatttttagaaataatggatataaatttgtttttgcttgattaaaatagcttattcctacattaagtctctttttaaatgttttcatgttatttcttttgtgcagctatttcatctgtgtgagtcacagctttgtttccacgtattattcagtttatttctgtttccttacttgtttacattccgtggtacctacttacatgcttaggagtcaaatggattatgacattaggaaaaaagcagaataaaagagattgaagtcttctgatgattgagtgttttggataggcctgatcttataatgataaatcagagaatgaaatgctctccaggaagcattctgctc

SEQ ID NO: 50353 - DNA, 448 bp, Homo sapiens
tttttttctgcaacaaactgtaagactcttatcgcaaatggaaagtgggtttcttttaaagatgaacaacaagagacgagcacagacaggatcacatgaaacgttactttctgcttcaggttaaaggactcctcctcacccacgcttatcaaatcctccaccatctttaacattgaagaaggatctcctaaatttatattatcagccaacaactcaatcatcttctgatttgctacaccgattagttttcctggctttgtgcttttaattacattttcaagagcttcttcccagcctcttaatagagggtgcagggagcagattcctgattttgataaatatatagcaattttcatctcagcagattccgtatcatcattattgataaccataaatggcagcagacatacaaccacctgatttgacaactgatcattttcactcagta

SEQ ID NO: 50354 - DNA, 1410 bp, Homo sapiens
tatgcagctaaatttattctcacaacaaattacatttaaatgtgtaaaagtggtcaacaggaaaagggcataaaggaaaacaaagcgttctttcaggggaagtaagctgctctggaggccaggaactactgcttgcgttgacacggtgtgagtgggtatctttgccctgaagctgaagttaaactttctactggccgtgtggcacacagtttagatgtgtattaggttaagcctggccaactagagagcgaaggggcttattagttaaattgtgctaatatcagttaggaaaatgcttgtcatgttgtggtgaaatcttgagtttgtgttgcaatgccctgggacatgaacgggccatacaaacagaggaaagctctggggcttccaggcaatggccttgtgtcgagtcatcttacaagtgtccatcttgaaatcataaagtggatttaaaaagaagtagcagtgcccacagtttatcaccaagaacttattttaatggaaatgggtctaatgtcccttcatgcaacaagacagatgaacaaaaaacaatggtcctaattagctatgagtgatcttgtatccaggtggaaacaaagggcatgtgtacatgtatatatctcttagatgaaatcacacatgttgtgaagggtagaaaaacgaagcaccaagcagtgctttagtctgcaaaggaaagtttttagccataggcatgttggctagtcgttccccttgatgttgccaaggagcagatgtatgaggtggcaagtctgtgtctatctagctgcttttaaaaaataaaaggaactttaagcattttgccttttcttctacatatcccaatagaaatgtgactacaaatcattacaaaaccactttttaggcaatgtatagttcactgagattacttagatctggatacactgggagataatatccaggaaagataatacattaacacaataatgcagtatatttcagtaaaaatagaataaataaaataaaaatattttaagctgtatttaacaggttaattaaaaatatggtaagacatagaaggcatcgtgaacatggctgcctgtttaccgaatcacagatctaaagaatgcatagataactgaagtgtcactaagatatcaggtaaaacattggcatccttttacaaacaaatacacacatactttcatacatactttttggccatggcagaaagtgtctgaacatactctttaacataattttacaaaattaatttgcatttactatacaatgccattttcaaaacaaaacgtctgcaaagttttcaatatgtaaaggctatcattcatcttaatgcatcctataattgcacatataaatcagtttgctacttaaagctagctcagaattcttgatcttgaaaacaagcaaatg

SEQ ID NO: 50355 - DNA, 1880 bp, Homo sapiens
  misc_feature (1)...(1880): n = a,t,c or g
tcagtttaatgagacacaaactctcaactttttatttaaaacagaaatgcagtagtaagctaaaccttttgccattcatagggaaacaaatatcagtaatcctctttgttctaaacaaaaattcataattatttatacattttaaaatattatattgtttcaaatgttgttagtggggcaataaatcataaagagatacaaccagtcgaaattagacttttaaagaattactctcaaagacattgcaacaactccaaagtccagggatcttataagactaatttattagtaacaacatttacaaagatagctttttaatgctgagttgtatctgatttaatgcagtcagaaagaaaaaagaaacatttatctcattttgctgatctgtcagattttgcttaagttaggagagcctgcaatttcaagcccagataactggaattccatgaataaacacagaaagacaggagaaaggcaaggaagttcaaaaatcacagtctggggggaaatcagtagagtaagattaccaataagtgaaatattggtcatatgatttcttagtttccattagttatgcaaatattttactgttaatatttagattagtgttttagaacgttttgtagagactgaaaagcaaataaataattggcattagcattgttaagtatcagtgttttctgtttgacaaataatcgtacagctgtgttctcaggctgcaataacaaaaccaccagagacatgagaaacctnaaacaaacaagaaatttgtttctcancagtctggaggctggaagtccaagacagagtccaagactctcgccagcagcgagagtttgattgtgaggcttctcctcttggcttgtaggtggctgccatctctctgtgtgctcccatgccctcttgtttgcatgcacagggagggagggaacaagctctctggggtctctccctataaggacaccaaccttagcagatcagagccccaccatgacttcatgtaaccttaattacttccttagcagccccagctccacagtgcaggttggggcttcaacacgggaatttgggggtgaagggtgggacacaaacattcagtccataacaatggcccaccaaaccatgaaagtaaatagaaaaaaaatcacagttcaagaataacataaaacttaactaggtgtgttatagagcaatgcatagaactaagctgagaagttaaaacataaactcattgatttttaaagacaatctttcccaagtctggttcaccttagggctgatacacaccttcagaaccagattttggtctctaatatcatcttccactgaaagccagggcaaacaggtttatgttcatttcatcttggcctataatttctccttaaagtgaccattaatattcactatcacaattaaggcttggtctgggccattctgagaacaagctctggagaccacaattttaaaggattaaataatcataacggtattctttgtcctgacaaaattattaatctgacagtgactgaattatccttcggactctcccaagccctaaatgaatacagcaaagataaatgtcaagaattcaggaaacaattgcttctgctacggccagtaagctcctaacagaccatgcttctgcagaaaacgattctggacaaatttttaaaagcaacaaactgcatgaagtcacttaaaaaaagaagcccagccttggaagaaagaaagcgcacaggctgagtttcttatttttatggcttttacccaaaatgcaagacacagatcggcattgtgcaggacagctaaagttcctttagaaaaccaccatctttctggctggaagagtcaggggtcagaatgcgcgcgggccaccgctg

SEQ ID NO: 50356 - DNA, 359 bp, Homo sapiens
gaaaaaaatggtaggtagtcaatgactgatagctatagacctatgaaactaacatttcctatcttgtctcaatattctgatgtatataatcattttaaaacataataaatttaggccttttttgtttttgtttttaacacaagatatgccactaatgtctgacaagcatttaatctagtggctttcctgcattttccatggatcagatgcattctaatcctctgaaatgattattaaatacagattgccagcctttatataatgcctgctaaatttaccagttgggatctgcacatatattggtaaagagtgccccaagagtttctgaccttctgtctgctttcagaatccacatgagt

SEQ ID NO: 50357 - DNA, 495 bp, Homo sapiens
  misc_feature (1)...(495): n = a,t,c or g
cctgaacaaggagtggaagaagaagtatgtgacgctctgtgacaacgggctgctcacctatcaccccagcctgcatgattacatgcagaacatccacggcaaggagattgacctgctgcggacaacggtgaaagtgccagggaagcgcctgccccgagccacacctgccacagccccgggcaccagcccccgtgccaacgggctggtccgtggagcggagtaacacacagctgggtgggggcacagaggcagaggagtcgtttgaatttgtgggtgggtgtccctcactgggcagacgtgggcacttcgaggcttcaacggcggaagagcgggactgtgggttcagagtgtgcagggcccagatccttgccagcctgcaaggttcccgcagtgccaaggacaagacttcgacttggggaaccagaacgcagcttttggcttttgcaaggncgttcgnaccgttccgcggcaacagtttttattttcgattncgat

SEQ ID NO: 50358 - DNA, 584 bp, Homo sapiens
ccatcagtgaagaaggtattaattaaagtaaatgaaaatgccctcatttgttgtaatggatttagctcttgcagaccattttctacggggtcacctgcctggatgatgtgctgaaaagaaccaaagggggaaaagacattaagttcctaactgccttcagagacctgcttttcaccactctggcttttcctgtatccacgtttgtatttttggcattctggatcctctttctctacaatcgagatctcatttaccccaaggtcctagatactgtcatccccgtgtggctgaatcatgcaatgcacactttcatattccccatcacattggctgaagtcgtcctcaggcctcactcctatccatcaaagaagacaggactcaccttgctggctgctgccagcattgcttacatcagccgcatcctatggctctactttgagacgggtacctgggtgtatcctgtgtttgccaaactcagcctcttgggtctagcagctttcttctctctcagctacgtcttcatcgccagcatctacctacttggagagaagctcaaccactggaaatggggtgacatgaggcag

SEQ ID NO: 50359 - DNA, 221 bp, Homo sapiens
  misc_feature (1)...(221): n = a,t,c or g
tcaggacagttgtcctctgctggagagagctatnttggtggaatgcgttcctgagggcagaccacatccacagactggtcaatgtgggggtagaaagatcagctctattataaaggtatagtggttacaccccaacctggtgtaactgtgcacggccattccgccccagaactccctgtgggattgtctcagacctgcgttgagatcatctcctcgcaggc

SEQ ID NO: 50360 - DNA, 671 bp, Homo sapiens
tccacttttttcttaaatgaacatattgtcttataaccagcaaatgaagttttacttttttaatcagaaaaaatttcgtcataaagctatatttttatatttttaaaattgatacagttagataccttcagattacctaagttaagtttttgccaaaatgctattttatgccctttttgtaaagttatgatttattttgtaaatatagttccttatagttttctcttgagtgtttggacatgagaatagataagattaaattacaatttacaagatcacttcattaggcacaggaaaagtatttaacaaaattcaacaccctttcacaataaaaaataaaaaataaaaaaccctcaacaaactaggaatagaaggaaacttcctcaacctgataaagggcatctatgaagaacccatggttagcatcatacttaatggtgaaggactggattatttccccctgagatcagaaacaagacaaggatgtctgctttggccatttctattcaacttgtactggacagtcaagaaagggcaattaggcaagaaaataaaataaaagtcatctaggttggaaaggaagaagtataactaaatagagatgggagacgatatggtggttttgtgcatagtaatccaagggaaaactatagaaaatccaaaggcatgat

SEQ ID NO: 50361 - DNA, 1310 bp, Homo sapiens
  misc_feature (1)...(1310): n = a,t,c or g
tgcatttgtaatttaattttttataacaacttgagataaaatctacataccacacagttcaaacattcaaagtatacaattcagtggttttaagaaaatccagagttgtgccaccattaccacaatcaactttacaacgtttacatcaccccaaaaaagaaaccccatactaattagcagtcacccctttgtcctccccaacccttcagcctaagcaaccactaatctgccttctctctatatatattcgcctgttctgggacatttcatataaatggaaatcatataatatgtgggcctttcatgtctgggcattcttcacttggatatgttttcaagggtttttccatgttgtggtgcatatcagtacttcatctctttttttattgctgaataatattccttgtatggatatgccacgttttgtttattcacttgttagttgatagaaattagggctgtttcaannnnnnnnnnnnnnnnnnnnnnnnnnnnnnnnnnnnnnnnnnnnnnnnnnnnnnnnnnnnnnnnnnnnnnnnnnnnnnnnnnntnnnnnnnnnnnnnnnnnnnnnnnnnnnnnnnnnnnnnnnnnnnnnnnnnnnnnnnnnatcactttgattatatatctattccaggannnnnnnnnnnnnnnnnnnnnnnnnnnnnnnnnnnnnnnnnnnnnnnnnnnnnnnnnnnnnnnnnnnnnnnnnnnnnnnnnnnnnnnnnnnnnnnnnnnnnnnnnnnnnnnnnnnnnnnnnatctcttgttgatttttaaaaattgaattatatgccttttaattattattgtaacagttctttacatattctaaatacaaattcctcccttaactaatacatgattttaaaaaaaattatctcattctgtgggttgtatttttgctttcttgatattgtccttggaaacacaaatggttttaattttaatttacctattttcttcttttgttgcttgtgtttttagtgtcatttatttaagaaatcattgcctaattcaaagtcagaaagatttacgccatgttttctttgaagatacttataatattagctcttacatttagatcttaggtcaactttgagttaatttttatatgcaatatgaggtaggagtccaatttcattattttgcatgtggatatccatgtttccaagcatcatttaatgaaaaagactattttgcccccattgaattgtcttagcactattttcaaaagtcagttgatgataaatgtgatcaatatttctggaccctcaattatattggtattttactctttctgatgctgtcaa

SEQ ID NO: 50362 - DNA, 486 bp, Homo sapiens
gtctaaaattgcttgtagtctagtgaaggacagaggcaagtaaacaagcaactacaaaatgaaatgaagattgcagtgatggggaggggagggggtactctgggtgtagactggggtagggtgggcaaggctgagtgggtgagatatcattacagtggaaacccgaagactgagtatgtgtgagctaagcatgcaccatgaggggtctggcagttgggacggaagtgtactccccatggagagaatgtgcagaagcacgcataaccttctgaccggactgcagcaggcctgggtgacggtggtggtgaaggtggggagtgttgagaaacacaaccagcaaaggatgaaaagggcaaagcatgcattctcttccttaagggaggcttcctaaatgctgcacatgacacttttgcttatagctttttggctagaacttagtcacatggtcatatccagctgcaagagaggctggggaatatagttttt

SEQ ID NO: 50363 - DNA, 1139 bp, Homo sapiens
ggggatgagcccgaactagggatgtgacagagcgcgagacccagcctaaagagagcccggagccagcgtgggaggccgctgccgtcgcgcgccttggtttttctgttccttttttttttttttttttaacttcctgcctatacacacgcagccatcagcccacaaagacatgactaccaacgcgggccccttgcacccatactggcctcagcacctaagactggacaactttgtacctaatgaccgccccacctgggcatatactggctgggcctcttctctgtcacagggggtcttagtcgtgaccacatgggctgttgtcaggtcgtgctgcggttgtcccattggggactttgggcgggcgactgtccctgtgctggtttgcagtgtgtgggttcattcacctggtgatcgaggggctggttcgttctctactacgaagacctgcttggagaccaagccttcttatctcaactctggaaagagtatgccaagggagacagccgatacatcctgggtgacaacttcacagtgtgcatggaaaccatcacagcttgcctgtggggaccactcagcctgtgggtggtgatcgcctttctccgccagcatcccctccgcttcattctacagcttgtggtctctgtgggccagatctatggggatgtgctctacttcctgacagagcaccgcgacggattccagcacggagagctgggccaccctctctacttctggttttactttgtcttcatgaatgccctgtggctggtgctgcctggagtccttgtgcttgatgctgtgaagcacctcactcatgcccagagcacgctggatgccaaggccacaaaagccaagagcaagaagaactgaggagtggtggaccaggctcgaacactggccgaggaggagctctctgcctgccagaagagtctagtcctgctcccacagtttggagggacaaagctaattgatctgtcacactcaggctcatgggcaggcacaagaaggggaataaaggggctgtgtgaaggcactgctgggagccattagaacacagatacaagagaagccaggaggtctatgatggtgacgatttttaaaatcaggaaataaaagatcttgactctaaaaaaaaaaaa

SEQ ID NO: 50364 - DNA, 878 bp, Homo sapiens
ggtggactggattagctgcggagccctggaagctgcctgtccttctccctgtgcttaaccagaggtgcccatgggttggacaatgaggctggtcacagcagcactgttactgggtctcatgatggtggtcactggagacgaggatgagaacagcccgtgtgcccatgaggccctcttggacgaggacaccctcttttgccagggccttgaagttttctacccagagttggggaacattggctgcaaggttgttcctgattgtaacaactacagacagaagatcacctcctggatggagccgatagtcaagttcccgggggccgtggacggcgcaacctatatcctggtgatggtggatccagatgcccctagcagagcagaacccagacagagattctggagacattggctggtaacagatatcaagggcgccgacctgaaggaagggaagattcagggccaggagttatcagcctaccaggctccctccccaccggcacacagtggcttccatcgctaccagttctttgtctatcttcaggaaggaaaagtcatctctctccttcccaaggaaaacaaaactcgaggctcttggaaaatggacagatttctgaaccgcttccacctgggcgaacctgaagcaagcacccagttcatgacccagaactaccaggactcaccaaccctccaggctcccagaggaagggccagcgagcccaagcacaaaaaccaggcggagatagctgcctgctagatagccggctttgccatccgggcatgtggccacactgcccaccaccgacgatgtgggtatggaaccccctctggatacagaaccccttcttttccaaataaaaaaaaaatcatccaggaaaaaa

SEQ ID NO: 50365 - DNA, 1141 bp, Homo sapiens
ttttttttttttttttttgtctctcaacatttcatttttaatttttctaatagtacattctttaaaagaagttaacgacttcaattccaaatataaggattaaataatgcaatgaaaagctgtcattttcagtgaagctattgcctaattaccctggaaaaaagtattcttatgactgaactgatgcaaaaatcccttagaaaagcttcatttgttgcctgtaaagagtcttcttaaggtcacttttacttctagactgcccccttgtttccagtgaaagagttttgcttggtaatggcttgtggttccacagtgttttgtgtatgaaaagcgtagactaagagatactactgaagtcgctcaaattgtagattctgccatgaaaggaagtcccaacactgtaacatttccccttaatcttcagcaagacacatgaaaaaaaaaaaaaaactcaagtcccaactgaatctttactttgatcatcacttccagcggcattcagaggctgctgtgcggtcagacacagagctccctcgaggcccctgtgtgcttatgaagtacctgcaggttctgagcgtcggcgccagcccgggccaggggtctgcagacagaggcacctggtggctgctgggggctccctggggtgagccatggcacgggagcccctaaagcgccaagctcggccacggtcttcgtctctcggaaggcaggggaagaagcagcgctcccagacaggacagagaaaagcctatgaaacaatgctctccagtcaccaaccagttgcctgatcagagctggaatttactgctgggacaagagtgcactccgatttgctttcattttttccagacgcttcactaagtggccgttgctcacctcgagctcttctgttttatccaatgcagagcggagctctctttggagtttccgtttttctgccttaagttcatcttctattttttctgcattttcagccgctgatttgtaacgtgatacttgactctctaaccttattacattttgttctaatgcagttatctcttgctcagattttgcaagtttaaatttgaggtcgctgatctgtcatgttggcatccctttgtaggtccattacatgcatgtctgtcccgttttccaagac

SEQ ID NO: 50366 - DNA, 725 bp, Homo sapiens
gcgaccgctcacgctgcattaccgccagaatggtgcccagaagtcctgggacttcatgaagacgcatgacagcgtgaccgttctcttattcaactcttctcggaggagcctggtgttggtgaagcagttccggccagctgtgtatgcgggtgaggtggagcgccgcttcccagggtccctagcagctgtagaccaggacgggcctcgggagctacagccagccctgcccggctcagcgggggtgacagttgagctgtgtgccggcctcgtggaccagcctgggctctcgctggaggaagtggcttgcaaggaggcttgggaggagtgtggctaccacttggccccctctgatctgcgccgggtcgccacatactggtctggagtgggactgactggctccagacagaccatgttctacacagaggtgacagatgcccagcgtagcggtccaggtgggggcctggtggaggagggtgagctcattgaggtggtgcacctgcccctggaaggcgcccaggcctttgcagacgacccggacatccccaagaccctcggcgtcatctttggtgtctcatggttcctcagccaggtggcccccaaccctggatctccagtgagactccagggttctagacagaggccagtcttggccactcaccccacaccccgcggaccccaataaaggcttgcatagctccaaaaaaaaaaaaaacctcatgccgaat

SEQ ID NO: 50367 - DNA, 568 bp, Homo sapiens
ttggatttcaatcccaactctgccactgagttgctggttgactgaggccagtcactttccctctccagggcctccaggcctcctgggtatataaaatgatggtattctaaggtccatccttccgtctctgacattttgagatctttggaaaggactctatctcatcctcccctcgacaagccaagaatgagaattgggaataagtgaacagagtttgagggtttctgggcggcctccgtgtcacccaaagtcatgatcaattcaggagactgcccaaggcttgcagaagaggtaagggagtgaggcactcctatcccagtctcccaggtttggttgagggctccccaaggcagggcaagatagcggccctgtcactgaccctggcctgtggtggtctgagctggggagggaaggacaccaatgaatcagcttgggacctctttaggccttccccttttcctccaccccgatgctccttagtgatgctctgaggcgtggccacgatctccctcccaggtggtattcgcccacctgaaaaaatcctgagaatttctttccatcttgggcc

SEQ ID NO: 50368 - DNA, 519 bp, Homo sapiens
gagccatagtacctacagcggcactccaggtacccacccagcccagttgctgcagactccttccccaccttctctgccctccccctttgctcactcgtgtgctgtgcatcctgctccgatctccccccaaccccgccgacccccagacgaaaatgcgagggcacatcaagtggcaaaaaactagatttacaagaggaaagaggcgcattgttaaaaatggagattgcattgttgcagtttgcaggccacactcgctctctcttcccgcctcccgccaacctcctctttttcctcctcagaatttgtaccagtgtagtgtctccaccgggcaggattgaaactttggcaaacacgtatccattgcattcatttctttccccttgttttggtatagttttctggaatgaaagaagcctcttgttttacaaacctctttgcatttctaatgtggtttctttcagatttttattagatatgttacttaaaagggaattaagggtttggacagattgtgtgcca

SEQ ID NO: 50369 - DNA, 667 bp, Homo sapiens
cccggactggatcggccagagttactccgaggtgatgagcctcaacgagcactccatgcaggcgctgtcctggcgcaagctctacttgagccgcgccaagcttaaagcctccagccggacctcggctctgctctccggcttcgccatggtggcaatggtggaggtgcagctggacgctgaccacgactacccaccggggctgctgattgccttcagcgcctgcaccacagtgctggtggccgtgcacctgttcgccctcctcatcagcacctgcatcctgcccaatgtggaggccgtgagcaacatccacaacctgaactccatcagcgagtccccgcatgagcgcatgcacccctacatcgagctggcctggggcttctccaccgtgcttggcatcctactcttcctggccgaggtggtgctgctctgctggatcaagttcctccccgtggatgcccggcgccagcctggccccccacctggccctgggagtcacacgggctggcaggccgccctgggtgtccaccatcatcatgggtgcccgtgggcctcatcttcgtggtcttcaccatccacttctaccgctccctggtgcgccacaaaacggagcgccacaaccgcgagatcgaggagctccacaagctcaaggttcagctggacgggcatg

SEQ ID NO: 50370 - DNA, 492 bp, Homo sapiens
tttttttttgaggtgtccttatgagtatatttatgtgtcacacacacatgtacacactcaatgctggacgggagggaggttgagacggacaggacaggaggaggcacccaggtggcactggcacaggggaggagaggggacacagcgagtgtgtggccccactttggccccccaccgcctcccaacaggaggtggacctggagctggaagaacaggaaatgcttattctcttagaggacagtttcaaagtgcagaaatttctcttataaaaatcctcttccctccacgctctgccccttgctgaagcccagccccctgcgcaggctgtccgtgaggctggggcaggacaaggtcaaggggaagggcgtaaggccaaagcactggaagggcccagaccacatgggcctaggcatagtggctgccgggcgtcagggggtggtcccctctgtggtccagctggtcctgtaagcgggcaaactccgccagctcgtt

SEQ ID NO: 50371 - DNA, 427 bp, Homo sapiens
  misc_feature (1)...(427): n = a,t,c or g
ctgaactcaggcggaattctccacgagttttgagcagcctcgggtttcccaccacctccaaatcatggaagacacacggtgcaggcagagccccccagccgtggccagcccttccggcagctccgaagccactggcaagccccgaggcagggatggccggcccaggagggaggaggacgacgtccctcccgaagagaagaggctgcggctgtagctggaggggggaagcgcagaacccgaggactgcgaggacggggaggacgcgccgcggccaggcagggaggagaccggcacccagacaggtggcgaaggcagannnnnnnnnnnnnnnnnnnnnnnnnnnnnnnnnnnnnnnnnnnnnnnnnnnnnnnnnnnnnnnnnnnnnnnnnnnnnnnnnnnnnnnnnnnnnnnnnnnnnnnnnngtctt

SEQ ID NO: 50372 - DNA, 937 bp, Homo sapiens
  misc_feature (1)...(937): n = a,t,c or g
acccactaccagatagactttttcatttcaagcataacttgagtctgcactggggagacactcgtggtgggggtggctgtgatgagggcacttgcgagtcccgacaacagacactggctcctgcacccacatcaccaccatgtcccaggggcagcctggaggggagtttgtggtcagagccccagccaggaaaggagagagttccagaatgttccaagagtctagccgcacgtcccagacaccatgagctggagggtcgggatggggcagcctccctggtgcaatcggcacctggggcccccgggcatgntcaagtgctgtcgtgaggtctgtctgccctggggtcagagcagcaggcagagcgggcgcttcttctgccgttgcgccttcttcagagcgctgagagccaccttggcggcctcccggaagacgtcctccacattctcccgaaacttggcggaacattccaggtagagagcagctcggatcctgtttcgcacggcgctcaggccctgcaatgtaggtgatgggctccagctgggcggcccgnaacttacgcagctgctccttgtccttcctcaggtctgtcttgcagccgatgagcaccatggggatcccgcggcagaaatgcgtgacctcagggaaccacttgatgaggacgttgtcgtagctggtgggattcatgacgtcatagcagatgagcacgaggtgggtgttctggtaggacaggggccgcagccggtcatagtcttcttgcccggccgtgtcgtagaggttcagggtcacctccttgctgccaacggtcacgctggccgtgtacttctcgaacaccgatggggcgtagtgctcggggaaggagccctggctgtacaccatgagcagcgaggtcttgccgcagccgccgtcgcccacgatcacgatcttcagctccttcctg

SEQ ID NO: 50373 - DNA, 479 bp, Homo sapiens
cgcccagccttacttatttttaaatcagattttttaatcaactaaaacagctatgagttaagtacctgccctgcaaaaatttttagaaaaagttttaggattatgaaattaagaattattttccttaactggaacagttctaaaatttatctgatacttctctaacaagtgagtgatctcatgtaaccccagtttgtatcttaaaggctgcagcataggaattgagctgtataacagtgttagaactgtcaagtgataatcacagaacagtttgtatcggttttataattctcatgtcttgatcagatctgaaggaaataggcataccctccaacattctaaaaattatttatttttattaggatttgtttattaaagttccacgagctgctttatggtcagttgggctgagtagtagatatcttaaagacatgcagtgaaagtgaaccctgtcatatcatggtgcctctttcaaggtt

SEQ ID NO: 50374 - DNA, 1095 bp, Homo sapiens
caactacacaacacagataaaacggaagttataacatataaaccagtacctgcccacactcatagcagtgaggggaataaaaatcaaggttgcactgtaattccatgactctaaaaatcaagtctatttgacattggtttgaagcaacagaacctttatagcagattcccctttttaaagaaaaacccaaggagagatgatcaagcacaaatgatcacttcatgcattttattgatagtctatattttaaatctgcagtatgacatcttacatagggaaaaaagcttcttcctaaaagataactattaataatcaaaccagctttaatatgattgacctttcaaggtcttgttttgctttaaacaagttaacttttagcagttgtaaagcactgtacaaaagaaaactgtgtacattctcaaaatttaatacagggcttcccaaccaggagtctgctggataggtatcggagaagggtgttatgttcaggtttaaattgaaagaaaatgagaaaccagataaagcaagccaaccaaattaacttcactttgtgctcctctctgcttttttgagtctctcccgaaggtcaggaagccctggtataacaatcactttagtctttacagaacatacatctatgtgctttgtgaccaaagacataaaggcagcctttgttactgttccccctccaaaccccttcaggttcttataagcttcagaaagctttccaagattgctgccctgttctttgtatgaatccaagtaaacaactataccaaagcagctcttcctgggagaagataaaacaggcacagatacatcaccaggccaactgcgtacctactcaacttgatacctgatcacatggccctacatccttaaaagcagcaccagggacaaatggagctatcaagaggtaaaatccaaacactggacagttaaaacacatacaaaccagttaaaagaacattagtaatggggcactaaatagagttaaggctggacagctggttcaaccataccttggtattgaaataattctgcaagatgaggaacttacagaggaaccttgaaagaggcaccatgatatgacag

SEQ ID NO: 50375 - DNA, 244 bp, Homo sapiens
ggcggctcccaacatctcatctcacgtccatcaagtaaaaacgagtttgcccagagatcagaacaatggcctagaagttatcaaggaggatgctgctgaggggctttcttcacccacagactcctcgagggtaatggagtagtcctgtggtgtggatcgctggcatctcattgcttctgcctcagtaatgactgtcttaattgtgatgatagcagctcactaactctgcgtttgtggtgtgatg

SEQ ID NO: 50376 - DNA, 420 bp, Homo sapiens
atgaaggcagctgaactctccatcaagtttctgcctccccaacgtaatatggaagtcgttctggctgtaggaccccagctgattggaattggaaagcacagtgcagctgcagagctctatctgaatctggaccttgtcaaggaagcaatcgatgctttcatcgagggtgaggagtggaacaaggcgaaggttgtagctaaggagttagatcccaggtatgaagactatgtggaccagcattataaagagttcctcaagaatcagggcaaagtggactcgctggtgggtgtggatgtgatagctgctttggacctgtatgtggagcagggccagtggggacaagtgcatttgaaacagctaccaagcagaactacaagattctgcacaagtatgtggctttgtatgcaactcacttgatcc

SEQ ID NO: 50377 - DNA, 416 bp, Homo sapiens
attttaatcggtaggataaagaatgttgaagataaatcatggaaaaaaatacgtccaagaccaacaaaaacaaattatgaaggaccatattatatatgtaaagatgttgctgctgaggaggaatgtagatattcaggccactgcacgtttgcttattgccaagaggagatagatgtgtggacactggagcggaaaggagcattcagccgggaggctttctttggcggcaatggaaagattaaccttactgtgttcaaacttctccaggagcatcttggggaatttatattcctttgtgagaaatgttttgatcataagcctagaatgataagtaaaagaaataaagataattctactgcttgttctcacccggttacaaagcatgagtttgaagacaataagtgccttgtccacat

SEQ ID NO: 50378 - DNA, 1323 bp, Homo sapiens
ggttttcctccgacttccggacatctccctgggagtcgcgcagagtggagtcaaaggcaaccagtgctcgctgcggtctctggggatcgggaccgcggcggcggcccgcgagcgggatgttccggggcttgagcagttggttgggcttgcagcagccggtggcaggcggtgggcagcccaatggagatgctccacccgagcagccgtccgagacggtggctgagtctgcggaggaggagctgcagcaagcgggagaccaaggaagctcctccaccaaggccaaaagacttcggcaactagtttatttaactttgcatctgctgccacaaaaaagataactgaatcaatttgctgaaacagcacaaacaataaagaaatccgtagaagaaggaaaaatagatggcatcattgacaagacaattataggagattttcagaaggaacagaaaaaatttgttgaagagcaacatacaaagaagtcagaagcagctgtgcccccatgggttgacactaacgatgaagaaacaattcaacaacaaattttggccttatcagctgacaagaggaatttccttcgtgaccctccggctggcgtgcaatttaatttcgactttgatcagatgtaccccgtggccctggtcatgctccaggaggatgagctgctaagcaagatgagatttgccctcgttcctaaacttgtgaaggaagaagtgttctggaggaactacttttaccgcgtctccctgattaagcagtcagcccagctcacggccctggctgcccaacagcaggccgcagggaaggaggagaagagcaatggcagagagcaagatttgccgctggcagaggcagtacggcccaaaacgccacccgttgtaatcaaatctcagcttaaaactcaagaggatgaggaagaaatttctactagcccaggtgtttctgagtttgtcagtgatgccttcgatgcctgtaacctaaatcaggaagatctaaggaaagaaatggagcaactagtgcttgacaaaaagcaagaggagacagccgtactggaagaggattctgcagattgggaaaaagaactgcagcaggaacttcaagaatatgaagtggtgacagaatctgaaaaacgagatgaaaactgggataaggaaatagagaaaatgcttcaagaggaaaattagctgttcctgaaatagaagaataatccttaacagtctgcaaactgacattaaattctagatgttgacaattactgaatcagaaggcatgaaagagtataattttatgaaattcaaaattattcttttttcaagttgaaacttg

SEQ ID NO: 50379 - DNA, 124 bp, Homo sapiens
gtttctttacttgaaaatgacctgtgctccatctactcacccctcttcctttaaccccacctgaaccccttgcaagtactgatctttttagtgtcttgtcttttccagaatgtcaagtagtggg

SEQ ID NO: 50380 - DNA, 430 bp, Homo sapiens
  misc_feature (1)...(430): n = a,t,c or g
gagaccatagaccctcaggagagaagaatcccttctaccctggactcgctctcttctctggaactaacttctcccccataccctgattgtctttggagaaaatgttctggattctagaatctaaggcagagccttttaagccatactgtacacataaatcacctggaaccttgttaaaatgcagatcctgactcaggaggtctgagttagagcccaggatttcatatttctagccagctccatgatgagctgctggtccgcagatcatgcttgcaggttttaaccagagtcagtnttggttagagagtcttgaacacagccacgtggtggaagaagatttatggacaggaaaaggaaaatnatgtactgaaaatnaaagtnaggtacagaancagccagactggttatagctcagcattggccttatttg

SEQ ID NO: 50381 - DNA, 182 bp, Homo sapiens
  misc_feature (1)...(182): n = a,t,c or g
tgaaaagccattcagagatgaagttggtatgtggcttcattctggaacctcggctgttgattcaacagagaaagggacagattgttccaaccgagcttgcacttcacttgaaggaaactcagcctggattgcttgtggcttcagttctgggcttgcagaagaacaacnaaattggaattgaa

SEQ ID NO: 50382 - DNA, 689 bp, Homo sapiens
ctaaaactttcaaatttgttttatttgaaggttggctttctgtttgtttttgagacaaagatgaatgcccaagtctcaaaattcctattgataatattaccaaaacttgtatcttctgggaaaatttcagagataaagatctttaaaagaaataacagagaagttgatgaaatatgcttaagccagatgcttctggctagaagagacagaattaagggggaaaaaaaccacaatgatgtgtgattttttttttttaagtgatgaaagactgaccagtagaaggtggtgaagatgaagaatagtggaactggcaagtaagaactgttcagacaagcattcattgtgtaatatccataaacaaaactataatccaaaggacttccattttagtatgttctgatgatgtactctagactgtcacctcctctggcttacagaataatccagaactttccatagacattaatcttgcttaacaaaggctgtttacctattatacacacacatttttaagggaaatatatgtatatagctttatctatacacacacatatacatacgtgtatatatagatttatacaaatgtataaataaacataatacttttcaatctttccattgacaaggcaagttcacattcagcaaagtgccaccacatcccatatacacatctctgtacagatatacac

SEQ ID NO: 50383 - DNA, 1903 bp, Homo sapiens
ttttttttttatccattatgatttattctctacaatacttcgttaaagtgttcaatgatttgcactcagaagttatatagccaagaggcaaccaagtgtaatacaaagaattggtctgaagtctttgcactgaaggccatatagtctcttgcttcagggaagtaagaacgaaatgaacaaaaagaacacatagctccctaggctccagaatctcaatagaaaataacgtcaacagttagtgaaattgtagatgtcaacacatcatggaaaacagatcttgtgcaaaatattaacacccaggacttcttttgtatagatgatttttattataaacaataaaatatatgtaatgtctcaactacaaacctttcatgttgaaagggtctctaacatgagttgttttattattatgaagcaaaaaagttttaagaatctcacagtggaaataatccaacaccgacagactctagtgatcaaagacattctcttttaatgtaaaacaaggacaattcataattacagagagaatgtcctagctgtgggtattatgagacaagccaactttccagaccaaaaggcactcacagctagggatgaaacgaactccgaaccaagccagagaaattgggctggtccttgaaaacagtggttacctactgtccagctcgagcagcccaaggacaaaggaaacactcagcagaaaacattcccttttctttaaacctaccacgcacaccgcaggtactggccgccctcatcactgctttggtcaagcgtgcagagaaggcagttcagttccagttcggagctatcctctccctatggcaaagctgccacatggatgatccagacttggtatttttcctgagagccacctgctacacactttcatgaggcgacccgtgaccgtacacttctagacccacttcctgactaggccccgttcaggacggatactgacaatgcccattcctcacggggccaaatggtttcccttggtcgactcctgagtcccctgacaaaagcaagaggaacccaagcatttccattgctggacttgtgtgggagcatgagggaatgtgcagggagtaaggcttcttcactccaaaaaccactgagcccacttcagtgtggtgctgggcctaaccagcccaattcttgtgcactgattttttttttccccatttctcgggttttaaaattttctattcattttcttaaatggcaggtatcgtaccccccctcgataaaataaaataaaataaaataaaataataaaataaaataacataccatacattggagaagacaaatagggcaacatttctacaagaaaaaatcggcttgaggagcatggcactgtaaatgcttgcatgaccagtctcactgagcgtgctcaggggtgaaggtttagcaccaatttttttgctttttttaatctttagaaattaaacacaactcttaacatagaacacttgaacagtaatgagtgtagccctatgtatcaatactgttgtacaaattggaggtgggtggcttagtccagagctgaccaccctgacatcgatccatggcacctaagagtaaccgttgccacgtttttaacaagacatttattctcagcagcaggaaatcacgaaacgacccctccatcttcatttacattgccaagggaaacgtagcaggctgcaggaacccagcacagcagtgaagggccgcagcctaggcaccgtcacccacgtttccctcgcacgtcccaggtcctctcgagcagcacaggacggtgtggagcaaacccactcacccttgcccatcccttcccacaaacttgccagcgatgcctagaacagcacaggtgtcctttctcagattgtgcccccactccccttccccattcctggca

SEQ ID NO: 50384 - DNA, 490 bp, Homo sapiens
  misc_feature (1)...(490): n = a,t,c or g
gtgacagtagagagtccttcatcctctgaagttgaagaggttgatgattcttcagagagtgttcatgaagtgcctgagaaaactagtatagaacaagaagcattacaggaaaaactggaggagtgcctaaagcagttaaaggaagaaagagtgataaggcttaaggttgataaacgagtcagtgagctggaacatgaaaatgcccagttaagaaatataaatttctctttgtctgaagcccttcatgcacagtcattgacaaatatgatcctggatgatgaaggtgttttgggcagcattgagaattcttttcagaagtttcatgctttcttggatctccttaaagatgctgggcttgggcagcttgccacaatggctgggatagatcagtcagattttcaattactaggtcatccccagatgacttctactgttagtaatccacctaaagaagnaaagaaggcgcttggaaggatgaaaacccggaccg

SEQ ID NO: 50385 - DNA, 2093 bp, Homo sapiens
gaattcggcacgagcgcgcggcgaatctcaacgctgcgccgtctgcgggcgcttccgggccaccagtttctctgctttccaccctggcgccccccagccctggctccccagctgcgctgccccgggcgtccacgccctgcgggcttagcgggttcagtgggctcaatctgcgcagcgccacctccatgttgaccaagcctctacaggggcctcccgcgccccccgggacccccacgccgccgccaggaggcaaggatcgggaagcgttcgaggccgagtatcgactcggccccctcctgggtaaggggggctttggcaccgtcttcgcaggacaccgcctcacagatcgactccaggtggccatcaaagtgattccccggaatcgtgtgctgggctggtccccttgtcagactcagtcacatgcccactcgaagtcgcactgctatggaaagtgggtgcaggtggtgggcaccctggcgtgatccgcctgcttgactggtttgagacacaggagggcttcatgctggtcctcgagcggcctttgcccgcccaggatctctttgactatatcacagagaagggcccactgggtgaaggcccaagccgctgcttctttggccaagtagtggcagccatccagcactgccattcccgtggagttgtccatcgtgacatcaaggatgagaacatcctgatagacctacgccgtggctgtgccaaactcattgattttggttctggtgccctgcttcatgatgaaccctacactgactttgatgggacaagggtgtacagccccccagagtggatctctcgacaccagtaccatgcactcccggccactgtctggtcactgggcatcctcctctatgacatggtgtgtggggacattccctttgagagggaccaggagattctggaagctgagctccacttcccagcccatgtctccccagactgctgtgccctaatccgccggtgcctggcccccaaaccttcttcccgaccctcactggaagagatcctgctggacccctggatgcaaacaccagccgaggatgttacccctcaacccctccaaaggaggccctgcccctttggcctggtccttgctaccctaagcctggcctggcctggcctggcccccaatggtcagaagagccatcccatggccatgtcacagggatagatggacatttgttgacttggttttacaggtcattaccagtcattaaagtccagtattactaaggtaagggattggggatcaggggttagaagacattaaaccaagtcttgcccagtttccctttcccaatccttacaaaggagccttcctcccagaacctgtggtccctgattttggagggggaacttcttgcttctcattttgctaaggaagtttattttggtgaagttgttcccattttgagccccgggactcttattttgatgatgtgtcaccccacattggcacctcctactaccaccacacaaacttagttcatatgcttttacttgggcaagggtgctttccttccaataccccagtagcttttattttagtaaagggaccctttcccctagcctagggtcccatattgggtcaagctgcttacctgcctcagcccaggattttttattttgggggaggtaatgccctgttgttaccccaaggcttctttttttttttttttttttttgggtgaggggaccctactctgttatcccaagtgctcttattctggtgagaagaaccttacttccataatttgggaaggaatggaagatggacaccaccggacaccaccagacactaggatgggatggatggttttttgggggatgggctaggggaaataaggcttgctgtttgttctcctggggcgctccctccaacttttgcagattcttgcaacctcctcctgagccgggattgtccaattactaaaatgtaaataatcacgtattgtggggaggggagttccaagtgtgccctcctctcttctcctgcctggattatttaaaaagccatgtgtggaaacccactatttaataaaagtaatagaatcagaaaaaaaaaaaaaaaaaaa

SEQ ID NO: 50386 - DNA, 708 bp, Homo sapiens
  misc_feature (1)...(708): n = a,t,c or g
ttatctctgacactttacacaggcctggcgtatagtaaacatttaatagattttcaaagaagcaataaaaggaataaatgaatgttagcagccaaacctctgttcacctttctctggaacaggagttggcaaactatggtttgagagccaaatccagcccttcatcaaattttgtaaataaagttttattggaacacagtcacacccattcatttacatattgtctatggctactttttcactatagaggcagagtagttgcagggtagttgcaacagagatactatgacccgcaaagtgtttactgtttggcccctttataaaccaatttgctaattcttactctagaaccatgtgagctcaaactaaaaaatgggcttctgagcatggaaacagtactaacctatgctgactaacaagctaacctatgcttcttttgttaggtgtttgaaatgatcattaatccctggagataatgtcctcctagatgaacctgcttattcaggaactcttcaaagtgnnnnnnnnnnnnnnnnnnnnnnnnnnnnnnnnnnnnnnnnnnnnnnnnnnnnnnnnnnnnnnnnnnnnnnnnnnnnnnnnnnnnnnnnnnnnnnnnnnnnnnnnnnnnnnnnnnnnncaaacaaaaaaggcttaaaatggcaacaattttaccacaataaaactaaaataaaataaaaaantttttct

SEQ ID NO: 50387 - DNA, 3973 bp, Homo sapiens
  misc_feature (1)...(3973): n = a,t,c or g
tccaagctgaattcgcggccgcgtcgaccacgccggccctgggcagtgacggggttcgggtgaccatggacagtgcgctcaccgcccgtgacagggtgggggtgcaggatttcgtgctgctggagaacttcaccagcgaggccgccttcatcgagaacctacggcggcgatttcgggagaatctcatctacacctacattggccccgtcctggtctctgtcaatccctaccgggacctgcagatctacagccggcaacatatggagcgttaccgtggcgtcagcttctatgaagtgccccctcacctgtttgccgtggcggacactgtgtaccgagcactgcgcacggagcgtcgggaccaggctgtgatgatctctggggagagcggggcaggcaagaccgaagccaccaagaagctgctgcagttctatgcagagacctgcccagccccccaacgcggaggtgccgtgcgggaccggctgctacagagcaacccggtgctggaggcctttggaaatgccaagaccctccggaacgataactccagcaggttcgggaagtacatggatgtgcagtttgacttcaagggtgcccccgtgggtggccacatcctcagttacctcctggaaaagtcacgagtggtgcaccagaatcatggggagcggaacttccacatcttctaccagctgctggaggggggcgaggaagaaactcttcgcaggctgggcttggaacggaacccccagagctacctgtacctggtgaagggccagtgtgccaaagtctcctccatcaacgacaagagtgactggaaggtcgtcaggaaggctctgacagtcattgatttcaccgaggatgaagtggaggacctgctaagcatcgtggccagcgtccttcatttgggcaacatccactttgctgccaacgaggacagcaatgcccaggtcaccaccgagaaccagctcaagtatctgaccaggctcctcagcgtggaaggctcgacgctgcgagaagccctgacacacaggaagatcatcgccaagggggaagagctcctgagcccgctgaacctggaacaggccgcgtacgcacgaaacgccctcgccaaggctgtgtacagccgcacttttacctggctcgtcgggaaaatcaacaggtcgctggcctccaaggacgtggagagccccagctggcggagcaccacggttctcgggctcctggatatttatggcttcgaagtgtttcagcataacagctttgagcagttctgcatcaattactgcaacgaaaagctgcagcagctcttcatcgaactcccgctcaagtcggagcaggaggaatacgaggcagagggcatcgcgtgggaacccgtccagtatttcaacaacaaaatcatctgtgatctggtggaggagaagtttaagggcatcatctcgattttggatgaggagtgtctgcgcccgggggaggccacagacctgaccttcctggagaagctggaggatactgtcaagcaccatccacacttcctgacgcacaagctggctgaccagaggaccaggaaatctctgggccgaggggaattccgccttctgcactatgcgggggaggtgacctacagcgtgaccgggtttctggacaaaaacaatgaccttctcttccggaaccttaaggagaccatgtgtagctcaaagaatcccattatgagccagtgcttcgaccggagcgagctcagtgacaagaagcggccagagacggtcgccacccagttcaagatgagcctcctgcagctggtggagatcctgcagtctaaggagcccgcctacgtccgctgcatcaaacccaatgatgccaaacagcccggccgctttgacgaggtgctgatccgccaccaggtgaagtacctggggctgttggaaaacctgcgtgtgcgcagagctggctttgcctatcgccgcaaatacgaaagctttcctgcaaaggtacaagtcactgtgcccagagacgtggcccacgtgggcaggacggccgcaggatggggtggctgtgctggtccgacacctgggctacaagccagaagagtacaagatgggcaggaccaagatcttcatccgcttccccaagaccctgtttgccacagaggatgccctggaggtccggcggcagagcctggccacaaagatccaagctgcctggaggggctttcactggcggcagaaattcctccgggtgaagagatcagccatctgcatccagtcgtggtggcgtggaacactgggccggaggaaggcagccaagaggaagtgggcggcacagaccatccggcggctcatccgaggcttcatcctgcgccacgccccccgctgccccgagaacgccttcttcttggaccatgtgcgcacctcttttttgctaaacctgaggcggcagctgccccggaatgtcctggacacctcgtggcccacgcccccacctgccctgcgtgaggcctcagagcttctgcgggagttgtgcataaagaacatggtgtggaaatactgccggagtatcagccctgagtggaagcagcagctgcagcagaaggccgtggctagtgagatcttcaagggcaagaaggataattaccctcagagtgtacccaggctcttcatcagcactcggcttggtacagatgagatcagcccccgagtgctgcaggccttgggctctgagcccattcagtatgcggtgcctgttgtgaaatacgaccgcaagggctacaagcctcgctcccggcagctgctgctcacgcccaacgccgtcgtcatcgtggaggacgccaaagtcaagcagaggattgattacgccaacctgaccggaatctctgtcagcagcctgagcgacagtctttttgtgcttcatgtacagcgtgcggacaataagcaaaagggagatgtggtgctgcagagtgaccacgtgattgagacgctgaccaagacagccctcagtgccaaccgcgtgaacagcatcaacatcaaccagggcagcatcacgtttgcagggggccccggcagggatggcaccattgacttcacacccggctcggagctgctcatcaccaaggccaagaacgggcacctggctgtggtcgccccacggctgaattctcggtgataaaggcgcccactggaccctcccaacgcccaatgctttgcttttctcctcctccccttcccagttaccaaagactcgaacttccagacagggacccagggacaccccgaagcccacctgcaatctcccacctcctgcccatccctctcttgagggagcagcaggggccaggagctaccccaggagtgggccaggccgggccacagcaataggaaagccagggccagagcgagccatgccagccctactgccgatgccaaatatttgagagaagggaacttttgctgaggttttctctgaggtttttttgatgctttataggaaactattttttaaaaaaagccatttcccacccaaggacacagtggatgtgttttccctgactccagcagggcaaggaatgtagccgagaggttgtgtgggctgggctctggtgccctcttccctggccaggacacctctcctcctgattcccttggcaccttgtctttctgtctgtttacctgtctccctgcctgcccatctgcatcttttgcagcccactctgacttccatctgggggctgagaccacccttgcctgcccccttctttctgccttaagaatgtccttttaggctgggcatggtgggctcacgcctgtaaaccccagcactttggggagggcggagaaggggcagataacctgaggtcagggattttcgagaccaacctgaacttacatgggaggaaattccgcctttagttaaaaatacaaattaggccgggcatgggtcgtgaaggntttaatttcaggttattggggaggttgaggaagagaat

SEQ ID NO: 50388 - DNA, 2018 bp, Homo sapiens
tcactgtctgggtatttggaggaggaacaacccccatgttgacttggcttcagatcagagttggcgtggacctggatgaaaatctgaaggaggacccctcctcacaacaccaggaagcaaataacttggataaaaacatgacgaaagcagagagtgctcggctcttcagaatgtggtatagctttgaccacaagtatctgaaaccaattttaacccactctggtcctccgctgactacaacattacctgaatggtgtggtccgatttccaggctgcttaccagtcctcaagcctatggggaacagctaaaagaggatgatgtggaatgcattgtaaaccaggatgaactagccataaattaccaggagcaagcctcctcaccctgcagtcctcctgcaaggctaggtctggaccagaaagcttcaccccagacgccaggcaaggaaaacatttatgagggagacctcggcctgggaggctatgaactcaagcttgagcaaactttgggtcaatcccagttgaattaattggcatgaagagtacagatgtaatcacaagtaatgcaagactcactgaggaatacaagccaagctgatgaggcagtacaggggagaggctggaaaacatattaagagcataaattggagagaatcaaagccttgtcacatggatcctctggtgcctgaagaaatgagattttattatccctctctattatgcaaatgaatttagttttttgacagcagccattctgattactggattggctggggtggggatggaggtatcaggagtctagctgctggaggatgggacagctgtgctgggtcttcagggcatttctgctgcgaatgggctctccaggcccttcacttctattctggattttattccctccattaaggagagtttaaaaataaaagaaagcttctgagagtaaacattttgctcctaagctgaagggaatgcccagctatttagtaagtgataagtttcttattttgaggacttgactcccatttgctctcagtgaccccagggcagagccagacgaagtgttccgtacccactgctgatggtttcccagagcccacactgagttgaagaacctattgttcttcttggcatccttcttatgctacttctcccatcgctcaaaggggttgcctatggctgtggtgtgccctgccctaaatgcagcaccactttcaagcttagtaggaccattccaagaaaaccaggtttcttctccccataccacgttgtgcctgaagaacaagccttcccgtccttgcctgcatgtgagtcacttcttggctgtgcagcaggtccccccctccccgcgatatgctggagggtaggattctgcagcctgtgttgctctctacctggcagcagactgtgcaggagccccaacctgtcctccaattccagcattcacagctgatgagcagtgcaggagcagggcgacgaggaacagaagccaattgatgtgtgggttacactgaggagccaaggacagggcctcaggtctcccccttacaaggcgtggctcatggcctgcattccagagaccaacatgatagcttttaattcagctgcatgacctgtgccttttaagccataaagatacctcaagcctagcacctcttgaaatccagatgttcatattagactcgaaaaaataggctccaggcctaggtgcccaggctatgatgagtctgcttttgaaggaggtagggaatgacatcttccttggacccaaagcttaaaagtaatgtatgctttgctgaccactgtttgttaggccttaaacaacattcactgtggtggtatcaggcacactgctatgtgcatcaattatttttttgctttccaaacagaatctctggggcacaagttttacactcaagctaagtataactttgtcatttcaggtaaatatgacaagtggtggagcatgaagttttctaatttgacttaatcctaataaatttttgttacaaagtaaaaaaaaa

SEQ ID NO: 50389 - DNA, 447 bp, Homo sapiens
  misc_feature (1)...(447): n = a,t,c or g
tttccagtaagacacancagtagattaaggtaacatccaaaaatttctttcatagccatcaacaatttaagtccccctgcccctttttaanaaaaaactatcagtcatgcctgacacaaacaactgcttttcataatcttcccaaataatttctatattgttccatcttattggcctttactgtttgtaattcctgctttatgagaaaaaaatttcaatagggtttcctaatttgttaatatcttttcatgtggcaaaaatactaactctaagatatgcttgttttctcccaaaaatgtttctgtccagttataccaatgaaattggtccactttcctttattaaaggaaaatttaagtatgctatcaaattctctagtcaaattttaacctgaggttacctcagactgtgcaatgtgtacctgcacaaactgaatgtggtcatcat

SEQ ID NO: 50390 - DNA, 974 bp, Homo sapiens
tttttttcacagctaaaagttttactttaatcacaaattcacaactagagatatcatttgcatatcttagaacgctaaagacctgttaaaattttttaaccaatcagcaaaaatatgtgccccacagatttctaatgttcataatttagaatttatcacatataatatttattaatagtttatttgcaaaattattattcttaaaacacttctttccaacacatttacaatgttcatgtgttttaaagaaaaaaaccaccctcatttaaaaatgtactactgactttaatgtgtggttataccagtgccaccaaattagaaaagaaaaagaaacatacagctgtattggatatgtagttactactacaaataatgacaacacacgtcctatacaaagatcatattcacgcttttctaccacttctcagtcattgtcagaaccatttggaggtaagaaaaccaatgcatcattgaaaatatgcccaaatgccctaaggcggtataccccatacatcatcacatgcatctgatttggagtcagtccattaaaagtaacagccatatctgaacaacagccttctactacctggttggggtgataagtcattgcctctttaatagaaagcccaacagatttggtattaaatacatcttttccatcagcatcttctgcattttctgcaaatactccagcatatttcaggcaaactgctagctgtttatcttcagatatcttccaaatcatccctccctgttcaggacacttttctgggatattgagaaggctgttaagtcttttcattgattctacacttaagacaattcctccttccatacccacatattcaaggtctccagattttatagtgtggcctagatagaaaggctgtgatggatccttttttaacaaaaaatactttaggttttcaatgatagcaaacgtagtggggcgtgcaaggaagaaccagttgtat

SEQ ID NO: 50391 - DNA, 726 bp, Homo sapiens
taaaaatttgaatccttaacagctatgacatgattacgaatttaatacgactcactatagggaatttggccctcgaggccaagaattcggcacgagcagggttgttttatattgctataaaccatcattatacaacaaaatggtaactgaagttgctgagttactacaatatagactggcagggcaaagtaacaaataattttgaagtttgccaagaatcatttttaaagcccttagcaggcttctgtgccactggtgctgtttgactgtgcattgtctcaatgtggtatagtccctttttgttatcttggtgctttctccctttttcagttgtgttgtttcgtcactcaggaaaagcacctttctacacctgcctgcatttaacataactcgatttttttccctcccttttgcagcagttgcgattcttgcagcatcaaatggctatggcagcagcagcagcacaaacagctcagctacatcatcatcggcatacaggcagccagtcaaaaagtaaaatgaagagaggcacgccaaccactccaaaattttgagtcttgcattactttttgttccttttttaaaaacacaagagcactgaatcaaaagaattgagtttctactttttgttttttttaatgtgtcagtattttacattgctagatgtacaaactttatacagaagcacaaccttatcatttttaaataaaaacagggaaatggttt

SEQ ID NO: 50392 - DNA, 190 bp, Homo sapiens
aaatttctagatggtctcatgagtttcaaaataataatttttgtgtatgaacaaagctgttgtttttaccatgcagtattgcatgattttaagttatgtggaattaacataactgattttgttttaattgtaagttgttaactcctgtatatatcattaaaataaatctgaagttgaaaaaaaaaaaaaa

SEQ ID NO: 50393 - DNA, 499 bp, Homo sapiens
  misc_feature (1)...(499): n = a,t,c or g
tttcctcttttttgcttttccccttgcctgtttcccatctgctttttctccaaggtaaagctggactgatttcagtggatgagaatacagtgataagcaaatctttaaatgttaccctaaataggctcttaaaatagaatgtagcttggaaagatataagttaactgcctgcaagttagtggccttctactctccagtggtggtgtataaacccctgaaaattcaaatataatcctaaaagcagaaagactgacatttaggggaggggaaaggatggataaaaagaacaatactcaacctaccagcctccaaagagaagtcatgcaattgtgaatacatgtcaaccaactgttattaatattccagccaaatcacactgaaaataaaaaatctgggtaagagctgtagtgggaaagccacattagcccaccttttaatgggatatatnnnnnnnnnnnnnnnnnnnnnnnnnnnnnnntcttattaaaggtctattttc

SEQ ID NO: 50394 - DNA, 691 bp, Homo sapiens
tggagagtacgcggaggccgaggcactgtactccgcttacattcgccggtgcgcttgcgcggcctccagcgacgagagtcccgggagcaaatgcagccctgaggatttggctactgcatataacaacagggggcaaatcaagtacttcagggttgatttttatgaagccatggatgactacacatctgccatagaagtccaacccaattttgaagttccatattacaacagagggttgatactgtataggctgggatattttgatgatgctttggaagatttcaagaaggtcttagacttaaatcctggatttcaagatgctactttgagcttaaaacagactattctagacaaagaagaaaaacaaagaagaaatgttgcaaaaaattattgatatttttaacttaatggaagtattgattcatgatccttacatctgcatctagttatcagtaatttagatattgagctattttgatttatatttaagaaattaatacattagcactgaaagttaaatagtgtgtttaaggtagttaatttcaggttgaatgggttttttttaatgaagtgtaaataataccaatgtataagtgtatattattatattaaatattatagtaaaaaggaatgtgtggtattttcttcagcaaaactatttttgtgatttttttattctcaactttttatt

SEQ ID NO: 50395 - DNA, 429 bp, Homo sapiens
gtgattttctagtgagtgtatgttaggaacaaaagacaaaatagtatcaacacattataaatatttagcttactaaatatttgtaattatttttacatccatttatttctagcttgttctccagcacttcagtgtttgaaagtttcatcctaaaatatatactacaggaaagctgcagttcattttcatgcatggatcattacatttttcacttgtaaatgtaggtttttatgaaaattaaacattcccctatttttctttaaattttatacaaagcactttaatgatagatgcaaccttatttttcagttcctatttttttaaagaccacacatttactaatgttaatatgaaggtaataaatagcttactgatattttatggatgcagacaatccatgcacaaccacttcttatgatactagtttat

SEQ ID NO: 50396 - DNA, 374 bp, Homo sapiens
ttgatacttaccacatctctctcacacacacacactcccacatagaaatatattcctaattttgatgtatgagcattttagcagtgactccattcctgaagtttactgcagctcacaaatcactaatggtatttgggcaaacagaaaaggacccttgggacacagcaacacagtttttgcctttagctgggtgaactgatgggctacctgtcccataaccatggggtgttctccactcctaggagtggactcctggctacggcacccactcctggacctccctccctggcctcccggcagggccacagcacatctgtggatggccaagagcaagaccttctgggtctgggtggggaggctgggttcttgagggc

SEQ ID NO: 50397 - DNA, 407 bp, Homo sapiens
  misc_feature (1)...(407): n = a,t,c or g
ggtagagtcagtttcccctctatcttgttaccccataattcctgtggaaagtttcccgtgaacttgaattctgccttctaactattgtcaccatttggagatttcctattatatgttgtgtcacaactgctggagatctaccttttcactttttcatctcttcttcgtttagcctgcttcgtaatttgtaacctcccaccatctcttagaatgcacgggcagtccttatttctggcatacatcaagaaaggaatcagagcctgattgctttgaaaatgccagggttctacggccagggtcacggctgttaatcccaacactttngggagggcttgaaatggggagggactgnctttgagcctggggganttttnaggaccagcctgttgcattntaggtaaggaccc

SEQ ID NO: 50398 - DNA, 366 bp, Homo sapiens
gaaagacgaggaaaaaattaaaaagatgaggttattgatctcaggaattgtatttgccaagtgagaaggaaaaaatattcacaaaggcttgtacatactttgatcctgaaggaacacctctggtgtcttcatgtgccacatagtcttcctcactgactgtctgcctttgcaaggcaaggctctccggtaggcctcgagatgaaataacaagtcctttatttcactcagcctgccaggagtggagaaggaatggctagggagtcctagccccaggggcttcatggcaatacggaccccagatgtctccctggagctctgccaggatccattcaaggccaagaaagtatgattgggagaggaggggtg

SEQ ID NO: 50399 - DNA, 275 bp, Homo sapiens
  misc_feature (1)...(275): n = a,t,c or g
ggttgtctgttcactctgctgattgttgaataagatgtcctttccccactttatgtttttgctttgagaaattgttgacagttttaaaatcatttaatgagaaactaaaattggagttaagagttcaccaatgtgctttttccaaattatgaattgttcaaaaagtttccattttccacctgttgagatcttcattttgaggnttttgttttctactgtgtctaatctacatcccacttttccaggtgagtatagagggccttttaaaatcaatt

SEQ ID NO: 50400 - DNA, 401 bp, Homo sapiens
aatggcttttcttcaggtaaacaggtgtcagatgaagagctgtgtccactctgcctcctggactgccatgaatttagtacttacaaaactttatttctctacttgtgtttttcctccttaatgagtttgatttaactacttcttaaaattcttatgatagtcaagagtctctgagaaatatttctttccaatatccagtagccttctctacattttctatgttatagcttcttatatgacatgaagaattctcagcaagaatttatgatacacagtattaaaaatgttccctttgtggctgttgaacagggaaagatgtgggtactcaagatctctattggggaaacttgtggtccatagtacacatggagaacatgtcatgttgaggctccatctgtgtg

SEQ ID NO: 50401 - DNA, 723 bp, Homo sapiens; identical to SEQ ID NO: 21696

SEQ ID NO: 50402 - DNA, 359 bp, Homo sapiens
ttttgaagtgacatctatttttataaagtactgtttagttggaaaaagttgccttaatgtttgaaatgtgtgaaatttttggaacttgctggacagggtgatttaatttttagctacataattttaagaattagtattttcagtggtgtgcatattttggttcttaaatttttgcttcttaaactaaaaaaatcctgaccaatttatttgttgttttctgtgggttgcgacccatgcaatcaaaaagcaaaattttgattgagattttttacagcataggtttttcatataaaaatattctgaatttgttaagcactgccataatatcattataatgtttttgtcttttaagtgcttcc

SEQ ID NO: 50403 - DNA, 401 bp, Homo sapiens
ttgcaggcgccgagatggcgggccagggccgcactccggagactcgcggttgctacgcgcaccatggctggagcgcccacggtctcgcttcctgaactccgttcactcctagcctccggacgggcccggctcttcgacgtgcgctctcgcgaggaggcggcagctgggaccatcccaggggcgctcaacatcccggtgtccgagttggagagtgctctgcagatggagccagctgccttccaggctttatattctgcttgagaagccaaagctggaagatgagcatctcgttttcttctgtcagatggggcaagcggggcctccaggccacgcagctggcccggaatcttggatacactgggggcatcggaacttacgctggagcctattagagaatggtt

SEQ ID NO: 50404 - DNA, 462 bp, Homo sapiens
agggcagcgagaaggagaaaccccagcccctggagcccacatctgctctgagcaatgggtgcgccctcgccaaccacgccccggccctgccatgcatcaacccactcagcgccctgcagtccgtcctgaacaatcacttgggcaaagccacggagcccttgcgctcaccttcctgctccagcccaagttcaagcacaatttccatgttccacaagtcgaatctcaatgtcatggacaagccggtcttgagtcctgcctccacaaggtcagccagcgtgtccaggcgctacctgtttgagaacagcgatcagcccattgacctgaccaagtccaaaagcaagaaagccgagtcctcgcaagcacaatcttgtatgtccccacctcagaaggcacggtcttgtcttgacattcgccgacatgggtcaaaagttccttccccaaaggccaccaccccaaaggcca

SEQ ID NO: 50405 - DNA, 757 bp, Homo sapiens
ttttttttttttttttcaatggcaacacagatttattgggagaaagacctgcggagagggggtaccagctagtgccagagcccccttcccgcttacaggctggaccagttacagtcccgggcaggagaggtctgggattgttgtgaaaatggggtgggggcggtgtgtttggctgctgataatgaaggaatttagtgcagccaggggttaggcctgggacctgcctgacaggatgtttctcacagctcaggcccctggtggaattttccactctgaccagtttgtaaaatggtaggggtctgcaaaatagtgcagtttgggctaacattcttatttcttactttagtataaaaaggaaaaagggcgtcgttgatcatctggctgcttcctgctggataggggcgttgtgattagggcctgggttctggagcttccgaatggtttcctcgtaggctctggtattagacgtggcaaaggtgaaatatattatcaatgtgtttttgcatgcttgcctggataaaacaattcagcctttgggaaatgaagcgggatacaaggttaaatatgcatggcccaatcattagtaacaggaagaggaagatcaggggtcctaggaagggggcaacccagggtatccatcttagaagggatgatccttgccaccaggagtcagcgacttgatgtcaaagctctgcagccctgtcatgaagcctacgaactgcgatatgaacaatgccagattcattaacacagaaac

SEQ ID NO: 50406 - DNA, 282 bp, Homo sapiens
  misc_feature (1)...(282): n = a,t,c or g
gcctgaagcaagaggaagccttccgcagctactttgagatcttcaatggtcctggtgaggtggatgcacagagcctgaagaatatcctgctcctaatgggcttctctgtgacgctggcccaggtggaggacgccctgatgagtgctgatgtcaatggagatggtcgtgtggacttcaaagacttcttggctgtgatgacagacaccaggcgcttcttntgntttgngaaanagaacgccctgtccgacatnnctctttncaaccnanacctntactctttga

SEQ ID NO: 50407 - DNA, 575 bp, Homo sapiens
tttttttttttttttacaaacaatatctttattacctgtaatatacttaaagagcaggggtccccagttggttaaacattgaaaacagtgggagagcttcagaatagagaaaaatgactgtgcctcacccctcacttactgagtcagaatctgcagagagggaagtgctgagagatgtctttttaaaaagctctccaactctccaggtgcttctgtccaccagccagatttgggcaccggtgctgcccagcatgccccaggcttcagggtatgggagtcgccctgggcttgggtcaggctggggctctctcattcaccaggtgtggggaggggcttgagcctgcatttccagcaaattcccaggtggggctgaggttgctgatctgcagtgctccatctctgggtgtgtacctacacacccgtcacctttgttgtactgggctcaggtataagttgcagggtgcaccgtgtacccccgtagccctgccctactccatgctgcccccagtctcaagtggtgcttgaacttgccttcaccaaggcagttctcgtctcagagttgaaccctccctgag

SEQ ID NO: 50408 - DNA, 173 bp, Homo sapiens
tgagatgacaggtgtgagccatcagacccagcatttttttttttaatttaaatttaaattttttttcatttttttgagaggttttttttgttttgttttgttgttgttgttgttgttggttttgagacagtcttgctccgtcaaccaggctggggagtgcagtggcatgatct

SEQ ID NO: 50409 - DNA, 678 bp, Homo sapiens
gcttcatgttacggcattcttccacacagtccagattgatttaaggaaaagcagaaatggaagtcaaagtgtgttataaattgagactgaaaaacatgctttaaaaaatagatttaatttcttacactgtgaatagccattgtattgttttgtttctgataaatcagttgttttgggcccctatttttgaactgttaaaaaattttgatgcttttcgtggataaaagtagtgcctctctttatacaactgatggggttttaaaaagtgtaaattgccttttttgttaaacttattttaaatgctttagtatttaaagggtgtatgttattaattaatctgcatatttgtaacgcaaataactacttcctgatttacatctcaatatattcttctttcatttgcccaatttaaaaaatacgtagtctctattgttgctgtttactaatagttttagatcccaatgtgtattagaattatagctacaaaaagttgcaagtaaaatttagcaatttcctattcaaacaggatctcattagtatgttttttaatgtgtagaattaacactttaaaataaacaggtgtgaaaattataaaggaatatatatgacaattattttctgtacattaatgtctaaacattatacttactttttcataataaaggaaattttggaacc

SEQ ID NO: 50410 - DNA, 475 bp, Homo sapiens
cttagtcctggttttgttttgaaaattactgcgttgcatttttgtgttaagtttttgaacccacgtgtgttttggtggagtatgagttggaagtcactgcaaactagcataaacaacaaagctcacagagtaggcacagatgtagagaacagagaccaaaatggggtgaggtggcagtaaatctaggatagggaaaaattaatgtgagggtgggaaataaactgtaattacctgaaatcaaatgtaagagtgcaataagtatgctttttattctaagctgtgaacggtttttttaagaatcattccttcctaatacatttgtgtatgttccatagctgattaaaaccagctatatcaacatataatgcctttttattcatgttaatgaccaacgtaagtggcctagcctttatgtcttatttatcttcatgttatgttagtttacatacaggggtgtatgtctctgtgctgtccc

SEQ ID NO: 50411 - DNA, 1062 bp, Homo sapiens
ttttttaaggacgtggaaagaagtttaatttgatgattaaaaacatgcaacagttttgtgtcttagctctcctactaggattatcggcgccttgaaggaattctcattcatctttgtgttacctttggtctgggtcacaccaactggtatactgaatgcatattaacttagtatagtgcctggcatgtaagagattctcaacaatattctcaataaatattcgctgaatatgagataaattattaatagctactgaataaagaaagattatttaaaaccagagaggaaactccatatatgttctttaatccaaacagtttaattcaagcaatctggaatataaaaagcactttctgatattagaaggagatcagactcccaaaaaagatcagcattctttagtcaagcaaaacttggaagtttacaaacagctaaatcagaagcttgaaattcaggtcctctccagtacctgctacattatatgtaattccaaacatgacttcagagattaaagaagaaagggaagatgtttcccattcttttgtaccctatataaactaagggtaccctgccctaatcttttttccaacacttccccaaataacccttccttacaaagaaagaagtctaagagaactctctcatctaaatatatttaagtagaggcaagcctgaaaaaaacacaaaaacctaaatggtgttaggctgtggttcacctattctcatggcacctcaaattaatggcttgggtgttggtgtaggtaacgcttggcctgtatgttgaggtagtcactagataaaattctgggcacaacatccgtttagcaattgggcatacattctacagatttagccataacgttttgaagctgattattttacagatcaactaattaattcctctccctaactttacagatgagaaagctcagatgatttgcccatgggttataaaactacttccttacacagtggcagcatcagaactggaattcagatctcttgcctcctaggcagtgtttttcctattataatatggtgacttcgtaaagcagggttaat

SEQ ID NO: 50412 - DNA, 322 bp, Homo sapiens
  misc_feature (1)...(322): n = a,t,c or g
gcaaggcggcccaggacaggcaggggctgcacgcggtgaagaaaccaagacgcagagaggccaagccccttgccttgggtcacacagccaaaggaggcagagccagaactcacaaccagatccagaggcaacagggacatggccacctgggacgaaaaggcagtcacccgcagggccaaggtggctcccgctgagaggatgagcaagttcttaaggcacttcacggtcgtgggagacgactaccatgcctggaacatcaactacaagaaatgggagaatgaagaggaggaggaggaggaggagcanccncccncccacacct

SEQ ID NO: 50413 - DNA, 243 bp, Homo sapiens
  misc_feature (1)...(243): n = a,t,c or g
ttcacgcgcgccgcagcgggggcaccggaagttatggaggtattaataggggaccctattaccacatgtntttntccctcagtgtatgatataatttgtaatcttgggtttcaactcagagaaaattgtgatatcaatagcattgtaactcagaatggtgaagtatgctggaaaacaatcacagactgtgtgagctacacagagtcagagcagggtctggattactggggaagcgtgaggctt

SEQ ID NO: 50414 - DNA, 433 bp, Homo sapiens
  misc_feature (1)...(433): n = a,t,c or g
acatctttaacccatttatgtctgaggttacaattttttgaatttttgcatgaaattcatatatgttacctagaaaaattcaaggaacaaaaatttgaagagaaaaaaaaatttattatgttccattgttatgtgacgttccaaaattggaacactaggcaaaaccactgctacactgtacataatgtataaaactatgtttcttatctcaggaggggtgacacctgctattcagtgtgatattcaacgggaacacttcacatgtaagggcaacatcacatttttcacatcggaaaagttgtgttcttatgacattcagcggcatcgggtttgcttttccctggtttggactatccacctggatttatggcccttcataacggngggggccaatgttacgggtttncgagggggcttccnttttggggccggg

SEQ ID NO: 50415 - DNA, 306 bp, Homo sapiens
  misc_feature (1)...(306): n = a,t,c or g
gctttgcgcctatgagagctcttggacgatgccgaaaataccccccaaacccaaaaaagagatctctcgaggatccgaattcgcggccgcgtcgaccccatccgcctgtgagtggtcaactttcccccgcccacgtatgctgaagaagggtcctcagcccctgccctgcaatgggatttntcaannncngncngttnnntnatgtgaggccaggantttnanannctnctgncancattgtgaantnnnatatntattaattttnttnnnttntanntgtnctgnttggntnangcntgtaaaccc

SEQ ID NO: 50416 - DNA, 1041 bp, Homo sapiens
tttttgacaatgggaaggaaagtaatttaataaacaacataactcaatccatgaaataaatatttatttatgtaatacaatttgctaaacaccaccattattaaggagagcactaggaaaaactaccaaacacagcatgtgaaacagttgggcacggtggtaaagggcacagactctggagccacagctggctaatacactgcaatattttatgtttagcaaattatagctggtctgtgtataaccagaagagcggtatctgggggatcaggatatctaaattctagacttacagcctggccctgaatctaactatcaatgttgccttgggaaaaactgctcaaacttttgatgtctaaagtttcagacttggtaaacttgagagggttgaggtccaaggtcccttaaatgtaaactttaaaatgcttttttgggaatctttcaaatcttcaagctcttcaaagtgcaaccagactttctccttactatacagtctgaacaactttgagaatcactgtattatcttagtttatatagtaatcctgacctaaattttattattctcattttggagacaaggaaatagaggcctaggctagcatggctaaataagtgataaagctgggaatagattttaactctgcccattttaaagctgtgcattttctatttttctgtaagttattctgacattagacttaattttcacatagtaggctaggattccaagcactcaatatctatatatttatccagatagctcttactttgatatttctaagtctatactttgagctaacatttgctctgttctctcctatttcagcactcccttttcttgttatttatggtgttgtcagcccatatggtctaactctcatttcatactcctgttgaatgtctcctacatgtctgttttttagcagtaactcctgacttttatctgaaataaaatttttaggtacttgctcatttcatccactttatgatgaaaaaaattagctaggtgtgaagttggtgctaaaattataataaacagag

SEQ ID NO: 50417 - DNA, 394 bp, Homo sapiens
ttcatgggagaagattgcgcattgaagcaaaggaacgagtgaagtctgtatttcatgccagagagtttggaaaaataattaacttcaagaccccagaggatgccaggtggatcctcacaaagctacaagaagcaagagaaccttctccgagcctctgacagagaacactgcctgaagacacacagcaataagtgattacagctcctagactaccttccaaaacctgtttgggaagcatattacagaaatgatttcaagtaccctgtattctggatgctaaaaaacaaaaacaaacaaaaaaacaaaaacaaaaaaacaaaaccagaatcaggtaaaacagctatgtgattaaaatattttaattcttcagcaaaaaaaaaaaaaaaaaaaaaaa

SEQ ID NO: 50418 - DNA, 549 bp, Homo sapiens
  misc_feature (1)...(549): n = a,t,c or g
atttcaagcagtgtatcccatatggtatctcttgctcttccttcaactccaataaatttaatgactaaatgccaagttaacaaatcaacttccatttggattgtaggtgtgaaggcacaactctaattgctattagtctacatgtatttctgtaatagtattgtgtcatatcaatttttaagatgtctaaattttatggtcacaagttatccctcctcagtatgaaaaataaattagatattgaaaaatgtctaaacttcagtgatggaaagaatatttcaagaagttttttaacctaaatacttttattttgaatttaagtctttgcacataaaatatagcaagcttacatattaaactatttacgtaaatggaatgtaagccatgactttaactgaagtgttcacattcactaattttgatagattgctgtccttaataattttggnggaaattaagccaaatgattattgtactacagtattttcagaatatgggaaatcaattaaaaatgtaatctaatctagtttaagatttttgtttaatcat

SEQ ID NO: 50419 - DNA, 81 bp, Homo sapiens
ataccttgtaaaagttgtgaaatgtctagtccttaacagagaagttgcctctggttttcctaaagaaattaacttatattt

SEQ ID NO: 50420 - DNA, 2228 bp, Homo sapiens
gcaatcagtaccaagaattagtccagaatgaagccaaatgtccggtcaagatgtcacacagctccagtggctcagccagtctgagtcaggtttctccagggaaagaaacagatcaaactgaaaccgtgtcagttcagtcttcggtattggggaagggtgtaaaacatcgacccccaccaatcaaacttccctcaagctcaggaaatagttcctcaggtaactattttacaccacaacagacaagcagctttctcaaatctccaactcctcctccttcttctaagccatcaagtattcctcggaaatcatctgtgggatctcaatcaagttaggcatgctttctccagctgccctatcacctgccagcttcattcacaaagaaccacgggccacccggggtcatggggcaaactctgctggacttaacttcatcaatgtagtgggctctgtttgtggggcccaggctttgatgagtggttcaaaccccatgctgggctgtaacactggtgccataactcctgcaggaataaacctgagcggccttctaccctcaggaggtctgctaccaaatgcactgcccagtgcaatgcaggcagcttctcaagcaggtgttccatttggtttaaaaaatacttcaagtctcaggcccttaaatctactccagcttccaggtggttcacttatttttaacactctgcagcagcagcaacagcagctctcccagtttacaccacaacaacctcagcagcccacaacttgtagtcctcaacagccaggggagcagggttctgagcaaggttcaaccagtcaagaacaggccttatctgctcagcaagctgctgttattaaccttactggagtaggaagttttatgcagtcacaggcagctgcagttgcgattcttgcagcatcaaatggctatggcagcagcagcagcacaaacagctcagctacatcatcatcggcatacaggcagccagtcaaaaagtaaaatgaagagaggcatgccaaccactccaaaattttgagtcttgcattactttttgttccttttttaaaaacacaagagcactgaatcaaaagaattgagtttctactttttgttttttttaatgtgtcagtattttacattgctagatgtacaaactttatacagaagcacaaccttatcatttttaaataaaaacagggaaatggtttaacaaactagggttggtttgcctaagtcattgctttttaaaaatggtttcactatacataatatatatggaagtgacctaagaaataatagaaacatctttcagaagaatgtagtttgatatttatttagtataaaacgtttgtgcacagtgttaacaaatacaatttttacaaatctgttttgaaaatgtggtggctgtttatttgggtttcatatctcttaattacttcatccatcagttttttaacttctttgtgtcttgtaactgctcggctcatacagtcctgaagtttagctccagttagcccacttccacctggtttgtgaagacaacagagtttgccttcctcatccattactattgttaaggttcctgttgccagatgttcctcctctccagtagggtcaactataagcaaagtgtcatcaaacacagcaaaggaagttgcaactggatgagttctaatattcaaataacttttcttctttaaattaacttctgctaaagcagtttcttcatttatagtaacttcaggcaactgtacattttttaaagccgctagcaaagcaaatgtgcaggcatccaaaatgtttccatcgtagtcgaggcaaatgagatcacagtatagaacccagacaagctttcctggagaaatgcataagtcctctttctgaattatctgtgaattttcaatgacatctgcaatgaactggctagacacttgggcctcttctccaggaggtgcagaccggaatctcgatgaacacaggggtggtagatacacattaggaaaaacgtatccctttaccagggcatctgttgatgggggcggaaattctgctttaactccacagattactgtagtatttcccaacttcactaaagcagaaccatctgcggtactaattgaaccgatgttgacagttgtggttctgaattcaccaagttctcttccatcaggacggcagttctctttcagaaatctcctgtaatactccagaggttccacggttttgaacccagccg

SEQ ID NO: 50421 - DNA, 245 bp, Homo sapiens
ccggaaacatgcacaattcttggattacaacaggtgaagattctggggtgggcgaaacctccaaaagaccattttcccatgacaatgcagattttggcaaagctgcatctgctggtgagcagctagaactggagaagctaaaacttacttatgaggaaaagtgtgaaattgaggaatcccaattgaagtttttgaggaacgacttagctgaatatcagagaacttgtgaagatcttaaagagcac

SEQ ID NO: 50422 - DNA, 287 bp, Homo sapiens
gtccctacctactatccagcgaaaccacagccaaggaacgggcttggcggaatcagcggggaaagaagaccctgttgagcttgactctagtctggcacggtgaagagacatgagaggtgtttacaccagcaaaatactcattttttaagtgtaattaagttgaagatcaaaaaatggaaatgtataattaaatcatacttagcaaatctaacacatgaaatgtaacatctgcatatggagaaccgtgttactttattgaaaaacattaaaagtttgagaacttaagt

SEQ ID NO: 50423 - DNA, 520 bp, Homo sapiens
tggatccctcatgacagcctccatgggggattcagtccccagagcaggccgtaccctgctgtagtgcctcttatcccttccccgtctgccctgggtcagaggagcccccttgggcttcccagtcttgcctggctctcctccttggcccaggagctcaggatccctggggctggggaactcccaacttcgtgccctagatcctgcacctcccccactcgaaagtgggtatccgaaaactaagccagggaagcggttaacttatctttgccaacatttgagggagccttgggccgctgcatgtcgttatgcagatcagactcatcagggggagccctcacctctgcctcaagcctcccgtggaaggcgagatggtcctggaggcagtcctcacctctgcctccctcgctcctccaacagctgccttctcccgggttccagcctctcagtgtgttggagaggtaggggtgcggggtgggggggagctgaatcttcaatcggaataaaagcagccctccccttc

SEQ ID NO: 50424 - DNA, 630 bp, Homo sapiens
tttttttttcttattgttaacataaaatttaaattttgatattaaatgctaccagtattattcctttttcaaagcccagtttagctcccaaataagctcacatctgtcttttagccctagcacttccagttccacattcctgtttaaagtacttcatccccctgcccctacctacttttttccttccagaagtgactaatcttcctgttattctactctgtcagtttttcccctagtattcttttcatgttgcataatgtttacttttcactagctccttctataattttactaccgtctcccttggtactagccttccgttttcaacagattaaaatagccaatatttatgtattagcaaacttttttgtcaagtttcgtgctgttcagattaagctatttcctcaagtcaaaaatacaactaatcttttgatagagtaaatattgtttttaaaaaaatccatatgttgaccttcaaagttaaattcagtgtaagttttagaattaacagatatcacaattaaagggctaagatttcaaatttcctgataaggtactccagcaaagcaaacagaatatcactccttttaaagatctccttcttcccccacgcgtccgcccacgcgtccg

SEQ ID NO: 50425 - DNA, 1094 bp, Homo sapiens
  misc_feature (1)...(1094): n = a,t,c or g
ttttttttttttttttaaaaaatgtataatttattatatatgtatgtattccttaacaatatgttgtataacccaacaatgaaatatacatcaatgaaaatgacagctataaaacaataaaacttgtgaattctagagacatgttgagtgaaaaaaaccaaatccttagactacatagagtatgatacaatttttttgaagttcaaaaagaaagaaaactataaaataagtcactttagggatacatatgtattttaggtctttctacattcgaacaaatctattaaaaagagagcgggggggtcggcaaagataggagaagagctcaaatagataaaatacaagcactcataatgttattcttaagttaggtgatgagttattatgcttgataatttatttgcattccccatttacccttttataagcatcaaatattacatttaaatataagtcccaaattatgtataaagtgttgataaaatttatatctgcatggctgttcctaaaactatgcttattttatcaagcagagttcttggttttaggcaattcaggttagttttaataacagcaaaaaaatgattttattaaaagtaattctcaggatctctaggacagccagcaaacaagaattagaggttacaggcccaggcaacaaggtttcncgccttataatccccagcacttttgggnagcccaaagcnnnnnnnnnnnnnnnnnnnnnnnnnnnnnnnnnnnnnnnnnnnnnnnnnnnnnnnnnnnnnnnnnnnnnnnnnnnnnnnnnnnnnnnnnnnnnnnnnnnnnnnnnnnnnnnnnnnnnnnnnnnnnnnnnnnnnnnnnnnnnnnnnnnnnnnnnnnnnnnnnnnnnnnnnnnnnnnnnaagannnnnnnnnnnnnnnnnnnnnnnnnnnnnnnnnnnnnnnnnnnnnnnnnnnnnnnnnnnnnnnnnnnnattagaggttatcgctaactaaatcacttttgctgtacctctgtggagatgaatgcagtagtgttgttaatcaccatcttcaaaggaatctgcatggttccctccttctttgtatcactaattttaaaattgaaggcag

SEQ ID NO: 50426 - DNA, 62 bp, Homo sapiens
accctacctactcccctccttcataattcacagatatctcctctaataaatctcttttaaaa

SEQ ID NO: 50427 - DNA, 348 bp, Homo sapiens
gatttgtcttggatgcttatgagcatttgtttttcacaactaaggttgaaagacctgacatctcacacaatggggttctgggaattcccctttcctcctttatctgtttttattgtttgtttcatttttaattgcaccagtctatgttgtcggaaactttgttttgaaggggcaaatgtgaggataacaaggaaaggcaatgtgatggaaagactggatgaatttacctatggctatgtaaattattttaatggactgataagatgtttcaagtctcatgcttggatctttatttattggtgatctaggatctgctcagctctttagcacatgaagaaaatcaggtac

SEQ ID NO: 50428 - DNA, 1464 bp, Homo sapiens
tttttttttttttttttttgatgataaacgactttactctaaaagcggctggaactcagtgacatgagcgtgcgctgaccccacatggggccccctgtgcaagcagagctggccggcccctccttgctggcagaggcacgggaggcctgctggggatgaggccactggccagggctatgctgcaccagaccaatggcaccgcccccacccctcccagcgcaggggcagcttggagcagaggcagcactggccaccgctgcgggggcaagtcagcgtcaagagagtccctgagtgagaaggcccagataagcccaggccccccaggccagcggacaggcacaggcagggcctacagaggtgccaaggccccaggccagttgtgctaggagcctggacctgctcttccacacccccatcccgcccctactgcacaggcttgtgccttggtgccccctggaggcagcagggaggaggcttctcaggcagaagtcttaagttgcatcccattccccagaatccccaggagggagaagagggatgggctgcccctccttcctgccagagccacagctccaagggcagtgggatggccctgcacccagcccaggtaccccttcctctgtgccgaccatgctgtcctttggctccgaggaggccctgagcactgccccacccccacaccttggagggagcagacggagggggtgagtactgcacagagcctgcctggaggtgcagactcatgcactcagccctgaagaggtgagagaggctggatcttaactgtggtcccaatgggcatattatgagtggtccttgtccctgcctgctatggggtaaccctgacccagctagcgtccctgacaacatgatacaaaaacacagaactctagcgggatacagagatgtgtgcacagctggcaggagcactggccacctcccaacctgttccccatagcttactcctggatgtagcctggagggactgctgggctggggagggactggccatggagcagggagctggatgccagcgggacctcagacctggactgcagcatctctttggttatcggttgtgtgtgtgctcagaagggaggaggccttccccttgttacatctctctctccatatattctcccggactcatcagtttggggggcgaaaagtccaccacatggtcttggcgacaaaccactggggatgtcaccccagctgcagagctggaagcttgtgccggaggggaaactgggtgagcaagggaggggcgaggcctgcctgtgctctcctcaccactgctgggaccagaaaagatgggcacctgatagctcagctgggcagtcccaacgcattcccactcagccaagggcctgagccgcaggccattctggttgtgtcttttcagagcagtgagacccagcctcaggcctcctggggggcagcagccacactgcccgtggcgct

SEQ ID NO: 50429 - DNA, 515 bp, Homo sapiens
  misc_feature (1)...(515): n = a,t,c or g
cggacgcgtgggctcatgttgaaatttgatccccattgctggaggtgttttgagcatggagcggatccctcatgaatgtcttggcgttgtccttgcagtaatgagttcttgctctatttttcctcccctggaagctgattgtttaaaagagcctggtatcctccctccctttcttctttgcttcctctctcttgctgtgtgatctctgcacacaccagctcccctttgctttctgccatgagtggtctgaggctctcannnnnnnnnnnnnnnnnnnnnnnnnnnnnnnnnnnnnnnnnnnnnnnnnnnnnnnnnnnnnnnnnnnnnnnnctttgttttttttttttgtttgttttgtttttttttcagtaaattacccaggcctcaggtattccttaaacaacacaaatgggggctaaggacacaggggtcatagggggataggcagggncacctgaggcccaagccaggaacttaggnttcttcaactgtttaaatgnagggatgaatttgta

SEQ ID NO: 50430 - DNA, 752 bp, Homo sapiens
  misc_feature (1)...(752): n = a,t,c or g
ttttttgagggcaggtaaatgtattcagagcacatggcgagtaagaggcaaatcttctgccagcaagtccaggatttttttcaccagaggacattgcttggtccccagggctcaggaccctgtgttttgtctcactcccacccacagagctcctgtatccaggcatcaactccaactccnnnnnnnnnnnnnnnnnnnnnnnnnnnnnnnnnnnnnnnnnnnnnnnnnnnnnnnnnnnnnnnnnnnnnnnnnnnnnnnnnnnnnnnnnnnnnnnnnnnnnnnnnnnnnnnnnnnnnnnnnnnnnnnnnnnnnnnnnnnnnnnnnnnnnnnnnnnnnnnnnnnnnnnnnnnnnnnnnnnnnnnnnnnnnnnnnnnnnnnnnnnnnnnnnntgtactccagcctggtgacagagcgagaccctatcactgccccccgccccaccaaaaaaaaactgagtagacaggtgtcctcttggcatgataggtcttaagtcccctcccagatctgtgacatttgacaggtgtcttttcctctggacctcggtgtccccatctgagtgagaaaaggcagtggggaggtggatcttccagtcgaagcggtatagaagcccgtgtgaaaagccatactccaaggggctccaagtccagcgcacagtcccagaagggcccagcaaggcagccagggcggcacaggcaccaggtcccaaccttcttccctgtttgcccactctcagaccccggagttcatcatct

SEQ ID NO: 50431 - DNA, 745 bp, Homo sapiens
gcagggttgtcccaggtcctgctgcgaggaggcggccaggtcctgctcggctggacactccattacttcccgtttttcctgatgggccgggtcctctacttccaccactacttcccagccatgctcttctcaagcatgttgacaggcattctgtgggacaccctcctgcggctctgtgcctggggcttggcctcatggcccctggcgaggggcatacatgtggcgggaatcctgagcctgctcctgggaactgcctacagcttctacctcttccaccctctggcttacgggatggttggtcccctggcccaggacccccaaagtccaatggcaggactaaggtggctggactcatgggacttttgaggccactgcaaagattccagcctgggtccaggaacttcccaggagagccagctgggaagcagtactggaccatccggccatgaggaagctgcctaaggagcccgaagaattctgctgctcaccaggacccagctctggagtgcagctggaatggaacccagcattggagagagccgggagagagccgcagctccgtccacagcaccacggagaggacagcgcctcttgggctgctccctcgtgcacagcgcaggggaggatgggtgccagagggtgggagtgggtgcgcgtgtgtgtatgtgagggcatgttgtccatatccctgtggaatacagaccgtgtaactggacagctgagtgtcataaactctaaaatagtc

SEQ ID NO: 50432 - DNA, 162 bp, Homo sapiens
cttttctaagtgtttgcttaagcagagtgtaagaatgtgtggttacctttggttgagatcctttccattctttttgactctctgcttcagattttttcagtagtgtgagtcaccaaaacatttactaagagtaattgggtttagggggtttttttttttttt

SEQ ID NO: 50433 - DNA, 1591 bp, Homo sapiens
tacttatgtgccaaccccttgttttaggccattcccaatattcctgattaggtgcaccctcctggtgattctggttttacagctatgggacttacacgatcacaagagcaaagaagccctcatgtatctgaagactgagggggcctataaacctgaaactggcccaaggcaaattagagctctcaccagcccaaagaaagcacccagaggtccaaacagctgggaaaatttgggcagaggtggccctctccagaaaaggtggattgctggacagtacaaccacagagacagaaggagaaaacagataggagctttactcaaaatcacaaagacactatttttcattgagaaccagtgtgagagtaggaaaattggcaaatggccagttgcccccagcagccctgaagaaatcaggtaaattccgctccagagacggcagagctggtggcgccattcttcagggcagcacagcctttttctgctacacctcactcggccagggcaaagtttgtagactgcagccgctcagtctcctggcagatgttctgctccactgtgtcacactcggctaggaatgcctgaaccttttttaccaagcctttccttttcaatctactgtctttgaaattttctggcaggatcagtgtgtcaatctcctccaagatcttcataaactgctctattgtggcttttactctcctatcaagtttgcagagagcttcagcttgcaaatccttgggcagaaaaccctgctggattccagtaagctctttattcaactcttccagctggtcagctatcttctccacagacttctccaaatgtttcaacttctttagttcaacctcttcctgtggactgttctttttcccaattaacatgacccggcaaccatcttgtattccaagtgctgacaacggtgtttccatttccttcagagattttcccttaaatatgagtttctgaaaagactgtggaacccctatgacctcttcaacaacctgggccaggtcttggacaactggttcactgctgccctgctgggaggtaacatgaaggtcgtgcttctcattgctgtgggtgacagtcacggtgagcccagctgccgccatttcctccctggtcacctcctcgctccgggtcgactcctcgtcccgggtcacctcctggctccgattcatctcttcgccctgggtcgcctcctcactctgggtcgcctcttcactccaggtcgcttcctcactcagggtcaactcctcgctccgggtcaactcctcgctccgggtcgagcggcgccgggttttcttcttcatccgcggcctgcgagcgccggcggcggcgcccctggtgggtcggtcatgcccgctggcagtactccgggcaggtggacgccgagagggaggcggaccacgctgggccgggggctccgactggcgcggctcccggcctggccgaagggcgcgcagccgggaacccagccgctcccggtcgcctcgcggtctccgcgcccccccgcgctgagccaggcccgcacttgttgaccgcccagcgatggaagctgagcgcggcgtctcacaaccccgcccgacta

SEQ ID NO: 50434 - DNA, 416 bp, Homo sapiens
cggcggggtccgtggccagagctgcagagagacaaggcggcggcggctgctgtgctgggtgcagtgaggaagaggccctcggtggtgcccatggctggccaggatcctgcgctgagcacgagtcacccgttctacgacgtggccagacatggcattctgcaggtggcaggggatgaccgctttggaagacgtgttgtcacgttcagctgctgccggatgccaccctcccacgagctggaccaccagcggctgctggagtatttgaagtacacactggaccaatacgttgagaacgattataccatcgtctatttccactacgggctgaacagccggaacaagccttccctgggctggctccagagcgcatacaaggagttcgataggaaagacggggatctcactatgtggcccag

SEQ ID NO: 50435 - DNA, 1248 bp, Homo sapiens
cgcggacctgcagccatggcagtcaccgcccaggcagcccgcaggaaggagcgcgtcctctgcctgtttgacgtggacgggaccctcacgccggctcgccagaaaattgaccctgaggtggccgccttcctgcagaagctacgaagtagagtgcagatcggtgtggtgggcggctctgactactgtaagatcgctgagcagctgggtgacggggatgaagtcattgagaagtttgattatgtgtttgccgagaacgggacggtgcagtataagcacggacgactgctctccaagcagaccatccagaaccacctgggggaggagctgctgcaggacttgatcaacttctgcctcagctacatggccctgctcaggctgcccaagaagcgtggaaccttcatcgagttccggaatggcatgctgaacatctcgcccatcggccggagctgcaccctggaggagaggatcgagttctccgaactggacaagaaagagaagatccgggagaagttcgtggaagccctgaaaacagagtttgctggcaaagggctgaggttctctcgaggaggcatgatcagctttgacgtcttccccgagggctgggacaagcgctactgcctggatagcctggaccaggacagcttcgacaccatccacttctttgggaacgagactagccctggtgggaacgactttgagatctttgccgacccccggactgttggccacagcgtggtgtctcctcaggacacggtgcagcgatgccgggagattttcttcccagagacagctcatgaggcgtgaccggggcccacatctgtgtgtcgtgacttctgaagagtttggcctaggcctaaagagaggtcctggtgttggatagatgccagggcccctcctctggcccaggacgcctgctgcaagcccacccagatggggccagagtctgtgtggacaaccgtccccagccagtctgctcctagtggcactggcttcgtcctcccagggcccagagtgttccccatgctccacctggtggcccaggccacagctgctgcttgtatttcggtacagaagaggtttctttctgcaccaggaggaggcgtgctcaagtatcggtacgagatctagcctgccctgcctgcctgccctgggcgatgaggtacggtggggaaggtgcctattttagagaactttgtcacagtattaaagttcccagaacaaagtaggtgtcagctgaaaaaaaaaaaa

SEQ ID NO: 50436 - DNA, 397 bp, Homo sapiens
gcggggccggcagggggacctgctgctggaagagcagcggcccgagccggggccatggcgaagctgctgagctgcgtcctaggcccccggctctacaaaatctaccgggagagggactctgaaagggccccggccagcgtccctgagacgccaacggcagtcactgccccccattccagctcctgggttacttgagtttgtccaaagtggtgccgttttctcactatgctgggacattgctgctacttctggcaggtgtggcctgcctccgaggcattggccgctggaccaacccccagtaccggcagttcatcaccatcttggaagcaacacatcggaaccagtcttcagaaaacaagaggcagcttgccaactacaactttgacttccggactgc

SEQ ID NO: 50437 - DNA, 363 bp, Homo sapiens
  misc_feature (1)...(363): n = a,t,c or g
gatgacccgagtccaattagctgaaaaccttctgtagaaaggtgattgtatgaaaaattcaatcaacattaaaaaagggaagtggggagggaatacaaacttgaacaaaatattcttaaatgaagttgcatctctttttaaaattaagatatcattcatgcaccatacggtttatcctattaaggtgtaaacttcaatgtttttaatcatattcactaagttgtgcaannnnnnnnnnnnnnnnnnnnnnnnnnnnnnnnnnnnnnnnnnnnnnnnnnnnnnnnnatttgcaatcactcctcctcctccttcccccagcatccggcaaccactaatctactttctgccctatgaatttgccta

SEQ ID NO: 50438 - DNA, 1024 bp, Homo sapiens
cgtcgacttttttttttttcgcaggtctgaaatggactttaattggcttttgtctctagaattacccacccgttcctgcgctctacggttctccatgccccctccagtttgggggtctaaaccaaacaggagaggtgcaggggaccaggaggtgtcctggcacaaaggttcgggggtctccctggcaaggggtcccagggcctggagcccaaggcccagccaaaagcacacagcatcaaaacatgtttttagtgggaagctccaggccctgccctccccgggggcctcgaggtcggggagcaggtgggcgtctgtctgcctccaggtcatggcagtgcaggcggtgagctgggggccggcaggggcgcggacagtgcggcgtggtcgaacagagggttgcgcacctccatttccccggtcggggccaggcccgggcactcgtacaccgtgaagtctccgtcctcattctcctcatccgaggaggccgtgtccagctccttgggtggctctttatgccgctccaggcacagcatctgttgccgttggtgctggtagtggtacatctccgcgctctgtgccagccgctggtccccaggcgagatccggggagctgcaggtgagccaggggccttgcagtggcgtagtcggccttctgagtcaggcggatctcacgctgcagcctgcaccagcagagggaggctacggagagggcggctgcaccgatcacacagaacgccaggatcagcacagagggcgaggccgtcgccttgccctccccggggctccaggggcgacatgtgcaccgggtcggatgacacaggggagcccagggaggtgtggggcgtgggcgtgggggttcctggagtggaggggaggcccagctccagcccctgcccccgtgccgagaagcccagggtggcaggctccgggagccgctgtcggtccttgggtaggggcggagttgagtgtccagactccttccgggcaagctcctgggccaggaagtcaatctcatcttccagtc

SEQ ID NO: 50439 - DNA, 358 bp, Homo sapiens
gtccattgtcatcacgtcagagaaaaatcttcaggggtgctaatcctgttgcatcagttgatcatactaacgagaacggtaatgcgacaagatacacattgccttcatctgtacattctgtgataccaggcaaattaccaattacacacagctacttatattttatgaagggcattttttagatgacctcatcctctgtgttatttgttgattgggtttgttttctgtttgttggtttgtttgtttcttccacgtaaggaaaagtagtgtaaacagtagcgagaaaatggaaaccacagaggaagatgtattttgcatgtttttcctttcagtgttcttacacgttgtatcactgcat

SEQ ID NO: 50440 - DNA, 430 bp, Homo sapiens
tttttttttttttcttttcatgctaaatttttatttcaatgttatgcaactgcataagtataaatattttgttcaatatacaacaattatgacgtccataaggaatttcttagagaaaataagactgcaaacactttattgcacagatcctaacaaacttttaagctggtaaatctacagctgggagtactaccaaggagcacatcctacaatcacacagagactgaccaaatagaacacaatgaggagaatttctaccagctgattggagaggtttacaacaacaaacatgtaatacatgaatgcaaccttaagtactctttactcatttataatgaaaaacatatttggcaaaaatcgatgatacactatacaaaatatacataaaaatatcatttggtaaacaaatagctagttgtgctttaaagga

SEQ ID NO: 50441 - DNA, 110 bp, Homo sapiens
ggactttaataatgtgtgacaaaagagcaatttccattgaaatattgaagtgttacactcagtttacacgtacagaaatcattctttttagtgagtcttttagttgataa

SEQ ID NO: 50442 - DNA, 100 bp, Homo sapiens
ttatccctccccctgcccttgaaaatgaattttttaaacacaaataaaaaatatttcagtgttttgagaattttaataatttgcttaatatagtacagga

SEQ ID NO: 50443 - DNA, 748 bp, Homo sapiens
ttcaagctggcttttcgtatattgtgtataaaaagatcagattcaggatgatttggtgggattgccaggggctgaccggagtgttgctgggaaggagcctcagctcgtctccaggtcctccaccaggtaggactgggactcccttagggcctggaggagcaagtccttgcaggtccagttccaggctggtgtgaaactgaagagcttccgcatcttgcttgggttggtgggctcggcccgcagctgcctggtactgctcatccgtcaggaccttcccgtacagagcatccagcagccactcaacgtttgtgaccctcgcgataagcgcagcccggtgctggtctataaagtgcaggcctggcttggctgccgactgaggaggggcctggatcccagctgggcgcggctccagagccctggtgcgtggccgcctgcagctgcccggccatctcctgcaggcccatgtcgcgcagcacgttagcggtgagctcggcgccgtaggtctccaggtagaagctgaccagcttgtcggtgaggtccaaggcgtccatggacagcagcgcgccccgcgggatgcgcccgtagccctcgcgcagcggcaccgacagcagcttcagcttgaacttcttgagctcctcggcggtcaggttctccagcgcatccaggatggcgtccggcgctgcgccccatcggctccacggattcacccggccgctgccgccgctcaccccgctgcagccgcctgacg

SEQ ID NO: 50444 - DNA, 468 bp, Homo sapiens
ggggtgtgggggaggtagccgcagtgcaggggcagcgcggcggaggccaccgacgggacgcggctccgggaacatggctcgcttcgctctgactgttgtccggcatggagaaacaagatttaacaaggagaaaataatccaaggacaaggagtagatgaacctctttcagaaactggatttaaacaagcagcagctgctggttatatttctgaataatgtgaagtttactcatgctttctccagtgatctcatgaggacaaagcagaccatgcatggaattttggagagaagcaaattttgcaaagatatgacggtaaagtatgactcaagacttcgggaaaggaaatacggggttgtagaagggcaaagcgctaagtgagctgagggccatggccaaaagcagccagggaagagtgccctgtgtttacaccgcccggagaagaagacgctggaccaggtgaaaatgc

SEQ ID NO: 50445 - DNA, 363 bp, Homo sapiens
gaaaatctttcctctaaagtcaaactgttgcagttgtattcagaggccagtgtagcgcttctaaaactgaataaccccaaggattttcaagaattgaataagcaaactaagaagaacatgaccattgatggaaaagaactgaccataagtcctgcatatttattatgggatctgagcgccatcagccagtctaagcaggatgaagacatctctgccagtcgttttgaagataacgaagaactgaggtactcattgcgatctatcgagaggcatgcaccatgggttcggaatattttcattgtcaccaacgggcagattccatcctggctgaaccttgacaatcctcgagtgacaatagtaaca

SEQ ID NO: 50446 - DNA, 2496 bp, Homo sapiens
  misc_feature (1)...(2496): n = a,t,c or g
ctattggatatggagcctttggtgttgtctggtcagtaacagatccaagagatggaaagagagtagcgctcaaaaagatgcccaacgtcttccagaatctggtctcttgcaaaagggtcttccgggaattgaagatgttgtgtttttttaagcatgataatgtactctctgcccttgacatactctaacctccacacattgactattttgaagaaatatatgttgtcacagaattgatgcagagtgacctacataaaattatcgtctctcctcaaccactcagctcagatcatgtcaaagtttttctttatcagattttgcgaggtttgaaatatctccattcagctgggcattttacatcgagacattaagccagggaatctccttgtgaacagcaactgtgttctaaagatttgtgattttggattggccagagtggaagaattagatgaatcccgtcatatgactcaggaagttgttactcagtattatcgggctccagaaatcctgatgggcagccgtcattacagcaatgctattgacatctggtctgtgggatgtatctttgcagaactactaggacgaagaatattgtttcaggcacagagtcccattcagcagttggatttgatcacggatctgttgggcacaccatcactggaagcaatgaggacagcttgtgaaggcgctaaggcacatatactcaggggtcctcataaacagccatctcttcctgtactctataccctgtctagccaggctacacatgaagctgttcatctcctttgcaggatgttggtctttgatccatccaaaagaatatccgctaaggatgccttagcccacccctacctagatgaagggcgactacgatatcacacatgtatgtgtaaatgttgcctttccccctcccactggaagagtttataccagtgactttgagcctgtcaccaatcccaaatttgatgacactttcgagaagaacctcagttctgtccgacaggttaaagaaattattcatcagttcattttggaacagcagaaaggaaacagagtgcctctctgcatcaaccctcagtctgctgcttttaagagctttattagttccactgttgctcagccatctgagatgcccccatctcctctggtgtgggagtgatggtggaagataatgtactactgaagatgtaatgtagctttccactggagtctgggatttgcaattctggaggttaatcatgcttgtactgtaattttactaatgaagttttaaattaacaaccactacttgtatgatatgaataatatttagaaatgttactagacttttaatcttgtaaagtggttgtgcttttagaagaaaaatattttacccagagttgcacatgttttatgaatttagtgcagctgttatggctcacctcagaacaaaagagaattgaaccaaatttgggagtttggggttttatgttttgtttttcttttctaaaatgaagtgagattgttcacacacacacacacacacacacacnacacacaaacacaaaggacagtcatacattttgatatttgagccattcctaaagatttggggttttctaaaactaaagaatctaggaaccttgcctgcgaccaatcatggagccacgtgagctgatcgtggctgcacctggggggagggtagggaggaggggcatgccacctaatgatcaagccctataattagcttctcattagagccgtgatggtgatgtgtgctgtctaaaatccaatgttgtgggtagagagaatgagtttgtgactaggagagactaaacttttgttttccttacccagtataaatatatatatatatatttaatctatttttattagaagtttttctgctctttcttacataaaagaaccccaagcatgcatctttcatgtgtgtaaataattcatttctgggctaatttcaaaagaatcccaatattgctgtatagaaagagaactagcttgcacattttaggtctgtgaaattttgtgagacttttcctgcactggacagtaaaaaaataataaaagacaaaaacaaatttaaaaaaaaatttaagccacaaaaaaaggcacatagggaattatgtcaaatgtgtttgtgtccttaggcaaagctgtgggagtcttgaaatgtcacagtagtaaataacttattactttttgacaagttctttttttctgttggaacactgaattcttctgtgcatatgtacatatgaatacaaatcgaaggcctctacctcctggagttatacaacttggcttgtttacctccacatgctgatgatgactattttttttttttttgagttcagtgtggagacttgaaacttgaatgtcccttccaacttttatattaaaaataaaaagacaagggaaattgaagatcatttttcacctgtacaaggaatactaatggatcgtcttaaaattggtctaggaaaaaaccttggtggt

SEQ ID NO: 50447 - DNA, 421 bp, Homo sapiens
  misc_feature (1)...(421): n = a,t,c or g
tccacctgctgctgtgagggagtgagaagtgattgaggaatttagctggtggaggagacagaggaccccgaggttagggctgttgttttaccaaagctgaccgagcctgaggagctggcctcaaagcaaaggcctggatgaagcgaggagcagcgtggctcgttgggtaggagggtcagctcggccgtgggagcggccagggcacggcctggagaggatnccatggctgacgcgagttagnggggagctccactgcccaacccaggcaacggaggcaacagnggagagaatccaagctagcctggggggagcgcttttctccatgtgaggcacttcctgaatctttccttctactgactcgtttaattctcccaacagccctggaaggggacacattggcaatgtctggagacattttggt

SEQ ID NO: 50448 - DNA, 94 bp, Homo sapiens
tgtcaaagggtcagtaactttgaaggatctagattgattagggtagacattttaaaagacaaacatgttaaggtgaataatttttttttttttt

SEQ ID NO: 50449 - DNA, 568 bp, Homo sapiens
  misc_feature (1)...(568): n = a,t,c or g
gggtaaggagggtgaatcttctaagtgattgacaaggtgaagcaagtcacgtgattacaggataggcgggcccttcccttttaggtagccaaagcagagagagaaggcagcatatgacagcgttttctgttcacacgtacaagaaagatcaaagactttaagactttcactatttcttctaccgctatctactacgaacttcaaagaggaactaggagtacaggaggagcatgaaagtggacaaggagcgtgaacattgaaggaccacagggaggggtttaggcctccgatgattgcggccaggcctggataatatccagccttccacaaaagctggtggagcagagttttccctgactcctccaaggaaaggagactcnnnnnnnnnnnnnnnnnnnnnnnnnnnnnnnnnnagacactggcgttaccgcttgaccaaggggccctcaagcggcccttatgcgggcatgacagaaggctcacctcttgncttctattcacttctcacaatgttccttcagcaacctgacctatacctgccgggtatttccagggtaatataattaat

SEQ ID NO: 50450 - DNA, 245 bp, Homo sapiens
ggatgatgtgtttggtttttttcctcctttgtgaggattattaggatattaaccgtccctcttaacacacgggaaccctataccatatgtgaaaattaaaagtcaattatttgagcactcaacttaagcagtagttggggaaagaataatgtcaaagaaatacaaacatttgggctgggtgcagtgattcacacctgtaatcccaggcactttggggggctgaggtggggcagatcacttcaggc

SEQ ID NO: 50451 - DNA, 412 bp, Homo sapiens
atagactaaaagtaaagtaaatgttttaaatttgtattacgtctaaagatttgtacgtggatgtcattaatttaaatgtccatactctatttataaatcttacttacaaattttgtaacatggaacaccatttgatttataatacttgcagaagttcctgtatgctgttaaataaattaatttgtaaaataattttgcattctatatttagttcagcatttaattgttaaatgagtttatagacttgatatgtgggtgaatgaaaaatatttacattaaaatcatccaaggcattttcccttttatttttgtaggtatggcatattttaggaaaatgacttatggaatgtttccatcatcacagaaacagtaagctgctatgttttcattactgcttcagtcattaaattta

SEQ ID NO: 50452 - DNA, 756 bp, Homo sapiens
  misc_feature (1)...(756): n = a,t,c or g
tttttttttttttttttttgcatttattgtgttataatattcataatataaaaccttttaaccatttatttttaaacattttaagcttcttattgaaatataacaatataggaaacacatacacagtacaacttgtaagtacactgctcaatcagatttcatctggatcaagaacagaatattccaatattccggaaaagaaaagaaacatgttaaaaagaaaagatttttatttaaaaaacctagacatagtaattaaaatgggggttaagagaggtaatctctctatccctttgtgtgtgtgtgtatatatatatatatcatacataatcccatatctatgcatctatacccaccctataatgtaccattttcagaaatgggtttgcagaagactttctaaggggtatttgttttattgtttaaaagattatgtggtaataactttgggatacactaaatagagtaatcaaacaagtttgtcacccaaggaaattttcacaaattcagacttcagggcctattgactgatcattctcaagtcaagagaggaatgaggagaatccttcttgcccattctagatatattttttaaattatgataaaatatacataacnnnnnnnnnnnnnnnnnnnnnnnnnnnnnnnnnnnnnnnnnnnnnnnnncattcaaaatgttgagcaaccatcatcgctatccatttccagaatttgttcatcccaaacagaaactatgtactcgttaaacaataaccc

SEQ ID NO: 50453 - DNA, 442 bp, Homo sapiens
tttttcaccttctaagcaacctttatttgcaaactctgaggttggacgcggtgcccgaggcggacagtgtcacgtttctctccctccactttcccctggcttttggggtgctccagcctctccccccagcccactcccgcccaaacccaaaatgcagaggagacttctctctctctctctcccgccaggcttcggggttccacggggcccatccctggcaggccaggcgtcgggtgctggtgctcgctcctctggggccagcctggggaggcagcatggcagcagtgcctgtcagggacccaggcgggggcaaggtcgctttctgagctgacaacttcaggttccagctggcagccagacctggggtttggtgggggtggccctggcacgggagagccagcgtatagtgggaggtccatggacatgccgcagaggacggggc

SEQ ID NO: 50454 - DNA, 755 bp, Homo sapiens
ttttttttttattcttagatttttacatttttattttaaaacagagaatttcatattgattaacacctactactaaacagaatgatgcattaattaaatgccttgtcctaactgttataagctctgttagaaaaataaacatctcaccacaaactacagtgtcagctctttaataaatacataaaacagaagttagtagtcaatcagagttatatgaacaggttcatagtatattatgtgaaagtatcatattctccaatattctgtatcatttaagacaatttaagttacgtataattcaaagccagaaataataagaaatatgttcagtgataatttgcttctttcttagagctattttatattcaaatatttaatttaaaaatatattctatattaaatttatttttacaaacgcagtattcgttaggtgaaacaaaataagtttttatgttactgataagtttaatacatttctaatttttttcagaagttcaagaaaccataatgaagtagctaatgtaaaatagtttaaaagctatgttaaatatacacaaaatgaatttctatattaataagtgcaaatgtatattttcttataatttagaattaaagtactttatactcaatattcttaataaaatttatgtaccatacttgtcattgcgtagacttcttatcaaaatttcacatttatctgtaggaaaatgtaaagttggtaaaaattgtttacacaaatcacacattttccatcc

SEQ ID NO: 50455 - DNA, 461 bp, Homo sapiens
caggggcaggtgtagcctctgtgcctcgttgtcccctggcgctacccggacatctctcagggtgccggcaccatgaagatctggacttcggagcacgtctttgaccacccgtgggaaactgttacaacagctgcaatgcagaaatacccaaaccctatgaacccaagtgtggttggagttgatgtgttggacagacatatagatccctctggaaagttgcacagccacagacttctcagcacagagtggggactgccttccattgtgaagtctatttcatttacaaacatggtttcagtagatgagagacttatatacaaaccacatcctcaggatccagaaaaaactgttttgacacaagaagccataattaccgtgaaaggagttagcctcagcagttaccttgaaggactgatggcagtacgatatcctcaaatgctagtaaaggccgagaagcaatg

SEQ ID NO: 50456 - DNA, 470 bp, Homo sapiens
taatacaaacaacttggggaaggtagataagtgcaatgggagggaggattgaattgaatagtaaaacgtaagcgtatgtgatttcttactttggaagagaggccctttgttataataaaaaaaaaatcgagaaagagaaaacaaataaaaacaacaacaataaaccaaactcctacttccaatgttctctagactgttcaaaatgcctttcccttggtttccatcagtacctgggagggaagaatgggcgttttggtgcaaagaacggagggcccctagcaaaaggtggcctgggtctctttaaactgtgaaatgggtctctgctgagaaaaggttccctaggccgaaagtctggccggggactccgtaagattataccactccggctgatggtgtctctgtgtgagggacccaaggggggggccactgctgctgttgctgcctcccccacctcctcctccatggggtgg

SEQ ID NO: 50457 - DNA, 519 bp, Homo sapiens
aggctttaagtatttttggtacaaaaaataatagtgtttttgtcaatggttattcaatattttgctgtaaattaaaaagaattgtttctcacatcaaatggttccattaggcacattcaagtaaaatcataaaatatccaagttaaacaatgacacagccaagcatgtggcttgataaaagttaagagtttgtccattctctggaatggaataaaattgtcacttcccttaacccgagactcgtggttttgttgttcatatccatttctaacatacagataagtttcttaaaaaaacaaaacaaaacaaaaaagttcacttattctgcactcagaagaaccagcgaggaatctgcacttcaaaaggaagtgaaactgaaaacattaggtgaaatttcatagtagttgagtttactcaaaactggcatcagatggactgagtttgagtttgagtggtgccaattaatggccacctccaggtgcattgtgtacccaatccaaaacaatcaaggccatgctt

SEQ ID NO: 50458 - DNA, 219 bp, Homo sapiens
  misc_feature (1)...(219): n = a,t,c or g
ccaggcacatcttacatggtggcaggcaagagagagcatgtgaaggaggaactgccaaacatttataaaagcattaannnnnnnnnnnnnnnnnnnnnnnnnnnnnnnnnnnnntgggggaaccatccccatgatccagtcacctcccatcagttccctccgttgacatttggggattatggggattaccattcaagangagattngggagggnacact

SEQ ID NO: 50459 - DNA, 770 bp, Homo sapiens
caatttatcttttatccattgcatctagaacagagtcaatgttagtacatatttaatgtatgtattcaatgatgtaacaagtaatcaggcaaatatcaacattatagagactttaatatagaactggattccaacaaaacagttttattaaaataaggcacaatgtttgatatggcaaaattcacagaggattggttaatataagatcttttgtacgtcctgggggagggggaagaaggtggtagaattgaagtagcccatatattcttttaagagcatttagcattacaaggcaatatataaatttgatattaatataataaacaataacttatcctaaatataaaaattgttgaatcatgttgctgaattacacttatttctaccattaagttttacttatttatctatagatgtagatattcctaatttgcaagatttcaaatacagaaaattaagaaatcagatcataaaaagtaatttgacccaagtaaaagtatgttttcagtacccttcgttaatactttgacatcccaaactttacaaaaacttacaatgctgcttatctaaaacttttctcccattatgtttttgtttctcatgaatacaaagcaggctcagaaatgcaaaaaacctcaactgcaggcacacgtctttacatgattgttgtaaagtgactgtttaggttaatattctttctcaatatcacaacaatgttaacaatttaagttagtgaaaggattctcttaaacataagcggtagacataat

SEQ ID NO: 50460 - DNA, 1406 bp, Homo sapiens
  misc_feature (1)...(1406): n = a,t,c or g
ttttttttttttttgcagatcactttgtatttattacattactgaactttttcaaatgacagaattcaactccaaaataaagtaataaatgcctattaaataattattcacttgtatttttctctcctaaaattttaacacagcaaaacatcttaaagacatgtgaataggttcagtgcactctcagtggctcacaatcatgaggcaaatactacatttatccataaaaatataagataaacagatcaatattttaaaatattgctgacataaaaggaaaaaataaaatactacacttttaccacaattattttggtagatgatagtagaacattgtttaaaataatgctcctctacaggacacatggctgtgcttggtatacttggcacattagcagttggtaactgctcagcttccatctgcagtttctctagcaggacccttactcaggcccactttcaaaccctgagctctgatctgcctgcctccacagggactattctgggtacccttcttcctccgtctactcttaaggcttttctgtcttcccttatattcccccagattcacacttgctgccatctccattttcagcaaagatgcctggcacaaaactcacaaagctgagcacctcctccatagctcttaccccagatgttgtcccttcactgactaaattatgactattaggtaaagagaatgaatctacccacaaaaaaataatttgcccgggcgccaagttgtnacgcctntaatccccaagcaactttgggaggctgaagncgggccagatcaccttgagntcggggagttcgagaccaagcctgaccaacatggagaaacctttgtctnnnnnnnnnnnnnnnnnnnnnnnnnnnnnnnnnnnnnnnnnnnnnnnnnnnnnnnnnnnnnnnnnnnnnnnnnnnnnnnnnnnnnnnnnnnnnnnnnnnnnnnnnnnnnnnnnnnnnnnnnnnnnnnnnnnnnnnnnnnnnnnnnnnnnnnnnnnnnnnnnnnnnnnnnnnnnnnnnnnnnnnnctccctactttacagtcacatctcctgcaatgcaaaaataaaggttggtggacacctgatttacaacttaaaatattcagtgagtttagacagaatatatactgctctgaagttccttaaaatctgtttttctattattgtttgtttttaaaatcataaaaatataaaaagtgtaaactttctaataaacattccagtgaaaccctgttacactactttttatttagtgggtcagaaagaacaaaagtgacaccatgttcctttgggcagacccaaaatcatgctcccagccctaaatctaccattacatgtctcccacccattagacagctctgtatgccaagcatgtctctcacgacaactgcagcta

SEQ ID NO: 50461 - DNA, 435 bp, Homo sapiens
ctgagggtggcggccggatagctgatgttctaatcatgtcagataaagatgatattgagactccactgctaactgaagcagcccccatccttgaagatggaaactgtgagccagccaagaattctgagtctgttgaccaaggtgccaaaccagagagtaaatcagaacctgtagtttccactcggaaaagaccagagaccaaaccttccagtgaccttgagacttcaaaagttctccctattcaggataatgtttccaaagatgtaccccagaccagatggggttattgggggagctggggcaagtccatactctcctcaggcctcggctacagtagctacagtaggacaaggcatttcaaatgtcatcgagaaggcagagacttcccttggaatccctagtcccagtgaaatttcaactgaagtcaagtatgta

SEQ ID NO: 50462 - DNA, 383 bp, Homo sapiens
gaagaattaataaaatctcacctgtcaacttttcttattgtagcttttgtgaagtatagaaggctaaagcaaattggttaaattagacattgaaaaaagtatatgattattatctccaaaatattgagactttacacataacagcttttgggggctagatttagaaaatcactaacataaaacaattagaatgttcttaattatagttttcagaactgactatgtagaaaaaaatacactcaagtttgtgttctatgtttacatgttgttttgacaaaaatgaatgttatgtttgaatttagttttgggagatttcagtttttttgtattcagaaaagtcttgtttgtctggttgtatttcccccaattttcataacttttat

SEQ ID NO: 50463 - DNA, 577 bp, Homo sapiens
  misc_feature (1)...(577): n = a,t,c or g
ttcatgtttccaactggaatcgtttaatgtgtctacttcttccacgcataattataaaagaataagaatcgacaaaaatattttctttccataatatgtagaggtggtttgtttcntttttttttttttcttttctttttacttttttttttgcccgcccctggcagagctcttggcggggagggaaggggagagggaaatataaccctgaggtggggatggttcagctcccaaccccggaacccctggtgtgtacgggtcaggcagacacatgtggctgggcggctgggctggggaggggacagccgccactgaccagcagagcgtggaagttcggtgcgtttcagtgcctgcctgaaagcttggggacaggagggctgtccacaggtggtgccccccgcgggccctggccgcttctcctgtggggcccgcatgaccctctgctcgggcttgggaagaaatggagcctaccaggtgctgggttgcaaccccgctgcccggtgtggaccccaagtctagatttaggcaccccttgctttctgtcttttattttttatttattttgagacagagtttc

SEQ ID NO: 50464 - DNA, 5660 bp, Homo sapiens
gaattcctggaggcaagcgctgcccgcgagctgagccgccggaggaggagccgcgggcaacgaggtttctctgtcattcacagaaaaatgaatcatttaaacctttggaggactcagttatcacaatacttctctactaccaactaagatttatgatagtaaatttatgagagcaaatttccatgttatagaactgttgaagaactaaaagaggatattctttcatcaaaataattctgcagtatcataatattactaaataaaattaaaaagcacaattattaaattattaaatttgccacacatgtgcagcagctactgtatcctgatagtgaccaaacctcaaatataaatggtttcccttcatgggaaaagccattatatttggaagaaaccactgaacattgttattaaatatattttcagctaactgtcatttaggagaattttcatgaaacaagttctagaaagttccaagtcccaccagtaagtggatttgatattatggcagcaacttacagacttgtggttagtactgtgaaccactacagcagcgtggtgatagaccggcgttttgaacaagctatacattattgcactggaacctgccacaccgttcacacatggaattgactgcattgtggtacaccatagtgtttgtgcagacctcttgcacatccctgtgtctcagttcaaagatgcagatctgaactctatgtttctaccccatgaaaatgggctttcttcggctgaaggagactatccccaacaggccttcacaggcatacccagggtcaagagaggatctacatttcagaatacctacaacttaaaggatattgcaggagaagcaatcagttttgccagtgggaaaataaagaattttcctttgaaaactcaaaactcttaccatgcagcttacagaaagggaaggaaagttaagtctgactcatttaataggaggtcagttgatttggacttgctttgtggccattataacaacgatgggaacgccccatcctttggtttactgcggagttcctcagttgaggaaaaacctttgtctcatagaaactcactggatacgaacctgacttccatgtttcttcaaaacttttctgaagaagacttggttactcagattttggaaaaacataaaatagataatttttcttctgggacagacataaagatgtgcttggacatcttattgaaatgctccgaggatttaaaaaaatgcacagacatcataaaacaatgcataaagaaaaaatcagggagtagcatcagtgaaggaagtggtaatgatacaatttctagctctgaaactgtctatatgaatgtaatgaccaggttagcatcctatctgaaaaagttaccatttgaattcatgcagtctgggaataatgaggctctagatttaacagaactgatcagtaatatgcctagcttacaactgactcccttctccccagtgtttggcactgaacaaccccctaaatatgaagatgttgtccagctctcagcttctgactctggacgatttcaaactattgaattgcaaaatgacaagcctaattctaggaagatggacactgtacaatccattccaaacaactccacaaattccttatataacttagaggtaaatgatcctagaactctaaaagctgtccaggtccaatcacagtcattaaccatgaatcctttagaaaatgtttcttctgacgacttaatggaaactctttatattgaagaagagtcagatggaaagaaagcattagataaaggacaaaagacagagaatggacctagtcatgagttattaaaggtaaatgaacatagagcagaatttccagaacatgctactcatcttaaaaaatgccccaccccaatgcaaaatgaaattggtaagatatttgagaaatcatttgttaatctacctaaggaagactgtaaatcaaaagtttctaaatttgaagagggagaccagagagattttacaaattccagtagccaggaagagatagataaattgttaatggatttggaatctttttcacagaagatggagacctctctaagagagccacttgcgaagggtaaaaactctaattttttaaatagtcacagtcagttgaccggtcagacccttgtagatcttgagcctaaatctaaagtctcttcacccatagaaaaagtctcaccttcctgtctaacaaggattattgaaaccaatggacacaaaatagaggaagaggatcgagccctcttactgcgaatcctggaaagcattgaagactttgctcaagaactagttgaatgcaaatcaagcagagggagcctatcacaagaaaaggaaatgatgcaaattctacaggaaaccttgacaacttcctcccaggccaatttatcagtctgtagaagtcctgttggtgataaagccaaagatactacttcagcagttttgattcagcagactccagaggtgatcaagattcaaaataaaccagaaaagaaacctggaacaccactcccacctccagccacctctccaagtagtccccgacctctctccccggttccccatgtgaataatgttgtgaatgcgccattgtccataaacattccacggttctactttcctgaaggactcccagatacctgtagtaatcatgaacaaactctaagcagaattgaaactgctttcatggatattgaagaacagaaagcagacatttatgaaatggggaaaattgcaaaggtctgtggctgtcctctctattggaaagcccccatgttcagggctgcagggggagagaagacaggatttgtgacagcacagtcattcattgccatgtggagaaagttgctgaataaccatcatgatgatgcctctaaattcatctgtcttctagcaaagcccaactgcagctctctagaacaggaggatttcatccctctacttcaggatgtggtggatacccaccctggtctcacgttcctgaaagatgctccagaattccactcccgctacatcaccacggttattcagagaatattctacacagtcaacagatcttggagtggaaaaattacttcgacagagataagaaaaagcaactttttgcaaaccctagcacttttggaagaagaggaagatataaaccaaattacagattacttctcctatgaacatttctatgttatttattgtaaattctgggaactagatactgatcacgacctctacatcagccaggccgatctgtctcgatacaatgaccaggcttcatcaagcaggattattgaaaggatattctctggtgcagtaacaaggggaaaaacaatacagaaagagggaagaatgagctatgcagattttgtttggtttttgatctctgaagaagacaaaaggaatcctaccagcattgagtattggttccgctgcatggatgtggatggagacggtgtactctccatgtatgagctggagtacttctatgaggagcagtgtgaacggatggaagccatgggaattgagcccttgccattccatgatttactgtgccagatgcttgacctagtgaagccagctgttgatggcaaaataactctaagagatctgaagaggtgcagaatggctcacatcttctatgacactttctttaatctggagaaatacttagaccatgaacagagagatccctttgcggtccagaaggatgttgagaacgatgggcctgagccctcagactgggaccggtttgccgctgaggagtatgagacgcttgttgcagaggaatctgcccaagcacaattccaggaaggctttgaagattatgaaacagatgaacctgcctctccctctgaatttggaaacaaaagcaataaaatattaagtgcaagccttccagagaaatgtggaaagcttcaatcagtggatgaagaatagctgccggtgtctacaatgaaacgaagatgtgtattttaaatgtttctttcttgtgaagagatgttctcgtttgcatactgctttttaaagactttgatttctccaagtgtgtatcatctgcactaggaactttgtttttaagcaataggtctggatacacatttaacttaggaggctcctccaatttgcctcaaacctcttacggagcttctcctcagaagtggtaccatcgccttccaaagtcagcactctacactcttgaatgtaccaaggatctcttggcgacagtaccaagcacggttctctacacaggtgactgaagttgcctctgtgttggctggcatccctgagtcccctccggctcctatggagcctagaagaaaccttcacttgcagaaaacttgagtcagaaaattctggaacttgaaaaagtagtaagggcctccagaattgacttagccctagtaataaaagcactgccaaaacatctcagagacttcttttatgtatactggagttcaaagatctttaacttacctggcttatgtaatttcacagttacctgccaaactactagtcactttacatcctcaggtattgtaaccactgggccttccaactttgctggcaagctctggtaacctccctgactgtggatcttatataaaatctcaagataaaaaaacacttcttaaatgaagtatagaatttgactcatacttggaaaaagcccttttaacttttatcttttattcattgaactattgaatgatgtatttaatatccaaattagttgataactgttttcacttcctatcagaaggcctgcttgaagacataaaggaataatgatacattaaaattcttactagatagatatattccttcctcccaggagtattagactagctaatagtaaaggcctcaacgttattctttacttcatgttgaaaacaattactacagatatttcatccacctcagtatttatcaaggaaatggaaaatgatacagctataaaagaaagctgttatttactgtagttgtagatgtattcactacagaatcctacatttttcagcagggccacagtccagccaaatcctataatatccttgaaaggaaactattaaaaagggtagacatttctgatgtaagtaaacccccaggcaacttaatatccatctgtcagtcatcaacttttcccctagattttttttttaactagttctgaaagtgtcaagaatagcttccctttccaccctacctaggttccctccttgctggcataaaggccaagcagtgaaatgaaccttgggttagagttatggtaggcaaaaagaaaaggagaatttaggaaataaatatgctataaacaaggtacagtacagtgagagttaacaatcctaggaatcctgcctgtcacaagctcccagttccctgtcattttatcttcatgattagaactgatcttccatttaactattacagaaagcagtaactattgcaactatctaatagttcacacaaaagaattaaaagcttaaaaataatttttaggaaacacaatattcaaaatctaaacacactgataaattattaagattaagattatttatgtgataaatgaaatctcctaccaatccatccagcctttaccagggaagaaaagcaattatttcatttcagatagaaatacaaaaaa

SEQ ID NO: 50465 - DNA, 969 bp, Homo sapiens
  misc_feature (1)...(969): n = a,t,c or g
aagattcttatgaagcttatggccaggacgactggaatgggaccaggntttcgctgaaggccctcctgctaggccagtgaagggagcatacagagagcacccatatggacgttattaaaaacaaacatgaggggaaaatatcagttatgagcaaagttgttactgatttcttgtatctcccaggattcctgttgctttacccacaacagacaagtgactgaaaactcctgaggcatttcctggactagaatgggtagtgaagacccatgtcagctatcagaggactcctgaaacctggagagctacctgctgtataaaggctggcctgagggcatttgctgaacacagagaaacccaggagaggagatcagcagttttctttcactctacttgatctgtcagatttacccacagaaagccagtcagggatcccttaagagtctttaggcccagaatggagtcctcagggctgcaggggactgtggtgctaacaattaaactgttcaagactttaaagagttgaaggggactaatgggtatccctagcatggcctcctagatgggaattaactggcaactcctactgtgccattcccagtatgtgtgcttccctttagcctcccatagaattggctgaaacaccctaccaccgttttctgtttccccactaccacacctgtgttatgggtgtcagcctgtgagtccttgaacccttccagagggctcccaagggagggtgatcactgcccttccataaaaggctgaggaaagccaagtgagaagattcaattaatttgggcaagttatttaacatctgaacctgtttttctcttcattgtttattacttaccttgtccaaaaaggtcataaagggtagggctttttctgttccacctctgtactatatttctccccaacaaatatctgcccctgaggacctcaataaaggtttggtcaagtgaaaaaaaa

SEQ ID NO: 50466 - DNA, 427 bp, Homo sapiens
atgagggcacggccttgtaaagaaacccaaagcagcacagcctctgagaactgaataatggccccttccagatgcctctttgcaatggtggaaatttggcagtaacaggttcctgggcagatcgatcaccactacatgaagcagcaagtcaaggtcgccttcttgctctgagaacattattatcacagggttataatgtaaatgcagtaaccttagaccatgtcaccccattgcacgaagcctgccttggagatcacgtggcatgtgccagaactctgctggaagcaggagctaatgtaaatgcaatcacgatagatggcgtgactccgttattcaacgcatgctcccaaggcagtccaagctgtgcagagctgcttctggagtatggtgccaaagcccagcctggagtcatgtcttccatcccaac

SEQ ID NO: 50467 - DNA, 614 bp, Homo sapiens
ggcttaaatatttatcctcataggttgttatggggatcaataaacgtgaacacttagacagtgttagtacaaaccagacattcaataaatgtcagctattagtattttacaaattctatccatcctttagaggaagaactctaataccatttacttctccattctgctttaattgcttggttcatagcatttactgtctaagccagtcatgtgccaataacttatataatatcctgtgacaattatttttctgttatttaatcattttaatatttctctttctagtaaagtaaaaactttcttaaaaaccagaagcatacttccatccttcccaattacaagcaaatggtagcagctagtgggaaggatggaagtatgcttctggtttttaagaaagtttttactttactagaaagagaaatattaaaatgattaaataacagaaaaataattgtcacaggatattatataagttattggcacatgactggcttagacagtaaatgctatgaaccacgcaattaaagcagaatggagaagtaaatggtattagagttcttcctctaaaggatggatagaatttgtaaaatactaatagctgacatttattgaat

SEQ ID NO: 50468 - DNA, 380 bp, Homo sapiens
gctcactggaataatctgataattgttacttttacttggtatggctgcaagaatagtggaaagaagaggacttgagagttggtcgaacccaggtttgaaatctggcttagtcatttttcagctgttatcctgggtgagttttgccaactttcttagcttcatttccctcattaatacggtgggacataacagctactcttgcattgaaaattaagttagattacctgtctagcatacccatcatcatacacttactatggtcacattttgtatttaaaataaactaatacgaaaaatatttctttttttttacacagaattatgattctcacagggtatataaattactgattagaattatttatatgtggccaattctt

SEQ ID NO: 50469 - DNA, 930 bp, Homo sapiens
ttagctctttagctcaatcttccaactctttgctattgtattttaaaatcttaagaccccttcttgatttgtagaagttccttttcttacaaccaaaaagcctttatctatggatttgttcacagataaggggtattcaatatagtgtatttttttttcatttaaaattgtttgcgcatctatttcctccaaatttctttctgtatttattttttgttgtctatatttcagacttttccaggatatctgataatctttggctgtcttcttatggttgaaagagggactaaaaagcttggaaagcctttgggttgtgggaaggggctgtctttaggattatctgaatgggcttttttgggagtcccctcctccacatgaatattttggttttgtcagattccctagaatagaggcttccaatctccttcctggaggggtctgtccaggaaggagattgtctaggggtctgtcagacagcagctttcagctacttccttgatctttttcactaatgattatatagtcatctaactactgtcaacaagtaatagatatcctatccttcacttgtttagattatttgctgagataacctctcaaaagaacctctcaaaataaaaggttaacaagagcctatatcttatatttttcttctctttatcttgttagaagatagctattaaaacctgttctttttctgtcttgataaacacacttcaatcttggtagaatggtagatgggacagtatattttaggacctaaagctctgcgaaatgtatgatcagcttgtaagtacaggtgctcaaaaacatgtaaacaatcatgctttttactctgtaggaatatctttaaaattcttgtgaatttttccccagaagtaaagcaaatcttcccccagaaataaaattaaatgtgcataatctaaaaaa

SEQ ID NO: 50470 - DNA, 668 bp, Homo sapiens
aaagaagaggatattgaagttccaaaggccatgggggatatttttgagtcgcttgctggtgccatttacatggatagtgggatgtcactggagacagtctggcaggtgtactatcccatgatgcggccactaatagaaaagttttctgcaaatgtaccccgttcccctgtgcgagaattgcttgaaatggaaccagaaactgccaaatttagcccggctgagagaacttacgacgggaaggtcagagtcactgtggaagtagtaggaaaggggaaatttaaaggtgttggtcgaagttacaggattgccaaatctgcagcagcaagaagagccctccgaagcctcaaagctaatcaacctcaggttcccaatagctgaaaccgctttttaaaattcaaaacaagaaacaaaacaaaaaaaattaaggggaaaattatttaaatcggaaaggaagacttaaagttgatagtgagtggaatgaattgaaggcagaatttaaagtttggttgataacaggatagataacagaataaaacatttaacatatgtataaaattttggaactaattgtagttttagttttttgcgcaaacacaatcttatcttctttcctcacttctgctttgttttaaatcacaagagtgctttaatgatgacatttagcaagt

SEQ ID NO: 50471 - DNA, 410 bp, Homo sapiens
aacatcaaatataaaagaaaaataaaatcttgatgaataattaatattatatatcttctacaatttgatacacaaaacaataaagacttaattttaaccttaatactacctttagggacttttttgaacagcagaaatcatatctccatttttaattgtggtacttttatggaagcttcccaaacttcttttgatatgtctactccaagaggacattttggttcatagcggatgccttctatgtcatgtaaaatgcccaagccagcacgtagtctttcaataccattccatgcaatcataatgccattatcagtgcatagtctgggaggaggacacaacaaagtgcactgtgttgcgtttgttaaaatttccagagctctgcggatatagaagttacttgcgacacccac

SEQ ID NO: 50472 - DNA, 674 bp, Homo sapiens
ttttttttttttttgaaattaataacatttttatttgacccaatatatgcaaaacattatattccaacatgtaatcagtattaaaaagtattgagataatttttacatcagttttttcgtactaagtcccgtattttacaatatagcacatctcaattcgctatatttcgagggttatcaactagctacgttgcaagagctgagtcaactcaggaggccagcgcgaccataaggggcaatgcatttagagttcacttattaaatgctgacgttaacagaacccacagagccgcatttcccttggtttcggaggacacgcgaaaaataacaacagcaaagggttctcgagcatctccttcgcgccagacggtgtgttgtactttgtcatcgtcgcagtaaggccggtgctatcgccctcctagtttgaccaagcgagaggactttctccagatgggcccctcccgagagaatggtcgccgtcccgctctcctgttcgggtcaccaccggccgggcgccactcgaacgagccccggccagccgtcaccctaatcattcccgaaggaggggccatcagagctacagctcatcagggtcaatcagaaggggcgcccgcacgcaaaggtcacctgcaaaccgaagcggcgcacggataaggtccgggacttgaagtcta

SEQ ID NO: 50473 - DNA, 382 bp, Homo sapiens
  misc_feature (1)...(382): n = a,t,c or g
gtggatttccccattacagatgtcctccagatgatggggcgtgctgggaggccgcagttcgatgaccaaggcaaagctgtaattctagttcatgacataaagaaagacttttataaaaaatttctttatgaacctttcccagtagaatcaagtttattaggagtgctctctgaccacttaaatgcagagattgctggtggtacaattacatctaagcaagatgcattggattatatcacctggacttactttttccgacgtcttatcatgaatcccagctattacaatttgggtgatgtgagccatgattctgtgaacaagtttctgtcccatctgattgagaagancccngattgaattggaacttttccctactgnattg

SEQ ID NO: 50474 - DNA, 1852 bp, Homo sapiens
tttttttttttttttttattgtcaacatttttatttaagaaaacaggatttaacatggcatttttcttccctctaagggcagcagcacataaatcatacatcagtcatccagtgatacaaagaggtggccaattgtgtctgaagtagtcacttgtaaaggatcacaacccaggcagtgttgcttttctgcaaacagaaggaaacagaaggctccatggtccttgaagattatccaagttttccactagttgtcaagatttctgtcccaacctcttagtcaccatttacagcaagaagagccagcaagtgaaaaactgttaatttattgattcaaagttgttttttttctttttaaaaaacaatccccaatacatgcagttcagggttaagtatcacatttgtagcacattgttgagtctcaaaacaaaaatatgcatcacctgtataatcccatcacatctttttccagcctctacaatacctagttgggggtgttttcatttatacatccacatagctcagaagcatgttattaacggttgatctggcccgatgcttctccgccacctcccctgccctggtctccacctcggggttatttttttctaaaggcaggatgttactcagtcttaatttattaagatcactgacaaactttggcttcttgtgtgctcatgtggtccctgcttttgctttcggaagggtttatattgaaacgactgtgactctgatcggttattatcccctcattttttgtaggaaataagtttgcttgtttctgtgggtgctcacacagtaacacaggttcctaaagtaaccatttaatctgaactggtattaaaggaaactgttaaccaggctctcttagatctatttcagttcatataaaaaaactcttccaattgttgcttgtgtctcaaagtagttctgcttccatccttatcaacagagcacctgggagaacctaagtcatttccctgagtaggcacagaccacgaggacccgcggcacccagctctctctgggactaagcgcctgactcgagagcaccacctttcagtccactgggaccaatccagtgggcagcgccctccccagggtacattccagaacataaacttggtaccctctaatttatcccctcaagaagttaatttcctcctcaagagctacctttagatggattttcttattggtcccttttcttttaacagcccttcccctagccactctcttcaagtccccaaggattacgagtttgtctgtctcctctaatctatcagtctgagagcaccttcctctctgcaagggaacacatttgctttaaaccttgtgagtgctgacatgttacagaatgtctgggaggaggcctggctgagtgactggtgtttaagtgcctcaatgaacgacatcagcgcttctctagttggtgagaaggcccaggaaagcttggtctgcgtcatacactcaatagcttctcctacccagccacctaccctgcctacagggataggatgaaagcaaggcccagctgacagcatccaggggagagtgaactgccaccacaccagaggtgcaaatgtgactcagcacttcatgagttctactctcaccatgggatttctcagcagaagcaaaccttgcagtcaggctcacttgtagccaacaaatgatatagccatctggatttggcataggaaccttttgttctcaccataccaggtctatgttcttgaacataggcagtacctgagatgatagtataacactaccctgttccccacattttttgcttttctttaggaaataattaagtccttatcataggcacttttaacctgtttaagataat

SEQ ID NO: 50475 - DNA, 548 bp, Homo sapiens
tttttttttgcttatcaaaatattttattttaggagacccctcaaaaaaagacccaccacattagacagacgccccaacaacacccttggcctttttttggtcttttctgtattttttcctttttaaatcaactaaaacaatttgatgcttaaaataaaagacaggaaatatttcctgatgagactttagtcgagaatatagatatatttctgatccgggggcgggtgatcaggggcgggggaggagaaggatgtgccaccagtggttcgcgaggttccgtttctcagctcaggagggagcctggctgcctggacccgggctagggacccagagctggggctccacaggcctgaccagggccagggaagaagacggaggaggaggaagagaaggcggggctggcggctggggcttgtaatttacatgagaaccgtgctggtcactagcgctgtctgtgtctgtctgtcctgcgggacttctgctctggggagggaggctgggattcagcgtcgttgtcatttcctgtgtggcttcttttccagctgag

SEQ ID NO: 50476 - DNA, 896 bp, Homo sapiens
ttttttttttgtattctaatgctatttattatcacaataaataattcactgcaaatgactgcatgaaaaatgtgggttccagagcaccatgtataaaatgatcccatttatgtagaactgtaaacatacatccacacactgacggacaggtacatatgcatgtttggggaggggtctggaatgatcacccaagtggacagggtgaggggtggtttcctgtattttttacaataagcatttatgacttttacaaaatcaccaaagctatcactttttccatttagaaaacacaaaattatttttaaatagagacttgacgtcatttgacacaccttggttttctctcggagagcacagatgccgcaggacaagaggagcggacccgcctcccagactcctgcctgccccgtccctcccccgcaggtggcactggtgagccgggaaggtgctgccagccccagggatgcctcgcacagcccgggctggaaacccctgcccctgcttcctcgcacagtctgtcattctagaaggctctctccaaaccactcttccaaagagggtcatgccagggaacagcagcgaggtcattttccagtcatcccacaggaagccagtgagccccactcccactgccgtggacctccaggcctggcttccttctcttccctgggttacctgctcaggggtttctcagccaggccagcatgtctatcaggcggcatccagcatccaatcacagtgacaagaaccttccggaacaccctgcaaactgtggatgcccacgggtggccccattatgccttgagcagggcaaccttttggtccagaatggagtcttctctgatgttgtagggctgggtccctggctcctgcctcaggtgcttctctgcttcttc

SEQ ID NO: 50477 - DNA, 663 bp, Homo sapiens
ttttttttttttttgtgggcaacaggaaatgtttatttatatacaagtacatgggaaagcaatttccatttagtttttttaaaaaattgttacaaataaaaagtttttaatacattcatcctttgcacacaaaatacattctttttcttttactctcagtatgaattatttcttaataatagaaaacataggctacaatgaatggacagtcatatggtttggtgatttgacaaacttttttcaagaagcaaagtccaattttaaaagacagacaatatataaaataacttacatatttaaaatgctacttcattgaatcctaaaagattgaatgagtactcttatccagcatgatttgtagttgtcctttaaacaatgcagaggacaagaaatcctctatgtgatggcaactcaatttctacaagactgaaacagtcttcatgaaattgattgcttatcacatctaaatgacaggctcatagaaaaattcttatggatgtattggggagttagtctttattcagaggtctcctaactgatcaattaaactaagatcgtaagttgcactctccaaacagggattgcaagaggttctacgtaaataaacataaatgatttgatttgatttgtcagactaattgtttttaagagagatgtgaaaac

SEQ ID NO: 50478 - DNA, 175 bp, Homo sapiens
  misc_feature (1)...(175): n = a,t,c or g
atcttttaatagttccatccaaccctctccccatttttcctcccaccnnnnnnnnnnnnnnnnnnnnnnnnnnnnnnnnnnnnnnnnnnnnnnnnnnnnnnnnnnnnnnnnnnnnnnnnnnnnnnnnnnnnnnnnnnnnnnnnnnnnnnattattttcactcagcattaattccc

SEQ ID NO: 50479 - DNA, 208 bp, Homo sapiens
cttagtttttcaaaacacatgttcattttaccacaaagtgcccatttttatatacatttaaggattattttttcaatgtcaagttcatgttagtgatttcagaaatatagtcaaaatatatagtcaaatatatcttgacaggcatcttgagatttggtttttcattttactatatttatgactgaaaatggttttgtgttttctttat

SEQ ID NO: 50480 - DNA, 52 bp, Homo sapiens
gctggaggagcagcgggtggagctggtggaaagactgcaggccatgctgcac

SEQ ID NO: 50481 - DNA, 366 bp, Homo sapiens
  misc_feature (1)...(366): n = a,t,c or g
aaaatcctctttagcaaggagaaataatcctgctgatccacgaaatgccacaattagcaatttatccttttgataaagcactttgggagtccccataggaggaggcattcatcccacactcttccaggtaaacaaggtcatgagggccactcctccccatgagaagcagcagagcaattacatcctaggcacctgaggccaggccttactgacttcaaggaagatgggcaagtcttcatcttcactggctttcttccccttcagtctgttacatattaaccattccttcatggccctttgtggcctgctttaggccccctttaaccatggaaggcacttcaggngacaagtttacattgttgtttt

SEQ ID NO: 50482 - DNA, 1285 bp, Homo sapiens
  misc_feature (1)...(1285): n = a,t,c or g
gcagccacagaagattttttattgttgttttaagaactccctagcccccaaatcaacaaatcatgtcaggtaaatataaatattttagccaaccagtggctctcgcctntaatcccantgntttggggggccaaggnggaaggcncacatgaggccaagtgttnaagtccacactgtggagggcacaagctgtgggagggcctggaagacacgcctcagagattctcccagtcctgccaccctgtgggagacacttctaaggaatcgtaaactcatgtgaccagcagggaggacaacgatgaagaaactttcctgcctaaaatcagctgctgtccaagagctagcacctggaaggagacactccctctcctggggtcacatcttcactgcaaggcgggtgggagctcactgctgtgacccacatatactcctctctcggcgtctctatcctgctgctttctctgactgcatcttcctctgttccttggtcagtgtttgagaagagaatgttgaacaagtcacatccttgtcactctgagtcagaaccctcatttgacttggaagatttgtgcttccgttttttcttctttttcttttctttcttccttttcttatgcttttctttcttcttctttttcttgtgtttctctttaccttcagaggaactggagctgctcctatcttcacctgaggtagaatcctccagtaactgttttaactgctgtatccttacattcttttcatgttgtttattgtctcgtatgatgtcatacatgaaatcctcatgtgctactctgaactgttgtaacttttggttgtctttgataaagaaagggcattctttgtagcctgttcggtgaccgtaccatttgcaatgccaacctaaaagcaaagaaaaggggaaatatttctgtaagataagagtgtttcaccttagtgagataaagaatcgagtagattatattaaagtttttattcattaaactccaattctaaaagaaaatgcaatcatggatgaaccgtgtaaggtcccagaaaagacaggtaaactaattgcttacccaagcatcctttaatcttgtgctttaggaattaattttccaacaccaagaaattatgaagcaatccaatgaaaagtactgcaaaaggtcaatttttttagtgtgtctcgctgtatttttcaaagtaaatatcttctattaatcaagtggctctgaatctcatttataaatttagtcactagaacaaataccttctttctcaggttgagtcgacatctgttcac

SEQ ID NO: 50483 - DNA, 533 bp, Homo sapiens
gagagcttccacctgaacgtgagcggagaagcatccttgtttgaggtgaacatccgctacatcgggggactcctctcagccttctacctgacaggagaagaggtgttccgaataaaggccatcaggctgggagagaagctcctgccggcgttcaacacccccacgggaatcccaaagggcgtggtgagcttcaaaagtgggaactggggctgggccacagccggcagcagcagcatcttggcggagtttggatccctgcacttggaattcttacacctcactgaactctctggcaaccaggtcttcgctgaaaaggtcaggaacatccgcaaggtcctcaggaagatcgaaaagccctttggcctctaccccaacttcctcagcccagtgagtgggaactgggtgcaacaccatgtctcagttggaggactcggggacagtttttatgaatatttgatcaaatcctggttgatgtcgggcaagacagatatggaggctaaaaatatgtactacggaggcctttggaggcgata

SEQ ID NO: 50484 - DNA, 1196 bp, Homo sapiens
gttttatttttttttggtttggcatagtttattacaattagtgtgcgcataaaaccatgtaaactctacaaagtaaaccatttcccctccacactaaccagcagctagtctgccatgaccttccagcacccccattattttaacatatatacatttcacaggatgtaataaccacacaaatagggttataatacattcttcagggaaaaaaatttttggtccatattttctattaaaaaaacacacacacttccctctttggcaaaagaggttaaatctcccatagttaactcacaaaagaaactcaaataaaaactactgagcatgaggtacagctgatgtctggactgttctggaattacagacgcctccttgaggggaaaatcatttcttataaaatgagatcagtttccaacagtttcatgtcagtagaaaagctcgatttagacttggtcagaatcacttttgcatgaacatgttccaaataactttgtttttcagaggacagcggaagtcacgaaaatgtgctacttctgaagaaagtcatgaaaattgtggcgtctgacctcagcaatatttttaatctgaggtacgaaaacatctgacacagccattcacactgtaattcctgtgccaccttcatggtcaccggagctgggccgacctcttcgcatccccctctgaagtggagactaaggaaacgggcagctgctgaggtgttgtttctttgcttgtttttaaatctacagtcataattgctaaataaacaaccaccctggtgtgcttttcatgcttcaagtaattcatttcttccaggagaagaatgttaaaaatgctttcagttcgatacacacgcacactctggaccagcaggctcccgttcttccagtgccttgtgacagcccgacgctcagtaccacagcaggcttctttcacattgtgttcacaaaagggcagtcatggccgtctggttgaggggtgtgaggcagtctctgggggcagaatagctgtcactcgtcccgggatgcgttgggggcttctgagagtcagggtgtccgctttcggtggcgagggcgctgacagctttgggccggtcgtagcccctgtccgcaggctgtgcgctgtgtggcctttgatagtctccgtcctgggcgcccacacccgctacgggggacaagccgcccgaggagagggag

SEQ ID NO: 50485 - DNA, 768 bp, Homo sapiens
tgcctccccaaatcataagaccaaagaccaccaaacgcagggtggactctgctcattattctttgacccagaaagactggagaaggtatgtgctttaagtgctgctctacctgaaaagaaatcctttaaattacctatggaagtgatgtcctcagataaatcttaaatgactattttggcatttattaaatagaaatgattatggactttgatctgccatacggaggttcggaacctggagaatggctgtgataagtaggttttgattgagtgaaagcatgagcttgttcagagtgaggggcatagtgaaaaaggaacagccatgcctcaaaatcaaatcatttgcattcccacagcatcctgaataccgactacctcttcacttgctaaagcagctaaactgtgaagctctaagtggtttgggtttgttgtttaaccttagcgagatcctttaactgcagcaatattcaagccagatatttggaagcaaatgatatttcctcttgcagtgtccacaaatctgaatattaggggcatgaaattaggcttaccatctgatttgtaattacaattttggaattctctgttttagttgctgaggcctgagttttctggctcttaaagcatagatcatttcacctgatgtttttgaagcatcctaagtacagtagagtagaaaactgatttctttgttaattgtacactgaataatgccttttaaaaatcaaaataaaattaacaaataatggtgaaaaaaaaaaaaaaaaa

SEQ ID NO: 50486 - DNA, 991 bp, Homo sapiens
  misc_feature (1)...(991): n = a,t,c or g
tggtgttgagctgtccggggagtcaccaatagaaaacttaggaattttaaattgatttgtaggagtaggcataacctttgtcttggaatttagacaggaatctcgccgtctgatacttctagtcttattcaattgagaagattctgaccaagcgcaactggagttcagccactggccgccaccttccggagtctggggttgggtgggggatgctgagggggggtgccgtgagctgctccgctgccagctcagaaacatcgacccgcttggcctgccaggaggatgcccccacagggcctgcaggcagagctggccgcagcatggcgggtcccattctgcctgacttgctgatgtttgacagaggccgggagctatttgcaggaatacttgcaaattcacttgatttagctttgcccactgctggggatgtgcacgcactggatgccccgctccaaacaggccccgaggaggacttccttgcgagattgctggtagagccgggtgcttttaacagggtcttcttcagccccaacttgtttggaacagggatcgcccgcttgccctggcccnaagtggcttccggcggccggcacattgacagcacccggggcaggtttgtcaggagaacatcccggtgggattccttctcagctggatttttgtcctggaaggactagctggaatctctttcttgggtttctccgcagccccagggatgcttcttcctctaacagagccgctcgaggcagcagcaatttggtcccgggcttcctttgagtcgctgcctgacttgcagcatgagcagtgcatgattccctgggcaaagcatgagcagagtgcggaggccccggcgcccgggtgaggcgggcctgggcaccagagctgggcagggccggggaggaggccaagagccgaggctcacccacagggggccccagcaaggggctgtctgacaggtagtatgtctccccttttaagagacgtggggctt

SEQ ID NO: 50487 - DNA, 326 bp, Homo sapiens
ttttttttttgtggggggtggggacctgtgatgaaaacacagaccacgagccctgccctccactggctcagagactgattgacacagccactccaccctcccaaaggccagaggattctgcgtgccaacaggaatggaacttcaacctgggccttctgtccctttctccaacccccatcccgcttcctccccacacccagtccctcggtgcacctgggctcatgtcaggaggctgcaggctgagaagcaagggctgcccattagcgccttgcagccaggcctcggcactgagcacaggctcccagatcacagccgtgtctgggaac

SEQ ID NO: 50488 - DNA, 514 bp, Homo sapiens
gcgcctctgccgtgggcctgcgagaatcgaggcactcgctggcgtacccatgtatcgaaatgagttcacggcctggtaccggcggatgtcggtggtctacgggatcggcacctggtctgtgttgggctcactgctttactatagccggacaatggcgaagtcgtcagtagaccaaaaggatggctcagcaagtgaagtacccagtgaactctctgaacgcccaaaaggattttatgtggaaacagttgtcacatataaagaagattttgttccaaatacagaaaagatcctcaactattggaaatcatggactggtggccctggtacagaaccatgactggctgctgaattctgaaaaccaggacttggttcaacatttaaatttgatagttgccctgattcccattttgggtttgtgaaaagtgtatgtatttaaatttgctgtaaaacataatcactaataatatgcaataaatattttcttgaaggaaaaaaaaaaaaaaaaaagtcgagc

SEQ ID NO: 50489 - DNA, 1158 bp, Homo sapiens
gctgccgcctactactactaaattcgcggccgcgtcgactttttttttattaataacttctttattctggaaaagcaaatgaaagtcatattcatataaacactgacattacaaagtacagggaaaaggggaagggagaaggaaacaaaaccctttacaaatcctgctaatactgtcttacccaaaaagaccataatgctttgtcccatattcagtcacttatataataaaccacaaataaaatcttctctggaagatacattgctcctctttgagatggcagggaaaagggaccggaagttggggtaggaggctttattcttttggcagatcctctcagtcattatagatattgctgcactgttaataaaaaatatatgcttctctgtaaagcattaaaaaaaaaaatccaaggatgagatggctgagttctcagctcaagtatctccaaatacattgctgtccattccctgacctttccgtgtgttatttcttggttgttttccggatcaatgccattctctgtttgtgagcttctgtggtgcaagcttttttgtagggtcggatttcttcagagccaaatcctgggatccacatgttccactggcgctctaaatgcagctggacatctttcacctccagggtgctagacttgcgatgccgcgcaagctggacaggctgctgtcaccacactctcgataaaatcatcagcaatctgcagcagcatctcctccacatcttcatccaactgctcattaggatccacttctcttactaagtcctgtaatttcttcttggtcaatacctgattgttttcagggctaagacgacctcctgcccccaggagtgcctggtatctttaccactgcagtactattggccatggagccttgtggaggggtgctggctggttccggttttatggatgagaaattggagaggttgattagggctgaggggccaaactggttcataatctgccgagctttggacttcagctcatagagcttatcgagatcctgtttctttttggagctgtgaggaccaaggccaattaaaggcagcagcgtctatctccccatgatatgcagagactgccccagtgaagcgttcgtctcagcagccggtccgactgcgcggccctccccgactacttcc

SEQ ID NO: 50490 - DNA, 490 bp, Homo sapiens
ttttttacgctcaaatggttagtaaatgttttatttgtgaaaagagatactggaatgctgaaacttgttagaaatagcatcgtgctgaaatcttccatccccttcgccactcacggcaacacccatgtcactcctcattctctccttgctctgcccgggtggctggcctccccacgctcctgagaaggtactggttgtgctttcagcttctgcgtttcctcgcccccctcactcctccgtccagaggcagccttacttctccaaagaggacgctctgagtctgcgttcccctggcagcaagtcctgaggcaagatttggggacaagcagctcctgtgggaagtggctccaggaagccccaggagagacgcggggagtgagcccagcgggaaggacaggcagcgaggaccgctccaaaggtggtgcctcagcaagcaattcttttctgctcggctgtcctcgagcagccccgcccgccccgggccctccgg

SEQ ID NO: 50491 - DNA, 648 bp, Homo sapiens
  misc_feature (1)...(648): n = a,t,c or g
cagtcctaatttttgggaattctggaaacatcttatgaatattttcctgacacatacacaagactactatctntccccactgcagagaaacatgacacatggcaaaaaactattttgaatgataaatatggaaataaaaaacnactctttccccatatcaatgttcctcaacaactttttttttttaacccaactggaaggaaaaacctagggcacaagaaaaatagagaaaagtataaaaaaaaacagtaccagcacgtaagtataccaagctcttccagtcctatggtccctgaacttctctacactagacatgtatcataaaactaaaaaaatctagactacaaagaaagttccttcttcagtgaagggagtcaatctgtaaaaactgtcacatttctaaaaactagtctgtaaaaacacaatctgtaaaaattagtcacatttctgaattcaacctcttctaataatccagacaaaggaggaaaggggagggatgggtaagaggacaaagagaaggagaaggcggcgaggagtggggtggtaaaggaaaggaagggaaaaacaaaccacaatacctactacactctaagtcatcccagttttctcagaggtaaaattagaatattaaagactcctaacaatctg

SEQ ID NO: 50492 - DNA, 534 bp, Homo sapiens
ggaaatgatcctgcaggccctgggaagtcctaccacccaggctgcttccggtgctccgtgtgcaatgagtgcctggacggggttcccttcaccgtggacgtggagaacaacatctactgcgtgcgagactatcacacggtttttgcaccaaaatgcgcctcctgtgcccgtcctatcctccctgcacagggctgcgagacaaccatccgtgtggtgtccatggacagagactaccacgtggcatgttaccactgtgaggactgcgggctgcagctgagcggggaggagggacgccgttgctatcccctggcgggccacctactgtgtcgtcgttgccacctgcggcgcctccaacctgggcctcttccctcacccactgttgcacgtcactgagctctgagcaggggaaaacccgtccctgggccggggtgggtgtgggtgtggagggagggcccgcgtgggtggccctggtcagcgtcaggggagctccctccaatcagtttcccaccgagctgctgtctgcaggggccggac

SEQ ID NO: 50493 - DNA, 595 bp, Homo sapiens
cggacgcgtggggcggcaactcgcgcactcaaagatggtccccatccctgctggagtatttacaatgggcacagatgatcctcagataaagcaggatggggaagcacctgcgaggagagttactattgatgccttttacatggatgcctatgaagtcagtaatactgaatttgagaagtttgtgaactcaactggctatttgacagaggctgagaagtttggcgactcctttgtctttgaaggcatgttgagtgagcaagtgaagaccaatattcaacaggcagttgcagctgctccctggtggttacctgtgaaaggcgctaactggagacacccagaagggcctgactctactattctgcacaggccggatcatccagttctccatgtgtcctggaatgatgcggttgcctactgcacttgggcagggaagcggctgcccacggaagctgagtgggaatacagctggccgaggaggcctgtcataatagacttttcccctgggggcaacaaactgcagcccaaaggccagcattatgccaacatttggcagggcgagtttccggtgaccaacactggtgagggatggcttccc

SEQ ID NO: 50494 - DNA, 1403 bp, Homo sapiens
ccgcctccttgccgcccagccggtccaggcctctgggaatcatggcgcttgtcccctgccaggtgctgcggatggcaatcctgctgtcctactgctctatcctgtgtaactacaaggccatcgaaatgccctcacaccagacctacggagggagctggaaattcctgacgttcattgatctggttatccagggctgtcttttttggcatctgtgtgctgactgatctttccagtcttctgactcgaggaagtgggaaccaggagcaagagaggcagctcaagaagctcatctctctccgggactggatgttagctgtgttggcctttcctgttggggtttttgttgtagcagtgttctggatcatttatgcctatgacagagagatgatatacccgaaggctgctggataattttatcccaggggtggctgaatcacggaatgcacacgacggttctgccctttatattaatcgagatgaggacatcgcaccatcagtatcccagcaggagcagcggacttaccgccatatgtaccttctctgttggctatatattatgggtgtgctgggtgcatcatgtaactgggcatgtgggtgtaccctttcctgggaacacattggcccagggagccagaatcatcttctttgggtctacaaccatcttaatgaacttcctgtacctgctgggagaagttctgaacaactatatctgggatacacagaaaagtatggaagaagagaaagaaaagcctaaattgggaatgagatccaagtctaaacgcaagagctagattgagccgccattgaagactccttcccctcgggcattggcagtgggggagaaaaggcttcaaaggaacttggtggcatcagcacccccctcccccaatgaggacaccttttatatataaatatgtataaacatagaatacagttgtttccaaaagaactcaccctcactgtgtgtttaaagaattcttcccaaagtcattactgataataacattttttccttttctagttttaaaaccagaattggaccttggatttttattttggcaattgtaactccatctaatcaagaaagaataaaagtttattgcacttctttttgagaaatatgttaaagtcaaaggggcatatatagagtaaggcttttgtgtatttaatcctaaaggtggctgtaatcatgaacctaggccaccatggggacctgagagggaaggggacagatgtttctcattgcataatgtcacagttgcctcaaatgagcaccatttgtaataatgatgtcaatttcatgaaaagcctgagtgtattgcatctcttgatttaatcatgtgaaacttttcctagatgcaaatgctgactaataaagacaaagccaccctgaaaaaaaaaaa

SEQ ID NO: 50495 - DNA, 523 bp, Homo sapiens
  misc_feature (1)...(523): n = a,t,c or g
gtatcacctttgacttaatttgctttctctaagggaaaggggaaaaaatgttcacatagctccactgcaatgttttttataatagaggagagatattgtaaatagagactgccagccagtttccacaaaaaaacgaagagttcataaatttgacatgtttgaacccataaagcattttctttgcttggaaccattataaaagtaagtgagttttcaggctctatatacattttaattcctcacgttttatattggagagttcggtacagactgtccattactgcaccaaaagaatgagtaactgttacctatagggaaagaacacttcttcttcctgctgtttggggaaccatcttcagtgtgggcgtaatgggttagggagtacaggtttccagatcccgttttcttaggantttaaatcttggactctggccacatactaggctggtcttgactggaacccttgggtttttccgtggtttcaagtttcccccanttgtaaaaaccgggggttaccagtttt

SEQ ID NO: 50496 - DNA, 2023 bp, Homo sapiens
ttttttttttttcaggatatgaatacagtttattacagttttcagactcccattacgacacatatctaaagctgaacattgcaaactgaccttactagcagcaattctccctagacaggaagggtttcagttaatttagcaattaggagtaaagacaaacttacaagtcatggtttttcttgtagcagctggtatatgagcagtgaaactatagatacgtagagtcattcaggtttagccttgtctaaaaaaacattaataagttatggtgcagaggagtatccccaggggttgccaaagagaaggctgatgtctttaggatgtcagtatgaaacaagcaaatcactttcaagacatggcttactatttgctttactgtcaggacaacagaaaaagaagtggacagctaccctagattctagctcacacataattcagccagataatcatcatttaaataataccccttgaaatttttcagacttttcacagctctaaaaacacaacatcagacataacatcacacatttgttccaaaggactaaaaatcaaaagcaattgcaaagtattgggaatcacttttatggctttcctaagggacagtccccatctttccaaggagtgtttttaaagaagcactaactctggtaggttatcaaactattttttattctaaataaataaaagactaactgaaggtctcaggtgcacacttatttttccccgcagatcttcaaaccatccagaactatttcttgtcagagagctttcatttttattagagcagtgcaagataacgtacaaacatttgaaaaacactcaaaatactgagagtaaaggaggcccaacccttcctcagggcccagaaaactgacaggaaccccaaaggcttatcttaaatccatcaactcaatttgccagaaagtgctgacagaccacccacctttgcaacacagggctcaggattcttgcatttacaaccactaagaaaagccttctgggagaagaaaagcacagactggtgaacataagttactgaaaaagggttgactgcattctatatctggcacaggaaaagaaaaattcaaacagctgtgaaaccattatatttacaccacgatactcttacatgaaccttgactttcctacagcaacagtttcattcacaaaaaatacataaaagattggaaagctttggggtagcaccaagtgacagctagctgtcattgaatagttttaattttttcctagaggcaaaatttagagaaaacttaaagaagcaatttatagaaatgattctatttcatgattttgcctttgtcagctgccatggaaatggtgcaagcagaaatataaatatccattctgcatcaagtaagtttctatttcttttttctcaaagggtagaaatggtacatctcaatttttgtaaggcttctgaggattaagggcagctcatcgctcaggacttgacaatctctaaaggagctcctggactctttcaccacaaggatagatggagccactccctatccacaactcatagcaaggatctctatgcatctagattttaatgccaacggtttcttggcttcctgacttgacatgcaccatgcacaaagagcaaggtactgactggtctaaagccactctccccggacactgctaactctagctaaccatctcacagacatcctgcctctgatcataagatggtccctggaaggaagcataaacacttcccaaatactagaacagacagcccaaagtgcaagttctactaatgggagagtaaatgaatcacctctgtgtacagagaatggcacaggaaattgttatgagtataaaaccatatctcccctttcttaatcacttgttattatctaacaaaggtagatacttttgagaagacctcaccaactacataagtatgtcctataaattgtcttgaaaacatattcccatgtttaaagattactttgaagaaccaaagttgaatgttcaaaaataaaaactattctta

SEQ ID NO: 50497 - DNA, 644 bp, Homo sapiens
  misc_feature (1)...(644): n = a,t,c or g
tccgagtgaaaacagtctgtttattacagcgtctagaggtggggatgcagaatgcaggggtgcccagaggaaggggcgcctgcagcccaggggcggaccgtgacaatgcgcgcaatccaaatacagttcacccggaagacacggcagagcctcccacgttacaaaggctgacacagaccagcagcgtgttgtgttgggaggggggtctgaccacgatggcgagggcagtcggcggggggtggggggcctgctgaccactgaacagactgacgcatcctgggggcagataaattaagggggaagtcttaaataagtcactgtgcgtgcctcatgggccgaggagggggtatcctagtttttagggttcctatcaattcctgaggcaagagccactccccagggcgccgcccgcccacccacagttcagcagcagcagcacaggtccccgccagctgcccacggaaactcaggccagtgccagcaccaggctccagatccccagtctccacgnccaccctgcgacccgccacacaccacccctcagtctgggagtgtctgagaagaacacagncccagggctcagaacaggaggntgtccgcaggcagccaccacactagttcacgtgtggtgacacgcatatgac

SEQ ID NO: 50498 - DNA, 1445 bp, Homo sapiens
  misc_feature (1)...(1445): n = a,t,c or g
tttttttcagcacaatatttcatttatttattgtataagtttggcaaacagcacaaaaatccagcaacatttaaaacatataaaaaagtcaaatgctaaacaggactagggatttttttttacatcattagaaataacgagtacacattttaagattctgcaaagcctagcaaaatgaagatgccttgccttctgaacatatactacaaacacacatacaaaaaaacaatataatttatctttacaaaaattacagccaagcaatagaaaagaaggatgttaatgatgaagatagcaacacatatgtttagtacatatatcttacacattgaaatgctacatcttataccctgaaatgccatgtgtagagagccaagcagagtaaatttaggctcattactgaggttaagaattatttgagaagaatttaattcttatatgtaacatattcagttaaaactttctatataggagttgctagaggatgacaatgtatcccattatagatctgagaagttgagtcttctttgttggcagtataaaatttctgaccagtatcaaaattctggtaaaacacaaattgaaggcattttctagtgtatgcaaacattacaaggggcatcaatgaatgtagaagaaaatcgtagatttttcacatcaagtttctgctgagctttgtcaaaccaaatagctcaactataaggcaagagaaaacaactccctataacagattagtggatcttaccaagtaaatataggaattcaatcttagggaaaaattccctacattaatagatctgaaacagctggtcttgaaacaaacatctagaaattaacgaacatcttgacattcagtcattggttcagaagcgtgacaaacaatctgttggtatatattattaaattaactttttggaatcagcaccagtccccaaaacctcaaattataatatttaatcttcattaaaatatattttttgtgctacattaacacgaccacaattaagttaaagaaagctgaatttatttaacttattgtatatgtttatgtatactaggtagtgacttaaatttcttttatttacttgtgcttctgttttggggcactttgattgaagagaaattcaattcacaggattacatcttgctaaagcattccttagcattggtccaaacttgaattccctgtaatcccatctactcggnctggatgaggtagaattgcttgaacacgggagggcggagggttgtaggtgaggctgaggancatgccattgcactccagcctggggtgacaggggtgaggactctttttgcacatactgatctgcatgactgcatagcttatgaggggcctcctttaagnctcggntcttttgttctttgaaggcgttcaatatnagccctgcgnttttnacaaattcnccgccntccagattttaggg

SEQ ID NO: 50499 - DNA, 519 bp, Homo sapiens
  misc_feature (1)...(519): n = a,t,c or g
cactaggcaactgactgatgaccctggggaatggtgtcatatcaggggctcagtgttggtctctgttgctggcagactgggcactcagagatagccttggccaggtcagccttggtgagtagaagtccatgttgctgagcccatgcataaactccatccctgccactatggccattttgttcacaggcgcattgcatgatgacagaagtggctggggaaagaggccgagtggtgtccacagaatgaatcatcctatccacttgattattaaaatccttttttgctaaccctttggtgagcattcacatggggcacaaatatcttcacagtttttgaccattcagtgtctatccacatacttcatctccaaatttctttgtcaccaattttccagttatattgaactccctgaccatccagccaaaccactggccacggcctatgaattggcatataattgaatatctggntattttnccttctaagcaaagtcaacagggggactgctcaaagttgtgt

SEQ ID NO: 50500 - DNA, 1147 bp, Homo sapiens
tgacacttagaggtggctcaggctgagcatgtttaattatcctcactgggagagttgaaaactacttgacaggttccataatcaataagtcagagattcagatcatcaaaaagggggattgtcacctaccccaaggccacatataggattctgggtcccagagtgagtctgggaggtggaaccctgtgaaaggcagctttgacaggtggtgtctgttggacaccagcttctggcctggccctgctttcttctcgggtaccagacagggtgtgagggcagggaactagctccggagatcactggaggactccgagttggggccagggcttgctgagggcctcacttacagttttttgggggaaattcccaccggccttggcccttgccaccaaagtttcgcacccgatggataatctgcagctgctgctcaatggtcgaggtgatgttcaccgtcatctgggatgtggacgtagcggacattgcggcctgtcacaaagaggtcatccagcttgacctgatgcccccaacggtccgtgtaggtgactttggccaggcggatgttcatgaaagcatcgacattgtctatgcgtccgtgggccacgctctcatcccgcaggtccacagtggttacccggccctggaggccctgcagtaggatgatcaggctgttctcagagatggtccgctccttcactgaatggctcaccgccattcttccacaccagctgcctgcttgcacgcgacattccttccgctttccccgtctgggtcgccgccgaagctagcgggcgcctggactggctgcctcccgccggctgcagcaggacggagaaaccatgccggcgaccgggccgctctgtcctccgggcgcagagtgcgtcagtgctctgcgagtcaccgcgtcacggagaaactacaatccccagaatgcttcgcggcgcggggctcgtcgtccgcaaatcccggcctgcgtcattggagtctctttcactagagtcgttcattcattccgcacgcattcattgaaccggcgacctgggccaggctccttcccaggctccggcatggagcagtgaccaagatcaagtggtccctgagctgatggcgctgcaggggagagagtcttaagaaaacaaagaaaaaaaaa

SEQ ID NO: 50501 - DNA, 713 bp, Homo sapiens
ttttttttttttttgtcatatccatagtttattttaaaaaactgttaaaaactaaccatacaggtttattaatatacttaaaaagtttgttccctatgttgaagtaaaatacattagcaacatcttccggacaccatctttataaaagtaaaacttctagatcctgaaatgtactacagtagagtctatagtttacacttttaatcacagattggaattcattctccttactcccctacttcccacatgtggcagttattacttcaaaattaatgacattcactcatgttatactaccacagatccttaaatagagtacatactgcataattactaacagagccagtcttctctatttgttgtcacatatttcatataagcatttgacttaaagtacaaatagaaatactacatcccataattgtaaacattcaccaggagcttccatagtacagtaagtaacagaggtggcccaagagtcagtcaagtgttcttcactcactggatactgctgagattaggaaaactgttttgaaggcaaattatcctaagtcttacttgtatttctataaggatgcagttctggatatatactttcagttgaaaacacctgaaagtcattctatagtctacattaagcaccactttcacttacctgaaatattttgagttaaattcagcagtatgtacggttgttaatatcagaaattaag

SEQ ID NO: 50502 - DNA, 399 bp, Homo sapiens
  misc_feature (1)...(399): n = a,t,c or g
atggaaaccactgggctcaaacacgtgctttattctcctgtttatttttgctgttactttgaagcatggaaattcttgtttgggggatcttggggctacagtagtgggtaaacaaatgcccaccggccaagaggccattaacaaatcgtccttgtcctgaggggccccagcttgctcgggcgtggcacagtggggaatccaagggtcacagtatggggagaggtgcaccctgccacctgctaacttctcgctagacacagtgtttctgcccaggtgacctgttcagcagcagaacaagccaggggccatggggacgggggaagttttcacttggagatggacaccaagacaatgaagatttgttgtccaaataggtcaataatttctnggtgactcttg

SEQ ID NO: 50503 - DNA, 908 bp, Homo sapiens
gcacgagtccaagtcccagcgaacccgcgtgcaacctgtcccgactctagccgcctcttcagctcgccatggatcccaactgctcctgcgccgccggtaagaggctggggatgcccagtgtagactgtagcgctagagaagcaatttctgacccctctttctttctctggtcactcaatttcaggcacaggagttgctccttcccaaagagttttggtatctttctctccattctaggttattcggagccccctttttaccgttaaggagatctgagttaatggcttgctcaagttcccaggaatcggttgtggactgaggaactcggccccgggtcttagtacgcgtccctttttcaggtatccagggagttctcacctctgtcttttctccttcaggtgactcctgcacctgcgccggctcctgcaaatgcaaagagtgcaaatgcacctcctgcaagaaaagtaagtgggatcctctctttcctctaccccttccctgtcctccagcctgtcccctctccaccatcctcaggggaattaaagcagtctggggatgccccattgcgcggaaattgttgcctcctcagtgatccttatcagggagagcaggaatccttattcccggtgtcgctagtactcatctctgccgcctcctgtctgcccccaggctgctgctcctgctgccctgtgggctgtgccaagtgtgcccagggctgcatctgcaaaggggcgtcggacaagtgcagctgctgcgcctgatgctgggacagccccgctcccagatgtaaagaacgcgacttccacaaacctggattttttatgtacaaccctgaccgtgaccgtttgctatattcctttttctatgaaataatgtgaatgataataaaacagctttgacttgaaaaa

SEQ ID NO: 50504 - DNA, 925 bp, Homo sapiens
gcgtgactctcacttcccagatgaagatctccttcaacgactaaagcctgcagaccacatttgagtacccttccgagagctccctagagcaggaggaagaggtggaccagcaggaggaggaggaggaggaggaggaggaagaggaagaggaggaagagggatccggctcagaggagaagccctttgcactcttcctgccccgggccacgtttgtgagcagcgtgagacccgagagctctcggctgccagagggtagctcaggcctgtccagctacaccccgaagcactctgtggccttcagcaagtggcaggagcaggcgctggagcaggccccgagggaggcagagccccgcccgtggaggccatgctcacacccgccagtcagaatgacctctcggacttccgcagcgagccagccctgtatttctgagcccagcactgccaggaccaaggctgagcccagctgtgggagtcccggaagctgggcagtagccagggactactgcacccgcttctgccttgtttggcctcactgtatcccacccacccctcctggccctggaagcagctagggtgcctcctgccatcggggccaggtctgggtctcactccccggccctgatttgggagggtccaagggggaagtggggtggggaactgcctgtgggtgagtgccaggggcctgctgggtggtggccatctgcgacccggcagggggctgtgcagattctgcaccctggccattccctgtcctgtctcctcagcctgcctcacagtggccatggggtgtcggggtgaagggctgtcccagctacttgtcctctgcaggaccctaagcccctgcccgcagcccacatgccctctgtgatgagtggcgtctttcctgcctctgatgatggactcaataaacagcactggacaaggc

SEQ ID NO: 50505 - DNA, 759 bp, Homo sapiens
tgcactgttttctcactaaattggctttatttatacagttccccgggaacctagcattccctaaacaagctccaaaatgcagaagaagaaattgtgccacagtgatagagtttttaatgaatatccatggccacagttttgagtctcaggtaagtcttggaagaagttaaacacagtattaggcaaatatttatctctctgaaaaaatagggaggaggtgaccaggaaaaaataaccactattgaatgacacgtttgtacttgatggatctgtcatcaagttttaaaatcagaatcatttgggctttttaaaaaccattttatactcgtaataaatatatttaatataattgctgtatttgtgagaaagatctgttttcttttagctggccacttcagtttgctgcgtatctttagctgctgttgtgcttaaatactgagtcatagggtgcttttttaagaggcccttcagaatatacttgtaaaggtgtattggcattttttggtttataagataaaaacagggcatgaagagccttcatagtattaggccaaataaaatctattaataactgccagctagctctacacttatctaaagctgttaatgttccttttttttctatcaccaaatttataaaggactaaacagtactattgagtttactcggtttataaatccagttttaactataattcaacaatattttggtgtggtgaaacgttgtttatgaaatgtataaaatgtataagttttaat

SEQ ID NO: 50506 - DNA, 169 bp, Homo sapiens
gggtgattccaaatctaagaagtcagtagcttataattacgcatgcatacttattttggtggtggttcagtcttccagtgatgttcaaatgctagaacaacatgcagcatctctcttgaagctttgtaaagcagatgaaaataatgctaaattgcaaagaacttgtgca

SEQ ID NO: 50507 - DNA, 1077 bp, Homo sapiens
  misc_feature (1)...(1077): n = a,t,c or g
ggtcgacttttttttttttttaattgctcaagaaatgattctctcacaggcttgggaaatcctgttagcatgcagaataatgtggtaactttgtcaatttcccattttatttttttaaataaatatatgatctaaaagccaactttttctcagttttactcagtggaaagataaactaagttttaatgttatttttttaaatttaagcaaaatttatttctgttctttaataaataagaaaatgtggtccactgcattgttgtgatgtgtcttgtgacatttctattttgtagaaactttaaaaaagggaggaactatgttcaatttttcctgtcaatggtttttttgtgttgtagttgtcacctgtgtgattatcaatcatttagaaatctcatacccttcccctaaattttcagcaagtgcctgggcctctctaagaggtcactttgtactctccttttctggcagtctcctctttggtatctgtactatcggtttgaaatgggaaccagatatgtttccattttatacagataattcagttgcttgaagaagagggacacaggagaaaagatttaaactattggctaaaatgaggtgtcttattattgattttcatctatatcttgtcccataatcaggaataaacagtagctacactgccttgtatggcagccagagcgctgcttgcttgcacttttaatgattccatcaataccatgtagattgaattagcaaggagaagtaaacctttcatttctttgccagactatattgggaaatgaaaatccgtcattacttttccttgctagcaattgttcgaatatctgggataaagaaatacatacaggaaaatgttagggcagaccaagtattaaaagctaggacagagcaggacaaaggaggaaggataattctacttgtttggcaaagttacatcagttgtcttactgacacatcagggtactatctataggtggaaattgagggcccggagagggttaaatgggcatgcccggtgttcacttgctatttttttcaggnacaaaaattaggattccngatctggatcccggg

SEQ ID NO: 50508 - DNA, 410 bp, Homo sapiens
ataactattagaaccagagttagaaagaagcagtttggctaatataaaaattatgtggattctgttagagtagttcagcttccttaaaataagcatatatcaactaacaaactaaatataaaagctaaacaagtgaaactgaagcagatttattgtaagatttggaagagtgcaggatgtttatcatagcacattattaatatttattattcttcctatgtagataagtaatgtcctagatttataccatagaaaaacaggtagagacgtttagctgtgagtgtacaagtataaatcaattaagtgccagattttgatcatcaccagttgctcattcaagtcctatgttgcaaagttactcttacccttttttacattacttgataaaggcaatgtttaattacatattt

SEQ ID NO: 50509 - DNA, 387 bp, Homo sapiens
ttaattaacaaatgtccagttttattcattacaaatattaacatcatttttcttttatttatcctttatgcatcattttatacattcacacacacaaagaacattaaaaatatatccaattattcaattttggttgaattttcattaaaataagtgttaaaaatatttatttgttttctgttttgagaaggcttttattgttgtactccagagtgttatttctggagacaaagttgcctgtgctttaatagggagattcctgggagaatctaaaccataagcaacaaaattttaagttaataaattcaagacaaagcagaaagtatagatttgctttcagcattcccgaggtgtttagatttttattagtcacctaattaaaatatt

SEQ ID NO: 50510 - DNA, 182 bp, Homo sapiens
cggacgcgtggggaaattttgcacaactttaacaagtagcagaactaattgttcactgatggctttaaagatgaaataattctgtgaatacatgaaactgtgagggactcttcgtggttgtctaggtttatttatatgcatactcattaataaaagtttttttttgttaaaaaaaaaaaaaa

SEQ ID NO: 50511 - DNA, 515 bp, Homo sapiens
tgattttaataacttcccaattaccagggttataacattgctttcttcagttattaatacagtcaaattaattttaacaatataggcacaattcatttacaaattcagtacagtagtccagggctacatgtaagtggtctctttattttattctttacatcagaaaaatcatgaatgtcagttttgccagtattttacaatgaggcttatcgtttaaaattttatagtgtatgacatgtaaataaaccagtatttattgtaggttgtttgattcaggcatttcaaatggatataggttaatggcaatggaatcctatttatttggtagttggttttgtttgtttttgtttatttacttttgctatttgttttgtattgtctaaactttgcttcaactgaagacagtgtaaggagttgaaaatacaatcaacatagcaatggaaagcaatgcaaagagggtaaatcttgttttaatttttttaactttttttttttgtaaataaatagtactgtga

SEQ ID NO: 50512 - DNA, 616 bp, Homo sapiens
attcgggacgaggcatacagttgttgtccagtatttttagaaaagtaaagtcttagcatgaaacttccttaacctattttagcctcatgcttttgactaaaatagacttaaaaactgaattaaatttttatatacacttatatttaattaatctaaagagatagcttacatatagaaattaagtaaaggggagatctgtattttcattcaagatgttaaaggctagcacagaaattttctaggcattaaatcattgcttattacataatgtttttaatagtttgctttgatatcagtattgtgaataacggagcaaattcagccatattagttctgttgacttcatgctcataattttgagaagtccagggcgtaaactaaaactcttttgggtgtacttgaatattctttgtttgttgatgtaaaatatgtaatctctgattttatagttaacaataaaaataaaattttaggtgagtgaaagcagtgatttaaatttaacagtgtcctcttgaaaaaccttaatcacagttaagtgatggcatgggcaatgaattttaatcatatttaggaataaaatactagatattagtgtataacaattagatatatgtta

SEQ ID NO: 50513 - DNA, 1046 bp, Homo sapiens
tttaagatgtaaattttaatacattatttcttttttgaacttgaacgggaaccagaatgggatgatccagatgatgacctgtggcgtctgggtaaagtagtggtgttccgtaggggttggccctgggctcagggttgtttagtgttttcaccaatcacctggctttcgggtgaccgtgatcttgttcgtctttttttgcgatcaccagatgaagaagatctagaacgacttctctttctgttcctctcaggagaagatgatgaacttgaataagatctttttcgtggggaagaagagcccctgtgggacctggagctggatcttgatttcgacccacgagatctcgaacgttctctggaactggaacgagatcttgactgcgaactggaagaacttcttgaacgggacctggaacaacatggaacgattttttttttccaggaccatttaattgagctttgtgatatgaacactgaaagaaagatatgtattagagttcattttcatataaaaagataactatacaagatatatactttcaaaacatagtattttaaattagataagatttagtaacaaaaggtaattaaaaaaatatcactttccaggtgattaaattaccctaaagccactcaactataaaacaaaacattatcactttattacaaaaacaatgaatactttgtttacaagtaactagaagctacccagaatacatccaagaaaacagaatgttgcgatttatacttaatttctctaaaatgtctccatcattttcctttataaatccccttctatttttgtttctagttagtacaaagttttgaatgttggcatgtgtgtatttcatccctatatttttctgtttactcaatgcttagagaattaaagggaaaatgtataattctgtcattgttaggtaattatattattggaaaatatgacacaagggagacatggttcgtacaaactttaaaactcacaaaattcattaatctaatttacaactataatttgtcccttataataataccctgtagaaaaag

SEQ ID NO: 50514 - DNA, 993 bp, Homo sapiens
  misc_feature (1)...(993): n = a,t,c or g
gggtcgacccggatcgcatctgtgaggtcgccctcagttgacaggcggggaaactgaggccggggggctcgctcaaggtcacgcagctcatcggcggcagggctggaccgagaccagggcttacatcgggtggccttcctcccgaaaaggaggactggagggacgaggatggacaggtctgctaccgctggcnacggccccccctgctgccccggctggggaggggtggtccccctgcaccccctccaaacctcaccagtaacaggagactgcagcagacccaggcccaggtggatgaggtggtggacatcatgagggtgaacgtggacaaggtcctggagcgagaccagaagctgtcggagctggacgaccggtgcagatgcactccaggcgggggcctcccagtttgaaacaagcgcagccaagctcaagcgcaaatactggtggaaaaacctcaagatgatgatcatcttgggagtgatttgcgccatcatcctcatcatcatcatagtttacttcagcacttaaatccccgaggagtctgccctgcctagagaagggcctctcccccaaccctcagccgttcctccacctctcagccatatctttcagccccccctcccctgggatccgtgtgtgtgtgtgtccgtgtgtgtgtccccctgtaaatagccagctgttatttatacatatataatattatatatatttggtctgtttgtagttttattactagatgatttttccggttgtccttaacaccccttcctgaggttcccttcacccctctctcttgccttccttccctttccctttcttcctgactagccccaagtcccttcatttgcatctgctatgcaatagtccctctcctttccttcttcttccctcagatttagctgatccttcctcccaccctggccttcctttcctctttcctcctcactctccccgtcatgctccctctgccccgccctcaaaaaaaaaaaaaaa

SEQ ID NO: 50515 - DNA, 1227 bp, Homo sapiens
acagcacctgtccaggcttccttaggtacatcttctttgtatccattgggaggctctgagactggccccacttggtcctaagaatcccaaggtctttgggagcgtccagcatgttaattagcgtatcattacatactgctatccctttccatttctttttgttccatcactcttctctcaacctgtgtttctttttttactgaggagttagtccccattagttcttgtatcacattttcatttgcacgacattactcgcaggtggtggggagcctgggcttttggggaaccaggctgctctggtccccagcattgcctcctcctagcccctctagtccagtttgcctcccttaccctcattttccaaacctcttgtaccctcctctccctcccccagctggtatgtaagtgtcttgaagttcagtatgttatgatggaccaataattctgccacttcgggtttctccctacattcctgctccccagttttcatgtggggtactcaactgacattcccatggggtttcccctcccatctgcctgatccacctcctcctcccaccaggagagttgggggttggccacaattgatcctcttgtgagaggggtggctaccagtgtgtgtgtgggggtcatcactgccttggggaggagtggggcagggcagagaatccccccaattcctgcctgaaatctctggcctcacccctgctgggggttggactgaaaaccctcctccccaatttggggggtgttgccccatcactgcccagctcctctgactgccccccctgaatttagggtgggggtactagtcactgccaatgtgtgtatgggacttgctggaaaacggggatgcttgcccctctccaggactattgagcccagagagagctgtcctctcattgggtgaactgattgaggaagggtctattgtctttttaaatggcacaattttaagggtttgagggtaccagtcccttaacctgccacgggagggggcccccaaactttcttccccccacacttctggttttctgtgtggagggggagcagggatatctaagctgtggtgtgaaagggtaggagagatgctggaggtgggggtgctgtgttttagaccccccatattatcccagtgtcccctgcccccctcttcccccaccccatgcccccaattctgtggcgcatccagattgtgaaaatgtacaataaatgtgtaatgag

SEQ ID NO: 50516 - DNA, 1676 bp, Homo sapiens
tcgaggaagagggggtgaaggccagaggctcggggcttcaagaccgctgtctggagtccccctttccaggccatgtcggggcccacctggctgcccccgaagcagccggagcccgccagagcccctcaggggagggcgatcccccgcggcaccccggggccaccaccggcccacggagcagcactccagccccaccccagggtcaatttttgcccccttccatctgagcagtgttaccaggccccagggggaccggagggatcgggggccggcgtgggtggggtcccatggagtactccagcacacgcaggggctccctgcagacagggggggccttcgccctggaagcctggacgccgagatagacttgctgagcagcacgctggccgagctgaatgggggtcggggtcatgcgtcacggcgaccagaccgacaggcatatgagcccccgccacctcctgcctaccgcacgggctccctgaagccaaatccagcctcgccgctcccagcgtctccctatgggggccccactccagcctcttacactaccgccagcaccccggctggcccagccttccccgtgcaagtgaaggtggcacagccagtgaggggctgcggcccacccaggcggggagcctctcaggcctctgggcccctcccgggcccccactttcctctcccaggccgaggtgaagtctgggggcctggctataggagccagagagagccagggccaggggccaaagaggaagctgctggggtctctggccctgcaggaagaggaagaggaggcgagcacgggccccaggtgcccctgagccagcctccagaggatgagctggataggctgacgaagaagctggttcacgacatgaaccacccgcccagcggggagtactttggccagtgtggtggctgcggagaagatgtggttggggatggggctggggttgtggcccttgatcgcgtctttcacgtgggctgctttgtatgttctacatgccgggcccagcttcgcggccagcatttctacgccgtggagaggagggcatattgcgagggctgctacgtggccaccctggagaaatgtgccacgtgctcccagcccatcctggaccggatcctgcgggctatggggaaggcctaccaccctggctgcttcacctgcgtggtgtgtcaccgcggcctcgacggcatccccttcacagtggatgctacgagccagatccactgcattgaggactttcacaggaagtttgccccaagatgctcagtgtgcggtggggccataatgcctgagccaggtcaggaggagactgtgagaattgttgctctggatcgaagttttcacattggctgttacaagtgcgaggagtgtgggctgctgctctcctctgagggcgagtgtcagggctgctacccgctggatgggcacatcttgtgcaaggcctgcagcgcctggcgcatccaggagctctcagccaccgtcaccactgactgctgagtcttcctagaagtacctgctgggttctcagttccagttcccatcctttgattgatcactctccctgacatccacctgtatgactttgtcaccaaatgctgtcttctctttctccaatcaagaaataataatccctcgagtttacaaaacaaaaaaaaaaaaaaagtcgacg

SEQ ID NO: 50517 - DNA, 1347 bp, Homo sapiens
cttgtgattgtgtgacaagtgtgtttacagattattggttacacttcaatttacagggcataaacaatgattatctattactctgaactttatgattacatgttcttcagattacatgggattgtagttgggagttaccatgtaactcaaacataattaacatgtaattagtttacagattgtagggcatcacttcaattcaccaagcatgtagttctagcgcactagcatggcgccagccatgtacttacaatgtagttacagagtaattacatggtgatttttgcaatgtaaaataaagtgtttctgattattttctatgtaaaggaaccctctcctttccccttctggtccctgcgctttggtataatatatatacttctccatacacagacctctgcagaatgcaaaataaaacttgcagtgaatgaatttagcattttatgagagtgctgttggaaagacttgataattcaccccttttgttttgaagagttgaatcttctgttaaaaggtgatttaaaacttgaatgtgatgaattgtggcaagttaacttcaagttatgtgcaatacttatttcaaacttttgaaagatctttgcagtgtaattctttgtttttaattgcagacatttaaaaatgtcattttctactgttaagagtaatcctctttcttgctggtgtttctaaagaaaagaatcagaaatcaatctttctactaatgtaaatttgagattatttttaaaaatggaataaaagaggttttggtcatttgctttattttattattttaaagctactgtgattgatagcattgtaagaatcgggacaatattgtattcaactgttttattttttatatttttaaaatttaaagtataattagttcttataattttcatcagatttttgttatattttttggaagtgaaacttttagcaagtgggtgtctagtttttactaatccctaattttttttccagtgtattgctcatattatcagaaggaaaagttatttaagtatgtcagttaattgtactacttggctgaatttccatatagtttttactgtgtatggggaggttgtagtatttattatagcattttaaataagggtaattcattttttattaaagtcattttcacgttaagttcctatttttgtatgttctactcttaagttatataacacagttccttttttaaaagagttcatttgttgaagtgctagtgaaaaattaatgttattaaatagtttgcaaatgactatttataccagtatgcatataatttttaaatatttgtaatgtgagatgttgaatgaataaaacttttaactcagaaaa

SEQ ID NO: 50518 - DNA, 252 bp, Homo sapiens
atgaatgttactctgcatattgatcatgctggaaggttatttcctaatgccagcaatctaccattgcccaaaacctgctgagtttactcttttggaattgcattcaaagttaatttgtcacacacactaaactttatgattatacattgttttaaaaaatatagtattaggaagcttgattatttttagttaccattacttggcaccaaatgaaagtttccaaaacttccacctaacctttgaggtaatggc

SEQ ID NO: 50519 - DNA, 336 bp, Homo sapiens
gccaagcccagggcctgggggtggcctgggcacatgctgagggttctctcctgcaggacagccacagtgtggaagaccctgtgccccttctggggtgaggagtaccaagtgcacctgccgcccaccttccacgctgtggctttctacgtcatggatgaggatgccctcagccgggacgacgttatcggaaaggtctgccttacaagggacaccatagcttctcaccctaagggtaagttctcccttccctcccgcactggtctgcccagtccctggcctccctcccactcagagacctcccctctaggctccgtctggtctcctgctcagggaaag

SEQ ID NO: 50520 - DNA, 1857 bp, Homo sapiens
ttttttttttttttttttacagtcaatgagctctctctttattgaggtatttcaaatatacaaacacttcagagctttttagatatgtgaaggtccaatttagtgaagcggaattaacaaaacatgattctaaaagcctgcctcctctagaccaaggccatgtaaaagatttatgtaccaatcagcatcttttccttttaataatcttcaggatgttgtgttgggtccccagattcccatttgattttcttgcatcattttctcagactgtttgcttccttgcttcctccccagtgagtgccttgggcattttgtgtgtgcagatagagaagtacagagttactgcaggagccctcaggagtgagacaacaggaaatgacaaagtaatacagagctgcagtagctgggatgggtgaggaccccacttgggatgccccatggtagagtactggtgccttgggagggtagaactgctcaggtctagcacgcctcactgaagattggattcacctgctgggtgactcggatgaaggtagttctcctgctcaactctttgagcttagctgctcccacataggtacacgtagagcggatccctcctaggatgtctcggatggtatgttccacatctcctttaaaaggaacttccactgtctttccctctgaggctctgtactcagccacgcccccagcatacttcttcatggccatttcagaactcattccatagaagagcttgtacttcttgccatccctctcgatgagctcaccacctgactcactgtgcccagccagcatgccacccagcatcacgaagtcagctcctgccccaaaagccttggccacatccccaggacagctgcaacctccatctgaaatgatgtgcctttgaggccatgagcagcatctgcacactccatcactgcgctgagctgtggataccccactccagttttcttccgagtagtacacacagagcctggcccaattcccactttgatgatgtcagccccagaaaggatgagctcttctaccatctctcctgttaccacattccctgccatgatggtgtgctgggggaagcgcttccgtacatcttttacaaattcaacaaagtgttcagagtagccatttgccacatccaggcatatatacttcacctggggaatagcttccaggatctgttccagctgctcaaagtcagaagagcctgtgcctgagctggcagccagatgctcaagacaatcaggattctggccagcaaactcttgccactgaacgaggctatagtgcttaatgggacagcagtgaagagagagaacttacagagaaccttggccatctcaaaggtgcccacagtatccatattggcagcaatgatgggaacccccagagtatgtctgctttgagttccgaaatgaaaaggatcttgtgagatccacctcacttcgagacttaagggtactgcgtttgggcctcaaaaggacatccttgaagtccagtttcacatcgttgtcaatatgaggcatggcgcttagcctcggggtagcgatgaatctgagggctggaaggcaggaagtcataaggaccaatcttcccctgggctttaacgccctgttacggctggtggcctctcttcgcttaagttgtggaaggtcgggcaaaggccgaagtgtggtccctgaagcctgtcacctcgacccatcccgtggctgcgattaccctagggctccatcccaggtactgtttgttggggaggagagctgggaaagggttgtgagagaccctgacggtgcattccttaccccgctacacttccttcttctacccctgcaaagagcaatggggcaagaggct

SEQ ID NO: 50521 - DNA, 2083 bp, Homo sapiens
tgggggagggaatgggtgtctggctcatggatttgcaatctggaaattctccataacttgctagcttgttttttttttttttttttacacccccccgccccacccccggacttgcacaatgttcaatgatctcagcagagttcttcatgtgaaacgttgatcacctttgaagcctgcatcattcacatattttttcttcttcttccccttcagttcatgaactggtgttcattttctgtgtgtgtgtgtgttttattttgtttggatttttttttttaattttacttttagagcttgctgtgttgcccaccttttttccaacctccaccctcactccttctcaacccatctcttccgagatgaaagaaaaaaaaaagcaaagtttttttttcttctcctgagttcttcatgtgagattgagcttgcaaaggaaaaaaaaatgtgaaatgttatagacttgcagcgtgccgagttccatcgggttttttttttagcattgttatgctaaaatagagaaaaaaatgctcatgaaccttccacaatcaagcctgcatcaaccttctgggtgtgacttgtgagttttggccttgtgatgccaaatctgagagtttagtctgccattaaaaaaactcattctcatctcatgcattattatgcttgctactttgtcttagcaacaatgaactataactgtttcaaagactttatggaaaagagacattatattaataaaaaaaaaaagcctgcatgctggacatgtatggtataattattttttcctttttttttccttttggcttggaaatggacgttcgaagacttatagccatggcattcatacttttgttttattgcctcatgacttttttgagtttagaacaaaacagtgcaaccgtagagccttcttcccatgaaattttgcatctgctccaaaactgctttgagttactcagaacttcaacctcccaatgcactgaaggcattccttgtcaaagataccagaatggggttacacatttaacctggcaaacattgaagaactcttaatgttttctttttaataagaatgacgccccactttggggactaaaattgtgctattgccgagaagcagtctaaaatttattttttaaaaagagaaactgccccattatttttggtttgttttatttttattttatattttttggcttttggtcattgtcaaatgtggaatgctctgggtttctagtatataatttaattctagtttttataatctgttagcccagttaaaatgtatgctacagataaaggaatgttatagataaatttgaaagagttaggtctgtttagctgtagattttttaaacgattgatgcactaaattgtttactattgtgatgttaaggggggtagagtttgcaaggggactgtttaaaaaaagtagcttatacagcatgtgcttgcaacttaaatataagttgggtatgtgtagtctttgctataccactgactgtattgaaaaccaaagtattaagaggggaaacgcccctgtttatatctgtaggggtattttacattcaaaaatgtatgtttttttttcttttcaaaattaaagtatttgggactgaattgcactaagatataacctgcaagcatataatacaaaaaaaaattgcaaaactgtttagaacgctaataaaatttatgcagttataaaaatggcattactgcacagttttaagatgatgcagatttttttacagttgtattgtggtgcagaactggattttctgtaacttaaaaaaaaatccacagttttaaaggcaataatcagtaaatgttattttcagggactgacatcctgtctttaaaaagaaatgaaaagtaaatcttaccacaataaatataaaaaaatcttgtcagttacttttcttttacatattttgctgtgcaaaattgttttatatcttgagttactaactaaccacgcgtgttgttcctatgtgcttttctttcattttcaattctggttatatcaagaaaagaataatctacaataataaacggcatttttttttaaaaaaaaaaaaaaaaaaaa

SEQ ID NO: 50522 - DNA, 378 bp, Homo sapiens
tgcttcactctctcattcttagcttgaatttggaaatgacttttgatgacctaaagatccagactgtgaaggaccagcctgatgagaagtcaaatggaaaaaaagctaaaggtactagggatgggaaaatgtgtacagggaaagaatcccagtgttagccccaaaatgtaaattcaccgaagaatgggattagaaagctaaacacccaagtatgggaaaatagaattaataccatttacttaaaagaaaaacaagaaggctataatgatgatgatgatgacaacttatttataacaatttatactgagtatttactacaggttattctatatgttattcactttcagagtattatttctcagaatcttcgcaataaca

SEQ ID NO: 50523 - DNA, 431 bp, Homo sapiens
cttgagtttgcattaatagtttggctctaacaacctaatattttcaaattaggaaaaatttgaagctctcacaagtaattcagcattaaatatgagaatgtactaaagcatagggtggattgaggcactgtatgttatgctactactaaggtagtagcaaaataagctcttatgggtgttatctgctgccaggatggccagattgaatcagaaacaaagtcaagatttcagctggtcaacctgttttatttaggacaatgtttggcaaattggagagtgtgacctgtaagtgggttgtaaaattaatttagtggatcacgaccagtgttaagaaaactgtaatagaagagaatagaaaagatgacagtatgttacatgcagtaaccggtaattacttgtttgttgcagttgttgtatgtattggtcatgga

SEQ ID NO: 50524 - DNA, 788 bp, Homo sapiens
gcatcactgacggctatgtccccattctcggcaacaagacactgccctctcggtgccaccagtgtgtgattgtcagcagctccagccacctgctgggcaccaagctgggccctgagatcgagcgggctgagtgtacaatccgcatgaatgatgcacccaccactggctactcagctgatgtgggcaacaagaccacctaccgcgtcgtggcccattccagtgtgttccgcgtgctgaggaggccccaggagtttgtcaaccggacccctgaaaccgtgttcatcttctgggggcccccgagcaagatgcagaagccccagggcagcctcgtgcgtgtgatccagcgagcgggcctgggtgttccccaacatggaaagcatatgccgtctctcccggccgcatgcggcaatttgacgacctcttccggggtgagacgggcaaggacagggagaagtctcattcgtggttgagcacaggctggtttaccatggtgatcgcggtggagttgtgtgaccacgtgcatgtctatggcatggtcccccccaactactgcagccagcggccccgcctccagcgcatgccctaccactactacgagcccaaggggccggacgaatgtgtcacctacatccagaatgagcacagtcgcaagggcaaccaccaccgcttcatcaccgagaaaagggtcttctcatcgtgggcccagctgtatggcatcaccttctcccacccctcctggacctaggccacccagcctgtgggacctcaggagggtcagaggagaagca

SEQ ID NO: 50525 - DNA, 919 bp, Homo sapiens
atatattacaatagaagaatgcaaaaacaaacaaacaaaaaaacagaaaatagattcctaagccccattccagacctgaattactaaggttttgcccaaaggcaggcctagcaagtccagaagcctgaagaaaccaggtaggattcagagagcccaggaactgacatattttaagactagcctagtctgatctttataaataatccccaaaagcagccctctccataacccataaccaggaccacttttcctaggccatctcaatccagatatcctagctcatcactccacagattcattctcctcaagatttgttccaaacaatggggaacagatactgattctttcaattatgtgccttggacattttaccaaaagctcctgccaggttttgcggctgcctgattgttaaggaattaaggagaatgaacataattctcaatataaaaccctttcaatatctttcttggtcttcttgccctcccatctcactgcttctggaaacttaatctgttcttttctttccctttttctatcagtgattcagggattggatgagtctctatggtttgttttgccctgaagagcagaaggcttctgtcccaactggtgttgccaaagcaacatattaattccatgccatgatcctgggtcaagatctgcacaatctgattgggcatgtcacctcggatggcaagggagtggaagtggtcaaaatcatggagtcccagctttcggagacgccttgcagctgcccggtaacacttccagggttggggctccacaaggaggtagtggcagagggaggaaagatgggccagggaactcccataggccatggtctccatgattcagatgaatccacatggttattgacatgcagaagccaatgtcaaaaacttaacgtccaaattggctt

SEQ ID NO: 50526 - DNA, 498 bp, Homo sapiens
ttttttttttttcctttttgtctgtctttatttacagcaaagtacataatatgtggtcactttgtaaccactaacaataaaggtagggtggtaaaaagaaaagggagaggagcaagcatcttaaaaggggggaaaaaaaagcctaagtctgtatttagctactcaccctgctcctgaggcaggactgggtaggcactccctgcctctaagaccacagccaagctgacctggaatgccagtccccggtatgaggaaggcagcagaacgcccagagacaaaagattaaaggggactgagctctggatgcatccacttatgctttgccagacagttcccttccttgttttgtttgaatgcttcccccaccccgccctgagcaaagtgtaaagggcaacggtggtacagaagtacaggcagtcccttccagaagcagtcctgaaccgcataacccacctacctagctgctcctcagcctgccgagttcttggccctggaatc

SEQ ID NO: 50527 - DNA, 451 bp, Homo sapiens
cggggttgcaaaacggggcctctttgtccgggcttgcttccggcgtcatggctcaaagggccttcccgaatccttatgctgattataacaaatccctggccgaaggctactttgatgctgccgggaggctgactcctgagttctcacaacgcttgaccaataagattcgggagcttcttcagcaaatggagagaggcctgaaatcagcagaccctcgggatggcaccggttacactggctgggcaggtattgctgtgctttacttacatctttatgatgtatttggggaccctgcctacctacagttagcacatggctatgtaaagcaaagtctgaactgcttaaccaagcgctccatcaccttcctttgtggggatgcaggccccctggcagtggccgctgtgctatatcacaagatgaacaatgagaagcaggcagaagattgcatcac

SEQ ID NO: 50528 - DNA, 700 bp, Homo sapiens
gtattcaaatgatatccaactataaatattcttctataacttactgtgtttgggagacttattcatgtaaatacatgtagctttaatccactgacagttaactgctgcataaacgtgccacaattaatccagtctcctatgacagatgcaggtgttttcaataatctgctgttacaatgctgtaacactctcctacgtgtcgtccatgcacatgtgcgagagtaacaagggtggaaagaaggacagagagaggctatcagtgcttgtgtgagtatatgaaatctgcccgctggctcctcacacggttggaggtgaaatgtgagagaagggcaaacagcagttgtgctccaccgtaggcatccatggccctccacagagtctagatttagagtcacaagaggccttacagaaggcctctatcctccaacccgcactcaggaggcagcttggcctatgtcacagagcacgtcagtggaaaacctgggactaaaactaggtttcccttcttcactgccttctttctcaaatcaagatctgtaggccaggcaacatcagtgtcacctagaaacttgttaataatacaggctcttgggtcatattccagacttactgaatcagaatttgcattttaacaagattctgagctacacattcaagttttaaagatggaaaagtactctagagtgaaattaatgatcgc

SEQ ID NO: 50529 - DNA, 687 bp, Homo sapiens
agagagtctcgagtttttttttttttttttttgcaagactttgatgagattgttcacttttgtctatgtaaaatcccaaatccttgagaataaaaaagggggaggtttaagtcacttgttgcaatgccctttttaatagaggcaataaatctaaaggccataaatttagagtgacttacagaagatcgaactttggagtgtggcagagtaagggatggaaaccgggccctccagttcactatcagtagcttttgcactggtctgcccttcctaaattaagtatgcacttcaatttgatgagtggaaacagtctatctgggcagtaaccagggagctttgtgcctagtagattgcttctgttctgcacttctttggtttcccacctcaatgtaaaaaatagctagcaatgaagtccagaagttgtcaatggttcatccccagaagaatgcataatgtccaaagttgtatgtgtatgatgtcttcaatggtattaagttatttcaaattcttagttcacctacataaatcatttctaacaagcatcttcttaaccaactttatgcacagtgtatgtttgtaagtgcttctgcacgatatgtttatacatgactgtttccatagtacttatgtttttaaaaatattcagtcatttcctactataatcctcatgtatccatgtaactgact

SEQ ID NO: 50530 - DNA, 693 bp, Homo sapiens
  misc_feature (1)...(693): n = a,t,c or g
ttcggcacaggcggcaggtccgcttccgcctgacgcgctactccccggtgcggtccgagccgcagcctggtgccgcagagctggagatgcccgtgctgaagagcagcctggccttggctggagctggngccgacggngagccactttgatgctgcgaaggccgtggaggaacagctgagaaaggctgttccagatccgctgcggtctggaggagagcgtgtccgagggtgaggggggcgggcggccggccgcgtgcgggagtcggggtgaggcgcgccactcacctccgtccccgctgcgctctcagggctgaacgtgccgcgctccaagcggctcttccgggacctggtgagcctgcaggtgccggaggaacaggttctgaatgccgcgctcagggagaaattggctctcctgccgccacaggctcgagccccgcacccaaaggagccacctgggcctgggccagacatgaccatcttgtgtgacccagaaacgctattttatgaatctccacacctgaccctggacggtctgccccctctccgacttcaactccggccccgcccttcagaggacaccttcctcatgcaccggacactgaggcgatgggaagcgtagaccccaaagatccctggagggctagttcgtatttttgtgttaaactatttgttagaataaagtaattttgctaat

SEQ ID NO: 50531 - DNA, 490 bp, Homo sapiens
  misc_feature (1)...(490): n = a,t,c or g
tttttgaagggtgagaaaaatggaatttattgggcaaaagggaataaaaggggaagcagattctcagcatagtgagagtcctgctagtacaggcttcccacctcacaggctgaatcccaggtaccacccaggaagagaaggagccaggctcctccctcctgcaaatggcatgagcttccgagactccacactcctcccagtgtgcaggccagtcagaggttctccaggacccctttacacttggctgtctcattcccccctctcaagaagtacatcaaactactgttagaacaaggataggggtgaggacgaagaccgatctaaactgcttcctgctaacagggagcggtnttttgggaaacggcagtcagagctccctcagaagcctatctaagggttcccggcagaaggcgccatcttccgaggctccggttgcacgaccatttggagtttgatggcccaggttgggtcttgaacttgcactgaagtt

SEQ ID NO: 50532 - DNA, 746 bp, Homo sapiens
gacagctcaaaaataacctgaagggcccaatcctatgctttgttggccctcctggagttggtaaaacaagtgtgggaagatcagtggccaagactctaggtcgagagttccacaggattgcacttggaggagtatgtgatcagtctgacattcgaggacacaggcgcacctatgttgggcagcatgcctggtcgcatcatcaacggcttgaagactgtgggagtgaacaacccagtgttcctattagatgaggttgacaaactgggaaaaagtctacagggtgatccagcagcagctctgcttgaggtgttggatcctgaacaaaaccataacttcacagatcattatctaaatgtggcctttgacctttctcaagttctttttatagctactgccaacaccactgctaccattccagctgccttgttggacagaatggagatcattcaggttccaggttatacacaggaggagaagatagagattgcccataggcacttgatccccaagcagctggaacaacatgggctgactccacagcagattcagataccccaggtcaccactcttgacatcatcaccaggtataccagagaggcaggggttcgttctctggatagaaaacttggggccatttgccgagctgtggccgtgaaggtggcagaaggacagcataaggaagccaagttggaccgttctgatgtgactgagagagaaggttgcagagacacatcttagaagatgaa

SEQ ID NO: 50533 - DNA, 314 bp, Homo sapiens
aaatcaaaagtttatatttttccctagagttagaggattatgcagccgtaatgtgcaatcgtgtccagcggataaatagcattaaaaaatactcctcagatatgggacattgtagtgattgtcacaattcacaagtgttatcctgatattttcagactcaggtattctgagcctgcctatgaaatggagttaggaacaaatgacagagaagggggtatcaggaggggcaaggcagggtctgcccaccctcctatacttcgagcacactttcttctttccaatggagaaagagttaggttgcacattcattgttg

SEQ ID NO: 50534 - DNA, 831 bp, Homo sapiens
tgaaaaacttcacaatatcgagctgcaattcttttttctttttatacaaatacaagttaattagctctattaagttgcaattttatttttataaagctttgtaaagttatgaacatggaaaccctaagaatcacctaagctttttacataagtaaatttcaagttgacagtctgtccattttgaactatttataattaacaggacacttaacacagtaatatcttagacaaggaagagggcattaattctgcaggcaggtagcaatgaaaatgccaaacctgaacaatcagtcactatttccttatacagtttgagtaaaagaggtagactacagaaagaaaaaaaaaagtgaatataaaatgtatcttccccaaatacaactctacttcaataagtcttgaagattaccgatgacatcaacaaaaatgaatgaactcagggaatgagttctttctccccatcaaagaaaaaaacagcatgtgtaattttaaatttgaaaaaaaaaaagaatggcaatttgcaagcaaaagaaaaccagattcacattctactatttacatttgttctattcacaggtcaaaaataaaatatttcattagataatttaaaaaaaaaacacttttttaaaacaaatgtattttactccatcaatactgcaaggaagataactgaatttagaaatgctctctctctacagcaaagttaacttaacttttcggggcccaactgggcctatcatttagatctttaatagcagccatagcttcattatagtttatcatagcaacaatgggcttcccctgtaggtaagccttggctcattatactgt

SEQ ID NO: 50535 - DNA, 945 bp, Homo sapiens
ttttttgggttttgtgctttattaaatatggtacagttgatcctcattattcaaggttatgtatttgtgaatttaccaacttgctaaaatttataaccctcaaattgatatccgtggcacttttgcagtcatttgtggatatgtgtaaatgggtgaaaaatttgagtcacccagtacacatgttcccagctgaggctgaacaagatgatgctctgccttcctgcttcagtctcatagagaaatgactggagggtggaaatggcaggggcaattctgtgtagtacaagaagctctggctccggggccagctggatggggtttgaatttcagctctgacacctgttaggggggtgcctcaggatagtcacttaacacttctgatacctcactttcacttctgtaaaataaggtagaatttgctaggatgaattaagaattcaagctcataatgtgtgtgagataaacatatgtaatacacacatacacacaaatacactttcctccctaaaagcagttgttcccatatttaattcagtgtttatgggagaatattctgtagaacataattactgtgaataatgagaactgactgtatattagcttatttgatttttagatgttgaaccaaccttgaattcctgggataaattccacttggtcatgatatagaatcctttttataggttgctggattcagtttgctaatatttttgttaatgatttttgtgtttgtattaataaggaatattggcttatagttttcttgtgatgtctagtctagtatcagggtaatactgacctagagtaagttgggaagtgttctttcctctcctacttttagaaacagtgtgcaaaaaattagtgctaatttaatgtttggcagaattcaacaatgcagccatctaggcctgggattttctttgtgagagagacttttaaaattac

SEQ ID NO: 50536 - DNA, 667 bp, Homo sapiens
  misc_feature (1)...(667): n = a,t,c or g
ttcattataagagaatccccttgatttttatttctttttcttttgttttctggattacctgccttcagtaagcagatgcagacccacttgtaaggagtctggttagtgatgagaaaaggatgaaatctagatacaaaagtcaccttgaaggtgatgatggatctttaatccacttgactaagtgtctggaagagctacttgctcttccacccctcatctcaaatgagaggagcagaagtttaacttcctcaaatagcccagctctggctaaaacccaaagaagaaaggtcaaaggaagggaaagcatgtcaggggctggtttgtgacttggcaggaccaggaaacagcagccactgacagcccagagaaggtgactaagggctggcagaagattagaatgttaatttggctgctgtccggactaggaggccatgttcaatggcagtcagaatttgtgttctgcgcattgctgggtctataaatatgataagcaagtggtgacagaattatagtataaggtgatgtactacatgcagatcataaaggctttggttttaagacttaagtagaaaatccctctcctagcttattacccaacaatattcagataatgagcttttgggagaatatctttttcctatcactaggaaaagattttaccnggggg

SEQ ID NO: 50537 - DNA, 983 bp, Homo sapiens
caggagcctccctattaaggaccttgccgtagacagcgcctctcccgtctaccaggctgtgattaagagccagaacaagccagaggatgaggctgacgagtgggcacgccgttcctccaacctgcagtctcgctccttccgcatcctggcccagatgacggggacagaattcatgcaagaccctgatgaagaagctctgcgaaggtcaagggaaaggtttgaaacggaacgtaacagcccacgttttgccaaattgcgcaactggcaccatggcctttcagcccaaatccttaatgttaaaagctaaaaggctgcctggaatccccccaccccaacaggctggactccctccatccttacccccacacagatctggcatgtgagccccacggtgatgcttgacaatgtataactctgctgggggcacctctgatggccaaccgcagcatttctgtcctctgcccaccccagagctgatgctggggcccagccccctgcagctctgtacccaccaaacctccccagggcaaccctcgccaccccccaaatagcccgtagcccaatcccctgccctctgcacagggccttagctgtagaccagagagggcaggaggggtttgctggcataacaccccagaaccaagggaaatggatgggccgctgctcagtttcccaccatcctcagctcctggcctcatcccctcctagaatgagtcacccgtagatcagggtctggggaagaggctgatccctggcgctgcccggctccctcgctgccctctggagctcagggcagcccggaatagggctctttgaagaggaagtagaagccccagggtaatgaggcagagacccctcctggcagtggtgaggtgggggcatgcaccctcctttctgtaccgtgtgtgctggctccatagttctctcttctgtacatataagcatgcttgttctgaaataaagaagatttgaagtgaaccaca

SEQ ID NO: 50538 - DNA, 989 bp, Homo sapiens
gtcgccgccgtcgctgccgctgccgctgccgccgtcgttgttgttgtgctcggtgcgctgagctccgcggctccgcgagccggttccgtccccttcccgccgccgccatgaagtggatgttcaaggaggaccactcgctggaacacagatgcgtggagtccgcgaagattcgagcgaaatatcccgacagggttccggtgattgtggaaaaggtctcaggctctcagattgttgacattgacaaacggaagtacttggttccatctgatatcactgtggctcagttcatgtgggatcatcaggaaaaggatccagcttccttctgaaaaggcgatcttcctgtttgtgggataagacagttcccacagtccagcctaactatggggacagctttacggagaaggaaaaagatgaagatggattcttatatgtggcctacagcggagagaacacttttggcttctgagggccattgctgggctaggtgcaccgtaactgcttgtgtatcttgtaaatagccagccattttcagttattataccagaacctcttcacatagacctattagtgcatttgtaactggatttatttcttaatatattggaaggttttgtttccttagactagtaaattatcatacagagttttattttgagtttttctttttgtgcattgtcctcatgcctgtattctccaggaaacttgtcccttctggaaatcatattgaatgatatttctatatcgaagtgaggtaggtgcggtattaaagtgaaagggaaggtgatgcatttattctgggttatgcttgaagtgttagatggctaagtattaaaattatccaaattaaatccttagcagtcagaacacttgcttcactagaatatgccaactgccaatcatgttggactgagctaatttgttcctctttctgaaactattaaggtaaataattaacaataaaaattctcttataaaggcaaaaaaaaaaa

SEQ ID NO: 50539 - DNA, 6521 bp, Homo sapiens
tttaaataccttacccattcatatctctatcacgtggccgaatacagttatggccacccaggtaatggggcagtcttctggaggaggagggctgtttaccagcagtggcaacattggaatggccctgcctaacgacatgtatgacttgcatgacctttccaaagctgaactggccgcacctcagcttattatgctggcaaatgtggccttaactggggaagtaaatggcagctgctgtgattacctggtcggtgaagaaagacagatggcagaactgatgccggttggggataacaacttttcagatagtgaagaaggagaaggacttgaagagtctgctgatataaaaggtgaacctcatggactggaaaacatggaactgagaagtttggaactcagcgtcgtagaacctcagcctgtatttgaggcatcaggtgctccagatatttacagttcaaataaagatcttccccctgaaacacctggagcggaggacaaaggcaagagctcgaagaccaaaccctttcgctgtaagccatgccaatatgaagcagaatctgaagaacagtttgtgcatcacatcagagttcacagtgctaagaaattttttgtggaagagagtgcagagaagcaggcaaaagccagggaatctggctcttccactgcagaagagggagatttctccaagggccccattcgctgtgaccgctgcggctacaatactaatcgatatgatcactatacagcacacctgaaacaccacaccagagctggggataatgagcgagtctacaagtgtatcatttgcacatacacaacagtgagcgagtatcactggaggaaacatttaagaaaccattttccaaggaaagtatacacatgtggaaaatgcaactatttttcagacagaaaaaacaattatgttcagcatgttagaactcatacaggagaacgcccatataaatgtgaactttgtccttactcaagttctcagaagactcatctaactagacatatgcgtactcattcaggtgagaagccatttaaatgtgatcagtgcagttatgtggcctctaatcaacatgaagtaacccgccatgcaagacaggttcacaatgggcctaaacctcttaattgcccacactgtgattacaaaacagcagatagaagcaacttcaaaaaacatgtagagctacatgtgaacccacggcagttcaattgccctgtatgtgactatgcagcttccaagaagtgtaatctacagtatcacttcaaatctaagcatcctacttgtcctaataaaacaatggatgtctcaaaagtgaaactaaagaaaaccaaaaaacgagaggctgacttgcctgataatattaccaatgaaaaaacagaaatagaacaaacaaaaataaaaggggatgtggctggaaagaaaaatgaaaagtccgtcaaagcagagaaaagagatgtctcaaaagagaaaaagccttctaataatgtgtcagtgatccaggtgactaccagaactcgaaaatcagtaacagaggtgaaagagatggatgtgcatacaggaagcaattcagaaaaattcagtaaaactaagaaaagcaaaaggaagctggaagttgacagccattctttacatggtcctgtgaatgatgaggaatcttcaacaaaaaagaaaaagaaggtagaaagcaaatccaaaaataatagtcaggaagtgccaaagggtgacagcaaagtggaggagaataaaaagcaaaatacttgcatgaaaaaaagtacaaagaagaaaactctgaaaaataaatcaagtaagaaaagcagtaagcctcctcagaaggaacctgttgagaagggatctgctcagatggaccctcctcagatggggcctgctcccacagaggcggttcagaaggggcccgttcaggtggagctgccacctcccatggagcatgctcagatggagggtgcccagatacggcctgctcctgacgagcctgttcagatggaggtggttcaggaggggcctgctcagaaggagctgctgcctcccgtggagcctgctcagatggtgggtgcccaaattgtacttgctcacatggagctgcctcctcccatggagactgctcagacggaggttgcccaaatggggcctgctcccatggaacctgctcagatggaggttgcccaggtagaatctgctcccatgcaggtggtccagaaggagcctgttcagatggagctgtctcctcccatggaggtggtccagaaggagcctgttcagatagagctgtctcctcccatggaggtggtccagaaggaacctgttaagatagagctgtctcctcccatagaggtggtccagaaggagcctgttcagatgtagttgtctcctcccatgggggtggttcagaaggagcctgctcagagggagccacctcctcccagagagcctccccttcacatggagccaatttccaaaaagcctcctctccgaaaagataaaaaggaaaagtctaacatgcagagtgaaagggcacggaaggagcaagtccttattgaagttggcttagtgcctgttaaagatagctggcttctaaaggaaagtgtaagcacagaggatctctcaccaccatcaccaccactgccaaaggaaaatttaagagaagaggcatcaggagaccaaaaattactcaacacaggtgaaggaaataaagaagcccctcttcagaaagtaggagcagaagaggcagatgagagcctacctggtcttgctgctaatatcaacgaatctacccatatttcatcctctggacaaaacttgaatacgccagagggtgaaactttaaatggtaaacatcagactgacagtatagtttgtgaaatgaaaatggacactgatcagaacacaagagagaatctcactggtataaattcaacagttgaagaaccagtttcaccaatgcttcccccttcagcagtagaagaacgtgaagcagtgtccaaaactgcactggcatcacctcctgctacaatggcagcaaatgagtctcaggaaattgatgaagatgaaggcatccacagccatgaaggaagtgacctaagtgacaacatgtcagagggtagtgatgattctggattgcatggggctcggccagttccacaagaatctagcagaaaaaatgcaaaggaagccttggcagtcaaagcggctaagggagattttgtttgtatcttctgtgatcgttctttcagaaagggaaaagattacagcaaacacctcaatcgccatttggttaatgtgttactatcttgaagaagcagctcaagggcaggagtaatgaaactttgaacaaggtttcagttcttagtttgtaaggtatattacattttatattcatttatgatagcagacaaccttttaagattgctttaattagtatctgatgttgatttttaagtggcattcttttccttaggactttttatgtatacctgttgattgttgtgtaaattttagtaaatctaagagagtgtactaaaccagcaggtatctgttagcttatgtgtttaattgaaattagaaggctaagatggtataacagcattttattgctttgtccagctacaacttgtcatttttttctccatgtcttatcttcctgtttcactttagtttattcttcgttttttattgagatctataaaaaattggcttacttaatagcaaattacttgaagaatttgcctgctttatataaagttagcactttaagatttttttttagagatgagaagacatttaaattgaagaaaaattcccccagcaatagacagtctatcagtccaagtatttacttcctgagttttgatcaatattttttatttgtgtatgttaatcgtcataaaaacagtgattttggtgtgttttttattttggtgctttaatggcttaagatgttgcacattttttttttcttttggtttctgtttatgtttttttgcctatgcagttaaatttttcctagaaatagcatttgtgttgaacagtaacactttatacatatatatatgcatgtttattttttggcgtctttggagggatgcttttagacttgtttgcaaaagggcagttttctttttctttgctgcagttgtctattttgcagaataatagtgtgtgcaagtttgtgagcaaatgaaatatgcaggttcaatctattgattttgatttttacatcttatatctatgccagaatctgtatttcatataacttatttatttcgaatggatgtagtaaattcacagctatcagttttgattttgcaataaataaaccactaggttgcatgtcgaacaaatttttatctcaaataccaaccatcagttttttttttcatgtgttttggtacagctaattcctaattgtagagtgttaaatgtttgaggagaaccttttctcatagatggttggtgttcatatggctactttacaataaagagaactgtaagtgagatttggaaactacaaacctggaattaggagatataattattccttcaagtttatagaatatcacttgggagattggaaagccatagctattacgcggcaaacctaggataagaaaggtagtatgagtgctggtagaccagctgcaactttcctatacagtgaaaaaggctggtgaaacaaatgcagtccagattttttaaaatcatactttctcagggatctccacaaactggtgggtgtcctggctgtctgtgtgatagcctctttctataggtgaggcctcaaatgaattgcagctatcctggtgttcctatgagggcactttgtatgaaaaagggcatgtactccaaaacatttttgtaggttctttggccagttgccaaagagtgtgaaagaatccaatagaggatttttcttactgatagcagtcattcattgcagtaaaataaaatatgatcccattagggaatcttgaattctgacctcccatactccgttttgaaataaccactttatatttcattttttaaaaatctgatgatctctttgaggcaggtttcagatttggcagtacaacatgaaagattaggaaaagcattaataacgtgtgggtggaaagcttgttaaaaatctgagagtgaagtttgagttaaaagttgtttgaacatggcattgactgggaggccaaagatttaaagaagcggaagattcttctcttaagacatgaggagtaagttgtgtgataatggtatgtgttttgtgtgcatgaatggacattgtaaatgttgaattctaggctccgacaatcattgtcaacagaagatcaagctgcaaatatttatgttttaaaacttaaattataaagctagttaagtctttctaatgactagttttaatgttcatgggtacattttacctaagttaccgtttacattgtatagaaaaagatacatcttaagcacagattggttattaggaattagtttggggaagaggtttttttgtggattatttcatactgcaaagaaaaaccatttgccttttggggaattgagctaacttctaatctagtcttaagactagaatgctaaaaacaaaaacatgaaggaaaataaaaccccttattattaaattgatttgtaaaaacattgttactggaaatttattggacttgaggccttcctccagaaaataaggacttgattgtcaggcctatattaggttctgaaccttaatgccatgtatttgtacttactaaaaattgtttcaatgaaaagtacattagcagtatgaacttctggtccagttggaagtttttccatttgaaaaatgtgatgtttgcatggaactgtttgaaagactggtgatcgagttttaagataggaatccaaatcctttttgaactgaggtggcattactccagtgaaattggtgagaatccggggagcaatgttaatttcactcaacatgtccacctttagattaggagtgaatgggtcggggagcctcatgtttcttggaaaggcactcaggatcaaatttcttaactggatacaattaggtgggatcacatcacagaacccataatggtaatcacaaaggaactctgggaaatcatgcaaaagaaccagcagcactcttaaagtgcccttgtagaggatttgcataggtttggtgagttccacatttctaaggaaaggcgctaaatatttgaataaatcaatcagtagctgtgcatacataggccaccccttctgctgtggcgtatgtgccagcattcttgcaataaatatccgatgggaaatcagttcaagccaggcatatacaaagccaggagctttggtaggcctcaagatgtggaatgtattgcagaaagctgtaagtgtctggaaattaatggtttccaacacatgctcaggtgcattcacttccaagagaagcataataaaaattcgatggtagggaagttgctgaaaaaaaaaaaaaaaaaaaaaagaattc

SEQ ID NO: 50540 - DNA, 1157 bp, Homo sapiens
  misc_feature (1)...(1157): n = a,t,c or g
tttttttttaaagggaggttggttcctgcatttccactctttgaccataggaacgcctggctacaaaaggggctgtaattggctgctgcctataggggccccaggtccttcctccaattgcaaggcagcaactccgaagttctaagtcccatggaaagtggcagtggttgggctggactgtggctggaggatcaccgggcctcggttctcaagcaccatctgtctggctgcagctgggcccttcagctgggggccagtgttgctttccagctgcccccaccggggtcagatcatctctggcaaggaagagctgctgggcatctcttactgtccttctcgcagggccttcctccaccttgggtgcctcctgacgcctggccccggaagtcttcatctgaaaaggagagggaagctgcctcatcctcctaccctgcagggcctcgctncagcacggcccctagactgggcaagagagctgacccgactctctctgcccccttcatttgggacccatgcagatccccccaggtagacgatgcatgggtccagggagagaggcagcaggacactcaggtgctggccagggtccaccactgagctctgagaccttggacaagttctcccctcgtctttgggcctcaaatttcctcatctataaaatgggatggaaaagctggactatctagatgacctctgaggcccttccagtccttgtttctggatgcctcctgaccctcgaatgtggcatgaggatcagggttcagctgcgggcccaggagggtctgaggcagagtcttcctgcccacgtggcctttggaagggactgggtgaaagttgagaagcctctgggcccacagactgaagctgcccagtgcttggttctcaggccgagggtcccccatgggggcaggcctgtctgccacctcacacccaaaagaatattccccagaaacagtacctggcacttcatgctacaggtacacatctaggtggaagttaggctagggccccttttcaggggttgcagaaagggggaagcaatgtcgaccaagtcagggggatccatatctttgggtcacctgcccaccaaccctcagtgtgttcctccaggggacagggcgggtgctcccatgaaacacccaggaactccgctgggc

SEQ ID NO: 50541 - DNA, 961 bp, Homo sapiens
tttttttttttttttttttaaaactaaaattggttttaataaaagttttggagtcatctaaatgagtaactatacacattcctcctctccagcaagtatacagaaatcttcccttactccaatttgacgctgcaaaatcatacatgcaccccaaactgatctgttattgaaatttctttttctggtctcacccattactttaacatatcagaggaattaacataacagcctagagaacagaaataagagataataggtgcttcagtaccacccaaattatctactaagaccacagtgtgggcaacagaatgcagattcatggtagtagttccttgaatgaaagagttcagacagaatcttccacaaacacaaatttttgcggtatccaaatcttggcagagatggaatggaatgatatgagagccatatggaatcctattatgtaatatggttcgtgcagaagattccaataaagttaatggtgttgcagctttattactggaaggacttttggttgttcaaaagtatttccaaaaagatccaagtattcaagggataaatttctaaattcactaggcaaaaatggaagcttatttcgagctgctgacaaaaagcgaaggtttattagttgtcctatcttgcaaggaaattgaatcaattcattatcgtcaagttttaaattcttaagttcctggagctggcaaaactgcacagggagtgccttgattttgttcttgctgaggtccaaactccgaagtgacttctggagtgtagaatgacacaaggctacactaaatgactccaagtgattgtcattcaggttaagttcttgaaggtgtatgaggtctccaattgtagctggaagcttttttatatggttgtgactcaagtctaatttcctaaggctttttaagcaaagcatacgcatatcaactcggacaagcccacagtaagaagtctg

SEQ ID NO: 50542 - DNA, 1811 bp, Homo sapiens
tttttttttttttttttaaggaaaggaactttaatgagaaatcaaaacacagggaaccaaagtgcaaatcatccaccccccatgggggggccatcctgaaccccacatcatcccctcagcccccttcaggcccccagcgcaggcccagggcctgggagcttctgcctcaggtagctcttgagctggggcaggcctctctgggactccagttcctcgaagggtagcggcaggagctggtagcccatcaggcctaggtgccgctccctcagggccctcgagcccagcagcacccggccgtcccggcagaaatgccagcgttcccgcaacaccagcaccaccctctgggcagggtctcgagtagtggcgctagaggcagcctggccctgtgggcaggaccttggtgggtatggcaggaaggggtcctgggtcctcacgggaagcacagcaccagagctgctggcgcacagcaggaagtctgtgcagtagcctggaggcacagtcaggtcctggcggtatttctcctcccccagcagctggcgcaacccctcagctactatgtccttgtgactgtacttgcagcgggcacggtcggtgatgagaggctggggaaagatgggcacttgctgccttcggggaaggcggggacccccggtatcctgggagctccagctccacggccgtgtccagcagggagaggtagcgacgcacaatcagagcatgaggggtgccactgatgtagttgatgaagccaggggaaaaaacaaagtgcagggctctgaagggcaggcaccgcagttggcacagtgacatcaagatgttgactgtagccaggggtgccacccctgcttcccgagccaggatcctctcaaggcagggcataaactgctgttccaggggcaggtagttcagtcgcccaaagggcaggaccaacttctgtaccaccttgctgctgagttgcgtttcctgaaccaccaggaagtgggcaatggcttccagaagctggggctcccgcaaccggtgccgggcccaggtgctgggcccaggagcaccatcacgtggggagtcagttcctctggccttgcctctgcccaggctgctgatcagatgctgccgtggataccgcagaaaacgggggcagcttagagcagcttccaacccttgcccacctcggagaaggggctgcaaagggggaggtggcttcggcagggaaggcggagccttcgctcctgttccagggcacacaccaggggaccatcagatggaaagccaagtaagactgcaaggtgcagacacacgtggatggtgtgaatgtcaaaggaggggcagtttcggatgatgagctgactcaagtcctgcagtgtgcacctgctccacaggagggggccgtggccgagaccccaagagctggcccagacgacgaagcgccaccgagtagtggtgggcgcgcaccttgctggggttctggcccagccagcgcaggagctccccagggctcttcgcctgttccagaagccgctgcagtccttgcacaggacctgcactggggcctcctccaacaggccggtccccccatttgctgggccccaaacagcagggctgtactggagggatcagcagcaggccagacagccgagcaggggaggtctgagcagagagcaggactcgaagcatggagttgggtgatggagaccatgactccccgggccctgcgcaggtcgctccctcagtcggtctcggggcccgggggccgggttccccccgcggcctcctcatcggctagccaccgagtccgccatcttcccagcagcccc

SEQ ID NO: 50543 - DNA, 1238 bp, Homo sapiens
tctgtttggttaaaaaagtttaatgagctgtaaaataaatacacttccattaaatattaaataaattatttacaacttgaaaaaatactttttaccttcgtgcacctttatatacagaaatagcataaaaagtgacaattgaaagtttaaaaccatcataacaaaaagggtccattgtcttatgatccactggaaagaggaccgactcatcatttatggctatgacttggcagtgactccaatgtgatatcctgtaattttatcttcagttatgctatagcatgtacatttccattctcttgtcgaagtttctttcgttcctcagcttctccttcatatttcctgacgtattgtcttctaagctggactgtaataacagcaacagctgtgaggatcacagcagacataaaggcagctatggctgctaatgcaatttttgataaactactgtcaatcatgctgtgagttttcatggactttttcccacaccgttcaccgaaatattcttgctgacatttgcatgttactgcttccaggtgctctatatatttgcattctccgtgaatgcagaaattttgaaattctgcattacatggatttttcttctttctgtttcttctattttttccatttttgcctccctttttctttcttttgggtttatctgaagtattttcactttccgtcttgttttgggggggcttaactacctgttcaactctgactgaatcatcgacaatatagccaggtatttgtggttcgttatcatactcttctgagtagtcatagtcggctcccgaggacggttcactactagaaggcatttcactcacaggggaaatctcactccctgaagacatctcacttcttgaggtaacctcaaatccatcagcactgtggtccccagaaaatggttcacgcttcccagagtaggtgtcattgaggtccaatccagcagcataatggcctgagccgagtatcaagagcgacagcaccaccggcgccggcggtagcagcggggctctcattggtccttcgcagcggcggcgtctcggtctctggggcaactcggtctctgggacacgagctgccgccaaaacgagcgggtgttggaagagcgagtggagaccgggagtgtgcgccgctctcgaaggcttggggagctcggggcggcgggcgcggcgcctcgggctgtcccgggacctctggggcgctggcacccaggtgtgcgaacgtct

SEQ ID NO: 50544 - DNA, 524 bp, Homo sapiens
ttttttttttacacacatattatatacaacttttaaaatagctgcacaattttatatctcacttttagagaagtgcagtccaggcagaccatgcttctcaatatattaaaaatattaaataaaacccaaccagtttcatacttttctaatagtcaagctggctggaaaaaaaaggactggagaaagaacaggcagttgtaaaatgggatcagtcttcacaaacacactacttaaaaatcttgctatttccttatccctttgacagcatctctacaatctcacctttaaagctggaaataacacattgctaacttagagacaacatcgggtgcaacatgcatatgtcaactgcccactcaaccaactgcaaccctgaggatttttctggcccagtagaaagaggaaacacgaagataatctctgctgtagagctgcttctccagtttacgacttcatgtgttttcaggatgtttcttggacatgcatgtgtgacagtcacttcatggttctacttcccataagca

SEQ ID NO: 50545 - DNA, 2525 bp, Homo sapiens
gagatcctgccatgggcttcaggctcctctgctgtgtggccttttgtctcctgggagcaggtgagtcctgggcacaacttgaaagtctccgatcttcatttcttgtccctgaaatgcatgtgggccaacgatggcttcagcaggaggctttcttctgtgccttatggttaacttttgtctcctgggagcaggcccagtggattctggagtcacacaaaccccaaagcacctgatcacagcaactggacagcgagtgacgctgagatgctcccctaggtctggagacctctctgtgtcatggtaccaacagagcctggaccagggcctccagttcctcattcagtattataatggagaagagagagcaaaaggaaacattcttgaacgattctccgcacaacagttccctgacttgcactctgaactaaacctgagctctctggagctgggggactcagctttgtatttctgtgccagcagcccccggacaggcctgaacactgaagctttctttggacaaggcaccagactcacagttgtagaggacctgaacaaggtgttcccacccgaggtcgctgtgtttgagccatcagaagcagagatctcccacacccaaaaggccacactggtgtgcctggccacagggtatcttccccgaccacgtggagctgagctggtgggtgaatgggaaggaggtgcacagtggggtcagcacggacccgcagcccctcaaggagcagcccgccctcaatgactccagatactgcctgagcagccgcctgagggtctcggccaccttctggcagaacccccgcaaccacttccgctgtcaagtccagttctacgggctctcggagaatgacgagtggacccaggatagggccaaacccgtcacccagatcgtcagcgccgaggcctggggtagagcaggtgagtggggcctggggagatgcctggaggagattaggtgagaccagctaccagggaaaatggaaagatccaggtagcagacaagactagatccaaaaagaaaggaaccagcgcacaccatgaaggagaattgggcacctgtggttcattcttctcccagattctcagcccaacagagccaagcagctgggtcccctttctatgtggcctgtgtaactctcatctgggtggtgccccccagccccctcagtgctgccacatgccatggattgcaaggacaatgtggctgacatctgcatggcagaagaaaggaggtgctgggctgtcagaggaagctggtctgggcctgggagtctgtgccaactgcaaatctgactttacttttaattgcctatgaaaataaggtctctcatttattttcctctccctgctttctttcagactgtggctttacctcgggtaagtaagcccttccttttcctctccctctctcatggttcttgacctagaaccaaggcatgaagaactcacagacactggagggtggagggtgggagagaccagagctacctgtgcacaggtacccacctgtccttcctccgtgccaacagtgtcctaccagcaaggggtcctgtctgccaccatcctctatgagatcctgctagggaaggccaccctgtatgctgtgctggtcagcgcccttgtgttgatggccatggtaagcaggagggcaggatggggccagcaggctggaggtgacacactgacaccaagcacccagaagtatagagtccctgccaggattggagctgggcagtagggagggaagagatttcattcaggtgcctcagaagataacttgcacctctgtaggatcacagtggaagggtcatgctgggaaggagaagctggagtcaccagaaaacccaatggatgttgtgatgagccttactatttgtgtggtcaatgggccctactactttctctcaatcctcacaactcctggctcttaataacccccaaaactttctcttctgcaggtcaagagaaaggatttctgaaggcagccctggaagtggagttaggagcttctaacccgtcatggtttcaatacacattcttcttttgccagcgcttctgaagagctgctctcacctctctgcatcccaatagatatccccctatgtgcatgcacacctgcacactcacggctgaaatctccctaacccagggggaccttagcatgcctaagtgactaaaccaataaaaatgttctggtctggcctgactctgacttgtgaatgtctggatagctccttggctgtctctgaactccctgtgactctccccattcagtcaggatagaaacaagaggtattcaaggaaaatgcagactcttcacgtaagagggatgaggggcccaccttgagatcaatagcagaggttaattcagcgtgaaaggcagtgatggagctgaagaggttacttctagaacagtctaggaagacacagatgttgagtataggaattttctatatccaactatactgttctgcccaggaaagacgtgctcagaggaaggccaacctatacag

SEQ ID NO: 50546 - DNA, 123 bp, Homo sapiens
actcagtaatccataatagcattggattttgagaagggtgccatcaacaaactgagatagtggggacatttataaaaaatataaatcaaatggtatctgattgattggaaagccatgtcgacg

SEQ ID NO: 50547 - DNA, 424 bp, Homo sapiens
gcaaactctaaaaaaagattacaggttggtagaatacttgcaagctatgaggaattttttcttaatggaaggaggagataccatgtatgacttctacacgtcaatttttgataaaataagagaaaaggaaacatggcagaatgtgtcttttcttaatgtccaactccaagaagcagtaggacagcgttatcctgaagatagttcacgtctatctatatcttttgaaaatgttgacacagctaagaagaagctgcctgttcatatcttagatggtctgaccctcagctacaaggtcccatggcccgtggacattgttataagtttggaatgtcaaaaaatttataatcaagtgtttcttctcttattgcaaataaagtgggcaaaatataagtctggatgttttactttttggtgactgggtaga

SEQ ID NO: 50548 - DNA, 325 bp, Homo sapiens
gctgcgtcggggtcggttctgcagcgctgtatcgtgtcgccggcagggaggcatagcgcctctctgatcttcctgcatggctcaggtgattctggacaaggattaagaatgtggatcaagcaggttttaaatcaagatttaacattccaacacataaaaattatttatccaacagctcctcccagatttaaaataaccaatgactgcccagaacaccttgaatcaattgatgtcatgtgtcaagtgcttactgatttgattgatgaagaagtaaaaagtggcatcaagaagaacaggatattaataggaggattctctatgggag

SEQ ID NO: 50549 - DNA, 1674 bp, Homo sapiens
tttttttttaaagatttttatagaatagatgctttatgtaaaatattaaacataaaaggacaaactgacaatttatttctgagtctgtgactgagatgtaaatgagggagcccattctataaattaaattggtgtgtggtattatccatagaagcattgccatatcccagatgctagggaacagaaaaggtgggtgtgccaacaaacacaatctaccctccagaaaacgccatcctgacctttttattgtcgaaattaaaaaataaaagatacttaaatacaacggtgaacatatagggcaaaacagaatcataaaatttaatgttgagttaagcagtgagctgaatgtctaggtctccaaattggctttgaacccaaaaccacttaaaaacaagtatgttcacagttaacggcaattggcttataggtgagagaatggtcgaagttgttccagttgaacttccagggaaattctctcctcaagaacatcctttaattgttgctgcaattcgctattcaatctggccaaaacggtgttggtttccttattacgtctaattgatgcctgaatagctttcttatctttcccaacagatctgggaatagaaggttgtgatgcaagaacagcagctaagacacccgtcttttgtgtatgttcatcaatttctggccttaattcatcttctgattttaatcttcttcgaacaggtttaggtggtggagcaagtggtgttgtgcctttgctcacattggcaggagcactagcagctgtcttttcttcagttttactatctgttttggcaactcgaagagaacttgcaggatcagaagctttttcagccggcaggacttctggatgtttctcggcttcatcatcttgttcgtcgtttacatttgatgcagcaaatacttcaaactgactgaaatctgcaaaatttggttgctctggtatctgctgaggtgaggtactagtgtgagttatgagccatcggcatccactgggcgatgcacagcaggacccaggagcctgtgagggctgtggtcttggaggcactgcaggaggatgggcaacaactccagcctgttgttgtcctgtggtgactgtaaaggtccgattcatatctaaagatgatgatctagaatgagagggctgtggcccttggagggggaggtggtggtgcagtgttatcaggcgacgttcctgaatgagacctttgacgagttacattgctcccgatctgttctgggtcagaagtaaaagagtctgaactactgtaaccatctgctacagtattaccagaagcgaatttcaccgatgaatttatcttattttcttctaaaaggtcagatggtttcacaagtaatgggctagtgggatttgtatgatcgctgccagttcttttaagttccatttcctgcatgtggattttgcttggagtcatacgaatgggaactggatgaacaatagcagtatcaggatcagctggtgcaatgttagaatcaaattgggtcagagtttgtgagcttgaagagcgttcactaaatgtctcccactgctcactgctctgattcagctcaggccatgtctggtttagtgatggcatcgatggtgacttgcttggaggagcttcagcaggagagcctgaataacctacctcacctggctgatcccca

SEQ ID NO: 50550 - DNA, 189 bp, Homo sapiens
ggtggcctttctcagtttttgaatagaaacatctatttcaaattcatttttaagtatattttgtgaatataggattacaggttgacacttttttctttgaggaccttcagaatggcactccattatcttctcacttccatcatttctgttgacaagtgattttcagtgctattgtttctcctttgagag

SEQ ID NO: 50551 - DNA, 804 bp, Homo sapiens
tttggtcctcatgtgtagctggctgatgaactacacacacacacacacatatatatatatatatacacacgcacacatatatgtgtgcatgtgtatgtgcataatttttaaagagtctcattcttctttttgtacagcggttccaggtgtggaacggggtccatttgacctagaagctttggcagagggagcagacacagtattcactatgttgatttcatcatcaagcaactggcaatcggttttacatgctaaatcacccatttctactttctgctttcactttttttgttcctttttgcagtcacacttttcactgacttggtatgaccttgactgagaagctcattttactactgatgaacaatgctgatgattctgatgttttttaaaagttagtattttgatttaagaataaattaacaaagggtagtttcatactatttttgcatattgtgtcaaagttttggtgcaatataattttcacctgaaatgttattagataaatttgggttcaatcacttaagtgaaaattagtcacaggcttgttatagggaacactgtgttaaacaaaaaaagcaagttcaatttttcaattcatctggcaactttaacagagatcctcagaaagaagttctggatattcaaatgcttactatagagaggatataaatagttggactctctaaaaagattattacaggcattatttctgaagatggacacctttacctttggcttctagtgaggaagtaaacatcaaagtgagaagaagtttgaggcatttcctatctgcctcttccc

SEQ ID NO: 50552 - DNA, 72 bp, Homo sapiens
acaggtgttggtatgaactcaggaatagaaacacggaggccttttttaaatacggagggagaagaatccatg

SEQ ID NO: 50553 - DNA, 1316 bp, Homo sapiens
ctgagcaaccctagtgacaggagccgaagcagcagcgcaggttgtccccgtttcccctcccccttcccttctccggttgccttcccgggccccttacactccacagtcccggtcccgccatgtcccagaaacaagaagaagagaaccctgcggaggagaccggcgaggagaagcaggacacgcaggagaaagaaggtattctgcctgagagagctgaagaggcaaagctaaaggccaaatacccaagcctaggacaaaagcctggaggctccgacttcctcatgaagagactccagaaagggcaaaagtactttgactcaggagactacaacatggccaaagccaagatgaagaataagcagctgccaagtgcaggaccagacaagaacctggtgactggtgatcacatccccaccccacaggatctgccccagagaaagtcctcgctcgtcaccagcaagcttgcggggtaacctgagcccccctctcctccccttcctcaaccactggacgtttatatattataggcagggatgaaatgggcacctagtcagatcttctcagcttgctagccagaaatgactgtgattctgctgggggctgctgagaaggtaatgtaggttgaaaaggggctctaagtttatttatttcgttagattgacacttccacacactccctgtagtccaggtagggcccagaaataggaaaggctaggattggataatgctgcaaatgctttttttgtgtgagaaactggagagatgtgatttctccttttgggagagaatgtcccaaaattgattcagctgagccttgggaatagtttggcaggtttaacatcccaagggttaacctaacgtagttgggaaaggtagattgaatgagacatgttttctgtgcttctaagtgttctgtcccttaggctgctattgcttcatgtttccattatggcaggtttagagaatccttaaaaagaaaaattgacttgcttgcctaaaactacagtgcccccttagcctccattacttagtatctcttacagtttgctctggctctcaaataatataaagattgatgaacattattcacagaaaatgggcaccttctctctctcttccaggcatgttgcttttgaaagtatcatggggatagtggggacgaggcactggtttagggagtcaaggatatctggggttctcactctactcagtcccaggcagagctgttgtataaccttgattaagtcatttagcctctctggatttctatttcctcatctgtaaaatagagttaaatgtatgtaagattgaaaaaa

SEQ ID NO: 50554 - DNA, 404 bp, Homo sapiens
tctgtcccgctgcgtgttttcctcttgatcgggaactcctgcttctccttgcctcgaaatggaccccaactgctcctgctcgcctgttggctcctgtgcctgtgccggctcctgcaaatgcaaagagtgcaaatgcacctcctgcaagaagagctgctgctcctgctgccctgtgggctgtgccaagtgtgcccagggctgcatctgcaaagggacgtcagacaagtgcagctgctgtgcctgatgccaggacagctgtgctctcagatgtaaatagagcaacctatataaacctggattttttttttttttttttttgtacaaccctgacccgtttgctacatctttttttctatgaaatatgtgaatggcaataaattcatctagactaaaaaaaaaaaaaa

SEQ ID NO: 50555 - DNA, 322 bp, Homo sapiens
aaatcttctgaaagcttcctaatcaacatttttctgttaaaatgtactgcatatgcacatttatatattgggagcattttaaaggtttactttgctatgaaagaaatatttaatgtgtttcaaaataatttttgagattattctagttgtggttaagcttaaaggctgagaaattacttaactattcaaatagagcctgtgcaactatatgaaatgtcattatggagacactcattatgcttttcctgtagaacaaaacaagtatgttgggtttatctgcaattagggttttttgaggaacgtgagggtggctggacaaagt

SEQ ID NO: 50556 - DNA, 152 bp, Homo sapiens
atttacaatagccacacataaaattaattcctaggtatttaaccaaagaagttaaatatctctgtaatgaaaactataaaacactgatgaatgaaattgatgagatcaccaaaaatgaaaaaatattccatgttcatggattggaagaatca

SEQ ID NO: 50557 - DNA, 1903 bp, Homo sapiens
gcaagatcaatctcgccaaattcacgcttggcaagtgctccactctcattgtgactgacctggccgcccgaggcgtggacatcccgctgctggacaatgtcatcaactacagcttccccgccaagggcaaactcttcctgcaccgcgtgggccgtgtggctcgggctggccgaagtggcacagcctactccttggtggcccctgatgaaatcccctacctgctggatctgcacctgttcctggggccgctccctcaccctcgcccgacccctcaaggagccctcagggtgtgggccggtgtggatgggcatgctggggtcggggtgccacagagtgtggtggacgaggaggacagtggtctgcagagcaccctggaggcatcgctggagctacggggcctggccgacgttgctgataacgcccagcagcagtatgtgcgctcacgcccggcgccctcgcctgagtccatcaagagggccaaggagatggaccttgtggggctgggcctgcaccccctcttcagctcgcgttttgaggaggaggagctgcagcggctgaggctggtggacagcataaagaactaccgctcccgggcgactatctttgagatcaacgcctccagccgagacctgtgcagccaggtgatgcgcgccaagcggcagaaggaccgcaaggccatcgcccgcttccagcagggacagcaggggcggcaggagcagcaggagggcccagtgggcccagccccgagccgcccagcactgcaggagaagcagcctgagaaggaggaggaggaggaggcgggagagagtgtggaggacattttctcagaggtcgtgggccggaagcggcagcggtcaggacccaacaggggagccaagaggcggagggaggaggcccggcagcgggaccaggaattctacatcccctaccggcccaaggactttgacagcgagcggggcctgagcatcagcggggaagggggagcctttgagcagcaggcagctggcgctgtcctggacttgatgggggatgaagcccagaacctgacgaggggccggcagcagctcaagtgggaccgtaagaagaagcggtttgtgggacagtcaggacaggaagacaagaagaagattaagacagagagcggccgctacatcagcagctcctacaagcgagacctctatcagaagtggaaacagaaacagaaaattgatgatcgtgactcggacgaagaaggggcatctgaccggcgaggcccagagcgaagaggtgggaagcgagaccgtggccaaggtgcatcccggccccacgccccaggcacccctgcaggccgagtccgcccggaactcaagaccaagcagcagatcctgaagcagcggcgccgggcccagaagctgcacttcctgcagcgtggtggcctcaagcagctctctgcccgcaaccgccgccgcgtccaggagctgcagcagggcgccttcggccggggtgcccgctccaagaagggcaagatgcggaagaggatgtgaggaccaggacccagccccgtggctccttgattggccttagggtgggcatcagcagacgttcccgtgcaccactgtgtgcctggccctgtgctgggcactgggggcactccctgcaggagccatcatctgtgaaaaggagcactgtatggccacagaagggcagcagctgcgtcagccctaagacagagacatttgaacagggccttgaagggtgtgcaggagttcgccagcaaagccaggcaggccaagacttgagttggcaactcagctgctgctgcttccatgtgttctgggttcagaggtcatggctgcaccggtcagagccctgagtgcctcagggtttggcaatggaatttttaatgtaataaatctttattgag

SEQ ID NO: 50558 - DNA, 1315 bp, Homo sapiens
agttgttatacagtattttttatttgtaccattttttgttgtattttttttttcctgaatactttttatcgcagttggttgaatccgtggatgagggctgactataagcctctgtaagtgttagctattgttaattattgtcttcctctctctaaggggttccccagccctggatctggcctgctccgccttgcgaaggccccacagcttgcttacctcagcaactcacagcggaagtgtgacaaacgttcataggcaaatgtcaggtcagatgtcaacttgttgctccacagcctttcggcaacagcccctgctctgggcctggaggaaaaggggcatgtgccagattgggccctgtattccctgcaaaggtgctggacatccacaggctgctacctcttgtctaggcaccctggactcactcaggccaaaggaagtgatcaataccttgttatgagccacagccaggttggatggctcccagagagttctacggctcagctccaccttcattaaaatgtgggtagcaatcccactctcttcctctctcaaagatacgggaataagaataaaccttaaagccatcattaaccacaatgacagtggcagcagcagaggtccttaaaatgtaaactttgcacacccaaccatacttggtaaggctgcagtgaaaaacagcagagggaaacccttaattaacaggaatccagggatgcttgtgctgggtcttgagcaactcacctatgttctcccaggcctcattatctctctgggaagtaaggttaacaatccctatcccacataccaaagggcagctggagggatatagacggaagtcatgtggagagtgaatattgcacacaaatcttcagaaggctcgttgcacggcctgctctctctcaggcctgaaagaagggtactagtccagaggtggctagatgggattgggtctctaagggagaactcctgctctcaggcccaaccctccacctcccccccgaaaacccttaccagagcctggggaccaggtttgtgttgtccacatattctccccacatacaagcctctccaccaatcaccagagccttctgctcaggggtaccttcaaatgccaggggttccactacgtagaaatccttccagtcagggccataggatatacggttcaggtaccagggggcagagagaagggcccggaagccggccttggtgaccagttccagtgcttcatatagttcaacgacatattctctcgcacaactgtatgattgtgtcctgctgaatcttactctataccaacacgtctgtcaaccac

SEQ ID NO: 50559 - DNA, 690 bp, Homo sapiens
tggtaaacattttataatttatatataaaatctcagtaagaaaccatgtaaaatgacagaaatatccaccttacattaagagtcaaaataaaaaaaaaaacccatacacactgaatgtaaattttaattataaaacaagaatatgaacaaaacattttaaaataatctcaattatttggcaactcatcacatcattgcaagagacaaatttgatcgtaagaagtttaatcttatgaaaaactgaagttggacagtttgctcatatgagagttaaaacatgtttaaaaaaacacttggcaataaagccagtttctatactgaaataactgtgtataaaacaacataaaatcctgaaactggatagacaggagggacctaatcttgaatgcatttctcttcactgaaaaagacaatatggaaagagtattggtagaagcttcagaacagcacagaagaggaatgaacacagagaagaggaatgaagagggatttctgctgcaggtgactgacgcaactttaccctgaaccagaacctgttttgtgtcaacgtggctggtagtaaagtcacagatgcaagtataatctaaaaacaagttacattcttaaaaaacagagccacaactgtgaacagaaaagcaatgaagaacctttctttagctaaactactttacttggatacatgcgagtttc

SEQ ID NO: 50560 - DNA, 1929 bp, Homo sapiens
atgagattcccttgatcagccctgcagctgtagtacagtgctgtgccctcacctccacccttcctgttgttcccacgtgggcaataccagggacccatggggaaactcaagaatgacagcttctatattttgtaattctggatgaaagataactgtgttgaacaaacaggtgctccaggctttgattatagatacgacttcaaaaatatgctaagacgcttgacttattaaggactttaacctactcaacagtatttcatatccattgtggttagttactcagttatgttgagaagaatctggagctaaaagcagagatgtttgaaggtgacggtaggaatgtgagcaggatggtgatgggggtttttgttaaaatgcatctgagcaagtcagccagccccgaagtcccctcagtgtgtgtgtctcgagtggctacctgttgggcttgtgggcagtgattgtacagagcctgtccattgggtgcagtcatgtagatctgaagccctgaaaagcctcatgtctgcatcccctttccaaggctgcttccctggtgtgtctgttctctcctctgtcccaggtgctgggagcgtcctcttcagcgtcttttcctagagctggtcaccactaggctgtcactataaattccttgaatataagtaacagttattaatgaacttctaaatttctaatttctctctctctctctcttttttttttttttgttgttgttaaaaagggcctactacattggcgctattcttaggacttctgcaacttttaaagtcttacttgtctttcttgttgcttttgtattaggagttccccgtgtgggtctagaactcccctttggtaatgcttctttgtttttttatggcccttctgttctcaggatggagagaacacagaagctactatccatgtcaggatttattctatttatatcttattacaataaaattagtggcactttattcataaatattcatgagcctgttaattgttagttgtcttcctgtagctgaatcaacaagttattttcaactcaattttatgacttgcgaaaaagcttttgccctgttgtgtaccataacatttaaaagaatggaaaatgactgaaatccaatttagattatttttagagtatttttccagcaaattcaatttattctgaaatttaaatccagatcttttctaatatggtattacaatgaaaagaataaagagaagatttgaattttcagtttcattttcaaaaactatttaccaaaacaaatggagaagaaacatccaaaagcacatttcatttctccaaactttgtgttttaaattatagttataaattgtaaggtaattttaaattgtccctcgtattatttctccacgtctgttttagtttaatgtctcctaagcttttctctcatagcgtagacctagggaagggatgggaagattgcccagtccccgatgggctgcgcacacaggaggcggcggagcacaaggcaagtgagtttgcactgtcagccccagaccgtaagcttggctacactgatgtttttctttactaaggatactattcaaaaattaacattttcatctcagtaagtttttagaacatcaaaatgttttctgagctccaagtggctaggttgtaaaagttttataataatttgcaattaaaatacatgatacatattaatccattaaagactagtgggaatgtatcagccagagtagcaagtaatttttgttttataaatcatagtatctgtcatcttgcagtattaccaatgctgttgtaaattgaatttaaagtggtattaaaaaaaactgttaaacaatttttatctgtttgtatatcttactatagattatgtacaagtaacatctaaataaaattacacttttaaccctaagaggttttgcttatta

SEQ ID NO: 50561 - DNA, 411 bp, Homo sapiens
gaaatgaattattagtgagtgtgtgtagtttgaaggataaatctctaatattctagagtacaactagtttgtcttctattctagaaatgaaactatcttccccttcttataattcaaaatattagttcagtaatacagtacttttcactgaaaatatgacatgagttctataagttttcctgttgtatatttgtacagcaggtccttgaataacatccttttgttcaatgttattttattataacattgataaggaaaaaaataggattcctgggccagagccactgtctgtgtggggatttggcatgttctcctcatgtctgcctggggttctctggggtacttcggttttcctcccgcatcccaaaggtgggcatgttagggttaattgggtatgtctgcatggatccc

SEQ ID NO: 50562 - DNA, 1259 bp, Homo sapiens
ttttttgcgtttaacatttttatttttaactccgctttggtagtacaaaagtcataaaagtacaaaccagacagttaaaaatacacttgacactcgaaatggtgaaaattttccttacaaatttttacatcaaggtagtagccaactcattgatgacaccaaaaagttgtccatcattagtgttttctagagaaagtctgttgtggattccctcatccttagaaaggaggaggagaaacacaagacctgtaaacatcagttgctttgggaacacaggaattctcatcagatagttcagtataaaccagtaaaaagcgtatgtgttgaaaatactgaacgcttaattttggcaaatttggaagcctgccagacaaaaaccgctcaagtatttattagaaaatatttaaaacatactcttggtatcaatacagttttaaatatttttgagtattctcttgcctgttgtattgctatttaaaaaaaagtgctctgacttgaataagatggaaaaataattaaagctaaagaatatcttacattttatcccccaccattttgagggcatatttttaaagcaaaaaagtatgcttatttgtttttaattaaaatgattagcctagactgcacatatattatttacactaatacatacccctaaaagtcctatattgctactttctggatctcagtgaaatttatttccatactgactttctccagtccacagtgtatatgaatatgtacacatacagtgtttattagttgtcagtaaaaattctcatgaaactaaattccccatttatttaaaaggttagaaatgtttagtttgatgctggaaataaaatcattgaagtctatgtacagtaaatactttgaagtatatttttatggaaatcatcttttgggagacaaatgaaagatgtgcattttcctatatgaaataaaagaagtgctcaaggcaccccccaacactgacatggaggcgggtcttggagaccttgtaactggcctcccccacagctcaccccagagctaccataaatcatgtaatactatttatgcctctgggtcctttcaggtgttttgtaaaatgtacagttataaaaaaaaaaaagaaaaagaaaagtttgccaggcctaaagggaaaagtaactggagtgttttaaataatgagcattagttacaggatgaaaaacaggaaatacacaaagaaaaacatgccagaggtaggtgcaggcccatcttatatgagaagcagg

SEQ ID NO: 50563 - DNA, 1300 bp, Homo sapiens
  misc_feature (1)...(1300): n = a,t,c or g
ggttgtcatttattgttttcaacactatcttcatgacctgtttgtgttcagagtggctcacagataaggaaacatttttgcccagtcttaagttcatggaagataataggaagagtaattaactgcagcaaaaggttaggacaaaacatggcattatcagggcttgaaaggactttattgtggctgtggtgaagcaggccctggtcttggcagatgataccagaagggcactgagtgccagcgtgcaacttgaatttgatcccataaagtcaggcatcaggaagccattcagaatttttcaccctgtcagatgctcagatttgctagagaactctggtagtggcaagaaccagagctgttactcagaattgggacagaggcattgtcccaaaaaaaaaaaagcccaaatcagagcagtggcaatgtaagtgcagggaggacatgatgtgggattatttagaaaacagggccaaatgacatgcaactactctgcggatacagacgaagcaggaatcaggggacccaataagtctcaggtgctttcaagtaagagcatgtaggtggaaaggggcaggactctgggttccattctaagtaactgagactgaagcaacagtggaacctccagatacagataacccctgacagactgaaatacgatctggcgacagcaaggaggtggcagcttgagagaggtctacaacccacctaatggtttagagcccacctgactaccaggcctgtgtgtggacgggaaagtcctgaggattggactctggaaaaccatcacacttaagagacagaggaaaaagagcagtcacggaggtaggtcacgaaatgggtcaacaggacccccgaagagttcaagatactggaaagcactggccatgagtgccagatctccagcacacacatcatgaatttgcttctccccagaggaaaagaagctccttcagggtggtgcctggctcagggtagctggtcaacaactagcttttaaaaaaacnnnnnnnnnnnnnnnnnnnnnnnnnnnnnnnnnnnnnnnnnnnnnnnnnnnnnnnnnnnnnnnnnnnnnnnnnnnnnnnnnnnnnnnnnnnnnnnnnnnnnnnnggcaccaccccgaagagttcaagatactggaaagcactggccatgagtgccagatctccagcacacacatcatgaatttgcttctccccagaggaaaagaagctccttcagggtggtgcctggctcagggtagctggtcaacaactagcttttaaaaaaacagagacacggtctcactatgtagcccagg

SEQ ID NO: 50564 - DNA, 1594 bp, Homo sapiens
  misc_feature (1)...(1594): n = a,t,c or g
acctatttagtaatgttttcccaagtttattttttatttttaattttttccccaagtttatttttctatttttttttcatggaaaaatggggtaacttagcagtttcaatattgaagactgaagtttaaaaaacatttaaattcaaggtacttttaaaattcagttagaaaagtaggctttaaaaattattagagacaagagtaccaaagcggtgtgtgtatgtgtgtgtgtgtatgcatgcttgtggattggaaaaactttggagactgattacttttcattatatatgtgtcacagtgaaacagcttttatgtgtcatgtaagattactgcttgcctctctaaggaaggtcgtgactgtttaaatagacgggcaaggtggaacccttttgaaagatgagcttttgaatataagttgtctgctagatcatggtttgtattgaactaacaaggtttgcagatctgctgacttatataaagctttttgattcctactaagctttaagatttaaaaaatgttcaatgttgaaatttctgtggggctctatttttgctttggctttctggtgagagagtgaggaagcattctttccttcactaagtttgtctttcttgtcttctggatagattgattttaaaagactaagggaatttacaaactaaagattttagtcatctggtggaaaaggagactttaagattgtttagnnnnnnnnnnnnnnnnnnnnnnnnnnnnnnnnnnnnnnnnnnnnnnnaggcaggcagaacacttgaaggagttcaagaccagcgtggccaacgtgggtgaaaccctgtctgctactaaaaatacaaaaattgtttagctctgtttttcataatagaaatagaaaaggtaaaattgcttttcttctgaaaagaacaagtattgttcatccaagaagggtttttgtgactgaatcagcagtgcctgccctagtcatagctgtgcttcaaaaacctcagcatgattagtgttggagcaaaacaaggaagcaaagcaaatacagtttttgaaattctatctgttgcttgaactattttgtaataattaaactttgatgttgagaaatcacaactttattgtacacttcattgcaacttgaaattcatggtcttaaagtgagatttgaatttctattgagcgcctttaaaaaagtaataccaaaccataaagttaaaatctatgtatattgagtcatatctaaaaccacgtataaacataaattgtatttcctgttttaattccaggggaagtactgtttgggaaagctattattaggtaaatgttttacaaattactgtttctcactttcagtcataccctaatgatcccagcaagataatgtcctgtcttctaagatgtgcatcaagcctggtacatactgaaaaccctataaggtcctggataatttttgtttgattattcattgaagaaacatttattttccaattgtgtgaagtttttgactgttaataaaagaatctgtcaaccatcaaagaggtctgcattatgcttgcatgtcaaaaacattaaaaatcctataatcttcaaaaaaaaaaaaaaaaaaaaaaa

SEQ ID NO: 50565 - DNA, 359 bp, Homo sapiens
tttctccaccacagccaaggcctggagactgggggcccagcagagcctgctcccaccctcctcccagcagcagacacccaccctctcactgactaacaggtccctgcacacagctggcctggtaaacccagctgggaggtttctaggcagcagcaaaactctgtgacagggtgtcctcacaccaggccttggacagctctcccagacaggagccagggttgagcaatggagagcccagcccccacgtcttacagtcgccatcctccaggcgtgtggtccctccccattgggtgcacagtgcagaggggccgtggccccatgtgatggtgcgcagagaggaacctcttgggattcagcac

SEQ ID NO: 50566 - DNA, 465 bp, Homo sapiens
cccagacagaagagaccacggtaaagatcagctgacggcctctgtgggaacaaagacagggaaaggggaaatgagttcaccagaaaccaacaggcagcacaggaggtggtaaacccgaaaaagaaaatgaagaaaaagaaatacgtgaattctggcacagtcaccctgctttcctttgctgtggagtcagagtgcaccttccttgactacatcaaaggagggacccagatcaacttcactgtggccattgatttcactgcctccaatgggaacccctcacagtccacatccctgcactacatgagcccctaccagctgaacgcctacgcgctggcgctgactgccgtcggagagatcatccagcactacgacagtgacaagatgttccctgccctgggcttcggggccaagctgcccccggatggcagagtgtcccacgagttcccactgaatggcaaccaggaa

SEQ ID NO: 50567 - DNA, 1585 bp, Homo sapiens
tttttttttttttttgccaatcaaagcacacaactttattgatgatacacacagatgcggacttgggtggaagaggttaagtcggtacaatagacagaagagcagtgcacttttttgatgaataggttcactatccatcaggcgcgtgtagaagaaagagcaaacgaaaaataattcaacctaagctgcaacaaatgcattttcagctcaagccgcgatatgcctctggtctctgcaaagcggtcccgcttggacagggagaccaccacaggcaacaatagcactcgtgatgctgtaatttgatgttctttgtccacagcaggcagctgaagtgatcccctcaccacatgaaggaggctgcaagggaggaatttacaatgccaacattgcctgcagactgcacaaccaagaagttactcaaaagctctgtgggagcccctgcctggccaataagagtgtggtcctggattgagccctggaactttcacccaatgaggtggtgattggctaaggctggatcttcagtagcaccctctgcagattctttgacatctgcaaaccaagcgcgttgtgggtggaatccgtccccattgtgttccgaagagggccgtttaaggggcaaggggtttcccaggagaatctcctcctgttttcccatttctgataaagagggacatgaatgagaagagcatctgggcaccgactaactcccccgccaagactggcttttcagacaaacccatcagcggtttcaaaacctgaaccttagcacatccacttccctctgatatcaaaggaaacttcaagtctgaagcggacttggcaagcatgttattaataactgtcatgcttattaacaaatttaatccggcctgctgcagaaatgagttgcagcaacgtgacacagtctcccgacacacttcattgatgtacatcttaatctggccctgactttcaatactcgcatttaagttatccggggcacacaaagcctctctaacagtggggtctggagtggggctcgtgtttctagccattgagaggctggccaaatggctattgatatcctggctaaatggaaagcccgcatccttgggctcggcaaacaacagttttccctgaatgaaaagacacttggagaggtccagaacacaactgccatttttacaattttgagcactccaagtatttttatgttcataggggaatggccgctgttttattgggtgtgctcggttggccttgcctccccctgagggcctgtcctcagtgccactggggccccaggttcagtccaatccccatcctcagtccaggccgagccatagtttcaaaatcaaaccaaatatcaggctcctcctcatccagctcctggtcatcgtcccactcctcttccccctcctcctccagcttctcactgtcatctcttcctatggtcagtttgtaaacgcagtagcagcaccagccccaatcatcagtcctgccgccatccaacccacttcccttccgagcccggcccatgctcaagtctgtgccagccttggggcaggacaggagagggccttgctccacctgattgaagagg

SEQ ID NO: 50568 - DNA, 2003 bp, Homo sapiens
  misc_feature (1)...(2003): n = a,t,c or g
cgggctgtggggtcccaaaatcggtgaccccggcccctctcccctcctcccccaccatgtcccatgtcaggatcagttcgaggtgctcgagcgccacacgcagtggggcattggacctgttggacagatatgtaaagttcgtgaaagaacgcaccgaagtggaacaggcttacgccaaacaacgtgcggaccatggttgaaaaaatatctgcccaagagacctgccaaggatgatcctgagtccaaattcagccagcaacagtccttcgtacagattctccaggaggtgaatgactttgcaggccagcgggagctggtggctgagaacctcagtgtccgtgtatgtcttgagctgaccaagtactcacaagagatgaaacaggagaggaagatgcacttccaagaagggcggcgggcccagcagcagctggaaaatggctttaaacagctggagaatagtaagcgtaaatttgagcgggactgccgggaggcagagaaggcagcccagactgctgaacggctagaccaggatatcaacgccaccaaggctgatgtggagaaggccaagcagcaagcccaccttcggagtcacatggccgaagaaagcaaaaacgaatatgcggctcaactgcagcgcttcaaccgagaccaagcccacttctatttttcacagatgccccagatattcgataagctccaagacatggatgaacgcagggccacccgcctgggtgccngggtatgggctcctgtcggaggccgagctggaggtggtgcccataatagccaagtgcttggagggcatgaaggtggctgcaaatgctgtggatcccaagaacgactcccacgtccttatagagctgcacaagtcaggttttgcccgcccgggcgacgtggaattcgaggacttcagccagcccatgaaccgtgcaccctccgacagcagtctgggcaccccctcggatggacggcctgaactccgaggcccgggtcgcagccgcaccaagcgctggccttttggcaagaagaacaagacagtggtgaccgaggattttagccacttgcccccagagcagcagcgaaaacggcttcaacagcagttggaagaacgcagtcgtgaacttcagaaggaggttgaccagagggaagccctaaagaaaatgaaggatgtctatgagaagacacctcagatgggggaccccgccagcttggagccccagatcgctgaaaccctgagcaacattgaacggctgaaattggaagtgcagaagtatgaggcgtggctggcagaagctgaaagtcgagtccttagcaaccggggagacagcctgagccggcacgcccggcctcccgacccccccggctagcgccccgccagacagcagcagcaacagcgcatcacaggacaccaaggagagctctgaagagcctccctcagaagagagccaggacacccccatttacacggagtttgatgaggatttcgaggaggaacccacatcccccataggtcactgtgtggccatctaccactttgaagggtccagcgagggcactatctctatggccgagggtgaagacctcagtcttatggaagaagacaaaggggacggctggacccgggtcaggcggaaagagggaggcgagggctacgtgcccacctcctacctccgagtcacgctcaattgaaccctgccagagacgggaagaggggggctgtcggctgctgcttctgggccacggggagccccaggacctatgcactttatttctgaccccgtggcttcggctgagacctgtgtaacctgctgccccctccacccccaacccagtcctacctgtcacaccggacggacccgctgtgccttctaccatcgttccaccattgatgtacatactcatgttttacatcttttctttctgccgctcggctccggccattttgttttatacaaaaatgggaaaaaaaaaaaagaaattatataaagttaaaaaaaaaaaaa

SEQ ID NO: 50569 - DNA, 2321 bp, Homo sapiens
ttttttttttttttgttcatttatattttatttaagagctgtgcccagttttatcatctcacaagaatgaagcaagggacaaaggtaagtgccacgctccctggccactgggttcctggcaagctcccagccactaggtgccaatctcccttcaatgtactccttcttccccagagtgcagaagcgtatgaagacagttatgacatggacacatgcatgagctattatacataattacaaaagctgattctgtcatcaccgcatcttgtctcatcagtaggagcgaatggctggggggacggtggcacagtcagcctcgttcaaagttttgtcgattacgggtctatatcccagagtgaccatgaaaagaagagtcttcccagtgccaacgtccacataggacagggtgtgcttcctccagtgctcctcaaagggcttcttctgttgcccctggatgggcttggagtaatcgtactcatcaatccgcaccttgtagtcttccctggcatgcgcgccccgtgactccttccgtgcctctgctccgtagatggtctgcagcgcacacagcatcaggttctgcagctccagggtctccaccaggtccgtgttccagaccattccccggtcgaacgtcttcaggtgctttaggtctccatagagcttgctgattttcccacaaccttcttgcaacacgcttcccacacggaacacggcagcatgattttgcattgacttctgcatgctgagtcgcagttccgatgttcttatgcttccatcagcaaatctcaatttgtcaagattcatgacagattcttccccagcgtttggtttaattggagggactttatctccaggcctgcatgactcttcgatgctcagggcacatgcccgaccaaagacaaccaggtccaagagcgagtttgccccgaaggcggttggcaccatgtaccgaggcacaggcggcctccccacaggcgtacaggccgggcacaatctgatcctggccattcacgtgcctcaggacctgccccttgtagttggtgggaatgccgcccatgttataatgcacggtggggaggacagggatcggctccttcgtgacgtccacgccagcgaagatcatggctgtctctgaaatgccaggcaggcgcgtggccagctgctctggaggtaggtggtgcagctgcaggtagacgtgatctttctcagggccacagcctcttccttctcggatctccagagtcatcgaccgagacaccacatctctagacgccaggtccttcgcgacaggggcgtatcgctccataaacctttcgccttgactgttaatgagaatgcctccctctccacgacatccttccgtaatgagacaaccagcaccatatatgcctgtggggtggaactgaacaaactctaggtcctggcaaggaaggcctgccctggtgatcatggccgtgccgtcgccagtgctggtgtgggcagacgtgcagctgaagtaggtgcgcccgtagcctcctgtggcaacaacagtgttctttgctcttatgcgatggatggacccgtcctctatgcacagtgcgatgacaccacggcactccccgttctccatcaggagatccaaggcaaaatactccacaaaatagctggtatcatatcgcagagaccgtccatataaggtgtgcaatagcgagtggccagtccgatcagccacacagcagcaccgatgggcctgcccgccctttccaaacttgaggctctgtccaccaaatgcacgctgataaatcttcccatcttcagttctgctaaacggcatgccataattttctagctcgaccacggcggcgggggcctgctccgtcatgtagtggatggcatcctggtcccccagccagtcggagcccttcacggtgtcgtagaaatgccacctccagttgtcctcctccatgttccccagagcagcattgattcctccctgtgctgcaacagtgtgtgacctggtaggaaacagcttggtaacacatgctgtattaaaccctgcctcagaaaggccaaatgcagctcgcaaagcctgcccctccagcgcctaccaccactgcatcaaattcatgatccactactggatactgagcagaaatggaatctgaaactttagcagatgccctcttgttcccatcaacagtgaagtgaaaacctcgggttcctgtttgcaacactgttggccacgccttggccagcgccaggcgccgagcgctcagcagccgcgacaggccccggacccccgacatgtctgctgttgccgccgcgcagtcccgccagtccct

SEQ ID NO: 50570 - DNA, 332 bp, Homo sapiens
aaaaccttaactttgattctgggtgcatgcaggagtgtagtttctgtattatttcttcagccgtaaacagtgtcagtggtatttgtgatcttctcagtggcttaggctgcagttgttagtagaggctgtggtgaggttttgttggggatggggacaccatgtgagccagttctctggcagcagtgggccaagggtatctatccttgggcccctgggcagtgtatgagtgcattggcattagtgagtccaagtgggccaattcttgggtttccacgtggcttgctcaggtgccagcagtggcagtggtaggctggagtgtggacaaaatctcc

SEQ ID NO: 50571 - DNA, 474 bp, Homo sapiens
  misc_feature (1)...(474): n = a,t,c or g
gtttctgaaaaagaagtttgaaagttatatncacataggtttcatttaaattatgcagcaatcttttattactgtcccagatcttgtttaatgaagatctctgtcatcaaatcaagtacggtatttcatgactataagaatgataatcactagcaaaaggatagcagcaaccaaagccatgatggcttttattttgcatccacgccaccacatttgccttcgaagttgtttggatctgttgctaaaagctgttgcattatccgataagctttctgatttgtcctgtagttcatctagtctctcccctctctcaattacctttgtaatattttcttgcatgacatcaataacttcatctacttgattctgaacatgcttaattttatcatttctaggtccaaatcttggtccagatggtccccttagaaaaaagtcctcttcttcatctgaatcatcttccaaaagatttctcct

SEQ ID NO: 50572 - DNA, 3349 bp, Homo sapiens
  misc_feature (1)...(3349): n = a,t,c or g
agaacgcggtcggcccggtccccgccgcacccagcccagcaacatcatgacaacagagaagagtttagtgactgaggccgaaaattcacagcaccaacagaaggaagagggtgaggaagccataaactcaggccaacaagaacctcagcaggaggaatcttgtcaaacagcagctgaaggagataattggtgtgaacagaagctgaaagcttctaatggagacactcctacacatgaagacttgaccaagaacaaggagcggacatcagaaagcagaggactttcacgactattctcctcgtttctcaaaaggcccaaatctcaggtgtccgaggaagaaggcaaagaagtagagtcagataaagaaaaaggtgaaggaggtcagaaagagatagaatttggaaccagtcttgatgaagagatcattttaaaggccccaattgcagctcctgaaccggaactcaaaacagacccatctttggatcttcattcattaagcagtgcagaaacacagcctgctcaggaagaactcagagaagatccagattttgaaattaaggaaggagaaggacttgaagagtgctccaaaatagaagtaaaagaagaaagccctcaatcaaaagcagaaacagaattaaaagcttcccaaaaaccaatcagaaaacacaggaacatgcactgcaaggtttctttgttggatgacacagtttatgaatgtgttgtggagacatggctggattccgccaaagaaataaaaaagcaggttcgtggtgtcccttggaattttacatttaatgtaaagttttatccacctgacccagcacagttaacagaagacataacaagatattatttatgtcttcagcttcggcaggacatagttgcaggacgtctgccctgttcctttgcaaccttagcattattaggttcttacaccatccagtctgaactgggagactacgacccagaactccatggcgtggattatgttagtgattttaaactggccccgaatcagaccaaggaacttgaagagaaggtcatggaactgcataagtcatacaggtccatgactccagctcaggctgacttggagtttcttgagaatgccaaaaagttgtctatgtatggagttgatcttcataaagcaaaggacttggaaggagtagatatcatcctaggtgtctgctctagtggccttctggtttacaaagataagctgagaattaaccgcttcccttggcccaaagtgctgaagatttcttataaacgtagtagctttttcatcaagattcggcctggagagcaagagcagtatgaaagtaccatcggattcaaacttcccagttaccgagcagctaagaaattatggaaagtctgtgtagaacatcacacgtttttcagattgacatctacagacaccattcccaaaagcaaatttcttgcgctaggatccaaatttcgatacagtggccggactcaagctcagaccaggcaagctagtgctctaattgacaggcctgccccacacttcgagcgtacagcaagtaaacgggcgtcccggagcctcgatggagcagcagctgtcgattcggcagaccgaagtcctcggcccacttctgcacctgccattactcagggtcaggttgcagaaggtggcgtcctagatgcctctgctaaaaaaacagtggtccctaaagcacagaaggaaacagtgaaggctgaagtgaaaaaggaagacgagccacctgagcaagctgagccagagcccacagaagcatggaaggatttagacaagagtcaagaggagatcaaaaaacatcatgccagcatcagtgagctgaaaaagaacttcatggagtctgtaccagaaccacggcctagtgaatgggataaacgcttatccactcactcacccttccgaactcttaacatcaatgggcaaatccccacaggagaaggacctcccctggtgaagacacaaactgtcaccatctcagataatgccaatgctgtgaaaagtgaaatcccaaccaaagacgtccctattgtccacactgagaccaagaccatcacttatgaggctgcccagactgacgacaacagtggagacttggacccaggagtcttgctgacagctcaaactatcacatctgagaccccaagcagcaccaccacaactcaaattaccaagactgtaaaaggtgggatttcagagacacgtattgaaaagagaattgtgatcacaggagatgctgatattgaccatgatcaggtccttgtacaagccatcaaggaggcaaaggagcagcacccagacatgtcagtgaccaaggtggtcgtccaccaggagaccgagattgctgatgagtgagctcaggaactaacctaccccaactctgcccttctcccatccaagagaaaccagcaaaatgataaagaagctaacctgccatagtcagacttcagactttcaagattattctaaatcaccagaaaattaatttcagtttctattgggagtttataccaagagattcttctagatctcattgatccttttgaagagctttttctatattaggatatcagaattgttcaacttttcactctatagactgttttaagagttttggggttttttttaattgggtggtttgtaaccccttcagcctagcctctctgcccatttatttccaaccccaacagacactgacagggtcccacggaantcttcgggaaatcctcccaaggactcttgtcagctgtgttggaggccaaagccagcttagtgggacttccgcgtctctccctagtcttatcccctttggatgatggcagaaacttcatgaaccagccctttctcagagccagtgatgtgagtgtatcagaatgccagggagggcaccagccctgatccacagacctcggaaagatgcccctgttcctttgttgcgggtggttttggtaaggcagagccctctgctgagaatgtagtattgtttttcccctctccctcctgctttctttttggagcttctttgggtcaaagacatggaagttgcttcagatatctgatactgtgaatgtttgaacatatccgtggcctacacctctccaggtacccttttccnacaacagaaggaggggctcagctaagtgctccccctagctcccatctcaggagaccaaatctcacagaaaaataggcactttgggccaaaagctctaatggaacatttttagtggtgatttggggaaggaaagttaatgaggtttttaaaataaggttttctagttttgagagtgtgcacttcacacagggtaaatcatggtgctagctctctcc

SEQ ID NO: 50573 - DNA, 620 bp, Homo sapiens
  misc_feature (1)...(620): n = a,t,c or g
cgcggccccactgacatcattcctcatgagggaggaggcacaaacagttctgggccgaccagaaaaaggacgactgggacttgactctgaatcgcaggatttgaagagatttctcctggcttcccaacgaggctggtgggaagcggtcctcctcccatacactgacctcccaccctcgcgaggcgtagaaaccagttctgactgtacagtaaagcgagggccagggctgaggtctggaagctaatgaaagcacagaaagtgtcgaaactggatgagcaggaagcgaagtggcctcccctgtcatctgacgttttcccaggatgtaatttgcctgactgaaacagatcaggaccaacagggagagttttcgatttagtgtgaggaaaagagcactaaattgtagcaaaagaccttattgctcaaggcccagtcagaagatttcataaggaagctgtagaaagtcttaagaggaaatcagcnnnnnnnnnnnnnnnnnnnnnnnnnnnnnnnnnnnnnnnnngaaggctgaggcagggagaatccgctnnnnnnnnnnnnnnnnnnnnnnnnnnnnnnnnnnnnnncgcgccactgtacgccagccttgggnaaaagaacga

SEQ ID NO: 50574 - DNA, 1200 bp, Homo sapiens
cgcagccggtccaccccagctagagagacttccacagaggcagcgtttccacagcccaaagccacgtttctagggtgatgcagccccagtaagttcctggcggggaagctcacggctgtcaaaagaactcttcgctccagccggcgcacgaaggggaggagggcaggaggctgccgcccgcacaggtcatctgatcacgtcgcccgccctagtctgcttttgtgaatctccactttgttcaacccccacccgccgtctctccctccctgcgccttccctctaaccttaaagacccagctacctctacgcaaatggtagctacctctgcgcaggtggaagttgagttcggttcacgcgggaccctcttccctgtggcaagctgctgaaggagacctgctgttactgctttagctgctgttctgcttaatctcagacagctggaaggtagtattccgccctcgcccagccacccgagtaaatgagaatgatgactgactgagaccctgatggtggtggcttaggcttaatctcagacagctggaaggtagtattccgccctcacccagccacccgagtaaatgagaatgatgactgactgagaccctgatggtggtggcttaggcaagatgaacgtctgaaactggaggcccagggctgccacgatggctctgtagtcatcagggagggagctccttttatcttgttacctactcccctcttgtgcccctttcttcccttgatctaagaaggttgctccggatctcgccatctggcctgcgttcaatcagcagaagcttcctggaggagcaggaggaggcactgtgctcgcatcacataccagtggccagaagttggcttcagggaagctcaggaaataggatgcgagaagccatgagacctccccaaactctgcagtaacagagtcaacaagacaatggcttaaagatggagagaccagttgatcggtcacacaagctgttccacgataattcttgtgtcagaaggggaggctgactaccaggaccactggccccacttccagcccctccattctgagtacacttcagagggctctggcagggtgagggggtcttggtggtgccacagagagtaaaggtctagcacacccattgtggagatatttcatggggacaacccagtgacttcacttgaagtaaagtgggattttccaaccttgaa

SEQ ID NO: 50575 - DNA, 431 bp, Homo sapiens
gcccccgcttcctttcacgctgtcgctgcccgtaggtggttgtggccactgtgcccggagggaggcggaggcggccagcaatgcctgggaaactcctctggggggacattatggagctggaagcacccttggaggagtccgagagccagaagaaggagaggcaaaagagtgacagaaaaggaattcaaggcaccattatgactcggatgagaaatcagaaacaagagaaaatggtgttacagatgacctggatgctcccaaggccaaaaaatctaaaatgaaagagaagctaaattggagacactgaagaaggattttaatagactttcagatgaattctccaaatctcataaagtcaagaagaaaagatctaccaaatggagatattagatgaatatgaaaaaaaatcaaagcgagtatcatctttagat

SEQ ID NO: 50576 - DNA, 690 bp, Homo sapiens
ttttttgaaaagagacaataaaaggaggtttttttattcaaaggtataactggataagtagatttgttccattcttgtgaaatactttttaaaaaaatacgaccaacttctttgcaaatagcagacacatacctcaactatgatgacctaatttttggtggataatgtacatgattaggcagaaataggcaagctcacactggtagattaactatcaaatactcagtcaaaactccgtttgtggcccccacttcttgatcgatttctattcccacttcgtcttctaccatcttgtcgacttcctgagcgacttccttgtcgactctgtctacctgaccggccgccagatcgaccacctgaccggcctgaccggcctgatcgaccacttgaccagccactcctctgtctggaattagaagatgtgtttccatcataatattcttcaatttcaggtaatttggctgggcactgagagtatccagtcggaatcatgccactctgcctgtaacctttctgactcagttgtaggaacatcaaagcaaacacccatattccctttcaggaggcacattctggtaatctgagacactgcattactactcagctttctgttaagttctttccaagcacagctgacatcctgtatttcctctaggctttccagagtcatggtcacaaaccccttatcag

SEQ ID NO: 50577 - DNA, 173 bp, Homo sapiens
agcaattcacctttattctgatccttgtgccaaaggcaaagcactcttcttgggacactactcatattctgcagctatgccagttctccggaagccatcaactcagctaaagaaaataaaaatgtgctttttaaaaagaacccaatatacaaaattaatacttaaaagaaagt

SEQ ID NO: 50578 - DNA, 320 bp, Homo sapiens
atgaattaatgtttataaatgactgtactgaatttaaaaccgtacagtttcatttgcattttgacattactttattatacattttgcatttaaaaggctgcaccagttggcttttcttctgttttattctcaaaatatagagattctgtgatttatttgccctgtttatggattaaaaagaaaattctaatataaagcatttcaataggatgcataggtatattacgttttttaaatgctttagatctgtgattcttgacttactatttattttatccccttttaagtcagggatgctttattctattttaaagcactta

SEQ ID NO: 50579 - DNA, 988 bp, Homo sapiens
ctgatctgttcaaagctgtcttttccacctgctgaaattcattaaatcactggaggcatgcataatgaatggagaatgagtgaacttccaatgcaacttggattcacaaacccattatcatagccaatatgcagattttaaacagcatttcacatttcatttgaccatgtcttctttttcgcatcgcctgctgcagaattccctactagaatgtgaaacaacgaacaaaccacagaacttagagtgtgctggttagtcacataacttagtagcaggattgtgtatccaggcacaaaggtgtctttgctaatgttctcttgctacctgccctgcttcaaacgctaaatggtatgggtctttctttgttgccagccatattctacaaataagacttttcaatatagttatgagtaatataattttatgtacatataatgttagaatattgtacagaatcttggtttctacgatgcgcttttcttgtttcaaaaagaggaaaatgcttgatttttgttgatgatacttttgttactgtccttaattttccatagtttggtttcttaattgtgctcactaagcatcgatctgtgctgatgccaagctatggactatgtacgcaagaccgagcaatagacagaggtgcctagggtccaaacacactgaacgcacgtggaaccgcctggttcaggagcctcatcagacccttctccatgcacatccttcccaaacagtcacagattccattgaaaggagcagattctatcagttcttctgtgcagactttaagagctgaacgttctggttctggaagccatgtgactgcgcagaacaacctaagaaaccctttgtgtcctgaggggtcgttgacctctccttccagggtcggaggcagtcactctgaggggcaaagcgtgggtccactgtgtgtgatgttttcagggatgctaggggtcaaaggaaagaaaccaagtgggtacataaggcccag

SEQ ID NO: 50580 - DNA, 1215 bp, Homo sapiens
gaaaatattgggggtaggggggtggattaggagattgaagggttgagaagaaagagaaattgtccaaagagtcctcagaacctgcctggagaaatgcgcatgggggtgggcctggtaagtcccaggaaccacaggaagtgagctaaggctcacccagagcagctgggtctccaggctgcctgggctttttgtcctcatgaacaactctggagcagctgtctgtccctcagagggcacctggaggcagcaaagattatcttatttattttattttgttttctgctatatttagagtggcaaaaaaatagagcagagggtttctgcctgtctccagactgtctaccaaagagaaggcgacagatgcctcctgggtttggaagggggatgcactgtggatctgccatccattctgcagtctccagcagagcaggcagtcaggccccagcgtgcctccatcccagtgccccgatgaccatctggtcagccctcccaacctcccttccagggggcttaccagcaaagccatattcggctaggaatttggaattcacaacctttattaacccctggcaaaacttcccgtttgcatgtcaaatcacattgaagcctgaagattagcttttcttactggtttttccaataagtaatagcaaagcccacttatcatacttaaactacagtaaagaaaagaggtggttctctgcagtgatcgtttagtgtggccctcaaacattaaatatcccgaggtctccttggtgggtggcaggatttaaattcaatcaaatcctgtcctagtgtgtgcagtgtcttcggccctgtggacacaggtgaatgagggaccagccctgccctgggctgttgagaagagatcagtccacccagagttagacattgtttttgtagaaaacaggcatttattatgtctagggttttgtgtttttttttttttccttacaggataaaagcctttatacagaaacaaaatggaacctttcatataaaaccttttctttaaaggctgtgtggttcgtatcatgaatgcccatcacgaggcaggattcgggcacatacctgtacttctgctccagagtgtgcggttccccaaatcccctgagtaaacctcttctgggactgctgctcagacacctgcgtcaggtggaggtgcctccccctctgtgggcaccagcttggggaggtaggtgacttttccttgca

SEQ ID NO: 50581 - DNA, 634 bp, Homo sapiens
cttttagaaggtaatttgatggtatttctttctcgaatgaaaagctgctggtttaccctcaaccctattcattagcattaccatgagtgaatttatatctaattatttccacttgccctgttctcttcacaccaaggaagctccagatccagtatcttgtttggcctcaaaacagaagcagcttcttttgtctcccagcagtagtgagccactcagtctcttccacaggaagtttgggagcctacattccttgagtcagggagcttattacagaaaaaccccgtttccctgaacttttggctaacaaattaatttaactgacatgcatattgattctgaaatttttttcctaagtttttttcatttttttgaatgagttttttaaattttttagatgaccaaaacttgcagggcaggggatgcccagaagagtggtgagatagtaaaacacttattccctcatcctttcaggttttcaggttgcccatttatattcatttacatgtcatttgactgtctcactttttacccagaacagtaacaacccacaccgtcttccttcagggatttccaactggcactctgtgggtgctacacagaatgcaatttaatggatatttctcagcctggttca

SEQ ID NO: 50582 - DNA, 568 bp, Homo sapiens
tttttatttttttttttttttataagagcagcaacaacttttattgagtgcttattatttgacaggcactattctaagtgctttacacaatatattaactcctttaatgcataaaataactttatgagacaggtactactaatgacctcatgttacacaggaggaaactaagccagagagagttacgcaacagattaagttcacacagtaggccatggaacctgggtcaaacgcacacagtctggttccagagcttgtgttcttggcctccatattttactccctacctcagaggtttgtggaaaagaatctgtgtttgtaagagtgactatatttcaggtagacctggaaatcaaggtccaagctcgttcaaacaatcccatggcactgatttcattcaacaggtatttatcctgttttggaaccagagttaacttacaatctcaaatttggtattcagctttaagtatatgaccggaaaactagtagactcatgtagttaagaaagaggattaaaggtccaattaatcttggtcacggttaactggtatacggtctgcggttcccc

SEQ ID NO: 50583 - DNA, 342 bp, Homo sapiens
gagaaccaaagtatccaaacaggagcgattccttcagagcacaactgagcatgctgaagaacgccaaccatgcagaaggagagcatggaacagttcattgtcagccagctaaccagaacacatgatggtttaaagaaggcaaggactaacttagaggaaccatgcaagaagcgcagccaccagaagtccttaaaacagcaggaaaggtgggcctgtcccccttttgtgcagctacctatctgctgaggagcatctgggcctcattcctccaagtccacgggagggtccagaagagggagtcagagatgtatcctggtggagctgggagaaaggcagaaagcc

SEQ ID NO: 50584 - DNA, 1380 bp, Homo sapiens
  misc_feature (1)...(1380): n = a,t,c or g
ggccctctcctccttggctgctgtgagacaccagtggtctccttggctgaggctcagcaggagctacagatgctgcagaagcagttgggagaaagtgccagcactgttcctcctgcttccacagctacattgctgagcaacgacttggaagccgactcttcctactacctcaactctgcccagcctcactctcctccaaggggcaccatagaactgggaagaatcctagagcctgggtacctgggcagcagtggcaagtgggatgtgatgaggcctcagaaagggagtgtatctggggacctatcctcaggctcctctgtgtaccagcttaactccaaacccacaggggctgacctgctggaagagcatcttggtgaaatccggaacctgcgccagcgcctggaggaatccatctgcatcaatgaccgcctacgggagcaactggaacaccggctgacctctactgctcgtggaaggggatccacttctaacttctacagtcagggcctggagtccatacctcagctctgcaatgagaacagagtcctcagggaagaaaatcgaagacttcaggctcaactgagtcatgtttccagagagcactcccaggaaacagaaagcctgagggaggctctgctgtcctctcgatcccaccttcaagagctggaaaaggagctggagcaccagaaggtggaaaggcagcagcttttggaagacttgagggagaagcagcaagaggtcttgcatttcagggaggaacgtctttccctccaggaaaacgactccagactgcagcacaagctggttctcctgcagcaacagtgtgaagagaaacagcagctctttgagtccctccagtcagagctacaaatctacgaggcactttatggcaattccaagaaggggctgaaagcttacagcctggatgcctgtcaccaaatccctttgagcagtgacctgagccacctggtggcagaggtacgagctctgagagggcagctggagcagagcattcaggggaacaattgtctgcgactgcagctgcaacagcagctggagagcggtgctggcaaagccagcctcagcccctcctccattaaccagaacttcccagccagcactgaccctggaaacaagcagctgctccttccaagattcagctgtgtcccctccagtccgggatgttggtatgaattccccagctctggtcttccccagctctgcttcctctacttctgggttcagaaacgcccataatcaacagagcaaatggctttgggttttggataatttttccagtaattnaagaccccttcccaagnttagaagggtgatggttantgatnggttctttttgccaataaggattggccgncatgt

SEQ ID NO: 50585 - DNA, 1239 bp, Homo sapiens
ctggaactgagaaccaaagtatccaaacaggagcgactccttcagagcacaactgagcatctgaagaacgccaaccagcagaaggagagcatggaacagttcattgtcagccagctaaccagaacacatgatgttttaaagaaggcaaggactaacttagaggtgaaatccctaagggctctgccatgtactccagccttgtgacccttgccttccaggaaccatgcaagaagcgcagccacctagaagtccttaaaacagcaggaaaggtgggcctgtcccccttttgtgcagctacctatctgctgaggagcatctgggcctcattcctccaagtccacgggagggtccagaagagggagtcagagatgtatcctggtggagctgggagaaaggcagaaagcctttctgacggctatggaatacgattagccaaggtccacttggccccagcactaagaaaaagatgcgtagtttgcacagaaggttttgtgatcctgcctctcaacagccccagcagcttgggaactagcaagagcacatttcttgcctcatcagctgtcctgagatggaaaactcagtgaatataggaccctgattccgatgaaaggggcacgtggtcccaatgctggagctcctctggcaggttctaaaagcacactactgagcagcggtgccctgccggacactgctggcgggggctcagtgagcactactcacagatccacacctgaccctgttgggtcgagtcaggctgggccttggtctgcactgtagcacctgtgttctttgagttcacatcatgaatgtgggtgacttcccagataccatctcaggcttaacctagcacatcctatttcttttcttctatgatatccaaattggactgacctcacttcaaagttgctgtcccattttgtcaccctatcttatctcggggaaattgcagactgatggccagaccaactctgttgaaattcttgcatagagcaaacctgtgctcatttttaagtggcatgggagaggccccaagcctagtaaagccctagtctgtgtcttcacagtgctggtagaatgtgtttgtgtgtataaatatatgatatagatttatatatgttgctaacgccatatattgaaggccaacataactggtggacagggtgggtgacagaaaatgaaagcctttttggtgattgttaaagcaagatgtgtataaagaaataaatagtttttctttca

SEQ ID NO: 50586 - DNA, 533 bp, Homo sapiens
gatttgtctgcctctgctcattccaaggtggtgatcttcacagtcaactctttgggtagttctcagtcgtaccttgatgtggtacagagcaatgtggatatgttcagagcccttgtcccagctctgggacattatagtcaacacagtgtcctgctcgttgcatctcaaccagtggaaatcatgacctatgtaacatggaaactgagtacatttcctgcaaatcgagtgatcggaattggatgtaatctggattcacagagattacagtatattattacaaatgttttgaaggcacagacttcaggcaaagaagtatgggttattggcgagcaaggagaagacaaagtgctcacatggagtggccaagaagaagtagtgagtcatacctctcaagtgcagctgtccaacagagccatgggaactgctaaggagtaaaaggtcaaagatcctgggtctgttgggactgttcagtaggctgacatgggtttgacagtattgtaaacaataagaagaaagtgcattctgtatcagct

SEQ ID NO: 50587 - DNA, 615 bp, Homo sapiens
  misc_feature (1)...(615): n = a,t,c or g
ccgtgcagcatgcttggtggtcttgttaagtggaaactgctgctttagagtttgtttggaaggtccgggtgactcatcccaacatttacatccttaattgttaaagcgctgcctccgagcgcacgcatcctgagatcctgagcctttggttaagaccgagctctattaagctgaaaagataaaaactctccagatgtcttccagtaatgtcgaagtttttatcccagtgtcacaaggaaacaccaatggcttccccgcgacagtttccaatgacctgaaggcatttactgaaggagctgtgttaagttttcataacatctgctatcgagtaaaactgaagagtggctttctaccttgtcgaaaaccagttgagaaagaaatattatcgaatatcaatgggatcatgaaacctggtctcaacgccatcctgggacccacaggtggaggcaaatcttcgttattagatgtcttagctgcaaggaaagatccaagtggattatctggagatgttctgataaatggagcaccgcgacctgccaatttcaaatgtaattcaggttacgtggtacaagtaagtattagtgggtttgcattttctgnttcctctggttctat

SEQ ID NO: 50588 - DNA, 1013 bp, Homo sapiens
  misc_feature (1)...(1013): n = a,t,c or g
aacagcaccaatgaagcctagttctccacgggagtggcgtcgagcaggagcactgcacatcgccccagtggaccctctggtctttgtctgcagtggcattccaaggctgggccctggcaagggcacccgtggctgtctcttcatttgcagaccctgatcagaagtctctgcaaacaaatttgctccttgaattaagggggagatggcataataggaggtctgatgggtgcaggatgtgctggacttacattgcaaatagaagccttgttgagggtgacatcctaaccaagtgtcccgatttggaggtggcatttctgacgtggctcttggtgtaagcctgccttgccttggctggtgagtcccataaatagtatgcactcagcctccgccacaaacacaaggcctcggggagggctagactgtctgcaaacgttttctgcatctgtaaagaaaacaaggtgatcgaaaactgtggccatgtggaacccggtcttgtgggggactgtttctccatcttgactcagacagttcctgggaaacaccggggctctgtttttattttctttgatgtttttcttctttagtagcttgggctgcagctccactctctagtcactggggaggagtattttttgttatgtttggntttcattgctggcagagctggggctttttgtgtgatccctcttggtgtgagttttctgacccaaccagcctctggttagcatcatttgtacatttaaacctgtaaatagttgttacaaagcaaagagattatttatttccatccaaagctcttttgaacaccccccccctttaatccctcgttcaggacgatgagcttgctttccttcaacctgtttgttttcttatttaagactatttattaatggttggaccaatgtactcacagctgttgcgtcgagcagtccttagtgaaaattctgtataaatagacaaaatgaaaagggtttgaccttgcaataaaaggagacgtttggttctggcaaaaa

SEQ ID NO: 50589 - DNA, 315 bp, Homo sapiens
  misc_feature (1)...(315): n = a,t,c or g
gcttgcttagtgctagtttgagtccttcagtggcaggacagcctgtaaagtaccacaagtatgggagtgttataatggcagagtgaaacgattagagcagggaggaagtgaattgtgccattagtaccttcatgcaaattataccatgtgattttggacagtgaatgatttttgcatcattcattcacagcccatcactctgttaaggtgagagtgtaattcttacttctcccatcaccacctgtaggctaggaaacagggaaaggggagnatgaggatgatcccggacaacattaaaaaggtgccatgttnggc

SEQ ID NO: 50590 - DNA, 172 bp, Homo sapiens
taaatctgtgagtagatgtggcacctggagctactcactacattactaaaaacagaaacaagaaatctataatggcaggatcacaacatttgcgccgcaaataggctaacccaaccaaagactggccaccgagaggcagtctgtctctgtgactggactggggaacttggga

SEQ ID NO: 50591 - DNA, 407 bp, Homo sapiens
tattcagttttatagaggaaaccatcctcagtttatagccatattgtccttattaaatattaatagaaaaagaaaaaatacttggtgtgagctgtagtttgagaaatcactgtgaccatccttatctttgtattcatgtttatacacatcaacttttatgcctaaaattgtaggttacttgcaattggatgataaactattagagactgtcagtatccaacttttacaacatgtaacgatgattaactgatttttgaatttcttaatgcaggatctgaacaatgttttgaacagcttcagccagaatattcttcacaggaggagagccagcatgctgatctaccaagtatttttagcattgaagcaagagattcttcccaaggcatgaaaaatcagaactatccctc

SEQ ID NO: 50592 - DNA, 2023 bp, Homo sapiens
  misc_feature (1)...(2023): n = a,t,c or g
aaaaattccatttatggagagatcccaccngaggcagaangaaataaggaataaaattcatgtctctgaaaattctcaaatcaaaacagttaaagagaaaccatctataagttcatctgtgagtcgtctaaagggcgtgaataaagtcagagcatcttttcctgaagacagaaagactacacaggctctaaggcaccaaaggggtcttaaggttatacaatcaactagctgaagtgaaacaacaaaaggaagaaaaaacaaaacaagaagcttatgcccaaaacagagcaagggcaaaagaattccataaggtgagtataactgagggggaaggacttaatttttcaagcatgaagtacacaactgaaactcaaatttttattccttccacagaaaacactagagaaacttcgagccaaaaatacatgctgactttctagaaatagtgtaaaggttttttaattgtgtatatgtagcattagacaaaattatttaaagtcaataaattgttattcgaggaattccatgttgtgatttcttccactgtccatcaaggtcactttagatcctctaaagagctggagtcaaaagatttatcttcaagtttgccctttttaatgaaactgatccagttgtcctgtcagcccataattactttggcttctgtcatctcgttttaatatgggatatactgatgaagacttcaaaattcaccaagaatctttgggatctaatttcttcaaccaatttactttagggtcctttttactgtaggtggtggggatctacctggttctcaatttgacaccctctcaacatgaatgagttcaaatcacattcattcctaagcgatcactcaagaatggtacagatgtgtggagtatgccaatacctttaactccagacaccatgttctcaagataaaagcctttgacattcatgatcctgtcacattttcaggcctctctgtccagtatttttggcttttgtagctctctttttagacaaagcagcttcttcagtaatatcctcttcttctaagtatacactcagtcttacagggaattcagaacttactatgaaactatcccctgccaatttgatatcacattcgttatcttcaagatgtgttgcatcctcatcctctgctgttgactcctcaataggagaaatggatccatcatcatccaaaaatttgtatctacgactgtcaaaatcttcattttctaaatcttcaccaacattcatttgcttcaatgattctttcaggtggtgttcatacttcagtttttcaatatagttaaaaaatcctcttgcaacagcttgctcaaacgttaaaatttttctccaaggtgcgtttttttcattctctgattctaaaaatgggaagccagatcctctgcttctaaattgtttcttcttatctattagtgagtatataggatttctccttccttctggtcttccccgtggtcttcctgttggctggtacctcctctttttcttttttttatatctctttttcctgttcttgaatctttcaaaaatagcttttatagtcaatggtattggttcaaaagatgagtcacttgatgaatcacttgcgtgaacactttcaggtgtacgaacaaattttcgaatggggtttcttttctcccctttaggtgagtaagggatacactgagttttaaataagctgctatcagaagagttatcacttcgatttgcaagttccacagcatcagatgtcacatggtcaagagaatctattcctgatttatccatcaattgctctttgttttaaacagttttctaaaacggcctcgcagtggccccaaccgcgcacttgctgcttgtaacccaggcctcggcccaaaacccgcgactggcctggtgcgtgagtcctagagctctgtacacaccaccctccctacagccctcccagctaaacatttggaacaaaacaccagcccttttgtagtggatgcagaataaaattgttaatccaatcacctccaaaaaa

SEQ ID NO: 50593 - DNA, 115 bp, Homo sapiens
tcatcttggagcatctccagccacttccttcccccactctgatatggtgtgacagaggtacaactggctgggagcctgccttctggccctctccctatgaccaagtagagtgacc

SEQ ID NO: 50594 - DNA, 879 bp, Homo sapiens
  misc_feature (1)...(879): n = a,t,c or g
ttttttttttcaaagtaatcatttcactttaatatccaggtttgaatgtacaaatgcttgctaaatgtgattaatgttctcattatttaagaaacaggatatttcaaacttttgattatggtatatgcattaatacattacatttaaaaaaaattaggttaaaccagttattcaaaaaaggcattaaaccattattaaaaactaaattgaaactttactttttatatgaaaatttatcatgccattgggattaattttaaaaaatcaaaaatgatttttgtcattgaaactgctgaggctttcaaattcagtagttgaatgatgactgtttctttagtgaaacaattcttgcaattggagacattaagtctaagagttttccttctgctcttgctgtagctgtttcttctgcatttcagcaacaagaatgtgaaatcagaaacattaggactctaagttgaataaaggcattcatttcatggtaaacctgttcttcacttgcaatgaaggatgtcagcttttcttacaaaacatattatcaatgaattagaatataacaataggttatctcagtgatacaaatacaactcataccacaatagaaacagaaacatggagaacaaaaacatgtcccctaacagaataatttgtatattgatgatacaaggttttatgcatgtatactaatttaaaaaaaaaaaaggcggccaagcaccttacagacgtgaaggctttctaaataacaggttgcctaaattctttcatgaatatccttccccttaacggcctactcacactagactatgctcttaaacaatgtacacgtgtatcactcctcagtggaatccttccctaganatctgattcccagaaacgttc

SEQ ID NO: 50595 - DNA, 5838 bp, Homo sapiens
  misc_feature (1)...(5838): n = a,t,c or g
ttttttttttttttgagaaagggaatttcatcccaaataaaaggaatgaagtctggctccggaggagggtccccgacctcgctgtgggggctcctgtttctctccgccgcgctctcgctctggccgacgagtggagaaatctgcgggccaggcatcgacatccgcaacgactatcagcagctgaagcgcctggagaactgcacggtgatcgagggctacctccacatcctgctcatctccaaggccgaggactaccgcagctaccgcttccccaagctcacggtcattaccgagtacttgctgctgttccgagtggctggcctcgagagcctcggagacctcttccccaacctcacggtcatccgcggctggaaactcttctacaactacgccctggtcatcttcgagatgaccaatctcaaggatattgggctttacaacctgaggaacattactcggggggccatcaggattgagaaaaatgctgacctctgttacctctccactgtggactggtccctgatcctggatgcggtgtccaataactacattgtggggaataagcccccaaaggaatgtggggacctgtgtccagggaccatggaggagaagccgatgtgtgagaagaccaccatcaacaatgagtacaactaccgctgctggaccacaaaccgctgccagaaaatgtgccacaagcacgtgtgggaagcgggcgtgcaccgagaacaatgagtgctgccaccccgagtgcctgggcagctgcagcgcgcctgacaacgacacggcctgtgtagcttgccgccactactactatgccggtgtctgtgtgcctgcctgcccgcccaacacctacaggtttgagggctggcgctgtgtggaccgtgacttctgcgccaacatcctcagcgccgagagcagcgactccgaggggtttgtgatccacgacggcgagtgcatgcaggagtgcccctcgggcttcatccgcaacggcagccagagcatgtactgcatcccttgtgaaggtccttgcccgaaggtctgtgaggaagaaaagaaaacaaagaccattgattctgttacttctgctcagatgctccaaggatgcaccatcttcaagggcaatttgctcattaacatccgacgggggaataacattgcttcagagctggagaacttcatggggctcatcgaggtggtgacgggctacgtgaagatccgccattctcatgccttggtctccttgtccttcctaaaaaaccttcgcctcatcctaggagaggagcagctagaagggaattactccttctacgtcctcgacaaccagaacttgcagcaactgtgggactgggaccaccgcaacctgaccatcaaagcagggaaaatgtactttgctttcaatcccaaattatgtgtttccgaaatttaccgcatggaggaagtgacggggactaaagggcgccaaagcaaaggggacataaacaccaggaacaacggggagagagcctcctgtgaaagtgacgtcctgcatttcacctccaccaccacgtcgaagaatcgcatcatcataacctggcaccggtaccggccccctgactacagggatctcatcagcttcaccgtttactacaaggaagcaccctttaagaatgtcacagagtatgatgggcaggatgcctgcggctccaacagctggaacatggtggacgtggacctcccgcccaacaaggacgtggagcccggcatcttactacatgggctgaagccctggactcagtacgccgtttacgtcaaggctgtgaccctcaccatggtggagaacgaccatatccgtggggccaagagtgagatcttgtacattcgcaccaatgcttcagttccttccattcccttggacgttctttcagcatcgaactcctcttctcagttaatcgtgaagtggaaccctccctctctgcccaacggcaacctgagttactacattgtgcgctggcagcggcagcctcaggacggctacctttaccggcacaattactgctccaaagacaaaatccccatcaggaagtatgccgacggcaccatcgacattgaggaggtcacagagaaccccaagactgaggtgtgtggtggggagaaagggccttgctgcgcctgccccaaaactgaagccgagaagcaggccgagaaggaggaggctgaataccgcaaagtctttgagaatttcctgcacaactccatcttcgtgcccagacctgaaaggaagcggagagatgtcatgcaagtggccaacaccaccatgtccagccgaagcaggaacaccacggccgcagacacctacaacatcaccgacccggaagagctggagacagagtaccctttctttgagagcagagtggataacaaggagagaactgtcatttctaaccttcggcctttcacattgtaccgcatcgatatccacagctgcaaccacgaggctgagaagctgggctgcagcgcctccaacttcgtctttgcaaggactatgcccgcagaaggagcagatgacattcctgggccagtgacctgggagccaaggcctgaaaactccatctttttaaagtggccggaacctgagaatcccaatggattgattctaatgtatgaaataaaatacggatcacaagttgaggatcagcgagaatgtgtgtccagacaggaatacaggaagtatggaggggccaagctaaaccggctaaacccggggaactacacagcccggattcaggccacatctctctctgggaatgggtcgtggacagatcctgtgttcttctatgtccaggccaaaacaggatatgaaaacttcatccatctgatcatcgctctgcccgtcgctgtcctgttgatcgtgggagggttggtgattatgctgtacgtcttccatagaaagagaaataacagcaggctggggaatggagtgctgtatgcctctgtgaacccggagtacttcagcgctgctgatgtgtacgttcctgatgagtgggaggtggctcgggagaagatcaccatgagccgggaacttgggcaggggtcgtttgggatggtctatgaaggagttgccaagggtgtggtgaaagatgaacctgaaaccagagtggccattaaaacagtgaacgaggccgcaagcatgcgtgagaggattgagtttctcaacgaagcttctgtgatgaaggagttcaattgtcaccatgtggtgcgattgctgggtgtggtgtcccaaggccagccaacactggtcatcatggaactgatgacacggggcgatctcaaaagttatctccggtctctgaggccagaaatggagaataatccagtcctagcacctccaagcctgagcaagatgattcagatggccggagagattgcagacggcatggcatacctcaacgccaataagttcgtccacagagaccttgctgcccggaattgcatggtagccgaagatttcacagtcaaaatcggagattttggtatgacgcgagatatctatgagacagactattaccggaaaggaggcaaagggctgctgcccgtgcgctggatgtctcctgagtccctcaaggatggagtcttcaccacttactcggacgtctggtccttcggggtcgtcctctgggagatcgccacactggccgagcagccctaccagggcttgtccaacgagcaagtccttcgcttcgtcatggagggcggccttctggacaagccagacaactgtcctgacatgctgtttgaactgatgcgcatgtgctggcagtataaccccaagatgaggccttccttcctggagatcatcagcagcatcaaagaggagatggagcctggcttccgggaggtctccttctactacagcgaggagaacaagctgcccgagccggaggagctggacctggagccagagaacatggagagcgtccccctggacccctcggcctcctcgtcctccctgccactgcccgacagacactcaggacacaaggccgagaacggccccggccctggggtgctggtcctccgcgccagcttcgacgagagacagccttacgcccacatgaacgggggccgcaagaacgagcgggccttgccgctgccccagtcttcgacctgctgatccttggatcctgaatctgtgcaaacagtaacgtgtgcgcacgcgcagcggggtggggggggagagagagttttaacaatccattcacaagcctcctgtacctcagtggatcttcagttctgcccttgctgcccgcgggagacagcttctctgcagtaaaacacatttgggatgttccttttttcaatatgcaagcagctttttattccctgcccaaacccttaactgacatgggcctttaagaaccttaatgacaacacttaatagcaacagagcacttgagaaccagtctcctcactctgtccctgtccttccctgttctccctttctctctcctctctgcttcataacggaaaaataattgccacaagtccagctgggaagccctttttatcagtttgaggaagtggctgtccctgtggccccatccaaccactgtacacacccgcctgacaccgtgggtcattacaaaaaaacacgtggagatggaaatttttacctttatctttcacctttctagggacatgaaatttacaaagggccatcgttcatccaaggctgttaccattttaacgctgcctaattttgccaaaatcctgaactttctccctcatcggcccggcgctgattcctcgtgtccggaggcatgggtgagcatggcagctggttgctccatttgagagacacgctggcgacacactccgtccatccgactgcccctgctgtgctgctcaaggccacaggcacacaggtctcattgcttctgactagattattatttgggggaactggacacaataggtctttctctcagtgaaggtggggagaagctgaaccggcttccctgccctgcctccccagccccctgcccaacccccaagaatctggtggccatgggccccgaagcagtctggcggacaggcttggagtcaaggggccccatgcctgcttctctcccagccccagctcccccgcccgcccccaaggacacagatgggaaggggtttccagggactcagccccactgttgatgcaggtttgcaaggaaagaaattcaaacaccacaacagcagtaagaagaaaagcagtcaatggattcaagcattctaagctttgttgacattttctctgttcctaggacttcttcatgggtcttacagttctatgttagaccatgaaacatttgcatacacatcgtctttaatgtcacttttataacttttttacggttcagatattcatctatacgtctgtacagaaaaaaaaaagctgctattttttttgttcttgatctttgtggatttaatctatgaaaaccttcaggtccaccctctcccctttctgctcactccaagaaacttcttatgctttgtactagagtgcgtgactttcttcctcttttcccggtaatggatacttctatcacataatttgccatgaactgttgggatgcctttttataaatacatcccccatccctgctcccacctgcccctttagttgttttcttaacccgtaggcttctctggggcacgagggcaggaaggcagggccggggcacccattcctgaggagggggccgcggttccttttcccccaggcctggccctcacagcatttgggagnctgtttacagtggcaaggncatgatacaaattcaggtcagaaaaccaagggttaattntttc

SEQ ID NO: 50596 - DNA, 274 bp, Homo sapiens
ggtcgacgataaatctaatacctgaaatggatctccaacaggaaactcgaggatttccaaacaatggcctagagtccttgttttccagagataaaagaaggccatcacatatacagtagcccaaccagaatcggagataaacaatgaaatagcaacaggccaattgagttcaactttgaaactcatgaaggagaattaaaatcaaatcagggaaacgaaaggtgaagtcaaaaaacgttgagaatagaagaactgaggagattgaaaaaatggg

SEQ ID NO: 50597 - DNA, 1520 bp, Homo sapiens
ttttttttttaaagtacccagaggacttttaattttaaaatgttcttttttggtcagtagccttagtaagagatttatatgaaaagaggtaggagtatataaatagggtgttaaatatatcatgtcaccaaaaaatttacccgagaaatagaagtttaaaagcaattttaaaaaaccttcaatcaacaatatataaataacttaatctgaggtaagagggaaaaatgccctgcaaacactttagaaaaacacatctctgccacactacaggaaataggacctttaccacatcttctgaatccccagttccctccatctaccaaagattttgggcaccagaactaaagatgagaatctctcccacccctaccacttccaggtaaacacaaagttcatgttcagccagggctaaagtacaagaaaactgaacccactctccatcccaccccatcctaggataggtggggccagggcagaaatcatggaatgctcaggactccacccctcccaagtgcactgaggtaagttctggaactgagcttcctcccaacaagccactcacctcctctgggagttcattcacctcctctcccttcctcaaaggacaatgtttaatctctgaaattcctcttgccttgtccaagagccaccatctggctgccactccaaccagtcctcaaaagaactcagcctccaaccctgaccccaaatctgtccaacctggttctatagtgtcttccatctgaccgagctctagagtgacagctccatatcagagcatcatcgctcaacacccctgcctcaggccaagacccaaatgtcttctcctgggagggaaagggagaaaaaaagcaaaaatcaataataaagtattttgcaaaaactcaagagggagaaaagattctgaatcggtgttctggtttgtgcagctgtttcttaaaccctctttctgttttggtatttttaacgtcccatcacacagtagagctgaatgctagaggaggtagattcagagcagagtcttggccagtggctgcctgcttccctaccagcctgcggaagcaccttgccaaagcactgcagtccccggctctgctggctgtgcccagtcctggtccttaagtgtcctgtctgccgcagagtccccagaaacaggaaagaaaggtgagaaatccaaaaggtgagcggagctgcattcactctggatagtctgggccaggagctcaggccgtttgctctgcactggtgccagctgtgaccaagtactgactgggctttgctagcatccctgggccagtgctgtctgccccaatcggccacagcaggtagcatcagcttttcctgcactgtggtatggaaagtaacaaggagctgccacagtgtctctcttgagcagcctgggcctgcatctcagcagcaccatcttgacggtgagatgctacctaccaaggaaggaagccagtctggctataaccagtggctgccgtttgatgaaagagctcaggagctgaggtgggaat

SEQ ID NO: 50598 - DNA, 1121 bp, Homo sapiens
  misc_feature (1)...(1121): n = a,t,c or g
ctggaacctaactcctatttggcaaatggatgtcacacatgttccctcatttgggagactagcttatgtacatgtatgtgtggacaccttttcttactttgtctgggctacatgccaatcaggagagtcttctgcctgtgttagttaaacatcaccttttgcagtgttttgtggtggtgggcattccagcttctattaaaacagataatgccccaggctatactagccaagctctagctacatttttctctgtgtggaatattaaacacattaccggtatcccatacaattctcaaggacaagccatagtggaaagaatgaatctctccctaaaacagcagttgcagaagcaaaaaaaaggggggaaaacaaggactacaggacaccccatatgcaactgaatctagcattattaactttaaattttttgagcctgcctaaaggccggatcttatcagcagctgaacagcatctacagaaaccagctgcaaagacagaagcagaacaactggtttggtggagagacctgataacagaaagttgggaaataggtaaaataataacttggggtagaggttatgcttatgtttctccaggccaaaatcatcagtcagtttagataccatcaagacacctgaaaccttatcatgagccagatgctggaggaagagattccgggaggatcccgagggacccccccagttgcagccatgtcaagacttgatgctgaggaggacccccaactgtcacgagcaacacccgttcaaacacagccacccacctggggacagatcaagaagctgtcacagatggtggaagaaaacctgaggaaagcaggacaaccactcacagtgaataatttaatggtagctatgatggcagtgatcaccatttctgtgagtattccttcaacaaaggctgacacagagaacaattgtacttattaggcatatttatcaatcttagctggtaataatgcctggatgtaaatcactgtatgacacagttacacatgctttctgatctcagtatttaccataataaatctgctcctgtaattgaggcatacaacccccaaaaacctatttgtaaacaggattggactcagttagcnnnccaaa

SEQ ID NO: 50599 - DNA, 805 bp, Homo sapiens
ccaagttcaagaacatcccttttaatcacaaaccactcatccacaaatgtggctatggggtaagcagtctaggctgggaccctttccagaggtaagtcaaggtcacgtccctgcccccttcctagggtggcggtggcctccagccaggggggcttccaggttaataccagagcctcggctactctggactcctgtgagctcttcttggctggaagaaggggggcattgtgggcctgctctgtcccaaggctccagaagctgcccctacccaggcctgcctggcctcaccctgcagcctgggtgcacccgcgggcagcctggggccccgcctacacaatgccctcagtgcgcttgctctgccagaccaccagtgccgtcaccagcagggtcaccgtgatggggaccacgatgaaggggtagaggatgctgccgggcgggtcccgcacggccctgcctgagatggggcagctcctgaagtagcggccatgcactgccaggaagaacctgtccacctctgcattgggccagaagcagcccagcttctccgccatgtgccaggtgcagtcggccagctccctgtagctcctgatggtcctgccccagtcacaccacagcgtctccccgacggcctccatgtctacctggaactgggtgaggcagagctcccggaggagggcaccgtagttagcctcctggcaggcagtggtcatgaagaggtgatgggccaggagcagccagaggccgcgccgcgggaggcggcacagggcccgggccatggtgcacagcggtgccgagtcgagtccgc

SEQ ID NO: 50600 - DNA, 429 bp, Homo sapiens
  misc_feature (1)...(429): n = a,t,c or g
ggtgtccctgcagccagggtgtccgggggctggccagtcagagaaagggggccatggactgctgtggcaaatagggagacaaggagacagaccctgcagtcctactacagtctggagtggggtcctaagaagaagggtcccacctcaacccctgtcagtgtccactgtggggtgggggctgacccctgcctttgattgtcattctcctgggaagcccagtctcagtccctcccccaacactgtccacactgcccctccccactgtttatttattgcacggatctaagttattctccccagccagagcccggntccctgctccccgggaaaagtggcgtatggccctgagctgggctttatattttatatctgcaaataaatcacattttatcttatatttagggaaagccggagagcaacaacaaaaaa

SEQ ID NO: 50601 - DNA, 352 bp, Homo sapiens
  misc_feature (1)...(352): n = a,t,c or g
ggtgtagcatattcacccttcaacaggcaggaagcaagccgtacccagaccagtaggccggacggagtccaatgcaaagctgtaccacagaattcagagtccagcacatcacactgacgtataggactccttgggatacaggtttattgtagattttgaaacatgtttttacttttctattaattgtgctcatcttcagacttaatacagcaataagaatgtgctagagtttacacatctgttcacttttgctccaatatgctcttttgacttaacgtcaagctttggggttgttgtgggtanagggggncaaactgctttgagaggaatgggacagttctgctgcctaaga

SEQ ID NO: 50602 - DNA, 677 bp, Homo sapiens
  misc_feature (1)...(677): n = a,t,c or g
ccgtgaacattgtgtttgtgtacaaggaaactatataaaggacttaaatattcttggaagagatctttcaaaaactataataattgacaactcaccacaagcctttgcatatcagctttctaatggaatccctatagaaagttggtttatggataaaaatgacaatgaactcctaaaattgattccattcctggagaagcttgtagaactgaatgaagatgttcgaccacacatcagagacagatttcgcttgcatgatttgctgcccccagattaagtacaaagacttgtcaaatcactgaagggggagagaatgcaggacccttttggactaagacaaaaacattgccattactgttgaaattttgcatttttgtaccccgtcttgcttttcttatctttggtgcccaataataattaaggggttacagaaagagactttatctatctcagatcgaatacatatagtaggtaggctaaaacagaagagtctttagaactagtgcaactccagtgaaatttttnatgtacaggacatctgcagtttataaagaattctgtttctgccaccagcagtttgacctgtagtcacacaggnttttatgataataacagagatgaaaatggactttnattttctctctgtttggtgctctaagtgggtttgtagccacttt

SEQ ID NO: 50603 - DNA, 601 bp, Homo sapiens
atacaaaggggccctccttaaaagggacaggatgaccttcccgaggaactcattggcctggggtagtttaagaagtaatgttctttctttctttctcttttccctacctcctgctaacccaaccagagatccccttccttgcagagagggtccggggcaggaggagatttggcagtgcctgcaggttgcctggccaggtggagagggggaaagaggaagggcaccgtgggtgtaagatgcctttctcctccacccatcgaaaccagccaccccttccctgtgccaccaagacagccttttccagtggccatcctaaggggaactcccaaatgggtgttgctggtggacacagatgctccccccaatggaagccccaagctctgaggtatgcgggtagaggctttggataggttttcttctgctcccctcttttatagatctaggctgcttggctgcctgtctttctaggcagtccccctagaggaaaaatgtaggaatttattttttctttaactgctgtgaactcactttgagggggtaggaggagggagaaacagcctgtgttttttatgcaataaagtcatcaactacatcatgaaaa

SEQ ID NO: 50604 - DNA, 338 bp, Homo sapiens
ttttttttttttaattgtggaatcagtgtaatgggaaagtgacctgccctggtgcatttggctgtttcatcaagttgccaccagcatttctaaggagaaagaaaccatttttagggaaatggtgatttaagataaagccacgaaactcacaaaattcaggtcgtatgctgccgtaattctaaaaatacattttgttttgacttgggtaattttgttcaggagaaaaataattagagacgaaactctaaagcttctggatttgataagtttgtcagtggggaagggacaatgctaccgggttgtttttttttggttttttttttttttttgagatgaag

SEQ ID NO: 50605 - DNA, 835 bp, Homo sapiens
cgctttccggccaacacagaggtgcctgaaggctggttggggtggtgaggcccgaggcagctcttgttcagcttctggaatttctgagcagccctcgtcagtacaagatggaccccgtagtcttgagttacatggacagtctactgcggcaatcagatgtctcactattggatccgccaagctggctcaatgaccatattattgggtttgcgtttgagtactttgccaacagtcagtttcatgactgctctgatcacgtcagtttcatcagccctgaagtcacccagttcatcaagtgcactagcaacccagcagagattgccatgttccttgaaccactggacctccccaacaagagagttgtatttttagccatcaatgataactccaaccaggcagctggaggaacccactggagtttattggtctacctccaagataaaaatagcttttttcattatgattcccatagcaggagcaactcagttcacgcaaagcaggtagcagagaaactggaggctttcttaggcagaaaaggagacaaactggcctttgtggaagagaaagcccctgcccaacaaaacagcttatgactgtgggatgtacgtgatatgttaacactgaggccttgtgtcagaacttctttaggcaacagacagaatcactgctgcagctactcacccctgcatacatcacaaagaagaggggagaatggaaagatctcattgccacacttgctaaaaagtagctattgaagtatatttgcgacttttgaaggctcctctttctggcccttccccatttgttgggatgggctgcaatctcatgtgcctga

SEQ ID NO: 50606 - DNA, 338 bp, Homo sapiens
  misc_feature (1)...(338): n = a,t,c or g
gctgtcaaccttttgcatggagagatcatgttttccttgccaaaagggaaagtttgaagactgctgtttgcttcaatgtatttattttacattaggggaacagaggcccagggagggccagtgagccctcaatggtgtctgtgaaacaggcgtaaacaagcctgggattcagattatcctgggagccggttncattggctgctttacacgttgactgcccttgttttgggatcccatccctgctcagtctttcctgagagcacagcagacccctcctcctcttcgccccaggaggatgtcagggaagtctgggggactccgtcccatggggccaaccc

SEQ ID NO: 50607 - DNA, 683 bp, Homo sapiens
acagccttacgaatttaaaacgactcactatagggaatttggccctcgaggccaagaattcggcacgagcggtgaggtcagcttcacattctcaggaactctccttctttgggccacggaattaacccgagcaggcatggaggcctctgctctcacctcatcagcagtgaccagtgtggccaaagtggtcagggtggcctctggctctgccgtagttttgcccctggccaggattgctacagttgtgattggaggagttgtggccatggcggctgtgcccatggtgctcagtgccatgggcttcactgcggcgggaatcgcctcgtcctccatagcagccaagatgatgtccgcggcggccattgccaatgggggtggagttgcctcgggcagccttgtggctactctgcagtcactgggagcaactggactctccggattgaccaagttcatcctgggctccattgggtctgccattgcggctgtcattgcgaggttctactagctccctgcccctcgccctgcagagaagagaaccatgccaggggagaaggcacccagccatcctgacccagcgaggagccaactatcccaaatatacctggggtgaaatataccaaattctgcatctccagaggaaaataagaaataaagatgaattgttgcaactcttaaaaaaaaaa

SEQ ID NO: 50608 - DNA, 277 bp, Homo sapiens
  misc_feature (1)...(277): n = a,t,c or g
gcttcatccatctgtccatctaaccattcattcaggcaactatccgtggatcctttaagcatcagatatgtgctaggtagtggagacacagagagcaactgatttcactaggtgctcacagagtgtgggcatgggggcaggagggcagatggacatgtgtattagtcagctcaggctgccgtaacacaataccacacactagggaggggcttaaaccacataatttattttcctatagttctggaggctagaagtcaagaccaaggnactggtagag

SEQ ID NO: 50609 - DNA, 1195 bp, Homo sapiens
tttttttttttttatccaggtggttttatttagtaaaattttacaaaagtcagggctgacttcttggctctgcccttcgaagagcacagttttccttagcagataactgggggaagccacgggcccaccagaggctctcgcaggccagtggtgcgacctcctgtccacaaccgtgagggacaaaggcctgtccttgaggctgctgggcaggggcccaggcagtaagtgagggcacctgcgaggctctgaggacacagcacatctgtacaccctcatggtgccctgaccacacagcagccagggcagagtgtgacagacagagggtttctgagcggtctcaacagctgtctctctggtgacgtttcagtgccttccccttttcctctgaactcatggatttggccacaagttggctcccccctggactaagcagcccagaagccatgcccaggggtccatccctgggcaaccccccaccaggtgccagcagcattcacatggggcagggggcccatgagtgccacctggaccccgacagcctgtcatggcatccagaaacctctgtctcacccttgctctgccaaggacacatcctccatctcctggtcagacccgagacaagcccagaacacaggacaggtcctgttggagagatcccaggaatgggcctggggtctggaaaacagctccacagacagctctggtttccacatcaacccagccaggaagaaaatgaaaaattcctcataaaggtacaaagtcctcctgattttagcaaacgtcgctattaaagagtgtcaaatttgaagcttgcgtggagtgaacatccttttccttggaatagtgatgtgctggccacctccgcatgagggggtcttcaggaagcggctgcatgtcatcagcctcccctgtttgctgccaggcggccccgagagcttggtctggatcagggctttgcaatgctggagacagaagctgctgacagtgaggagtccttcaggctctttgaggtcacaatcttccatgatgtgccctggcctccagaaaggttcttctcgcagcatctattccgagaacaagaaagaagttctcctggcaacgggactcgctccagaggcgctgagaagtagacgtggtgtgtatgctctgaagggctctccagagttttctggattcgttacacaatttatgtaca

SEQ ID NO: 50610 - DNA, 198 bp, Homo sapiens
ccaattgggtctgccttgagctgccgactgatcggcccttgggccatcggaatgtgggagacgggttttccccttcctgagcagcgtctcactgagccagtgagcaggaagcgcgcggtaggttgggcttctccaggaggcaccggtttgactccaatggggcctgcgggtacgggcggttaaacggtaggaacgtaa

SEQ ID NO: 50611 - DNA, 724 bp, Homo sapiens
  misc_feature (1)...(724): n = a,t,c or g
tgactttgttcttggtaaattcttgatactggtaggctctatcactgtccatgtcctgatctctacaaccctcaggtggctgggtcattgtccgtttgttagagatgtcctgtgggagatctactgccatgcgttttacctttctcctcctgcgcagagttctattcccaacattgtccacagcaaaatcagactcatgccatagaggtcttttccctcgaacattattatttaagtttgatgacggcctgcgctttgctactaacatttggtcatcagagtcactgtgatcttttttattattattgtgattctctctatagtccttgcttggttcttctaaactagaatcagagccttcacttaagcagtgaccagtctcccacgggtgatgcacattatacgacctccgttttctccctctccttttccttgcctggcgtttcagagggcaagatatacttcgagaatggtctcctgtttcagcaaatccacctcgagcttgctctggagctctcttccaatgctgagacaaggtcatgaaccagctcctccatggttctactgaaatgccagctggttcccggctgctggagctccgatcgggtgggccccggcggccccgaacattaacgacacccaggagcctggcctcgaagctcaggcccgtgaacagactcnaactacaacagcaccggcgacttnnaaagagccctgtgccgaa

SEQ ID NO: 50612 - DNA, 854 bp, Homo sapiens
tttttttttttttaaacaaacaaaatttattaaactttcaaaatacaaaaacatcatcaaaaagtcatagcatttctatacattagtaactatctcaaaatgaaattcaaaaaaattccatctacctaactatagtttgaagtaaatttaaccaaaaagttgaaacaccttacattctactctaaagaacattatacaaattaagtaacacataaatggaataatattactcattcatgaactggcatttttaatagttaaatatttgtattacacaaaatgatctgcagatataatgcaacctctatcaaaataccagtgacatacttcatagacatttttaaaaagcatatctaaaattcatatggtaccacaaaacaccctaaatagccaaagcaatcaagacaaaagaaggtatcaccctgactttgaaatacactacaaaactgtgggtaacccaaaacagtatgtcacttggaataaaaaccagagatataggccaatggagcagaagaaaaagagagcagaaatatatcagtgtatttacagctaactgattttaaatacaggtgacttttttttttaagggaaataacagtatcttcaataaatgatgtttagaaaactttatgtccacatgcagagaaaaaaaagtgagaccctcatctcacaccatatgtaaaaataaactcaaaataaattagccacttaaatgtaaggcctaaaactcttaaactactactaccaaaaaatagagtgaaagccccataacattggtctgggcagcaagttttttgatttaacctaaatatcccaggacacaaaaggaagaacaagtcagtcagatcacttca

SEQ ID NO: 50613 - DNA, 2413 bp, Homo sapiens
ctgagctctctgtggaggagcctggtcccgctgttctgctggctgagggcaaccttctggctgcgagctaccaagaggagaaagcagcagctggtcctgagagggccagatgagaccaaagaggaggaagaggaccctcctctgcccaccaccccaaccagcgtcaactatcacttcactcgccagttcaactacaaatgcggcttctgtttccacacagccaaaacatcctttgtgctgccccttgaggaagcaaagagaggattgcttttgcttaaggaagctggtatggagaagatcaacttttcaggtggagagccatttcttcaagaccggggagaatacctgggcaagttggtgaggttctgcaaagtagagttgcggctgcccagcgtgagcatcgtgagcaatggaagcctgatccgggagaggtggttccagaattatggtgagtatttggacattctcgctatctcctgtgacagctttgacgaggaagtcaatgtccttattggccgtggcaatgagaaagaagaaccatgtggaaaaccttcaaaagctgaggaggtggtgtagggattatagagtccctttcaagataaattctgtcattaatcgtttcaacgtggaagaggacatgacggaacagatcaaagcactaaaccctgtccgctggaaagtgttccagtgcctcttaattgaaggtgagaattgtggagaagatgctctaagagaagcagaaagatttgttattggtgatgaagaatttgaaagattcttggagcgccacaaagaagtgtcctgcttggtgcctgaatctaaccagaagatgaaagactcctaccttattctggatgaatatatgcgctttctgaactgtagaaagggacggaaggacccttccaagtccatcctggatgttggtgtagaagaagctataaaattcagtggatttgatgaaaagatgtttctgaagcgaggaggaaaatacatatggagtaaggctgatctgaagctggattggtagagcggaaagtggaacgagacttcaacacaccagtgggaaaactcctagagtaactgccattgtctgcaatactatcccgttggtatttcccagtggctgaaaacctgattttctgctgcacgtggcatctgattacctgtggtcactgaacacacgaataacttggatagcaaatcctgagacaatggaaaaccattaactttacttcattggcttataaccttgttgttattgaaacagcacttctgtttttgagtttgttttagctaaaaagaaggaatacacacaggaataatgaccccaaaaatgcttagataaggcccctatacacaggacctgacatttagctcaatgatgcgtttgtaagaaataagctctagtgatatctgtgggggcaatatttaatttggatttgattttttaaaacaatgtttactgcgatttctatatttccattttgaaactatttcttgttccaggtttgttcatttgacagagtcagtattttttgccaaatatccagataaccagttttcacatctgagacattacaaagtatctgcctcaattatttctgctggttataatgctttttttttttttgcctttatgccattgcagtcttgtactttttactgtgatgtacagaaatagtcaacagatgtttccaagaacatatgatatgataatcctaccaattttcaagaagtctctagaaagagataacacatggaaagatggtgtggtgcagcccagcccacggtgcctgttccatgaatgctggctacctatgtgtgtggtacctgttgtgtccctttctcttcaaagatcctgagcaaaacaaagatacgctttccatttgatgatggagttgacatggaggcagtgcttgcattgctttgttcgcctatcatctggccacatgaggctgtcagcaaaagaataggagtgtagttgagtagctggttggccctacatttctgagaagtgacgggcacactgggttggcataagatatcctaaaatcacgctggaaccttgggcaaggaagaatgtgagcaagagtagagagagtgcctggatttcatgtcagtgaagccatgtcaccatatcatatttttgaatgaactctgagtcagttgaaatagggtaccatctaggtcagtttaagaagagtcagctcagagaaagcaagcataagggaaaatgtcacgtaaactagatcagggaacaaaatcctctccttgtggaaatatcccatgcagtttgttgatacaacttagtatcttattgcctaaaaaaaaatttcttatcattgtttcaaaaaagcaaaatcatggaaaatttttgttgtccaggcaaataaaaggtcattttaatttaaaa

SEQ ID NO: 50614 - DNA, 493 bp, Homo sapiens
aaaataacaaaagttaaaaagtgtagtatgaagttaaaatgtagagtttttattagttttctctttgcttgtttgtttatgcattcagtgttattggtttaaaataattggttataagatagtatttacaagcctcatggtaacctcaaaccaaaaaatatacaacagatataaaaaaataaaaagcaagaaactaaatcatatcaccagagaaaatcaccttcactaaaaggaagacaagaaggaaggaaagaaggagtagaagatcacaaaacaaccagaaaacaaataacaaaatggcaggagtaagtccttacttatcaataataacattgatgtaaatggactaaactctccaatcaaaagacatagagtggctgtatggattttgttttaagaaagacttaataatctgttgcttacaagaaacatccttcacctataaggacatgcatagactgaaaataaagggatggagaaagaaattccatgc

SEQ ID NO: 50615 - DNA, 781 bp, Homo sapiens
tgagtacatctccagttgcccatgaaagcataagtttgttttcctcagctgaggcaagtggtagagtatacaggataacgaagtaacatgtaaaaggcaggacgcacataaaggtgtacatggctattgtttcacctggagaaaccacatgattgggacctgaaggtttactgactgactacaggggctgattgtgaagcacgaggaaccccatgtgtgttgagactgtagggtgagagcacacaattattagcatcatttctgagtgatctcacagattttttttccttgtgtttgttttgctttttgacaactgcttctcccacgttccttgcaattctattctctcaccttcactttactatttgtattcgatggaccaggataattcaggcaaggttaccttgtaaacttgaattggccacacaccatgttgtcacccagctggctatgaagtgaataatggtactgaaagtaaacctgaagacctttctcagatctattttaagtctgagtctgaccaaccatggaaaatattcgacatgaattaatgtagagaactataaagcatttatgacagctccaagaaaaatcatctactctatgcaggagatatgtttagagacctctcagaaaaacttgcctggtttgagggtacacagtaccattttaatcttctgaaaatatctgtattcctgctctttttctgctgtcactgtcaatctgctatatttttcactatcctattaaaatattactgtctccttaaaaaaagtcgacg

SEQ ID NO: 50616 - DNA, 1131 bp, Homo sapiens
  misc_feature (1)...(1131): n = a,t,c or g
aagcatgtaataatgatttaatgtacattgtgcacaaatacaatatttaaaaaataaaaatagaaaatcaaaattcaaatacaaaagtaaactacattcatcactccaaaatatcttttaaggagaattgttaaaactgaccaaaagagtcaactaaagcctgaataaaattttgatgctactgttacattaataattgaacagcatttacaagaaaactatatactccacaaaatgtatgtgttcagtcttagtcacttatctgctcttaagacgtaaataaatgttcttaggggggaaaaccaattatccagtcctccccgcttccttatttgtctggttcccaccactatcctctccccgacctnnnnnnnnnnnnnnnnnnnnnnnnnnnnnnnnnttctagcatgatattgtctatgtggtagagccttaaaaaatgttatttctttcagatatggtctacaaatagaaaaaataatattaatgagcattgtcaaaagttttacaatattttgagaaaatcacgcataaactattaagctgtatgttccattggaccacaactttatggttgagcattgttaaaacaaaacataactatagacatcattttctggatgactctcattcagaattgctggtattcctggctcttctttgggtttttctttcatttcttgaggaaaagtataagcatctttagcatcttcctggtgtgctttaggatcctggccttggggccccacctgtttcttggtgtggttctggaaagcattctttaggcacatccttatttttatatgtctcagtagagaggtcttcaggccccggtgtttcttggtatatttcaggtgaatattcttcaagctgggatgtttcttggtatatttcaggtgaatattcttcaagcccaggtatttcttgatacgtttcaggtgaatatttttcagacccaggagtttcttggtttatttcaattgaatagtcttcagaatgaggtgtttcttggattgttttatgagagggggctttaggcacaataatttcgttacatgttttatgaggaaggtatttaggtncagctgatncttggtgtgtttttgtagaaaggnctttaggctcagctat

SEQ ID NO: 50617 - DNA, 2295 bp, Homo sapiens
ttttttttttttttaactttaaacaaatttttattacacaaaggttgtcacataattggatacttctctactttgtacacaattattctcactctccacagaaaggctgcttaacttctcatctggtggtggcaagcactaaaatcctgattttaacagaatagtagtaaaaatgcctcagtgatttaagttgaaagcagtacactgggtacatggctcttgtacccagtatcaggaatgtacaaatgttttttattcaaaaatacaaaataaattatctgtaggcatggacaatgacagcagtaaaccattatatattttgtcaactgaaaccagtaactgatggttatagtgattttcagccagcctttttcttcattttctccaactgacttctctgaagttattggtgaggaacactgccttgggcttcctgtcacagttcattaataaaggtaaagcactagtctaggagttagaacatgccacctcccataccacctcccattccacccattgcacccattccagggtccttctcttctttaggaatttctgtgactacaacttctgctgtagttaacagagaggccacaccagcagcatccaataaagcagttctcacaacctttgttgggtcaatgattcctttttccaccatattcacaaaatctccagccatagcatcataaccaacttctgaggaactttgcataattttctcaactatcaaagatccttcaacacctgcattcttagcaatggtcattgctggaattttgagtgttcttttaataatttctataccaattttttgatcttcattagctggagtcaatgagtccaaggctggaatgcatcgaaggagggcacaaccccctcccaaaacaatgccttcttcaacagcagctcttgtagcattaagggcatctgtaactctgtctttcttttcattcacttcaacatcacttgtcccaccaaccttcagcacagccactccatctgaaagttttgcaagccgttcattcagtttttccttttcatattcactagttgtgacatctaactgctcaatgatttcttgaatacgtttttcaatttgagccttgtcaccttttccttttaagagcatggcatcgtctttggtcacaatgacctctccaacttttcctaagtcatgaggctgaacgtcttcaagattcagggtcaatccctcttctccaaacactgcaccaccagtagcaatagccatatctttaagctggttctttctattgtcaccaaaccctggagccttgactgccacaacctgaagaccaacctttagcctattcaagacgagtgtacttagagcttctccatcaacatcttcagcgattatgaccaaaggcttacggtgagcattggcaatttcaagagcaggtacaatggactggatactagaaattttcttttcactcaacagaacataggcatcctgggaattcacatttctgaccttttgatgtattaataaagtatggagaaatatagcctcgatcaaacttcatgccttcaataatttctaattcatcattcagtgtttttccatcctttactgtgatgacaccctttcttccaacttttttcattgcatcagagatgatattgccaatttctttgtctccgtttgcagaaatcgtagcaacctgtgcaatttcttcaggggtggtcacaggtttagactgctttttaagttcagcaattacagcatcaacagctaacatcacacctctcctgatttccactggattagcacctttgctaatcttctcgaagccttccttggctatagagcgtgccagtacagtagcagtggtagtgccatcccccagcttcttcatttgtgttattggcaaacatcttgaacaaagtttagctccaatgtttttgtatttatcttttaagtcaattgactttgcaacagtcacaccatcttttgttactttgggacttccccaactctgctcaataatcactgttcttccctttggccccattgtaacgggccacagcatcggctaaaaggtctacaccttgaagcattaaggctcgggcatctgcaccaaattttacatctttggcataagcccgagtgagatgaggagccagtaccctggacaccggtctcatctggcgaaagactgtgggtaaccgaagcatttctgcggggcggcggcaagggcgtgcgctcggcgagacaggtcgtcggcggcgagtgagggacatgagtgcagggcgcacagccgcaagtga

SEQ ID NO: 50618 - DNA, 728 bp, Homo sapiens
ttttttttttttttaaggaatgaactttttaatgtttttctgtttccattctaacaaacatgcatttttgccttcagaaaataatagagtcaatagctgtgcagagttgaagaaaaacgtcctctggtgttccctctgcatttatcttgtgtagctgtgtttttgtctcgtagtaggcgatcacggggatggacgctcggtagtaggcttctaggcgcttggcgatggtcttggtggtgtcgtccacaggcaggctgctccggctcctttggagaaggcggttggtcatggtgtctgccgagcagtccatacagatcaccaactgtgggtctccaatcctgcgtccgaactcttccccttgcttcacctcccgaggatagccgtcaatcaggaagcccctggtgtccccgaggctggccaccatggcctccttcaggagctccaaaaccatgcctgagggcaccaggtctccacgttccataatgtctctgatcaatttgcttctttcagattctgatgccagttcctcacgcaggagctcgccagttgagagatgtgtaaatccatatttttccaccagcttttcacactgtgtgcctttgccagagccaggaccaccaattatgaaaataattttacactttctcaaatcttccatgaaacctcccatagtgtcctctccaaatacatttaactggtcatcacccaatcacgtcttctgatatggg

SEQ ID NO: 50619 - DNA, 1267 bp, Homo sapiens
tttttttttttttttgaaatgaaatgaatcatttaatgagaatcttcaaactgtggcactggctgagtactaagcaaatccaggggaagacgtgaagcccaccaaggcgcacagcctcaactccggtgcctgcccctgatctgaaatacaacatccaagagctcgaggcctttttaccacccgtttgtggagcacctgcacctttctgacaacaactctcaagccaactttcagagagaaaacatgaagggaaaaaatagatttcctttggccagacagctctttcttcctcaataaataggaaccacacttggaacaaagagacagcgtgagctcggtgggggaagcacaagctttattggctgaaagttcttctcaggagcctggtctgctgggactgcatgttcctggatgggctcccccaggcctaagctccaggtttcctctggccttccgaaggattttgtgggttacgaccaattgatcaaagatgactttttcctggcgcttgctcagctgcaaaagcttcatggtgttttgcaacttcttttcttgttcaaacaattttttatgtagtttggtgacctctgccttcatttctccaatctgctcacagtgaagggggcactggccatcctcggggagtgagactctccagagaagcttcagccgcctgtaggcctcttccagggtcagcttggccgtgctcacactgctcacaaacttgctcagtggtgctggggtgtggaccctttgttcccagctcttgacttgtggagctgggagcctcttgggtttgaatgtccatttcagcaaggagcctctgtccctggctgatctgtttgagcagggcctcatagtcctcaatcaggcccaggacatggcggccattcttgctggcccacaggtggtggccagtgaccaggcgggacacacacggagtgctagttgccgaactgccactgtcgcaggagagggagtccgtgtcattcccagagagtggaggagtctctgaaactgtaaaatgagaagtaggatgtaaaatctgtttcaggtaacactctgcgttcaagacgcttatgatgttgaagctagctaggagggctagaagaggccctcgtgcccaaatgccacccaacacaagcccagaggggaaaagaggcacgctcctggacctctgtatattaccccacactgggcttatgagtcatcttgtaggagaggctcaagtcaactcaaccaacacttatcaaccacccactcggca

SEQ ID NO: 50620 - DNA, 886 bp, Homo sapiens
  misc_feature (1)...(886): n = a,t,c or g
gtcagaagggaatctttgataagaggcccacaggcagggaaagcgaaatagggttgatgagaccaggggagacctaaaaaaaaggcagctttgtgtcttctagctccaaatatacctgccttttagctcacacactgtcctggagttctcagacctttaggggccctaacacagttcagttcatacaggggttcaaaagggacagtggcccatttgggagacctttaggatcaatgggaatcaattccattgttttgcctcagagtaaagtttctggctcggggacaattataagttgcaaaaaggatagaggcatatcccaagtcttccttcattccacaaataattacaaacaacctactgtgtgccaggcactattcttagcactggaaatacactagtgaagaagcagatgaggaccctgtttattgtttctctccaagaaattctccaagaatattgtttcttggagagaaataataaataaacaagacaatttctgaaagcaataagtgcaatcaagataattaaaggatgctaaagtgtgacttgtggggattgggagagagatgcacagacaatattaaagaggaggcattcgagctttgttgtgaacaccggaagtaacatgccgagcgcctggggggatgggaaactcctataggcaccccacaggctaacagcaagtaggacaagacaaaaagggcaggtgggacatggtagagatggaccctacccaggggaaacagctcccttcagcatctttaggccttgccccacttttaggccacacataccccacgtgttgttcctggagtttcagtgttgccccacctttcatttccccacacccttcacttaggtttngggcagggttaggggnggg

SEQ ID NO: 50621 - DNA, 726 bp, Homo sapiens
  misc_feature (1)...(726): n = a,t,c or g
cccatgtggagaaatcagatcactgcttaatgaaaggaattgaccaccgtcagctcgaaaatccacccacagtctagaattgggtgtttatcaggcagaagttctctccaaagacatttttagcatgtgtcaacaaactataagagagaaaacccaaagcttaaaggagggtgtgtaaggggagccttnnnnnnnnnnnnnnnnnnnnnnnnnnnaagaaactcaaagcaactcgattctcctagtaagtctggcatttctttttttgttcagtagggaggtggagaagaaattaacccccatttactagcaattgcttggggcaagtctcaccagggaacatcagaatgtgggctaataaaggaatctgtatgatgctccgacctcttcagggtccttgcaagcctcttgtctttcctcatcatcaccacacccacctggggcaggtggagctggagtcctcacctcctatatatgacatatgagagaaccgagggcacaagcagggcagggtggcttgcccaaggatttcagtgggttcctgatttttacctgaccacatcgctgctatgtaggcctcatctcagtctctcgggactgggaggggacaaccccatgggctgttttatttacaagacaaccaggggaagcaaggccttgttatttcccttagtggccctgcacatttcccggggttgcagccaaagtttgcctcagtttttaatt

SEQ ID NO: 50622 - DNA, 339 bp, Homo sapiens
ggaggcggagggctagcgagccaagcggtggggacgccgctgccttcctctttgcctgtctcgccgccctcctagacacgctcctcatctacggatcctaccctccccgctcttgcaagcattcactcggccggtcgcctgctgaccctccttcgccacaggctcgtagcggaggcagcagcgaggcatgaagacccccaacgcacaggaagccgaagggcaacaaaccagggcagctgcaggacgggccactgggtctgcaaacatgacaaagaaaaaagtctcccaaaagaagcagagaggccgaccttcatcccagccccgcaggaacatcgtggg

SEQ ID NO: 50623 - DNA, 1784 bp, Homo sapiens
aagaccacagaaggctgaccgttctgtttaattatctgtaataatccttaaaaatcagcacacaaatccattccaggtagctttgccaccccacctgctgtggtggcatttgtccagatgccaccacccccctaagagtgggtcatcctgggggagcaaggcctgagaaaggaaaggaagggaaaggccccctagtgcctgccccacagccctgaggaaggcacatatttagcctggcctgagacaggacaggaaggggccacagggctgagtgcagggacaaaggggtcagggtcccaagtgtccgggcccccagctacccaccccatgtctgtttttggttttgtcattaaaaaaaataaagtgacaaatactggtggagaccagttgttgcactgtcttctgttaaaaatacggaccaagggcatagaaagtctcctcttcagcaggtcctgcttcacaggatgtctgcccgcttgtcccgcacacggcttcgagccttggtccgggctttgaaggcagcagcattgtacaggtgcttctcaaagcgtggaaccttgcaggccttcagggcagtggcatccagcaacagcacagggcccaggccaaagatgtcacggagtagctcattgttctggaggtggtggtgcatgcccgaacccagcacttccttgaaggcagcgtagatccggtgccgagcccagctgtccatgtagagcacctcaaagccgaagcgcactatctcttcttcgcattcaccgccctccacggagtgcagcacggcgcggaaagtagagcgctggcgccgacgatcagccttggcacggtacttgttactgtcagtggccagagtgcgcaggacactgcagagggcctccatgtcctcgtaaacaaactcctcctcaaggtcccgggcaagctcaaagagcagtgcaatggtttcaccggcagcgatccgcaggttcacactttcactggacaagagctggggcagccggggcagctgcctgtcaaggatgtggctgatttgggtgctagggcagatggtgagcagcaatgcccaggcctgcagggcagcagagagcaggccgtgcaggctggcaggaaccacaggacttgtggagctgccccccaagccatagaaccggctgaaaacactttctaagcaggcaaggcaagagaccaggtcctggatgtcagcggcagccacgtagcagcccaggccaagggcagaagcacagtggagccgggcagcagggctagctgtgctgtcactgagcacagagaccagcagaggctgcaggctgtgaaacagctcctcacccttaggtccagggcccagctgcacgcagagcaggcctagcacagcagcagccagggcttgttcctcgcccttccctttcttgaggcacttttccagggcatcggctagcgtgaggcggcgctccagcaagaagtcggggagtaggcgggacgctagggccaggcgcaggctctcaagagcaccctgccgggtcttggcactcttgtctgtgagacagtccacatactccttcagcttttcctcaaggtcttcctgctggccctgctcatccacgacatcccccccaaggctgtcctctgcagtggtgctgagaaggctggggcattcactggcggtgctgcgggcctcactggctgcctcatcgtcactggaacccgagtcagcttgggcactgctccgggcacctcctccacggcgctgaccacccttccggagcgtgttgcccttacgggcgcgaggc

SEQ ID NO: 50624 - DNA, 1095 bp, Homo sapiens
  misc_feature (1)...(1095): n = a,t,c or g
ccaggaagaggtaagtagttttatttttttcaacgtagaggaggccacgtcagtgaccagcactttccccagctgtggggcaaagaggcaatttatggctcaaagaacaaccttaaaataaccctccctcagtcctaaaatgcagtgtctaaatttacagaaaaacccacaggttcctggcaggcaggcacagcagctggcagtcccggtgctggcagacgcaggacccactgcacacgatgctttagtggggctgccctccatcaaactctccgctcccccctcctcccaagtgccccaaggccccagttccaagcaaccagaccagtgctgtgattttttttaaaagatgcaaaactttttaattaaaaaaaaaaccaacccagcaaaatcttataaaaacgaaccaggtagcccaaaaatgcccacctgtctctctatgtacagtaatacaatatttgtcagtcactatatacaatattataaaaaatgccgcagacagtacaaattaaggcccttatttctcacaaggcatcacaagcctcgatcctctagtgtagacccggtgggagagaagatgccacttaaattattgcaccattttgaaaaacaaaactcgtcaaggaggatcgtggtcttttcccaccgggccttcagtcacagacgggggctggggtggtggcgtcgtcgtcgtcgtcatcgagggagaccctctgtagccacgctgtgcccggcccggttctctgggtccaataaataccagtcacagtttgggaggggtgcgcccggcgcgtgggaacccgccacggccgcgcgcaggtgggcgggggcgtcccggctacatgtgccgtttcatgtgcagcgccaggtgatcggagcgcgagaaggcacgatcgcacagatggcactggaatggccggtggcccgtgtgctttcggtagtggcgcgtgagctcgtctgagcgcgcaaacttccagccgcagccgtcccagttgcagtggtagggcttctcacctgtgtgccgtncagatgcgccttcagatgcgaactcttggtgtaggtcttgccgcagcacgngtagctgcaggtgtgagt

SEQ ID NO: 50625 - DNA, 434 bp, Homo sapiens
agcgtgacacgtcgatgagatctggctctgagccgagggcgagacaggagtattctcttggcctctggacaccctcccattcctccaaggcatcctctacctagctaggtcaccaacgtgaagaagttatgccactgccacttttgcttgccctcctggctggggtgccctccatgtcatgcacgtgatgcatttcactgggctgtaacccgcaggggcacaggtatctttgggcaaggctaccagttggacgtaagcccctcatgctgactcagggtggggccctgcatgtgatgactgggcccttccagagggagctctttggccaggggtgttcagatgtcatccagcatccaagtgtgggcatggcctgctgtataccccaccccagtaattccacagcaccttgtacagtaggcatgggggcgtgcctg

SEQ ID NO: 50626 - DNA, 722 bp, Homo sapiens
  misc_feature (1)...(722): n = a,t,c or g
tcatctgcaggaagagcataaagaagatgctggaagtgctggtggtgaagctccctctctccgagcactgggccctgcctgggggctcccgggagccaggggagatgctacctcggaagctgaagcggatcctccggcaggagcactggccgtcttttgaaaacttgctgaagtgcggcatggaggtgtacaaaggctacatggatgacccgaggaacacggacaatgcctggatcgagacggtggccgtcagcgtccacttccaggaccagaatgacgtggagctgaacaggctgaactctaacctgcacgcctgcgactcgggggcctccatccgatggcaggtggtggacaggcgcatcccactctatgcgaaccacaagaccctcctccagaaggcagccgctgagttcggggctcactactgactgtgccctcaggctgggcggctccagtccatagacgttccccccagaaaccagggcttctctctcctgagcctgggccagggacttcaggccgttcctgggccctgcacatgatggggtttggtggacccagtgcccctcacggctgccgcaagttttgcttgcagattgacctcattgaacttggaaggggttaaggttgacccgggaggaagagttcaaagacaggggcacaggtttatttnagagcttgagggggcccttgggaacttttgggccattnaggggaagggg

SEQ ID NO: 50627 - DNA, 1340 bp, Homo sapiens
  misc_feature (1)...(1340): n = a,t,c or g
tttttttttatctgcacatactaagttgcttttattaatccagaacggcatgcctacagatactgtacagcatgaacatttattcattacaaaaatggcttccaaaccattaaaaatgaacttggaataagagcataaaacggaacagtaacatcacaactgttaggaaacattcaaagtattcacaaaaaatgttatagttagcattttaataaaccagagaaaaatcggagacagttttacaatcgcttcatgtcaactacaatggcactgaatgaacaggtttcagctttatacagcattttgcaacatcaacatgcctaggttttttttatttttaaagtctgctgcctactcgtatgtaatatgtgtacataaaagcggcagctggtttttcgtttaagagtaatctaatatacagaattttggcccttaagggtttatacctcttcatttaaaatgctttctggacaatctgctaccaaacacattttgttataggtgacattaaaactacatacaaatctacctatgtaacatcacagcaaaacatgatgaacaaaaattacagcatcaaaaagagggagaaagctaaattcactgagaattttggcacgtaaagttttgtacacggtcagtccgggtcctaagggcgcagggtagggcatcccactgggagttcaaaggggaaacgaagatggttcccactgctgctcagacagtgtcgctaaaattccctcactcattttcaagtcttgttttacataatggcttttaaagccaacttttgttaatgctactgatccttaatgcaactattaatgtccatttggtgacatctgggtttcatacagaaaaaaaaaagtcaaaaaggggaaaccaaaaatatatatacacattttatatataaacttaaaaaccttgtacaaatgagttgttatatataagatgcttatgcctaagggggaaaaaaactttatacagtttcaagaaaaaggaaaacatatttaaaaagggacgacatacaggtacgacaagcaatctctaaagcaataaatactactggcccaacagcgttgtgattctattaagtgttgagtagcgtcccctccccccaaaagaacaacaccatggaacaaggtatattaacacatttttaccctttgtttctgtacatttaaacaataacaagtaacatcacaataagagttgtttcacacagaaaaaaaaaaaaaaaagtaacggcactgcattcatggtgccttacggtttaaaaaccagatgtaaaatgattggtncgcaagctcgtatttaatacaaataatacagaacgaactcct

SEQ ID NO: 50628 - DNA, 461 bp, Homo sapiens
ctgacaggctgggaagcatagcctccagccagaagccagaaacagactcttcaaggaggaggtaaaggaaatagcaatttatgctgactggaatggccaaatacatttatttaataagctccaggaggagtcatgaatatttatggaaggagaaatgcatgcatgcacaattgagtttctggcttcttcatgggtcccatgtacaaaaaatggcagtgttagcatgatcccagggtgcagttttcagccctctgacattaaaaggtgaagcagaggacatgaaaactcgctctgtgcatcctctgtacgctggccagaacctctctgttgtgggtggtctcttatcaggcaagaaaggagaggttgatatccggtagtggaggcttttgaaagggctggtttcctgttaaatccttagggaagaaagcctcatcatggttagcaaaggagtgggtttaacg

SEQ ID NO: 50629 - DNA, 387 bp, Homo sapiens
gcgggagtcacgcggtctctctgcgctcttccctcaaaactctttttgtgaaatgctgctaccagtttactaacaaaattgcgaagaaggaccgcgtggaaggaaggacggcaaagtgagttcagaactctatagcaaaccagctataaaaagcgttagtccctcacccccaaagaggtgcggacactttccagcacctgaaagctggggcctcagttgcaggcaggcacagaaaacctgtgggagaggtcacctttaacacagcaacagaagcacgcatctcatctctcttgcattttctgttctttaatttggccctgagtgtcttgagacagtgggccatgccactgcctctgtttgctccctacccagccactgtcaggccag

SEQ ID NO: 50630 - DNA, 1519 bp, Homo sapiens
ctatggcggcaattcccccagattcctggcagccacccaacgtttacttggagaccagcatgggaatcattgtgctggagctgtactggaagcatgctccaaagacctgtaagaactttgctgagttggctcgtcgaggttactacaatggcacaaaattccacagaattatcaaagacttcatgatccaaggaggtgacccaacagggacaggtcgaggtggtgcatctatctatggcaaacagtttgaagatgaacttcatccagacttgaaattcacgggggctggaattctcgcaatggccaatgcgggggccagataccaatggcagccagttctttgtgaccctcgcccccacccagtggcttgacggcaaacacaccatttttggccgagtgtgtcagggcataggaatggtgaatcgcgtgggaatggtagaaacaaactcccaggaccgccctgtggacgacgtgaagatcattaaggcatacccttctgggtagacttgctaccctcttgagcagctcttctgagatggccccagtgaaccagcttctagatgacatagaatgacatgctaatgctaaattcattttgggctttgcaagtcatgaagcttaggaggcctggcatcttgggtgagttagagatggaagtacattttaataggatgcttcttttctcttcccccagtgcctaggttgccagagcatttgcacaaatgcccctgtttatcaataggtgactacttactacacatgaaccataatgctgcttcttgtgcatgtctgctctgatataccgtcgaacaatgtagcagccactgtcatttctcagtggttttgcctaaccaaacttcttcctaaggagatttatattctggcctacacagcagtccttgatggctgacagccacagaattccaaaccaagtagtgtctgtcagccctcttaactctgtgcacgccctatttcagtcttttacatttgttcttctagggaatgtatgcatctctatatatattttccctctcaaaaccagaacatcaacagtgctgtttctgacacttcagacatcccacgcaaagccacattgaatttttgccaaatgaaaaacacatccaacaatcaagtttctaagaaggtgtcaagtggggaataataataatgtataataatcaagaaattagtttattaaaaggaagcagaagcattgaccattttttcccagagaagaggagaaatctgtagtgagcaaaggacagaccatgaatcctccttgagaagtagtactctcagaaaggagaagcgccactcaagttcttttaacccaagactttagagaaattaggtccaagatttttatatgttcagttgtttatgtataaaaataactttctggattttgtggggaggagcaggagaggaaggaagttaatacctatgtaatacatagaaacttccacaataaaatgccattgatggttgaaattaaaaaaaaaaaaaaaaaaagtcgacg

SEQ ID NO: 50631 - DNA, 1273 bp, Homo sapiens
ttccgtggagccagggcgacaagacggcgagggcggcccgggcccggcggcgctgccctgcacgctggccatgtgggagttgggccactgcgacccccggcgctgcacgggccgcaagctggcccgcctggggctggtgcgctgcctgcgcctgggccacagattcggcggtctggtgctgagccccgtgggcaagcagtacgcgtcccccgcagacagacagctggtggcgcagtctggggtcgccgtcatcgactgctcctgggccaggctggacgagacaccgtttgggaagatgcgagggagccacttgcgcctgttgccctacctggtggccgccaaccccgtgaactatggccggccctacagactttcctgcgtggaagcgtttgctgccaccttctgcatcgtaggctttccagaccttgctgtcattttgctgcggaagtttaaatgggggcaagggcttcttggacctgaaccgccagctcctggacaagtacgcggcctgcggagcccggaggaggtgctgcaggcggagcaggagttcttggccaatgccaaggagagcccccaggaggaggagatcgatcccttcgatgtggattcagggagagagtttggaaaccccaacaggcctgtggccagcacccggctgccctcggacactgatgacagtgatgcgtctgaggacccagggcctggcgccgagcgcggaggagccagcagcagctgctgtgaagaggagcagacgcagggacggggggctgaggccagggccccggctgaggtttggaaaggaatcaagaaacggcagagagactgagggttgcagacacatatatttttgaggctgggtgacgagaaaatctagagacatgagggacataaatgggcctggcagcctcggctctttgcggctgctggcaggactgagctgtccgggttctccccacacttcacagcacagctgtgctctgtgtcctgcctcggcgctctcgcaaatgaagctgcaggccaagaagccccttgtgagtctgtttttcacactgggcctggggaagggttggggcgaactctcggctctgcctgggaagggttcgtgggagcaggtttcagggtgggccacggatatgtgcgtgaaggacagctgaccagttggcacgggagccctttcacacttgaccaccaagcctttgggttgacgtccctggccctcagaagttgacctcaagggggaaccttttcccccgggccttggggaagccccgtt

SEQ ID NO: 50632 - DNA, 524 bp, Homo sapiens
tactgtgaacattttattttcacaaaacaaactttacagattttacaatctcccaaatttcacttatttaaaaataggagagacaaggcaacctagactccaagattgcaggcgtgaaaaaactagtaccagatattcaagttatatatgcaaactgcattttatataccatgaaagtgaaatgtgacaaacactcactagtttcaagtgtaccttataagaaacacatggacatacttgggttttttaaccacatagtctcatatcaataaacatctaagtatctgacatgtatttttccattaaaggtaggcacaactctatgaatatcaaattatatcaatcatttgctttttataatcttgactggaaactgaaaaattaagaggaattgtaaagttaagtagccgaaaatgctacttactgcacaaaagcacatcatgaaaaggaatgctagaagtagttctcctcaggaatgggttttgaaatttaaatattatttatcagaaagttaagcctcagtg

SEQ ID NO: 50633 - DNA, 428 bp, Homo sapiens
ttttttacaatttaaaatttctaagtaaacttgaaaatatctttcaacatttatttaaccataagcacacaaaacatgaaaatatcaaactgaaaactagtcttaaacttggaatcaaattactttgtcaatgtgagaagattcaggcagctctcagtttataaaataatctacagagacaaatgatggggactgttttaattagcattaaaaagtattatgctgaaagcaacatttagattttttttggcctcactgtcagtattaatttattatttactgcattaaatactacacacaatgggaaaacagtattttctattatatcaggttatatattcccaagttataaaaataaatctttctgcaaataaaaaacaaaaacagaatagtctgcattataagttttaaaaaatcccacgcgtccg

SEQ ID NO: 50634 - DNA, 440 bp, Homo sapiens
  misc_feature (1)...(440): n = a,t,c or g
tttttagtcattgttgaactatctgaactttattttaaaagattcaaatataacactatcctgtttctgatgagctattaaagccaaaccatatatgtagaagacatttcttcaatctgtttcgctggcttcttgaaaattttggaaagatatttatcaaaatagcatacaaacacctaataagagtagtaccacagttagctgaaggcaatctgcactcttatagggttgtttccttaaagtaggagtcagtgggcttacatttctctaaataataaggctaggcactgcaggtatggttactgttatggggatattctttaccaaattttccaaattngcctatggaaaccncttggggcctggatatataaatggaatnggggaaatatttatggtttttaaccagggatcctcccggtatggattanggtttatag

SEQ ID NO: 50635 - DNA, 964 bp, Homo sapiens
cttttcgggcagcatggaaatcattgaggtctcctgagaagaaagacacttgtgacttctatagacaatttttttttcttgttcacaaaaaaattccctgtaaatctgaaatatatatatgtacatacatatatatttttggaaaatggagctatggtgtaaaagcaacaggtggatcaacccagttgttactctcttaacatctgcatttgagagatcagctaatacttctctcaacaaaaatggaaggggcagatgctagaatcccccctagacggaggaaaaccattttattcagtgaattacacatcctcttgttcttaaaaaagcaagtgtctttggtgttggaggacaaaatcccctaccattttcacgttgtgctactaagagatctcaaatattagtctttgtccggacccttccatagtacaccttagcgctgagactgagccagcttgggggtcaggtaggtagaccctgttagggacagagcctagtggtaaatccaagagaaatgatcctatccaaagctgattcacaaacccacgctcacctgacagccgagggacacgagcatcactctgctggacggaccattaggggccttgccaaggtctaccttagagcaaacccagtacctcagacaggaaagtcggggctttgaccactaccatatctggtagcccattttctaggcattgtgaataggtaggtagctagtcacacttttcagaccaattcaaactgtctatgcacaaaattcccgtgggcctagatggagataatttttttttcttctcagctttatgaagagaagggaaactgtctaggattcagctgaaccaccaggaacctggcaacatcacgatttaagctaaggttgggaggctaacgagtctacctccctctttgtaaatcaaagaattgtttaaaatgggattgtcaatcctttaaataaagatga

SEQ ID NO: 50636 - DNA, 254 bp, Homo sapiens
cggacgcgtgggtaattgggctatttggcagcccagtgaacctatgtactaatggcaagttaggggcaaatggaaatggacacatccgataaagttgaaatgtatgttttaatctttcacagaagtattacaccttgaatatttaaaaacaaaacttttaaacttcctaataggtttatgatgtttgttttcatttatatggacataatccttcatagctcagtttatatgccattgttgtattagaagggatc

SEQ ID NO: 50637 - DNA, 436 bp, Homo sapiens
cggaagttgagcggcggcaagaaataatggcggcagctacgggggatcctggactctctaaactgcagtttgccccttttagtagtgccttggatgttgggttttggcatgagttgacccagaagaagctgaacgagtatcggctggatgaagctcccaaggacattaagggttattactacaatggtgactctgctgggctgccagctcgcttaacattggagttcagtgcttttgacatgagtgctcccaccccagcccgttgctgcccagctattggaacactgtataacaccaacacactcgagtctttcaagactgcagataagaagctccttttggaacaagcagcaaatggagatatgggaatcccattaaaatccaggcactgcttctttggaaaaccctgttactccttcaacaagttcctctctcg

SEQ ID NO: 50638 - DNA, 681 bp, Homo sapiens
ccctttcttttatgcatcgcctgaacatgagaaggtaactcttttttcattctgtggtttacttggctgtccaaactgaactttagaacctcactattaatagacttttctggacccagtcgtactaaatttatatctccacagtttcctaaaggattcttcttgtctttacatttttctttgaattcaaggataatttttttcatgagttcatcaacagctgcattggaaggtgcacacacgaggacacggttttgtttgattttggcattggagttttcgtctgaatgccccttcctctggttctctgtcagtagacgatagaggaggccaacaatagtttttgattttcctgttccaggtggtccatgaatcaagcagattttggcaactgatggtgagtgtttcaccatagcatatgcagtttctattgctttcttttggtcttcattgaaatctcttaagtacgcaataattctctcagatgttgtagtcagtaaatcttttgtacagaagtccatagggtttggattcagaacagctctagccagttggttccgactacccaacagagacatggctttcaacttcctttgtgtagttaccagagaactgattacaatacaattcacaagttcgtttaaattggccggaaagttctcttgagtctggatggaaggg

SEQ ID NO: 50639 - DNA, 1664 bp, Homo sapiens
acgaatttaatacgactcactatagggaatttggccctcgaggccaagaattcggcacgagtctgccttcctcacagcgcctctgctggagttcctgctggccttgtacttcctctttgctgatgccatgcagctgaatgacaagtggcagggcttgtgctggcccatgatggacttcctgcgctgtgtcaccgcggccctcatctactttgctatctccatcacggccatcgccaagtactcggatggggcttccaaagccgctggggtgtttggcttctttgctaccatcgtgtttgcaactgatttctacctgatctttaacgacgtggccaaattcctcaaacaaggggactctgcagatgagaccacagcccacaagacagaagaagagaattccgactcggactctgactgaaggcctgggcgggtgccttggcaacctggaggccacacaggccttccacccctgcgcctcacaggggttcgctgggcttgggagcgggaggcctggggatttcttgagtttgcagaggggggttgcgggacacagcaggccccctacagcctcaggtttttgcctgagcccagcctaccaggcttgcccctcagctcagcactgttgaccacgctgcgtatgagggcatcttgggtatcccactccttctccccatttctgtcccacaggccttcagccctttaacgtctctgccaaaaaccagcacaaggagacaaagcagagccttgtctgtatctgggcagcaggtgttccatgctgctaggtggcgggggtcgggggtcttctgtttcactaacaggaacaaagacagaaaccatgacagggctgccccgccaggccccggtggggtttgtctgcacttggtgctcctgcccacaccagccactttggtgacaatgacccttccaagaatctttggttcaaggagcaccagttccctcttcattcttgaagcagggagaaattgacctttgccttgtcgcccaggaagtggggctcggcacccataactaacacctcccacccttggaaaccatgtcttctgggggtgagatgaccattctgggtctaagactgtttcaaagaagagctcatagactgactggtccagaagacagagggtacaacagtggcatcacagtgacagtgtcatggggagctgggcgggcccagccaaaccctccttcttcctagagcccagccagcaggcaggagttcctggaccctcaggacagtgaacttccagacctcagggcaggtctatgggccactgcaggagatgagaccagccttctgtgttcacctaacgatttatactgtgtatctgtctttgatggaattttgtaactttttatatttttttatgcaaaagcagcttcttaacagatggcattttctgtgactctaggcctcacaaaagagccagagttctggacccatgtttggagcatttgtagccttattctcttgcgtgtgaatctcttaccctgaaaaaaagccataatgaattaagccagactgaccacttgcttggagtgtgtgcttgaaaaaaccagagcaatactgttgggtattgtatcaggcttcagtacaaactggtaacaccaatgtggatcctgacagctttcagttttagcaaaaatac

SEQ ID NO: 50640 - DNA, 330 bp, Homo sapiens
aatattgcaacacacactcccacctcaggaggcatttgtggtttatttgggtgcaaacatacccatagtctgagcagcttatgctaggtggtgtcactaaagctggtcatgtgattccaagtggcctcttagagacagaacctaagacagaaccccacatggtcccaagtgaagcttacggtccttatcaagtgtcatcttggagcagacacacatgacataaggtagcccttgtgggtatgggggtcggacagtgggtatatgcaatggggcagggggaagtgagtcctttgtccttttgtctggtctggttcatgacccacgcgtccg

SEQ ID NO: 50641 - DNA, 1010 bp, Homo sapiens
tgctgagtctgcaggagttctccaacatggaccttcgggacttccacaagtacatgaggagccacaaggcagagtccagtgagctggtgcggaacagccaccatacctggctctaccagggtgagggtgcccaccacatcatgcgtgccatccgccagagggtgctgcgcctcactcgcctgtcgcctgagatcgtggagctcagcgagccgctgcaggttgttcgatatggtgaggggggccactaccatgcccacgtggacagtgggcctgtgtacccagagaccatctgctcccataccaagctggtagccaacgagtctgtacccttcgagacctcctgccgctacatgacagtgctgttttatttgaacaacgtcactggtgggggcgagactgttttccctgtagcagataacagaacctacgatgaaatgagtctgattcaggatgacgtggacctccgtgacacacggaggcactgtgacaagggaaacctgcgtgtcaagccccaacagggcacagcagtcttctggtacaactacctgcctgatgggcaaggttgggtgggtgacgtagacgactactcgctgcacgggggctgcctggtcacgcgcggcaccaagtggattgccaacaactggattaatgtggaccccagccgagcgcggcaagcgctgttccaacaggagatggcccgccttgcccgagaagggggcaccgactcacagcccgagtgggctctggaccgggcctaccgcgatgcgcgcgtggaactctgagggaagagttagccccggttcccagccgcgggtcgccagttgcccaagatcaggggtccggctgtccttctgtcctgctgcagactaaaggtctggccaatgtcttgccccaccccgccagccgcgatacggcgcagttcctatattcatgttatttattgtgtactgactccatctgccccgtcaaataaaaaaccacaaggttcgagccgccgggcccgacaaaaa

SEQ ID NO: 50642 - DNA, 433 bp, Homo sapiens
  misc_feature (1)...(433): n = a,t,c or g
ctggtttccttctcggtttattctgttagaatgaaatggttcccataaataaggggcatgagcccttcctcacgaccatggtccatgacaaggggcagggcagagggggcctggatgggagtccttgtgggggaccaggcaggggacttggatcaacaagcaccagacgagtggcgggggcaggcgagaggctcagtgggacctccaccctcgttgccccagctggtggctgaccaggtggctgtggagggtcaggagctgccccggatcctctccatgtagttgcgaagctcctcagggtccttcagccccatgtcctcacacacccagcggatgtcctcctcgcctgccacaaggatggactgcacagcaggggcccctacaggctcctcaggtgactgggctggaggggctggcacaaatttnacaaact

SEQ ID NO: 50643 - DNA, 2149 bp, Homo sapiens
tgggtagaggaagccgtgaggccggagccttaggtcgggaagggatggatcgctgagccgatagcgtccgctaggcctgtctgcctcggtacctgttactgctgctacttcctcgtttgacaccttcctggaatctctcttgatttttgaggaaatacctagtaacaaacatgactgagttctggcttatatctgctcctggggagaaaacctgtcagcaaacatgggagaaattgcatgcggcaacttcaaagaacaataatcttgctgtcacttccaagttcaatattcctgacttaaaggttggcacgttggatgtcttggttggcttgtcagatgaactgggctaaactggatgcatttgtagaaggagtggttaagaaagtagctcaatacatggctgatgtattggaagatagcaaagacaaagttcaagagaatctgttggctaatggagtggacttggttacttatataacaaggttccagtgggacatggccaaatatccaatcaagcagtccctgaaaaatatttctgaaataattgccaagggagtaactcagattgataatgacctgaaatctcgagcatctgcatacaataacctgaaaggaaatcttcagaatttggaacgaaagaatgcaggaagtttgctaactagaagtctagcagaaattgtgaagaaggatgactttgttcttgattcagagtatctcgtcacattactggtagtagttcccaagttaaaccacaacgactggattaagcagtatgaaacactagccgaaatggtagttccaaggtctagcaatgttctttcagaggaccaagacagttacctgtgtaatgtcaccttgtttaggaaggcagttgatgacttcagacacaaagccagagaaaacaaattcattgttcgtgacttccagtataatgaagaggagatgaaagcagataaagaagaaatgaacaggctttctactgataagaaaaaacaatttggaccacttgtacggtggctgaaagtgaattttagtgaagcatttattgcatggattcacgtgaaagcattacgggttttcgttgagtctgttttaaggtatggcttgccagtgaacttccaagcaatgctacttcagcccaataagaaaactttgaagaaactgagagaagtattacatgaattgtataaacatctagacagcagtgcagcagctattattgatgctcctatggatattccaggtttaaacctgagtcaacaagaatactacccctatgtgtactacaagattgattgcaacttgctggaattcaagtgaaaatgggctcctcccccgacaatcctgtccttgtgtttgtgtgtgctaacagaaataagttgcagtatggtcgtacttttaactctagtatcctttgcttgcttcttaccccctttcctaggtgaattctcccacagtggtctgtatctcaacattttctttttaaaggaaaaaatatatatatatagtttctttttattgatcaggtctgtaaatgtgtactaaaaaaatcagagtttatttataaacaaaatagtttatttaaagagaaggtctcttccttattgatatcatggtatgcattaattccatttgttactattgtgcacaaaagccctgttcacaggggaatggtgtaaacatttatactgttttgttcactgtatttagtagacataactgttgaatagttactgaatcatgatgtaaagaatatgtgaccatcttcaggtatgggatttctgaacgtttcaaatttcaatcaatgagcactgtcaacacccacaggagagaataaaattacctgtgcaaaggtgtattgtggtgtgtgtaacttaagattacagttctgtttgagagttaaatgatgtcatagctcacttgctatgctgcttccaggattttgttatatgctgaggtgtaaccatttgtgttgtctgactttcgtatgatttaattgagccaaatttgggtcagaacacaaatttgaagatgacttttcagtatatgatgggtatttacatttgaacactagaattttaggtctctcaaataattaagaatagagccagttttgaataaagtctagcagaactatgaaaaaaaaaaa

SEQ ID NO: 50644 - DNA, 389 bp, Homo sapiens
gaactggactggatccatgattggattggatctgataattaactgacttggattcagttaagaggctgcagatgtccaggatcaggcagaaactagcagaaatggtaatattacagtgggtgcagacttcagaaatttgcagagatttttgtgttctacattctttttcttgtacccttaggtagggaaaaatcattaactaaattgatgaaggggatctgaggaccaaatccaggattctagggaaatattggatccttagtatctgaagaacaccgtattctaccttctagctataaggtagaatgtataaatattaggcctcagaagaaataactacttacagaaatggcaaaatctttgtaacttaaaattacaattgggaccgt

SEQ ID NO: 50645 - DNA, 1108 bp, Homo sapiens
ttttttttttttttttttcatgatgcagattgagtttaatgaacaaaaatctctgtataaaaaacatttaaaccttatcaaatgctttaaacacacacacacaaatccaaatccaatacacaatcttagaacattatctttgtgtacctcaacataacctgtaaaagtatttctagataaaactttacaagtgaagaaagaaaacccatgatgttacacttacacacttacacacacacacacacacacacacaatcattcttaaggaagaacaaaaacatggtaagagtgtgaacaggaagggaatgcatctttttttgtaaagcttatattaaaaaacacagcatgagtaaaataacttcctatgccaagagaagatgcagagagaggaaacagaaagcagggatgagactaactcattaataaatagtttgagaatgtcattcaagaacagtaaatttggggagttacagataatccccagttgtcaccacctcaaattctttgattccgataactaatgacacttaaaaagcatctatgtgttcatttcttgtaggtcttgatttgttcatcattatttaggtgtgctttgtctctttcagtggttaattcctcagttcatactcagtgttatgttgtagtcaccagaagggccacagtaataagcgaagtgaacacaggttataatgggtggcactggtggtatgagagggtgaataaggagggccagattgcctggtttggatttcagcatcactgcctgccagctcctggcacctagcaagctacttagccactgtgtgtctccatttcctcatcttcggttgggggtcactatagcacctacttcagatagtgtgattagggggttaaacaagatggtcattcaaaaaatttatcacactgcctggtcaataaatgttagctgaaaatactattagttgtggtattacaggggaaccaaaaggaaaattctgtatttctcctcactgataaagttttcagggacaaactgtggcaaaaagcagagataccagtacatttgagaccagtacaaagagattgaagacctagtcttatgaatatagatacccatttttatata

SEQ ID NO: 50646 - DNA, 390 bp, Homo sapiens
  misc_feature (1)...(390): n = a,t,c or g
gcaggggtggcctgaagatagacagagggtggataaataatcatgtaggattcctgagaagatagaagaagttggatccagagcacagcagggggaattagctggccttggaaaggagagatgatctctatcctctattctagaaggaagccaaaggtgatgtgtgcagatgcagaggtgtgtttgatgtggtgaagccaagtcaaaggagtttttgttcgatgccttatatctgctccagaaagcagttgagtcaccaactgagacagggagagagaaaggggctggcatacttaggaaggaaaggggatcatttccagatatttngagggaggacagagttaagttgggaatattnaaagggattaattnagttgaatttagttagga

SEQ ID NO: 50647 - DNA, 1201 bp, Homo sapiens
aaatcccataaaatcagatgttcccagagtcttaaagcttttgaaaactcagataacagacaagaggaccactccattcatatttatttcacatttgatctgtaaacttttttatttaaaaaaaaatccactgtcattagcaacatgtgctgacattagtttttctttagtgaaataagagtgcaggccttaaattgtctctgtctaaaacatgtagaaatgcagatgtaaacacaaagtctctgccctcctcccctgactttggcagttcatcaatgacatgatctcaaccagaaaagcacggaggggggaaaggacaacattttgatacctaacagctcttggggaagaaactgtacagtttggcaggcccatttgtcttttcaaactgtttaccttgggcaaattgtatcaggtttgcttcttccacataatttccactccttggagtctaaaaacagcagctaaaagatttccccatagtcagcactttcggggcaggaggggcacacagacatacaagatagaaacatacatattcttcttcaagcagtggccctggagggagagagggaacactggaaagagaggttttaaagtgagttactggggcaaacagtgcatcagagaataatggctttatacacagggctgatgtgaggcagaaaggctcattttacttatgtcttgatccaccatcataatatttacataggaaaaggcaattatgctgttaggcacaggaaaaaaatggacagaaatcttttccctgtcaggaaatctcaaagcaggtccgtgtcgaagggacagtcaccagttgctggtgaaaacgacgacatagagggacttcataacaccagaaagggcttgcattgcaaaggggcttggcctgaaccagacagctgtgtctgcctggaaggcatctctcccaaggccaggatttcaacatcaaaaccaaggccaagagatatgggggccccatgtgtgctatcaaaaatagtgtatatttacagcgggggatggggagggcaggcagtgctgcccttagcatttttcttcaaaaagagagagagagttgggaatggaaggggaattagccagggctaggtaacccccatccattaaccttttgtgagccatgcccttgtagtccagtgcttgctctgaagagctgtgagggctgtaccaggcgaagagggtg

SEQ ID NO: 50648 - DNA, 1588 bp, Homo sapiens
aggccgctagggtgcggggttggggaggaggccgctagtctacgcctgtggagccgatactcagccctctgcgaccatggctgtgctggcggcacttctgcgcagcggcgcccgcagccgcagccccctgctccggaggctggtgcaggaaataagatatgtggaacggagttatgtatcaaaacccactttgaaggaagtggtcatagtaagtgctacaagaacacccattggatcttttttaggcagcctttccttgctgccagccactaagcttggttccattgcaattcagggagccattgaaaaggcagggattccaaaagaagaagtgaaagaagcatacatgggtaatgttctacaaggaggtgaaggacaagctcctacaaggcaggcagtattgggtgcaggcttacctatttctactccatgtaccaccataaacaaagtttgtgcttcaggaatgaaagccatcatgatggcctctcaaagtcttatgtgtggacatcaggatgtgatggtggcaggtgggatggagagcatgtccaatgttccatatgtaatgaacagaggatcaacaccatatggtggggtaaagcttgaagatttgattgtaaaagacgggctaactgatgtctacaataaaattcatatgggcagctgtgctgagaatacagcaaagaagctgaatattgcacgaaatgaacaggacgcttatgctattaattcttataccagaagtaaagcagcatgggaagctgggaaatttggaaatgaagttattcctgtcacagttacagtaaaaggtcaaccagatgtagtggtgaaagaagatgaagaatataaacgtgttgattttagcaaagttccaaagctgaagacagttttccagaaagaaaatggcacagtaacagctgccaatgccagtacactgaatgatggagcagctgctctggttctcatgacggcagatgcagcgaagaggctcaatgttacaccactggcaagaatagtagcatttgctgacgctgctgtagaacctattgattttccaattgctcctgtatatgctgcatctatggttcttaaagatgtgggattgaaaaaagaagatattgcaatgtgggaagtaaatgaagcctttagtctggttgtactagcaaacattaaaatgttggagattgatccccaaaaagtgaatatcaatggaggagctgtttctctgggacatccaattgggatgtctggagccaggattgttggtcatttgactcatgccttgaagcaaggagaatacggtcttgccagtatttgcaatggaggaggaggtgcttctgccatgctaattcagaagctgtagacaacctctgctatttaaggagacaaccctatgtgaccagaaggcctgctgtaatcagtgtgactactgtgggtcagcttatattcagataagctgtttcattttttattattttctatgttaacttttaaaaatcaaaatgatgaaatcccaaaacattttgaaattaaaaataaatttcttcttctgcttttttcttggtaaccttgaaaagtttgatacattttt

SEQ ID NO: 50649 - DNA, 417 bp, Homo sapiens
attcggcacagcttccattggaattatcgccccctctcctgaacagtactatttcgtgtgaatctcctccaagccttcttttcattttatatctcatgctgtaattcttggaaagtatgctgtagctcaagtgcagaattctcatcagttttatctttatatctctcctaaacactttacctgatgaagagcctggcatacacataaatatatattgaatgaatcagtgatggattgaaaagagaaatgatggatctcctaaattttaacttttataaaatattttgatacattcatgaccttactttagcaagcaatgaacgtgatgtaaactattgttgatatagtttttatattggaagtgtaagtagtttgtggcatgggattgtgacatatcctaggtttcctcatcttctt

SEQ ID NO: 50650 - DNA, 965 bp, Homo sapiens
aaaacttttgaaactgaagctgccttaaatactcacatgcggacacacggcatggccttcatcaaatccaaaaggatgagctcagcccgagaaatagccacagatgctccatgattaaaatccctgtccacattggaataaaaaagacatttttgttacaaagtttgccagtataatagagttaacagtactgtcctagggctgttgccaatatattctctttcaatgtaccttccttcacctcgtcgtatatatcctcgataagtattaaaacagtatttgagtttaaaagagtttgtatatatttaaatgaataactttttatactctttgttacatgtttgtatcagtatttagtggaaaaccatttgagttgttttgggttagaatttttctttttgtactgtttctttaaaacagagttcttagtaacaggggcagttcctgaattcaaataaaccattttgtatgtttggattttgaatgggttaactaattacaggctaaaataatgccttttttagtgttttaatttttagaattcactacataaattgtaagtaattgtgggtctcaaaaacactaggaacttttaagtgtcttagcacttcctcgatgtgcctgccctgagggagtgagttcacatttgagacaactgcactccagtgtggacgtgcctttgtcttcaggccatgccgaacggtcgtttaaagcagtcttgcaggtcgctcctttcccagccgtggataaaaactgaagctaggaatctaataaggaatgctgatttcctcagttccattttgaggaatggggaaggctattctaaagaaaaaaatgggatttgttttctcggcagatctgcaaggctggctttaagagcacaaggagggaaagtaacgaaagggctggactactataaaagttacaaatacgtagttagaccaatagattttatatagtcaggt

SEQ ID NO: 50651 - DNA, 442 bp, Homo sapiens
cactcattccttcattacggtcaatttagtgttggctcaaatgctttcatctcaaaaataccggaattgaatggtaatttggataattaagttatcgtgcattttaagcagcatgtgtttcctttttccgtgtgagttccatgagcctctgcactgccgctcttttctgctgaactgatcactgtgggtcattctggctcctcttccttcctgtcatctaccttttggccaatctactcttcatcaggggaaaggaacaaacttcaaatctgtgagttattctttctgtcagaagcaacgtgctagagagaatacatgggatttgaagataatcagtggactcatctttctatccacatggtaactatgcccttgacaggtggtatcatttcacatcatcaattgtctttggtaaagtccatacttaattggtttgactcca

SEQ ID NO: 50652 - DNA, 626 bp, Homo sapiens
tccctttgaggttgctttgttttgtcttacaaaggtgaaaattgtttgtaagtgaagtgagaagttcatatttctttggcttttttgtgtttttaaaagttactccttttagggagctggtctgatgacttgcttagcttggaaatccttgttttcagtgtgtcgagtcaaaatgtgtttatgtgagctgtcactgtggggaaccaattgctttgtcatatagctggttatgaactagtaacatgtttgggaagtcctactgatgttcctttggaagaaaaaatctgctggttttaacaactgtgcttttgctatgtatggtatccaagttagttgaaacgcagacactgagatctgtttgagtttagggtcatttttagaaaggggcagtttaaagcacaatgtctcacatgggacaaagttccaaaatgccaaattcttattttttaaaaagctagttctataaaatactggtattatgggtgggggtagtgtgcctccttgacatttcgttcaagttatagattcaatggagctatgtcttgttttaagttgctttaatgcattgtattagatcttcaaacagaataaaggttgttttgaaactgaaaaaaaaaaaaaaaaaa

SEQ ID NO: 50653 - DNA, 455 bp, Homo sapiens
  misc_feature (1)...(455): n = a,t,c or g
gcgnnnnttgnnactttganaacgcttgacnnnnnnnnnnnnnnnnnnnnnnnnnnnnnnnnnnnnnnnnnnnnnnnnnnnnnnnnnnggcacgagagatccagagagtttggtaaatgttaactttctttccaaagtgggaacatcattgtggccactccaggccgcttggaggacatgttccggaggaaggccgaaggcttggatctggccagctgtgtgcgatccctggatgtcctggtgttggatgaggcagacagacttctggacatggggtttgaggcaagacgcaggaagtggagaacctggtgagagcgggcctccggaaccctgtccgggtctcagtgaaggagaagggcgtggcagccacagtgcccagaagaccccctcccgcctggaaaactactacatggtatgcaaggcanatgagaaatttaatcagctggtccattttt

SEQ ID NO: 50654 - DNA, 1085 bp, Homo sapiens
ctggtgttggatgaggcagacagacttctggacatggggtttgaggcaagcatcaacaccattctggagtttttgccaaagcagaggagaacaggccttttctctgccactcagacgcaggaagtggagaacctggtgagagcgggcctccggaaccctgtccgggtctcagtgaaggagaagggcgtggcagccagcagtgcccagaagaccccctcccgcctggaaaactactacatggtatgcaaggcagatgagaaatttaatcagctggtccattttcttcggcaatcataagcaggagaaacacctggtcttcttcagcacctgtgcctgtgtggaatactatgggaaggctctggaagtgctggtgaagggcgtgaagattatgtgcattcacggaaagatgaaatataaacgcaataagatcttcatggagttccccaaattgcaaagtgggattttagtgtgcactgatgtgatggcccggggaattgatattcctgaagtcaactgggttttgcagtatgaccctcccagcaatgcaagtgccttcgtgcatcgctgcggtcgcacagctcgcattggccacgggggcagcgctctggtgttcctcctgcccatggaagagtcatacatcaatttccttgcaattaaccaaaaatgccccctgcaggagatgaagccccagagaaacacagcggaccttctgccaaaactcaagtccatggccctggctgacagagctgtgtttgaaaagggcatgaaagcttttgtgtcatatgtccaagcttatgcaaagcatgaatgcaacctgattttcagattaaaggatcttgattttgccagccttgctcgaggttttgccctgctgaggatgcccaagatgccagaattgagaggaaagcagtttccagattttgtgcccgtggacgttaataccgacacgattccatttaaagataaaatcagagaaaagcagaggcagaaactcctggagcaacaaagaagagagaaaacagaaaatgaagggagaagaaaattcataaaaaataaagcttggtcaaagcagaaggccaaaaaag

SEQ ID NO: 50655 - DNA, 649 bp, Homo sapiens; identical to SEQ ID NO: 16038

SEQ ID NO: 50656 - DNA, 1808 bp, Homo sapiens
agagttttgaatccagcttcataaggctattggacaaaataacgaatggttctcgaattgaaataaaccaaacaggaacaaccttatattatcagcctggcctcctgtatggtggatctgtggaacatgactgtagcgtccttcgtggcattgggtattacctggagagtcttctttgcttggctccatttatgaagcacccgttaaaaatagttctacgaggagtgaccaatgatcaggttgacccttcagttgatgttcttaaggcaacagcactccctttgttgaaacaatttgggattgatggtgaatcatttgaactgaagattgtgcgacggggaatgcctcccggaggaggaggcgaagtggttttctcatgtcctgtgaggaaggtcttgaagcccattcaactcacagatccaggaaaaatcaaacgtattagaggaatggcgtactctgtacgtgtgtcacctcagatggcgaaccggattgtggattctgcaaggagcatcctcaacaagttcatacctgatatctatatttacacagatcacatgaaaggagtcaactctgggaagtctccgggctttgggttgtcactggttgctgagaccaccagtggcaccttcctcagtgctgaactggcctccaacccccaggggccagggagcagcagtacttccagaggaccttggcaggaactgtgcccgggctgctgctggaggaaatctacaggggtggatgcgtagactcgaccaaccaaagcctggcggctactactcatgacccttggacagcaggatgtttccaaagtcctgctaggccctctctctccctacacgatagaatttttgcggcatttgaagagctttttccagattatgtttaaaattgaaacccaagcccatgtggtgaagaactcaagggtggggataaagtgctgatgacctgtgttggcattggtttctccaaccttagcaagaccctcaagtgataaccatcacaagataaggccccaatgcctacagacaaagcagaagctgccacggacaccaatgggaccaagtccaaatggattaatccaggacagaatagccacttgcttaattttctgtgaagaaatatcaatatacaaataaaagacatccctgtagcatatggtttccagctgtttctccagtggcattgccattgcccaggaggggcccagtcaccatgagagctcccttgccttacctggaggaagaatgtggccttcaggccacagtcgtggctgctagaacagtctcatagctgcagttcagctgtgcttcctcagcctactatcatagggctttcctcagccctctgtcatatggctgttttccaaacctgtggagtctgttaactgttctttctgcaaggactcacctccttgagccttggtttttgttgtagggattaaatgagataatatgagtggcagctcttcatgagtcctgcagtgctaagcaaatgtcagaaattggtgtattagactatttatctttgatcttctgaatggattgctgtcatggacacggacacggatcttcatctggttcattgtatttatatgtgagggatggatggctgcggggctccaagtaagttattgggatgttttttatattccaggtgtgctgtacattcttattttattttcacaacagctctgtgatgtaaatgctatctccatgagaaaattcataaagggtgttttgttcctttgaaatgtataatgtaaagacattaaatctcctcatttaaggaaaaaaaaaaaaaaaaaa

SEQ ID NO: 50657 - DNA, 415 bp, Homo sapiens
cttgctttctgtgaattctttgtgatcaaactggtggagtgtccacagcatctcccactgcatagattaggctcataccacattcaccattaattctctctttcctagacatatttttaatttgcctaattaacttgctaagttgctcctccattgaaatactttaaagcttctaaaatgaatgtacacatgcagtaaagcaaatccttgttttcagccttcctgggcagcccttcaacaatgacatcccctagcagcacctgagtttccctttgctggttggctggggaccagcagggagcccaggattaagtgacattccttacctgtccctagcatgataactgcacccaagagccaccttagggaaggagacagagattatcagggcccactgccactgtctttgcttgca

SEQ ID NO: 50658 - DNA, 792 bp, Homo sapiens
cgaacactgagaagagtaaacttttcctaaaacactttatattataaacgaaaataaattgctagtttatattttagatataaacatcatattttttattaatacctacatcaaatggaaaatatctgaaatttttttttccatagcaggtattttctactagaagtagttttactacttttcatttagaacagagtatgagtcttaatctgaagtctttttcatgcccttgttttaaaaaaactacttttttcggcctcaaaaaaatcaagggtgtaatttttaataaattgttaatcctatgttttgtaattttcattttaggagcttgacttatttttttctctctcataaaaacacatttgttttaattgtaggagaaattttctcagcattttgcatgttctttctaatctttgttggtctgaatatattggtagtaattactgtaattattcaacaaaaagcatatccgttcaaaaatttttccactatgtcttttttctagtggctactgttttagttttctagttgaatatctctgacaagctttcgtatggttttgttatattttcatctacatgtaatgtgttattaattttattaaatgaaaactaatcaccttcatgtggaaatgctctgagaattgtccttaggcatttggtagtaaccagctaaccaagaagaaacagagaaaccagaacttcatatggcagtccatttagatgaagaatgatgatataaaatctggttccttcttagcaaaataaaaaacaaacaagaaaagataaa

SEQ ID NO: 50659 - DNA, 830 bp, Homo sapiens
tgtgctttctgacctttgcctcttttattatagagatgagaaagaagagggtatcctgggaagcatactgttacctagttttcagatagctttgcttacctctgaagatcacattaatcgcaaatatgcttttaaggcagcccatccaaacatgcggacctattatttctgcactgatacaggaaaggaaatggagttgtggatgaaagccatgttagatgctgccctagtacagacagaacctgtgaaaagagtggacaagattacatctgaaaatgcaccaacctaaagaaaccaataacattcccaaccatagggtgctaattaaaccagagatccaaaacaatcaaaaaaacaaggaaatgagcaaaattgaagaaaaaaaggcattagaagctgaaaaatatggatttcagaaggatggtcaagatagacccttaacaaaaattaatagtgtaaagctgaattctctgccatctgaatatgagagtgggtcagcatgccctgctcagactgtgcactacagaccaatcaacttgagcagttcagagaacaaaatagtcaatgttagcctggcagatcttagaggtggaaatcgccccaatacagggcccttatacacagaggccgatcgagtcatacagagaacaaattcaatgcagcagttggaacagtggattaaaatccagaaggggaggggtcatgaagaagaaaccaggggagtaatttcttaccaaacattaccaagaaatatgccaagtcacagagcccagattatggcccgctaccctgaaggttatagaacactcccaagaaacagcaagacaaag

SEQ ID NO: 50660 - DNA, 1890 bp, Homo sapiens
ggcggccgcctggccgtctggtccgtctgctccggaggccgtgacggccagactcgttggtgtcctgtggttcgtctcagtcactacaggaccctgggggggctgttgccacctccgccgggggcgaggagtcgcttaagtgcgaggacctcaaagtgggacaatatatttgtaaagatccaaaaataaatgacgctacgcaagaaccagttaactgtacaaactacacagctcatgtttcctgttttccagcacccaacataacttgtaaggattccagtggcaatgaaacacattttactggggaacgaagttgggttttttcaagcccatatcttgccgaaatgtaaatgggctattcctacaaagtgggcagtcgcattgtctctttttcttggatggttgggagcagatcgattttaccttggataccctgctttggggtttgttaaagttttgcactgtagggttttgtggaattgggagcctaattgatttcattcttatttcaatgcagattgttggaccttcagatggaagtagttacattatagattactatggaaccagacttacaagactgagtattactaatgaaacatttagaaaaacgcaattatatccataaatattttttaaaagaaacagatttgagcctccttgattttaatagagaacttctagtgtatggatttaaagatttctctttttcattcatataccattttatgagttctgtataattttttgtgaataagttatacttttatttttcagaaacaaaaatgacaagtggcaacttgcctttgtaaaagattaaagagtatcagagtaataagctatctctcatagagacagaagcccgagaaacactattatacagctttcaaaggaagtcctattaaataaatctcacaataatatactttaactcaacaaaacaaaaaccacaaaaaattatacagaactcataaaatggtatatgaatgaaaaagagaaatctttaaatccatacactagaagttctctattaaaatcaaggaggctcaaatcctaaaacagaaagaagaaatacgttaaaacacaatattttttaagagtccaatgaggttattgcagatgtacattttaacatttcatttgctcaatggtatttttttctcattcttggagcacttctggtataatggtagagagattacatgaatgataatgccagatactgggccctccccaatggggcctttccggttttaagtttcaaatctgaatctggaatcccacctaaatgtttacataataggctaccaagaatgagattcctcttaaaattacatttgcttaatttttacacactatggtttagaaacaatctacttttgaaagagacacaatttacagtatgaataataaaagttacatgaaactacacaatccttctcataaaataggagaaacaatttccaaaacaaaaatgcctaatacaaaatgatacagttgactggagctggggtaggatgggaggaagagaacaaccatgtgacagaatgtatggaagacctagattctagtttcagttttgcactaattagttgcgtatcttactctcaacttccttaggtcttgatttttttcctggtaagaagaggtagatggatctctaagctttattctaattttaaggctcaatgacttacagtttataagatttggaaaaccttttggacaatcagttgaataaattccttacatcttgagggtgtgtcactgttcaatcccatgacaataactacaaggcatatccataattttactgttagaaaagaaaaaaatccacctaaagggcaaaagtatacttcatatcctgtttctgttctacaagacagaaag

SEQ ID NO: 50661 - DNA, 469 bp, Homo sapiens
cgccaggccatcaagataaggcgccgcagagtcagagatctacaggatcccccgccccaaatggccccggagatccagcctccatcccaccacttctcccccgagcagcgggccctgctctacgaggacacactctacactgtcttgcaccgcctgggtcatcctgagcccaaccatgtgacggaggcctctgagctgctgcgatacctgcaggaggccttccacgtggagcctgaggagcaccagcagacactgcagcgggtcagggagcttgagaagccaatattttgtctgaaggcaacagtgaaacaggccaagggcattctgggcaaagatgtcagtgggttcagcgacccctactgcctgctgggcattgagcagggggtaggtgtgccagggggcagccccgggtcccggcatcggcagaaggctgtggtgaggcacaccatccccgaggaggagacccacc

SEQ ID NO: 50662 - DNA, 1275 bp, Homo sapiens
ttttttttttcttactttttaaaacatttatatttatatatataaaaaaattaaatatatataatatatagtgtgtttgagactaaaaatatagtacataatatttttaaaaaaaggaaaaaaaagtagaataggaaaaggtgtgagggacacacagatacacattgctaaaaacctacaatggtttgtcctaacaaaaataatatctttttttctcttctcttaattatcatcatggatccatttatttttggggtctgggtggagaaaattcaacaggagctagaaatggaggttgcaatgccaagaatggctgggtagaaaatgtgaccacagggagccctgggcctcttctggtgaaattggacttctcaaaattttctgggtcactgttgctaacaagattgtgtggagttttactgtattgggattttggctgctctttccccagagttagggtattctcaggggggacagcatctgaagagctccaaaagcaaacagaagagctcagggcccatcgatactcaacaaggccagtggttggggccagcaaaaaaccagggtagggacagcagactggcaggaatgagtgacagttctatgcaaatggagttattattattattgttattattaataagggcaggtttgtaccagaactgcccagtatggcctgtgacttctgcgcagcaattatttctcccagggacagggcctgaagctacctcacagtgatgcaaaaaaatgggattccccactaacccccacacacacccccttcctaccaaaccacacatctctcagtcctctccagcagcccagaggtgaacgtcaggacccacgctgacaaagatgagccaatgcctttcacaaaaagcctggccttgaggagaggaggagaaataccatagggggataggaggaggccaagagaagggaatgggatatttaaatgctaattttacagcatcttcacaaaaataaatgcctttcaattacatcccttggcctgtgcacttcagtgttcattatggcctcgccagggtcaggagcttcactaatccttttgggcaattctcaacatgcacagtggcctgtagaggcaccaagcagtggcctggctcaggtcagacagcactaacttggggaagccaggatttctgaggccagggtgcttggggaggaactggagttcagcagtagggacagaaccttccacacagcaaagaacaaggcagttcgctccaaacgggtcttggctttaatgtggtc

SEQ ID NO: 50663 - DNA, 887 bp, Homo sapiens
atgaatagtaaaattcaaacatatctaataataatttgccttagtttgattaataaattatatcaaaaaacttggggatagaaagaggcttttttttccccctgtagtatttttaaaactttttagatgagctggatgaaaccttagtacattggagctggagttgtattgagtacagccccaactctgaagccttatattcatgtcttaagtaccattgattgttctgtgaattgttgttagtttcatatttgacattgtagtaatccaccttgcattttagtctttgcaaaaaggatattgctaggtatattcttatttctgattgagtattggaatttacatttttcagaatttcattctttgtcattataatccaaaaacaatgtccacatcagacttggaacttctcacttcaaaaatgaaatacagatttagcagtgttgtacataatgatgtccaagcatttttccacctgtttactgagttttccaaccatttactatgtgttgagattggtgggttttctggctgtttttctgaggtgaatgacttgttacagagcctcagtaagaaatttcaactaaaatcacaaaaacataaagtccaggaaaccaccagaagatggatttttagtgtttttgaaatcttgtatttccttttgatatcatttactcattttaattttacgactgccaacttgttacggtattaattatatgtatgtgtttatatgtatgcatataatatatgtatatgtatatgaagaataaagttaagatttggtcaaactatattttcccattcaagtacaaaaatgttttcaaggctgcaaaaagtgtacagttgttaaacaagttgtaaataaagacttgtataaaaattca

SEQ ID NO: 50664 - DNA, 57 bp, Homo sapiens
ctgaagcagagtgtgtcacaaagtgatgagaacattactaaaatccacggacgcacg

SEQ ID NO: 50665 - DNA, 465 bp, Homo sapiens
tttttttttttcataatcagaaacaagttttatgttttgttttgctttttctaagaaaaaaagtagtttccagagcctggggttgctgtttgcattgggggctggacactcaggaaggagggactggcgcaggggaagggcatccgctgggaatagcacttgacccggagcccataggctgctgctcagtctcaggtcaccagcttcctcatctcaggggggtcaccaccatctgctagggttaccagaggccccactagaggatgcctgcagttgcgctgggagcccaccctggggcaggccacgctgggcccaggtgggcctctgaaagcctgcagcctggcggtgggttgctcagtggtctgatacctgagatcccccatgtccagctccaaaggggtggtggtttccttgatttctgtcccctccaaacaggaagttgtagttcagggaatttttgatttc

SEQ ID NO: 50666 - DNA, 258 bp, Homo sapiens
tctgctatttttgtttatcttttgggacttgcctaaaaagtggccctctaaaaggtaaaagggtttttggacgtgtccagaaactctggaaatccttatgtgagagtgttccaccagcctggttaagagaaatgggccttgcactactccaggccctttgatatctggtacccccagcccagcccaccttaagcagaacttcccactagagctgactagtcaaccaccgggagtctgcaggcagagctacgttatgct

SEQ ID NO: 50667 - DNA, 386 bp, Homo sapiens
aaaccccagaagaaagctgggtagttttcagaagatacactgacttctctaggcttaatgacaaattaaaagagatgtttccaggttttcgactagcacttcctccaaaacgctggtttaaagataattacaatgctgactttttagaagacagacaattaggattacaagcgtttcttcaaaatttagtagctcacaaggacattgctaactgccttgcagtgagagaatttctttgtttggatgatccaccgggtccatttgatagcctagaagaaagcagggcattctgtgaaactttagaagagacaaactaccgctttacagaaagaactacttggaaaaacaaaaggaggtggattcacttaaagaaactgctccagtgg

SEQ ID NO: 50668 - DNA, 2431 bp, Homo sapiens
  misc_feature (1)...(2431): n = a,t,c or g
tgcggccgctgcccgccattaatcgactgaagaagaaggagtacgtgatggggctggagagtcgagtccggggtctggcagccgagaaccaggagctgcgggccgagaatcaggagctgggcaaacgcgtacaggcactgcaggaggagagtcgctacctacgggcagtcttagccaacgagactggactggctcgcttgctgagccggctgagcggcgtgggactgcggctgaccacctcgctcttcagagactcgcccgccggtgaccacgactacgctctgccagtgggaaagcagaagcaggacctgctggaagaggacgactcggcgggaggagtctgtctccatgtggacaaggataaggtgtcggtggagttctgctcgggcgtgcgcccggaaggcgtcgtcttctcttaaaatgtagggtcaagtaatctgctctttatccgcgtttacccctttcaactcccttacaccatgtcaaacttaccttagtgggacatcttcaccggacacatttcagaggagagaaaaaaagtaatattgaatcttaaagtgtttagctaaaagcatgaatgtgacacagtaaccaactcctaatgataacatgtgactattaaatctctctgacagtttcttttttaggtgatttccttcctgccaggctccgttgtaggggttacagaacagtcgttcccgcctcacaacctgtggatacagctgttggggcagaagagacgggaccagctgctggccacatttcctgctttattttaaaaggtagtataagaaatgaggaaaaagaggtaatatcagggcttctgctgttttttatttttaacatgttcataattaaaaagtattttccagcagtccaaagatgtaagttatcttacacataaaatgttttattttgttatttggttatgaaaatggaatccttgttcttgcacaactgtaaatgttttgttgctagataataccgatttgagacctgaattggtctttggtttccagtgcatcacagcatattttgtaaaatcatctactactgcacttgagcatgaatgggtagtagccaaactcacaaattggagtgatgaacctgcttatacctaagggcaggagcaagcccctcacaatgcagctgcatgggtttttagtgcctactgaatnnnnnnnnnnnnnnnnnnnnnnnnnnnnnnnnnnaaccaaaagtagttggaaagattatttgaaatgactaatttgtgctatctttatgaaatatgttaaatgtagcttttttgaaacagaagccttgaattgaaatttaactaatacttgaacattttgtatatatttctttgtatataattttgtgcagtaccaatgacaaaaatatggtgtcataataaaaccaggtttgttgatcttttagttatgggctcaaagaatttattcatctctaacatgatattggaaaataatggatgaaaataggaaaaatgattgttaatgctgactgtgggtcttaaaaggttctggaaagcagtaagttcatttttctaaaaactataacattctgttggagtattttcttccttacgtcaatacttttcctgcattatttgaaattgtgggctggggagaaacagtagtcaaagctttctgaattgagatactttgaaattccaagtgtagatttttagaatgtcattttataaatggcagtttttggaattacttgataagaacttttgaaaatggaaggattagtatggcctatttttaaagctgctttgttaggttccttatgttttattaactgtcttttctcagtttccatttcatttttttttttctagttttggtgacttagtgattttgtcattttttacatcaacttcatggtcttgtttttacatggtaattgcatgtacttaggatctatctaataggggctttaaataaatttggtcatatttatgtgtaagcacattttactgtaaatgtttgggtttctgaatttaaacagatctgtttatttcagtatgtagtaaacaatatcttaaagtgtccgattcactacttgttaattaaaaaagttatgattaatgtgaaactgttgtcttactatttttagaaaattgtgttctggatgattagcacatggataaaggagatttctggaatataaaatggattgtttttgaaatttctaggtttggctctatttactgtaatggttgaaaacaatttagtatttgggtgacccttttgtttttcttctaaatgtgcctctggtaaaatacagaactagactaaagatgtagctttttaatatttgtcttttgatggtggcaggagttcatacattaattgaactaacacatcatattttgacctactatttctatcatattgacttactgtttctgcacttcttt

SEQ ID NO: 50669 - DNA, 513 bp, Homo sapiens
cacaatatattgcaaaattttaataccatgtggttaaacacaatattcaaatattaaacttttcaagcacatgaaagtcaccttctgaaagacaaactgggctttttttataactacctttgtgtaactttataaaattacttccctcaacaatatctgacactgatcttgatactagttagaaagtctgatgtaagatgatgacatctcaacgtcagtgatttaggagattatcttcagaattcatcagaggaccaatcgtcatcttcatcccttacttctcggtatctccctgaagactccccttctggattataactccgcattttaatattcagtctttcagctaatttttgcgctgcgagctttgcttgcatctcctcataattctgtttctgctgtttctgaagtgccaaggattcttctatggagagcagctgcgtgggcatatggtgaagtggtagaagccgagctgctgtgatgtcatcaagatggcggcttatccctgcgccg

SEQ ID NO: 50670 - DNA, 528 bp, Homo sapiens
tgagaattttctttaatttcaaaaaaatagctgctgcttctttaaagagtttaaaaattgatcggttcaatggcaaagctacacaacaactctggagtagaaggaaagaactctctttatagtacaacctctttccagcatactgccatcagctagtagaggcaactgcaaacaaatggtaggagttgcccaggaaggtattttgggcttggacaaagtgatagcaacccttccagaccctggctccttataaatgtatagcaattcattcatacaaactgcacagaggttaaacaaaacctactaaaaaaattaaaaaatcccacaaaatccccaacccagaaaacgtttcctggctctctactaacagtaaaatgtgctgagcccaaattttctgctctaacattggtcccacggacctatcagtctgctctggggtgctgacctgctgggtcctgagcagggtctttccctaagcatcactgtgggtttggagacagctgtaatgtgtgcagctgtcagcagaaa

SEQ ID NO: 50671 - DNA, 357 bp, Homo sapiens
cccctgatttactttatcctcctgattatttgaatttggttacactaagcatgtattttataatcaaaaataattaagatttaaaacaatgtatttgactactaaaaagcaaattatataaatcagttgaataataatgttgttaaagaggctgtttagcactaatttgaccaaatctatagtcaaagtttgattctacttgaattttttggaaatttgctgttgtattacttattctttgccttgttctctgtgaagtcctttcctaaaaaagaaacttatacaatttagttcacaaaactttgttgacctctttctctgtagaaatgaaaactaaatatatataattgagaaata

SEQ ID NO: 50672 - DNA, 852 bp, Homo sapiens
tttttttttttttttttttcaatatgcttatgttttatttatgtaggtggcatttaaaatacatgatgtgtttagggttacattgtccacagaaagcatcaaataccactcctctccccgccaaaaccaaataaacaaagccaactctttggcaacagttgtgttaaataaaatcccaggtcacacttgtttctggctcccaagcctgggtcactgctacatggattgcgccaaaaaattcccagcttcaacactgctagattaaaattgctggcatttttaaatcacagcaaagcttttcacaatgccctcaagtccaagaggacaaaggagaaagcaacatgaacggcagatcctcatgtgaaagggaaggaaagtcactgggagggagcatgcagggaagaagtcaaggcagccctggaattctactccgtgctcaataaaaacaaaacgtgaagaagcaatacatcatgcaaacgaaataatgaccggaagtgggcgcatctagttagaatgaagtgactttcgtaaggagtcaatgttcgcgaactgaaacatgagttcaacctccttgtgccgtctctgggtgttttgcgcgtgtgtaaataccggcccgttttccccagcatggccctaacccatggacactagggagggtgccactgagcaaaaattttttgctaaaaataattagcaaaaatccaagaaaaaaatatggaatctagcaaaacctacaccatatttgaagttgaatttgcactacctgcaaaggatgaaaattaaaagagtaaacagaaggaatgattttacatctgatgtgattcacgacagccttctattcgtgtggccgga

SEQ ID NO: 50673 - DNA, 353 bp, Homo sapiens
aagcataacgaactttttcattatgacactatcattttctgacaaatggggcatatggccttcctgagaatttctccaagcatctaaagtagcaacaaaacaagaagagaaaattccagtagcatgggcatagtagactacgataactgggactgactatcgggagagccacaggggtgaataagccccggcacactaataaccaggattaaagcgtgttcttaacaaatgtactcaagcacttccaaggggaaacaataaaaaaagtatgattaaagcaatagtttttcatctttacattagagataactagctagtctactacattattcacttttaattttgaaaaaaat

SEQ ID NO: 50674 - DNA, 629 bp, Homo sapiens
tttcctttctgaagatttactcattcataaaaagttctccaggtacaaaacaacaacaaaaaaggtattctcaaaactgtagcctggcagagtgagtctgagagatgcggaccagccagccacgcctgggaacgctgttggcctctctgggaatggcatctaccaggaaagcagccagggatgtcagataacagaaaccccagaggtggcatgggaacatttgagggagtaaagaactggcaactcaaggtagggggaaggtacaagggacacggaggcttgaagcaggatagtacaggctacaacacagagtgctgaggaaggggtgggtggggaaggaaagcaggaaacaatgagaacggaggaagagccccgctaacttctctcagctgctctgcatttagacaagggatattccccactccgcaccaataccaggtccagttactctcaggctgtcctagggtctctcccaccacctgcctctacaaacaaagctgctatccagggccaggtcaaatgagctgggtgggtgctcagctgtaatcccacacttgggaggtggaggtgggtgatcgctgagtcaggagtttgagatcacctgggcacatagtgagacctccactcta

SEQ ID NO: 50675 - DNA, 483 bp, Homo sapiens
  misc_feature (1)...(483): n = a,t,c or g
agaaatgtttcattctggacagctggtaaaagtctgtgccccaatggttcgatattcaaagttggcttttaggacactagtaagaaaatatagttgtgatctgtgttacacaccaatgattgttgccgctgattttgtcaaatctataaaagccagagacagcgaatttaccacaaatcaaggtgggcaatggcagaaggttatggggcttgcttaataaacaagccagagcttgttcaagacatgggtggaaacaagtaaggaaattcaagtgggaaacccctggggtttttcagtttctattaaaataaggttccatgatgaccttaaaagaactgtagatctttgtcaaaaggctgaagcancaggagtttcatggattacagtccatggaagaactgctgaagaaagacatcagccagtgcactatgattccattaaaataattaagganaatatgtctatacctgtaattgctaatgg

SEQ ID NO: 50676 - DNA, 235 bp, Homo sapiens
cttagggcctggtctgcagtcaaggttcattaaacaacacctgttcgtagcggccgttacctctgtatgcttctgcagcaggtgtttgttgagtatctgctttgttccagtatgtgcgtgcaagtgctgggtgcaggacatatagtgaaaaggtgacacagaagcttccccttcgcggtagctggaattcgtaggtaacacagagcagggtattgaagccaggtgctagctctcc

SEQ ID NO: 50677 - DNA, 1718 bp, Homo sapiens
ttttttttttttcattaaaataattcttttaattattgatgctttgaataagaagtccattttactaaatttagtataaattatttttcttaaacagaacctgtttgctggatctcagttaagttcactttgcagttttcagacacaatgactcatattcaacttttctctttaaggattcagtggcttgattcctgacatttcctctttaagagggaatcttatgtcatcttctgaaatcatgtatatgggtaataatattagtgtcttctcttctgaagatgtgattcttttaatgccatgttctcttccctctggtgacctgacttagattgtagcagcactagaagctattaagagatttggggccagttgaggaagccttaggtaattgttaagagtagaagtatttttaaaaagctgtggagagtggtttgggaggggattttgtccctggctgaagctggtcccatgcctgggtaaactttacttataaaagaataccaggaacacacaaaatattcttctcctctttcttttgcaatccagttttggagccaaaaaataatctgtgtgcacatgtgttttgataatactgtctcgacttaggtggggaaattaaattcaggagttttatgactttcttttgttctgagtatcactttagagtataaaaaagttttttcaaaaagtcctttatcagaaaatagtttcacccctatgttgaaattaacaataccccaggattgtgagacataaatcaacatgagtaggaagctccatctgagtttcatcattgtttgtgtatcttggcaagatttattcagaagcaccataatgggggccaatccttttgcaccaggctcaggcagctcaggaggcagctgtggtgagtgatgcactctaccaagcacagtggcttctaggaataaagaacacatactcaactaccttcaaatgccaatgggcaatttaaaactggtactcattcctcttcaagagcaccactggaaacatctttggaattgatgggacaaaacttatttgattatagtgaaggatatttctctacgaaaatggcttcaaaataggaaaaaagtagctaccacatcttccaggaaatccaataacaggtcaactctattggtaaacaagcaagtaaacaagcaagcaaacaaaccagcatgtgaccagaaaactggctaatattctgggacgctttccagagaaacattaagccttttaagtgtgtatgagccactttaagaaacttcataagtgttgctaaattcaccacagtctgcttcactgaactgtgacattataatattcttctggtgtcacgatttttggtccaccaaagtagtccaggacccagatattggttatattcaacttagcaaagaaccaattatggctggaaggccaggttttcatctcagggtgtcgaatgaataacgaatgctttgcaatatccatttctgtttcattcaccttggtcacagttcctgacagcattatgtgaacacaaaggggactttgtggatcaaatccatgtttcttgcagaagttggtctgtgccaaagtcatggtcagtgtagcatatggattctcctgcaggttgctcacggagagctgcagcgggctcaggtagaaatagggcacgccgctgcccgcgcccgggggcccgtcgctgagcgagaggacgtcggcgaagg

SEQ ID NO: 50678 - DNA, 2724 bp, Homo sapiens
ttttttttttttttatcctactacatttttattaaagtaacaaaaaggtgtacatttgtccataagctgtacattcttccatataaaaacactatcatacaattagtaacctttgtcttttctgtcagaatagcttacaaacatactactactatttatttttacttaataggagagacaggcctgctcaacagtccagctcaggggttttgttgtttttaaagtgaacatcataaagaagagaagagagacaagattaagcatgagaccatgaggctgcttctaaaaaggcagggacctgtttgcagacaagatgcaagaacacagcctgcagtgattcacagctttgtttcaacccacaaaccagaaaattagctcttgggtctgtgggcccaaagtgaactttaaagcaataaagactggaagcaggtctgggaaggcaatacaaaatgtggagagttgaaaaggaggcagagctggcaggaatgggtagggagagtgtttggtaaatagcacctttgagtcaaaattgagcagtttagaaatccaggaaaggggactggctgtggggaggagaacctgggggtagaggaagtggggtgaagattcctcactaaggggcaacagcaggagggtggccatcctggccaaatgccctagccctgtccttcttaaggtgattcggtttgggaaactcgaggtcttttgaggacccctcatcaatgtcactgagaaattgaaggaagggagtttcttcccagtgtagctttccacttttctccaacccacaacagtatatattgcacaagtctacgacaaatttggattgtactgagacagacagcaacctttcccacaggtgctctgagcaccagggagaaaaaacagtgcccaaggtttggcttttatttagtgtcggccctacaagaataccaagtagtcttgcagaacatggggcactctcccattcagccaaggaatacatgcaaggctgactagccagccatcatcccaaggagagcaggagagatggttccctaagcccaccagggcatcaggaggttctgatagccagttttcctccagaccctcctgggacccagggggcatattgcacagtgactgagaactcttgtcctagaaaatacggtagctctatgacccgaccagaagggaagggggaggggagggttagaggagagttgtgcttttgaaaagaaggcagtaataaaggacctggagttccctgtagcttttgagccacctctcaaagggatcatggcagcagcatcaagactttcatgtggttccaaaaggaagagttttggccaaaaaacatccccagtggatactctttgggtcccaaaatttcattgcaaatcacccccaaattatttgccacacatacacacaaagcagcactagcaaagcaaaggttttgtgcagagttcccttccatcctaaccccaataacctccagttccctcctccccccctcagaaaacccaaagctttagattcctggctggaaagcaacatctacaggcccctgagggtagaattagaaacaagtcatgatttcaagaaaagcagcttaggacagtaggaatcaggagaggccttttcactctctgcccaggacctcattagaaaaataaaagaaaagataacatagtattgtttaagtccaggcatgaatgcccctgagtaatagaggagccagggatgcaggtgtctggctgggggagacagagagctctgaacttggcctctcttcctcccccagggcaaatcccgacctctctgttcacagttgctaaccttgcttgctccctctcacatcttcctggggtgctagccaaacgtctcccacttctccttggctaggtctaccccctaacagctccccctcctataggcagacactggctcacagactcaagcacgcaacagttctctccaaaggcacctggggaggccacttccaagcagctcccttgaaggattttttttcttaaaaaaaacttttggtttcttttcctcctttcttaaaaaaaaataatatatataaatagctcttcatttaaaaatacagttccccaggttgaggtatgtggtggcctgttgtcacggcagcatgagcacggcggcgcccagggcgggggcggaagggcctagctggagactgccatcacgtagttcttggaggggctgctccggcccagcagcacttggttcttgcaggtgaggagcccacaggaggcggccagtggggcctcctcgtacaagacgcagatggagccgtcctccccaatgcggtaggacacctcataggggtccacccacagggtcagctcgctggggcagcagctggtgcagctggggctggctgagtccgatctggctggccaccctgctgatgatggggtccatcttgtggttgatgcgaatgcagcggtagccggagcccttggacggcttttcgggaaaccagtggtgtttgtagtgctctgtgagtgcctcctggagcgccccgctgaagaccttaagcctctgctcgctcacgcagccccgggtcctcaggaggctggagaggaagcccacggcggcggcgatctccgggagcatgtcggttcccttcccgtggctcatgctcgcgcgcggctcgggctcagtgagaggtctcgggtgggaagtgcgggtccacaagacagcgttaccctg

SEQ ID NO: 50679 - DNA, 380 bp, Homo sapiens
tcctctaccaagcagctaacctggccttgaaacctaatctctgatgccatgtccccccaagccccatcagagttttgtaaaaagcccctccctgctctccacaccaatgctgagagcccatggggtaactggaggcttccctgccatcttggcaaagaagcctggctgacgtcctgcacatgcttccccaggtgattgcttgcacttaacagcagaggaaacgagaccaccccacacaacttgtagcagttgaggagtctctgcctgatcccaccccggatacttagagcatccagaattaaaaataagccttgtcaccaacatccggctcccccactccccagagccaggctcaatgtgcccaacagcgctggggcccg

SEQ ID NO: 50680 - DNA, 527 bp, Homo sapiens
caaattattacattacatttagtatttttctgagttacattgacaagaacttaaattatagcctgttattaatattgatttccaacgactgaacagtacaacagatcaataaaaaagtttatacactgctttaactaatttttgttatactcatgtggcttagtgtagttagtcactaaaacagagttcaagtgagcttggcaatggtgttgagtaacaagaaagaattttgcattaatgatttctttttattttcctcatttaaacaaccagcattactgccaaacaccaaccgtggtccatatttgtaacaggtttttaacatgacatagttagcaagtttgattgaagagatttttaggtcctgggcctataagattttagtatgatcttttttcatgtttctaatgcttgaggtgttactgcttaacttgggaaaaaaaaaaacaaaaaacagtgttcctgccatttgtaagttttcctataatattccttttattaactttaaaactggacttatcgggttc

SEQ ID NO: 50681 - DNA, 1303 bp, Homo sapiens
ttttggccaaagttgaccactactcttcttactctaacaagccacatgaatagaagaattttcctcaagatggacccggtaaatataaccacaaggaagcgaaactgggtgcgttcactgagttgggttcctaatctgtttctggcctgattcccgcatgagtattagggtgatcttaaagagtttgctcacgtaaacgcccgtgctgggccctgtgaagccagcatgttcaccactggtcgttcagcagccacgacagcaccatgtgagatggcgaggtggctggacagcaccagcagcgcatcccggcggggaaccccagaaaaggcttcttacacagcagccttacttcatcggcccacagacacccacccgcagtttccttccttaaaggctctgcctgatcggtgttgcagtgtccattgtggagaagctttttggatcagcattttgtaaaaacaaccaaaatcaggaaggtaaattggttgctggaagagggatcttgcctgaggaaccctgcttgtccaacagggtgtcaggatttaaggaaaaccttcgtcttaggctaagtctgaaatggtactgaaatatgcttttctatgggtcttgtttattttataaaattttacatctaaatttttgctaaggatgtattttgattattgaaaagaaaatttctatttaaactgtaaatatattgtcatacaatgttaaataacctatttttttaaaaaagttcaacttaaggtagaagttccaagctactagtgttaaattggaaaatatcaataattaagagtattttacccaaggaatcctctcatggaagtttactgtgatgttccttttctcacacaagttttagcctttttcacaagggaactcatactgtctacacatcagaccatagttgcttaggaaacctttaaaaattccagttaagcaatgttgaaatcagtttgcatctcttcaaaagaaacctctcaggttagctttgaactgcctcttcctgagatgactaggacagtctgtacccagaggccacccagaagccctcagatgtacatacacagatgccagtcagctcctggggttgcgccaggcgcccccgctctagctcactgttgcctcgctgtctgccaggaggccctgccatccttgggccctggcagtggctgtgtcccagtgagctttactcacgtggcccttgcttcatccagcacagctctcaggtgggcactgcagggacactggtgtcttccatgtagcgtcccagctttgggctaggtttatcaggcagtga

SEQ ID NO: 50682 - DNA, 455 bp, Homo sapiens
ggcaaatggcggttgcagaggctcgtccgaattctcggctcgctgctccctggctggcgcgtgtttgttcattctgggctaggtgagcagggacaatacgtcgccctctcaggactttgctctctccttaaaacccgaggattcaccgtcaagcttctggtttctctgacatccttccccagccgccccttcatcgccaccgatgatccagtggagaagctgtgttggaggtcaagggatggaggcgaaactgcgcgttctcgtccctgcagaaaccggaatatccgagacacatgacgaacatgaaactttctccttgtctcttggctcccactccgctacacagatgaacggtgttaccttccctcatgttactttgctaagcctactcctcagagctggtccttttgcataacctcttcaaatgctctcaactctccttgtcctacataatg

SEQ ID NO: 50683 - DNA, 1261 bp, Homo sapiens
  misc_feature (1)...(1261): n = a,t,c or g
gcgtccgctcactccccttctcctcctcctcttcctcttcagtctccaacgactctgcccccgatggtcctcgtgggttgggttgttttgggggggttgtgctgggggggagggggttcaaatatttattgtattttttgtttgtggcagcaactcaacagattctgctgctgggaagggcctcagcgttcctgaagagagatgtaggggacccactggttgttgccccggctttcttcgcagtagctggccacctccaccaagccgtggctcttccaggcgtccgtgtgagggttctgtaggagggaaaagaaggggtttagtggagcctccctctcccggggcccctgtgtggggaaaacagtcaggctcaaaatagcttcctgggtgaggaggccccagcccggctgcccacgggacatgccaaacgtggctgagcgctgagctgtgcaggaccagtcagcccgatttntttgacaaacaccngcccagggtgcccgggcgtggcggggcagggcagaggcccgactcaccgtgaccaggagacaatgcaggtctcgggcctcggtggtgccctgggtctcggccggctctcccaggagctgcgccaggcgctgcatgcccgacacccgcacgatgttgatgtcgttgtcacagcagaaggactggatgagcgtgaagtggatttgcagggcgatgtcatcctcctcctcctcgtcaatggccaagaggcagaggaccacgctgtctgggtccctgagggggccaaagggtagggatgggtcagccggggacaggggaggggccaccgtgcagggggagtttgcaaaaaaggagcgtgcaagagcaaaagagaaactgcaagggtgcaggggattgcctctgcaagctggtgacggtggggggaggggagggcacacggttcaaagtatggggtaggggtaccaggcccacggcgggaggggtgtttgcagacgatacatcaggatacggcagcccccgatccacaaaacggcagagaagctctgcatccacagcggggggcacttggggaagtcccagctccatgcaagacaagcgtgcggaaagcgtccagagcggaggggaggtcccgtcccacccgcgcccagcccgggaagggggtctgactcacacattcatcaacttggccgactcgtacacccccactgtgaggcgatcctggcgctgagcggccaccaaaagctcctccaccgcggcggtcaccgtctgcatcttctgc

SEQ ID NO: 50684 - DNA, 415 bp, Homo sapiens
cagggaaacctcagggagtcccccaaaatggggctgcagaagaatgttgatgatggtgtttaaggtcacaaaactgtgagtctgtgatcccattttgatagaaaaaaatgcagtgagtcacatgtctacaatatgtgacataggctgagaaaggcaagagaaactggcacggtggtagactgctcggaaactcgcgtggcgggctgctctcggaaactcgcgcggcagtgggctgctctcacagactcgcgcgggggtgggctgctctcgtctgtaaattttccacattgagagcaccaactgctcagcttcagagaggagcctgggcggcaggtgggaccctcactccccacggtgtcctcgctccggctcagtctacttctcaggccctcccacgtcctctgtatcttctgca

SEQ ID NO: 50685 - DNA, 493 bp, Homo sapiens
agttcttttccatcaggccgtcgcaccttgcgtgggaaggagcaccccacttggaagcaggaggcggggttcagatcttggccctacccctcctgtgttaaagtccgcgagcctcagtttccctcacagtattttttgcctcgccttacccggttttgaggatctgtacgagaaagagaaaggaagtggacatttgttgaattcctgcatggccaaataccacgcagactgcttcatccgccacgtttaatccttattacttggtgttctcagaactcccatttcatggattcttaagctcacagagtcagtgaataacagaaagggattcagatctagccgtttagctgcacagtggagttcttctccagagtcttcccttgtctgggctctggctggaactattcctcagccaaatcctcgccccagaacagtgcttcctgtttctccagctgagaagtctccctttcagtttccttcttccagcacggag

SEQ ID NO: 50686 - DNA, 202 bp, Homo sapiens
  misc_feature (1)...(202): n = a,t,c or g
gaggagttgtatatgtgtatgggtgacagcataatgcctctgaagcccagggacctagctacttcttaggctcctaacgtaatttcatccatgtaactcacagaaataggatctgaaggattgaggaataggatggattctgtttattcccaaattatttcaaatttattctacttaaacttggcccttanctatccaaatg

SEQ ID NO: 50687 - DNA, 408 bp, Homo sapiens
ctctgttctgcattataagcaacatgaccagcagccacgtttgttgtaattttttaaatatgtggaaaaaaagcaagatatcaaccatgtattaccttaaccaagatgccaaattatctaacttgtttctccaggcaagcagcccaacaacagggacagctcccaggagccagtcaaggttgtctgtctgtccatccactcaggacatctgcagaatctgtcactgcgaaggggatgaagagagccccctcatcacaccctgtcgctgcactgggacactgcgctttgtccaccagtcctgcctccaccagtggataaagagctcagatacacgctgctgtgagctctgcaagtatgacttcataatggagaccaagctcaaacccctccggaagtgggagaaactag

SEQ ID NO: 50688 - DNA, 391 bp, Homo sapiens
ctgaatgtcaataggttgctgcatatcgttggatatggtgatttccagatgaaacagatagatgcccccggagaccctttccctttaaatcctagaggaattaaaccccaaaaggacccagacatggcaatggagatttgtgctacggatgctgtagatgatatggaagaaggtcttaaagtcctaatgaaggcagaccctggtagacaggaatccttgcaagcagaggttatcccagatccaatggagggagagcaaacctggcccactgaggaggagctgagcgaggcaaaggatttcttgaaggaaagttctaaggtggtaaagaaggtccccaaaggaacatccagttaccaagctgaatggattttggatggtggcagccaaagtg

SEQ ID NO: 50689 - DNA, 405 bp, Homo sapiens
tctcgctcgagctctttggatttgttgttactgtgtaagctgatgtgttttagataatctgcttcaatttgagttcccatacttacctgttttccaggtggattgtctcattgttagtgctgaatcttcttgcctacttgtatctgggaatttaactttgaagaggaagagagtgaatatgaataactgaaaaataaaatggtgtgtagtagcactttgtattttttacaatatactagaatttactactctagaacagattattaggctgtaggagtggacgtgggccattgatcaaaagggtttaaaggcttttttggggaattgctgttaagacatttatcacagtttttatttaatttatttattgtttttgagacaggatctcactctgcagcccaggct

SEQ ID NO: 50690 - DNA, 357 bp, Homo sapiens
gtctccgagcctccccttcgcgatgcggaggacgcgggacagaggccaccatgttcagccagcagcagcagcagcagctccagcaacagcagcagcagctccagcagttacagcagcagcagctccagcagcagcaattgcagcagcagcagttactgcagctccagcagctgctccagcagtccccaccacaggccccgttgcccatggctgtcagccgggggctccccccgcagcagccacagcagccgcttctgaatctccagggcaccaactcagcctccctcctcaacggctccatgctgcagagagctttgcttttacagcagttgcaaggactggaccagtttgcaatgc

SEQ ID NO: 50691 - DNA, 1056 bp, Homo sapiens
cgcaccggcggctcacaggtcgggtggtggggctggggttcttggccgccttgtatttctgcaggttctcaaagtggcccagggacttgcagtgggagagctgtgcccctgagttgctgtgatagaacttgtggcagatgcggcagatatagcccatcacgggcaccaggaagtccacaccatatgcagtattggggctgtaggtctccgagcccttccactcctctctggatatatctctggacctcacctgaaaacatgcaagtgtgggcctcggatctggcttccccttgacacctcccagacacaggtcgggggcctagagaccaccaatgcccttggacacacagaatccccttgatttccaggaggtagtgggtggcattctctgagcctttgcacatggtgatcctgcctcccagagtgctcttcccaatctatactttctagactctgttcaactagccccctcctcccaggaagccctcctgctcctacaggcgccataatccacgccaggtgtgcccaagacatcatgtgtcatttgactgaatcctcataacagccctctatggctacacacattttactaagaagaaactgaggcccagggacattaactcacttgtctagggttgcacagctggtttgtggaggagctgggcagggaaccctgtaggtctaagccgtagttcacactcttaaccatgagccccctgctaactccctgaggtcctatccaatactgcagtgaccttggtcctagagggtgggtttcaagggatcaaagactgcatttcacctgctggatgtgagatgaggtcatctgactctggccgtgtcagccctagcaggcctagcagtgccctccaccactcaccaggcaaacaaatgtggcttccaagaaggacaaccacccccgtttgctaagcccttcctaggaccaagctgtgggccctgggcttccctgatagtccaagttcaggttgttacttctgagcagaggcaactgaggctcagagaggccaagtggcttgcctgagatgatgtgactac

SEQ ID NO: 50692 - DNA, 119 bp, Homo sapiens
agaagtatctggccactactgatgtttacaaagtaggaaatttagcctgtagttccagctactcaagaggccgaggggtaagatcacataagcccaagaggctgcagtgaggtacgatt

SEQ ID NO: 50693 - DNA, 482 bp, Homo sapiens
tttttttttgttggtgccttgaaaagataagatttattactcaagagaatgaaatccactgataggttcacagaaacatgttccatctacagcgtaaactggaagatttttctggaagtggctgttggccgacgccaggtgtttgaataaagacagcagcatcttggtgttatactcaggaacagcttacccccttccatagggtaaaaagtggcttcttaggtctgcaagaattcgggttgtactcgggctactttccggaattctttagtgtgggtcttagggcactgcatctcacaccagctgatgggaaccatctggatacctggaagggaaaagctggtggtggagcccagaccccaaagatttgcctgcgactcctcttttatgctgggtatgaagctgaagtgccaccaagcttcctactgaacctcaactcataaagaaaaaactttgttcattctactgacttatgaagtgag

SEQ ID NO: 50694 - DNA, 908 bp, Homo sapiens
agtaaaaaagttttatcatagcaaaaaatatgtatttataaggactgtcaggagggataggctatttccaatatcacagttttgtttgttggtgccttgaaaagataagatttattactcaagagaatgaaatccactgataggttcacagaaacatgttccatctacagcgtaaactggaagatttttctggaagtggctgttggccgacgccaggtgtttgaataaagacagcagcatcttggtgttatactcaggaacagcttacccccttccatagggtaaaaagtggcttcttaggtctgcaagaattcgggttgtactcgggctactttccggaattctttagtgtgggtcttagggcactgcatctcacaccagctgatgggaaccatctggatacctgactcactgtgggctaccaccactcccagcttcgttctcggcggtggttagcaggtagttggactgtgcatcacctaaggagatcactttggccaagacaatgtcacctgggcggaaactcttataaatttcaaccttgtctttttcagttgctcggacatcttccttgcggatagttcctcgaaaagagttcttaagaggcatggaccccacatacaggatgtgtactttggcaaagcgtgaaattgatgcctagaagaccttacaggttacaatagctcccacatctggcaggtaacttgggactctgtttctctcatctacagacaccactggaagcgcgccattctcgctgctcttcatcagacagccggcaagcgacgaaaagatgtagccgtggcgggtgtaggtgccgctgcccgggcctgccctcctcctaagttacacagacgttcgccggggatgcagtatcatcacaggtggcgccatgattgccgctgtcc

SEQ ID NO: 50695 - DNA, 484 bp, Homo sapiens
tcagataccttctcgaaacaaaagattttcctacctgcttatacttggtaaccgagggaattactaagacttcttgctcatttctgagtattgtctttatatcctgacactatgaatgctacttggatgcctcttaagtctgttctctggggaggcagtaaggggccgtggagctggcctcggcctcggcatcgggagaggctggacttcctgtctctctgtgctgaatggctgcgatggcgcccgctctcactgacgcagcagctgaagcacaccatatccggttcaaactggctcccccatcctctaccttgtcccctgggcagtgccgaaaataacgggcaacgccaacatccttattgctgccaacggaaccaaaagaaaagccattgctgcagagggtcccagccttagattttcgaaattaattcttaccaagggaaggacttgggaaaggttgcaaccactggtggcattttattct

SEQ ID NO: 50696 - DNA, 351 bp, Homo sapiens
tttttttttagctactatggtggaaattttatttctatttaacacttctgacattagcaaatagtgtaccaaacagacatgctttttacatagttacatgattcttctcaacaaccgctcccaatcacgatgaaactcattccatctatccctttctttctttattcttggctgtatggagatacaggggtacatgacgctgctcgggatcagctctggtcagttcttcctcttcaatatcagactcccctcctgaactactgtcagtgacatctgaatcaaatgcctgttcactgcacctcaagttggctatgccactagctgtaaatctctccaattcttctgaaattg

SEQ ID NO: 50697 - DNA, 501 bp, Homo sapiens
cctttacccacttacgcaaggagaaggaaatcataatgatgtcatgtgatcaaaggaaaccatggaagggttcacgctgatagctgatagcttttacagtgctcattcctaacagtggatttacttgtaagctttcagatcaacacaaatagctgcagcctgggttaaaatataacatcactatttggcttttgttttgcatgatttttaaaagcagtactcctagggaaatggcctctgaagtatatcagtttcatctcttaccaagactgttaagaagaaactagtgggattttgaacaagttatataattgtggtctgaaaagaccctaaactgaagttctgtttaaatatagttacatgaatttctctgatactaatgtactcaacagccaggtataaactatatctcctagtaacattttccatttttgtttaatcaaatacttgcttatgaaggatttcagaaatttgtaataaatgtcagcttttgatagcata

SEQ ID NO: 50698 - DNA, 338 bp, Homo sapiens
cggaagcgctttgagccgggcacacagcgctttgagctgtacaagaaggcacaggcctctctcaagtcgggcctggacctgcgcagtgtggtgaggctaccacccggggagaacatcgacgactggatcgccgtgcacgtggtggacttcttcaaccgcatcaacctcatctacggcactatggcggagcgctgcagtgagaccagctgcccggtcatggccggcgggccccgctacgagtaccgctggcaggacgagcgccagtaccggcggcccgcaagctctctgcgccgcgctatatggcattgctcatggactggatcgaaggcctcatcaac

SEQ ID NO: 50699 - DNA, 2923 bp, Homo sapiens
ctttttttttttttttttttccggagaccgatgcaccccacagtcagggtgattttatttctagaaaaggtgacaggtgctgcacgtgggcaggagcaggtcacagtgaggcagggccaggggcatccccctctcaacacaacctaggcgccaaggcctaccggccaggtagagcaagggctggcccatgtagtgagcccagcatggggagacgctgagggcccatggggcgccaaagccagggggcagcagcctccaaacaccgacagcgccacgtcccctgggcaggaaggtggatgccccagggcactctgtcctcctgctggagggcctggcaggctggtctcaagacaccagccggagggaggcctggcaggtggccagggatagaggcaggggatgggctgagcagggacgcagcccccacctgcctgcaggctccagacacaacagcccaggccccatctgagccctggcgctgcgctggcatgggtgggggctggggaggggcgtgggcatggctggcctcagaagcccttgtccatgctcagggtgcggcgggtcacgtgctccagctcccctgacacgtaggcggccatactgatgcggtattgtgccagcatcttcagcatgagccgcaggctcagccaccactgctcccgtggcatgcggtgctcgaaatcagtgtctttcttgagctcagtgacggggctgaaggccaccgccttcttcttcaggccgatcacgcaggccgagtctggggcattggcgaacacccgtcccttgcggtaaacctcgcgcagcttctccgacaaccacagcatggccttcacccccagcttggtcccatagttccggtcaaagggggttggagcgccaccctgctgcaggtggcccaggacattggtcctgcagtcgaagacgcccttgccctctgatgagtacaggttgtacaggaactccgtggtgtagtagtcatggcacttctcgttccgcagcaccaggcccctctgaatgtctgtcttcatcttctccgtcatgtgctccacgttgacctttaagtcgtggatgttgaaagggtcctcgaagacgtaggcggcgtcggcccccacagcaatgccagtcacggtggccaggtagccacagtaaccccccatggtctccacgatgaacacacggcgcttggtccccgaggcagactgtttgatgcggtcacagctctccatggcggcatttacagcagtgtcggagcccaggctgaagtcggtgccagggacgttgttgctgatggtggctgggatgacacacatgacgatgcagagctcctcgtagcgcccgcgagcctccaccagctgcagcaccccttcataggcctcaaacccaccgaccaccagcagggcgtgaataccatagatgcggatgttctccacaatggactccagctggcccttgggcagggtcctcttggtccccagcatggagccaccacgccccaaccagccggccacgtcgtgccagcctacttcttgcacctgacccttggctaggccttcgaagccatcgtgcaccacgtatactgtgtgtccatgggagatgccggtccgcaccgccgagcgcacggccgcattcatgccagccgccggggcccccacattcaggatggccagggagaagttagacttctccttggggggcttctggtgggtgaggagcttgtaaatgttccagttgttctcgaagctcccaccacggagctgggtggcctcgtcaaacctcttgtcatccatggctttctgcacttccttggtcatctgcacgcactccatgaggggcagccgcactgactggttccccgagagggtgaccacgcaggccggcgtgtcaggcgtggcttccagcagcgccatcaccgcctccatgcccatcttgctgctcaggatccggtcgaaggcagagggcgtccctccccgctgcacgtggcccagcacagttacacgggtgtcgaagcccagcctctgaaccaccaggtccttcacgtagctggacgagatgggcttcccgttgcggtcaatggcaccctcagcgatgatgatgatgttcagtcgggacccacggctccgagtctcacccagcctctcacacatgaagttctcccagccgacctcgggtggagcctcggggatgaacagccagtcggcccctgaggccagtgcagataccagcgccaggtacccgcagtgccggcccatcacttccagcacgaaggtcctctggtggctctgggcagtggtggtgatggcatcgatgacctccatgatgcggtggagggccgagtccgtgccgatggtcatgtcggtgccgcagaagtcgttatcgatggagcccactaggcccgcgatgttcaggtgcgagtaggtccaggctgtagtctctgagatcttaccttccgccaccagctcctccagcaggctgccccactcgctgcggaagatgttggcacctgtgaggctgccatccccgccgatgacgcacaggttggtgatgccgtgctggaccaggttgtaggccgctgcccggcgcccctccctggtggtaaaggccttcgagcgagcgctgccaatgatagtgccgcccagctggatgatgttggagacgctcagccagttggcctgcttgatgttctcacctccctccacgaggccctcatagccctcgtagatgaggaagactttggcacccacataaatgcccatgcgcgtcacagcccggacagcagcgttcatgccttgcgtcgccgccgctggtcaggacgccgatggccttgcccgcgcccgacgcccgcagcttctccaggtccaccgcggccatggcggcggccgaaacacgggcccagctcgcactcccgccgcctgcgccgcgtcgc

SEQ ID NO: 50700 - DNA, 442 bp, Homo sapiens
ctgtggtggtggtgggtgggcttttgttctttgaaattttttttgctacatcacagtccagacatagtttaatgacaatttatggggaacaattatttataaataaaaccattttataggtagtttccttccactgcaagaagtgaggtcattagttttgcaggaaatcctgggcagaaatctcccccgtttatgcctttatgccttaagttacaaccttgggaagattctgacctgggagaattaggagccttatgcgctgccatattctccaaagaattgtgagataaatcactgctttagctccctaatgcgtgtacgtttagtgaaagcacaagaaaacaattatccatccctcctgtctccgaccagagtctccagagagctctgttaatactgcagcaaaggtgtgggattcttcccccatggcctgcagtctcag

SEQ ID NO: 50701 - DNA, 901 bp, Homo sapiens
  misc_feature (1)...(901): n = a,t,c or g
ttttttttttttgtaagtctaagtaggaatttatttacacggacactcaatcatagataaggcgctgtctaggatccacatgcgttccctggagctacttggcatcaggcttcttgtctccggcttcaagcttgagactctccgggggttggcgatagactgggaaagcctcccaggggctgttcaggtcaaatttgcggaactcttgggccaactccaccggctctgccaccacccgcttcacttcatcatcataacgtaactcaacatagccagatagaggaaagtctttccggaaaggatgtccctcgaagccataatctgtcaggatccttcttagatcagggtggttagcaaagaagactccaaacatgtcccagatctccctttcataccagttggctgccttgaacacagagacagcagacttcaatgggcgtcagcctcatctgtgtaggtcttcacacggatccgtgagttgaagcgcagagacaacaggttgtagacaatctcaaaacggttttgccgagttgggacgtccactgctgtcaagtcaaccagagatttgaactgtgcattggtgtgatccctgaggaaagtcagcactgggatgacgccatcaggatggatacagacctctaactcattgaagcaggacacctgaacttgttggacatacttgggcaagatttcagccacatactctccaaaagctgagagctgcttgtgggccacatcattccgtggtctgacagtggggcgcgtgtcggccccggcgctctccccgctcaccggcagcaacagaacggagggtcgcccagtccccctggtcagcgccgaggcccccaagatcccgcgccacgnacgagcctgaccgccgcgccgccatgttactcagatg

SEQ ID NO: 50702 - DNA, 1723 bp, Homo sapiens
gggtaagtgctttggtaggaaaaatgcgggtttccatcaaagtacatggcagggatacctaaatctggtctatgagtcactaaagacttcctggatatgatggtatctcagacgtaaaggtgggtagaaggtagcaagggcaggggagaagagaacaggatctggagacactccatgaagactcttctctactgcagaaattgtcatagacctaatttttaaaaaaatgaatctgaaggagtaattcaacaaatatttattgccctcaagtataatagctcagggcctgcaagcctggtaaggaggggtgtgggcagggaatggggaatagcagagcctgggaaggcagatcaccgtgttccctttaataccttccccaactgccctgaagtccccagagtcatgggacacaaacactcccagtcccccactgtctctctagcctctgatatgcattctttccctgtgtatatacatgccttttcccataaaatgcaccagtctctcaccacactaattctgagtacttcagagtctcacaggtcattctgggtctagaataggctccccaactcagtgattataagtaggaagaggaaaagcaacacatggggattctgagccaggctttatgacaactaattcctgctggagagaagagtcctgatgatgggctgtctccagatcctatcttatcttcatgccattgtatgggctataacctctgcctgtaactctctctgctaatttttattttggcagttttaattaacccacaattgctgagggcaattaatacctaaaagaaagtttgattcctcttctaagatatcctaggtagtgtcatttctaaagaagacttggtgatcactgcttgtattagtccattttcacagtgctatgaagatactacctgatactgggtaatttatgaagaaaagaggtttaattggactcacagttccacaggcttaacaggaagcatgactggggaggcctcaggaaacttacaatcatggcagaagggcgaagggaaagcaagcaccttcttcacaaggcagcgggaaagataaaacgaagggagaagagcctcttataaaaatctccagatctcatgagaactcactcactatcatgagaacagcatgggggaaatcaccccttatgatctaatcacctccccaccacgacccctcccctcaaccaccctggggattacctattggagatttgggtggggacacaagagcccaacccatatcactgctgttgtgggtaattaggggaggtgaaattggggggacaattcggcctctttgtgtccagaggttgtgcagttatcgagtgaggtcgatcagaagtcttaaagggatcttttcaaatggatagtgagttgccttttccttataggtgacaatcagagatttaatgttttaagtatcatataactaggtttttctccctgattgtgaattgtaagtgttggtaatacagaaaaatgagaaagtataaaccacccccaatcccaatgcccatagaaacgttgttaacattttggagtactttctattagtgtttatttttcccaatcctagtatttttagtaaaactactgtttagtaaatgatttttggtaactaatttcaaaatttatacttcaaccgtttattattagaatgtaatgcaagatgtattgcaataaaacttgagttttaaaagttac

SEQ ID NO: 50703 - DNA, 544 bp, Homo sapiens
  misc_feature (1)...(544): n = a,t,c or g
ggcacgagcgacttctacactcttacttctatctgcgccattggcatctgaaccaaatgagccaagagttcctgcagcaaagcttgaaagagggtgaggctgccctccactattttnaggagcttccctctgccaatggctcagtgcccattgtctggcaggccaccccccggccctggctggtgatcaccatcatcactgtggacaggcagcctggcttccactacgtcctgcaggttgtgtcccagttccaccggcttcttcagcaatgtggcccccagtgcgaggggcaccaactcttcctgtgcaacgtggagcgtagtgtgagccattttgatgccaagttgctctccaagtatgtccctgtggccaatcgctatgagggcactgaggatgattatggtgatgacccttcgaccaactcgtttgagaaagagaagcaggactatgtctattgcctggagtcatccctgcagacctacaacccagactacgtcctgatggtagaagacgatgctgtaccagaagagcagatctttccagt

SEQ ID NO: 50704 - DNA, 1189 bp, Homo sapiens
ctttttttttttttttttttttcaatgtgcaaagtcttttatttaaaattttagaagttaagacttacgaccacctcagtatatgccattcctaatagaaggaggtatgacggtttcaaactcgtgcagagctgcattttcatttacaagtctctgtaggcactttagaagtgaagcttggcttcaaaatacaaacactgggggctttggctcaaccttttaatataaaaaaattcactgatgtacaaaaatttgaaagtgtgacaatgacaattatgaaatcctgtgactgaaagtcccctcgagtgcactctgtggtgcacatgcgcccgcccacacaaactctggcatgggaaacataaactaatgcaaaccagtgctacccagaagcaccaacacgtgtgttctccattccaccaatcacagaccagtatctactcccaaacatccagtaacgaaaactatggcatcttcccaggaacagcaaggcaggcttcttactcacgatgaaccagcacgaataaacccagcaaaaagagaactgcatacttaaatttaggatagtcattcatgaggatcgtcacaattccaatataaggaacaaatcccctggctctccccacaacatcttttttctctagccaatgttgtccttgtttatagaggcctcggtcatcaaccgcattattatctcctttggtcaaaaacttgatatgcccattttgcttttcatgaatcttcaagactcggtgaactataggaatctctcttccttctatcctaaaaacaacaatttctcccactcgtatgggatcttcaactcgatttgttagaaagagaagatctcctctatgaaatgcaggttccatgctgccactgagcaccactacaatcggactttcacttccagttattaccattaaccccttccagatcattagtgccgatgagacaatcattccaaaatttaggacttgataatagagcttacaggtgtataaagtgcttcacacatggcaagagctcaaaaaagttattgttttgccttagtccttttctacacatttaggctccttgaaggccgagtctttcttaactatctttgcatttctctcattgtacctgccgcttgttcatccgccgcacatcgtccaaaaagtctagagacagcatggcggggacggcgagc

SEQ ID NO: 50705 - DNA, 2232 bp, Homo sapiens
aagcttaatgatttatgggtgattagctgcaagaatgcaagcacagaagacacaaacctttatgccttggaaatttgtcacaagccaaccagttgttttccatccctgtgaagcaggaataattggaggtctgacagaagaacttcccagttaccagaaggagcagcactcatgttctctcttagttttgtgtgaggtgttgcccctgccttggtcaacagtttgagtcagagagatgggggccgggcacaaatccccaccagacgttcccattcacagaccctgtgggggctgggagacgccctggggcaagcagccctggggtaaccaagggaacaaacacggaaaaccaggacgtcagtccttatctggagctcattaaatggggaacattagtcagctgtgaaggccaagatagggtgataggcctgtgggtgggctgggatggggcatgggggcagaggccgccatggaggagaagaggtattggcctcaacgaactccacctccccgccacgtgcccagatccgggatggaaggaccctataaatgcccacaacccagcctccccagaggccttgagaaagagagcgatagagtgcgagagcgagtgcccggagcatcctggccctgagacagctgggccagccccgcagggctctgcagcatgtgggagctccgctccatagccttctccagggctgtgttcgcagagttcctggccacactcctcttcgtcttctttggcctcggctctgccctcaactggccacaggccctgccctctgtgctacagattgccatggcgtttggcttgggtattggcaccctggtacaggctctgggccacataagcggggcccacatcaaccctgccgtgactgtggcctgcctggtgggctgccacgtctccgttctccgagccgccttctacgtggctgcccagctgctgggggctgtggccggagccgctctgctccatgagatcacgccagcagacatccgcggggacctggctgtcaatgctgtgagtagccacaactttgccatccacaaggggtgcccctaccccggccctcttctctgtcccccagctcagcaacagcacgacggctggccaggcggtgactgtggagctcttcctgacactgcagctggtgctctgcatcttcgcctccaccgatgagcgccgcggagagaacccgggcacccctgctctctccataggcttctccgtggccctgggccacctccttggggtaggtcatggccatgggttccagcctcccttcccttctctctttgattgccctcctcccactgcagatccattacaccggctgctctatgaatcctgcccgctccctggctccagctgtcgtcactggcaaatttgatgaccactgggtaatggctgaaaccccctgccctccccgccaagccgccctctccgctcgcccccaggtcttctggatcggacccctggtgggcgccatcctgggctccctcctctacaactacgtgctgtttccgccagccaagagcctgtcggagcgcctggcagtgctgaagggcctggagccggacaccgattgggaggagcgcgaggtgcgacggcggcagtcggtggagctgcactcgccgcagagcctgccacggggtaccaaggcctgagggccgccagcccgtgctaaggccccgacggacgcttgtgaggcccgaggcagaagggcccaccccgtccctcctctcccgcaggtctgaagttggccccccagcgcagagtagctgcttcctggacgtgcgcgcccaggccagtgctgtgagcaggcggggaggaggctgccggagggagccctgagcctggcaggttcccctgccctgaggctgtgagcagctagtggtggcttctccagcctttttcagggaactgggaacttaggggactgagctggggagggaggcaggtgggtggtaagagggaaactctggagagcctgcacccaggtactgagtggggagtgtacagacccctgccttgggggttccgggaatgatgcaactggttttactagtgtgcaagtgtgttcatccccaagttctcttttgtcctcacatgcagagttgtgcatgcccctgagtgtgaacaggtttgcctacgttggtgcaagtgtgcatggctggggacttctcacttccccttgcaccccttcctcccgtacctgcaataaa

SEQ ID NO: 50706 - DNA, 475 bp, Homo sapiens
ttttttttttttttcgggaaacaggaggatttatttagatgtacaccggctcagtggatttgtatctgaaaagctgaccattgaacaaagactgagtgtggtttttataggcaaacttacagaagcaaaacaaaagccagttaatgataccagtcacaggtcatgtaatctatagcataactgctgacttagcataacttgtggctttgcacagctgttggccttgcagctgtgtcaaaagaaaaacagagtctacaaatcttactaaatacaaccattggcaaacagtcatatttaatggttcagaaaaggagagacagtaaaggaatttttcttttcaactttgctccggaggaggctgtctggagcccattcctttggcctcgacttttcagtgttataactgtccttgaaggtaagctggctaagcagaggaaaacttgttcttgttttctttttaacccttaccccctgc

SEQ ID NO: 50707 - DNA, 1113 bp, Homo sapiens
taaatagcagcaatccaactttaaaaaaatgcagcactaaaaaaataactagtccttattcccatgcaggactaactgcaggcagcacatttgtatcttgcttaagttttgactttggattcaagtttttattacaggtgtcatgattgccaatactgtcttctctaggtgaagtatggttgctttgactttggatctaatcaagatagggaaagatcaaaagatttatttctgaagcttgctacagttttctaggggtcacattacatctgactttattcccagtcctcttatcctgtgaaggctggtacactaggaaagggatatttaaaaatgtcaagtgtgcatagctaatgctacttaaaagcatgcaacaaaatttgggtaagcatgcttgttaagagtcagtagaagctcttgcatttaagaaaaagatgcatgaaaacattcagacttatttctggcaactggattcactggcacaacataaaataatggtactatactgtaccaacataatggtgaaacaagagtattctccgatcaagtctttgaggaatccacatcaggaggttaaattcctaaatcccttaataagttctcagctaccggaataactacttccaaaaaatacatttatggcttcaattttctcttttcttcattaaccataatggaaatatttctctttcctttcctggatttccaactcccaccccttttcagtgcccagcaattttaatctatatttttctttcacccgcattataaaatttggctttctggtaacagggagcccagtgattgtcttctgcctcatcttctttgaattaaagcttctgatgaaagaatatcccacggtgtctcttaccatcgctgtgcattctgggcagcaagagtcactgcatccttccttttgcttgttggagccatctgggccacacaggtgaggagcacttcccagccaagctgagtcacacacttccttcaccacaagttaaacggaaacacacacattcaaatcccagtgcaatatcaggttttcaggaagcagggcttcccccaaagatgatcagtctctgtttccaaatagtctcactcttcgttatggac

SEQ ID NO: 50708 - DNA, 1041 bp, Homo sapiens
ctgtgaccaagagcaccagtctgccctggaggaagccaagcagcccaagaacgacaatgtggtgatccctgagtgtgcgcacggcgcctctacaagccagtgcagtgccacccctccacggggtactgctggtgcgtcctggtggacacggggcgccccattcccggcacatccacaaggtacgagcagccgaaatgtgacaacacggccagggcccacccagccaaagcccgggacctgtacaagggccgccagctacaaggttgtccgggtgccaaaaagcatgagtttctgaccagcgttctggacgcgctgtccacggacatggtccacgccgcctccgacccctcctccttcgttcagggcaggctcttcagaacccgaccccagccattaccttaggaggagcgggtggtgcattggtaatttcaaattattgggttaaaaattccagtgggagaacttcgggcaaaaaggaaatcaaacccttcaagaggttccttcgcaaaaaatcaaagcccaaaaaatgtgtgaagaagtttgttgaatactgtgacgtgaataatgacaaatccatctccgtacaagaactgatgggctgcctgggcgtggcgaaagaggacggcaaagcggacaccaagaaacgccacacccccagaggtcatgctgaaagtacgtctaatagacagccaaggaaacaaggataaatggctcataccccgaaggcagttcctagacacatggggaaatttccctcaccaaagagcaattaagaaaacaaaaacagaaacacatagtatttgcactttgtactttaaatgtaaattcactttgtagaaatgagctatttaaacagactgttttaatctgtgaaaatggagagctggcttcagaaaattaatcacatacaatgtatgtgtcctcttttgaccttggaaatctgtatgtggtggagaagtatttgaatgcatttaggcttaatttcttcgccttccacatgttaacagtagagctctatgcactccggctgcaatcgtatgg

SEQ ID NO: 50709 - DNA, 378 bp, Homo sapiens
gtggagaaagcggctctgggtctagattgagggatactccccctttccaccatgggcaagaagggcaaagttggcaagagccgacgagacaagttttatcacttggcgaaggagacgggttaccgttcccgatctgctttcaagctgatccagctcaatcgccgttttcagttcctgcagaaagcccgagccttgctggaccctgtgtgctgcgccagggggatggctgcaggtagctgccaagtttatgcctgtatccagccttattgtgggagtggacctggttccaatcaagcctctccccaatgtggtgactctccaggaggacatcacaacagaacgttgtaggcaggccctgaggaaggagctgaagacctg

SEQ ID NO: 50710 - DNA, 350 bp, Homo sapiens
gaacaacacaacgggctgtcactgggggccgtcacccagcctgggtctctactgagctgcccaaccccaggtgccatcctttcgagtagggtaatgtcactgatgctggcagttgagcaataatatcttcctcctttgggaggtagtgtgactgaggaggaaaccccaccctttttctcctcactgtgcctcagttctcaggggactccaatgactgttgtgttctcccccgaccccaccccaggcacagcgcaggcccttgttaggtagtgtgctgggacgccctccgtaatacatgcagtgtgcagccagtctggctcaaggaatgctgtgtatggtggggacggttt

SEQ ID NO: 50711 - DNA, 419 bp, Homo sapiens
cattcttcgtttcactaccaaagacatgtcggaatgcatttaggaccagcatctatagctgctggcatttttttcaaatagactgagctacattgaaaaggcagaccattatataacttgtgaagattaaatagtcagttatttttgtcatttcttctagcttacttacaaggtgaattaatgagcattctctccaaatgaagacatcacagcctcattcctaacacagaaagttatttatttcaaatacagtttcggtgggtaaataaggtggcgcattccttctacagaggacacacctaggagagcaagatacgtcccagtgaaacacagcttcgtcaccaacttcagtcaactctttggcaacatcacatcagcccatcaacttaacagatttcgagaagttttggcagaaaatg

SEQ ID NO: 50712 - DNA, 364 bp, Homo sapiens
ggcgacttgcgccgaaatcctgcggagcgagttccccgaaattgacggacaagtcttcgactacgtgaccggcgtcttgcacagcggcagcgcggacttcgagtctgtggatgacctggtggaagctgtaggggaactattgcaagaggtgtccggggacagcaaggatgacgcggcatcagggccgtgtgccagcgcatgtacaacactctgcgtctggctgagccacaaagccagggaaatagccaggtgctactggacgcccctatccagttgtcaaagataacggagaactacgactgtggaaccaaacttcaggactgctaaagagggaacagtcctcgacagtgaatgcaaagaagtt

SEQ ID NO: 50713 - DNA, 624 bp, Homo sapiens
gagagaaagaggtttttaaattctccatgaagtgtactatgttccatcattccttcccaaagccaccggaagcattccttctaggaaaggtggagtcggtagtgagaagccggaggtgcccctacagacatacaaggagattgttcactgctgtgaggagcaggtcttaactctggccactgaacagacctatgctgtggagggtgagacacccatcaaccgcctgtccctgctgctctctggccgggttcgtgtgagccaggatgggcagtttctgcactacatctttccataccagttcatggactctcctgagtgggaatcactacagccttctgaggagggggtgttccaggtcactctgactgctgagacctcatgtagctacatttcctggccccggaaaagtctccatcttcttctgaccaaagagcgatacatctcctgcctcttctcggctctgctgggatatgacatctcggagaagctctacactctcaatgacaagctctttgctaagtttggggctgcgctttgacatccgacttcccagcctctaccatgtcctgggtcccactgctgcagatgctggaccagagtccgagaagggtgatgaggaagtct

SEQ ID NO: 50714 - DNA, 798 bp, Homo sapiens
aagcagctgtaaggtttttggtagctgtcagtgctagcaaacagtgcttttctcacagaactactggaaagagtcctggctcggaaaacttgctcttgaaagtggcacggccagagcaggggtctctagagggtcgtgccacctctacctgccacaggttccattgtcggtcagcttctagaattcctctccagagctactctcaagttatatccaggggacaggcccctttggctccaacccacacgcctgaactttaaggatcattggactatcttctctgtggccagcgcagctctcttctgtgttcacagaatggccactgataggcacgcctcttttcccacccactggaaggctcacaggcaaggtgagagaggacacagaaggtgccaacactgtcgctacagtaaggacctgaagtgactttgagaaattcaccctcacaaaccttccttcaggagcaggcattggtagtgcagaggcacagattccgtcctttaccagctgcagaatcttgggcaagttacatagcctctgtgagcctcatcggtaaacagtgggggttatgaaacccacctcacagggttgttgtgaggatccaatgagttgatttaggtaagcacctagcacatgccatggcaccaagtaagcactcaataaatcactcaactccttagaaaaaagagagatcatatacccgatccatgcgtgtgaacgacgcgccaagtcagtaggtgaaatcgacccggaattcccagcagtacctgaggggatcacattccctatcagggtcgt

SEQ ID NO: 50715 - DNA, 1665 bp, Homo sapiens
  misc_feature (1)...(1665): n = a,t,c or g
tctaagatgtgcccaagcgatgtgtaccgcgtgtggaagcggggtgagagcctgcnagtagacaccagtctcctgggcttcgagcacatgacctggcagcggggccggaggagcttcatcttcaagggccaggaggcaggagccctggtgatggaagtggaccatgaccggcaggtggtgcatgtggagacactggggctcactctgcaggagcccgaaacactgctggccgccatgcggcccagcgaggagcatgtggccagtcgcctcacctctcctatcgtctccacccacctggacactcgtaatgtggcctttgagaggaacaaatgtggtatctggggctggcggtctgagaagatggaaactgttagcggctacgaggccaaggtgtacagttgccaccaacgtggagctggtgacacgcacacgcacggagcacctctctgatcaggacaagtcgaggagcaaagcggggaagactccattccagtccttcctggggatggggcacaacattcttccacacccgggcccccgggaagaaggaagccagccccaccaaccccacagccatctcccctgaggagtacttcgaccccaacttcagcctggagtcacggaacattggccgccccatcgagatgtccagcaaagtacagaggttcaaggcaacactgtggctgagtgaagagcacccgctctccctgggtgaccaggtgacccccatcatcgacctaatggccatcagcaacgctcactttgccaagctgcgcgacttcatcactctgcgccttccacctgggcttccccgtcaaaattgagattccccttttccacgtgctcaatgcccgcattcaccttcagcaacctgtgtgggctgtgatgagcccctgagctccgtgtgggtgccgggcccccagctctgctgttcgccgcatcaggtaccccaacgggaggaagagggagcctgcacagctttctggtcaccaagccccgcgggttgagcgtggcccctctgccaactgcctagggaaccctttcccgtgcgaggtggaccccaccgtgtttgaagtgcccaacgggtacagcgtgctgggcatggagcgcaacgagcccctccgggacgaggacgatgacctcctgcagttcgccatccagcagagcctgcttgaagcgggcactgaggcggacanggttgaccgtctgggaagccctgaccaacacccggcccggtgcccgccctcctccccagggccacggtttattgaggaacagtttcagttggagcgggggcccttccaggaaagcctgnagctgtcccanaagaacccaggggccccaggatcccctccccaggacacccccagcccccggtccacccagctttgaagagcagctgcgcctggccctggagttgtcttcacgggagcaggaggagcgggagcggcgcgggcagcaggaggaggaggacttacagcggatcctgcagctgtcactcactgagcactgagccatagccccgggagggctggccaggccactccctgcccgcttttgtaatttatttatttataaactctctgctgctgagcttggggcctggagccccaggaatgagcaggcaggggagactgagatggaaataaagagactgtcgcagca

SEQ ID NO: 50716 - DNA, 508 bp, Homo sapiens
ttgaatgtagattttaataattgaatttattctgccgtgttgatagaataactgaatatcagtaaattgtgtaacattggtggatactgttgcataagatgagctcctgaagagtgaagctaattctttggtcaatgttcttttcccctcagtgtctagtttaaggcttttagaagattgatctgtagcaattatttaatgaattgaatatttaaaaaattttttatttgctgtctttggtaattatctctctgcttgaaattaaatgcactataagttaatataacaagtaaaatacattgtcttttgaaaatagtttctttttaaaggaatactaattaattgtaacttgtaaaaccaaaagttctaatggtttttaaaaaccagtgttgagtggaaaagtgtttctttagtttggaaagacctgtgaagtatcctagtcagggaaagaacctgttttctggaagaatgtaagttgctatatgtggaggggcatgtaggacagggg

SEQ ID NO: 50717 - DNA, 1721 bp, Homo sapiens
agattatcggttaggtcatttgtgggttgattcttcagaaacagcagttgatacctagcagcgttattgatgggcattaatctatgttagttggcaccttaagatactagtgcagctagatttcatttagggaaatcaccagtaacttgactgaccaattgattttagagagaaagtaaccaaaccaaatatttatctgggcaaagtcataaattctccacttgaatgcgctcatgaaaaataaggccaaaacaagagttctgggccacagctcagcccagagggttcctggggatgggaggcctctctctccccaccccctgactctagagaactgggttttctcccagtactccagcaattcatttctgaaagcagttgagccactttattccaaagtacactgcagatgttcaaactctccatttctctttccccttccacctgccagttttgctgactctcaacttgtcatgagtgtaagcattaaggacattatgcttcttagattctgaagacaggtccctgctcatggatgactctggcttccttaggaaaatatttttcttccaaaatcagtaggaaatctaaacttatcccctctttgcagatgtctagcagcttcagacatttggttaagaacccatggggaaaaaaaaaaatccttgctaatgtggtttcctttgtaaaccaggattcttatttgtgctgttatagaatatcagctctgaacgtgtggtaaagatttttgtgtttgaatataggagaaatcagtttgctgaaaagttagtcttaattatctattggccacgatgaaacagatttcaactgataaagagctggagaactccatgtactttggaatctcctccaagatagccagagtttaatacatcttcattctcaacactctccaaagaacttgacctaccttatgggttccatatttttcttcttaaatgtgcatcaatcatggccttgcccccaacctttaaatatattcttagacctggtaaatgcactcaggacttgcgtctttaggaatttttaactttctttcactacattggcacttaaattttttctttataaagctttttgaaggtcataaacaaagaccataattgatgatagacctaatacatttcctctgtgtgtgtgtgtaacattccaaatactttttttttcttttccactgtttgtaaggtgcaacaatttaatatttttaagggactttttaagagttccttaagaaccaatttaaaattacttcagtgcaatcctacacagtatcaacattagaattttgatattagtcttatgttatcttccattctatttttatctgctttttgctgctagtttcaaactgccagtatttttccttttgcttttaaaatagttacaatatttttcatgatagccacagtattgccacagtttattataataaagggtttttatttgatttagcgcattcaaagcttttttctatcacttttgtgttcagaatataacctttgtgtgcgtgtatgttgtgtgtgtgcatgtgtggcgtatatgtgtgttacaggttaatgccttcttggaattgtgttaatgttctcttggtttattatgccatcagaatggtaaatgagaacactacaactgtagtcagctcacaatttttaaataaaggataccacagtgcatgctgtttgttcaaaaaaaaaagtcga

SEQ ID NO: 50718 - DNA, 430 bp, Homo sapiens
  misc_feature (1)...(430): n = a,t,c or g
ggtgctgtgcttttgaagcccagtgtgttttatgtattacagcacatcttggtttggacagaccacatagtggccagtggtgccatattggacagcactggtgtaagagggtccatctctcactcccacatcaatgtccaatggtttctcattcaactggaaagtgaaattggaaatcttgtgaaagatgaagaattatgaatgtggtacgttgaactgctgggcccacccacaagacatcaacaaatgaaggtgtggaagggttaaaccagttaacgttgaacaaaggacaatggatatgatgagttacaannnnnnnnnnnnnnnnnnnnnnnnnnnnnnnnnnnnnnnnnnnnnnnnnnnnnnnnnggtgtaacttatttggaaactagatcattatagaagttaaaacgaggtcataagggtgggc

SEQ ID NO: 50719 - DNA, 540 bp, Homo sapiens
tttccaatgaaagtctatttatttgctcgtaatgagacagaacgctacaatctgttcaacactgggctggacactgcagtgattaggggcaggtgtggggcagggtggggcctctgagcccgaggacaaatgtccatggcagagccttccagaagactcgtcccttaccctgtggggcagaaatagaaatcacatgatcgccactgattcgcagtggagagggcgctgagctgggcccggcaggcaggcagcctcagcagagattcaggcagtcagcatggtgcggccctcccgccagcactgtcaggtcagcagaggttcaagcagtcagcatggcgcggccctcctgccagcaccgtcaaggagggggatgctgctcctgcctggtgcctgccttcattctgaggggcccctggccccagctgagttcaagaggggacctggggctgccccagcaccctgagagcccgtggctgggcagctctggaggcggaaggacacaggtccctgaggccccgtctgcccagggttgttcctccc

SEQ ID NO: 50720 - DNA, 49 bp, Homo sapiens
tggagagaaataaaacttcctgtgatctatgtatcggcccagtacataa

SEQ ID NO: 50721 - DNA, 366 bp, Homo sapiens
  misc_feature (1)...(366): n = a,t,c or g
gcagcgtgaatataaaaagaagaaagctttgaaaaaagctcagagaataaaagaacttgagcaggaaagagaggaccagaaagtgaaatggcaacanttcaacaacagagcctattctaaaaacaaaaaaggccaggtaaagaggagtatttttgcttcacctgagagtgtgactggtaaagttggagtaggaacctgtggaattgctgataaacctatgacacaatatcaagatacctctaaatacaatgtcaggcatttgatgcctcaataatcagaaaaactgttggatttcatctctgcagggcttttacatttacctttttatccttatatttttcctaaaggtaaattatttgttagatg

SEQ ID NO: 50722 - DNA, 175 bp, Homo sapiens
gcctggcctaaatttaagattttgaaaaatgataatcaggcggctgaggcgtcttctaaaaaacaagttccattctacaatcttacggaaatctgagacatcaaattcctgtgaataaaggtaatttttaaagttttagggttttagtaaactaaactagtaattctgcagtacc

SEQ ID NO: 50723 - DNA, 365 bp, Homo sapiens
  misc_feature (1)...(365): n = a,t,c or g
caaaaggccaagacgttccaaaaatgtgctgatttggaggtggctttcctagcttgatgctggatcagtctgttttagaagcacttccacctgatctccgggaacaagtagagcaagtctgtgctgtccagcaagcagagtcacatggcgacaaaaagaaagaaccagtaaatggctgtaatacaggaattttgccacaaccagttgggacagtcttgntgnaaataccngaaccttaagaatcgancatgtgacgcnggaataaatttantagtcctttcancattttnacagntngaccctgnngtatttgntgccttctgttanctttatangnngctganagcattnttntnntnaatgac

SEQ ID NO: 50724 - DNA, 479 bp, Homo sapiens
gctcatgcctccattatgaaactgaacccaggccagccatggataagctctatgacctgatgacccatggctttcaaatatcaagtattgctgtgtccccgacccaaggatgtggctggctggtcactttcaattcacttggataccgatcaagggattcatccgagacttccccaaccatcctgaagcaagtggacgagactttggcggcagctgaccagaaatatatggtggtctctctgcaggggagttccagctgattccggcagacactcctcatcttcttccaagacctgcacatccgaagagagtgcttctggaagcatatgcaagaaactgttcacagtgcacagtgttgccttccaggagtggggaactatatggaggacaggagaaggagactgactttccatcatgtatacccttttgagaactttgagttttgtacctgggcaaaataaaattttaaaaaggggaag

SEQ ID NO: 50725 - DNA, 297 bp, Homo sapiens
ttaatagactttatttttttagatcagttttaggttcctcaaagcaaaactgagaggaaggtacagagatttcctatatagttgttgtccccacacatgcatagtctccaccattttcaacatctcccaccaaagaggtacatttgcagtaattgatgaacctacactgacacatcattatcactcaaagtccacagtttacattagggttcactcttggtgttgtacattttagggggttggacatatgtacaatgacaggtatttataattatagtatcatacagagtagtttcg

SEQ ID NO: 50726 - DNA, 531 bp, Homo sapiens
attacttgtatgcaatatataccttttttggtcggaatgattcattggaatcaactggactcggccttagtagtagtagactaagaacaactctaaacagaatacaagaaagccttattgatctagaagtttcagctgatcctactgccacactcacagcagcagaagaaagaaaggagaaggtgccaagtccacacctcagtcacctagtggttttgacatctggggatacgctgtatgggttggcagaaagagtggtagccacggaatccttggtattcttggctgaacagtttgagttccttcagccacatctggatgctgtgatgcctgcagtcaaaaagccctttcttcagcagttctattctcagacagtctcaaccgccagtgaactacggaaaccaatttactggattgtaggctgggtaaagcccttgattatggaacagatgctggcttctgcatgggctaatgtggaaatggggatggtaaaaggaattattgttcacaggcacaacatcttatgttagg

SEQ ID NO: 50727 - DNA, 666 bp, Homo sapiens
ttttttttttttttaggctgatcatactagagtatatttattaaatttcaccattatgatcactttgttataactaaattaaccctgacataaactttgacattttaaaaacagagaacatactgatttttcaactattttacttacatgtgttttttaattctcatgcagtgctcataattaggagatactacatattcaccctcacattatgcttattaagaaccaagctcagagggtagaaaagtgccaacttcattttccataaacttcccatacatatattaagccactgttcttctaattatatacttatggtacattcttctgtaaaatgtataactgtagtcacataaccattgttatgacaaggcggcaacatcatttcagattacaacaaatgagaccaaaagttgaagagaccacagcatataaaagtcatgagaacaccacacacatttcaatattttccactttccagtcaaaaaaacatgcacaaagttttcttagcagatagttgtcagaagtgcataaaaaaactggctttcaggtcatatatgttgagtgaggatcaatgccattgaggaaagagagctgtgttcattatcttttaggtctgtctatatcatctatagctgctagaagtttttgtcttgctttcttatt

SEQ ID NO: 50728 - DNA, 423 bp, Homo sapiens
gagccaccacgatcgcaccctggccaggctcagcgtgaggcgtgagtgccccgtcctctcttaatgcattacccaccctacaccacagccttttctggctgtcctggagtccctcaggcccccaccaaagtgcccctcatcgctgagaaaagtcacccatggccgtcccagcagcagcttgcccaaagcaaaacttttctttttctaatattttttatttaccttagaagtccatgtggattttgcattccattgcatatttccaagtcggctttgctataaacacaaatattctccagaaagacttgccatgggcatccttcaggcatgtattctagggatacacatacccacttaagtagcagggatggctgtcaaacagcaccccacacctcccacccaaagctggagccctctgtttcc

SEQ ID NO: 50729 - DNA, 1046 bp, Homo sapiens
  misc_feature (1)...(1046): n = a,t,c or g
ggctggtcggatcctcgtctttattctcgggaacggaaacaaccggcggcctgaaaaggaccaaagctcatcctttaaaaataaaatgaaaataaaaaacgtattatttggctccaaaacttccgtcatgagaataacaactctgaatggcaccttttcacacatccactgtgcccaacggccagtgcttcacccaaccgcaggccagatgccgtgactcctaacgtctttagagaacagtatcagacggcacaccaaggcgttttaagacacgggaatttgtttcctatggacatttcttttttaccaaaaaaaaatataataacttagtttgcattttacagcatttccaatcggccagggcatccttggctggaagctcatggggttgagtgtggcgagaacgtccacagcttcggtaccagggtcaggcctgggcccagggcacgcggctcccagcgcgtggccctcaccgcacggccccaccaggaccgcagcgcccaccgcagcctgtgactcatcaggagaggaagggcagcggcccacggagtcagtccgtgccaacctcacaagggttcagccccctctcctgggcatccctgtacatcctctggaagtccttgaagcgtggggcacagccgagccgcgcctccccgaagtgcatgtggccagtgaagaggaagtcgccatgccccggccgcacgccacactccagcagcgtcctgacgcgcccctgccagtggccgtcaccctcgggcaccggctcgaagaccctgcttttctgccgatagagtctgctcacgcgcaggtggatggctgagtcctgccgctcaggctcgtgggtaacttgctggatggagcctcgaacggcgaagtcgctggtgcagacggctaggagcacctcggtgtcactgcagggacggcacggcgctccacgnccacggcgccgggaccaccctcatttcccagcttcctcgaagggcagacactccccacantctgctgcccacttccctgggtcgcgacggcagcggcacccaaaagga

SEQ ID NO: 50730 - DNA, 682 bp, Homo sapiens
tttttttttttcattttttgtccattttttattgagatacaacttacatagcatcagattcacagaattcaccttttaacacgtaaaattcagtggcatttagtgcattcacagtgtggtgtggctgcctccactgtaaccccagaacatttcatcccaggagcccatcccgtgctggtgtcccttctccccagcagcaggaggagggtgaccacgtgtgtggggtcccaaggaggccgtgttctggttgtttgccgacttcggaagcttctgacacaggcctcttcattctcctttatcttcatttgagttaacagcacacaggtaagagtcagagacatttctaggtctttgtaggtgtgcacgtgtgacatgtcttatcaatgcagacccaccatgtgtgcaggggtggcctgggccctgctggttgggtgtccagctccttgcttttccctctttctgttttccccctgcgtccttccagctgcagctcccatgagctctagaggtcacagctgcgttcagctgatggggaggagggcaaacccctcccctaagggcccttctccaaatcccactgaaacccactgggcaaagccagtctctgccatagccagctgtgaggagggccgggaaccgtggacttcacccgtgtccgtgtgcccaccagagactgactctg

SEQ ID NO: 50731 - DNA, 583 bp, Homo sapiens
ccaccttcagttcatttttttctggattctgaagatgttttcattatttgtcctatggttttggttttatttgacttcgatgggcattatttttatttcgcaataacagaaaaggaattgcatgtatgaagttttcaatcgtgggcttttctttgttgtggggagggggtcgggggatagtttgatttccattttctgaaaacgacagacttggattctgtttgtgtgtgcatattttatccagccttaagttataaagctcatctgtcccgctgcattccctgtgtattttcaggacatggctcgtgggtgtgtgtgttcattgtgtgcgtctgtatgtatttttctgtcatcactgttccctctcctcccgagtgtgcattcagttaatataatcagttgcttgcttctttcaaagtgctttgaaggtcttgaactcacgtgtgagcatctttatcaactatcccaattgcatgttctccatcacatattctcttatttgctctgtaccccctgagaatatgttttagagatattggaataaagctgtctgggtaaggagtaggcttagccgacctatgaa

SEQ ID NO: 50732 - DNA, 399 bp, Homo sapiens
attcggcacgatgggggagttcctgtcccagcacaaagctgaggccagcagccgcagaaggagaaagagcagtcggccccaggccaaggcagcgcccagggcctacagtgaccatgatgaccgctgggagacaaaagaaggggcagcatccccagcccctgagactccacagcctacttcccccgagacttcccccaaggagacacccatgcagccacccgagatcccagctcctgcccaccggcctcctgaagacgagggggaagagaatgagggggaagaggatgaagaatgggaggacataagtgaggatgaggaagaggaggagatcgaggtggaagaaggtgatgaggaggaaccagcccaagaccaccaagccccagaggctgcccccaccgg

SEQ ID NO: 50733 - DNA, 771 bp, Homo sapiens
ttttttttttttttactttaaaagccaaatatatttttaaaagatcatgcttataataagtaaattacacattaaggaaacatcaaaataaagtagatgaataaaaaggcacactcgaaaaatttgagcgcagaaaggacagttctttttgttttgtttctaatgtcggaagaaaaagaaagagatatattaaaatcattgttttcaagtgaaggtttctgtcagttgaagtagttagcaatggcttcttttctcccgtgtcccaaagcaggctcttcctgcgctgacttctgaggaggtgttcagtcctctgccatgtataggcgatacatcaaggcgacggccactgcagagatggcagggatcacccagttggtccaccaactggaactagaatcaatagtagtgataagagtttccggaggcttgtttaactttggtctgtcatctggatggagctccccaatgatgaatgttttggacatttccctggcatctgtagagtgcccgacatcctcaaagttctcagtagcgtcacctccagcttgttcccttaaaacttcttccccaccaggatgctcttccagaaatttggtcaaatcgtacaccttgtggtgcaggatcagccaggtgctcttgctgtggttgtgcttctgaatctcctctagggtgtagtacttcgacggcctcgtccgactgctctgccatctcggttcgccgcgagccaggcccagcacacacagccccgtcgggtggagcagagcgcgcgac

SEQ ID NO: 50734 - DNA, 258 bp, Homo sapiens
tacaatgtcttttataattaagtttcccacatgtccttgctagtttattatgacccatttttgaaccatgctagaaagatacttttttattaggtaactagtgcttcaataaagcaagattctaattaatcaccactagttgtgtataccaaatacacatcctttaagacaatacagttcttaaaagaagaaaaattataattattctaatatttatacaaatcatataacgatttcacagaaccaaacacttacaag

SEQ ID NO: 50735 - DNA, 1538 bp, Homo sapiens
gattgccacctggatgggagaagagaacagacagcaatggcagagtatatttcgtcaaccacaacacacgaattacacaatgggaagaccccagaagtcaaggtcaattaaatgaaaagcccttacctgaaggttgggaaatgagattcacagtggatggaattccatattttgtggaccacaatagaagaactaccacctatatagatccccgcacaggaaaatctgccctagacaatggacctcagatagcctatgttcgggacttcaaagcaaaggttcagtatttccggttctggtgtcagcaactggccatgcacagcacataaagattacagtgacaagaaaaacattgtttgaggattcctttcaacagataatgagcttcagtccccaagatctgcgaagacgtttgtgggtgatttttccaggagaagaaggtttagattatggaggtgtagcaagagaatggttctttcttttgtcacatgaagtgttgaacccaatgtattgcctgtttgaatatgcagggaaggataactactgcttgcagataaaccccgcttcttacatcaatccagatcacctgaaatattttcgttttattggcagatttattgccatggctctgttccatgggaaattcatagacacgggtttttctttaccattctataagcgtatcttgaacaaaccagttggactcaaggatttagaatctattgatccagaattttacaattctctcatctgggttaaggaaaacaatattgaggaatgtgatttggaaatgtacttctccgttgacaaagaaattctaggtgaaattaagagtcatgatctgaaacctaatggtggcaatattcttgtaacagaagaaaataaagaggaatacatcagaatggtagctgagtggaggttgtctcgaggtgttgaagaacagacacaagctttctttgaaggctttaatgaaattcttccccagcaatatttgcaatactttgatgcaaaggaattagaggtccttttatgtggaatgcaagagattgatttgaatgactggcaaagacatgccatctaccgtcattatgcaaggaccagcaaacaaatcatgtggttttggcagtttgttaaagaaattgataatgagaagagaatgagacttctgcagtttgttactggaacctgccgattgccagtaggaggatttgctgatctcatggggagcaatggaccacagaaattctgcattgaaaaagttgggaaagaaaattggctacccagaagtcatacctgttttaatcgcctggacctgccaccatacaagagctatgagcaactgaaggaaaagctgttgtttgccatagaagaaacagaaggatttggacaagagtaacttctgagaacttgcaccatgaatgggcaagaacttatttgcaatgtttgtccttctctgcctgttgcacatcttgtaaaattggacaatggctctttagagagttatctgagtgtaagtaaattaatgttctcatttaaaa

SEQ ID NO: 50736 - DNA, 446 bp, Homo sapiens
  misc_feature (1)...(446): n = a,t,c or g
aatcaaacttgggtttgtctaactccagagtccttcctagtaattaacctccggtgctctgaactgccatgcaaaagaatgtgaacttcattctgaagggaatgggaaggtcgtggaaaatttttaagcatgaaagtgacaggctcaaaacagcaacaccaaccaaccaaccaaccaacaaaaaaccctcagtttttaaaagatagctcttggccgggcgcggtggcttcacgcctgttaatcccaacgctttggggagggccgaggcggggcgggattcacaaaatacaaaaattacaaaactaccaaaaatttggccgggcgtgggtgggtggggcgcctgttggtcccagctatttccggaggcttgagggcagggagattcgctgggacccggtaggggccaaggtttccggtggggccnagttngttgnccattgcattcc

SEQ ID NO: 50737 - DNA, 1078 bp, Homo sapiens
agctcttaagttctggtcagcctatgtgccatgccagacccaggaccgggatgccctgcgcctcaccctggagcagattgacctcatacgccgcatgtgtgcctcctattctgagctggagcttgtgacctcggctaaagctctgaacgacactcagaaattggcctgcctcatcggtgtagagggtggccactcgctggacaatagcctctccatcttacgtaccttctacatgctgggagtgcgctacctgacgctcacccacacctgcaacacaccctggggcagagagctccgctaagggcgtccactccttcttacaacaacatcagcgggctgactgactttggtgagaaggtggtggcagaaatgaaccgcctgggcatgatggtagacttatcccatgtctcagatgctgtgggcacgggcgggccctggaagttttcacaggcacctgtgatcttctcccactcggctgcccggggtgtgtgcaacagtgctcggaatgttcctgatgacatcctgcagcttctgaagaagaacggtggcgtcgtgatggtgtctttgtccatgggagtaatacagtgcaacccatcagccaatgtgtccactgtggcagatcacttcgaccacatcaaggctgtcattggatccaagttcatcgggattggtggagattatgatggggccggcaagtacaggaagaaaacaacatgcaaagccccttggaggacaagttcccggatgagcagctgagcagttcctgccactccgacctctcacgtctgcgtcagagacagagtctgacttcaggccaggaactcactgagattcccatacactggacagccaagttaccagccaagtggtcagtctcagagtcctccccccacatggccccagtccttgcagttgtggccaccttcccagtccttattctgtggctctgatgacccagttagtcctgccagatgtcactgtagcaagccacagacaccccacaaagttcccctgttgtgcaggcacaaatatttcctgaaataaatgttttggacatagaaacaaaaaaaaaaaaaaa

SEQ ID NO: 50738 - DNA, 1280 bp, Homo sapiens
tttacatgaaaacatgtttattgcctgaataataaaacttagctaaggagttattagaattaggattccccctacttgaagtacaagtttccaataaacagacagacagaagcaaaaccccaaatgagaaagaatacattggtaacctaaatcataggcatttgtgggtatgttcatacaatctacctatttctttgtaatttactatagcactgatgacaaagcatagacatacaatgagaaagagcaaatcagcatatcagtgtgactgtgcaaccactacaaagcttggccttcttaaatgtggccactttaacttacacacacccacagaggcatcagaaatctccctgcaaacacgatttgcctatagttttgtggcaatactgttacatagaacaaaaacaactctcagaccatggttaataaataagagagaaaagaagtaagaaacaacttccatgggttggcaggcatgcaaagcagcaccttgaacctcatttgaaaaaccaggcaactgggatagcttttggagcccaggagtgaaggctagaggctgaaaggagctatgcactattatctttgggtatttccacataatctgcaggatggggaagtttaattccgcaccacataaactgtgctcttttagatgtggctgaaacgggtgtctctgcagaattagaaacccatctagaaatgacattgcttaaaattgttctttccaggtgacaattccataacaatcacataaataatgtacaaaaacaaaactaaaaacaaagtcactcaagtgtccaatttttctcttttgaaagatgaccttagatgtattctcaaagtgcaaatcgggatataaaaaaatagtaggtatgggggaaatgtagccccatcttctgtcccccaccctccaaaacggggctgatttgattccctctttctagcatttgtatccttccacctatactttaagataatcatttttcagccgacctagtcgggtcccatggctcctaatggtgagggccagcagctcgtatttgtccctgagccccacagagatgtccagtgtctccttcagcagggacctggtgtggaccagcattcccagaaagtcctcgttgagcctgctctcctgccggctgtcctgttcctggccctgcttgaacttgctctccagctcagtgagggatttgtccgagttggagtaggcatccccgatctggtgggactcccgccgcaggtacttgccatagctctcttccccgtctaggtcgtag

SEQ ID NO: 50739 - DNA, 527 bp, Homo sapiens
gggaaccagtagccgcggctgcttcggttgccgcgtacggtggtcgttatggattctccatgggacgagttggctctggccttctcccgcacgtccatgtttcccttttttgacatcgcgcactatctagtgtcagtgatggcggtgaaacgtcagccgggagcagctgcattggcatggaagaatcctatttcaagctggtttactgctatgctccactgttttggtggaggaattttatcctgtctactgcttgcagagcctccattgaagtttcttgcaaaccacactaacatattactggcatcttcaatctggtatattacatttttttgcccgcatgacctagtttcccaggggctattcatatctacctgttcaactactggcttcgggaatgaaggaagtgaccagaacttggaaaatagtaggtggagtcacacatgctaatagctattacaaaaatggctggatagtcatgatagctattggatgggcccgagggtgcaggtggtaccattataacg

SEQ ID NO: 50740 - DNA, 283 bp, Homo sapiens
ccatctgcatactcttacccactccaaattggacctagcagttccccatctctactccttccaggaagccaggcccacaactcatcctggttttccctacataccacaaccactccttgtctctagccagtctttgtctctcaagggttggggttctgatttcctcttagagataggctcaccttatcttccaaggctcaccttatcttccaaggccaaggagaggtcaaggactggatctggctttgccaggtggctgaaaggacccgaaggagtaggatgc

SEQ ID NO: 50741 - DNA, 360 bp, Homo sapiens
  misc_feature (1)...(360): n = a,t,c or g
gaagaggaatgaactgaagaagcaagcccggctgttctaggcagaggctctataaatatatatgcatttatataaagatatatgtaaaatctctctactgaagctcggtataatcctctcttgtgtaatgggacacactgcctgccatgagacttgcttttctgtactgtcaggcaagcccacgtcatcgagatatttttatgctccttactttctcttttctaagtgctgtgggatctgggaagggatttgaggggactctgtccttttattggggatcctttttatactgaaacatcngtcctaacttgagtgccccaaggtcccaactctctttcctaaagaaggtgcctgaagaag

SEQ ID NO: 50742 - DNA, 441 bp, Homo sapiens
gataatgtaagcattgatcagtttttgagaaaaagacatgaacctgaatctgttagttctgatgttagcgagcaaggcagtattcatttggaacctctgactccatccgaggtacttgagtatgaagccacagagattcttcagaaaggtagtggtgatccttcagccaagactgatgaagtagtgtctgatcaaacagatgacattcctggaggaaataaccctagcacaacagaggcaacagtagacctggaagatgaaaaagaaagaagttgaaattagtcattttaagtttcagtgtacccaacgataagggcatttgggaacagtgctatccaggtgagctcagtggtgctgttgtaggttcagaaatggaaatatgtaagggaggttcacacatacactttacctgtatgttcaacctatgttatcaaacaaacc

SEQ ID NO: 50743 - DNA, 696 bp, Homo sapiens
cgggggcagatttttattgcaaatatttactcaaaaactactatatacagcagagtattttaatcgccatttaaaacattgaacattcagtgaaacaaaatttaagaatccaaagcacattttaagaagtaaaaatgaagcattttaaataaaagtttattagtatttcaaagcaaactactgttcttcatattattcatttctatatctattatattctagatgataaaaagaactgaaaaatcaatttagcagccatcttatagataaattaggctaaatttccaaaaccagttcttttacatcactgttttaggtcccatttgaagtttttattttacaattacagaaaagtcacttaaacatggctgaatacatgccaggacatgttttcagtttactgctttacaatatctacattataccatactttggtttggcttccagaccatttttatgggcctatttctaaggaagatcattaaaacaatattaaaagcataatagctacaggagtttcaacaatgggtttctactttacattaatacaactaatacatcaaagaatttctacacagcttacacactgacaaaaagcacaaatataaatttatatcttaataattccactttcactgaaagtttaattaaggtaagcttacagcctggcaggctaacacttgtatgggtcgacgc

SEQ ID NO: 50744 - DNA, 232 bp, Homo sapiens
  misc_feature (1)...(232): n = a,t,c or g
ctgttgctcgtggccatgtcacggacttctcagtcagcagcccagctgcggggggagctgctagctgtgcacgcacagatcgtgagcacacttacacgtgcaagtgtcgcccgcatcttcgcacacaagcagaactatgacctccgcgctgctggctggttcaaagcgcacactggaccgacttctggacagtatggagcaggacccaggagccctgctctggtgnccgtgc

SEQ ID NO: 50745 - DNA, 651 bp, Homo sapiens
  misc_feature (1)...(651): n = a,t,c or g
taaattagagacagggtctcacttacaattgcctagattggtaccaaactcctgggctcaagcaatcggcctcttattggcctcccaaantgttggctattgcaggtgtgtnccatgnncgcccagcttgaaaaattttttaatgcatgtggtaatccacaggagatcacatttagtatatgaccaagttaattaagaagtcaaaaaacacgttaaatttaagcagaataaggctgggttcggtggctcatgttagtttttatccttaaaattgcctgagttcttagaacacagaaaaaacaaatttgaatgcatttctaacagcttaataatttatatgtcccattatgattttagcggaatgttttaaagcaaagcataattcactgcaaagataaacctgaaaaagcaaacaaacttacaaatggtatgttatgacctagacaaaactgattatcaactagtaatactcataattagcacatgcaacagattgagaaattaaatcctgtgctatatactcttaagtattttgtcagatatatctttaaatgttctatcaattgcattcctttccacacatattttaaacaagaaaacaattgtctttcctccagattctcatgtttatcagtgcaaaacgttgcaatc

SEQ ID NO: 50746 - DNA, 362 bp, Homo sapiens
  misc_feature (1)...(362): n = a,t,c or g
ctggntgggagcacattacgtcatcttcccaactgcctacccccgccctgcccgcctgagaaagccagcggagtcaaacctgggnccccagcgctcgggacgggagtccgggtcatccaagtcccgcttctcccagcctccttacaaaggcgggcacggaggcttgacaaggttgcagattgtcccagggcggtcaggattttacgtcttctgctttgcacccgccgtgacctcgcgcttactccagtggtcctcaatctctggcacctcggaaccactgaggacctgaaaaccacgccagtgcccaggcccaccgacggcctcctgagaggggggccccggcacgagttttttgaaaaagt

SEQ ID NO: 50747 - DNA, 819 bp, Homo sapiens
ttcatatagccacaaaaataagactttattgaaaaaagtacataattcaatataaatacaataaataatcctccccaaactgtccccaggaggataaataatccccaaatttcccttcccatctaataaatactcaaccttatcataggtcagcatcacatgtcagtcagtattggtaattttcaacatatgcaggtcccactaaaattaatggactaattaacctgttggctcacaggtgcctggggtggtagatttatcttggccttgctgggccatggagatctgagtgccatccttgagctgctgcctttagggactcagggttgctgctccatgggcaaagacccgggcggctacagccacaaaggcctggaggctgcgaaggattttgaagcggagaaggagacgctgccatggctggctgggactgaggcttggaatctgctgagtctcccagtggtgaccctcaggctgcaggagttggctgaggcccagtagggaggcatgaagctgcgccacagggctatcagggagcagagaaggctcccctgtgaaaatatccgatcctagcagcttctcataaaaaatcagaccctggtggatcctttgcaagcagaactgactgttgtccctgagtccttgggggtcacagccatctccacactggatatggggaacatcatttgtagtctcttcatctccctcttctcttagatcttgtgtacaacgtctcctatgttcttcccatctctggtcccattctgggagcctttctaacgccacccaacaagtccggcgtctggctgcgtttgtccc

SEQ ID NO: 50748 - DNA, 1601 bp, Homo sapiens
aaaaaagatgcattcctgaagatctctggtgctgaagggcctcgagttcctttcagagactgtatttgacacactttaggtacacacaaacgaatggtatcacatgcaatattttaatggagcaatgggagaggctctttgaaatggggtttgcatctttttgtaacattttgatttctctggtgccttattcctacttgatgctggcactcacatacccacaagaagctgacacagaagtcagccttaggcgtggggacatatgggtgatgtttgagcatgcaggggccatggggagtttggtgtcagttggtggagaagggactagatggcatctcttagccgaggccaacagggaactgcacaagtccattataagtcaaagttagcaatttttgataccgtaaacacaatacttcattcttcctcatctgagctttccttccttcttccttttctatctctaccttctcataaaggtgctgctgctgctgctaaggtgcccggagtccagaatgtccattaatcactcaggcacgagcctggcactgccacgtcagcccccagcatgaccaaacccaggtttctcttgcttggggctgagaactgtcagatttttctcatcaaaaatgttttccaaggaatcagtggattacagtttttctgcattgaaaatgcacttttaaaaataaattaaagctccagactgtttaaaatatacagagggagcaggggaaagttaagcatgtgctagtgtctgaacccagttcagtttatctccagttgaaacgatatacactatattatgtataaatgtatacacacttcctatatgtatccacatatatatagtgtatatattatacatgtataggtgtgtatatgtgcatatatacacacatgcacataacaaaatcagatgctcattacaaatccagatgctcattacaaaaccagatgctacacaaacagcagcagaggaaacaaggttggactcttgcaacagatcacaaaaaataaaaacagctacttgcagtgactttggtcatttctgtatgttcataaagaatggattgtaacaaggaaaaaaaggaacagtgttagtgaaaaaggaaaaatgggcgaaaccatcttgatccgatgcgaatgcagtaatgttctatataccatttcatcagttatttcttttagtcatgttgatttgatttcagtttctggctatgaaaaacatttttaaactcgtcacccacaacaaactgaacaaaactactacagtgaaagcccttttcagtgaaagatgtcagaaacctcaaaacctttggcctgactcagaactaccatgtgaaaatcagtactctcttaatgtttgaaataaaaactgaaaaaaaaaacaaaaaaacaaaaaaccttttttgaagcaccttaacgtggccatccatttgagaagtgggtgccacttttttctttgagcaccttattgatgtgtttgctatctgctgtctttctgttacctgttggctgaatggctagctgttaacatatacatgtgcacagaagagatatctgggcatgtatgttctcaatgaagtttactgtggtga

SEQ ID NO: 50749 - DNA, 369 bp, Homo sapiens
cccaactgtgtctcattcatttcaattttgccaactaatatccatacaatttcttatgcaagatctcggcactgtacctcaatgttatgagaaatgtgactgacagcagatttttccatgtgctcacacatccattcatttgatatcgattgactcaatactgaagccactcatcctttcttacatcctttcaaaacactacaaataagctgcattttttatgtgacaaatctatcttctcaggtgaaactccagtaagattgatcagaaaaacaactctctttggggcaagggctcaaactcatgggccttttttttttctatttaggaaagaaataaaatttaaatgtttaatctactttctacttt

SEQ ID NO: 50750 - DNA, 235 bp, Homo sapiens
accaggtagctgggaaagccacaccagacatgcttttgggcaaccaaacaccctgagttgccacacttccagcatcttctcaccagcccttgtgcgctctggagaaaacgcagaaagccacatacaaggtggaacgaggggtgcccgcgggatgggtggttagtctcacgtcatctaacatgcatacctgaagctgactttgttatcaaccatttatgttgaaatctatttaaaa

SEQ ID NO: 50751 - DNA, 754 bp, Homo sapiens
tttttttttttttttttagtcgggtccattttccaataattctcaaaggagtctgagattccccaagctttcagaaccgctgatttgttctgtgtcagaccttcccattcattgtcttgtcatctcccacagcctccagaatgggaaaatacacatcattgcatgaaagaatcagtattaacaaaacattaatgacattcccttccccatccctgtggatcaaggcaagaagggccattcgccgatgcagataccaggagttggaaggccgcagcagttttgaggcctgcgttcagtgtctggacttccaggtcaagttctgagggtctatggcatctggctgaaatccttgcttcagggaagcctcatgtcctggctcacatgtggaagggggcatcaggagcccctgggcccctgtgaaggcccatagattcctggcaacgtgagaggctaaggagcctcctggtttggacaaaaccatggtggtctgaactggggtgggtgagaggccctgaatgtctagagagcctcctctctcaggtaaaggtgtggcagctggaacatgggcatctatgaggctcttctgctccaacgaaggtgtgagtttttggacctgtgtatctgtaaggcttggctccggaagtggaggtgcagccgctggaccctggatgtctgggaggcttccctgcttgggtgaagttgggagggcttggacccagatgtctgtgaggacttgtggcaggggcaaaggtgt

SEQ ID NO: 50752 - DNA, 447 bp, Homo sapiens
tcaaaactacagaatcgtatttattacagttggacatactaccaacacatacagtattttcaaagtggtgaggagtcttgcatttgcacatgaatcaggccggacgaagaatctacgggccagaaattccctttaagcctccctgtgctcttataactccatttgcacaaacacaggctgagcactcatatgaagcaaaggggtatatcatctactgaaactgatgaacgtcttacatttcctttcagtactccgctgccgcgtgacatctggccaatgcacttttatgatgagcagaacaagtgctcccccgattataaatgttatagctggctctctccctttgcccaagaagcaatccaaatggtattggaattttgttgttaattaaacaaaagcaaaattggaaggatgagactagagttactcaaatgaagatttattaca

SEQ ID NO: 50753 - DNA, 479 bp, Homo sapiens
ttttttttttttcactttttagaaaaagtttaataatagcaggttatcatcatatgtaaccataaaataaaaacaataagttaaaatcttctctcaagaaataagtatatgccacacataaaattcattacagaatcttttttgaaaacagacccctttctctgataaatcattgtttgaagggtgcaaatttcaaaaacccacattgtccacaaggcaaagcaaaaggtatcatcacagtatgagtcatttcttgttggcagacatctggaaaacctgtgacttacaagcagctcaaatctagccctaattaaatttacaggaacctttgctctttcaagaatagtcttgttggcatcatgctaggttgctaaaaagagtaatatgtgctctattcacagtaacattctctgtccagtgcttttgaatgaggataaccaaacaggttttcctgaaaaaaatcattaggaggcagattc

SEQ ID NO: 50754 - DNA, 1668 bp, Homo sapiens
  misc_feature (1)...(1668): n = a,t,c or g
atcctacatatctataccgtggctttttccctctacgtacataccatgataaagcttaacaaagaacagtgagagattaacagcaaccaataactaataaaagctatgtgaatgtggtctctgtcaaaatatcgtgctgtaatcacccttcttgctatctgaaaaccaagaagaccactaagtgactaatggtcagagaagctggatgaggggctgattcatgtcctgggcatgacagagcgggaggcacaaggtttcatcacactattcacaatggcgagcaagttaaaacggatttcccatttaatttannnnnnnnnnnnnnnnnnnnnnnnnnnnnnnnnnnnnnnnnnnnnngaagctggggatatttcagaaattcttttctaatcagaaattctaatcaaacataagtttccaactatgtgttctcttggtcctcagaagtgtttgaatagaaaagtaacaactaacttcccatctttctggtggaagagttaattctgcctggagggttctgcctgggagacatgacagcatgtgtgtgactcctgtgtctgtttctgtggggtcatcccatttcgtttcattttgccagggcctggctcaggattttttatggcagtgcctgtgaagacaaagcctggccctccatccagtcacacaggaaatccacagagagcatgctgagagcagccagcggctgggctgccatcaggcctggtttatgatgccacaagtgaatggcacgtttgttcctctttatctctgagcattgaaggacttttggttaaaaaaaaaaattaagttcagagtaatccttttcatggaagaatcttcaggtcaccaaagaattgaaattttaagccccagattgtactgagctgtacctgtgggaaaaggaatggccagggtattgatgatggaaaagattcaaatgaggagttagaaggcaagccctctgtgggcagccgtcttccagaaacctcgaacttatgtctgtctccacctgagaaaggagaagaaaagctggtggtgacccctgctcctgctgggccatgccatggctctgaagatgccccgtgttcttaggaggtgctcacccctggcacctaaagacatttccttctggttgttgctctttaaaaacaaaataagcccctgaacgtgcttgcaggccagtttgtgtgcctgcacttgacgaattaccttgaccaacgggccaaaggcacagagctccaaggcatcatctttccttaaaatcctgagtgtttattaaaaagggacatggtctctaggtatcttattacatttgtatttcttacatttgaaatatcctaaccgcgtccttcggtttcttcttaagaacatttacatctaattatttttcgtgcaagtcttgtaggacccacatgttttcctagctttggaaatcgatttttttcattcctcttatgaggatttccctatgtcagtaaacattaactttctatttcttccatttttgctcatttgaaacccctgctgcttctagatctatttctttgcacttgtataactttgaaataaattcctcatcccttagactaagagagtgggtgtctgtgaaaattgttttctccttcataatacctaaattctagtttgtcagtaaaatatttgtgtttg

SEQ ID NO: 50755 - DNA, 1242 bp, Homo sapiens
  misc_feature (1)...(1242): n = a,t,c or g
tttttttttttttaaagttataaaaatattttatttaaatgatacagaaaaaaatgtatacttaaaagtgattaaaacttcacattaggaaatgctaaaaacccagtaatgtacataatgataaaatctaaagtgatgagaaaacataaaatattttcatttggtcctgtcacctaacaaaactatcataaatatgagattatagtaattactaaagctggttaaaggcacatgacaacataattcctttatacacatccagtcattttatacaaggaactgctatcccttaaatggaagagtgaactacttgtttaaaatattaacagtgcactatgtacctacaatgaaaccactttctccaaagactcaaacagattaacattgcaaaatagtacttctgtatcactgacttctgaaaattttaataatttatgcatatgcaagtgaaatataatttattctggtttcaacaacagttatacaaagtcacaattttccccaggaaaccattcacttcatagctgcaaaaacacactgtagcttttctgttagggtctgccatgctttcagctagctggatgtttaaccattcacttcaaatttacatgtccagcccaggcacggtggcgtgggcctgtagtcccaactacttcgaaggctgaggnnnnnnnnnnnnnnnnnnnnnnnnnnnnnnnnnnnnnnnnnnnnnnnnnnnaagaccctgtctcttcggaaatcatccaaggagtgtgataaacatgacaacccccataaactgggtaaacaacaacaatggagtgaaaaacgaccacacatgccataaagcaatgttgaagcaaattcctgctgcaataaaggaggcagtggtaatgggtatcaaggctggatacttgacatcatattctccaattccacaataccattccaggtagactatgcagtaaaatgcaattgataaactgacaagcaacaaggcactgccacagagaaaccagctgctagtgtggaagttttctttaagggttttaaagaagtcaacataataggtcacaacaatggatgccaaaatccagaatccagaatggatattaagtcttggaagaggtttctcctttttctcaacagctgtggaggtttccggcccggcgtcaccctcgcggtccagctgggcctcggcgtccggcaggaggaggaatcgccgccggagctgctgccgggcccgcgaggagtccatcttgg

SEQ ID NO: 50756 - DNA, 756 bp, Homo sapiens
tttttttttttttttgacctgagagaattctttttattacgagtgaacagatgaactaaggtaagcgggtctcagccttccgctggtgcagcatctccacgcagggcctcagccccgtcctggccttgcctgaggactgcaccatgggtgttccttgggcatggaggaggcagcaggaaggggtgacaggagcaggagcaggtgcagggcacctcacaccacaggcctcccccacctctgagctgccaacagccaagactcctggcgaggccgggagaggaggggtgagagggaaggagggtctctgtgaaagcaagccccacccccagagcagagcagagacccaggtctgcaaatcacaccctccccccacgagttcctcctttgaggccagcagcacccgagggagggcaggggctgcacagagaccagagaaaggaaaaccccacagaagaaaactcaaagcatcagtcccatgcgtgtctgctgaacgagtgaatgggcccaaaggctcttctctacaaacggcacgcatccatccgacagggggccacaggaaaccgaccggggccgtctgcgtctgtgcctgtgcagcccacaccagtgcagcccggggccctttcagacctcaccacacgcgtgcccagcacatgtgtgcacacgcagatgcaggagagaacacacaccaccgtctctttgcacacgtgtgcccctgtccggcccggggggctcatctctccttcacgtggttctgtc

SEQ ID NO: 50757 - DNA, 437 bp, Homo sapiens
  misc_feature (1)...(437): n = a,t,c or g
cccaagtgtaaataaatttcttctctgttttgagtttaatgtgaccattgtccttatagacatgcttgtaggtacagcctcttgaaatgatttaattaatacaatgttatatataaactttaaaagtatttgacaacatctgatcatgaagattcctatcagtatagaaaagtgtcnnnnnnnnnnnnnnnnnnnnnnnnnnnnnnnnnnnnnnnnnnnnnnnnnnnnnnnnnnnnnnnnnnnnnnnnnnnnnnnnnnnnnnnnnnnnnnnnnnnnnnnnnnnnnnnnnnnnnnnnnnnnnnnnnnnnnnnnnnnnnnnnnnnnnnnnnnnnnnnnnnnnnnnnnnnnnnnnnnnnnnnnnnnnnnnnnnnnnnnnnnnnnnnnnnnnnnnnnnnnnaaaagtgtcagcaggtgttaccagttgccatttaagtact

SEQ ID NO: 50758 - DNA, 339 bp, Homo sapiens; identical to SEQ ID NO: 43387

SEQ ID NO: 50759 - DNA, 633 bp, Homo sapiens
tttttttttacaatgtcccttatacaatttataatctcttaaaggaagcaataaacatttaaactattggactactgggatgtacattttaccagataccagcatcataatcttataactctatatgaaagtttgaaaaaataattataaagtttatttaaatgttgattgtcccaaggtctacagtttcttttctgttgtgtcatcagtgacaaagagtaaaaaaaggaaactcccatatttagcactttagagtaaaacacatggatcatcgttattaacagtcctctgggcgtgctggagctcactgagaaggcttctattttgagcttggaatgttgtgctgagctgtgcagcctgttcctgcatctgttgttcctgcattttctgttgctctgccagccaattttgtttggctatctccatttgtctcacttgttcctgatggagtctctccctctcctgcatcatttgctcgttctgcctttgaatcgccgccaacctttgcgcttcagccttttcagcttctgctttcacttgtgcctctgaggagaaaaagataatctttcttctttttttccgtctctgtgagagcctgggtcagtctgtaatattgcatgactcacagactcc

SEQ ID NO: 50760 - DNA, 3233 bp, Homo sapiens
ctttgcagaggttacctctttttcttgtctctcgtcaggtctctgacattgacagagcctggacgttggaggaagccccaggacgttggaggggtaaagtaaaagtccacagttaccgtgagagaaaaaagagggagaaagcagtgcagccaaactcggaagaaaagagaggaggaaaaggactcgactttcacattggaacaaccttctttccagtgctaaaggatctctgatctggggaacaacaccctggacatggctccagagatcaacttgccgggcccaatgagcctcattgataacactaaagggcagctggtggtgaatccagaagctctgaagatcctttctgccattacacagcctatggtggtggtggcaattgtgggcctctaccgcacaggcaaatcctacctgatgaacaagctggctggaaagaaaaagggcttctctctgggctccacggtgcagtcttcacactaaaggagtctggatgtggtgtgtgcctcatcccaactggccaaatcacacattagttctgcttgacaccgagggcctgggagatgtagagaaggctgacaacaagaatgatatccagatctttgcactggcactcttactgagcagcacctttgtgtacaatagcataggaaccatcaaccagcaggctatggaccaactgtactatgtgacagagctgacacatagaatccgatcaaaatcctcacctgatgagaatgagaatgaggttgaggattcagctgactttgtgagcttcttcccagactttgtgtggacactgagagatttctccctggacttggaagcagatggacaacccctcacaccagatgagtacctgacatactccctgaagctgaagaaaggtaccagtcaaaaagatgaaacttttaacctgcccagactctgtatccgggaaattcttcccaaagaaaaaatgctttgtctttgatcggcccgtttcaccgcaggaagcttgcccagctcgagaaactacaagatgaagagctgggaccccgaatttgtgcaacaagtagcagacttctgttcctacatctttagtaattccaaaactaaaactctttcaggaggcatccaggtcaacgggcctcgtctagagagcctggtgctgacctacgtcaatgccatcagcagtggggatctgccgtgcatggagaacgcagtcctgggccttggcccagatagagaactcagctgcagtgcaaaaggctattgcccactatgaacagcagatgggccagaaggtgcagctgcccacagaaagcctccaggagctgctggacctgcacagggacagtgagagagaggccattgaagtcttcatcaggagttccttcaaagatgtggaccatctatttcaaaaggagttagcggcccagctagaaaaaaagcgggatgacttttgtaaacagaatcaggaagcatcatcagatcgttgctcagctttacttcaggtcattttcagtcctctagaagaagaagtgaaggcgggaatttattcgaaaccagggggctatcgtctctttgttcagaagctacaagacctgaagaaaaagtactatgaggaaccgaggaaggggatacaggctgaagagattctgcagacatacttgaaatccaaggagtctatgactgatgcaattctccagacagaccagactctcacagaaaaagaaaaggagattgaagtggaacgtgtgaaagctgagtctgcacaggcttcagcaaaaatgttgcaggaaatgcaaagaaagaatgagcagatgatggaacagaaggagaggagttatcaggaacacttgaaacaactgactgagaagatggagaacgacagggtccagttgctgaaagagcaagagaggaccctcgctcttaaacttcaggaacaggagcaactactaaaagagggatttcaaaaagaaagcagaataatgaaaaatgagatacaggatctccagacgaaaatgagacgacgaaaggcatgtaccataagctaaagaccagagccttcctgtcacccctaaccaaggcataattgaaacaattttagaatttggaacaagcgtcactacatttgataataattagatcttgcatcataacaccaaaagtttataaaggcatgtggtacaatgatcaaaatcatgttttttcttaaaaaaaaaaaaaagactgtaaattgtgcaacaaagatgcatttacctctgtatcaactcaggaaatctcataagctggtaccactcaggagaagtttattcttccagatgaccagcagtagacaaatggatactgagcagagtcttaggtaaaagtcttgggaaatatttgggcattggtctggccaagtctacaatgtcccaatatcaaggacaaccaccctagcttcttagtgaagacaatgtacagttatccattagatcaagactacacggtctatgagcaataatgtgatttctggacattgcccatgtataatcctcactgatgatttcaagctaaagcaaaccaccttatacagagatctagaatctctttatgttctccagaggaaggtggaagaaaccatgggcaggagtaggaattgagtgataaacaattgggctaatgaagaaaacttctcttattgttcagttcatccagattataacttcaatgggacactttagaccattagacaattgacactggattaaacaaattcacataatgccaaatacacaatgtatttatagcaacgtataatttgcaaagatggactttaaaagatgctgtgtaactaaactgaaataattcaattacttattatttagaatgttaaagcttatgatagtcttttctaattcttaacactcatacttgaaatctttctgagtttccccagaagagaatatgggattttttttgacatttttgactcatttaataatgctcttgtgtttacctagtatatgtagactttgtcttatgtgtcaaaagtcctaggaaagtggttgatgtttcttatagcaattaaaaattatttttgaactgaaaatacaatgtatttcactaggcttcttatttctgattaagttttctttttgcagttatttttgtcagaaaagaaggttttagtctttatagcaatggttggcaatcttttctgtaaaataccagatagtaacgatttatggctttgcaggtcatacagt

SEQ ID NO: 50761 - DNA, 322 bp, Homo sapiens
gtatggtgctttaaatactaattttatatttcaagctttttgcagggtagaaataagtggctgttaaagaaaatatcttcaagaaggattatttcagtgtccctttttaaaactcgatgatggctttcagtttatttaagtcttctgtttttcagctccagttaaaactgacaataggcagctatcaaaaatggaaaaaatcttgtgctctttctggaatattagaggaatcagttaataatagtaaagtggtattaacccaatacttgatttgcagtttttaaagcagtttttaaattgagagaaaaggggctgggccagt

SEQ ID NO: 50762 - DNA, 559 bp, Homo sapiens
tatttgcaactttatggcctttaaatataggacatattatatagcagaaattttgactttaaatcctcttgagtagtatattttgagaagaaaagctatactgctcttctggatggtttccatcctttatttaggtcttttctttttgaattcaagtgttttgtatgcttagaaagtagacatgtataatattgagatcggttatttctgagctggaaattggaaactttggaaactcaggaaattgctctgacaatgttttaactgctctcaatttaagaaaatgacgaaatgtataaaaaagacaaaaataacgtgtgctgttttttccaagtgctttttctaagtgcttttccattgtgcaatgaggtgaagtttggtaatttttcggtgtagtagttaaatattgctcaatttttatttacatgtaaagaaaacagatttaaatgtttatgtggccaaaaggtgtcatttaaaaggtaaaataagtttatgtaggaatgtatgttcatggtgcttatttttaaaatgtaattcaagtttacagtattacttaatg

SEQ ID NO: 50763 - DNA, 287 bp, Homo sapiens
gtggtggcgctcacctattaaaaaaggtaattgtatcttttctgaaaaatgtttaaaaaaagaaaaaattgtttttttacccttttcatttattcttggcaaataatgccacgtggaaattttactttcacatcttcaccagtgcatcattttaaaaaagcaataatcagcctctcaaaataatgggcataaataaaaatggtataggcatagtgcaaatcccacaacttttaacccaactacttcctctatatttatgggaacaaaactaagtgacactttacaaa

SEQ ID NO: 50764 - DNA, 426 bp, Homo sapiens
ctggtcgcccggcggccatggcggccgttctgaagccggtgctgctgggccttcgagatgcgccggtgcacggcagccccacagggccgggtgcctggactgctagcaagctgggcggcattccggatgctctgcccaccgtggctgcgcccaggcccgtgtgtcagcgctgcgggcagccgctcgctctggtcgtgcaggtgtattgcccgctggaaggctccccgtttcaccgtctgctgcacgtgttcgcgtgcgcctgccccggctgtagcaccggcggtgcgcgcagctggaaggtgttccgctcccagtgcctgcaggtgccagagagagaggcgcaggacgctcagaaacagggaaacagccttgcagctgaggactggtgtgaaggtgctgatgactggggaagtgatactgaggagg

SEQ ID NO: 50765 - DNA, 663 bp, Homo sapiens
tttttttttttggatgtaaacatttgttttaatttatattaataaaaggaaatgctctacttaaacaataattcatctgggtcttcttgtataatacaaaattcttccatgggagtctgatgatttgggggccagcaactcttctcacatgtgtaaactagaattgttccaaattccacagaaagacctaaattagcactcttgagcatgctgaccagtgctggcataagctgaaactcaaatatcctttggcctccacactggctgcaggctgggagctcggtgacttctgatgtagggcaggtcaaaaagagtggctctccactccaggaatacctcaaaatctgctcctgacaagcagcaattcgcttcatgaatttgtaaaacgtctgatctccacttttaattatggtcttctcatatttttcatcaccatcattaggaaggctttgggaaagcaactgatccatggcaatgccttctctctgctgatagtccctcagaaggctgtgggcatgatccaggttgacaaagtccctgtaatcatcctcatctgcaacacagatgtagtagggcaggaagatcgtcagcccaggaggcacaggatgggcagcacccaggacagcatcctgcaggcggaggtcttggagccgagcagtccag

SEQ ID NO: 50766 - DNA, 2791 bp, Homo sapiens
agcactctccagcctctcaccgcaaaattacacaccccagtacaccagcagaggaaacttataacctcgggaggcgggtccttcccctcagtgcggtcacatacttccagaagagcggaccagggctgctgccagcacctgccactcagagcgcctctgtcgctgggacccttcagaactctctttgctcacaagttaccaaaaaaaaaagagccaacatgttggtattgctggctggtatctttgtggtccacatcgctactgttattatgctatttgttagcaccattgccaatgtctggttggtttccaatacggtagatgcatcagtaggtctttggaaaaactgtaccaacattagctgcagtgacagcctgtcatatgccagtgaagatgccctcaagacagtgcaggccttcatgattctctctatcatcttctgtgtcattgccctcctggtcttcgtgttccagctcttcaccatggagaagggaaaccggttcttcctctcaggggccaccacactggtgtgctggctgtgcattcttgtgggggtgtccatctacactagtcattatgcgaatcgtgatggaacgcagtatcaccacggctattcctacatcctgggctggatctgcttctgcttcagcttcatcatcggcgttctctatctggtcctgagaaagaaataaggccggacgagttcatggggatctggggggtggggaggaggaagccgttgaatctgggagggaagtggaggttgctgtacaggaaaaaccgagataggggaggggggagggggaagcaaaggggggaggtcaaatcccaaaccattactgaggggattctctactgccaagcccctgccctggggagaaagtagttggctagtactttgatgctcccttgatggggtccagagagcctccctgcagccaccagacttggcctccagctgttcttagtgacacacactgtctggggccccatcagctgccacaacaccagccccacttctgggtcatgcactgaggtccacagacctactgcactgagttaaaatagcggtacaagttctggcaagagcagatactgtctttgtgctgaatacgctaagcctgggaagccatcctgcccttctgacccaaagcaaaacatcacattccagtctgaagtgcctactggggggctttggcctgtgagccattgtccctctttggaacagatatttagctctgtggaattcagtgacaaaatgggaggaggaaagagagtttgtaaggtcatgctggtgggttagctaaaccaagaaggagaccttttcacaatggaaaacctgggggatggtcagagcccagtcgagacctcacacacggctgtccctcatggagacctcatgccatggtctttgctaggcctcttgctgaaagccaaggcagctcttctggagtttctctaaagtcactagtgaacaattcggtggtaaaagtaccacacaaactatgggatccaaggggcagtcttgcaacagtgccatgttagggttatgtttttaggattcccctcaatgcagtcagtgtttcttttaagtatacaacaggagagagatggacatggctcattgtagcacaatcctattactcttcctctaacatttttgaggaagttttgtctaattatcaatattgaggatcagggctcctaggctcagtggtagctctggcttagacaccacctggagtgatcacctcttggggaccctgcctatcccacttcacaggtgaggcatggcaattctggaagctgattaaaacacacataaaccaaaaccaaacaacaggcccttgggtgaaaggtgctatataattgtgaagtattaagcctaccgtatttcagccatgataagaacagagtgcctgcattcccaggaaaatacgaaaatcccatgagataaataaaaatataggtgatgggcagatcttttctttaaaataaaaaagcaaaaactcttgtggtacctagtcagatggtagacgagctgtctgctgccgcaggagcacctctatacaggacttagaagtagtatgttattcctggttaagcaggcattgctttgccctggagcagctattttaagccatctcagattctgtctaaaggggttttttgggaagacgttttctttatcgccctgagaagatctaccccagggagaatctgagacatcttgcctacttttctttattagctttctcctcattcatttcttttatacctttcctttttggggagttgttatgccatgatttttggtatttatgtaaaaggattattactaattctatttctctatgtttattctagttaaggaaatgttgagggcaagccaccaaattacctaggctgaggttagagagattggccagcaaaaactgtgggaagatgaactttgtcattatgatttcattatcacatgattatagaaggctgtcttagtgcaaaaaacatacttacatttcagacatatccaaagggaatactcacattttgttaagaagttgaactatgactggagtaaaccatgtattcccttatcttttactttttttctgtgacatttatgtctcatgtaatttgcattactctggtggattgttctagtactgtattgggcttcttcgttaatagattatttcatatactataattgtaaatattttgatacaaatgtttataactctagggatataaaaacagattctgattcccttcaaaaaaaaaaaaaaaa

SEQ ID NO: 50767 - DNA, 392 bp, Homo sapiens
ggtggcggcggtggcgacagcggcgacctagggatcgatctggagggacttggggagcgtgcagagacctctagctcgagcgcgagggacctcccgccgggatgcctggggagcagatggaccctactggaagtcagttggattcagatttctctcagcaagatactccttgcctgataattgaagattctcagcctgaaagccaggttctagaggatgattctggttctcacttcagtatgctatctcgacaccttcctaatctccagacgcacaaagaaaatcctgtgttggatgttgtgtccaatcctgaacaaacagctggagaagaacgaggagacggtaatagtgggttcaatgaacatttgaaagaaaacaaggttgcagaccct

SEQ ID NO: 50768 - DNA, 429 bp, Homo sapiens
cccgcctgagggaggggagcggtgcagcagacatccgagggcagctgggaccccctgactcagccgacgggtgagtcaggctccctgcaggccacaccggacccccccagggcggggatttccccaagatgagaaatcagccaccggaagtcacgccggaccttggacgggcagacagaggctgggaggagttctgggtgcagagccccccaacctgcgctctcatctcttgctctggggtaagccagtggccatgctataaggacactcaagccaccctatgaagaagcccacatgaagaggaactgagatatctggccaacagccagccagtcactgagcctgccaaccacgctgtggcaggtacctccagccccagacacctgcagcctccactgaaagctcaatggcagcctcatgagacctgga

SEQ ID NO: 50769 - DNA, 1841 bp, Homo sapiens
tttttttagcattttttaaatggctttattaaaggctacaagtataaaatatgactaagttacaagtcgtcagtaagaatttattacttttgaaaatgttaattaaagaaagggagacgcaaagaaagggaggctcttcctgaaatccacacaggggggtgcggctcagacgggtgacagacccccgctgttcccagtagggcagcacccccaaacccagggggccaagggaggggctcccagatgaaacagaggctggttgctgatttcttgggggaacttttgtaaaaatgaagacactgaatccttgagctgaatcccaggtgcagagactgggggggaggtggagaatccaaaatcatgctcaggtttctcctgaaaagtgtgtattttctaaaaaataaatataaactcctggtttgagaaactccctcatggatgaatgggaggaaaatcatggcaaatggagagctaagaaaccatcttcgcatagactttgcccaaggtgtagaggaagatctgccggtcaggcaggatgaagacccacacatgagcctgtgtcctccaggtcgtcccttcttccaaaagcacagcaaagcaatacaacttgaggactccctccaagatttcctaatttttgattttacatttaatctcaggaggctataccattaagaaacattattagagttattgctgggtgctgggccccagacgatactaagtgaggcagaagctttcaataattcctacagccctcagcaccaagaagaacttggagggaatattgggcttgttgagaaagtgggaaagaaattagaatttctcccaatagaagaggcagatcaccttggcctactctctaggacacaggtctttcttctgtgctacaccaacactacagaatacaaactcatacatatacatttgctaccataggttctacaacagccccatgccctccaggcagaaggtggaggcaggtggccgctgattctgaggatccctgtgtgaacagtgccgttagccctgaggcggagctggcgcttgccccaggctgtgccccaactgggatttctaagctcctttttccctcacccacccatgctgaaacctttttttgcctcacatatatcaactatacttaaatggtacagaaagaaccaatatttgaaaagttacagtaaatcactgaagcagaaagataaaactataccccaaggatccaaatgaggtttagggacataaaacaattggcaagaaccaaatcaaaagttggctatgccacagctttggcagaaactttcctggagatgatgaggggttgaggtgagttgctatgtgctttattttggagccagataaaatattctggaaatcatttcagaaggtcctatgaaacaggcatttaaaaaaaaaaaaaaaagaagaagacacactttggtattgaaaccgagcgctcactggcaggtgtcgcaaagattaaggcttcaggtgagaacgcagtgatggcaacatggagatggcgccataccgggcttgaggctctgctcagacgcctcctgcaggctcacacggctcaggggccactgggcaggacagcctctgagtgcagcagcttccctaggggaggtggaccacgttgtaccactgggcagccttggtgtctgcaccagctccaagagatactgctgctctgacaccacgcaggtctccatgggcactgctgagttgaccgcaaactccactcttccacttctggtggtggtcagggctggggaaggtccgtcatgacgcaacctggctagcccttgggataaagaatgcccactgctcccatc

SEQ ID NO: 50770 - DNA, 1058 bp, Homo sapiens
ctagtctcgagtttttttttttttttttttgatattaaatgttaaattttatttcaaaaactatcacagcctaaagggaaatataatttaagcattaagatagtacatttcagaaaataagctagtattttcatgttacattttaggtacctatcatttgtcattccaagagatccttgcgttctagactctagaattaaatggggtaaagggttatgcttttaagaactataagctgaaatgatttacttcagttcaatatagaatatttgtcagtcaagataacaatcaatgtgtacaaaaatttacataacaagaggaaaaataggcagtgcagcacctttagaaaaataattaaaagtttcattgcatttacaggtaagtgccacactgagaatttacaatacagtaatttactgcaatcacaggggagttccataaagaaacaaagctcttacactccaggtttttggaaggtgttattggaatgcttaactgaaaccacagaacttgtatatccttaggattgagttgatgaaggtcataaaaggttttcatagcatctattatataaaaggagttcactgcatttggatagctggtttagtgtctctgacaagtgtgaagcctagaagaattactggcttgatggtgatctttctgtatccggcaagacagaccttctccacagtaacaacgctggaatatttctagtccatgagagccttttctcctatgcttggtacacacttgaccttctttcaggacaggtttacagatcttggaccagaagtgtctagcacaacacaatcctgaggcacagtctgatgaccggagacaaacagaaccttcttgtcctttggtgtgatacatttttgaagacaaggtggttcttctggaatacccatccaaggtgctatgatcattaccaaagctttcagtgatggtttcctcaatttctcctcggaaatgattttgatcagaagacacacatattccatttttgcagtaattcccggggcagcacatagcgtgacgcatgcagcgttttcggcgct

SEQ ID NO: 50771 - DNA, 706 bp, Homo sapiens
  misc_feature (1)...(706): n = a,t,c or g
tgttctgcagaaggtgtgacgggagctgccacttcccctagtacaaatggtgcttctccagtgatggataaaccaccagaaatggaagcagaaaatagtgaggttgatgaaaatgttccaacagcagaagaaagcaactgaagctacagaagggaatgcggggtcagctgaagacacagttggacatctcccaaactggcgtctacacagagcatgtctttacagatcctttgggaagttcangatcccagaangacctcnccccaggtgtatcaggtcgagcaattgactcagatgcatataaagatcaaatatcagtactgccaaatgaacaagacttggtgagagaagaagcccagaaaatgagtagtcttttaccaactatgtggcttggagctcaaaatggctgtttgtatgtccattcatctgtagcccagtggaggaaatgtctccattccattaaacttaaagattcgattctcagtattgtacacgtgaagggaatcgtgttagtagccctggctgacggcacccttgcaatctttcacagaggagtggatgggcagtgggatttgtcaaactatcacctcttagaccttggacggcctcatcattccatccgttgcatgactgtggtacatgacaaagtctggtgtggctataggaacaaaatattatgttggtgcagccaaaggccatagaaatt

SEQ ID NO: 50772 - DNA, 2435 bp, Homo sapiens
  misc_feature (1)...(2435): n = a,t,c or g
atttagggggtataagtacagatttcttacatgcatatattgcatcgtggtgaagtgggggcagttccttttgattgctgagtagtattccatggtatggatgtaccacagtttgcttaaccattcacccactaaaggacataagagttgttttcagttttttgccctaataaagctgctgtgaacattcatgtacaggtttttatgtgaacatacattttcattttctgggataaatgctcaaaagggcaactgttgggttgtatggtaaacacatatatttttgtaagaaactaccctactctttttccagagtggctctactttttacatacagccactcatacaattcagacagcaatgtatgattgatccagtttcttcacatcctcaccagcatttggtattactactattttttatcttaaccattcacatagatgtgtgtaatgataccacatgtggttttaatttgcatttccannnnnnnnnnnnnnnnnnnnnnnnnnnnnnnnnnnnnnnnnnnnnnnnnnnnnnnnnnnnnnnnnnnnnnntcatgtcttttgtctattttctatttaggtcatttgttctttttactattgagttttgagaggttttttatatatcctagataaaattcctctgttagatatgtggttgcttgaatttttaacataacttctaccaaggaaaaataagtaaaatttccaacccttgcatggccagtcacttacttaattcctgtccttcagtgttccatctagagaattaagagatatgatgtataaaatagacatcgagggccattaagagagtaaatacttaaaaatacatgttatgaaagcaaagccaataatcactgtaggagtatgagttgcctaagggccaaaactaatgtaaataagagaaagtgtggatataaatgaccattgtttataaacagttatgaaaaatgctgtgacttgaaatctttcccacatctcccaagaaagtaggtaggagtttatcctttccgtaatctctttttaaccctgctgactattacagggcttgtttaatcacagtggcaagaattacatgtatcttacagtaaagaaacagaatactggaatcgttagagaaccctgatgtgttgacctggataaagtacaaaggtggaagagggaatgagttatgctgttaaaatctcaggctattctgttaatgttcctgctactatgaacccaaactttttttttcccccttttgactccttgtgtcttcctctcctgtggcataaaagtagttctgtcgttaacttgtacaacattgccatctgctgttgagaattggtaggtactgcttctgagaacctggctgcagatccttagcataggcagcaaatgttgagaaagtctatctgtagtattacatatactaagttacagaggatgcatccaagtagagaaaataatatgtgggttaagatacatccttaaactttttttttttgggggcgggggacggagcttgctgcaacgcccaggctgggagttgcaatggnactatcncancncncngcaaccttcaccnccngggttcaagcaattccccngccncanccncctgantancngggaanataggngcanaccaccatgccnggtaatttttgtattttcagtaggagcagagtttcaccanattggccaggttggncncnaacnccngacctcaagtganctgcctgcctcanccncccaaagtgctgggattacacgcgtgagccaccacacccagcctccatctttaaacttttaaatgtgaaatttctatcatgtaccgttagcctaacaagattttctttcctatttctgactggtgcctttcccctttttaggagcaacgaaagctactctcttagttatgttcttgtgatgtgacaaaatgtcaagaagataggagaagagaatattttatttcgttgatgcttttgttcccaagtgtgaccctaaacttaagctttgtaggagttgacattctttcatgtcccttccctttactcatgccgaaactatcaactgggacattttgtgcttttggtttaaaagttaattggatattatactttggttttatctaaaaagtaaatgtatttgcctttgacaaaagactgacacaagagcaaataagctttaaaatcgggtgttatgtgctttcctccatttttgagcatattatccaaaatggtctgtataatataaatgagaatgatgcagtttaagtaagccttgttataccattgtcatggacccctgtcataaagccatttcttggtttgtttgggaaagaggcatatgggatttatacagattcacttgtaaatgttggattggggatttttgtgtaaattttctcaaataaaggctagcagaaaccaaaaaaaaaaaaaa

SEQ ID NO: 50773 - DNA, 1154 bp, Homo sapiens
  misc_feature (1)...(1154): n = a,t,c or g
tttttttttttaatgggcattgtgaatgaaaatatgtaatgtcaacctttactttatggtatcttaggtttgtcttcttccccttcatagttttcccctttgaggataacccttcaagctcaaaagggcacaaaagctaaaacgttattcacgtacaaaataccaagtatatagctgttctgcagtttgatacagaacaaaagaaaataacttttctaattaaatccctcattctgtacttaggccagactccatccccactacagttttacttgtattaacaggttaagagcaatctaggaacatttggcaaacaagtacattttttacatggaaaaaactcaatcaacatcaccattctctggtacaagaaatacaaaacacatttcctttaaaaaatcctcccagtgctgaagtatcttctaagcttcccagagtatgtcctaagctttataaataataaatctttcagacatgtcagtatgaaaatgagactggtctcaaaaaaaacccatcagaatattcagagaagtaggcctcataaactttagagctctaataagtcagaaacaggaaacgtttatttaaatagtgtagtcttaatttctttaatataaaacccccccaaatctgatgaaaacaaagttttatataccatataaacaagatttgtcagatttgaaagtgaaagttaaagtaatttacagttagcttttaaccctctcgggacatttagatacatcctgataatccatcttgtattagtgtgtgtcaattttacaatacactggggaaaactcagctattgtatttaacggtacagtttcatttatcaagtgtttcccattaattccattattagtgacagctaacaagtgaccccatcaaatgaagtgaatgacattagactgtggcagagtaaaccacatctggattgctttctataattcaccagtttgcaggaagtaaacattctttgatttgttcataatatactgaagttacctataacactggtgcagtaacacagctagttcctctgtattgttatggtagaacggattttgtaatataaagttaacaggaaaaaatgctcacacantatgtggtgaaacttatctcacaaaagagcattaaataaaaggatagaggga

SEQ ID NO: 50774 - DNA, 634 bp, Homo sapiens
  misc_feature (1)...(634): n = a,t,c or g
cggcacgaggtctgtcagtaaactctttaagcttggtgccgcaaagagtctttaaatgggggctgatttcaagtaacctaaaagactgtgttatcagaggaagaggtcccaaatttggagtaaagatgggagaaaataaatatgtgctatttccttggcgagttgggggaatttgccaccttacagagtttgtatcactgaattagctgcttttgtttttcttttttttttttttttgccagggctatggagtgggggttgtttgtcaaactgattttcaataattggatttaattttttttaacattgaaaagtgcctgaaaaatggtaaattcttaaatgtgtgtgagattgtcagaatcaacaaaactaggttggttaaacatatctctggtacatcaaggggcatgatacaaaccagtctaaagactgtttataaaggagagagctggcgacttannnnnnnnnnnnnnnnnnnnnnnnnnnnnnnnnnnnnnnnnnnnnnnnnnnnnnnnnnnnnatgatccatgggttcacttcacccctaccntcctgggggctcaagtnttcccctcacccttatccncctgaggcagctnggggactncagggcacacaccncccaccngggggc

SEQ ID NO: 50775 - DNA, 1663 bp, Homo sapiens
ttttttttaagtatctgtagtacattaataacaagttaaattattctttagtggtcattttttaagtgcacaattaataagaagcacaacttgttcacaaactcattcagaaatgattctcccaacaatgcatatcagctattcattgatacttagagtgggtgtgatttatttgacattttactgcttctttctgtctgtgtgttttaatttgcatctgccaagcataatgcatcttttttcctctgccattcttgtgttgattggagaatttttctgtatgtaattagaaaaaaatgtaaaacatgatttatgtgaaatactgtatagtaaaagttggtctaatagtagaactttaaaattttttcttattgtgaggaatctgttaaaagtttaaagctttgctgaaaactgaattcattctcaggaatttcataaatcttctccccaggtaaataattgaaatagctgtaaaataagtagatagctgctgttaatataatacagtacattttggggggcatatgtgtggttggggggtccttaaaaatcaaaatttgccatttcagttggatgaattactagaggtaataacaaatcttactataaaatcaagaggtttaagaacatacactgggcagatgttgattccgtgcatgcccaccttttattaccaaacaaggttttgtttatatgattgtattagaaatgctcagacttccccagaaatgaaccataaattttggaacttcctttcagctcaagaggttcagctatattgtatttgtgcagtgtaatcactactatttctgctcggtttcctaaaaggaaaaaaaaggcacagtgggtgatgaccctcatgaatgagccacgcttctgcattcttcttagaaactgctgtgaaaaacaatttatgtttgcagggtttaaaaatcagtaaaaatgggaatgattgagctaaaacccactctatgagaaggaagattactgaaaagcatgtgacatattgctacaaagattttttttcctaaatgattcagtaattgaatgattatttaatatatagtgctatcaagcaatccctggtactttggacttccatggcttgttatataaaattacatttttacatgtaaaaataaactaaacaaacctaatgataaaatataaaaataatgtcagatccatgttctaaaaaatttttgtaatgacatgacattacaagagtataaaaatggacattaaatcatggccttgcattaaaatatggaaagcagagcagtacatattcaaatgtattcagaaagtcaaaagattacctatcgttctacaataaaatacatggaaatagcttgctatttttatatacatttccaaaatattaagataactttctgtaagagtcagtgattctgttcgactaaatagctgtcctttccaacacattgctacttttttaaatactgtatcataagttcagcctgtcatactttttgcattgatcgttatgaataccagaccatttgtaagtgtggttgaagagcaaaatgctaattgacatctctagtaaatactgttacaggattcatgaacttgaataattctacagtttgaaactctgatgctatatatacatggtataatgtattcagacctttgatta

SEQ ID NO: 50776 - DNA, 335 bp, Homo sapiens
  misc_feature (1)...(335): n = a,t,c or g
tccagtgagtatgtattatttttgtaattaacatttaaatagtgagtgatgaaacaaagcaaaacagcactgggagacttctcaatctatcaaatagcacatttcccaagaaactctcttagttcaaatacctgaagatgttgtattaaatacttaaacatttctttaaatgcttaattcagccaacaagaaactgtaggagccactgctctgtgtaactgcagggggaatttaattaatgtcatatttctttatgtgggagccctgtaagaaagtgagagaaattctaaagcaaatataatggaaagctcaaatcctaagagatcnnaacctga

SEQ ID NO: 50777 - DNA, 426 bp, Homo sapiens
cacacaagcaggtggtggacctgattcgagcaggcgagaaggaattgatcttgacagtgttatctgtacctcctcatgaggcagataacctagatcccagtgacgactcgttgggacaatcattttatgattacacagaaaagcaagcagtgcccatatcggtccccagatacaaacatgtggagcagaatggtgagaagtttgtggtatataatgtttacatggcagggaggcagctgtgttctaagcggtaccgggagtttgctatcctacaccagaacctgaagagagagtttgccaactttacatttcctcgactcccagggaagtggccattttcattatcagaacaacaattagatgcccgacgtcggggattggaagaatatctagaaaaagtgtgttcaatacgagtaattggtgaga

SEQ ID NO: 50778 - DNA, 1029 bp, Homo sapiens
  misc_feature (1)...(1029): n = a,t,c or g
tgcctcccccgccccgcaactttgtgtaatttacttctgtattcagcagcctggatagcatatcattccatcaccccattttcttgccaccattggccatctttttgtatcattccacttattctgtcttttccattccttcattcaaactgctagagaaaaacagttgtgtaatgaatgccactaaatattcaaggcctccaacctcagccaagtcctcacaccaacacgcagtcacaccaacacacacctttatgggttcctggtccatttccttctctaattaccatgggcagttattttacacctctactgctgtccttaatcccataccccaccctcatcaggtgaccctgtttccttttttagagaaattgaagctcttagacattggtttccacagtaataattttaaaacttcttacaactacctacaaagcagatgttctatcctatctacagagcagaaaattgaaattctcaagtagcagacccggtattaaagtgcagatctgactttaaagtccatgttcattttacacagcaggctgcctcttaagatagtatttattgagcacacactttgtgtaaggttcctgattttggtagatgtcatgctttatattaatctttacaacaactataagtaagaggtattaacctcacttaacagatgaggaagcaagaatccagaatgtgccagaaggcacattctgcagatttcgtgcaaacatttatacacagcttctttttttttttttnnaaananagnntcnnttngccccccnggnnggngggcagggnancaatnnaggntnnnngnacccnccncccccnggnttaaancngttnnccngcctaaccctttnnngnagcgggnatnncnggctngcccccccccccccagnnantttggttttngtttttaangaaaannnggggtttnnntntttgggcnnggngggnntnnancnccggncntnggnacccccccncctggnccncnaaaggggngggantnncnggggg

SEQ ID NO: 50779 - DNA, 380 bp, Homo sapiens
ggacggggtgtgtggtgggtggggtgtttgtggtggagacagggatggggcgtgtgagggcactggaggtgtggatagcagttggatgcccagctgggggtaggcagtctggagggtcctgaatttgggagctcagatgtgtgggccacccggacatgctggagaagggcatttggggaaaacggctctgaggggtggacacctgccctctggcctcaccagctgtggacaggtgtgtgctgattgtgtttctggtcttttaaggacatcgtgctgggctgcagatgttgctgttttttaattggaaactttattgcccgctggacatggtggctcatgcccccttaatccccaccttaaccctaatcctaatcacagca

SEQ ID NO: 50780 - DNA, 890 bp, Homo sapiens
  misc_feature (1)...(890): n = a,t,c or g
catcctagtaaagaggaaataggcaaactaatgctgttttagtgtaataaggaatgcttataatgatgaactttagtcataaagaaaaggtgaaattatattcagtaacccatgttaggaaagcagaaaactatttaatatgcttggaaagattccaaccagagttaactgaataaaaaccttggacatttgaagagaaaagcatttagttctatctaatttcaatatgcacgtgaattagttcatgttactctaacaatgtattcttactgtccttttttatgaaataggaaagtaaaactgaaagaactatttcttgtgtttttaaaactagccttttctaatatttgatatctaattaaagttagataatatgtaatatgcttttgaacaataatctaaccangaaaatattgtataataaattaccaagaaatcattacattaattataaaaggaacatgtcaatacaacaaatgtttatttaacacctactgttactccaaatactgtgttagaattttgactatttcgaagatgaataatagtctttgccctctggaaggccacaatgtagaagtaattctctgtatcagatatttccttgagtgttaagtgtattagtaatcatgttgtaaatcccagtgtaagtcaagaagcaatatcaccaccaccacctccctatgattttgtgataatttggcattttcaatgcttgttaactttcatgttttcaatttttatgaaatcatgcagagcttgttataatttttagtggggtttggattaaaatgcttttttgatgtagcagaagatacattttttcccattttacattgttttccttaaatattaagaataatgagtaaaataaactgattttaaaatca

SEQ ID NO: 50781 - DNA, 316 bp, Homo sapiens
agagacgggagctctgagtgtccacgggtgaacgtgtgagtgtccacgggtgaagaagtgagtatgtttcacctggacattaaggtgatttttgagctgctgttaaggaatttcttgcttatagaggcaaaccacagtatcattttaactctagaattgggcttgtacagaaggataaaacccaggaaaatggatatttctattcagatttatttatgcctctttttaatcccctttaatgatgcagtggtttttatctgatcaggaacttgtcatgatttcctttcttagacttcataggagatagtgctttaaa

SEQ ID NO: 50782 - DNA, 607 bp, Homo sapiens
  misc_feature (1)...(607): n = a,t,c or g
ctgggctgggagcgggagggcaaggcccctcaccacaacttaacccaaacctaagctgcccccaggtgccataggtccctgtcccagcagggaggctgatgggcctgggcatggcccctccccacctttgggggtcagaaagtggccacccaggctgctgggatggggcctgacacaggctctgcatgcccattcagggtgcctgtggagaaagaatggagtcactgtttaaccatggtacctgcctcagccccagcagaccacaggaggttggccccagactcactgagtgcctgcagcagccgtacagacacagcatccttggccacctcatgcccatcccggccatctagggtcagcacaacccagatgaggccgctgaagggtaccggatgcccaggaatcaccatctggtaccagaagcggagccagccagtnngncctatgcccaaacacttgntgaggaacncnnngntntcnagnttcatnngtnntaacngtntctntntantanncngaaccccttggaanctaacttgaaccttgncaaanncaantggctgcctntggcttggnggaccngnntgaagggannnacaactgctgg

SEQ ID NO: 50783 - DNA, 422 bp, Homo sapiens
tttaaggggggtatttgtttaatacctctctctctcccatttttgttttatacaagttgcatttctagccaccacatcattggcatcttattccagaagaatagcattagttctagcacttgccaggcgggtgccatgcgccaagcagctccgtacgcccacctgctgcggtagttgtcccgcctggcctctccatcaaggtggagactgcctcatggttttccagctcgtagagacgaacaggtcccggctcttggtcagccgaaccatgagccggcccacatagaagccactgatttggcccacaccgtcatttctccccatggacaggaggaacgtcagtgcacccggcttgtaggcctggagaggccgctcgcttcacagagttgacgatgttggccacggcgatgttggcgtggagg

SEQ ID NO: 50784 - DNA, 287 bp, Homo sapiens
  misc_feature (1)...(287): n = a,t,c or g
gcttttcctgggtggtctcatccattcctttgctttttcataccatttatttgttaatgattcccacatttatttatgcacttggagagctcacaggaatctcagaaactgatgaggtacaattctgaaccctcagtctcttccctttaaacctttctttttctctactttaatttttctaaagactgtcttgctatgttgcccggggtgggtctccaactcaagtggatcctcctgccgcagtctnccgaggtgctggggattactggacnggggccaccacattc

SEQ ID NO: 50785 - DNA, 399 bp, Homo sapiens
aagtctcatgtgggttgcgtcggcactgaagctgctcctcattaaagctcctctttactccctctgggctagtttccagcagaaaattctttgaacagaactctgctttcaacccactttcttcttgcgctgggcctcttggccccccaatccgcagtggcagcctgccctagctgagctctagaggggggagctgtcattaaggtaaatgaggtaagggcaggggaaaaaactaacaaaacccagaaaccaaattaagcatcggtcagtaacaaaggtctgcagtttgaaaggctccaaatcagtctgttctttcctgtgaccataatgccagcttagtttcctgcccccctactctgtcccccctgttaaagtagataaaagtaattgctaacagcc

SEQ ID NO: 50786 - DNA, 343 bp, Homo sapiens
  misc_feature (1)...(343): n = a,t,c or g
gtagcaccaacttacatttaaattcatgcatactattttaatagaaaaaaatgtcaaggacaattggganggtaagaggnagccatcngggngtctaaanngctttctcaagaattttgacaatacaggaaaagaaataatatctgatacatatgtagccttaacattacctangtaccattctgaacgctttangtatattaactgnnaatcctngnctcaaacctangaagtacgcncnttctctggccccantnnnccnataggaancatttcttantnnanngntnttgctnnnnntngcattngaacccacgcttttggtancctnangccatngctt

SEQ ID NO: 50787 - DNA, 1968 bp, Homo sapiens
agcgaacaagatccgggcggaaacagtagataggcgggtgcagcggggcagaacataggttgccttagagaggttccccggtgtcccgacggcggctcaagtcagagttgctgggttttgctcagattggtgtgggaagagcctgcctgtggggagcggccactccatactgctgaggcctcaggactgctgctcagcttgcccgttacctgaagaggcggcggagccgggcccctgaccggtcaccatgtgggccttctcggaattgcccatgccgctgctgatcaatttgatcgtctcgctgctgggatttgtggccacagtcaccctcatcccggccttccggggccacttcattgctgcgcgcctctgtggtcaggacctcaacaaaaccagccgacagcagatcccagaatcccagggagtgatcagcggtgctgttttccttatcatcctcttctgcttcatccctttccccttcctgaactgctttgtgaaggagcagtgtaaggcattcccccaccatgaatttgtggccctgataggtgccctccttgccatctgctgcatgatcttcctgggctttgcggatgatgtactgaatctgcgctggcgccataagctgctgctacctacagctgcctcactacctctcctcatggtctatttcaccaactttggcaacacgaccattgtgggtgcccaagcccttccgcccgatacttggcctgcatctggacttgggaatcctgtactatgtctacatggggctgctggcagtgttctgtaccaatgccatcaatatcctagcaggaattaacggcctagaggctggccagtcactagtcatttctgcttccatcattgtcttcaacctggtagagttggaaggtgattgtcgggatgatcatgtcttttccctctacttcatgatacccttttttttcaccactttgggattgctctaccacaactggtacccatcacgggtgtttgtgggagataccttctgttactttgctggcatgacctttgccgtggtgggcatcttgggacacttcagcaagaccatgctactattcttcatgccccaggtgttcaacttcctctactcactgcctcagctcctgcatatcatcccctgccctcgccaccgcatacccagactcaatatcaagacaggcaaactggagatgagctattccaagttcaagaccaagagcctctctttcttgggcacctttattttaaaggtggcagagagcctccagctggtgacagtacaccagagtgagactgaagatggtgaattcactgaatgtaacaacatgaccctcatcaacttgctacttaaagtccttgggcccatacatgagagaaacctcacattgctcctgctgctgctgcagatcctgggcagtgccatcaccttctccattcgatatcagctcgttcgactcttctatgatgtctgagtcccttgatcattgtcctttacctcacagtctctaggattcctgactcaggctgacctctctctctggtcccagactgcctccttgcccaggcctctctcactcttcatactcctccagattttgttctcagcattttcctttctctgtgatcattggcatcctgggcgtttcttgccctctgctgactactgattggattttacctatggctttctgcaacttgctactctctccctctccatcccatctttgcagcctcatagggtgggatacagcagctttttttgcagttatccacactcacatttcagagtcctgactctcaaggaaccactggtttttgggatagaacttgggccagggctaggaacacaggctccacggtgacatgtcatttgattgtaaattaagtgttctgattagtaagaactaagcagggggccacatgctctcaatggagacaataaagtgttgtctttttcttattgtt

SEQ ID NO: 50788 - DNA, 125 bp, Homo sapiens
gcccggcccagatttcaacttttattttatttcctttcatttattaaataatataaataatgacagatttattttaggtgttagcctatttttgcatgagagatttacagaggtggaaattctca

SEQ ID NO: 50789 - DNA, 367 bp, Homo sapiens
ggcagacaagctttggggatgtctgaggaaagagacctgatgggggtcaggagcagaagctgccattagcactggtcccagcgaactgtcctgggcttccgcagcttggtcacccacctggaacgaagctaacccccccgcccccggctgcccagcccagagacttgtggggagtatgactcacttcgcggggggccattgtggctaatgtttaactctgcccctccttcagcaaggcactttagccccagcagcccttagcgctgggccctgccctgatcatgcctgctgctgagtgggctcagacacacagctgagcttggcctccttgcgccgtggggaccgggcaccctgtggggaaaggtgg

SEQ ID NO: 50790 - DNA, 204 bp, Homo sapiens
cttataactaaattataattatgtatattaataaaattttccttaaggaggggagattaataacaaaattttaaattttttttgtacttagatctcctataaccccattagaaatatttactaagaacataaagtgacttttgtttctcataaattttaagatttcaattcaattagataaagtaccattttgaatttaagatt

SEQ ID NO: 50791 - DNA, 354 bp, Homo sapiens
tgctggtctaagatgcaatggaatttggaggcaatggggctggattctatcaaatcagacacacggaagaggttataacgtgagaatttatattttttcattttctcagcccacacttgaaataacaatttgcaagagttttgctttgctcaatattaggcctgattagctaaaatgctcaaatttccattcaatccttaaaaacagatccacacttagtcattcttcacacctctctccctcgccctttcacacccaaattgttaacttttttctctattctcacatttatagtctggttcagacttccgtgatctgtcacttgctcttgtggttaaatttctgaagtgaaat

SEQ ID NO: 50792 - DNA, 412 bp, Homo sapiens
  misc_feature (1)...(412): n = a,t,c or g
gcaaaaaccactgcattgctgtccatgaagtgccctctaatgtagatatgacttagatcacaataccaaagttcttttgaaaacctggaaagctttcccaagaaggatagatagaaacaagcccagattgcaaagactacaataaatacctaactctttgatgcacagacaccaatgaacatccacaagcatcaagaactaaataaggcactaggaaccaatcctggagaaatacagatatgtgacctttcagagagataattcaaaatagctctttaaaggaaactcagtaaaattcaagataacacagagaggagattcagaatcccaccaaataaatttaacaaagagattgaaataattaaaaagaatcaagcagaaattctggagctgagaaangcnatcngcatat

SEQ ID NO: 50793 - DNA, 2225 bp, Homo sapiens
catatttccactccatattgattccataagggaaaattaatgggtgtttcctcctttagggaggtaatgcaaagagtgtggacatcttctaatcttgaggaacagtagttgatttcccttgaaggagcttacatattgactgttttcacaataacctgtttgccccagttcaatcctcattttaatacttaatttggtactggctcaaatagcattttcttacagataacaaatcaagagtgaaatttgaggttatactccagtaaagtttttaacacttgtgaatatggtcagctagactaaacttgactcttttttttaatggcttttttatctgtgaacattcagataagtggattttcaagtactggttgggggatggggaatcgtgcttttctttaaacttcagtttacgagatgctttgagagcgttaggcaaaagcagaaataaatatcaggagcaacggggaaagctttataaaagatcatggtggccactgttgcagctttgaagaatgagtgctggcttgaacagttctttgcctgcatcattggtagctgcactgaaaggaaaaaactttcaccttaagaatttgaaaaggaagaaacctgggctctggtcttcatggcatttagactgagatgcttaaacagaacagaagtaatacgcatttcctgccataggatagggaaaatgtaacaagctggttgctcttgaggttagaaaattgtctgtttctctgtggatgaagctggatttacttgaaaatggagagttggcttattgtttgaatattgggacatcaagctatctatagccaagtttcagtcgcaaccagttttccctttgtctggggtaaattcgatacaaaatgattctttttgaatcctgaatccataaattacacttttttttttcaaattcacaaaattcacagtggtgctgactgtgtaataaccactattgggaaacatcccgtaaacctgcctgttgccatgccaatggagtgactgaactggtgacatctgtttgagcatgctttgtgtggctggtagaatgccaccgttgtgcatacactttgtacatcaggggtgaagggagggttttctagattattgggggagggtaaaattgggatttttttgttgttccttttttgatggggtgtgggggtatagtactcagcttatgccctaaaataacatgtataaaaacccctgaagtattgtgtgggtgtgtacgtgtgagtgtgtgtttgtatacgtctggcaattaaagctttgtcttctggaacttagtgaattcttttctctttttcctccagaagtatttgttacaagatttgtaaataagagctctacttagtttgtttaccatgaacatgttgcagcaaaccttatgcatctaattcctacaaggttaaagaaaggcttttagacttgccaggttaagcaacagccaagttctcagtaattgtttgccttgatttatcttttagacttcattttgccagctctaaaactcccagtcttccttgattttagtccttaatcttttatgttctgagcaggaagggtaaaagacaggaacctgcttcactgtattaactagtccatgggctgagaccggggcatctcttttcttcatactgcaatgttgctagatacatgatcagacaccagagggttgggcattcttgcaataccttaacagtgctgaaatctgcagcatggtactaaggaagttaaagtttgaatgtaaccactttatttaaaaggtttttttctttaatttaaatgaaatgggggttgaagtgaacatgattttgttgaccatgttcgtgaattacagatgcaacatgcattggtagaatcgtgtgatggtcttttgtgatacttaatttttacatatcccagtctctgtatgtatctgcatagacaaagaaaaaacaaactcctgctttgcttttattgaagggtttccaggactgcgtgtctgctcctgagctctgttttaagtatgtgtatcctttgcttgtattttgtattaaaaaaataagaaaaagaagcctttattgttgagcatgttggcattgtcccctttatttttttctctttttgggacatatgaagcaagttattctttttctgtatctttttttcttttgtaaactttttttttgttttgtttaaaaatggctttataaaagggcttttataaccca

SEQ ID NO: 50794 - DNA, 335 bp, Homo sapiens
cagagctgggcttgtggccagacctgccttgaaggaggcaaggaagggtatgtgaacatgagcaacgtccacacaggtggacaaggtgacccgtgtgactttggttccctctctttaggaagaatttttggttgtacttgggacagttacaggcatgctgctattgccatgatcttcgggaagctgaagtgatgagcagcagtgtgtgattctgaggacacagagggctggggtctaggagctatctcaggtgggctcagtcaagtgccatcctcccttttggtgcctccctaagaagtgctgagaagatgcaaaaccaaaagcttttactccaa

SEQ ID NO: 50795 - DNA, 1111 bp, Homo sapiens
  misc_feature (1)...(1111): n = a,t,c or g
catgtatatattgtcagaatctgtccatgacaaacacaaaactgaagagctgttttcaaagaaaaaagattatttcacttaattattttgttggataattgtctagttagaacttccaaaaagatacttacaaacataattcacaaatttgaaataatttctgaagttgattagctatctcatatcttttatcaggtcattttttatatatgtaggcacaaacaataagtatgttctcttctgtttgggaaaataatttggaataaaatagaaattagataatgaaaccaaaaaccttctcaaatttaggccttatttaactcatgactggtttctatgcacaagaaaatactaaaccaaatatatggtaggactgttattctcttctgcatcttatccctattttgtttctgcctttatttgtaaaaattgtcttaattgatggtacatttgccaagacaaaggttcagaattactaattttagatattatgatattctgaaataactatttttatcctgtagttctatgattatatgatttgtaaataagaagcctaaccaatttaaaattcctgactttagtctcatatatcttgtcagactgtctcggttcaaattccaaacctaccatcttcagtnnnnnnnnnnnnnnnnnnnnnnnnnnnnnnnnnnnnnnnnnnnnnnnnncttttaaaatggggatgatgtgataacaataatacctacctcacaaggttgttgtganccatcaaatgagataacacaagtaaaatgcatagaacagttccaagcacagagtaattcaataaatattaactagtaatagtagtggtagtaactcgtgaatctttttaataacataataggctttgattttattatctctttaagttgttaacttttttcccttgttataagttttatgtcaagtaaggtagtttgtttaagttagttacccatgtccccaatcaagggaacctaaatgaagatatatcattaaataattaacctttttttattgtgtcaagcaatactaatttgtgtcataaaatttgttttgcatcattcaacaatttatgcccagaaataaacaatattctacaacaggc

SEQ ID NO: 50796 - DNA, 473 bp, Homo sapiens
  misc_feature (1)...(473): n = a,t,c or g
ctgtttacatgttgtttattgaggaggtgttttggcaaaaagcaattcatgataaataaaattnctgctttccatctactgggtaaaatgactattgaaatagtatgaatgtggtcagaggattatagttgagagtgaagtactatgtgtgagttatagatctctcgaattatatttatagatgcagtgtcctgcccagttttgtttgcctcctacattttactgtaaaatatttattgtcttctagccttgagcctctgagggtcagtaagtgaagtacagatagcaaaattttactacctcgttaacccttttcttaaaatattctctatctttctatgtctctttctgacatagtaatcccaaaggattgtgttactccccgtgaaagttattacttttcctttaaaaatggttttataataagactgtttaaaacctttccagtattggtacatcttggcttctggccc

SEQ ID NO: 50797 - DNA, 1327 bp, Homo sapiens
ttttcacttcagaaaagtttattaaaggtaaaatcagatttacagagtataaaacaataagggatagaggtgaagaggtttcaaacaaactatgagtacaatagaaagtaaattacctacctggggttctcacagcactttttctttacttctgcacaaagcctaatgtgttttttaaaaaatccttggaaaagtctcagcagtcatatattctcatgatttagcagttaaacaaaatgtccacaatccacaaagaaagaggggtggacctaagtgacagggtactaaacatatatactatgataagctctgcttcctctgttccagttctttaaattttgtgtctgtgttttttggggaaacggttatcatgcaaaatgactgtcttggaagcaggagttgaggaaaggaaattctggggctctctaaaaagccttcttggcctccttgggtgcagtaagcagcatgtcttgtaaaaagcctaacttctaccagacttataaccatattatgcaattggtacttttttaactaagcaaattttataaagaatttgaaacgttttgtgggtacttatagccaggtactgcacataaatatcacactcaaattaagagtgcaggctctgcaatcagcctgtatgggttcaaatattgatcccagatcacagttatgcaaacttaggccaagttacttaatttttctgccttcctttaacaataagctttagtattagtacatacctcagagaacagttatgagaattaaaaaaatatacgtagtttaaaacagtacctggcacacacgagtatttagtgtagatgcacacagagcttctttcatatagaatgtgtcatattcagatttacacactagttattagtgttaatgggaaaatggaattagcctcattttattagattttgattccctaaactacaattctatctgtatcatgtcaataaaaatgaactccttgagcacatgaactatatgctagtctacctttgtatactccaggatggcggaatgtgtctttttaccacatgaggtgatgccattagtatattccagggcctggcacgacatctattacatgggtgtgtaataaatgtggaataatttatttctggtaatttatggattatctacaaaaccaatataagtggatgttattagagacctttaaaaacctataattttactcatatttgctgcaaataagagtaatgcaaatgtaatgctgaatggaacttttgaggcattaaagatttttttcctatatagtgaggaataaaactaagacttgattgaaataactttttta

SEQ ID NO: 50798 - DNA, 1436 bp, Homo sapiens
tttttttttttaagattatgccatttctttcagatctttatttctcaaaaggatcaaaagccttcaacagagatgttttaaatcccaagctatcaaataaaaatacaatatatattagaacagtggagaaagattatcataacattttgttttgtttgtgcaaattataacagggaattagacactgggaatctaaaaatccaaggatactaactaaagtcagtattttaggtccagcacactgcttagtggtatcatggagacaaataatgtgggaaaactcaaaaatgtgccaagcagcagaaataaaaggagtgaaaataaaaaggttgtatctttctattaaaatatgtacgtactggtacctgtaaattgaatgcaaatgtcccaaaattctgaaattgtgactttaaaaaaagtaatggtgatagataaatcatatgccagagtgaaattttaaaatacatttcatatttcccagcatcataaaaataaatccctctgtaggcaattatcctaaaatattttttatcagaaatatagctttagtaacaaataaccatttgatagttacataaacatataacagatatgctctacatgtgtaatttaagtacattaatatgagcattctttatgggtatacatcatataaaaataaatcattttcatacttttttaaatgttggcactgtaagtcacaagaatgagctactcagtcagtctccctatttcaggaagcctttgcatggaaggacagagtctctgtgaagttctctgggaagtaaaggaggcgctgatagggactgaaggctgccttagctcagaagagctcaaggcaacagggcaatttggggagagtcacaggcacaggaagggcgtagatagaagatacgtaaaatcaaatcaggaagttttgttatattgttaaatgatccaatctccactccatgtccttcaagaaatgttgaaagaaaattttcttttgaaaatttaaaggtttggcactagtaaagctgacttttagtactttcagtcaaaaaagcttaatcctctttctttaatttctggttttatgaccaaatatcctgaaggtagcgtttttcttcttttaaagtggccagggttttcattgcttctagtttttcaactccaacctctttgcttattatttgcacaagggcatcatgtacatccttggccatattctttgcatctccacacacataaatatggccgttctcctggaggaggattctcgccacctgctggccatgaagctggatgttgtcttgtacatactttgctggggcttcctcctccccaacaggagcatctcttgagaaggaaacctttagatgagttaagatcccatgcttaaggaaatgtctgagctcttttctgaatagataatccctatccttatgcctgcagcc

SEQ ID NO: 50799 - DNA, 407 bp, Homo sapiens
gcggaggtgtgagtggacgcgggactcagcggccggattttctcttcccttcttttcccttttccttccctatttgaaattggcatcgagggggctaagttcgggtggcagcgccgggcgcaacgcaggggtcacggcgacggcggcggcggcatgacggcatggaagggtaggcttccttcaccgctcgtcctccttcctcgctccgctcggtgtcaggcgcggcggcggcgcggcgggcggacttcgtccctcctcctgctcccccccacaccggagcgggcactcttcgcttcgccatcccccgacccttaccccgaggactgggcgcctcctccggcgcaactgaaggagcgggggccgggtctccttgctcggttgtcgagccttcatgtcggataatcaga

SEQ ID NO: 50800 - DNA, 1186 bp, Homo sapiens
gccaattggcagttggttgtagaagaaggagaaatgaaggtatacagaagagaagtagaagaaaatgggattgttctggatcctttaaaagctacccatgcagttaaaggcgtcacaggacatgaggtctgcaattatttctggaatgttgacgttcgcaatgactgggaaacaactatagaaaactttcatgtggtggaaacattagctgataatgcaatcatcatttatcaaacacacaagagggtgtggcctgcttctcagcgagacgtattatatctttctgtcattcgaaagataccagccttgactgaaaatgaccctgaaacttggatagtttgtaatttttctgtggatcatgacagtgctcctctaaacaaccgatgtgtccgtgccaaaataaatgttgctatgatttgtcaaaccttggtaagcccaccagagggaaaccaggaaattagcagggacaacattctatgcaagattacatatgtagctaatgtgaaccctggaggatgggcaccagcctcagtgttaagggcagtggcaaagcgagagtatcctaaatttctaaaacgttttacttcttacgtccaagaaaaaactgcaggaaagcctattttgttctagtattaacagtgactgaagcaaggctgtgtgacattccatgttggagaaaaaaagaaaaaaaaaagctgaatgctctaagctggaacgtaggatctatagccttgtctgtggcccaagaccttggccttgtgtacaaaaatgacaaaatattgcaatagcaaagctgaacatctaacactagctatctcttgctagatctccttgctcagcatataactataaatacatgtaaaattacatgtatatggctatatttttatttgcttgctcctagaagagaaaaaaaaatcaactttgaatcacaactaggaattgatgctttaatttttggatactttttcagaatttttaatttactatggtccggcctaagatcctctgttgtatcaggttttgtgcacaaaagaaaagcacaaaagttgaatgcacatggggcatgtgctttctgtgcaccaaatatctggatgaggttcttttttcaggcctacagtcaaatctgtgtccagaattttttgacttttttgctttgtataatcatagaattcattgctgctga

SEQ ID NO: 50801 - DNA, 801 bp, Homo sapiens
catgtttcagtttcagtttatttcacagaaatgttttgaaatcctttatctctaatggaagcacaaacgggtgtgggggagtcaaaaatgggggaaaaatttagtctgtaagcaaatcattggatggcatcagaatttgagccagggtaaaaatgctggaccttggcccttatcagacagagaagtgcagaagaactcaggttgggggattctatttaaaacatgttcagttctgaggaagaggagtatgggcagggcagaggaaaaatgtaaaatgggaaactccctcatggacttaaggccccagccagagagaaaccatgtgctttctccctgcttccccgcttcccttctgacttggggcaaatgaggcagttcatgctccccttagggctggaggcagtctgcaggggccagctgggcagagatgaaatcttgcaaaggaacccttcttacactcgaaaagcaagaatagcaaagggactttgggaaggacataaaacaagaaaaggaagctcctcaccaacagctcccagatggagggagtttgtgtgtctagcattttcaccaaagtgctgctcatcctgatgcacagatgcagattggagctgctgcctgtgccctcaccatgggtatgtacccaccacaggcattcccaggtgatgcgggggcagaggattccctctttccactcaggataacaacccctcgatggggttttcaacaagtatagaaagctcctggactcagccaagaccctcacctacagtcccagtcctcccaccttcttcaggtctctag

SEQ ID NO: 50802 - DNA, 541 bp, Homo sapiens
gttatttataaaatatttattatgctcaatatacatatttcctttcagatgttaacatattgtttgatagccatcattaacacagtacttagcactaaaattgtacataataggagccactgcctcacagccagcccacaaatttcctacagttttcctgtcgatcagttatttcctttgattcattctgtacattcctgaaaaacatctgtatggttttccagtaaaactgcatgagtaatatccatgcttttgcacttaaacgtcaatttagatagacatgcaatttgtgctgtagtaagtgacctaattctcctaccttacaaatttccttcacacaaaaaacagtctgatgctttttagtttttatctttttgttcccctgaacatagtgagtactgcccacttctggtgtagtatcttgagtttagggaagtttttgtcctgtttcctctaaaatgttgttcctgttacatgtgttctgttagtattttccttctatcacttaacaagactctggattctcattgtctgatctctg

SEQ ID NO: 50803 - DNA, 46 bp, Homo sapiens
agaaagggagatccttgtgacctttgtagatagataggatgaggct

SEQ ID NO: 50804 - DNA, 370 bp, Homo sapiens
ccaattagcatttccaacacccctcaagatgtctgatgctgctggtctgtagaacacactttgagtagctccgagcacaggaataccaaaaactcctttatgttcacgtcctttcttgaggcctttgataacgtaagtaaaaaattcaattctcctgtctgctctgactggagactaggagccgtctgcccaccttcagtcctctccactctcccacaaccatttttttgtgcccctttgcacatcccctactgcccctccctgggaccatgaaacattaccttctgctggattcattaccgcatcgtggagcagggtggccatactcccagctatccctgcaaaacaaactccagaaaattaccctctg

SEQ ID NO: 50805 - DNA, 1413 bp, Homo sapiens
ttttttttttttttttttactgttttcagtcactgcaaattttcttccctcctctgggatctaaggatccagggaggaggctgccacagtgaagcagaaaagctacattctgcccagggaggaagagaaaaagcaatttctcgctccccttcccaagtccttcctgtccaccaccacctcggatgtccccgcacacagccttccggtgagcggccgtgccgtcccctcctctctctaaggcattggggagcagagggcccataggcagcaccctgcaaaaaaaaaaaatgatctacgtgtgaggagagggcaaggggctggatgcaggcagagaatgactttaagaaaagattctatgatcccttcctttagtatggagctcgattttccagctgggcgcttggtgagaaagtacttgaagaactcatagacagaccaagaaatggcggtggagggcatctggtagatgacacgcgcctggatgcctttgaagtagccggccaggccgttgagctggtacaccgtccggaaggcattggccatacccgacagccggccgctgatgttggccagcgagagggccacgttctcctgagtgttcagaagggtcttacagacgtccaggggggtcgtggcggccgcggcgagggccccggccagcccgcctgagatgatgtgggactgcgggttgtaggtccggtgggggttgacctgctcctgcaggaactcataggtgatgaagtggatggactggaaggggatgttcatggtcagctgcgtggtgtagctccggtagaaggcccccaacccctcggtcctccacaccgtccggatgcagctgattgctgaccggtgctgcgagttgtacatctgcaagcgctgcttcaccactgtggttggaaccgcggggcaggccagacggacagccagtgggcagtgggttggatgtggccccaccccagggtcggaatgaaggccaagccataaagagaaacaagccagttagacaccggaaacaggcgagacaggcacacacagccctagtctgagcagccgcggagggccagctcccggcagtcctaggttaaaatccatttttatctccaggactcacgcctggaaggtggctatttccgtctctcctgcctgaatcttgctgaaggcagcccccgaaccaggcagccacttcagactagagtcgctgatctgtttcccagatcctggctacccctggtaggaaccctcaggacccaccacaaagctgaatcctgtcccctgtcccctctgccctcctccttcccccaacacatctactggaagcgtgcccccttgtgtattctcaggggtttgtgcctctaatggtaattctagcttctgtgacacagtgcgtttggaacagacactagaattatg

SEQ ID NO: 50806 - DNA, 672 bp, Homo sapiens
tttttttttcataaatgctaatgcaagagggcttgaagtatcaaagagtccacaggaaatggatgcccccagtaatatcttttttttaaaaaaaatatacattatataatatatattatatatataaaaagctagtgtaaatgcttccatggtgtggtcacaaatttgaaagatgaacctcctttcagctgttaaccatcttcccatttgcaacaggttttaaaaagtcgtttttatcttcagacataacatgagttttcagaatgaggttgccagcactgacagatgtggtgatggggaggcaacttgcattgctaatagacactgggagtggctggctaaagcaagaagttaccggcagaattgttttttgctcctccagaatcacatggtcttcacctaaactctgtttcttctgctttggtggctccttttggtgctgctgtactggatgcccattttccactgccattccatttagcaactgatcattttgagaactgataccaagctgtatgtccaagatctcttcaattggttcactttgtccatcaggttcatcagtatcaagtgctgaaagctctaactcgatatccctatcaggtttagtatctgttgcatcttctgtataatcaccccacgcgtccgcccacgcgtccgcccacgcgtccg

SEQ ID NO: 50807 - DNA, 450 bp, Homo sapiens
ttttttttttttaaggtaacagacttttattacatcttcttttggaacttagaagacaatattagcctcctacacttttgagaattaaaatttagcccaccatcatttggccttggtagtgacatcacttgggtacagtgatgacaagacagcctaaggggctggacctcagaagactaaaggtctagtcctggtccttccactaatgggctatggtgaccctgagcacattattccacttctaggtgattcagtttcctcatgactcataacaggaaatcattggtctcaaccttcctccaaggactagtgtgtggagctagaacatgcaccaaggaagactggggaacatcagagagagataggactcagtaccgttgactcaggtaaggagggagacagcaagaacagagtagaaaggcagcataaaactggtggaaccaaacacag

SEQ ID NO: 50808 - DNA, 2086 bp, Homo sapiens
  misc_feature (1)...(2086): n = a,t,c or g
tttttttttttttttttacaattcaaacttttatttggcaataagttcagagtcacataacacataaaatcaacatttaaaataaatagcaaattcacatctagaataaataggtctgcctaatttgcattaattgtgcctgatatcatacaggcacaatctgtcattccacgagataactggaaaagtctccaaagtcagagttcaaacctgcaggactgaaaacacacagaagcactgtcgcaggttggggttccccgaaaggcagatactgaggtggagaatggcgtgcaggaaggttcatagggacagtgctgtgggctgagcccggctgggtacaggcttgtcagggagaggcactgggctgtaatgtggccacaatgaggtctcacttgaccccacaagggggcttctgggagctggggatggccccagaggttttcccaagttggggtgaggaggccagacctttgtaccccatatggagccggtaagggttacaggcaggaagggggtatgatctggggcaggccagggcctcttcagcaggggaaactcctcataagggctggaagtaaatggcccagccagcagcactcccagctgttaggggagtatgtccttcagtctggaaaggtcatccgggcagctgagctcagcacccagcactagcacaattacaaactaatgcaatgagaggtatattcaacaagtgntnctgacctgatggctcaagtacacacactggccatacatgtaactatgcccaggaagtagctcagagggaatacagtgcacttattacctacagaactttctcctctctgcatcccagctataaggttattcatctgcatgttctcagcaagggaatcttggccattgccgccaacacaatccattagagcaggggctaagcaagccacagcctgaggaccaaatacagccccacagcttgtccttgggtaaatcaagttgtggctggaacacagcccatgaccatggtcattcccacagtagtagtagcaaaagcaaacagcccaaaaagccaaaaatacttcctatctggccttttacaggaaaagtttgctgaccctgcattaagggtacttcattccctaccctttcttgaacgcactagcagtgtcaaaggttagctgaactttgagcctaagcctccctaaatgacactagtagtgtcaaagattactgttactaaatgacactagtagtgtcaaaggttagctgaactttgagctaagctccctaaggcaaaaaagaaagaaagaaaaacctggtacaaaagaaagtcgatattaagaaggcaaaatgtaagttctctattagttgaacagagcaatcaaggaaccctgtgtctggccaaatttcgtcttagagcattctagacaaggagccccaagtggtctttggcagcaaatgagcaggcagaaaagtggaattcagttccagtatttagcccagtctctgctgcttaaaaggccttttgagaagaggacagaagaaaagccacttagtttgcccaaagctaaattaactaggaccacaagactacttttcaattctcctttgcaataattaagagtgccaatgcattcaaagcaactagtaattgtagtctgtaatatgcccaaatcagtagcaagtggtttatgttacataatattaatgggaatagcagaaaatagtgccgaagggtaaaatgttttaaaaaacagacaggcactatgttagggggaaagtgggagctctaagccaaacaactaaagtatttcaaaagccacgtttcacccgtaaaaacaacactggaaaaagaaaatcagctgtgcaagtcccttccaaagggacctccatgggccttgctggactgtcatatttgtgatggctgctgccctggactcatcattgttcacataattcttagaaaatcagtcaaacaatattaaacagtaatttttaaatgttcaagctatttttgtttgcctttacaacacaattttttaaatggctgaaaacagattcatttcccttgtaccaatatgcattcatcaatgtgcacatcatgatg

SEQ ID NO: 50809 - DNA, 1403 bp, Homo sapiens
gggcaaggagctgctgggctggagcggcggcatgtccgacagcgagaagctcaacctggactcgatcatcgggcgcctgctggaagtgcagggctcgcggcctggcaagaatgtacagctgacagagaacgagatccgcggtctgtgcctgaaatcccgggagatttttctgagccagcccattcttctggagctggaggcacccctcaagatctgcggtgacatacacggccagtactacgaccttctgcgactatttgagtatggcggtttccctcccgaggagcaactacctctttctgggggactatgtggacaggggcaagcagtccttggagaccatcttgcctgctgctggcctataagatcaagtaccccgagaacttcttcctgctcccgtgggaaccacgagtgtgccagcatcaaccgcatctatggtttctacgatgagtgcaagagacgctacaacatcaaactgtggaaaaccttcactgactgctttcaactgcctgcccatcgcggccatagtggacgaaaagatcttctgctgccacggaggcctgtccccggacctgcagtctatggagcagattcggcggatcatgcggcccacagatgtgcctgaccagggcctgctgtgtgacctgctgtggtctgaccctgacaaggacgtgcagggctggggcgagaacgaccgtgggcgtctcttttacctttggaagccgaggtggtggccaagttcctccacaagcacgacttggacctcatctgccgagcacaccaggtggtagaagacggctacgagttctttgccaagcggcagctggtgacacttttctcagctcccaactactgtggcgagtttgacaatgctggcgccatgatgagtgtggacgagaccctcatgtgctctttccagatcctcaagcccgccgacaagaacaaggggaagtacgggcagttcagtggcctgaaccctggaggccgacccatcaccccaccccgcaattccgccaaagccaagaaatagcccccgcacaccaccctgtgccccagatgatggattgattgtacagaaatcatgctgccatgctgggggggggtcaccccgacccctcaggcccacctgtcacggggaacatggagccttggtgtatttttcttttctttttttaatgaatcaatagcagcgtccagtcccccagggctgcttcctgcctgcacctgcggtgactgtgagcaggatcctggggccgaggctgcagctcagggcaacggcaggccaggtcgtgggtctccagccgtgcttggcctcagggctggcagccggatcctggggcaacccatctggtctcttgaataaaggtcaaagctggattctcgcaaaaaaaaaaaaaaaaaaa

SEQ ID NO: 50810 - DNA, 268 bp, Homo sapiens
tagataatgtcataatacattgtcaaacccatagatgtataatacaagagaaatgctaatgtgaactatggactttgggtgataataaggtgtcaaatacaggttcatcacttgtaacaaatgtgccactctggtggggatattgataatgggaaagagtgtgcatgtactggggaagcaggtatatgggaaatctgtgcaccttatgcttaattttcctggaaacttaaaactgttctgaaagtctattccagaaaaaaaaaaaaaa

SEQ ID NO: 50811 - DNA, 333 bp, Homo sapiens
catgctcttatttaggaaacttgacggtatgttacctcagggattgttccttgcctgtctttccccaaagaacttgagtttgaagtgattttcacttggcagtaaattgaaggttttcttcattgcttaccaccatgtgccttactcctgctgctcttgatctccaagtgcccttactgctacagaaaggaaagctcttgaactaagagcttggcagccacttgatcaggatggccaaataatggcagtacaggttgagcatctgaaatgcttcaagatgggcgctggcatgacattcaaaggaaatgcctagtggtgcctttcagactttca

SEQ ID NO: 50812 - DNA, 139 bp, Homo sapiens
aatattttaaaactaggttgagtatgaatgagagggaaaagagaagtgagccagttcataattataggctaaagattatagtggaaatcagatcacatcttacatttcacattattttttcctgtactttggcattaag

SEQ ID NO: 50813 - DNA, 1044 bp, Homo sapiens
agcaacagagcaagacacacacacacatcaatttattttagttgtataatgcttttctattagtaaagcatcagctaagcttcagtggcctgctccatcccctaatgactcccatgggctatcctaaaggaacttccagaacctttgttggtgtgttgacattgaccatgcagaccaatttgggcacaactggacattgattccttttacacaagagctgcctcccaaagatagataaattttcccagccctaaatatgaatcatggggcaagatattggtcgtattgatggtgaacctttcctactggattctttgcatgccacatagcaggattcattgcctttctctcatcatggatggcatgcagcagcacccaagtattcttcattctttgcagggaaaaaattgtgcatgggggctgaaatgtagtatgtgtagctcaattagtctctcctctgtgatgcaaaatggaatattcaatggcagatctgcccttctgagatgctgaccatccaaaacaccttgtttatggtgcaccatgattagctcacacacaatgccaaggctgtgcttctattatctgatacatagtttgacaatgggtaattctactcagaccctccctactgattggctaggatgcctgtcaggaactcattatgctactggttgtttggggatccccatagtggactactttcaggaatggcatgaattgtaaccaactgagtgctgcccccactgttacggaagtttataaaaccttagttccagaagacccaaaggagagtactggtttgtgtttggtgcttggcctagatccagccaccactctgaaactcatcacatcttcattgacagggagggagcccaggacatatgtgtggctcattgaccagaaggctttcttagtcccaacagccatgaaccatgcacttatggatacccagccttttagggctacgtgaaatgcatccttgtaacatcattgtattctttcaataaatagccttctgagttgaatgggaaaaaaaaaaaaaaa

SEQ ID NO: 50814 - DNA, 405 bp, Homo sapiens
  misc_feature (1)...(405): n = a,t,c or g
ctggtacccttcctctgacaccacccagcaaggatggaagtaccgtcagttctgttagtttttcagtctggtcaccggggaggtggttctggtaatctgtggtggtgccgggacaggcgccccgagttcccactgcccccgggcggcctgcacagagctgctgccctccagagactgtgaatcccaagcctgactcagtggactgcttcctgttcccctccctcctcttcctcaccttgttctgcaccctcaagcctttctccaatgcctcncaggaggatttggggactttctccctggggcacccagatccagcttnggaggcctcactgggccctgggcaaggncttgacctcccgcccnaacttgcttctgaanctccggcctcgaggaattganggccag

SEQ ID NO: 50815 - DNA, 860 bp, Homo sapiens
attatcaattatgaatatgaattgtctggtttactaatgtagtcatttgttcatctttacttttagcagattagcaccataactaacttaaaactaagtttgttacctgctttttatactgtcacaaaggtttttgaaaaagctggggacactattttgtcttttagttttaaacttttttaaggcaaagcaagctccccaatccctgttctccaatatgtgtatgatgtgacttccatgtagatataaaaatgattgtgccctaaccaaacttcctcagattgtgcactgtttgtttaaaataatcacgtattttagtctgatgctgttgtattttttcattttatttaaaacactacttacttcttattctcttaacaaattttaaaaggtagtgatcttaaaaaaaaaatcactggataactaggaaatatttttgttgttgttttgtttcttaaagagtacagaggccattgaagccttttgctcctcttaccgtgaaaatgaaatgttagccattgtatggctaggaaccaatgcacttggcagttaatggatctgctgttgctggagtgtgagcgtggacttgatgcagtgatgacaaatcattgcttagaattaatgttttcaaatgtgcaactctagtttttaaaacaaaatttggttctttacattcattatttcgtttttgtttccctttagtatttaatggtctttggagaaaaaataataaaacagagtgttatatatatattttttggtgcaagataagattttctgttttttgaaataagtctgtagcataaaggttaaactattttaagacaaaataaaatagagtgtatttaaacaatgaaaaa

SEQ ID NO: 50816 - DNA, 4564 bp, Homo sapiens
  misc_feature (1)...(4564): n = a,t,c or g
atggcggcggccgcggcggancagcaacagttctacctgctcctgggaaacctgctcagccccgacaatgtggtccggaaacaggcagaggaaacctatgagaatatcccaggccagtcaaagatcacattcctcttacaagccatcagaaatacaacagctgctgaagaggctagacaaatggccgccgttctcctaagacgtctcttgtcctctgcatttgatgaagtctatccagcacttccctctgatgttcagactgccatcaagagtgagctactcatgattattcagatggaaacacaatctagcatgaggaaaaaagtttgtgatattgcggcagaactggccaggaatttaatagatgaggatggcaataaccagtggcccgaaggtttgaagttcctttttgattcagtcagctctcaaaatgtgggactgcgggaagctgcccttcacattttctggaactttcctggaatttttgggaaccagcaacaacactatttagatgtcatcaaacgaatgttagttcagtgtatgcaagatcaggaacacccgtcgatcaggacgttatctgctagagctacagctgcatttatacttgcaaatgagcataatgttgctctgttcaaacattttgcagacttgctaccgggattcctacaggcggtaaatgactcgtgctaccagaatgatgattctgtcctaaaatccctcgttgagattgcagatactgttccaaagtatttgcgtcctcacttggaagcaactctacagctaagtctaaagttgtgtggagacactagcctcaacaatatgcaacgccagcttgcccttgaagtgatcgtcaccctctctgagactgcagctgctatgttaagaaaacataccaatattgttgcacagactattcctcagatgttagcaatgatggttgatttggaagaagatgaggactgggcaaatgcagatgaactagaagatgatgattttgacagcaatgcagttgcaggcgagagtgctctagatcgaatggcttgcggacttggtggaaagctcgttctgccgatgatcaaggaacacattatgcaaatgcttcaaaatcctgactggaaataccggcatgcaggattgatggccttatctgccattggtgaagggtgccaccagcaaatggaaggaattctaaatgagatcgtaaattttgttttactttttctccaggatcctcatccaagagtaaggtatgcagcctgtaatgccgtgggacagatggctacagattttgcacctggtttccaaaagaaatttcatgagaaggtgattgcagctctgctgcagaccatggaagaccaaggcaatcaacgtgtgcaggcccatgcagctgctgcccctcattaactttactgaagactgtcccaagtcactacttattccatacttggataatttggtgaaacatctgcattccattatggtactgaagcttcaagagctgattcagaaaggcaccaagttagttttggaacaagttgtgacatccattgcatcagttgccgatactgcagaagaaaaatttgtcccctactatgatttatttatgccatcactgaagcacatcgttgagaatgcggttcaaaaagaactgagacttctgagaggaaaaactattgaatgcattagcctcattggtctggctgttgggaaggaaaaattcatgcaggatgcatcagatgtgatgcagcttttgttaaagacccagacagacttcaatgatatggaagatgatgatcctcagatctcttacatgatctcagcatgggccagaatgtgcaaaatccttggaaaagaatttcagcaataccttccagtggttatggggcctttaatgaagacggcttcaattaagcccgaagtagcccttttagatacccaagacatggagaatatgagtgatgatgatggttgggaatttgtgaaccttggagatcagcaaagctttggtattaaaactgcaggactagaagaaaaatcaactgcttgccagatgttggtttgctatgctaaggagttaaaggaaggctttgtggagtacaccgaacaggttgtcaaactgatggtccctttactgaaattttatttccacgatggtgttcgagtggcagcagcggaatccatgcctcttctcctggagtgtgcaagagtccgtggtcctgagtatctcacacagatgtggcattttatgtgtgatgctctaattaaggccattggtacagaaccagattcagacgtcctctcagaaataatgcattcttttgcaaagtgcattgaagtaatgggagatggatgccttaataatgaacactttgaagaactgggaggtatattgaaagcaaagcttgaagaacattttaaaaatcaagaattacgacaagttaaaagacaagatgaagactatgatgaacaggtcgaagagtcactacaagatgaggatgataatgatgtttatattctgaccaaagtgtcagatattttacactcaatattcagtagctacaaagaaaaggtgttaccatggtttgaacagctgcttccattaattgtcaacctcatttgtccacatagaccatggccagacagacaatggggattatgcatctttgatgatgtcatagaacactgtagtccagcctcatttaaatacgcagaatatttcttaagaccaatgctccaatatgtatgtgacaacagcccaggaagtcaggcaagcagctgcatatggcctgggagtcatggcacagtacggtggagataattatcgccctttttgtacagaagcacttcccctgctggtaagagttattcagtctgcggattctaagaccaaagaaaatgtcaatgctacagagaactgcatctcagcagtagggaaaatcatgaagttcaagcctgactgtgtaaacgttgaagaggtccttccacactggttgtcttggcttccactacatgaagataaagaagaagctgttcagactttcaattatctgtgtgacctgattgaaagtaatcatccaattgttcttggcccaaacaataccaatctgcccaaaatatttagtataattgcggaaggagaaatgcacgaggcaattaaacatgaagatccttgtgccaaacgtctggccaatgtcgttcgccaagtacagacttctggaggactgtggactgagtgcatagcacagctcagtcctgagcagcaggccgccattcaggagctcctgaactctgcgtgaagggccttaatgtcacccaccagaaaactaactccaaataaacgcttaccctttcctttaggtttctttgttttgtttttgagcaaaagagatcggtagtgttgtgtgtaggccattcttctggagagccacaagcaggaagagcagcgctgtgttgcagaatggagtttccatggatttctaccagaccactgaaggagttcctggaagccctgcggtagctagcactgaagactatttttctattggtataacccgcccacctgaaggggaaagggaaatcaaattaatttttctcgttagacataaggaaatttaaggaaaaacagctttaagaacagttactcagccgtagatgtgtgttcacacaaattgctctgcattcagtgttcattgtgaattgggagtgtgagtctttctgtagggtagaaagaagcctcctacccagcaaaccagtagacccaaaagttgaaaaaaactgatgacagacaacaagcatgaagatggcatatttgatgtcactttggttctttttcccagaaggcttatacagtgactcagtcgggaagctttccagcttccagcccttgaatgtgaagtgtcattggcatgtctggcagtagtctctcattcactcctcaataaacaacattgaatacaaaagaggcttgtgtaaaaactcagtactgtctggcttggattcatttcatgttttttaatataagaatgatctaatatttttttaaagtaatagctatcagtaatagctgagtgttttttcccctaatattttccttgtgcaattcagacttaagcatcgagtttttaccatcttccactttaagctaagttatgatacctattccattcacaattggtgttctttttaaggtttgcaaatttcagccaattttgtagctaagattgttctgatcagctcaaaaagatttggcttagtgttttcattgcaaattataattgctgtagagccacacacaacttttgaacttttaattataagtgttatggctaaagttatttactgaaaatttcagtaaaatgtgtgaatgtttctttatgtattaacctcatagcagtaaatgacttgctgttgtttaatttttctaaggcatcttaatagacttctgttgaaaacttcagtgttaacatttttatagtttgtactaaatttaaccgtgatataaaaatgaattttatgcatagatcagaattttaaattaaaggttttttctttaaaaaaagaaaaa

SEQ ID NO: 50817 - DNA, 475 bp, Homo sapiens
taagaacaaattattgtgtgaaatacctgtataaacacaaaatacaattaaatatttctttacaaaaagctgagcattacgcataatagtggaatgtctttcattaggtgtattttttaaagattaacaaaagtaacatttcctaaaatgtatacatgtgccatatttttgcaaacatgcctgaggatgtatttaaaacatttctgtagtaagagtttgcaagaacttcacaaacctgcaaataaaatgcatctttttaaaaaggtgaaaatggcatctccaacactgcaacaattcaaaaagtacagcatccctaatctttaaaaacatttctacagaccatctttgacaaagagctaggatactttggattcatttaataaaaaatgatttagaaaacagattgtgaccatctgcttgctaaagctactgccattctggataaattaaaagttttaagtaaaacaaaaacaac

SEQ ID NO: 50818 - DNA, 651 bp, Homo sapiens
aggccaccagggtgactgcgggattccgatctgcgccggagctgcgatgctagagcactcttgccacccccaccccacggacgtgttgcagtgatatcagaattttgcgtgcggtttacccgtgtttaacctctttgcgtctcgcttctgaatcgtatccacttgagcatcactagactgatctattttaacactggtggggggcagcgaggacatggttttaaactttaaaatgaaaatgtgaaactaggaatgttgctgtgagaccccttggacaaacagatttttgcactggggatagaacttgagcaatttctgtcttgggcctcgccactgacgtcccttctttcctgtggggacaggatggacagattcctggtgaaaggggctcaagggggccttttgaggaagcaggaggagcaagagccaactggagaagagccagctgtgttgggaggagacaaagaaagcacaaggaagaggctcaggagagaggccccagggaatggaggccactcagcaggccctagctggcggcacattcgggctgagggcctggactgcagttacacagtcctgtttggcaaagctgaggcagatgagattttccaagagttggagaaagaagtagaatattttacaggagcactg

SEQ ID NO: 50819 - DNA, 499 bp, Homo sapiens
tttttttttttttaactgttaaaaatgtttttattttttagtaagcaaaattttacgaaaagtcagattcacccgtgggagccagaaccttctttctcacgggaagactgtggtaccagtgcgtgttggtcgggtggttcatcattagtaagctcccgtgggccagcggcagcctgaccaccgccaccctcctggaggggcttttcccacgggaatccttatgccggaagacaaagtctctgcaggcaccgaaggagacagaggcaatggggctcccaggggccagttctctttcatcatctcggtgctccccgatgtggtcacagccatctttatacctgttgatgagcacaaagttgaaggtctgtccagtcaccccagagacgtgatcccggatgcgctctagaactgggatccagggctttggagacagcgtgaggcctgaaaatgtgtaggtcagcccagcgtcgccatacgttgcctgcttcctgggcacact

SEQ ID NO: 50820 - DNA, 1447 bp, Homo sapiens
gtgaagtccctatttgaagaacttggaagtagtcatggtttagctgcattgtcattttctatcagttctctgaccttgattggaatgttggcagctataacttacacagcctatggcatgtctgcgttacctttaaatctgataaaaggcactagaagcgctgcttatgaacgtttggaaaacactgaagacattgaagaagtagaacaacacattcaaacgattaaatcaaaaagcaaagatggtcgacctttgccagcaagggataaacgcgccttaaaacaatttgaagaaaggttacgaacacttaagaagagagagaggcatttagaattcattgaaaacagctggtggacaaaattttgtggcgctctgcgtcccctgaagatcgtctggggaatatttttcatcttagttgcattgctgtttgtaatttctctcttcttgtcaaatttagataaagctcttcattcagctggaatagattctggtttcataatttttggagctaacctgagtaatccactgaatatgcttttgcctttactacaaacagttttccctcttgattatattcttataacaattattattatgtactttatttttacttcaatggcaggaattcgaaatattggcatatggttcttttggattagattatataaaatcagaagaggtagaaccaggccccaagcactcctttttctctgcatgatacttctgcttattgtccttcacactagctacatgatttatagtcttgctccccaatatgttatgtatggaagccaaaattacttaatagagactaatataacttctgataatcataaaggcaattcaaccctttctgtgccaaagaggatgtgatgcagatgctcctgaagatcagtgtactgttacccggacatacctattccttcacaagttctggttcttcagtgctgcttactattttggtaactgggcctttcttggggtatttttgattggattaattgtatcctgttgtaaagggaagaaatcggttattgaaggagtagatgaagattcagacataagtgatgatgagccctctgtctattctgcttgacagccttctgtcttaaaggttttataatgctgactgaatatctgttatgcatttttaaagtattaaactaacattaggatttgctaactagctttcatcaaaaatgggagcatggctataagacaactatattttattatatgttttctgaagtaacattgtatcatagattaacattttaacttaccataatcatgctatgtaaatataagactactggctttgtgagggaatgtttgtgcaaaattttttcctctaatgtataatagtgttaaattgattaaaaatcttccagaattaatattcccttttgtcactttttgaaaacataataaatcatttgtatctgtg

SEQ ID NO: 50821 - DNA, 1649 bp, Homo sapiens
gttaatccaggagctgtagcaaacaaaactccctgctgtacccccttaaatccaggtcatggcattagtcagagcttgacctcccttgtccctgatcaagagcaggaattcaaggcatgaggcccatggccggcaacagacataccaacaccagaaggggcaaaataacctcaggaaagtgaaagagctctagataggtcttccagaggtgctaaaccgacacacctttatcccaaccccaacccgggaaagataagcaaactgaaagaaaatgcacagcaaatagacataatcttgaagatttttaaagaataaatatttttttgtaattaaacattatgcaaacacgtgccacgcttgctttgtccatgcatatgcgctatatacaattttgaaaaatactgtgttgtcctcttgttttaaaagtcatatacaaagtttttatgtttttcgtttgttgaatcctcttgctgcctacccctttccccatcccaagattttctttacaaggaactaagcatcattcactcatgaccttggggtatgagagaaagagagtcagtctgtgtgtgggtgtatctgtatgtgtaggggaggaaggggaagaggtcctttaccaaagtacaacaaaatggctggtttgaacatgaaaagcagtgtcaaggagctgtttgaaattttaactgtactacactcaggaaaaggaaaaagaaaaaaaaggagtcagctttgagaatgaagctacgttacaagttaaagttggagggcttttagtgtgtctgtcacacttttgttggcggcctagaatactgttgtacaatggtttatctacctttttattacaatataatttacttaaactttccattaacaaaacaattctggtactacagaccagtggtgtcagaataggcttagtgcctccttgtttgtgtttgttttgttttaattgcatgagcactctagatggtaaagttttcagagttcattttatgcagggccattctcagtcctcaatgtactcccacagatctttttcatagccttcatgcacatgctgtaacaaaacccttcgtcgactctcacagtatctgtacttgtcttgtactttctgctttatatcctgcagagaatcttgggaaatatctcgttcaaggtagcccgagagcacctctgtggcattctctagatctgcttggttattctcaaagataatggactggttattctttttgaggtagaaagcgaagacataagtgtacatgagtgtggcacgacactggcagaggacatcaactgccttcttcaggaactgcacctcaatccaggacatgttgtgctgctgcatctcctccattttctgtttcagcctgagcatatagtttgtgctcaaaagcgcaggctctgcatgtggttcatatagcgattacagtagaacaggtacctctgcagggctgccctagatcgctcctgtgcatctcttgctgcctttgcatcatcctcattatagcggttacagttgtaccaggcagatccatgtggttcccatgggccaagacacacccagcaaaactctgctttacaattctggttacgacagaccatgtgattacaaccaccatccttctcaattgtgacatggcatttgg

SEQ ID NO: 50822 - DNA, 748 bp, Homo sapiens
  misc_feature (1)...(748): n = a,t,c or g
gatcaatttgcttgaaaaatgcaaaataatttttacatacattgaaggttttatcattttaatagaaattgttcaagcatattaaggaacaagagttagcatttgaataattgcccataataaaaaattcttatttgcttttgacatttctgaatttgctttccattttaagactatcagggttcttaatatatatttatggaggttacatggattagtgtgacccaagagaatgatggtagtcaacatttcaaagttaataaagaccgcttttgacaataggggcagggattatatttttcatatataaaagaaaaaaatctgtcatttagtaaggttgatctatttgtctaagattatgcagctttgaaattgcagagtcagaatttgaatacagaaattctaacatcaaaatgcaaggtccaggttacggttgaattattgatttataagtaacatttgctgataattactttgaacaacacagagtaaaaaatctttagagatccccttggagttgtcttactatagagcataatcttaaagcaatttagttcagcaaacatttattctggcaaacatatattcagactctaggtgtttacaagggcaccttgaggaggaaactgtggggagggttattttggaccaaaccaaaataagggtccctattctttaaaaggaacttgccantcttattgttggactactcnggttgtattnggggcccaaggcggttgccccttat

SEQ ID NO: 50823 - DNA, 445 bp, Homo sapiens
  misc_feature (1)...(445): n = a,t,c or g
gaaaacggagctggatgagtgggctgcggccatgaatgccgagtttgaagctgctgagcagtttgatctcctggttgaatgagatgcagtggggggtgcacctggccagactctccctcctgtcctgtacatagccacctccctgtggagaggacacttagggtcccctcccctggtcttgttacctgtgtgtgtgctggtgctgcgcatgaggactgtctgcctttgagggcttgggcagcagcggcagccatcttggttttaggaaatggggccgcctggcaaggcccacttcactggtgtcctgttctctttgttcgtcctgttccttcctattcttccccaaagttaccataagccagttttccagatggggccacagattggggggagggagaatcagtgggcccagccagaaagtttaaaggggttnagggttgaaggt

SEQ ID NO: 50824 - DNA, 329 bp, Homo sapiens
caagattacaaatgttcatatggccaatcattttaaaagaactctcaagttgggtggaatatgttttaaaacaatactcttgctattctcaagcagcagtagttatatattttaaccatattcatctccattaaatttaacataactatgcagctttctttactgtaatatacagtagctatctcttcctttctgttggattttactgtttcaagagtaactaataaattaccaacagaagagactttagcccctttccctcccctaaagcatggctcagtttgaagattgttctataggcagccactatgactatcaacagtaccata

SEQ ID NO: 50825 - DNA, 169 bp, Homo sapiens
gaaagattctgtttttagcataaaaatcaatagggatgaaaattttcttagaactcaagactccataactatgggggtaaatgaagtcatcccttctcccccagtccacccccaagtgctcttagatactgaaggagtctcccttaacatacagtgttttttcgtggtg

SEQ ID NO: 50826 - DNA, 519 bp, Homo sapiens
tttttttttttttggtggcaatcacagtctttaatcattaattgtcatatttctgatttgttagcaagtgccagcttgtaggctggttgaagtacagaactcagaggaaaaaagaaattaaattttagctttctggagagcagcccctctctggcaccatcaaacacttctttgtttcccttcaacttggaactcttcaaacatcaggggttgtgagggtttggccattcttttatcttgggtccatgtgagtgacagaaatggtgcggcctgggaaagatctccctcctttacattttctcttctccctcctcctccttattctaaaactgtgcctccaacagaggggcaggggctcttgtagagagatccctggcccaggacaggagatgccaaatctaatttatctcactgagggcctttgagaaaaacgcttctgggccaggctcagtggctcatgcctattattaattcccagtactttgagaagctgaggcggcagatcacttgaggccagga

SEQ ID NO: 50827 - DNA, 1244 bp, Homo sapiens
ggtctcctagggaaggggcagtgatgccatgcatgagatccgctgtgccataagaagttgcttcctttagaatttctggtccaatgcagggaggtgaggcccagcctcatgcataacacatgcccatcaaggaaaagctgtggctaatgcttccaaaacaagtgaaaatcttgcaccaggcccagggccatatctcattccgccccagctactgagggaggggacagactgctggaggacaatttctcctagttaccactaggggttacatggctactcagaatgaaagataaattgccaggcctgttgcaatcttttttttgagatgggagtcttgctctgtcgcccaggctgggagtgcagaggtgcgatctcagctcactgcaacctccacctcccgggtcaagcaattctcctgcctcagcttcccgagtagctggaattacaggtgcccaccaccatgcctggctaatttttgtatttttagtagagacggggtttcaccatgttggccaggctggtcttgaacacctgacctcaaatgatccgcccacctcggcctcccaaagtgttgggattacaggcgtgagccacctcaccaggccccgttgcaatcttactccacttcgttttcacagcagtcccgggacatgcccattattaggcctatttgatagatgatactgaggctcagagtcgggggtcacaaggccaaagccacaccgctaggaagggctcaggacccagcccagctcccgtcctcttggtggcatcaagcttgtgtgatatgaggtcttatgtctgctcatgacagccttaaaagcaataaacagatacaacttccagcaacttcccactcagctgcaaggctgcgggggggtcctgcctcgagccataaggtgagcagctagccagtgccgggccagtgtggagaaggctgaattgcctgtgaagctggggttgcaggcaggaatattcatggagcccctgaccatgtactcacactgctcttcctcagttcagggttcttggatttgctcaagtccacccaaatatccctttacgattctcagggtcccactccttccagatccaatgccctaaactttacataagagttccggcaaggctgtgacttcaacttgtgttgtaactgcaacctgcagaatcaaatttagggttatgttttcagttgtatcagtcttacggctacaagatattaaagagattcttttctggttatc

SEQ ID NO: 50828 - DNA, 665 bp, Homo sapiens
tttttttttttttttggtgtctaatacttttacttcccagcagcataataccactttggtcaggttgaaccactgcacaattttgcagctctttcagaaaaataatgaaaacaattggaaagacatgatgtacatgcaaatggtgagaaaatgatactattgtccaatcctttcccgtaaatgtaaaatatccttagttcatctccaaactgtgtatttattataagcccttacatcagggattttgtttctttcagtttttgtaggcaccaaataggacacaggcggctaacaagaaataaatctgaaaagtcactggaaatatttatcacatgtcaggaaattttctggtctgtacctttaaccatgttcctgggcttcacatattcttcttaagagtaagctataacataagattgagttcccaccctgtgtttgctactgatgtgatttgtttaccatgaataatactttgttaatatcttttgtatattactttacaatttccaagtattttatatacagtgactcacttagtgactcattcattttaatgtaatggtgtcccccaaaccacagataatgattagacacatgaactcttgtgtcagattgcatgggttcaaatcccagttccacctgctagctgtgtgaccttggacaag

SEQ ID NO: 50829 - DNA, 477 bp, Homo sapiens
gacggcttcgacagtgaccgaggcactgcatgtaaggctatgaaaacagtcgctgttacaatgagatggcgctgatccgcgtggtgcagtccatgacccagctggtgcggcggccccccgaggtctttgagcaggagatcaggcaacactttagcactggtggctggcggctggtgaaccgtatcgagtcctggctggaaacccatgcccctgctggagaaggcccaggcactgcccaacggggtgcccaaggccagcagctcgccagagcccccagctgtagccgagctgtcagactccggccaacaagaacctgaggatggagggccagccccaggagaggcctcccagggctcagactcagagggcggtgcccagggcctggcctcagctagcagggaccacacagaccagacttcggagaccgcaccagacgcatcggtgccacccagtgttgaaaccaaagaagcggagaaa

SEQ ID NO: 50830 - DNA, 409 bp, Homo sapiens
attcatttaacaaatacttattgtgtacctagtgcatgctaggttctggaaatgcaacagcaaacaagacagacacaatccctcttggaggttactgtgagaaactctccaacatttactctagcaataactagagagtttactgtccattgggtcctcttcacacctgatagaaaaaataaaattcctcaccccatggaagtcatgaaatactccctgcacagatttgtgtgagcttgcttttctaaaaccactgctcaaaaatgctgcttagtttatctataaaccacgggttataccccagtgaggtagggtaagtaatttattcataactaacatttatgcagctctattttctaggccactgtgctgagtgcttttatgggacttatctcaccaaatcccttca

SEQ ID NO: 50831 - DNA, 593 bp, Homo sapiens
  misc_feature (1)...(593): n = a,t,c or g
gatgaatttggtagtatatttgaccttttccttatatatcatctgaagagtttttgccagtgtatataattgttgggagaattagaaataggatacaaatatagttgaacaggatagtctctgtatattttaaaattaatgaagcctaataaacagttaatgagcatctttacaaccatttaaagttttcaaccttttaaaaattatagcaaccatgcttgcggacagtccaaaaacacaccatgggccatactttgcctatcctggtataaaacaagtaaatcttctgagcagtatttaagataagcccaggacagttagtaacataggaaaagatctggataagcctggttgagaatttcaacattgcaattttttaatttttaaaaatttaatttcttcaataattattgaattaatttgcatttattttgttagccaagtgggagtgatttttggaattttttaaggagggctattattgggtgggttttataaggatggacttggcccaagttntatttgggggataacccntaagggaaattaccccnttattaaggatcntccgggagggggagggtgggggncct

SEQ ID NO: 50832 - DNA, 114 bp, Homo sapiens
tccttgcttgcagatgacctattgtgggacctaaccctgtgatcatgtgagtcaatactccttaataaactcccctatataaatacatctctcctattaattctgcccactaga

SEQ ID NO: 50833 - DNA, 1312 bp, Homo sapiens
gcacatcaaacaggttgaccctcagcttggactgcagctagccagcatgctaggctgctcattctatgaagtgtctgtcagtgaaaattataatgatgtctacagcgccttccacgtcctctgtaaagaggtcagtcacaaacagcagcctagcagtacacccgagaagcgaagaacctccctcattcccaggcccaagtcacccaacatgcaggacctgaagaggaggtttaagcaagccctctctgccaaagtgaggactgtcacctccgtctgaagcaggaggagcactcaagggggtttggtcttcccaggaagagggcctgaggttctcctagtgcaggaacgttgaatattggcaatgattcctggttccagaaagggctggagcagaagggccaagagggcatgtggaactgctacagaaaaggaagtgttgttctgagcagggggacaggattgatgaggcttgaaagagcccactgagccactctctgaatatgtgaaatgtactctgtgtcttttcctttagagtggggagggggcataatccgtttcggtttctgcattcaactaccttgtaaatggtggtccgttgcagtttcaccaaatgtattgatgtgatttacagtgggaatgaaagaacagattaagcattgataggctttcttttttcccccttttttcttttttctcttttcttctttcttttcctctttttccccaagaggaagaattgcttttctcttaccagtatgatttgtaactctggaacactattcttacagaatgcctttctaacctgaaggatacccagatttctttctttatgtacaagatggaaaatcccctacccctcaaaaacaggttgagtttatggggccagaatattctgtataccagacattggtaagctctcatggtttacaggaaggctctggttccccctcacaggatgagcatgctcagttgggcgtgtgtggaggagctgtgaacttcacgctcttcaaccccagactttgactgtatagttttttgtttttttaactgttccatcaggaaaaaaatgtgtcagttgattttggtgtgacttgtgtaaatggttcatggcaatgacgttgggttgcttcctaggcctggctgagttgtgcctaagggtggctgaaatactaaaacacttatcttacagcaagtgaacaggggctacctgccacatcccctccacagatgcactttaaaaagccactcatgctttggcttaaactgtaattaatttattttatgtacaataaatcgcatttgaaaaagaaaa

SEQ ID NO: 50834 - DNA, 868 bp, Homo sapiens
ctgctttggttaaacttccttctggagaggattacaatttgaaactggaacttcttcatcctataataccagaacagagcacgtttaaagtactttcaacaaagattgaaattaaactgaaaaagccagaggctgtgagatgggaaaagctagaggggcaaggagatgtgcctacgccaaaacaattcgtagcagatgtaaagaacctatatccatcatcatctccttatacaagaaattgggataaattggttggtgagatcaaagaagaagaaaagaatgaaaagttggagggagatgcagctttaaacagattatttcagcagatctattcagatggttctgatgaagtgaaacgtgccatgaacaaatcctttatggagtcgggtggtacagttttgagtaccaactggtctgatgtaggtaaaaggaaagttgaaatcaatcctcctgatgatatggaatggaaaaagtactaaataaattaatttgctctcatcgtattgtgtatattcacctaatgcccattgtgtattgatattgcattcttgaattttgaacactgaatatctttttgaaagattatacttctttacctctttgtgctttagaaattattttccttcaagtgttcaagtctaatgaagaatgaagataacattttatcacttctgtccttaaagatttcagacatggtgaaactgaataaagcatgtcatttgctcctagatagattaattatctctagttgtaggagtggatacatctttaatggtatattttgggttattgtcttatttttgatgcagtattctataaataatttattaaacctggcatccttgggtgagcatagatttttcaactt

SEQ ID NO: 50835 - DNA, 324 bp, Homo sapiens
caagactggaaaacaatagcatttgtcttgagtgaggaagtgaagcccgctgtgttcatagcaggagagggctcccagacacaggcccgtcctcggaagagccttgagagtgcagctcggacccaccggcggcccccgtagcaggtggtgtgggtgctcgggagtggaggtgacgtcagcagcgctctctgaccgcgggtgtcacgggcatttctcaaaggaagcaggggattcagtgagtgtgaaggtgaacaggatggcctgggcagcagggatgtttccgtgagccacaaataccagaaacttgaggcgaggctcccagca

SEQ ID NO: 50836 - DNA, 800 bp, Homo sapiens
  misc_feature (1)...(800): n = a,t,c or g
ggaccttggattaaacccttgcagtgctggaagaagaggactctgcactgcctgccacaccaggactggaagatcaatggccttcccttcttccaaactaccttcccatgaggtggggatggtggtcacatctccaacactggcgtgctgtggaagagacatcagcattctctgcaacaaatttggaaacagcctaaagagacgtttctacttcaaagagatgcactgaggaagtgcactggcactgctggggactcacctggggcccagggctgaggcttctcgtgtccttggagctgctgtcctcccgaggagcgtccacactgcagccagctcagcctcaggtgtcctatctggttttgaaaccaaatctaagtgggaaaagaagattcaagttttatccgatttagtctacataattttaagtatctattttgagctcaacaccaagaatcacttccttctctgtcccatctgtggtctccaaaggaaaggtccctgggttaggagacactggctagcatcctaaagccagagctggccgatgggtgtgtgtccactcttccttcatctcttccccaccctacagttgtttttgtctcatgctcacttgctctttctgcctccctctcactctttaggtctcacaaaggctttggtcaaggactgactgnactttccttggctctctgtcatctccccatnaatcaaaggcatttgcataacacacaatccatgtggaaggggaccnttgattcaaaattncacttnaaagagggagnttcactaatttaccagtg

SEQ ID NO: 50837 - DNA, 869 bp, Homo sapiens
ttttttcatgattcagccctttaatcttccacgggagcagttgagcgcggggtgtggcgggcggccctccgtgcccatgattcaggggcacagctgccccagcagacacacactttcatacgcactcacaccccacccccagacacacccccaggtctctggaactggcccagggtcctgctgctctcacagccgcagggacagggctcaagggctaccctcacccccacccggcttcctagcgccctggacgcccacggcccctcttggacttcttggtccctgaggggggacggatggggagaggggcggtggtcgagggcggcggcggtggcaggagtggaggtagaggtagctccgtgggctccggcaggctggggctgggccgaaacccctcaaaaggggagaacttgagggggctgacggggacccgggggctactgttgaggcgcctgggtgagcgcagcttgggctggaaggagaagccctccttgatgctgtccaggacagacggcgccacgtatgtgaagcccaggaaggcctggttggcactctcgctgagggctgtgtcatcaggactgtccaccggcgtctgccgtgtgaagcgggtatcaaactggctcacgtcctcctctgactgcagacagggcctgaaaggggggtccacacgccaggccagaaggtcgtcccaattcatgtgccggaaaaagggatgtctctgcacatcagcagcatcccctgggccacccccaatccgctggctgggattccgtttcagaaactttttgacaaggtcccgggcatctggggtgaggtaggggggcagtgccagcttgcccctgatgatcttatccatggttttcttccgg

SEQ ID NO: 50838 - DNA, 353 bp, Homo sapiens
  misc_feature (1)...(353): n = a,t,c or g
gagaggactccaagcgccatggccgctgccgcccgagcccggctcgggtacttgctgaggcaactgcaacgcgcagccccctggactttcaccttctgggaaaacaacagattatgcctttgagatggctgtttcaaatattagatatggagcatcagttacaaaggaagtaggaatggacctaaaatacatgggtgctaaatatgtgtgcttgatgacagacaagaacctntccaagctcnctcctgtgcaagtanctatggattccntantaanantggnattccctttacnnntnntgataatgttanagtgaatcaacnnattcaagntttaatgntatctnttntttt

SEQ ID NO: 50839 - DNA, 655 bp, Homo sapiens
tttcagttcacaagcgtttttatttttacatacatatatgtagcatggtgtattggctaagaaaatcgaccttggaatttcaagcccaactctacagttaactgtgaggttggatgagttattaatgtctctgaatctatttcctgattagtaaatgatgtattatggttctccagagaaacagaaccaatgatgtggggagggggaggacaagagaaagagggttattatcaggaatgcactcacagggttatggggggctggggcagtccccaagacctgcagctgtcaagcagaagagctgattgaaagccagtagacttgagacccacaaagagctgatgtctccattcaagttttgccacatggcacagtatctgtgtcacagacgcactcttcacaaggacaggtccaggcctgtgtcagtcactgcttcatcccagcacctagcacagggcctgactcatggtgagctggccccgagggtggggacagatccccgaggcgaggcgtcgatggctgcggtctgaggtctctagcggggggccgatgaagctgcttctgcgaagttgggaacccgcgcaccagttttagcagccgcggaaggaagtgctcttgccggggcgaagcagcagagttcggaagacacacgacc

SEQ ID NO: 50840 - DNA, 550 bp, Homo sapiens
aaaataaaaataaagcggactttatttagaagataaaggtggtggttatcggttttggttaatcgagttgggctcaagtgttttacaggtcttaaatgccatcacagactggcatgccaagggcattctgaatgccaattacagattgaagttgtttcaaaaaccaagatgctatcaaaagctgatgagtttggatttttcttaaagttggactaacacacttcttaaatatttgtaagagtaaatagattgcttggttctgaaagttaaaacactacactgagcaattccccttctccacaagtccctaaggcaatattacagttgcctctgacagcaagtccaacatttcaacaaagggggggtgaggagaactgggaaaaatgaaaagcaaaattaataaatgtaattgatacaggcagctgccacttgtggcaaaccaaagcctagtccgatgcccattatcttcacatttgcactggacatcttcccaagcagacggtaactacattcttgaaggaatgtgccaagactagggtggggaaaggcc

SEQ ID NO: 50841 - DNA, 348 bp, Homo sapiens
gtggcgccagtactcaggccagaagccccttgtgccctgctctcaggggtttcctcccatattggatcacgatgaaaactgcacagaaagtccgtgctcagtttcttccatggttacagaacacaggccccagaccagggaaggcattctgcttaaagaaggggacccgaaacctcagctaccagcgccgatggtttcatccttccgagggaaacctcctcttctacctagaacactagaccgaccatgcacccctgggcctcatcctgttagagaactgccaggtggaaccacaccttaaggctgcagaaccctatgcctttaccatcctgacccctggggtggagg

SEQ ID NO: 50842 - DNA, 2094 bp, Homo sapiens
  misc_feature (1)...(2094): n = a,t,c or g
ttttttttttagagacagtgaaagattttatttttttttttactttcatccaaacacacccttttctgaaaaacataaaagcatgcacatcgacggcattcttataaagaaaaattaataactaagctgtaaatcagtaataatacaaacaaaagtttaaatgatatgtgaaaagacttacaggtaggtatacggctcttaattttagaaaataattcaagtcagtatcaatacaggttaaggagaagcttctaattttccaaacattttgatacaaaatttttttcaacgactgtattttatagaccttttgtgagaagattagtatagttctatgaaacctaacattcaagtgatcttatgcaggtcaggctaccttgttaaaatgagttagaatccacataattccaacagtattgcctctcaaagttcaaatttagaacatacccattatattcaaaatatattaaatccctgtacttaacaaagacatggaattgatctaaattttactttacaggtaagagaaaattacaattcagcatgaggaaattttcataagttttacccatgccccgattattaggccaactatatcctgagtgtccatggatgtgtgcatacattctaatgtacacaaaccaattcacaccacacgactcttcaaagatgatgcttgaaagagtttattctctggcatgggagaagcagtgtaacacagtcacttaattttcccttaatcattatttctttcattttgcttatcatgatccaactggtatgtttaatgtgggccactgatatatttctgcagcaaaaatccagtagcagtaagcagaaatgtcaacttaaaggactatgaggaaatcgaagtttaaattataacacaaaaatagaacagttcacactgaaaggtcttctcccatgggatatattgttccatggctaaaaatcgtgatctggttcctggaacacagctcttgctctaaggcgatacatattaatgtgtagctccactaaacctaatgggaaataaacaaattcgttcagtcatgacgaattaagtctgtatttcactggcttgagaaggtgaacttcttgacacagacaaatgcaaaatgcctctgcagtagctggtgaagcccactcacaagggcttaaagagttcaactctgaaagtgggcagcacaggctggctctgcatttcttcctagcaagtctacgtgcaagccgctgagcagcaccactgacgggatccaagggaaggaccagagcccagtgggaatccacccacactacagaaacgcgacttctgaatgaatattctgtgaaatcaaagagaagcaggcaaaaggcacacgcctagtaaatctaggcagaatgtctgcaggctctcatcaccttaaaaatcttgtgaacttggggtccaaccaaggttcacatcgactcttttgatattaaaaaaacaaaacaaaacagaaaaccttaacgttttcaagcacttatggcacagacaaagggaagtactaatagcgtagcttaaatcttcaaaaagctgggaaatttaaagttctgctataatgaatcagagtcacaattttaaacttcgttctcatattttataccattttctgtgtgtacagggtgtgcaaattaagcaatttcaataaatattagaaatttattttgcaaatataaaatgagtaaaatcagctaataacgcaatacaataaaatcatgtgctaaacagagctttttccccatgaacactttttaccctttcctttgaacatcctgacacttcctaaatacaatttatttcactgacttgtagaaataagcaaaagatgaaatattaactagctgcaagatactaaatactttagtaataagagcttggagctgtcaagttgtaataaattgaaaataacagaaaaagtgaaatacgctgcaaattaatgctcaaaaatgcagccatctgacttgcaaaatacacaatcctcccagccttctcaagttgtcattagttcataggaaattgggacagagcagggngaaactccattttagctttttaccccttccagcagcccc

SEQ ID NO: 50843 - DNA, 430 bp, Homo sapiens
gggtccgggagcgcggcggagacgatgcctgagatcagagtcacgcccttgggggccggccaggacgtgggccgaagctgcatcctggtctccattgcgggcaagaatgtcatgctggactgtggaatgcacatgggcttcaatgacgaccgacgcttccctgacttctcctacatcacccagaacggccgcctaacagacttcctggactgtgtgatcattagccacttccacctggaccactgcggggcactcccctacttcagcgagatggtgggctacgacggccccatctacatgactcaccccacccaggccatctgccccatcttgctggaggactaccgcaagatcgccgtagacaagaagggcgaggccaacttcttcacctcccagatgatcaaagactgcatgaagaaaggtggtggct

SEQ ID NO: 50844 - DNA, 173 bp, Homo sapiens
  misc_feature (1)...(173): n = a,t,c or g
cactaggaacagcaggcacgtgtggtggttagcagctaattaattaaaacaacgtttaagcagtgggttgagatttttaaacacaaaccaactcaaaaacacttctctgctttctatggtaatagtgctcacatcatttgtatgattgtctcgtctctttaaattnggaatag

SEQ ID NO: 50845 - DNA, 580 bp, Homo sapiens
  misc_feature (1)...(580): n = a,t,c or g
ttttttttttttttgtgctcttttaatgagtttattctgtcaatagggaaaatatcaactttaaaatctaaacatatgccacaaaattttgggacaaattttgagttgaagacggcagtacaaactcatgtttagctttgtacacacataaataattatagatgtgtacatatgcatggattaatatacatacatatttctcaactctgctacaaacagtgacatcccagtagcaacaagcacatctaattgnnnnnnnnnnnnnnnnnnnnnnnnnnnnnnnnnnnnnnnnnnnnnnnnnnnnnnnnnnnnnnnnnnnnnnnnnnngattctagggttggggcagggaatatccaagatgaacctggagcatcttgtagtgccagaaagtaagaagtgctcaaaaatcaaaaggatgggcaccatcaaagggacatagtagccaacctggcagaactcctaatagccaagctggacaacttaagcaacaaaataaatactgtgttacccaaaatacaaaatatacatgagtccatactgatgtaaacaaattagggtgggagggagaaacaaattttcc

SEQ ID NO: 50846 - DNA, 412 bp, Homo sapiens
  misc_feature (1)...(412): n = a,t,c or g
attgtatgacaatggcctcatatttttcaatcataacaatcataggaaataatatatttggatattttgcatatttttatgatagtatatctattactaataactgatacaaaaaatagatattttgtgcttttaataaagtaatatgagaagtaataatgacattctataaattgtcccatattctaatagttatgcataatgctttaagacttgtatactttgctttcttacatagtttttagttatcttcagaagtataaataatctattagtttataattcattgaaatatagttaaatcctctttaaatatttattttatttatttgtttaaacatgtggactttatttagaaaaattatatgatttttgntactcttaatagagtttaagtacactttgtgatctg

SEQ ID NO: 50847 - DNA, 373 bp, Homo sapiens
  misc_feature (1)...(373): n = a,t,c or g
ctggggcaaacgacacaagtcagcatttagtttcttgctttaggaagcggaagactaatgaccgaagcttcaagactttgacatgtgtgaaaacatgaaatgacccttggctcttattgttcttgctggtgtggtatgttcacggctgaaaagatggtcagaaggggaaaggaggaagtgagaagaaagaaacagggaaatgcaggctgaggaattaccaaggaggcaggaggtggagcaaaacacaccaagcctggtgccaatcattgacaatattatggttagtacttactgagggctgactatggtnnnnnnnnnnnnnnnnnnnnnnnnnnnnnnnnnnnnnnnnnnnnnnnnnnnnnncaacgctagc

SEQ ID NO: 50848 - DNA, 574 bp, Homo sapiens
catagcagtatcaccacttaccaggatccaaatcgaaataataaaagctgtctccatagtttaaaatcgaatagtgccatcatcacagtatattagtcaaatagaagcttcatcagaaatgtatcccacatagagttttaagacttggattctcttctgcccttgttaatctccaactaattactacagattgacacgtttttaattagctgtcctttgtaagaagtcaggaaatctgatgctgtgtccaaaattatgcactgtttgttgaagtagaaccagaaatcctgacctcctgttaaatgacatcagtttccccctctgagcaacagactgcttgtcttgctaggagaggaggatggggggctgagcactcaggctgtccattgaaaccccttgtccatgaataggggtcatactcctaaggactgatgggggtgttgatcttctaggacatcacttgtttattcagtgccccaaacacagatttctcttctagcactttagagttgatccttgaagtctctcctggttcattcaaatacaagctgtgtgagtctggtggttttctgtg

SEQ ID NO: 50849 - DNA, 213 bp, Homo sapiens
  misc_feature (1)...(213): n = a,t,c or g
ataagtatcatattgcctaagtttgagtgatcatggttaattaattggcttaaatagtactcaaatttgtgtgggtcgtatattgtattttatcaaggactaattcttccaccatacccaaagcatctaggagacactctgtcatttacatttacnaataatggatgcagagaaatataatcaattcttgattgtcctggatacccaattata

SEQ ID NO: 50850 - DNA, 846 bp, Homo sapiens
atcagagatcttgtcagaaaaaaagatgtaatagcctttactttagtagtctccatgtcagttgaactgaaattgctaccagtaaacagtcattgaggtggaatctaccttgcttttttttattaggtctgtaatgagtttagaaagtaatagaaagcctcatctaatcttttcaattacatcctatttgttgtataaattattctaatctgatgatactgatatttagcaaaataacatctttcagatcaggtaagtaagcgcagtaagcctgccagtgagagttgcactggagaatgtgacctatggagctccccagcactttcctctctccttcactcactgcaggcagagtccctgccctacgatgagcggcctcttccagctattcgtaagcattatggggaggcagtggtggagccggaaattgagtaattgcagacatcagcgatgctcggaggggagggcatgttagggggagccagagcccttaaccgagaaggccttgagagaagccagctctgccatcgatgtgttgggagaaaccttggtttgctgaggcctattgtaagacgtggtcctaccgagaggatgcactgcttgccttgtctaagaagttaatggaaatgcctgttggaaccccaaaagaagatttaaagaacacactgagagcatccgtctttctcgttagaagagccataaaggacattgtgacctccgtttttcaggcttctttgaaattgttgaaaatgatcattacacaatatattcctaaacataaactgagtaaacttgaaacagctcactgtgtggagaggaccattcccgttttgctcaccagaactg

SEQ ID NO: 50851 - DNA, 375 bp, Homo sapiens
cgaggagatcctggacatcatcttccaggacttctgtgtgggcaagtgacgggatccagggaagtcgcacccaagctgcgtggagacccaggagcctcgggggatctggaaacagtttaggccaattgggattctcattcgcctgggaaagaacttgattctcaaatagtgaagcaacacagctgagaggtagtgagatccctgcagggactccctggagattcaggccctggaatggggctgaatggaggtcccgttcgacccttgatgctggggcatccgggttgggatggagataggaggatctcagtatatttgtttcgtagttttttatttattttgcaaataccaaaggaatgtaaaaaaaaactcagg

SEQ ID NO: 50852 - DNA, 412 bp, Homo sapiens
  misc_feature (1)...(412): n = a,t,c or g
ttagagcaatgaacacaataccatttatatatgatacacaagacaaacatatttgaaaggtacatccacaagtatgcaaacattcaaagttctggaaagacacacattaagccatgacaaccacagaagggctaaggaaaatttccatgttgaaacacttctggggccaggtgtgatagctcacgcttggctggggcagcttttctttaatacacaaactgaggaaatgaccctgcaaatttcagggcttagaaagccttcatacggaatcacagatgaaatgcttcttgggggaaattcaccatggacacagcgccacgtcatacctgctctgccagggggcctccctggggggggtgatgttaccacacagcgcccctccgaggctcttncagcagcatttcgcggggat

SEQ ID NO: 50853 - DNA, 333 bp, Homo sapiens
ttagtgctttctagtcacaaaagtctatagattttgagaggtaagcctataactctttttttctatagccctgttaatttaatttagtgtgtgattttatagagtgtgagttttatttaggtacacatggcatcacagcagaaatgcctgtacaaacattcaagttagttggcagtctataaatgtgagttgggtatattttacaactaaatgatagggcttgaaaatacttttgaattcttgtatataagtagggttaaaaccaacaagacaagcacaaacaattcaagttaactaatagacattaatataattttgaggccaggtatagtg

SEQ ID NO: 50854 - DNA, 1255 bp, Homo sapiens
cggacgcgtggggttttggttttgtcctattcctccaaatgcagcagggcctttagttgtctgttaaagctgcactataatttggtatctacattttatcacacaaaggaacctccccttttgacaacaactgggctaggcagctgttaatcacaacatttgtgcatcacttgtgccaagtgagaaaatgttctaaaatcacaagagagaacagtgccagaatgaaactgaccctaagtcccaggtgcccctgggcaggcagaaggagacactcccagcatggaggagggtttatcttttcatcctaggtcaggtctacaatgggggaaggttttattatagaactcccaacagcccacctcactcctgccacccacccgatggccctgcctcccccatcccatccccaacatccctgtaccaccttctctcacatcttctaaagctttgtacaaatcacaatggtgcacttccaacaaaatatatcaataggtgttttcctctcttattttgtaaatagtattattttagctattaagctggataccttctttcaaattcagccattcagttgtaaagttgggaagaagtttcttgacaagactctgcaattaaatgcttaaaatttggaggggatccttccttgattacatcaagtatgttggtacatgggtttatacaagttcctcttgagaaggcaaaaagaccaccatgtgtgagagctctttgacttggccaataggggcctatcttaatgcacttgtttggacacatttctgatcttatttgtaaaggctgcaaaaggagaggatgaaatgctgtaaaagtaggaaatgaagtggaagctggaagaaaatgtaattggtggtacagctatgggccagatggtggaggggagggtggggacccctgccggcaagcagagtgtcacagctggctttcctcacttgggaaaagggtactgccggtctagcagcctcctctgtactcagccaggacacccagcgcgtgggacctgtttgtgtctgttttgcttccttgggaacggcacagtcactcaccctgccatttgcggaaatgacctggtgcactttgactgttaagcaatgcgttattgctgtagtcaaggttagtgcaagcaaggaaacattcccagtaaggtatttgtttccattttctgtctgtgcttctgtcagaaacttgctaggactttagtggccaataaaaaagaaattcctaatttcaaccttagaaa

SEQ ID NO: 50855 - DNA, 685 bp, Homo sapiens
gacaaagcaaatcttaatgcatgaactcaaacaaatgctttcactgccaggctccatctttgcaaaactgaacctaggacaatgtgaacgtttctaactagcaattctggaggacagatcagggaggcagcgtgagcttgcttttctgcaatttaattgactggtcagtaaagtcagtgtttgcaggcattttcaatgttctatagtgggcttcagtgcctgtggagggccagggtttgcaatagcaaccagaacagtttctacttaaccctttactattaattttgatggaatggcataagttaacgttaaagaaatggagaaactggtgcctgagtatcacggatggaatgtgaaaacaaacccactgagaccccgctgggttttctcagaccctaaaatctgatcgaataatgatagcgttcgtacacattcacctcggcctgtcttaagattcaaaaactttccaagactctagggaaatctttccagacgctagacccgagttaaagattagatgttgattgaatgaaacacgtcctgcttgtaggtgcaatcccacatggagcttaagatatatataagcactagaaaaaaaaacttgtaactttgagttgatctggtgatttacctggcgcttctccctgtaagtggctgcagaaataaacttccttctttcccaaaa

SEQ ID NO: 50856 - DNA, 574 bp, Homo sapiens
attagccgagacacacagacgttgaagaggctttcagaagagactggcgtccatatcatatctggagccgggttttatgtggatgcaactcactcctcagagaccagggccatgtcagtggagcagcttaccgatgtccttatgaatgaaattctccatggagctgatggaaccagtatcaagtgtggcattattggagaaattggttgctcctggcctttgactgagagtgaaagaaaggttctccaggccacagctcatgcccaggctcagcttggttgtcctgttattatccatcctggacggagctccagggcaccatttcagattatccgaatattgcaagaagcaggcgcagacatctccaaaacagtcatgtcacacctggataggactattcttgataagaaagagctcttggagtttgctcagcttggctgctacttggaatatgatctctttggtactgaactacttcattaccaactcggcccagatattgacatgcctgatgataacaaaagaattagaagggtgcgtctcctggtggaagagggctgtgaagatcgaattc

SEQ ID NO: 50857 - DNA, 652 bp, Homo sapiens
  misc_feature (1)...(652): n = a,t,c or g
tttttgtttttttacttatgaaataagttttgacctagacacaaggggtatatgaaggaggaaaaaaatttctttgcaaaatctcccaaaacttgcttttttttcccttccacacaggcactattataattttcagtgccatgttaaattggattatttcatttactttaagttaggaattactgtgtaatttattaattcatgattctcataacattcagcataagtgtagcaaagttgctaataacggaaggggatcatagtggtgttgaatgtaactttgaagtagggaatggccttttaagtctgagagagaacatttgaatccttttcaggnnnnnnnnnnnnnnnnnnnnnnnnnnnnnnnnnnnnnnnnnnnnnnnnnnnnnaagtgtatatacataaatacactcttctaaagttgtatatacatatgcacattacatacattttaatttattgacaaaattaaccaaattaagatttggagatgtgggatgttcttgttttaaaatagcatgtttgaaaccatcagtttgtgtctaaaattagctgtagcacatggatgttgtccatattaagctatttgctgtttgaattatagaggtctacagtatttgtgttggcatagtttttgtaagaaaaagattgg

SEQ ID NO: 50858 - DNA, 459 bp, Homo sapiens
cttgcctggaaaatgcacttacatatttacaagcgttgtatgtcaatgtgcatgttttgaatttcctaacagtgtctaatcttagtagtttcatagtagttatgtaaaatctctttaactgcaaaatactataaaatattacttgaaatattaaagtattagtgccatttctagctgtggcaaggcacaagtcttactatagcttacttatgtcttctcatagatttcagtacagcatctgagtagtggatctgtttactgacagtatacacaaactaggtcttgacctcacttctttcttcatttaaaaggagaagatttgaaatagagctagtgtaaataataaataaaattatttaaatagcatcagtggctcaataccatctgttgaggaataaaataatttggttaacatacagaacatcgataatatacaataatgactttttaaaaaatgag

SEQ ID NO: 50859 - DNA, 592 bp, Homo sapiens
ctgaatccatctttttgaaatggggcatgtactcttaaggtggccactagcttaccattcccaatttttcttagtctcaaacattcacatgtttttcaaggccttggagttggcaaatcctgaatatatagtgaaggtaggaaatagctcttcttatgccacatcttagtctgattttgaagtcagttgtgtaagtttgggctgacagtggtattttccagtgaagactatcgccaagaatgcatatcattctgcttattttattctagtggataaaaattcaacgtatatttaagtgtatttttgacatctgtgcttgtccaacacagggctgtagggactgatgaaaagagaatgttgtgatttgagcttttataaaaaaagataagtgatcctagataaaatattttagatggtgattaaaatgcccatagattaattttttaatcggttctctgaaatcttgagatgttatccaagttacaatttaagcaatgagagtaaaatttgaattctaaattctcagcatcttccctcattcttgagtggagagacagaggaagcaaacgccaatgagccttctaattttgac

SEQ ID NO: 50860 - DNA, 432 bp, Homo sapiens
  misc_feature (1)...(432): n = a,t,c or g
gaaggccaattacatttgttgttttcaatagaatgattatttgaacatttccttgatgatttattatttcatatctatgttaggtttttatagtccccctcccaccctcacccccagaattctgaagagttagttggaagaaggaagaaggcaccattttaggaatattttattccagtttattgaatacagcctcctaaattgaggattagcgacagtaataaagaaaaaaaaagacctttagaaaattagaacattaagggtgaaatcagtttcatccagtcctggggaaaaattcctgttcctctgatcctgggttagttagcctggctttcaaagttatctacttctggagcaaggactcttggagcctaccttgnctctggcagtgtctggtcaagaagaggatgtcaacgtggcagcctgtatgca

SEQ ID NO: 50861 - DNA, 1622 bp, Homo sapiens
gaattcgggtgagccagctccgggagaacagcatgtacaccagcctcagtgttacagagtgtgggtacatcaaggtgaatggtgagcagaaactataacctgttagtccttctacacctcatctgctacaagttctggcttagacatggatattctttgtgaagaaaatacttctttgagctcaactacgaactccctaatgcaattaaatgatgacaccaggctctacagtaatgactttaactccggagaagctaacacttctgatgcatttaactggacagtcgactctgaaaatcgaaccaacctttcctgtgaagggtgcctctcaccgtcgtgtctctccttacttcatctccaggaaaaaaactggtctgctttactgacagccgtagtgattattctaactattgctggaaacatactcgtcatcatggcagtgtccctagagaaaaagctgcagaatgccaccaactatttcctgatgtcacttgccatagctgatatgctgctgggtttccttgtcatgcccgtgtccatgttaaccatcctgtatgggtaccggtggcctctgccgagcaagctttgtgcagtctggatttacctggacgtgctcttctccacggcctccatcatgcacctctgcgccatctcgctggaccgctacgtcgccatccagaatcccatccaccacagccgcttcaactccagaactaaggcatttctgaaaatcattgctgtttggaccatatcagtaggtatatccatgccaataccagtctttgggctacaggacgattcgaaggtctttaaggaggggagttgcttactcgccgatgataactttgtcctgatcggctcttttgtgtcatttttcattcccttaaccatcatggtgatcacctactttctaactatcaagtcactccagaaagaagctactttgtgtgtaagtgatcttggcacacgggccaaattagcttctttcagcttcctccctcagagttctttgtcttcagaaaagctcttccagcggtcgatccatagggagccagggtcctacacaggcaggaggactatgcagtccatcagcaatgagcaaaaggcatgcaaggtgctgggcatcgtcttcttcctgtttgtggtgatgtggtgccctttcttcatcacaaacatcatggccgtcatctgcaaagagtcctgcaatgaggatgtcattggggccctgctcaatgtgtttgtttggatcggttatctctcttcagcagtcaacccactagtctacacactgttcaacaagacctataggtcagccttttcacggtatattcagtgtcagtacaaggaaaacaaaaaaccattgcagttaattttagtgaacacaataccggctttggcctacaagtctagccaacttcaaatgggacaaaaaaagaattcaaagcaagatgccaagacaacagataatgactgctcaatggttgctctaggaaagcagcattctgaagaggcttctaaagacaatagcgacggagtgaatgaaaaggtgagctgtgtgtgataggctagttgccgtggcaactgtggaaggcacactgagcaagttttcacctatctggaaa

SEQ ID NO: 50862 - DNA, 58 bp, Homo sapiens
tgcacccacccctcaaccccaggaagtttgttaaacatgcaaattcaaggtgggggcc

SEQ ID NO: 50863 - DNA, 359 bp, Homo sapiens
  misc_feature (1)...(359): n = a,t,c or g
ggctcttgaattttaaaatattcttatagacaaacattaattggaatggggggtaaggaggtaggaatggcttacttgcggaaatgcaggctcattgttgtgtctagtaggtgctaggtgcattcacacatctcttaagctttaaacaacctattgagccggtttccatttccttgatctattagattaaaaaaaatgaagcataaaggagttggctcttgccctaagtcatactactgatggaatgagaatacaaaccaaaaacactttattcaagtccaggaaatatctgccttgaaaaagaataaccttaaaaattaaaagtgtccctcctatttgaaccatgganaaccagccta

SEQ ID NO: 50864 - DNA, 547 bp, Homo sapiens
cggacgcgtgggcgagcggcggggagctagggagtttatttgatcaccacgtccagagggcggtatgcgacacacgggccaaatatcgagagggacgacggcctcgtgctgtgaaggtatatacaatcaatttggaatctcagtacttattaatacaaggagttcctgctgtgggagtcatgaaggaattagttgagcgattcgctttatatggtgcaattgaacagtacaatgctctagatgaatacccagcagaagactttactgaagtttatcttattaaatttatgaacttacaaagtgcaaggacagccaagagaaaaatggatgaacagagtttcttcggtggattgcttcatgtgtgctatgctccagaatttgaaacagttgaagaaactggaaaaaaactacaaatgcggaaggcatatgtagtaaaaactactgaaaataaagaccattacgtgacaaagaagaaattggttacagagcataaagacacagaggattttagaccagacttccctcagagatgctggattttgaaagc

SEQ ID NO: 50865 - DNA, 1425 bp, Homo sapiens
cttacgttcaggtgtttgtaacttggccttataattaggctgaattatggcttcaaggtctacaatttatgtgtatggttcacagcctagcttctatttacatttgaaaatacagatttttaccaactttggattcttttttagttatatgtttgtctttcctttttaaattgttcaaaactattttttaatggtcaagttactaacacttgaaaatcagatactgcaccaaatacagtgtttttccgtagtgtttttaatgagtgcacctattactactgtgcgagaattcatgttttaccagtcattgttatattacaaacagacttgcatgattaaccagttgttacacttactttttcaagttggagtatatatgactcagtgcagactggtctctcttatgtgaatgcacacatgcagaaatgcagagtcaattttacatgcccataaagacatttgtaaagaattcagctcttatggtctgttgtataaatgtgtatctaggcactttattataactggaatttgacctcacagatgttacaacttgatcagtcgtttgacctaatttgtggtagctatctgtatgttttgcaatcttaatacagacatgctttccaaaaagattaatacagaaccatcctgccgttttggataagtctatccagctgtggaaagggcaacctgtggtttctctgtactggtgtttaatgggggaagaatatgaacagctttaaagagctgtgtattgtggttactactattaaaaaataagatctgcacgagtctgactggcctttgggtggcctttgtggacggctcgtagctggaaagtgttgatctgggttttctggcattcttttaagttaaaaagttaacatcgggacatgggtttgatcttttgttgtacctgatgacagtgcagagattctccacagctggataaaaatgtcacaaagctacttactgtacatgggcagtatcagatttcaaatcctaatatttcagctgtgcttttaatactcaaaatattaggggatggggtgttgaagctttcccttttttgcttttaacaatttatagaatttaacagatgtactgtctttcatgtggcctcacatttaaagttatgagaacatacacatggtttacaacttttactatatacctttccttggccaccaagtattttaaaagtgtgccaccttttaacctttactttttttaagttgaaggtgatactttttctatatatgatgaaactcatgtcaactgaagtgagtgtaatctcagatatcaacattattatattttaaaatcacgctatggaaatatcacctgaattctgtcatttgtcagatttacagtacctttttttctttaacttttagcattaaataaaaataaaattgggagcactga

SEQ ID NO: 50866 - DNA, 540 bp, Homo sapiens
aattagcattctagataacacaagggccatgattcactaaaattccaagctactgtaattttatggcatttatttgcaaatgttctttgtatctcattttatctgtagcagtccccactagtctaccttaaccatcttatagctctggtaaattaaaacttacgtagactttatacaagatccattggccgtattaaacctcccccactcttagggcttagggcggaagggacgaaggcagggctgataggacttttaaaaggataaaaggagtgggggcaagggaggcggaaaatacaggctcttgcagataccctccgcgctgccctccacacccagcccactgctctacaaaggtatgaatgggaatgggcttttctaggaaaagggcttccaaggaacattaaaggaattcctttccctggggaggccccgtgggagggctgagccagccttgaattgggcttatttctcaaatccatttgatctggcatttttgtcaacatggtacatgttagggcctacgatgatttttttttc

SEQ ID NO: 50867 - DNA, 327 bp, Homo sapiens
tgttaagcctgactacatctttttatctgcagttgattgaatctatggatgtggaacctgtgcatatggagggtcaactgtactataaataatacgaatatgccaacattatataatcattgctttctgcaactgtttactataatttcaaaattaatatcctattaactggtcctataaattatcaaatttggcaagtgtattactagcaggagatggaccttaaattatgacaactttatattttttgatagcatctcttgaaaaagaattttaatgattctaataagaggttctttttcttttttccatttccttgcaaaaaga

SEQ ID NO: 50868 - DNA, 359 bp, Homo sapiens
gctggaagaaatttaacaaagaataggaggatttgtacactaaaaagtacaaaacattgttaatagaaattaagtaagaccaaataaatggaaaaacattaaatgtttttgtatcagacaacttaatattgttaaggtgggtaatactacccaaattgatgtgaaggaaccaacacaattcctataaaaatccccagctggttttttgccagaatcaataagctgatcctaaaattcacatagaaatgcaagaaatccagaagagccaaaacaatactgaaaaagaacaaagttggaggattcactcttcccaatttcaaaattgtatgacaaaactattcaaggttgggtgaggtggc

SEQ ID NO: 50869 - DNA, 582 bp, Homo sapiens
  misc_feature (1)...(582): n = a,t,c or g
cgtcctgagcagagtttgcaagttgctttatctcccacgggctccccaagaacctccaaccccgaggcttatcgctagcggattcacacctgagacagacatttcaacaatgatacagtcctgtcatttatcagcaaaagattgggaattttctcctgtcaacttcttttgtattaggctgtgtattgatagttaattccgttaaaaattacttggaaaacagtgggaagtggtaggactctggaagaggccacacacccgagagctgcgagatctgtgcaagtctggttttggttaggtagtaataaaagtcctcactgtagatctctaaatttcaacccacggaaatgaaagccttttgtctgaaatttacggacttaaatcttcaaggttaaagggaattttctgctcaaataatactcttatcgcaaatgctaaagtcttcaatgttaaaatactgattggtaaaatcttgcagttgggattttgcagttggatatttattttaaaaaaaattataaataattcagactattcttaaaatggggacaatcagccnccatganaaattggatgtaaact

SEQ ID NO: 50870 - DNA, 394 bp, Homo sapiens
ttttttttttttttaaactaatagctctgattcctcttaccagtcacttttaagcagatccgctcaaccttgatccttttctagatctcgcgccacaatctgcccccaatccaccccgaatgactcaactccgaattaacagcggacccggcataaacagacaccacactctcacgacgtgagatgactaacaaggactttattctaccaaaatgggctagccttgattcaggctactcctctgcttggaaggcaaaatacatcggcagagaagtgaaaggagaaattaaacccagcaggaacacagaatgtgacacttaccttttctgattttgtaaggggtggaagatatcaagcagtaacgaggtgaattccccagcaggtacaacggagc

SEQ ID NO: 50871 - DNA, 800 bp, Homo sapiens
tattctttcaaaatatattttattagcggcacatggaatgtcaagttaagcaaattctttccagagagaaggtgagcctgacagactaaaacgttgagcacggatgatacagcagaaataacatttccagtgtaatgagagataaagaggaatactgcccaccgaggaaatgactttcttcaccatgctgaccacactgcacagcgcccgatccggctggtgaggatggggaggtgggaagaatctcaaagcactggacagggtgaggactcaggaagtcacggggtcagccctacagcatcagctcctctctgttgttggagaggccctgagccccattactcactatacgaggaccagagtgtctttggcaggtggaggctggctcacgggagaacaccaagtgagggggctcctctgtgaacccaagaaacttcaaggaaccccacagcgtctcccttatgacctcccatctccagattaggaagctatggattcccagagggtcctttggaagtatctagaaatgtccaggtaagtcagagaagggctgaactttcttagaaaaatcactttagtctctcatacatgaagaacattttccttaaaggattctggttcttttccctgatgttcttgtgcaacgttctgagggtcacctgggcttcgcccaccactgcttctactgctgctgtgtcactttcaaacagctccacctccaccggcccctcccacccccccttccagcccacagtgtctgcaggctgtgggtctcccacatctgtcatgtcaggatcatg

SEQ ID NO: 50872 - DNA, 451 bp, Homo sapiens
cagagaaccagtctccactggttttcaacagttacaccagaatacatggtcctatcaggagacgaggcctcagaaagtgggtgttacacaccagactccacatctgcttctgaatattcagttccatcactggcaacaaaagagtcactgaagaaaacaattgaccgtaagtccccgttaatattgaaaggtgtttctgaatacatgattccatcagaagagaaggaagacactggatcgtttactccagctgtggcccctgcttctgagccctctctctcaccatccacaaccgaaaagacttctgaatgccagtcaccactgccttctactgccacatcagaacacgtggtcccatcagaaggagaggacctaggaagtgaacgtttcacaccggattcaaagttgatctccaaatatgcagccccactcaatgcaacacaggaatctc

SEQ ID NO: 50873 - DNA, 619 bp, Homo sapiens
caagagtgaaatgcagggagccatcgggacggtggacaccttcactctgccttgtaaagaaaaggccctcctagagcgtaggagttttcttggagtttttgggtggcatggaaagttctcatcataacagcactgacaataacaaaatatttaacagtggttctcagtagtgggttgggtgacagtgaggaatcaattttacctccaaggggacattgggcaacgtctagagacatctttttttgtcacaatttgaggcagcgttgctagtggcatctagtgggtgaaggattttagcatgcactaagccttctacacccacacatgacagaccccccaacttaaggagttatctgggcccaaaatattcagttctgcccaaggtttgaggagacccttgagaatatcataaacattcaacattggaggaataggtaattcttttgaagcctcctgcaaaagcccatagtctgtagccctggctgtgtggcctagtgggctctgctagtgtctaagcctgatccagacctttcttcctctatatgtttgggaggcattcatgaagaattgagtacacatatatatgggtcagggtgtttgaaaggctgccaattcagga

SEQ ID NO: 50874 - DNA, 536 bp, Homo sapiens
aacatttgtgaaaggcagaacaacgacatgaagacacaaggctgtttagattttctgtatttcaagaagaatcatactcaaacacaagtggggtgacagaacactcagcgatatgtaattagttacgaaggttaacgctaaggcattgctttgtttacagtttttatcctgagtcacatcagatgtttcaactacatgtcctcttggtattccagatattttgctgtgatgggttcttcaagctgaattcctccactgcccattaatgcaaatgctggatacagtgtatgtgaacagtccacttggcgttcataaaggcatttcatctgatccatatcatagaaatttactttgcctttatcacagtcaaggaaaatcccaatacttgttggcatagggagaactctattttcaggttcattagaagaagtaggtgacttgggtataaaaaatttctgcatgcctatagtaactaaggtaaatggttgtgaagaatccaaacagggatcctcacttccactgtcatgcccactgtc

SEQ ID NO: 50875 - DNA, 2272 bp, Homo sapiens
  misc_feature (1)...(2272): n = a,t,c or g
tttttttcagtttctcccttttccaatttattttaaagttttaaaattacaaagacagcaaaattttcccggcacaagtaacacttgtttaaaaaagggggtgggggggggacgcgcaagtgcgcgatttttctattttattaaaaataagagaaagacaactgtacaggttttttctcccagctcccgggtgtgaaactaagtactagccctagatatgtatatatacacaaacacacacatgcacacagatctagctctgtaaaactacttagcaaatcccaaatcgactgcagtaagtcttactatccactgcccgcccactccccctccccctcccgcagctacaactacttataataaaggactcaaaaagagatcgggaggttttaagtggccgcagccccaccaaaccaagcaaagacacctcttgtacaggaggaacaaaaatccagaggaaaagaaaagtcttcctaggacacaatccatcgattgcgtggaaaaacctaagtttcaacagggcacactgaggcacttggctgactccccacccttcccctgaagttttcactccggtttaacaagagaatttgctgaagccacaaagatcccccaatggctacatcctagctgactgggagaaactatggcttctcccatccagctgtcacttggaccccactccccttccctaagaaaatagggaggccgaaagggcaaactaacaaaaatgagaaggaaactgggtttgggcccccactgctcaccactgggaggtggaagtcagcccggtggcggtttttttccacctccttcctttgccggctggctgctccctaccacctctctcctgctggccaaaggttctgaaactctcacaacgggtgcccaactcaaggaaaactcactcaccctaaagatattcctgctaacctcacaattcctgggttccctctcatctagccagaacaaactgccttgtgtcttctccccacccacatctaccttcatggcaaacaagccaacaaaacacacaagcccccccgcaaatccctaaccccgtaagtaggttaatagcaaaacaaaatataagtacattctcatcattagattggttgttgctgtccttgcacaactggttaaggaaaaatgaattattctgtaatttctgaagaatccaaatcctgtctcttataaagtcagaacagaagggggcaaaaggtggtggtgagcatcaagagagaaaaaaggagaaaattatttacagaaaataggagacaggagggagtgtccgcaagaaaagacttcattgtcacttcttcttgccggccctcttggcactggactttgctttgggtttcactggtttggcctttttgggcttggatgccttgaacggcttggctttgacagtcttgggttttttggctttcttgggcgtggcagccagcttcttcttggccttcttgaccggggtggctttgggtttcttggttggggctttggaggcagccttcttgggcttggatgccttctttggcgtggctaccttcttgatttccttcttggtcttcttgaaggccactgacttcttgggttcgtcgctcttggctagccggaaggaccccgaggcccccacccctttggtctgcttgaggacaccggtggtgacccaggcgcttgatggacaacttgatctgcgagtcagcgttctcacccaccttgtagtggctcttgatatacttctgaatggactggcgcgaggagccagcgcggttcttctcggcctggatggcagccacgatcatgtctgaatacttggggtggtctgtggacttcttggaggccttggcccgcttgggcttggccgcaggggcggacgtggaattctcggtcatggtggcctgtctggtccggctgttgaaggcgccttccaaagggccagccctcgtcggaggctgagcaaagcctgcctcgggatctgctcctgagcccctgactaccgggccagtctggagtgcggctcccggggatgcgagcgaggagtcgctgcttttcctccccggctcgggtgtcgggagagctcgccgagccggctttgcgaggcccagccccgccggtctgtcgcttggtctcggcaccgggctctgcctctgcctctgcctccgcctcctctgcctcccttttcctcgtgccgaattcttggcctcgagggccaaattccctatagtgagtcgtattaaattcgtaancatgtcaagagggtctcaaa

SEQ ID NO: 50876 - DNA, 253 bp, Homo sapiens
gggacaagtgtttatctgatcagttatgtactgtttataataagtaaatcagcagagggggaataatacttagaacctatagagagtaaatctgacaagatgaaatgctgatgaaaatatggaggaaatgaaactctcatgggttttgcagggaatctaagtcagtgctgtgttgtgaatgtaggtgtaccctttgaattcatatgttgaatcctaacccccaaagcaatggcattaagaggtggggcctttg

SEQ ID NO: 50877 - DNA, 1464 bp, Homo sapiens
  misc_feature (1)...(1464): n = a,t,c or g
tttttttttgccttgaatgaaaaccatgaatttaatgtgacattgggggagcctcatccttccctttttaccacccacccatccagcctgttgtgagttgggtgagggctgcccccagtctccgtcctgcggctctgggtgccatcctgttcctttgagctcagtcagcctcctgggctcgtctctctgtgaatctccttcttgcgtattcatatagtgcttgcttgcgctcctgcaggctctcctgccgggcccaggaagacttggcaaatgttagggctgttggctgaggggtcaccgggccagagctgggaaacttggaggcagaggctgtgggtagggactgagttcccttggtgatgtcttcaggcatgaaaagctacggccccctcaagcagattagtgatagtcaagtctacacagccagtcttggccaggtctctctggatgacacccaatggcacatggggcaaaacttccttgactctctgagccagagttgccagttgcacatcaggagaaggaccaggggagggagggaaagaagactgggctgactgggggcgcaatctggggtgtctttgtcgcttcatgtgctctgctttgtcagctggagtgagccgtgtccctgtctggcccaattccttggccaccagctgttgtacacggagtgcaaactcctcattcgcttcccctagttggcgatgaacaggacgaagccaccttacttgatacaccgtgaaagggacgaaaagtgaccacagcagttctgagacccaggaggcatctgacaccgttcacagagaccaggggtctctgaacttgcagggtaagaggttgtaccacatcttggatagaaaatggccaggaactgaagcgcaggagcccctcccggccattggtggcctcttcctcagggaatagcagcagaggagtggggggaagcctcgtggaagcacagaatctcttgagtgactccaccaactccccccgcccattcatctccatgaagccccgagaccagcacacaaagctggggggactattgagtagaggggtgctacaggtggtaagcaaattgactatgttgtggtcgaaaggtgtcacatggttggaaatgaggaccctgacactgtgatcccggagtccggagtcctcctgccgggccacgagccctagcaccgcacacatggtccgcactacgaatctgcgaaggacgctgtctggcagcgcgcagctgaccaggaagacgtggatcccgagaaagaggcgcaggacgaggaggcagaacccgactggcgcgtagagcagcagcacgagcagtaggaagcagtcacccggaagccggtgcgagtcaaagagccgctccggccccggccctgagggaagctccataactgctgcttcaggaaccgcncngccgtcgccgccgccgccattttcgcgcccaggcgcaggggctct

SEQ ID NO: 50878 - DNA, 349 bp, Homo sapiens
  misc_feature (1)...(349): n = a,t,c or g
caaatagatggaacaaaactaaaattttagaaacttatgtacccatatataaacactggatgatagagtttgggtatttgttcccnnnnnnnnnnnnnnnnnnnnnnnnnnnnnnnnnnnnnnnnnnnnnnnnnnnnnnnnnnnnnnnnnnnnnnnnnnnnnnnnnnnnnnnnnnnnnnnnnnnnnnnnnnnnnnnnnncatcctgacgacaatgagttcttacaagatctggttgtttaagtgcacggcacctccccttgctctctcttgctcctgctctcaccacatgtgacatgcagggctctgtttcaccttctgccatggggcaaaagctctctgaggcctgcc

SEQ ID NO: 50879 - DNA, 413 bp, Homo sapiens
  misc_feature (1)...(413): n = a,t,c or g
cctgcggcccaggggcaagtgacacctgctgagagaggcccaggatggtggaggctgaggaactggcacagctgcggctgctcaatctggagctcctgaggcagctgtgggtggggcaggatgctgtgcggcggtcagtggccagggcagccttggagtcaagcctggaatccagcagcagctacaactcagagactccatcgaccccagagacgtcctcaacttccttgagcacctcctgcccacggggccggtcctccgtgtggggcccaccagattgcctgttcgaggggacctccgtgattgttgggccagatcgggggtngcttttnttccacttgccaaatgccagcaacaggattccttgggccgaaccgagaacccatttaagnaacttggttggggaatttaaa

SEQ ID NO: 50880 - DNA, 904 bp, Homo sapiens
tttttttttttgcagagcactgagctttatttacaaacttccacagaatccctcaccctccaccccagggtcctccctctctggaactcaggcagcagacaagcttgggtccacccacctgcccaacctaggacagctgggcctgagctgggcgggcaggggattccatctcctgggtgcgcctgccagaggggagaggctggaggcggcgggaatgctgttctcccccagggagtcagtcctcagggcttctgccgtgggacgtggggccgagggacctggggcactgaccaggtcggggtcgggggcagcatctgcattggtgaggccgggtgaaaagggctgctggtgccggacagcttctggtgctgggcctcagcggagacagaggaccagaggtccaggttcctgggggctgagcttttctcagacttcggaggaaaaatgtcccagcccagcaggcagtgccggggcagggccagtgtgtcagaggcgtcaaagctctttcgccggtggatgtggtaccggtgcgggggctccaggatcgacagcgggatgctcaccctgacgtgcgctggctgcgcccagggtccccagggccctgctggtctcgcggtgtccctgcacaggcggcagggggtaccgggatccacaggcaccgggaacaggcgccggttgacacggtaacagtacacgcattcatggtcttcctccacgccgctgccactgctctcacgcaggcctggcaactggggttcaggatggctgcagatacactcctccttgttggtttcccgaaactcctgcagcttggagaagaaggcctcaggctggctggtgatggaagagctggtgtccagagaccctgcaatccagtcatagcccaggtatggcctgaggcgcc

SEQ ID NO: 50881 - DNA, 1071 bp, Homo sapiens
  misc_feature (1)...(1071): n = a,t,c or g
ttttatgttaaaaatatatatttatttcaatttttagatgcttcaactgttacaggccatcatgatttaaataaaagaaaaaacatttgagaaagaacaagaaccttttgtttagagaatgaaatataaattgttaataaacaaagtccacaacaatctcttaaaaaaaaagttactacagttatttctcttgtgaatatggcctggaagaatcacttttcccccaacttaagggaggtggagatttatctctatccaagctttcagtataagcagataagaagtaattctcattttcttgagactgacttgatgaaagggcatatggtgtccccaaaaatgtctgatgagtgagaacattaaaatgactaaactgatgggacatatttaattgactatgataaacctgaaagttactatatgaatcttgttctgttgaattgctgttctctccttcagagcatactatatcaatagaangttctctccttcagaaatcaanggtaagncttatctcctaataaactgttttgcacatcaggagaagattgcaactcaatttgagtattctttttttgatctgttccacgtgatcctttggtctctttctcccatatttctgaatgaaaattgctgcatacttctatatgtgagatttcatcccctgaatccagagacatatcctcttcatccttttcatcgttttctaaaagagctacatttaaaaaacaaaaagtcctcctctattgaaatacacagtttgtttaagttttaaaattatacactactcacacaatataacgcgtcagggtctgcaagtccacaatcccttaaagcttggtcttctgccacaagttcacttagtcacaacactcacactagatgtgaatgtccagataatccgatgctaaaagcttctgcgaaatgtgttcacgtttaatgttgggaaatcccaactcccagctccaaaggggttaatgtcaaaacagcatctgactgcgactcaagattctcattagcaccaagctgtggaaggttttcttctgtgattgaattgtgcccacgcgtccg

SEQ ID NO: 50882 - DNA, 389 bp, Homo sapiens
  misc_feature (1)...(389): n = a,t,c or g
tttcttagcaccatttattgaagagattgttttttctgcaatgtatattcttggcacctttgtcaaaaatgagttcactgtaggtgtatggatttgtttctgggttctctattgtgtnccattggtcctacgtgtctgtttnnatggcagtaccatgctttttcagttactataggcgctgtagtataatttgaagaaaggcaatgtgattccntcagnttnggtctttntnggtcagaatagcttgggntatnctgtgtcttctgtggctccacatgaattttagaattatttcttcaattcttgtgaaggatgtcangggtttcctgatagggatggaactgaatctttggatncanctngggntaaccaggttgaactgcaaaaaa

SEQ ID NO: 50883 - DNA, 1053 bp, Homo sapiens
attcagtcaaccaataaaccagccaacctaccaaacagccaaccaactatgcaacaaaccaaccaactgacaacaaatagtcaaacaatttaacttctaaccagccaacctaccaaatagtcaaccatctaacaaatcagccaaacagcaaagcaatcagccaatggaacagccagataaccactcaactaactgtgttctctagccagccaaccatccaaataaccagccagccaaccatccaaataaccagtcatccaaccatccaaataaccagccagccagtcagtcaaataaccagccagccaaccatccaaataactagccagccagtcagtcaaataaccagccagccaaccatccaaataaccagccagccaccatccaaataatcatctaagattcagccaaacaacaaaccaggcaaccaactaaccaacctgctaaccaggcaaccaactaactagccatcaaaacaacttaccaaccaaaatgccaaccaacaactcaatcagtcaaccaagctaagaactagccaaccaagcagccagccaattctccaatgaaccaccagttagtcaactagccaagcaaccaactggccagtcagctgaacaaccaatcaagcaaccaactgatcaaccaactagccaatcaccaaacatccatccatcctttcatctacccacaacaattacccaaatacctatggagcatccaccatggacccaggcctgtgagggctacaacaaaagtggagaatcacagcccctggttcaaggagcagaaaactcagccagtaaagcaggatgagcacaaataaaacagctggagatccctaaaaggcagcaaacacgggaaggctgcaccatgttgccatgtgccagaagcacgtctggggagggagagatcatcatggacaggagaaataagggaggatccctgggagagctgggactggagctgccttctcttgcagtaaggccaaccctagaagttaccatttattgagaacttactctatgccaggcattctaagtgatttgcatacag

SEQ ID NO: 50884 - DNA, 504 bp, Homo sapiens
tgttgatgacatcacagaacagaaaccagagcctcaggatgatgggaaaagtacggagtcagatgtaaaggccgatggagacagcaaaggcagcgaagaggtggattctcattgcaaaaaggccctgagtcataaagagctatatgaaagagcccgagaactgctggtatcatacgaagaggagcagtttacggtgctggagaaatttaggtatttacctaaggccattaaggcgtggaataacccgtccccacgtgtagaatgtgtcctggcagagctcaagggcgttacatgcgagaacagggaggctgtgctggatgcttttctggatgatggcttccttgtccccacatttgaacagttggcagctttgcagatagaatatgaagaaaacgtggacttgaatgacgtcctggtgccaaagccgttctctcagttctggcagcccctgctcaggggcctgcactcccagaacttcacgcaggccctattggagaggatgct

SEQ ID NO: 50885 - DNA, 1942 bp, Homo sapiens
gaacccgagtgacacgttgaatttgccataatcaaggaaaccttttccgggtggggatctctgaaattactcagtgagcaaccctaattaacctgattttttgctgataatcactctcaatggaatcaaatcacaaatccgggggatggattgagcggcactcagaaggaagcagccctccgcgcactggtccagcgcacaggatatagcttggtccaggaaaatggacaaagaaaatatggtggccctccacctggttgggatgctgcaccccctgaaaggggctgtgaaatttttattggaaaacttccccgagacctttttgaggatgagcttataccattatgtgaaaaaatcggtaaaatttatgaaatgagaatgatgatggattttaatggcaacaatagaggatatgcatttgtaacattttcaaataaagtggaagccaagaatgcaatcaagcaacttaataattatgaaattagaaatgggcgcctcttaggggtttgtgccagtgtggacaactgccgattatttgttgggggcatcccaaaaaccaaaaagagagaagaaatcttatcggagatgaaaaaggttactgaaggtgttgtcgatgtcatcgtctacccaagcgctgcagataaaaccaaaaaccgaggctttgccttcgtggagtatgagagtcatcgagcagctgccatggcgaggaggaaactgctaccaggaagaattcagttatggggacatggtattgcagtagactgggcagagccagaagttgaagttgatgaagatacaatgtcttcagtgaaaatcctatatgtaagaaatcttatgctgtctacctctgaagagatgattgaaaaggaattcaacaatatcaaaccaggtgctgtggagagggtgaagaaaattcgagactatgcttttgtgcacttcagtaaccgagaagatgcagttgaggctatgaaagctttaaatggcaaggtgctggatggttcccccattgaagtcaccctagcaaaaccagtggacaaggacagttatgttaggtatacccgaggcacaggtggaaggggcaccatgctgcaaggagagtatacctactctttgggccaagtttatgatcccaccacaacctaccttggagctcctgtcttctatgccccccagacctatgcagcaattcccagtcttcatttcccagccaccaaaggacatctcagcaacagagccattatccgagccccttctgttagagaaatttacatgaatgtacctgtaggggctgcgggagtgagaggactgggcggccgtggctatttggcatacacaggcctgggtcgaggataccaggtcaaaggagacaaaagagaagacaaactctatgacattttacctggggatggagctcaccccaatgaatcctgtcacattaaaaccccaaggaattaaactcgctccccagatattagaagagatttgttcagaaaaattaacctgggggacagccagtgtaccagctgcactctgctattggacaagaccaaagacagctattcttgtacaaaataactattcctgctctagccagccagaatcctgcaatccaccctttcacacctccaaagctgagtgcctttgtggatgaagcaaagacgtatgcagccgaatacaccctgcagaccctgggcatccccactgatggaggcgatggcaccatggctactgctgctgctgctgctactgctttccccaggatatgctgtccctaatgcaactgcacccatgtctgcagcccagctcaagcaagcggtaacccttggacaagacttagcagcatatacaacctatgaggtctacccaacttttgcagtgactgcccgaggggatggatatggcaccttctgaagatgcttttttaaatttaagaataagacac

SEQ ID NO: 50886 - DNA, 377 bp, Homo sapiens
tagcaccatcctttcttcattcctttttcacttatccatcattaggattgtgtactttttctttcagctggccccttccatccattcctttcctcaacaatctttgctaaatgtctgacacaagccaaaacaatgaaatgcaatcctgccgtaatgaaaactctaccgtggccaatgaatgcaggtacagatagagacactgcaagtggaaactccaatgataaagctacgtaaggactgctgttagaagattgaaaggatgtaatgaaaacatcaagttttatcttgtatacatataatgtggaatgatgaagaggatctaaaattgtacaactgggatgcatcttcacatactaattgatgaaagcactcacagg

SEQ ID NO: 50887 - DNA, 901 bp, Homo sapiens
tccggggagtggcgttggctgctagagcgatgccgggccggagttgcgtcgccttagtcctcctggctgccgccgtcagctgtgccgtcgcgcacacgcgccgccgtggacagaggactgcagaaaatcaacctatcctccttcaggaccaacgtacagaggtgcagttccatggtacaccataaatcttgacttaccaccctacaaaagatggcatgaattgatgcttgacaaggcaccagtgctaaaggttatagtgaattctctgaagaatatgataaatacattcgtgccaagtggaaaaattatgcaggtggtggatgaaaaattgcctggcctacttggcaactttcctggcccttttgaagaggaaatgaagggtattgccgctgttactgatatacctttaggtaaagttcacttagaagctttaaaaaaaaaagtaattaaattcttttacaagtttccattgaggtgtgatatacatacagcacaggtgctgtatgtcttagatatacagcacaggtgctgtatgtcttagatatacagcacaggtgcacaggtcttagatatacagctcagtgaagcttcagaaatgcatgcatgcatgtagccatgactcagatcaagatacggaagagcccagcactccacgatgctccatcatgcccctttgcagaaaatactgcctcctccagtaaacactattctgatgtcactatagattagttttgcctcttcgtgaactttgtataaatagaactgaacaatatgaactgtcctgtgtgatttcttgtatttcattatgggtggtgtgctattgtatcaacagggtatttgggtggttttcagatttgtgatattaacaataaaggaattataaatattgtagtacaaaaaa

SEQ ID NO: 50888 - DNA, 1590 bp, Homo sapiens
ttttttttttttttttttgtcatcatcaagttttctgttttatttaagattttagttttaattctgaagaaagaggtacatttccttgtttttagttttagcgtcaggttataaccaggtttctgttttcttttctcctgtcttttcaatactgcacaaacgtccagaaactacagggttaagtaaaagctgcaggcaaggaggtcagagatttgctcccgatggtgatcagatggccccagagcagtgctatctcagagtgccctcgtcaggtgaatttatggtaaaacaaaaaagattccgacagaggagaaggactgaagaaatgacttacatttcagctcttatattattaataggtattaaatctgtgaatacttttttctttaaaacatttcaatttactttaaatctaaagccaaaaaatttttctcctttaaaaaaattacttctcacctccttatgaactctttagcaatcggcccagttactactacagatgaatttgtctttccatcaacttccaatacattcttttgcttaatgacacaatcaagtccttgccatcaacttgccaaaagaattaaaaattaatttaaattaaaagcattttccctgcaataatgataagctgaatacaagatggatgctaggaccactgctttcccccatgcatttagcaatctcacgtaaatgaacctggttttcaaacttctgcagttgataatgcatttacttgagctttcctatagattaatcgtcattttctgctaagcagattatgtcattattatgcgcaacagacaaacaataattttctaagtattgagactgccctttgatttttttttctctccttaaaaaggcatttttagaaacattcaacagtgtcactcaaatgctggatcaacaaaaatttttacaattaataaagagatggtaatgaccctgtgatcgcattgcatctggggttagggagaaaaaaaattgatcaggtactggattcttcagaacataagagatgagaagggagctgtgggtggtgggctgagagggagaaaaaagagtgggacaaatcctgcattttctaatggttgctcctctttgcctaatggcggtccagtgttgaactctgtagtaaatctgtgggggttttgctggggggtctgaaggccgtctgaaagcctgggggtgcgggagtggaagctggaagggtttgaaggaggagggtagggattccaactggctctgtgcagcgggatctgtgtgctgaagggggcgctgtggtgggtctgtgatggagcagcgctggggccgtccatctctgtgagggcctgaagggattttagccagtgtggaggattgtcatcttgaagagagtctaaactgtttcctgaagacgctggaatacctgctacagggatccctcccagacctgtgttgtgctgtggcgggagattcaagtccaagaaattactatttgaggtggggtttgctgtgtggttcaagtgcatgatgctattgcgtggaaaggccatccaaggatagcgggctgcctggcctggaaaactgaatgaattataaaccgct

SEQ ID NO: 50889 - DNA, 603 bp, Homo sapiens
gggtgagactgtctcaaagagaaaaacaaaacccataagatgcacaggtatctgagaagggtctaaacaccctagaactgcaagcaaaattttgagtgtatacatgttttcctggcgaaggggtcctcattctcaaatcctgagcttttaggaaaaagtactaagccagtttcaggttacgatacaaaagccaccagatacacttagagccagtcaagtttgagaattctcaaagccatcactgaaaagttggaacacatactcacagcagagacaagtgaacatttatttttatgcctttcttcctatgtgtatttcaagtctttttcaaaacaaggccccaggactctccagattcaattatgtccttgggcttggtcgactgctgcaggagtctcagggagccttctacaaatgctagagtgactcatttaccaacattaaaccctaggatacatgcaacaaagcaggactccttcctccatggaatgtgccgatttcagatgacgcagcaccgaatgtagaaaacgctgggaattttttccttggaactagactgtgatgagaggtgcttgacatgaacataagctactgtcttttctt

SEQ ID NO: 50890 - DNA, 939 bp, Homo sapiens
tttcattttaaaaatcattttattgtcatttcatggttaaaaaaacatacatgacatgactataaagtaatgagacgagttctcaggtgtgggttggattactgagtctcattaatatatagtcacaatcctgacttgagcttggaagaaaaatatgccttcgctatatgattatcaattttgttacttaaaatttattgagtgccaacagagcactaggcacatatataacacagaattatacagtctctatgttgtagactatattatttacatagatttctcaaagataacattaaagcatgtatttacagaactttagacaaaaataacaatactgtaaatcagcaagtttctgtctagcaaggagcaccttttcatgaatgagagggttttgcagaacttattgtgcaaaagcactttaattccattacacagcaagtccatattattatatagttctataaagctataagaagaaaaacctaagtgggaagccatgatcagtttcattaggtcaaacgcatttaggaaattctctgctgagactgaagcttaaaaggctacagtcatatttacatattatagcagaaaagctagaactacagcatgcaattcaatgaggtggaagaatggtgaatatgaaaaccatttttctaaacctgcagtttgttctcttttctattaatttaattaccactgcagtttctgattttgagaagacattatctttcaaataaatgttgttgcacaaatttactttttaaaagagatttttggataagtacggtgaatagaaaattccccatatgatgtcaactaccaggtgcttgtaagtttgagggctctgaaggccatcctagggatacccacatgatttcagcggtgtctgttgggcagtgccagtcttggaaggtgggccaagcataaattccacaa

SEQ ID NO: 50891 - DNA, 418 bp, Homo sapiens
gctccatctcgaaaagcgagaaaggccttcagaccaccaacactcagctcaagtcaaacgtccctctgtgtccaaagaggggaggaaaacatccatcaaatctcatatgtctgggtctccaggccctggtggcagcaacacagctccatccacaccagttcattgggggcagtgataagcctggtatgggaagaaaagggcccagccccctgaggccggccttcaggggctgcacgacctggggcagaagctcctccagcctcctggcctccccaggccacatctcagtcaaggagccgacccccagcatcgcctcggacatctcgctgcccatcgccacccaggagctgcggcaaaggctgaggcagctggaaaacgggacgaccctgggacagtctccactggggcagatccagct

SEQ ID NO: 50892 - DNA, 1486 bp, Homo sapiens
ccataaagtgaggcagcctgggaagtggctgctgagaaccagcagggggccggggctcgcagctgtggcgccccccaaccctggtggtggcccagtgcacatcggcttcaaaggtcccacatcctatgtgtgaggtcacactgggggttcctgacaataatgagatcggagctttcaatttttaatgcaatatcctgtctactcactccaatctacctcacaacctttaaaaggacaacgtgtaccttcctttttttataggctgggaaaacattgaaaattaacaaagctcatgactgattgtttgacaacagcttaattgctaacattgaaagtctgctcttacagttgaggaaaagtacaaggtgtctgtatactgtttcatgagtaagttacaacagcaattaaaataaacataagacacttcatttttatgtaagaaatttcagattagcacaatgtgatttatgaaccatgacaattctcttaatatattactcagttataaaacatttttccttataagcccttcaacttacttctcaataatacatccttatatttatgaaaatgttaatattttgaatactttatttcatctttcataatgggcagaaacatactaacatttaataatatttcagcttttcttttcaaaaagaaacaccacaaaataggtcactgagaactttttgctgccaagatgaaaatgattatttgtcacacgaatttaataagttttagaagaaaatatatatatttccttgatctatttccttctgaatttaaaccagcatgtaaagattataaaaaatagtctatttacatggcatagtatacctcagtgatatataaacaaggccataataaagcacagacacatccgactccctacggacacagctgagcagagtccacagacacaagagctactgccgccctactgcacgttgtaggaactggcgaaatcctagaggaaatccaacacagaaaattcaatgataatattggccaaatttgcctgaaatgtcaacaattttataaaactattaaggtatgtataactaaatccatgaaattataaaaataacattggtacgtctgtgagagggtgtgttccgggtagaggtggagagctacgctgaagaggacgcctcctgcctgctgcggctatgtcatcgcctgaggcctcgtcccatcttccgtgaggtcataccactgggtccagcctttggcaagttcttcagatgccagagcaaccaatactttgccaaggagccctttgtctttggacaggaagccgccactgttcttcacggcaacgtcgagcgttctcctctgcacttctggtaacgaaacactgaaatcaaagctttgatcaaacactggatttaatgttttctttgacacgtgtgttttcctccttcctgaccgcctcttgtctggtaataaatacatgcggacataggggtcagagccgtcttca

SEQ ID NO: 50893 - DNA, 541 bp, Homo sapiens
tttttttttttttttttttgcaagaaagaaattgtttttattgcattgaggacttttccagaagcctggtggacccacgtctccctccagccccaaaggcagtgcaagcctctactgatcccccacttcaaggtgggtctcccctcctgcagggcccatggaggaggggtagggtgggctgtagggggcccagaagggaggccctggggacagagggagttcactcctgtttaagctggagaccagggagggcccagcctcacctctggacaacacagcaagtcagaggctggggtgtggcaggggctcagctgtcacctctggggtgtggcttcttcccggaaccgcaccagaggcccctggagcccagggagggaccacggagggcaggtgtaacccctggcctggagcacagctctcagagccctgaggctcccggggacagaaacaagtaacaaagtgagaccacgagagaaaaagaatccacagtttctacaaaaagccccaccctccccaagcaccctggtcagctggggaccgc

SEQ ID NO: 50894 - DNA, 344 bp, Homo sapiens
  misc_feature (1)...(344): n = a,t,c or g
ctgaaatcagttgtaaaacaatttaaagtagcaaatacttaacacatggctaatgagatttgtctggttccatagtgaacctttgtttaaattaaaagaattatctaaataaaaaaagaaggataataatagtattagttgtaatactgaaaagtcttttagaaaacatcttatacatgacttcccttattaaggacatctttctgaaatatgcagcctcacagtgacctttttgcaaacatgatccgttaactggaggactgaattttgggatggacatggtcaggattcccagtcaatactgcagcnggacgatccacacagtaacgntaccaaacnggggg

SEQ ID NO: 50895 - DNA, 2575 bp, Homo sapiens
atctctatggagatggcctaggcgatatccctgagctgagagcatcaccctgtccccgaatccttctttcctctctgttttgtttttcattcccctccctctctcccctccccctccagtccacgacgactggctgttgaccctgttcaggcctcggtgaaggcttttggttactccccttcccaccccatcccttaattttattcttttgaagagtgcatttcaagctgccaaggtggagagagggattacagaaaggagaacaccttatttcagaaaaggtgtaccatacctgagagcaccaggaagtcgcatgagagatcacctgatacatgaacgtatgatgttccatctgcgcattgatgaataggcagcatttacaaattaactgatgtgttgctgtatatcatctctttgatgattgctcctcttctttgtatcctgtcttataatttcaacacatttgcgatactcaatgtctattctaaattaaccatgttttgtaccacaaactcattgcccatggatctgttgctgaaacaaggaagtcttaaacaagaagtggaatctttctgttatcagattgtgtctgaatcaaatgatcagaaggttggaatattacaaagtgaagataagcagttgcaaccttcagtttctaaaaaatcagaaggtgagctttccagggtcaaatttatatccaattccaacaaaataacatttagtaaaaaaccaaaaagaagaaaatatgatgaaagttatttgtcttttggatttacttacttcggaaatagagatgcacctcatgctcagtgtgtattatgtaagaaaattttatcaaatagctctttagcccctagtaagcttcgaagacatttggaaactaaacatgctgcatataaagacaaagacataagctttttcaagcaacatctcgattcacctgaaaataataaacccccaacacctaaaattgtgaatacagataatgaaagtgctacagaagcatcatacaatgtaagttaccatatagcgctgagtggagaggctcatactattggagaattgcttatcaaaccttgtgcaaaagatgtagtgatgcggatgtttgatgaacaatatagtaaaaaaatagatgcagtacagctatcaaacagtactgttgcacgtcgaattaaggatctagctgctgacattgaagaagagcttgtttgtagactgaaaatttgcgatgggttttcactgcaactagatgaatcagctgatgtttcaggacttgctgtgctgcttgtgtttgttcgttataggtttaataagtctattgaggaagacctactcctgtgtgaatctttgcaaagtaatgctaccggtgaagaaatattcaactgtatcaacagttttatgcagaaacatgaaattgaatgggaaaaatgtgttgatgtttgtagtgatgcttctagggcagtggatgggaaaattgccgaagctgtcaccttaataaaatatgtggctcccgaaagcaccagtagtcactgcctattatacagacatgcactggcagttaaaataatgcctacatctctaaaaaatgtgctagaccaggcagtacaaatcatcaattatattaaagctcgaccacatcaatccagactattaaaaattttatgtgaggaaatgggtgctcagcacacagcacttcttctaaatacagaggtgaggtggctttctcgaggtaaagttcttgtaagactttttgaacttcgtcgtgaacttttggttttcatggattctgcttttcgactatctgattgtttaacaaattcatcttggctgctaagacttgcatatcttgcagatatttttactaaattaaatgaagttaatttgtcaatgcaaggaaaaaatgtgaccgtttttacagtatttgataaaatgtcgtcattgttaagaaaattggaattttgggcctcatctgtagaagaagaaaactttgattgttttcctacactcagtgattttttgactgaaattaattctacagttgataaagatatttgcagtgccattgtgcagcacctaaggggtttgcgcgctactctgttaaaatactttcctgtaacaaatgacaataatgcttgggttagaaatccatttacagttactgttaaaccagcttcattagtagcacgggactatgagagcctgattgatttaacatctgattctcaagtgaagcaaaattttagtgaactttcactaaatgatttttggagtagcctaattcaggaatacccaagcattgcaaggcgtgcagtgcgtgtacttcttccttttgctacaatgcacctgtgtgaaacggggttttcatattacgctgcaacaaaaacaaaatataggaaaagacttgatgctgcacctcatatgcgaatccgacttagcaatattacacctaatattaagcggatatgtgataaaaagacacaaaaacactgttctcattaaaattggaggagtttgcatgtctcatgataaccaaatgtaagatgaaaataaaagatgatttacttcaaaaaaaaaa

SEQ ID NO: 50896 - DNA, 628 bp, Homo sapiens
tgcaacaacatggatggacctggaggccattaagtgaagttaatgatacagaaagtcaaaaaccacatgttctcgtaagtgggagataaacaatgtgtacacctggacgtggagagcagaatcatagacactagagccttcaaaggtgggagtggggtgagagatgggaaagtatttactaggtacaatgtatactatttgggtgagggtatactaagcccagatttcaccactatgcaatatatccctgtaataaaagtgacataaatccataaaaattacaaaaagttgctcaaaaaagattggtagtcagaagctgaattctagatgtgctttttcaactatctcattttgtaaatgtagtgtatgaatctcaaaatttaacaatagacaatttttaaaataccaaactgccaaaattaaaagaaaccgtctttttaaatatccaagttttttggccaacttggctctactacttgattttcaaagggattagtggttactcatccacagtttaattgttttgtcattttctaatgctgctgatgcgatgaggttttctgtaggatgacaagctgctgagatcacaacatctgtatggccttgtaatttctgcacaatctcttta

SEQ ID NO: 50897 - DNA, 386 bp, Homo sapiens
cggggcccctggccctaaactctgggactggcgggcggttaggcggcacagggggaatcccgggggcctaaggaggttgtctcagtttttgtcagcatctccaccccgaggtggtttgaactttgagccttttgtagtcctgatgaataatttcattttcctcaagtttatgacactcggaacgtcaagaactggaggtttgtgcaatttgagaccggtcggcactgtgcagagatcagagtactaagagacagagattaaaatggcttccagaggaaagacagagacaagcaaattaaagcagaatttagaagaacagttggatagactcatgcaacaattacaagatctggaggaatgcagagaggaacttgatacagatgaat

SEQ ID NO: 50898 - DNA, 1603 bp, Homo sapiens
atgctggcagccatttgcccctgcatggtatgggatcaaagaggacagcctttcctccctcaccttctccaaatctaggtgaaatcacagagtacaaaaagtgagaatgctgaatgtgtaaagttgcagagggatccctaatttgaagactttgacacagaactaacttcttttgacttaaatgaatttaaaatgagccaaaggaccctgaaaagaagacatgttgatttcccactcctagatgctaaagagacttggcaccagctttgttcaaactgtaaaaataggcaatttgcccctactcgctcagagtggggacagtagtgaacagagctggggattccatggcgacagcttgaatgctgaccttcagacatgagacatagggatttggaggccccttagaatgggtagatggtgttatgttccctttctgggcataggcattcacttggtgctttggagattaggtgagggccctataggtagttggcctgttggcaggaatttatttaggaacagcccttttgaaagtgtcccagtaacaaagcacccagctgcagcaaggaggtggggaaggaggggcacccccaaaggacagcgccttcttctcttccacccatgcacggccttgggtgatggaggcgggttccctgtggctgcgtggatcccataggatcaagcccttctttgcatgaagcagtgttgtgactcttctctctccccttcctctgcacttcctttctgtaatccctactgttcttcttagtcccagcttctgcccaggggaggcttctacccagacttcttttgcaatttgtccctggggaagaggggggtctcccagtgcccccagcttcatcccagcagaaccagcaggatcctcctggtctctcactggccttcctccacacttggtttctatcctcaggggtagaagctcagagctttttatggcccaggagaaaatgtagaccctgagaaacctgtccctgcagaaaggttcccttggggccatgctttgggccctctgctctttatatgtttattctattctccatttttccaccccgtccttaccctagggcctaaacacaggtacagatatgtgcatggttcagggcagctcctaggcctggactgagctctcaggggggaattagataaatattccaacatcctcatgcctggcccatttagtttcatcctttagttacccaggccagtagctttgggttatcccttcctgtagctccaaacccagcacttggagcagcaaaatagggcactgacaggagatgaaactctctcctatctcagaatttgccaacttctgggctgggctcctaggaggtagttttcttgaaggggactgcatcctagttgacctgaattttccagaccaggagggactgctgtgctctcccttctcgccatcatactgtttggctagattcattcagcagtagaagctgtttgatctgttgaccccagcatactgctgtttcttcaccagcttcattgtgtcacagtagcttcctttgggaggatgatgtgatagaacactcagagagaggggaggggagaagagagatagtggggt

SEQ ID NO: 50899 - DNA, 253 bp, Homo sapiens
aaaaaccaaatggtttccactaaagccaccaagatcttttagaaatgtttgcacctttggtggtggcacaggaaaagagaagaattcagctggagtgaattctagaagtagatatcagaaacggggcatgaagaacaggggaactgggtggcatcagactcctaaagaagtgagttaattttccttcccttccattcagattcatgccacagctccatatcttgagtatgtgtaagaggtgagttccttcttc

SEQ ID NO: 50900 - DNA, 498 bp, Homo sapiens
gcaagaccctgtctctaaaaatatatataaaaagtaaaactaaagaacttcttgcctaaacctgaattaccgcaatttgctgagtgactttgagaaaaatcagactgtttagttcagtcgggatgaaaagcttgcgattgcttcccacaagaatgggcaatagtgacggctgcaaggtacttttatttgttcatgaaagaacgacaatttttcaaaatgtaattaaacataatagaatgttttaaactactgggcactgaaactggaagaaaaaggaggctttattgaacattcccctttttcagttggttcaaagttcagcactgtggttatcattggtgatgccagaaaacattagtagacttagacaattgctatggcagtttctaaacagagctttttctatacactatttgcaactggagtgcaatattgtatattctgtgttaaagaaataaagtatttttatcatttattaatactgaaaaaaaaaaaaaa

SEQ ID NO: 50901 - DNA, 563 bp, Homo sapiens
cttagaagggcttcagaaggaactgactgaacttggacttccatgagaagtataatgatttatataagttccagcagtctgatgatttgaagaagagaagagagcctcacatctccactttaaggaaaattctgtttgaagatttccggtcctggctttctgatatttctaaaattgacctggaatcaaccattgacatgtcctgtgctaaatatgaattcactgatgccctgctgtgccatgatgatgagctggaagggcgccggattgccttcatcctgtacctggttcctccctgggacaggagcatgggtggtaccctggacctgtacagcattgatgaacactttcagccgaagcagattgtcaagtctcttatcccttcgtggaacaaactggttttctttgaagtatctcctgtgtcctttcaccaggtgtctgaagtgctgtctgaagaaaagtcacgtttgtctataagtggctggtttcatggtccatcattgactcggcctcccaactactttgaacccccactctgacctgttattaaagttcacattttg

SEQ ID NO: 50902 - DNA, 2041 bp, Homo sapiens
  misc_feature (1)...(2041): n = a,t,c or g
gcggaggcagagaccgaggctgcaccggcagaggctgcggggcggacgccgggccggcgcacantggtgaagattagcttccagcccgccgtggctggcatcaagggcgacaaggctgacaaggcgtcggcgtcggcccctgcgccggcctcggccaccgagatcctgctgacgccggctagggaggagcagcccccacaacatcgatccaagagggggagctcagtgggcggcgtgtgctacctgtcgatgggcatggtcgtgctgctcatgggcctcgtgttcgcctctgtctacatctacagatacttctttcttgcacagctggcccgagataacttcttccgctgtggtgtgctgtatgaggactccctgtcctcccaggtccggactcagatggagctggaagaggatgtgaaaatctacctcgacgagaactacgagcgcatcaacgtgcctgtgccccagtttggcggcggtgaccctgcagacatcatccatgacttccagcggggtctgactgcgtaccatgatatctccctggacaagtgctatgtcatcgaactcaacaccaccattgtgctgccccctcgcaacttctgggagctcctcatgaacgtgaagagggggacctacctgccgcagacgtacatcatccaggaggagatggtggtcacggagcatgtcagtgacaaggaggccctggggtccttcatctaccacctgtgcaacgggaaagacacctaccggctccggcgccgggcaacgcggaggcggatcaacaagcgtggggccaagaactgcaatgccatccgccacttcgagaacaccttcgtggtggagacgctcatctgcggggtggtgtgaggccctcctcccccagaaccccctgccgtgttcctcttttcttctttccggctgctctctggccctcctccttccccctgcttagcttgtactttggacgcgtttctatagaggtgacatgtctctccattcctctccaaccctgcccacctccctgtaccagagctgtgatctctcggtggggggcccatctctgctgacctgggtgtggcggagggagaggcgatgctgcaaagtgttttctgtgtcccactgtcttgaagctgggcctgccaaagcctgggcccacagctgcaccggcagcccaaggggaaggaccggttgggggagccgggcatgtgaggccctgggcaaggggatggggctgtgggggcggggcggcatgggcttcagaagtatctgcacaattagaaaaagtcctcagaagctttttcttgggagggtacactttcttcactgtcccttattcctagacctggggcttgagctgaggatgggacgatgtgcccagggagggacccaccagagcacaagagaaggtggctacctgggggtgtcccagggactctgtcagtgccttcagcccaccagcaggagcttggagtttggggagtggggatgagtccgtcaagcacaactgttctctgagtggaaccaaagaagcaaggagctaggacccccagtcctgccccccaggagcacaagcagggtcccctcagtcaaggcagtgggatgggcggctgaggaacggggcaggcaaggtcactgctcagtcacgtccacgggggacgagccgtgggttctgctgagtaggtggagctcattgctttctccaagcttgggaactgttttgaaagataacacagagggaaagggagagccacctggtacttgtccaccctgcctcctctgttctgaaattccatccccctcagcttaggggaatgcacctttttccctttccttcctcacttttgcatgtttttactgatcattcgatatgctaaccgttctcagccctgagccttggagaggagggctgtaacgccttcagtcagtctctggggatgaaactcttaaatgctttgtatattttctcaattagatctcttttcagaagtgtctatagaacaataaaaatcttttacttctgaaaaaaaaaaaaaaataaaaa

SEQ ID NO: 50903 - DNA, 1663 bp, Homo sapiens
tttttttttgcactcttaatacttatctttattatgaaagtgtttccaaagtaaaatgatcctcataataatgattgcttccagagatcaagaatgaataattatattttcatataaaaatcagcaaaacacaataacaatacataaaataattctaattggctaacagtatttcattccatttctgacagagatgctcaagcactgaattgtcttaagaaaacaagtaaggttttgtcacctatcctatttctcactgcaagttgaaaaaaatcaaatccaaacaccaccaccccttctatgacaacaaacggctgtggaggtaaatgactatgtgggcaaagagttgatgaaaatcatgagcttaggggctttatgaaactttgggaaatcaaactcagaggttgttttccattcttaaagtaatgaagctctaagttaaagtttcagaatcatcacataactgttcctattccataactcatttcttttttttttttgcaggtaatcttattttcctaagggtagtttcatgatgacagtgtcaaaaaattactgtggataaagaaaaaattgtctcaatgaaatagaatttttcactgaacacagaaaccatctcaatagttgctgctccctggtttccaggccacgcaacagacatcaaaccaggaagccaaactttcatggacctgtgttaagaaaaacacacatacatgggcatactactttttccagaaaaacggaattaggcagagaaggaagtgtgggtgtacaactgatccacaagctattgggaaatcaatagctaaaaaatgtccacaccctggcttccttttatcaggaactccaggaggctgaaggaatgtgagtgcatgagataagcaagacagatcttaacggtcccctcacatccctttctgggcaatctccagaatgcctagttttgtggagacaccatgtactatctggctgcagagactttcttaggtcccgtgttagacccatggggtctcagcatgtggtcatgtggtaatgcattcctttcaaaggctttgggttgaactcaagttggaaatacctggaaaagaccaagcttctcctttgggtgtctgcggatcctattaaaaatattcgtgatgttttaagttctccaatacaattttctccacgaaaacaagcatcagatacactacctctaagtatttattggaggggttccaacagcctcgtggacaggccttctcagcagctactgagtgccccctaggggtggggaggggccagtgcacatggaggcaaaccacagagcccttttgtggcctattattatgaagaactaaaatgtggccagtgaaccagtcagtgctcatcactacggggtactttgacaatggcacaatttcattttaccaaaagaaaccttcactggctctggggactgcaatatcttcattttaaaatattttgctgcgttttcttcaagggcggcttgtgacaactgaactgctgattattccttccatggacagcatggtagtggcaagtgcagtaactgggctcattgcattttctctttccatacaagttactgcaactgccatgtgatcacttttccagcaggctgacttcgatttgatttttttcttatttaaatgttagaaat

SEQ ID NO: 50904 - DNA, 95 bp, Homo sapiens
ttttctttctgaaaggctagacagtcaataatttaggtttaagtttcccacggggaacaaagggagcgaggagggcaggcaggcataatcttacc

SEQ ID NO: 50905 - DNA, 442 bp, Homo sapiens
atagctgaattttcaaggacagaaggacaatcaggcactttgatttggaccttctctgtcctttcctctgctccagttacatgtagttaagtctgggcaggtttgaacagttaataaaacaaactgttaatgaggccatatttaccaatccgatccttatagagaataagaaaaatatgcatcactggctaaatggctctcatatttccaaatacatatttttcatcaaaaagagaataattctgcagtatgtcacacagcagagacagcaaattatatgcaaataactgggcttcctagaactggaaggaggtatttatgactgactacccagttcatacttcttcactgttaggtgatgtccccccatctgtcacacagcaggttatggtcagtgcaagtaaatcataaaagatcttcagataaacataaccaaagtacc

SEQ ID NO: 50906 - DNA, 1259 bp, Homo sapiens
tttttttttttcggttttaacattttattgggtaaatgattttaaaggtaataacaatagtgtcaaaactactacaatatctttccacagccataccttacagacccacataaaccttctcatattttttctttttgctcatatttaatattgtaaagcccatacatgtccatataaaatgccccatttcccaatagtttcttcaaactattaagcaattaaatgtggaaggaaggagggcctagttatactggaaggggtttcaggtaatctgtgatgtcttacggtaatcaaaaaacaggttactaagaaagaaggaaaagaggagctactcccaggtagctttttgctcattacaagtctcaccattgtatcaccaagaactcattatgctggtgacagattcaaagtaattttggggaacatataaaacactaaaataacttagaaactagatccaaatatttcaaaagtaatcaactttgatatacaaaagtagtcagaggtggttacaaaagtttgtttgctcagtgcgtctatgtaccagcgcagttactgggtagagcaaaataaaaggttcattttcttctgaaatagcaataaaaaacaaggaaaacatatatttgtatataaaggatcaatgctggtcttaagaataatgtcatcagaaacccttaaatcgagaggcacacaacgggtttccacttttaaaaaataaaaggaaagtcaccagtttatttaaatggaggaggtgctcacacccctcaaataaacttaattcattttaacatcactagcaaaaatcacttagaaactgtacaaaaataaaaaagttaacacatttaatcctgcaaggtttttgtaaggactggaaggcaggcttttgaagcagcatttgggcatggctgggggcttctttggtttgatctaacacacataagagatggaacctattccagatgacagtttcaaaattttcctgcacatttgaagacaagataagaggccagtatacaaacttccgggtgtgctgggcactgggactgtatgtgctggactgaaaatcttacaactgctttaagctttaagggtgaggggaagcaagccttgcacttcctccatcaatttcactgacctctcgtgttaggggagactacagagggtagtagcacattctcgtgcagtcagaaggccacttgaggggtgggggacaatttgttcttttagaatctggtacctggctgaccttgtttaagaac

SEQ ID NO: 50907 - DNA, 529 bp, Homo sapiens
  misc_feature (1)...(529): n = a,t,c or g
gaatacaaatgctccaacattattttttataactctggattaccgatgctgagatgtgtgcaggaatacttccaaataaatttttaacattgtaagccagtagattctttggctgggtggcaaattttgagtcttcttgcatatttggctcatgggttcataaattgaggccagagactcattgtatatccttgatcaattttctaattaaaggaaatagcttattgtttagtaaaatggcccttggttgtgggaagaaagagaattatttttaactgaacgtttttgttgtttttttaaataaagtagccatatgtaacgggattttaaaaatatatacattttacaacatggactataaaaggaccattagatcaagggttggccaactatggcccacgaatcatacctggcctgcccctgtgtttattccccctgtgagctcgaatggtttatannnttaccancgtntgnnctactactnctncannnctatantttatgccacctgaaaattctatgaaattca

SEQ ID NO: 50908 - DNA, 392 bp, Homo sapiens
cggacgcgtgggcggacgcgtgggggaaatagaagcccgttctttcttactgcccctggagggagcatggcgctagggctctcagcctcctagaaggaagggactaaggagacgggcacagacttgcgtcatctcgtttccacagttgacgttttatattactttctcaaattaagttaccaaaacaaactgaagagctgaagcaggtcttccagaccctgcgatcctttctgtagcagtgattctaaagtggcgtttgctgtgtgcttgagagtaacactgcacgctgcaggggctgttgcagcagtcagtcccaggaagccacagtgcttgtaggatctgctaggaccctgcagctgtgctgccgcacctctgctccagagtgtcccagc

SEQ ID NO: 50909 - DNA, 501 bp, Homo sapiens
  misc_feature (1)...(501): n = a,t,c or g
atcagctctttgaggatatatattctaacgtatttgttgaattattttataacacacattagtgatgtttaaaaaaaaaaaactcaatgcattccagattttgtcagtttctcacactcaagttaaaaagataaaccaaaatataccaaaggaagacattttctttaacattatgtggtaccttaagacatgagtgaataaagatgtaattaaggaaaatcagttggaatacttaaatagacttagttgtaaaaataaaaaaaaatgtgcttgttgaacgtataaaagcaaaataagtaataatactcggaacttcccagagaccctaaggttgctttagtaacattcctctccagccagatgagtactaagagttgattccaggttctcatgtttctcttgagccttttagtgtacagctattaagaaagtacaaataaactaatcaaaaactcgtgggttttttttgtttatttttggaggcagagtctcgctctntcc

SEQ ID NO: 50910 - DNA, 426 bp, Homo sapiens
ctgcatttacctctctacctcggttaataagtagagtggctcaccactggagggtgacatgctgctgcagaatcaccatgttatgcctgtggctcttctgaatatcttatcattttcctgtttaagagagttcccacacttcaagacaatattggtattttaacatagtagcattgattaatatatttgtctcccgatgaatcacccagacactttgatttggccactgcatatctctgaacaggaaagcctatacaggtcgagtgtgattggaggctgaggctcagccctagacacctattaatgcgtgaactagtcttcaagggcagacctggttataaagcttctagatcatcggagtttgaggtactccaagaaaatgagggtggtgttatttagaggaagctgaatgttaactctttgtaa

SEQ ID NO: 50911 - DNA, 764 bp, Homo sapiens
  misc_feature (1)...(764): n = a,t,c or g
ttttttttttttttttgcagcagcagttcacatttattgagggcctgcccccaaggagctcacagcctgggggctgagaccccgaatgtgcagggggcggggaagaaaagaggtgaaggcaaaaaggcaggcaatgcagagacaccgtggcccaagcagagggggtgcaaggcaggcacaggcagggggcctggggcggatggggaggtggagaaccggcagccctgcctagacctgaggactgtagaccccacacgtttgaaggctgccctcccccaccaggatggcactgcccgggcaccctgtgggaggcccagctcctccacctgccctgagccgggtccagcctcacaaaggcccctccacccaggactcccaaccatgcagactcccggtggagggcaggaagctggggtctggggcccagccgggacgtggaggtggggcctatgagggagcagatgaagtgtgggtggccctgggaccctgggcaagtccctaaggaacttccaggatcccatagaagcccctgagccagctaagaagggaaggaagcagaacccaacgaagcaggacggcgctccaacgaggcctggcccctcaaacctgctcctgttggggaagctcaggagtagataggtgaaaagaagggggacccacctggggggagggggcagcagacagagcagccaggcgggcagcagagcagggacacgcacacacggctcaccaccagncaccccctttaataaaacatggggggg

SEQ ID NO: 50912 - DNA, 437 bp, Homo sapiens
tggaaggaaggagccacgtagcctggggttgcatgaggggtggcacaagcacacccttagctacctcaactggtgtctcagtaggttgtgctcccccaacccaaccaggtcccctggctcggagcccagctcagcacaggacatgcctaggggttgcagtccttgtggcctagactgcctttcaagtttatttagagccccagagcactatagcccactgtagcaaggcttgcacaactcatgtttagaccattagggctggtgatttccctctgggctagggctggtttaaatgctccctccatgggcgggcatcagctgagtttgatttggtttgttttctgctataacaggacagcacgaaactcaatgcctcacaattactgggctctccctcccccagtgcacaaaaatgctctctgcagcatgctgcagct

SEQ ID NO: 50913 - DNA, 351 bp, Homo sapiens
ggatgaatctaacggaatagcatgaaataaaggaaaggctaaggagaggacaaacaggaggctattgtggcaatccaggcgtgaaagtctaaactaatcagcactgggaatagagatgccgtaggaaaaataatacatcattaatataacttggcaattgagtagatgttggagacaagagagaaatcagaaacactgctaaacactatgcagctataacaaagaatgagagagcattcagtaagatcacatccaagatatgtacatgaaaaacacaagggatagaactgtgtatatggcaagctatcacttgcattttttattttttaaatggtatttatttatttcttg

SEQ ID NO: 50914 - DNA, 1092 bp, Homo sapiens
tttttttttttttagattgtaaaagtttattgatatggtcaaaaagcaaacagccagacatttggttatctttgccactacaatgtgtcattctgaactgtatcttaaaaatgcataacaaatgatatttaaaccattaccagaaaagtaaatgaagagtctacttaaggcacttcatatgaaagctaattcaaaattttcacaaaagtcacactattttataagtgtagtaaattaccttctacacattttagccagaatgctgcctttctccttacagaagaatgtgctcttaaagggagaaaaagcaaatacaaaaaattgtcattctgtcaatgttcatggacaaattatctggaactatacagattacatggcagtagtattccccgtggtcaatctgtacaaatcagggcatcttcatacaagtctcataagaaccacagcatagatttggcctgagacaagtacaagaatagcaggtaaggaattcagaatctcacaatttaccagtggagtaattaaccaaaactggctgctccattaaaaagtaaaaggtcaaccatatcccctcatccatgaaatctagtaacgaaaaacaaaaaacccacataaaatatttcttctgaggctactatatccatctctttctgcaaaccacatggcagggttattagaaggtaaatggcaggtggcagtcatagtatctttttaatgtaatacttgtaagatttccttaaaattattttttcacaattacaattatcctatttcccacaatagtggcatttcaggttactccttcataactatgggggaggttatagttagatataatgataaccatgaaaacattcttcacagaaatttggttagcacatatggttatttctactgacagaaaccaaaagacaaaataaaaaaaatcccttcaaattggtactttgtttctccacctaaaggaagagaataaagactaaaataacagcaaaacatagaacagctttcgagaaacgcttaatttctatatacaggcatcagctcaatattttatgatttttctttcccattctaagggagtccttttctttc

SEQ ID NO: 50915 - DNA, 685 bp, Homo sapiens
gatctggccagtgggcacggtccctacagcttcacccttggtcccaaccccacggtgcaacgggattggcgcctccagactctcaatggttcccatgcctacctcaccttggccctgcattgggtggagccacgtgaacacataatccccgtggtggtcagccacaatgcccagatgtggcagctcctggttcgagtgatcgtgtgtcgctgcaacgtggaggggcagtgcatgcgcaaggtgggccgcatgaagggcatgcccacgaagctgtcggcagtgggcatccttgtaggcaccctggtagcaataggaatcttcctcatcctcattttcacccactggaccatgtcaaggaagaaggacccggatcaaccagcagacagcgtgcccctgaaggcgactgtctgaatggcccaggcagctctagctgggagcttggcctctggctccatctgagtcccctgggagagagcccagcacccaagatccagcaggggacaggacagagtagaagcccctccatctgccctggggtggaggcaccatcaccatcaccaggcatgtctgcagagcctggacaccaactttatggactgcccatgggagtgctccaaatgtcagggtgtttgcccaataataaagccccagagaactgggctgggctatgggattggtaaaaaaa

SEQ ID NO: 50916 - DNA, 1182 bp, Homo sapiens
ttttttttttttttaaaacccgaaggcattaaaatttattaaatgatgcaataacaacagaattctttatttacaatagcattatttaacatcaaataagcaaatagcatcagcaaagcaatattaacttgcataaatgtatttaaaatttctctgaatatatctacctttgcataaactgctcacactagaaatacaaacatcaatgcaggtgaacaaagtgatgttcagagtcaactccattttgaaaataaatcacaacctgaaacactgtaagctttctcctgaagaaccatagttaatatattgcttaattttacccttgtataatcttttcatatacacacatctcagatgcaacttcatgaggaactgtacaaataaaactcacaaatgacaaaggaaaaaaatgacagttaaatgtctgaagaaatgtatcatcatcactattcaaacaacataaaggttaagtgatgatgcacttattcaaaaattgtacacaattcactatacaaatataatacatcggacagctatgtaggaatatacaagacttaaaaacagatctaaggcattatgcctagattttagcattttgaggttcttgcacatagcttttacctgtagtaagaaacttaaaagattttgctttagtctataaagaaacaccagggagaaaattctaattaaaatcgaagccactacagtaattttcttttgtgcagaggatgctttgctcttaggcagcataccaccatacaaacactagaaaattttaaattcacaccaacaattaatggcttaagttgcatttcaaaactgattgtgtatctttgggttctgcaagtggatctgtgccacccatttcatgtgttaagcccatatgaactccatttttgaacacagattaaaaattgcattatataaactgcaaaaacattgctttcaattattacaggccataagagatacacatagggggaggggcattttaatctttgagtcaaacgaattcattgtagtaaaacagctcacttcactttttaaacttaccacattacatgaacacttaaaatgagttttacaaccaagttaatgtatgtatacttttcacattatgtttttcacatttagtaatataagtgaaacactgattatttgttctattaaacaaaaaccaag

SEQ ID NO: 50917 - DNA, 319 bp, Homo sapiens
  misc_feature (1)...(319): n = a,t,c or g
ttttttttttttttgtcgcctaggctggagtacagtcatgtgacttcggctcatggcaacctccgctttccaggtttaagtgattctcnnnnnnnnnnnnnnnnnnnnnnnnnnnnnnnnnnnnnnnnnnnnnnnnnnnnnnnnnnnnnnnnnnnnnnnnnnnnnnnnnnnnnnnnnnnnnnnnnnnnnnnnnnnnnnnnnnnnnnnnnnnnnnnnnnnnnnnnnnnnnnnnnnnnnnnnnnnnnnnnnnnnnnnnnnnnnnnnnncctggcctatgtctctgtcttaaacagccctcaaattgctgaccccttcattg

SEQ ID NO: 50918 - DNA, 191 bp, Homo sapiens
gcaccaaggaaccttcctggttcagccataggtcaaggtgtgtggagggaatgacctgaggggctgtatgagggaacaacctcctgggggctcccctatgccttagttcctgcaactcagaagttgaggcccagagatccaggtagagggggctccagtcctgggactgccctgcaagtaatgtggcctgg

SEQ ID NO: 50919 - DNA, 843 bp, Homo sapiens
  misc_feature (1)...(843): n = a,t,c or g
tttttttttcactatggaggctggacaccaagacccagctgtgtctctcaaagaccctcatgcctgctggacgcctcctccctcccacacccgcaccctccagggcctccctgcgctctggggaacgtgttcccactgcagctggtgtgtggccgagcaacccgaaggccgggctgcctgccctccaccccgacgggggncagcaccaaggaagcctgggctctgtgcacacggcagccacgctttcctcactcaatagtttttcccaaagaaacgatcaggctgggcatggtgtgaggaagggtaataacttttttaatgaattaatcatcattggaagagaatggagaaccaatgtgtggttttcaaaaatggcatgaaaaggggaaagaagcatttatcctacttttcttttacagatgataccacgagtcaacccaaaagttgctggggagaagttgctctttaatgaattgcatctcatgaatgtatcaggctgtgacctttctgcactctctaatgagttcatgaatttaggccaattatggccacaaatgctgctgctgtcacagagagatgccggataaagaacacccaccaccagtctctgaacagggaggggagaatcaactctgaatgtgatgtagtggccaggagagaggaccatgttcaacaacgccacacagatgcaaatgacttgtttcttcaacaaactgcaagggaaaaaataaaaatgggggaagctacagattaaaatacatgtgtttggataggagagtatttaatggcaaaagaaaaagaaaaaatttaaaaatgaaattgtgcaaaacttatttgaatcct

SEQ ID NO: 50920 - DNA, 931 bp, Homo sapiens
ccagactgtgtgtagcaccaagaacgcttccttcacacgatcttcaggatcgagcgggctgactgggagtgtctgcctcagtcccacgtggcacttggaaaaaacagagcgaggcccccccaagaggcagcgcccacccggccgccgtgctcccccaacttggggacgtctggccttggacagctgggcccgtctctcaccacccacctcagaggcaaaaaaggattcacacccagatctctagaaaaatgatcaaaagcaggtttcttctcacagccaagcttcctggacatggcagttcattacatctcgggaaaacgtaaatcatttcttcagctgtcaatactgtgtccctcacatccttgaaccttgttcttgcaaaatcttggccttctttctgggttcactggccatactgtatggggtgttgtgaagtttcttggacaccacatagaggaacttggcctgatcttcattcccatagttgtaagaagagccattgctgaccagttgttcaaacttccagctgtcggacatggtggacaccacctgtgtgagttcctcctcctgacactgaagcacgtggtacacatgcttcatgggcacctgtgatgttttgctctcttgttctctaattttgtcctttacaagttttattaatgaagtgatactgtaaaattctgcttcctccaacactccttcctccgcgaggtctttgttaatcaccagcttgccgtgtctcaggtagttcagcacaggcccaaagtaggtggggtctctgtcgattaaataggcgcctgtttcatccttgtctgagtccaggtcgggatcggcctggcataagcggtacaggaaggatttcgggtcccggcacagggtctgccgagtggtgaggaagtaggtgccgccgacgttgagtcggacccacttg

SEQ ID NO: 50921 - DNA, 479 bp, Homo sapiens
gcggtggcggcagcaagaggatcatgctccaacccggcgcggcccggaggcttcccgggggccaacagcccaggacctgtcgccgatctctacggccctgccagccaggactccggagtggggaattacataagtgcggccagcccacagccgggctcgggcttcggccacggcatagctggacctttgattgcaacggcctttacaaatggataccattgagcaggtgctttcgttgccatctcactctgagagcatacctggatgtccaggcaagactgggcgaagtttctgagtggccctttgtttaggtgatgtcctcagacctggacccccaccagcctcactccccatcccaaccagagatggctcacttcggatcgagggttgactacatctcatcatctcacgaatctgctgtaatataagacaacagcttttaaatgtgtatataacccatgaaaaaaaaaaaaaaaaaa

SEQ ID NO: 50922 - DNA, 1524 bp, Homo sapiens
gacttgtcaggaagcaaaagaatgaattaaagaaaactccagagaatgagctgacaacctactccctggtcagtggctctccatgcctacctgtggtctcttggacacccttgcagaagatgacttcctgggaactcttctgggagtgaatgttatcagcaaattcccaaaacaacaccccttagacaaaaagcctcctcacctatgcattgcctagaccacccactaaaggtgatggccacaaagaggtggatttgttgagttggtgccattccttctactgccagcttcaccaaaacaatgacacagtcttccttccgcatggagactcttctctttcctgtgttgcagtggatgcctcctgcagataagaaatgcttaactgagaaatgctcatgttgggatatcatcgatgagactttaatttgggcatggtgactgtttcccttgctgccacttgactcaatcccaggagcctcagtagaggatataatattacacaagatgctcaaaatggtggaattgctcagtgctcccataaatatacatttataattttcatttgccacatggtaaactgaaaaatacagactatattaaaaagaaactgcatgattttttttcaaaaattcaaagcatatttaaataatatataaattaaatgccctcctctcttccaattctgtccctatagttttcctctattaagtgaactacatgcattcttttagtggatagatgcacacaaacacacaagccattatggggaaggatccacgtgtgtggccatattgtaacacatttttctgcaaatcacctctttcatttaacagcccttattcaatggcctttttctttttcagtagtacatacacatctgtgtcatttgttgaatgacgacatgaatgttttgtagataaaatataattaaatgttttaagcatttctcactcatagatatttatgttagcaccaaatttctgtgcaatgaacctccctatatatcagtaattttgcatttgtctataatatcataataaattacttatcagttgaattactgggattaagtatgtgcacactttatatttatattttgaaaattattgcaagattgccttcaaaaatgtggttaacaactttatcttcaaatggcaatgaatgagattgccagctttcctacagcctcacagacaatggattttataaatatttaacatttttgccaatgtgatcacccaaactattgtcttaaattgtatctcttttgtttttgagtttggtcattttttcatgtttattagccatctgtattttttaatttcttctttatgtccaattttgtgggtgggaggaggatttagtctcttcctgatttcgaagagctcatttactatttcgggaaataagatttggattgtcaaccattatagctattttttacacacttttcaactttgtttttgttataagaatgtgtatgattgttacatgtccaagtataaccatgttcgcttttatggc

SEQ ID NO: 50923 - DNA, 923 bp, Homo sapiens
accatatttagttgtacagtaagagaaatttatctgtgcatagagcataaagttaattttttcaagcatttaaatacatcttttgtaaggttttttaataaaggcagattgagtcaagtttattaaaactttacatggaggggaagaatatgctaatttgacatttgagaaaagtttaaatgcgagcgtttgttttcacagcttagggattggtgggtgaggtctgtgtgcgttattttcatgttcccaaactgtgagctttatttcatgttatttttggtggatgttgacttagttcatgaatgttgtcacttctaaatgtggacagttgggctgcaggatgcaactcaacctcttttggatcctagagacccctgccaagcccccatcagtcctatttttaaatgaagacatcgccatttctagaagacctgagattttcttccctctgtgcttcgatgtattttaacctcaacattttgaaacggaaaatgcaaggaggggccaagaaatgtcctggggatttgatgccaggaagtacctggtaaggattggagattgctccagaatctactgcatgtcccaatttgcagtttgctcactagggctatatacaaaagctatacccttgagggttttttttttttcttttgatttcctcaggaccttagagggaaaacaaacagtagcagctaatattctcaagtatattgctgcttagaaagatcctcaggaacaattagcagcaataagcaagcctttgaaaagatctgaattctttttcctgaaatatttacgatacacaggtgctttttatctgaaatctgttgtgtcctccttttagggcagtctctgtggggcagagagtgggacttgcgaggtggacactgtggggatctggcaaaggagttcagaaagtgtgg

SEQ ID NO: 50924 - DNA, 362 bp, Homo sapiens
  misc_feature (1)...(362): n = a,t,c or g
tcgacgaaatctggctcacgccatctgacatctattaacttattcgttcagtcccatcgtccatgtacagcacttttagaattgttaacctgtatctccatgagaaatgcctttaccaaaaaagaacagtgcttatatacagttctttttgttgttagagtttccagtttcaagtttcccaaagttacttaaatcaaaccttttcccctgacatctgtattttaattttatttttaataaattgatcctaaattaccatggtaattatatataaagcttataaaaaatttcccttgcccaactaaagatctttagctttagatgtgtttttttttcctcctgncttttgtgaccaaaaaaaa

SEQ ID NO: 50925 - DNA, 1234 bp, Homo sapiens
  misc_feature (1)...(1234): n = a,t,c or g
gccgcctagaaggacactaaaaaggcaagagaagccctaagcagagtgagcaccagactccacaggttaagggctcagtcacacaggaccatccgcatgtcagaccccaggtgcaaggccaagcatcacctatgcatctgaccaactggctgtaaattggaggtccccacaactccctcctcaggtttgaacatttgctagaacagctcatggaacccaggaaaacagttttcttactagtgctgatttattacaaaggatattttaaaggacacaaatgatgaagccagttgaagagatacacagggtgaggtttggaagggtccttgtggagttggggtgcaccatcctcccggcacatggatgtgttcgccaacccagcagctctccatgtcctgtctttcaaggatttttctggaggctttgtcacgcaggcatgatcgagctccagctctgctccccaccccagaggatggggaatggggctgaaagcactaagcttccaaccatagttaggtatttttggtgaccagtccccaaataaggagcccaccaagagtcacctcatgagaacaaaggacgctcctatcatgcagaaaattccaagggatttaggaatccttgtgtcaggaaccaaggtgaaggaccaaacgttagaacaaaagatgtgcaatnnnnnnnnnnnnnnnnnnnnnnnnnnnnnnnnnnnnnnnnnnnnnnnnnnnnnnnnnnnnnnnnnnnnnnnacagctgatttccagaggatggaagaagtcaggaaacttgggacaccgctgctgaggtccttgcagccccacggtccccaggctggtgactggtgggggagtatggagtccagctgaccaccagagcctgcacgcctgctgctacaggggaggaaaggatgacttctacctcctttccacattccaaattccacgtgactaccttttattggcagcaccctgctggcaagggagccttgatgtgtgcttcctgggcttccagcacctcttcatcttcctcatccaggtattttattttaatactattcagatcaaatgaaacttttaccgaaactggagacctccattagggcggaaagagtgggggattgggacctcttcttacgactgctttggacaataggtagcgattctgaccttcgtacagcaattactgtgatgcaataagccgcaactggaagagtagaggctagagggcaggcactttat

SEQ ID NO: 50926 - DNA, 1855 bp, Homo sapiens
tttttttttgttggtgggggagttgaaacctaattttgtggcgtacgagctatgcagcttgaaatccaagtagcactaaattttattatttcgtatttgtacaataagcttcccaggagacgtgtcaacatttttggtgaagaacttgaaagacttcttaagaagaaatatgaagggcactggtatcctgaaaagccatacaaaggatcggggtttagatgtatacacataggggagaaagtggacccagtgattgaacaagcatccaaagagagtggtttggacattgatgatgttcgtggcaatctgccacaggatcttagtgtttggatcgacccatttgaggtttcttaccaaattggtgaaaagggaccagtgaaggtgctttacgtggatgataataatgaaaatggatgtgagttggataaggagatcaaaaacagctttaacccagaggcccaggtttttatgcccataagtgacccagcctcatcagtgtccagctctccatcgcctccttttggtcactctgctgctgtaagccctaccttcatgccccggtccactcagcctttaacctttaccactgccacttttgctgccaccaagttcggctctaccaaaatgaagaatagtggccgtagcaacaaggttgcacgtacttctcccatcaacctcggcttgaatgtgaatgacctcttgaagcagaaagccatctcttcctcaatgcactctctgtatgggcttggcttgggtagccagcagcagccacagcaacagcagcagccagcccagccgccaccgccaccaccaccaccacagcagcaacaacagcagaaaacctctgctctttctcctaatgccaaggaatttatttttcctaatatgcagggtcaaggtagtagtaccaatggaatgttcccaggtgacagcccccttaacctcagtcctctccagtacagtaatgcctttgatgtgtttgcagcctatggaggcctcaatgagaaatcttttgtagatggcttgaattttagcttaaataacatgcagtattctaaccagcaattccagcctgttatggctaactaaaaaaaagaaaatgtatcgtacaagttaaaatgcacgggcccaagggggattttttttttcacctccttgagaatttttttttttaagcttatagtaaggatacattcaagcttggttaaaaaaataataataaaacatgcatcatttttcatttgccaaccaagcacaaagttattttatactgactgtatattttaaagtatactctcagatatggcctcttacagtatttaagatatagcaaggacatggctgatttttttttataaaaattggcactaataagtgggtttattggtcttttctaattgtataatttaatttagtacaaagtttgtaaaatatcagaggatatatatatattgtttctacgacatggtattgcatttatatctttttactacagtgatctgtgacagcagcagcttcatgttgtattttttttactgaaattgtaaaatatccatcttaaagacatcaactattctaaaaattgtgtacaggatattcctttagtggtggaattaaaatgtacgaatacttgctttttcaaaaaaatgtattttctgttaaaagtttaaagatttttgctatatattatggaagaaaaatgtaatcgtaaatattaattttgtacctatattgtgcaatacttgaaaaaaacggtataaaagtattttgagtcagtgtcttacatgttaagagggactgaaatagtttatattaagtttgtattaaaattctttaaaattaaaaaaaaaaaaaa

SEQ ID NO: 50927 - DNA, 411 bp, Homo sapiens
gtaaatgcttaagagttttaatcagtccgccataaaaagctcctccccattctccatcttgggggctcagatcttggcttcgggttgagatgagggacagggatatcaggctgggagaggagagtaaatatgaatgcggctgagggaccagagctgggatcggaagaaaacacaggtgaaaaggagcagaaagagactgctaaccccagtccctgagccaagtcagaaatccaagtccttttatagcatccaggagccaaatgtagtgaaatccacacatcatatcgttcttatctgcaaagtgctgtcatctggcgctgaaagcaccaggactgggctgaattgggcccgaagtgaggaattccaccacactggcggccgttactagtggatccgagctcggtaccaagc

SEQ ID NO: 50928 - DNA, 487 bp, Homo sapiens
tcacagaaactgtgagactaaatgttatcttacactgctgagggtttgggcaatttcttacacagcagtaggtaactaatacacagccatattccacttttacctgtatcacaaggttttctgattattgtcactatgtgggagaagtcattactaagttactatcagaatccctgcctccaagataccccttgactcaactgccccaaaaccctccgtttgttgaagtcttgaattggatcttgggttttagaatagaaacaaatacagctgttaggaatggcttcgatacaaactatggaacttgaagagatgtggaccagggatttgagaaggaaactgttctttcttctgccaaaaatacaatttggtacttgaaggggtacctgggcacccagggatggaaacattttaagttaagcactttaccttttaaatgccacgttaaaaatgaatatattcataacagatacttacgaggaatatg

SEQ ID NO: 50929 - DNA, 968 bp, Homo sapiens
ggacctttgccaagcactggaacactgccaccatctctctctgcttatcagcatcccaccaccttcagcaatagaaactttgctaccacttcacctttggtgcttcaggattcaacttttaacactacatcaaatggaattttaagtcatcatgaccctttgctacaaatcaagacttcccagggaactgttccaactgctttggcatttgagcgcctgggcagttctgtattaagtaacagcataccacctcagtcttcaacataccgctcagctcaagagtctgcaccccatcttttacaacctcaatttagtttgttgccttcagcacttgggggatcccagcagactcctcaagcctacagttcaactctctttactagttctactgcttccattgaaagagctcttcttcgagaatgtagtgttattaaacaccatcagcggccttcaggtacccagtcaattcaggcacaactgactggttcacagcactccttacatagttatctatcaaattcaagtgtagttaattttcaggaaacaaccagggcagtcatctttatcctgtagcccaattggagattccactcaggtgaggcaacggagggttacaacagaaggacctcccagggtcttcagtgggaacttgcttcagtctttactcatctgcgattccatcatcagggtatcctccttctactacaaaaataaaaagctgttctacagaacaaccactgacatcaaccaagacccctaaacctcaaagtataattcctcctgtgcaaacactaagctattccaaacctttacataatcagagttctgtaatatcgggccaagcacaaatttattctacagcgcagctaccaagccttttatcaagttagtcagtcccaaaattacggtttagtacagccacataatgtgccatctattgtcattcacaggtttataggtccagcaag

SEQ ID NO: 50930 - DNA, 459 bp, Homo sapiens
  misc_feature (1)...(459): n = a,t,c or g
ttgaacancngctatgacatgattacgaatttaatacgactcactatagggaatttggccctcgaggccaagaattcggcacgaggacaggaagaaacaacaggaacacatatagctggaatgcagatgggatctgtgctacttacgctagccatgggatgattagaacaagataagagacatgaggaagacttcttcaaggaggtgctcaagccatgttttggaaaagagaactcaaggtctggcagggagaaaggagcaagagtagactttgagtctttgcttcagatgcagatcaagatgtggcaacctgttgtggagaactgggtcccttgagcctgtgctgnctctttttttntggtggctttgtcatttggaacnnngcntnatgggctgnnggntganaanctctcccttntanatgggacnnttgtctatnntnnactctntccgncctat

SEQ ID NO: 50931 - DNA, 796 bp, Homo sapiens
aatttaatacgactcactatagggaatttggccctcgaggccaagaattcggcacgagacagtggatgtgagtgtgtagaccttgtacaatagagcttataggctaatgagaagacaggaagaaacaacaggaacacatatagctggaatgcagatgggatctgtgctacttacgctagccatgggatgattagaacaagataagagacatgaggaagacttcttcaaggaggtgctcaagccatgttttggaaaagagaactcaaggtctggcagggagaaaggagcaagagtagactttgagtctttgcttcagatgcagatcaagatgtggcaacctgttgtggagaactgggtcccttgagcctgtgctgtctctttttttctggtggctttgtcatttggaacaatgcataatgggctggaagctgagaaactctgagctgagggcaagtagagctgcagctgtctggcgccactgtaatgctgtctcctcctctgagtgagttcatcctggaaacattttctcccataagacatgcacaggtcttacgtttacatgtttcactgaaagaaatttgattccactgctgggatgacaaggaagactgaagaaacctaatcctaggtgctgccactgggacaaacaagaagcaccagacacagtgctgttttagggtggggcagaattatgctgagggaaaagttattatcactctttaaggccaaggaaaccacaatttttaaagaagcttctagaaattctacccagtagaaaataaagataaacttctgt

SEQ ID NO: 50932 - DNA, 376 bp, Homo sapiens
ttttgaaggtttatagaatatttatttcttttttggttgcagctatctccttattgactactttcttgcatgtacggtaatttcgatcacctgtttcatatcattacatacccacaacgcggttgttaaggctgaaatatttcactgtatggatgtgcataaattactgaacccattccttacttggccatgaaaaagagtaagtcgatatgacatactgatgtgaaatgatgtgcaatagtaaatgaaaagaagcaagttgcactgatagcgtgtatcatattaacttagtaagacatggaaaaattaaatgtgtgtgtttttagacctggtctaggcatgcaaatatttcagaatgagacatagaggtctatta

SEQ ID NO: 50933 - DNA, 1693 bp, Homo sapiens
aaaaacatgatgagaagtctataaaaattgtgtgctaccaaagatctgtcttatttggcagctgctgcctcacccacagctttttgatatctaggaggactcttctctcccaaactacctgtcaccatggcccaccgatttccagccctcacccaggagcagaagaaggagctctcagaaattgcccagagcattgttgccaatggaaaggggatcctgggctgcagatgaatctgtaggtaccatggggaaccgcctgcagaggatcaaggtgggaaaacacttgaagagaaccgccggcagttccgaggaaatcctctttctctgtgggacagttccattcaaccagagcatcggggggtgttgatcctttttccacggaggaccctcttaccagaagggacagccaggggaaagctttttcaggaaacatccttcaagggaaaaggggatcgtggtgggaatcaagtttaggaccaagggaggtgctcctcttgcaggaacaaacaaagaaaccaccattcaagggcttgatggcctctcagagcgctgtgctcagtacaagaaagatggtgttgactttgggaagtggcgtgctgtgctgaggattgccgaccagtgtccatccagcctcgctatccaggaaaacgccaacgccctggctcgctacgccagcatctgtcagcagaatggactggtacctattgttgaaccagaggtaattcctgatggagaccatgacctggaacactgccagtatgttactgagaaggtcctgggctgctgtctacaaggccctgaatgaccatcatgtttacctggagggcaccctgctaaagcccaacatggtgactgctggacatgcctgcaccaagaagtatactccagaacaagtagctatggccaccgtaacagctctccaccgtactgttcctgcagctgttcctggcatctgctttttgtctggtggcatgagtgaagaggatgccactctcaacctcaatgctatcaacctttgccctctaccaaagccctggaaactaagtttctcttatggacggggccctgcaggccagtgcactggctgcctggggtggcaaggctgcaaacaaggaggcaacccaggaggcttttatgaagcgggccatggctaactgccaggcggccaaaggacagtatgttcacacgggttcttctggggctgcttccacccagtcgctcttcacagcctgctatacctactagggtccaatgcccgccagcctagctccagtgcttctagtaggagggctgaaagggagcaacttttcctccaatcctggaaattcgacacaattagatttgaactgctggaaatacaacacatgttaaatcttaagtacaagggggaaaaaataaatcagttattgaaacataaaaatgaataccaaggacctgatcaaatttcacacagcagtttccttgcaacactttcagctccccatgctccagaatacccacccaagaaaataataggctttaaaacaatatcggctcctcatccaaagaacaactgctgattgaaacacctcattagctgagtgtagagaagtgcatcttatgaaacagtcttagcagtggtaggttgggaaggagatagctgcaaccaaaaaagaaataaatattctataaaccttcaaaaaaaaaaaaaaaa

SEQ ID NO: 50934 - DNA, 277 bp, Homo sapiens
ggccaacaccttaagcctgtgtccacgggttaaaaaggtggatctcaggtccctgcaccatgcaactttgcacttcagatccaacgaggaggaggaaggcgtgtgctgtggtctctcagcaaacctgctgggcgacagcggactcacatgccttctggaatgtctgccgcaggtgcccatctccggtttgcttgatctgagtcacaacagcatttctcaggaaagtgccctgtacctgctggagacactgccctcctgcccacgtgtccgggaggcc

SEQ ID NO: 50935 - DNA, 485 bp, Homo sapiens
aaaagttaatgtgaatactgaggaattttggtccctcagtgacctgtgttgttaattcattaatgcattctgagttcacagagcaaattaggagaatcatttccaaccattatttactgcagtatggggagtaaatttataccaattcctctaactgtactgtaacacagcctgtaaagttagccatataaatgcaagggtatatcatatatacaaatcaggaatcaggtccgttcaccgaacttcaaattgatgtttactaatatttttgtgacagagtatgaaagaccctatagtgggtaaatttaggtactattagcatattattaatttaatgtctttatcattggatcttttgcatgctttaatctggttaacatatttaaatttgctttttttctctttacctgaaggctctgtgtatagtatttcatgacatcgttgtacagtttaactatatcaataaaaagtttggacagtaaaaa

SEQ ID NO: 50936 - DNA, 451 bp, Homo sapiens
aaaattcaaggctgtttccaaggcagcctcaaaaagagcctgggtgcccagggggtccttcgtttctgtgtggctgcagaggccaggagtgcagtgactgtctcactgcctagtggttgtggctcacatcctgccctgatggagaggggggcctgtcgtccaaccctctctgaaaaactgcagtagactttaccatttcaggccccacctaatgttctttccttccttccccctacattcttcccgcccctttcatagttaagatgcataagctgagcaataaccccacttcctgatttccctgaaatatgagcccagaagcagcaggtgacagggagcttcccttaccctgggggtgggtgggcacacagaccacctcctgtccttgtccccttgcaggtagtatttcacagtgttggtgttaactggggaggaagggaggaagggagct

SEQ ID NO: 50937 - DNA, 662 bp, Homo sapiens
gcaggtggatgctaagaccttaggaaattaggtagtctgcgtcaaagctgaagggtaaactaggagacctggttacatctttagatctcagtgctaaattgtgaaatctcctgtttgcctgacaagaagaagcagcattagccactgccggggacaagacagcatacttgatagaccaattgcttgatccgctatggcaaatcctgtgtaatacccaggattcagttactttcaaggaagaaacaagaacagaaggttcaggaaagtcccacaattctaactgaggaacaaccaaaagcctacgttacaaaagcaacagctaaaatgaccaggtaggctcacaacactggtaacagactgaactgctcaaattccctgagagttcacatgaagaccaaagcaagaatttgcagatcacaaaagatgagacagcctctgcagagtggagcgaagctggttagccagcagagcccagagtttcctcagccatccacagtgtccctgccctacatcaccaagaatttaaaattgcctggcagggttgatcgaaatagcctaagaataaggttttgaacttacctgggccatactgcgtgcatgaacacacggacatctgaaaactgctgtcagcctctattcccaccacctatcctaaccctctt

SEQ ID NO: 50938 - DNA, 364 bp, Homo sapiens
aaaatagtttgccaaagaagtttctgaagtcttcacagctcttaaaagccaggccagtactgactgtgtggtggtaaatgctattcattattttcttttctttcttccaagtgcatgtgtgtccttgtcttcttaagtctgagaggttgctggaaaggactgttttcttgtacttgttcatttgtgcctcagccattctagttttgttgtgtgttggaggacagtctaatgaagacaggataaatgtgattctgactagtgggaaatttcagattactttttaatgattggaatgggctataagatattgtgctgaagagaaaacagttgttctgttcactgctttcattgagaaaatgtggaa

SEQ ID NO: 50939 - DNA, 358 bp, Homo sapiens
tttttgctttatttaagctaggctagcctccaagctggaagctgaattgacagttgaaaaataatgacatgtatacaaagtatgtttgaaggattgcagatgcaggggcaccatatgctaaaggagtgttggaagctcactgcagaagatgacaaaagcagactgatatgtattatttgctgaaatataagctggaggcacaggtgaagattgccaaacctaatgaacagtttggcaaataagacaggctgtcaggccatggcagttcagcagtgggcgtgctgcctgtgaaccaagtcatttgttccagaggactacacttaaataccacaaataaaatcttccttgtcactgataa

SEQ ID NO: 50940 - DNA, 2362 bp, Homo sapiens
  misc_feature (1)...(2362): n = a,t,c or g
tttttttactgtcttttgaattttaatgacactaatagctttatttaacaaacactgagtgactactatgtgcaaagcactatgctaggtgcatgaaagatacaaagatgaaaaaagacacagtccctgcccacaaggagcgtataatctagtgagggagacaaatacacaaataactagaatacaaggcagtaaacaagagtgggcaagtgctgagtgtggcctgagtgtgatactaactagcctcaaggttccaatttgaaacacgatgaaatagtgttgtctgcttcgaaaatcccatcccaagtttggcataatggaagttaaatggccctacccaaacaggtggaaataacagagtaggccaggtggaggcgctgtttgaaagtactatcacacctacatacatggtgctgatataagtacgtaggtacagctaaaaaagaacttatatatatatatatatcatatatatatatatcatctgtcctttggttaatggctatagctactgttttaaacaatatacttttatataaaaaggaatttgtataatcccagaaaaatcaatttaaggattaatattaattcaagaaagaatcctgccataggcaattttatttactaattgattaagtcttttctctaaatatctataaagctctgtagcaattaaacagttagacatctaagtattgctgagtagaaacctcttatgttcagccttctgaaataaatggtcacatacctgatatatagcactattctaacagcaacaagaaggccttaaagagattttaagaaaaataatttttaatgcttcaatgcaaatggagtacacgctgattaaatacaactcaatgttctttgaaaacatctcaatgacagcgtttgataccagttaaggccagcaaaattgtactgaggaaaatattattacatgtactgtctttcattggtttcatgtatcattgcttatgactatggcaaccaaatcttttctttgacaactgcatttatgggaactgatgagctttgatttatgagctttgatttgcttttagttcataggccaataacaagtgctgaccacctcctcttggtagtgctgtctgaaataactggcaaagtagaagcacatttcctggctccttttcccacttcctgaattggagggttcaccaccttagcctgtttcctttcgtgtgtcactgtggtcctgggtcctctgctgctttctctcaaggaaacgagcccgtgcatcagatatggatttgtcatcatttcttctttgcattttctttaagacgtctttcgatattccatcctttagctgctttacattttccttatttgtccatctccttcttgcatcttctctcacttcacgtcgggccacactgctcaaatcatgtgcattaaattcatgcaacttgggtaacaagtctcttacccattcataacggattgggcatacaattcttgcgtagactttggtggtaaccaatacctcatgaaaaatgatccattcaagtttggtttcctgttcatgaagtgctgaggaaggatgaatgtgaactgggcttccacgaccatccattgtgcaaaacgttctcccaacagatcttcgagctacatttttgaaatagcccgcacaaagacatcttcgtagtacttcatgtttagggccttcaaaggtctcttttgggaaatcactttgctgtttaagcttcctgattagttctcgaagttgagcttccacacgaaatgcagaaaataagcacctccaatgaatccagtgtttttggcaccatgaagctggagctccacttgatttgcattgttcaaagatgacagctaaagttgcaaagtcattaaatcctccagctttagctgccaattctcgatgtctctgttctgcttccttctggtactctggatcaacaggtctaatgaagacgttttccacagacaacattgctgctattggaagtagtagatcttcacaatccagggaagcagcttttattactgcacatgtcagatgtggaggcaaaggaaactccaccatagacaaacccaatctggtgacatggccactcctgtcaatagcatcacactggtaaagttgtttaagagcttctaaaataagtctctcattaggtggatccaaatagggaaaccttatgacatcgngtatggcaaggcactttaaggtcagaactacagatgtcaaactagttctcttaatttcagggatcacatggtcaggcatacactggttcccaaaatctttactatagatccgaaagcattttcctgaagaagtcctgccagctcggccacttcgctgtaatgcctc

SEQ ID NO: 50941 - DNA, 2052 bp, Homo sapiens
atcattcatattttattaccatggttttcccatcttctatctaagagtagcatgcaagatcttgtaaaatgctttattggaaccaagaaatgttgcgcttaaagcttacaaaacagagacagctaaagctttctttcataagcaacaattgtcttctccatccccacctcattggaactgacatgatgaaggatttgaaagtttcataacttaactcagtgaagctcagtagtacatttagtattggttatacaacatttgtttaataaatgcaatgaacaaagctatacaggaactagacattgaagcagaaaaggtggttttacagtccctgcattaacctctaattcttactaccctggccaagaaagcattttcacctcctgcgctttccttcctgtgtgcttgtggttggttctttcttctcaggctttctcattctgatgctgagatagttctgttcacttagcttaacttgggacagtgacacagggtttgttctgtactttcttttccaccccaccccccaccgcaatcctcagtccccttcctaggaccattttctactcctagcattaagaggactcatcgttatatacttggagatggtccagttctgatagagtcccctggaagactcaattctacgtcaccctcatgatttcctgttaattccactacggctaatgttctaggaagacacccttatctctgggctcagatgggaacacctcccttagactatcctggactacctgctatttctcagccatgctttcattggtcccactgaattccctagatccccagcagttcccacactctgtatggtcctgcctcaaccattaattctacttatccatttgtttaggaataattattttctttttttcccctctaaactgggtaatttataacacgagcaatttttgtatgtttaaaggattaccatccctagcctgtattgttgctttgctgtgagggaacggttgggacagaaaaagtgtttgtgtagctctgaaacttcaatttctaggaatgcagctactcactggggcttccctgcttgaagatcatgggcttttcccttccactggagaccaaggaaaagtcgagagttggataagggatctggctctgagttctatgtttcctgctgcttgtagagaggcctgaggatgatggggttgcaaatccagagaaatgttcagagatgctgctgctactgctcttattacccccatgggatgggggtcatttgtcttgagggtcctttctccatttaaatttatggtccttccagtctcttgttgagcttcaaatgtttgtcttcacagagaaatatagtcctgtgtccactgcaaaaaggagtaccatcaccaagcagaaagagacttggtacccaggtggagagaatgatgagatggttgacactgccaaaccttgagtgatggtgatgttcacagtctctgaagacacatttttactcccaacaagccccctgcagaagtaggagccgctatctttgagtgtggcttttggaatgtggaagtcagaattatgatgaaaatacttcctgtctttgccattctgtaaatatgtgaccttatgcagagcagtgttcttccagctgtgacacctcaggtgaatagggtcttcctccttgaacacccaccgaggggcctggagcaacagccagccgatatggacttctagctgcaccgggtcactgagggtggagaggtttgtctggcacctgtactctccactgtcgttgactgtggcagcgtcaatgaagtagctcgaggcctggcttgagatgaggctctcattgtgaaaccactgtgtggaattgtcctcaggggagtaggctccctggcacttcagagtcacactgtccttctcaagcacgctgtaccattgaggctccaggaacaccacagcctttgggagatcttcagtccgcatgccagctgaaactagaagtagcagagcagttgggaggagcagctgccacatgatgccacactggagtggacaagtcaccaaaga

SEQ ID NO: 50942 - DNA, 1413 bp, Homo sapiens
ttttttttaaggaatcaaaaacttttattcagaataagcgttagaaaatgaaggtaggtgcctcataaatgcagggccccagagtactcagaaagggattagaaaataattacaaaaatattttgccacatattaacatgaaactacaatcactggctgtaaaatatagtcaaatgcaatcaagctgaaaagaaaaggtggaaatctccaggttatctgcccaggtggcaggaaatcgacagccccggagaacgcaagtgctgctgtgccgccaggcccagggctatgatccaaagtgacgggcagactaccggcctgcaccaccccactcaggctgcacacaagacagccagcttaaggatctccgtgggctgctacctatgtcacagagggctgattaagggcttgcagtgttcccaaatagggcctccaatgagaggagtggaagctgcattacaagaaattcactggggctgcacttgactcttcaacttggcgagtctcatgaggcactcgtccctccactgcctcctggcagctaagtgctccgggtcatcagggaccttcatgcacatgtcctggttaaccttctcagcagtggccctggaaaactctggaatgggtccaaaagtctgtaggacatgttttatgccttcgctgtatctgtcgcagtagcttaacataccttctgcattgagatgcatggtttccaggggtccaatgaatgcataccgcatgcccaacccttctgacatgacaaggtccaggtcactaggagacacgattccttcctccactagccgcccaggcctcgctgaatgattgcaatattgccaggcggttcagaacgaagccggccacctccttctggactcgccatggggcactgtccaatcttcttcatcagggcgtgggttctgtccactgtcgtaggggccgtctccgggtgggggaccagctcaaccagcgggatgtagtatggcggattcacaggatgagccacgatgcattgcttcacatggaccaagccagcaaacaacttggaaggcatgagacaagaagtggaactgcttaagatcactcgatcatcaatgatggaatctaactgagcaaaaaccttcttcttcagttctagatcttctggaacacattcctgaatgtgcatggcgccctctactgcttcttggatattgggacaaccactgatgagtgacagctgctcttccacactcagggagcctttcagagaacctgcctgctccagcaacttcatctcctttctgatgttttccagggcgttccttatctgctgttgctcaatgtcatagagtttcacctggaagcctccactggcaaacagcatggcccagcttcacccaatgactccactgccaacgatcaccacgcagccgg

SEQ ID NO: 50943 - DNA, 1031 bp, Homo sapiens
ggaattcggcacgagattcaaagcaacaccaccaccactgaagtatttttagttatataagattggaactaccaagcatgtggctcctggtcagtgtaattctaatctcacggatatcctctgttgggggagaagcaatgttctgtgattttccaaaaataaaccatggaattctatatgatgaagaaaaatataagccattttcccaagttcctacagggggaagttttctattactcctgtgaatataattttgtgtctccttcaaaatccttttggactcgcataacgtgcgcagaagaaggatggtcaccaacaccaaagtgtctcagactgtgtttctttccttttgtggaaaatggtcattctgaatcttcaggacaaacacatctggaaggtgatactgtacaaattatttgcaacacaggatacagacttcaaaacaatgagaacaacatttcatgtgtagaacggggctggtccactcctcccaaatgcaggtccactatttctgcagaaaaatgtgggccccctccacctattgacaatggagacattacttcattcctgttgtcagtatatgctccaggttcatcagttgagtaccagtgccagaacttgtatcaacttgagggtaacaatcaaataacatgtagaaacggacaatggtcagaaccaccaaaatgcttagatccatgtgtaatatcacaagaaattatggaaaaatataacataaaattaaagtggacaaaccaacaaaagctttattcaagaacaggtgacatagttgaatttgtttgtaaatctggatatcatccaacaaaatctcattcatttcgagcaatgtgtcagaatgggaaactggtatatcccagttgtgaagaaaaatagaatcaatggcattactattagtaaaatgcacacctttttctgaatttactattatatttgttttcaatttcatttttcaagtactgttttactcatttttattcataaataaagttttgtgttgatttgtgaaaaaaaaa

SEQ ID NO: 50944 - DNA, 395 bp, Homo sapiens
cccctgacctggccaacagccctgattctgtcctccaaacctgatgctggctggcttccaatagcctggctcattgctattctacaccagcccctctctgccctcaattcagcccctccactgcagtgtcagaattgagcctcaaaatgcagcctgctacagcctctgcaggggtctccatgcttccaagcctgcttgaaactttctttatggcaggcatggggaggggggagggcaggccgtgtgtggctgtcaccagacctggctgccttgggcctggctgctttgggccgagcctttgcatccctagtgggtcctcacagctgcccataaaacccagcagggtaaaaattcttcgttttgtcatactggagcagccagcatgcttaaccaag

SEQ ID NO: 50945 - DNA, 368 bp, Homo sapiens
  misc_feature (1)...(368): n = a,t,c or g
gcgcgagaagcgcttctgggcgcaggcgcctggctgtagcgactggttgcgggaggctggactctggtgactgtaagcatcaagtgtacctgatttgtgaacctatcttgcttcagttggtttcctcctaaatattaggcagatgggattggctggtctgtgctctgctaggtgaaaaattagacgatttcaagaattggagctgaatctgatgttaagtaatggcaacaggtgacttaaaaagaagcttacggaacctagaacaggtgctccgcttgctaaattatcctgaanaggtggactgtgtangtttgataaagggagacccagcancatctttgcccatcatcanctattcttttacctca

SEQ ID NO: 50946 - DNA, 311 bp, Homo sapiens
aggacacctatttcttcaaacataggaagaaacatcttatctgcatgatccctcctggggagctatcttacggtcttatgtgataaggtgacctctcctttgggtgagtggagtaaaaaagcgggcgaggtatctggaatatgcttctatccctcctaacctcccctacaaacaaagctttcctgaatgccttgtccttagcttcctggactctgaacctagcttggctaaattttctttttaaagcatcagcataaatcatgaataccttgggaagggaacattaaccatcagccggcaaagttaaaaat

SEQ ID NO: 50947 - DNA, 637 bp, Homo sapiens
aagcattttcatgtgctacatgggaggtgagctttgcctctactgcccaagggaccctatatccatacatatacaagacaaaagtaaaaaatacgaccacacatttctctgtacatttcatgcaagctgggcactatgtgaaaagaacatatacaaagcaccctttccagggtcaaactctcacaaaaatggctgattaatacgcagaaaagcctgcacccatcaaaggtctgtgctggcaaacagtgaaactaagggctgccggtgtccttatttttcttgtagcaatgcagggatgttgatgttccaaccaatggcttgccggtcaaacccacaggtgaacagattgcacacggggtggtcttcactccatgccgagcagcataccattctcctgtggccctgtcggctgctccggggaagccgcgccaggcgcactgcctgacatatcaaacagtctcacttgtcggttgtcatgggggagggctatgattttttggccgacacatacattgatcctgttaatggcagagtccgtgcgaatagttgcaatgggggatctcatatttttcaagtcccagactttcaccgtgcggtcatcggctgctgaaaccacgttgtctcccacggtgaacac

SEQ ID NO: 50948 - DNA, 327 bp, Homo sapiens
  misc_feature (1)...(327): n = a,t,c or g
ttttctctagatctggtactaatttcatgtggaaaataaatcgttaggaggttttcattttgtacgttttggctgcaaacaaccacaacccagtctttaggttttcactgagggatttttgttttagcccaattattgtatgacatgtatctgctccagaggttcttataggtgaaatgagatttttatgtatctgtattcaaacacnnnnnnnnnnnnnnnnnnnnnnnnnnnncggaacatatagacatacctctgaaaatacaaccagccatataatgtaagncngttgtgtgttaatgaatgataggggtataatacattatg

SEQ ID NO: 50949 - DNA, 525 bp, Homo sapiens
gcaagaggaagactcaagacttcctccagaggaatttgtcttctctgccttcactcagcatgggaaccagtgttcatcctgcccttgtctgtatcagatttggcagtgaggaggcttggggagcacctaccttactttcagggacaggaatctattgctcatacttctgcttcccagagttttgccaatctaaaggcattgtcatgtggcctgcctttcctgtccacatccccacctctgatgctcaagatgctatttccaagatctcttactgctgcttctcctggcttactggccagaaactagctcactcaaggctgccatccttcacttgcagcctccctgccattctccttcactggttggcaaccttgagagttcaaagaaaatcaacctctgtggtggtcaactaaaggtattaggaaactaagtctgtggctcttctctgctgatggaaacagaagggcgccaagcaatgcctaaaaagatctcgccaataattcttgtctttgggtgttggagctg

SEQ ID NO: 50950 - DNA, 268 bp, Homo sapiens
tagtgaaattacattgaagttttatatatgacccccaatgcatataaaaccatttacctccacattataggataggatatcatgaactacaaagatactcaaagtgctatagatgagttaatattgatgtaatacattttcattaatatacccaattttaattggatgattgaaaggacacgttgaagtgtttttcatgatttttgctatggccccagcttttactggagtttttaatgcctttgatgactccagacactcaactctg

SEQ ID NO: 50951 - DNA, 599 bp, Homo sapiens
ttttttttttaaagtatacacacatatattttttaaagttttaaagcttttaaagcaaaagccggcccctcccctctcccagagggggcggcccctcccctcagagtaggcggggacagcagttgcatggacagctttccttgtgagccacaggtccctctggacatactgctgcctggccacaccccccttccctttcatctttctcattgaccaatgggcttggagcattaaggccacgcccctgttctgcattctatgggggccctagttgtgcctcctcgggctcagtcacacagctgcctggtaggcaagtggaggtgttcatcagtgctcactgggattttgctcacgtggccccaaccccgcctccctccccaccccgcaatggcagaagaaactcaacagagcaaattggccgcagcaaagaaaaaggcaaaggttggaagagacctttagaacagctggtccctatgccgacccggtgcccgcactaagtttggcatcaatatgatggtctcctgggagcggggggccacaagttgtctaaggatggctgcattggtccatgtcagaaaaggggcgggtcagaaactccc

SEQ ID NO: 50952 - DNA, 429 bp, Homo sapiens
  misc_feature (1)...(429): n = a,t,c or g
ctcacacgcctgcagttcaccaccaccgtggtctcttgctgtcccgcggagctgcagactgaagggagcaacggcaagaaagaagtgctgagcggtttccaagtggtgctggaagacacagtgcttttccctgagggcgggggacagcctgatgaccgtggtacaatcaatgacatctctgtgctgagagtgactcgccgtggggaacaggctgatcatttcacccagacacccctggatccaggaagccaggttctggtccgggtagattgggagcggaggtttgaccacatgcagcagcattcagggcagcatntnatcacggcagttgctgaccatctatttaagctgaagacaacatcatgagcaagtagctgcattgagcagagcgnaatgaaaaaatcanagatcgctgtctgtgaatgtcta

SEQ ID NO: 50953 - DNA, 2233 bp, Homo sapiens
acaaaagctgaccgtatgtcctatcatcaatggggaagaccaccttcgtttgttgaactttcaacacaattttataactcggatacaaaatatttctaatctacagaagttaatatcgttggatttatatgataaccagattgaagaaattagtgggctttcgactctgagatgtcttcgtgtccttctgttggggaaaaacagaatcaagaaaatctcaaatctggagaatctaaaaagcttagatgtcttggatcttcatggaaatcagattaccaaaattgaaaatattaatcatttgtgtgagttgagagttttaaatcttgccaggaactttttaagtcatgttgataatcttaatgggctggattcactaactgaacttaacttgcgacacaatcaaatcactttcgtgagagatgtgggataatttgccctgcctccaacatctctttctcagctttaacaatatatctagttttgacagtgtttcctgcccttgctgactcttcttccctctcgggacatcacctttgatggcaatcccatagctcaagagtcatggtacaaacacactgtccttcagaatatgatgcagctgcgccagctagtatatgaagagaatcacggaagaagaaaggcgtatggcatctgttttagcccaaaaaaggagggaagaggaaggagccgggaaagtcataaacaatctttgcttaaggagaagaaaaggttaacaattaacaacgtagctcgacagtgggacttgcaacaacgagtagccaatattgctacaaatgaagatagaaaagattctgactctcctcaggacccctgtcagattgatggaagcaccctctctgcattcccagaggaaacagggcctctagactcaggactcaacaatgctttacaaggtttatctgtcatagacacataccttgttgaagtggacggggatacactttccctatatggctcaggagcactggaatctctggataggaattggagtgttcaaacagcaggaatgatcacaacagtctccttcactttcatagaatttgatgaaatcgtccaagtgcttcctaaactgaagattaagtttcctaattctctgcaccttaaattcaaggaaacaaatcttgtaatgctgcagcaatttaacgcactagcccaactccgtcgtattgaccagttgacaattgatcctcaaggaaatccagttgtcaattttacactctggaaatactatgtactgtttaggctaagccatttcagtatgcagaaaataaatggaacagaggtgacacagaatgatatgataatggctgaaaggctctttggaatcctagcacatgtagcatcttctgagttaccccagtatccgtcctgatttcccattctgggtgatgccaggaaaaagcaatttcggtatctactagaatccaaaggaaaaaaacctggtattatcaacgaagaaaataatgacagcaaaagacttgtaggagaaaacacaaatcgtgctacattaaattatactacaagagacttttataatgaaaagctagaggaaataaaggaaaagaagaaattctgtaaaacatatatagaagaccttgtgaaggaagccacagaaatcaacatgaaaaatgaggctttgcagaagctttggccacagatgttcattgagcttgttagggatgcagtcatagaaattcgcaataaaaattcctatatgaagctctgcctacagcagataacagaccaaaaataaaaatggcctttagttacagttgattttggcagttttattttttgaaggttgaaaatatgcaggttatacatgttaaaacaacaacaacactatcctataaactagaaagactagtataaaagcattattgcccactgttctcatagctaaaagttaagaaggaaagaaggaaagcaggagaaaggaaggattaattgcctgtatgtgaggaccaaacaacctttgggaactaaacagttttcagagatggcgtggcactgcatccttggttcttgctttgattggtgccctgctatagcccaaagcacgtagtatttgctgatgattcagcatgagctgcatctacctacttttagctgataattttcagttatttccctttttattttatgtcatgatttcaaagccaaaaatatgttctttttatgagtgaagaataaacttactaacaaattagtc

SEQ ID NO: 50954 - DNA, 902 bp, Homo sapiens
tttttttttataatgcctgaatcttatagtagattccaatttattcaaagattatcacagattggattaaaaagatcatttaatttttttcagatttgctttaaatttacaaattacattgtacataaatattaacttagataaccacacatagggaaagcagatacatggatcattgcagaaacattaaaatttttaaaaaattttataaaatataaagcaaaacatgtaactcacacaatactaatatgaagccacatgacataaaaaataaaattactctttaagaagcaacttaaaattaaatctttggggaactattttgacataattaaatgaattcaaagaccaacagcttcccttatcacacagaaacaaatcacaaaattttctacaatctatatgcattatcagttagttctaaatgtaatctcaaacattttactagcaactttgatttccttttgaaataggcttctgtacatatgcatttatatacaaacatttattaaacatgattttaaaacaaaatgtatgtacaaaagatcagcattcctataaataaaaacattaggtggcaaaaaggcacttgtaagtaaaaatctacagtagtttttacaaaacagaaacacattttaccttagatactgtacaataaacattaattcctataccaataatgaaaatgctaggttactaatgttaatgatgtaactttaaaaaacaaatttacatatatctgaagttcatttaataaaagcaccgtgattttctcctaaattcatcttgatgcaaagtaaaaacacaattcccaaaaaaccagtgttcgccatttttcgagtttaaaagtttttgtatttctaaattgaaaactgtttgtctgaaattagcatagtgtaaaa

SEQ ID NO: 50955 - DNA, 277 bp, Homo sapiens
  misc_feature (1)...(277): n = a,t,c or g
gcgtcgacgatgaccacagaggaggatcactcagaaacgcattttctcaaaaactataatttctttagtctcctgttcaggtggataattaaataaatggtgattttcccaaaatgcctttagaaatggtggtcctnnnnnnnnnnnnnnnnnnnnnnnnnnnnnnnnnnnnnnnnnnnnnnnnnnnnnnnnnnnnnnnnnnnnnnnnnnnnnnnnnnnnnnnnnnnnnnnnnnnnnnnnnnnnnnnnnnnnnnnnnnnnnnnnnnnnnnnnatttt

SEQ ID NO: 50956 - DNA, 503 bp, Homo sapiens
atgtccctgagacccaggaagggccgtgcgcatcagctgcatctggcaccccgctgcagggatggcctcctgggctaagggcaggagctacctggcgcctggtttgctgcagggccaagtggccatcgtcaccggcggggccacgggcatcggaaaagccatcgtgaaggagctcctggagctggggagtaatgtggtcattgcatcccgtaagttggagagattgaagtctgcggcagatgaactgcaggccaacctacctcccacaaagcaggcacgagtcattcccatacaatgcaacatccggaatgaggaggaggtgaataatttggtcaaatctaccttagatacttttggtaagatcaatttcttggtgaacaatggaggaggccagtttctttccctgctgaacacatcagttctaagggatggcacgctgtgcttgagaccaacctgacgggtaccttctacatgtgcaaagcagtttacagctcctggatgaa

SEQ ID NO: 50957 - DNA, 353 bp, Homo sapiens
ggtgagaaggaacattgccactacttggatctagccttgtccctttataggtaggcaaactgaggaccagagtggttagtggtctgtttgtggtcacacagccagtcagtggcagaagacccagattctgaaattactgccctgcctgggagaaaactgggaatgacagtattcctgctcttgagacaactttgcatctcaagcagtggctgtggccctgtccaaattgtcatcctcattctcctgggttcccctccctgaccctggaggacaccaccttttcagccttgctgatcttttccatggcttgtgtgggctgggctggtgaagaatccacttgcactgctggatgc

SEQ ID NO: 50958 - DNA, 243 bp, Homo sapiens
gaaacagaataacgaaagagaaagtagctagactggagggaaaagctgcttcagaatgagttgtcaaggaagcctctttgcaatcagaaaggtgagaaggatttagtcaggcaaatatcaggagtaaattattcttggaggaaagtaagcccatgcaaaggccctggggcagagtgggcttatttgataaagaggtaaaagggtcaggatatctgtagcaatagtggccaagggagggagagg

SEQ ID NO: 50959 - DNA, 607 bp, Homo sapiens
ggagcagtccccagagagttgtggcatgaattctaggcaaattggttaaaagtcaagttcatgggatgatgaaggctcagtggatgacacatccagcgatgctggtgggattcagacgctttcgcttttcaactcacttagcagcaaaggggatcagatgatttctgttaacgtgtgtataaaggtggcccatggcgccctcagtgatggtgccattgatgctgtggagacacagaaggacctcctgggagccagtgggctcatgctgctgcttccccccaaaatgaagagtgaggacatggcagaggaggacgtgtactggctgtcggccttgctgcagctcaagcagctcctgcaggctaagcccttccagcctgcgcttcctctggtggttcttgtgcctagcccaggaggggacgccgttgagaaggaagtagaagatggtctgatgctacaggacttggtttcagctaagctgatttcagattacactgttaccgagatccctgataccattaatgatctacaaggttcaactaaggttttgcaagcagtgcagtggctggtttcccactgcccccattcccttgacctctgctgccagact

SEQ ID NO: 50960 - DNA, 671 bp, Homo sapiens
aaagttgcaactccaatgtcagtgacaagccaaagatttacggtgcagattccaccttctcagtccacacctgtcaaaccagttcctgcaacaactgcagttcaaaatgttctgattaatccttcaatgattgggcccaaaaatattcttattaccaccaacatggtttcgtcacagaacacagccaatgaagcaaacccactgaagagaaaacatgaagatgatgatgacaatgatattatgtaaggaatatagtctagtctagatgcatttcaaaaggaaagttggttttgagcccagtatactgaactagaatattctagatcttgttttaccttaaaagactgaaatgtagctgcagtatttttcgtcagttaaaactgttagatctctttagtaaacatacaaatgtgtttttcagtaggcttcaattacaaacagttaagtacttgtttcttaatagtttcattaatgttgagtcctaatatggcaattctgtttttgagacacttttctgccttctatcactgatagtagcatttaagtttcagattctacagcctagtcagcagatttatctttgacagcataatttctgatctacatttaaatactactttattttataaggtaatatagttacttactgtcactagctttttttttttttt

SEQ ID NO: 50961 - DNA, 2727 bp, Homo sapiens
gcgaggagaagcgcagcgacggcgtcgggagagcgcgcctagccggctcgcgagaagctgttgaagttattgaagtacctgttgctatattctaagaaattaaaatgtccagaaatctgcctctgacttgacccaatgaaagaagcatatggcacttgtgaagataaatgttactcctccctttttaattggaacttctgcttaggacctgtgtatgacgtttcacctgtgatctgttctttcggtagccactgactttgagttacaggaaggtctccgaagatttgtgtcaaatgacgtcaatggccagcttgttttcttttactagtccagcagtaaagcgattgttgggctggaaacaaggtgatgaggaggagaaatgggcagaaaaggcagttgatgctttggtgaagaaactaaaaaagaaaaagggtgccatggaggaactggagaaagccttgagcagtccaggacagccgagtaaatgtgtcactattcccagatctttagatggacgcctgcaggtttctcacagaaaaggcttaccccatgttatatattgtcgtgtttggcgctggccggatttgcagagtcatcatgagctaaagccgttggatatttgtgaatttccttttggatctaagcaaaaagaagtttgtatcaacccataccactataagagagtggagagtccagtcttacctccagtattagtgcctcgtcataatgaattcaatccacaacacagccttctggttcagtttaggaacctgagccacaatgaaccacacatgccacaaaatgccacgtttccagattctttccaccagcccaacaacactccttttcccttatctccaaacagcccttatcccccttctcctgctagcagcacatatcccaactccccagcaagttctggaccaggaagtccatttcagctcccagctgatacgcctcctcctgcctatatgccacctgatgatcagatgggtcaagataattcccagcctatggatacaagcaataatatgattcctcagattatgcccagtatatccagcagggatgttcagcctgttgcctatgaagagcctaaacattggtgttcaatagtctactatgaattaaacaatcgtgttggagaagcttttcatgcatcttctactagtgtgttagtagatggattcacagatccttcaaataacaaaagtagattctgcttgggtttgttgtcaaatgttaatcgtaattcgacaattgaaaacactaggcgacatattggaaaaggtgttcatctgtactatgttggtggagaggtgtatgcggaatgcctcagtgacagcagcatatttgtacagagtaggaactgcaactttcatcatggctttcatcccaccactgtctgtaagattcccagcagctgcagcctcaaaatttttaacaatcaggagtttgctcagcttctggctcaatctgtcaaccatgggtttgaggcagtatatgagctcaccaaaatgtgtaccattcggatgagttttgtcaagggttggggagcagaatatcaccggcaggatgtaaccagcaccccatgttggattgagattcatcttcatgggcctcttcagtggctggataaagtccttactcagatgggctcccctctgaaccccatatcttctgtttcataatgcagaagtattcttttcaattatattgttagtggacttgttttaattttagagaaactttgagtacagatactgtgagcttacattgaaaacagatattacagcttatttttttctacataattgtgaccaatacatttgtattttgtgatgaatctacatttgtttgtattcatgttcatgtgattaactcttagaagtgttgtaaaagatgcagagtaagtattatgccccagttcagaaatttggcattgatcttaaactggaacatgcttttactttattgccctaacaattttttattaaatttatttgaaaatgcatcacatgatgaaaaattatagtagcttataagagggcatatacagtgaagagtaagttttccctcctactctcgatcttccagaagctgtacttttaccagtttctttgtcccaccaacttaaaaaaaaaaagtacaattcattgttttgcaaaagtgtatggtaggggcttaaaagaaactataaagttttatttgaatgaacactatgcactgctgtaactggtagtgttcagtaaaagcaaaatgatagttttctagatgacataaaatttacatttaatacagataagtgttcttcagtgtaatgtgacttcatgctatatatcttttgtaagacatttccttttttaaaaaaatttttgcaaataactgatctcaagtatatgtcatttactcaaaatctgtcataagcattactttatagctagtgacagtgcatgcacagccttgttcaactatgtttgctgcttttggacaatgttgcaagaactctatttttgacatgcattaatcttttattttgcacttttatgggtgacagtttttagcataacctttgatgaaatacactcaagtgacttggacttagatgcttatccttacgtccttggtaccttttttgtattaacaaacactgcaatttatagattacatttgtaggaagttatgcttttttctggtttttgttttacgttcaacttaggttataag

SEQ ID NO: 50962 - DNA, 3794 bp, Homo sapiens
cgccacccctgattgcggtgccacggactgctcctgctgggcggagaggacagattttgcaaagcggaggctgcgacgggtcctgcagggggacagtgaggaaagggccgcctcgtctccgctcctgggggaccgcagaaataagaatcaaactccacaatgacaacctatttggaattcattcaacaaaatgaagaacgagatggagtccgatttagttggaatgtttggccatcaagtcgactggaagctacaagaatggttgttcctgtggcagccctgtttacaccactgaaagagagacctgacttaccacctattcaatatgaacctgttctgtgtagtaggaccacttgccgtgcagttttgaatcctttatgtcaagtggattatcgagcaaaactttgggcttgcaacttttgttaccaaaggaatcagtttccacctagttatgctggtatatctgaactgaatcagcctgctgaacttttacctcagttttctagcattgaatatgtagttctgcgtggtcctcagatgcctttgatattcctctatgtggttgatacttgcatggaagatgaagatttacaagccctgaaagaatccatgcagatgtcattaagtcttttaccacctacagctttggttggacttattacttttgggagaatggttcaggttcatgaacttggatgtgaaggcatttcaaaaagctatgtcttcagaggaacaaaagatttgtctgccaaacaactgcaggaaatgctggggctctctaaagtaccagttactcaagcaacacgtggtcctcaggtacagcagccacctccttccaacagattcttacaaccagtacagaaaatagacatgaatctcacagatcttctgggagaactccagcgagacccttggcctgtaccacagggaaagagacctttgcgttcctctggggtggcactttccatagctgtaggactgctggagtgtacttttcccaacactggtgctcgtatcatgatgttcattggtggtcctgctactcaggggcctggaatggtggttggagatgagttgaagacacctataagatcgtggcatgacattgacaaagacaatgccaaatatgttaaaaagggaactaagcattttgaagcattggctaatcgagctgctacaactggccatgttattgatatctatgcgtgtgcattagatcagacaggtctcctggagatgaaatgctgtcccaaccttactggaggatacatggtaatgggtgattctttcaatacttccttattcaaacaaacttttcaaagagtctttaccaaagacatgcatggacagtttaaaatgggctttggtggtacgctagaaataaagacctcaagggaaataaagatttcaggagctattggaccctgtgtgtcactcaattctaaaggaccctgtgtgtctgaaaatgagataggaacaggtggcacatgtcagtggaagatatgtggacttagtcccactacaaccttagccatatattttgaggttgtcaatcagcataatgctccaattcctcaaggagggcgtggtgcaatccagtttgtgactcagtatcagcattcaagtgggcagagacgcatccgagtgaccaccattgctaggaactgggcagatgctcaaactcaaatccaaaacattgctgcatcttttgaccaggaggcagctgccattcttatggcccggctagcaatatatagagcagaaacagaagaaggtccagatgtgcttaggtggctggacagacagctcattcgactgtgtcagaaatttggagaatatcataaagatgacccaagttccttcagattttcagaaactttctccctttatccacagtttatgtttcatttaagaagatcttctttcctgcaagtttttaacaatagtcctgatgagagttcatattatcgtcaccattttatgcgtcaagatctgacccagtctctaattatgattcagcctatcctgtatgcgtattcttttagtggaccaccagagccggttcttcttgatagcagtagcattcttgcagatcgtattcttctcatggacacattcttccagattttgatttatcatggtgagaccatagcacagtggcggaagtcaggataccaggatatgcctgagtatgaaaatttccgccaccttctgcaagccccagtggatgatgcacaggaaattcttcactccagatttccaatgccaagatacattgacactgaacatggaggcagccaggcccgtttcctcctttcaaaagtcaacccttcacagactcataataatatgtatgcctgggggcaggagtctggagcacctattcttacagatgatgttagtttacaagtgtttatggatcacttgaagaaacttgctgtgtccagtgctgcttgaagtgctaataatgttaaagacacttaagaagatgaaataatattcaaatttcattttttcctttttccatttatctgtggaaaccaacagatattgctctatattttttgtattagtatggtttgagacaacatatggaaaatgttcacatttgtagattaagctggaattataatgagagcaataagaacaaatttattttgcttaccacagtgttatagctggttctagaaatttgaagtctttataacttaattatgtttaataaaaaatagagtctgcctcgtactacagatgtaactcatttgtatattgcagacagacccaaagtggcactgaattttcttgctcaccttttaaaaacttgttccttaattttagccagaaagcaaaaaaacaatagtaatgataaatgtgaacatttttgcttattcattgaatatttttctgtaattttcagcacttatgtatacactttttctgtacttactaggttaaggcagatttatttttatgatttgtttaggaattatttgattttataatggtaattttcatgatgataatgtttttggttatttggaaagatagtttagagatgaaaggtttttttgggtaacaatcccgcagctgacaaaaaatgtgaaatttccacaaaatatccaacttatgtgactaaacgcagtagtttttttaaaaggggagatagaaaataaatggttttgttggagtgcattttagtaagcctttgcagtaaaatgacggttgtaactactaaaccaaatttagttttcacagcatggttttgttgttttccccttgtttttcagaggtaaattttgcattatatccttcagtattttaacactattttggcagtttacacattactttttgtttttccttcctttttgtgaaatgtattaagttgtggttcttattgaaacagtattatataatgtttgcttaattatatcatgtgatgctcagttctattttgatttattcattagtattcacttttacctttaaagtttacttgtagcaaatatgtttacattgataaagccagatatgttttgacaatgaaatttacatatcaagtactgcaaataaaaggtggtgctatgatatatgcttaggaggacagttttaatgattgtacttgcatgaacacaatcatatgatggtaaagcagaaacttaagaaaaaattgtttatgtgttatattcaattagcttaaataagttgctttgttatattttatttgaattgaactacgctaggcctaaatgccaataaaatatacttttcactgttaaaaaaaaaagtcgacg

SEQ ID NO: 50963 - DNA, 358 bp, Homo sapiens
gaaattgtgtcatattataaatttaaaaaaaatgttttgactacaaaatctctatgtatatgcccagtttttgtagattgttgcttacgcttttcatatttttacccaaggagtaatcaggaattctaaaagtcttatgtaacaggatttaaaataaaattacacagaatctcaactgtactatattttgaaaatatgaatgattaagattattttttatatttttattaatatagagaaaataatttctataaaaatatgctttcagctaatgggggatcccattccatatttttttctttttctttttttttttatttctcccaggaaaaactcattcccgttcttttggcattaa

SEQ ID NO: 50964 - DNA, 789 bp, Homo sapiens
agaagctatctttgtctatttgggctaaccatagaatttcatttattttcctcacaatattttcctagaccaactccccatcattcacgtgttcctctttactcttactttaactattttgctggcttgcccgaaaatttgcctggcaagtcttccttataagacacatcatggtaagttttgtagtcctgtaagattctgcaacacagtcaagaattatacaatcctactagcaatatataaggacccaaaatgtcttctgctaagctcagaggctggggctaaagcatgaggactatgccagctatagaacttggactcataattcgctatccaatttttcatgcagttgtctagtcgggaagtaaggttggaaactaagtctcatttactgattcgtttatgggtagtaccgggatgaacccaccaccacaaagcaaattagacaacttaatgtgaaatcataccattggttgacgtttccttgagttgctacttcgttcatcttcacaacttaacaagtgcacggtcgaattattgtgcaagtggcttttggatatcctgattggggcctaagaagggcattcagacttgaattttaataggcagacagaaagtttgcctaatagttaatacgaaagagtgaaagaaacacaatattcagacaacccacattcttatcctggctctagcagtaaccacgtagccttggataagccattttccttcattaggtcctggtttaatttcctcatctttaaaatgagaaggttaaatttatcttagtac

SEQ ID NO: 50965 - DNA, 724 bp, Homo sapiens
cttgactgattacgaatttaatacgactcactatagggaatttggccctcgaggccaagaattcggcacgagtggcacccctcccctcaccacagatgctgagatggtagcatagaaatgatggccgggcgcggtggctcacgcctgtaatcccagcactttgggaggccaaggtgggtggatcacttgaggtcgggagttcgaggccagcctggccaacatggtgaaaccctgtttctactaaaaataaaaaaaaaaattagccgggcgtggtggtgggtgcctgtggtcccaggtatttgggaggctgaggcggaagaattgcttgaacccaggagatggaggctgcagtgagctgaaatcgtgccactgcactccagcttgggtgacagagcgagactctgtctcaaaaaaggagtttacaaacaagcttaaaatacaatttatcatcagtattaggtaatcaatatttgaaaagttaaactgacgagcccagtgttttaatggaggtaacagatttgctattttcaataaagctcagttatttccagaacttcttttccattatgcctgttttcttagttacatgaattttcatattgtttcagctgcttttcaaaatgaccagcagtacattttagtgtgatgggaaatggaataagccagccatactttaggaaatgtgatgatttaatttttgaaaatatgaactatttgaacttct

SEQ ID NO: 50966 - DNA, 1498 bp, Homo sapiens
  misc_feature (1)...(1498): n = a,t,c or g
tttttttaaaaaaatctctttaaaagcaacccattgcaaggtcaaaaattcacggaaataaaaaaactacaaaccgggtgaattttctttatccactcaaaaagacattaaagacaaaggaccagaattttccactacagcaatatatttcatagtctttattctgaaaatactgttgacattttggagagaataaaaagccctgcattaaacgtgttcacatgtatttatgacattctaagcaaaaaaaagaaactctatattgcccagaaaaattattttaagcctcatttcaaagcatctaatgagaacacattcaacaaccatcacagggaccactcaaggtgatgctttnnnnnnnnnnnnnnnnnnnnnnnnnnnnnnnnnnnnnnnnnnnnntaatgctttgaggctggatatggtatttctacggatttctacaaatgtaccaaagcagttttccagattatgttgcatcaggctttctggattagtcaacattttagagaataagtgcaagtccccaccccacccccacccccccaagctaaagcatgttatagtgctgtactttagattcaaacaatgcaacatttaaaaaaatcaattatacattctgaaaccatttgacaaccaaactgtaacactccaaaggttattacaactttgaactgaaatggtaccatctatatcatagatggctctcccttcttttgtcttttttaactatttaaaatatagtatgacatatataaaaattaaacttttgcatattcactcaagctactattactatacatactgtcttataaattaggttttggattaaaaatccagttaaaatattggtggaaataagatatttcaggtggtggggaagtggatatgaaaatgatacagttcaatgtgtaagaagaaatatagtttattaatgttaaacagcttttttcttacacaaattttattcccttcaaattaaattagaaacccatttagttatgggaagaatactcatggcgcttactgactagattttcctaaccgattgggattaaaacaaaaatgccacatcagaaacatgttgacataatcaaaggaaacagttgtttacaaaaaaagagaatcattagaaatcagtaaatggcattcaaatgtaaagctatcttgtttcttacagctaatgtcatgttagcaatgtgagacttaaagaaagtgaaactcaaacctcagtatatctgttaaagaccaaataacagttatattcactcagggaaaaataaatagcaacttcacaagttagggttttgtttctagttctactgtgaaagataatcactctttagcttaaaaaggctccctgatgtcctcattataaatctagacacaggaacagttatttgagcctgagtccctattatgaattaattgtaaagatgtgttaaatcaaaacatatattcatttactgataggtcttgtcttaactgaagctggcaatcc

SEQ ID NO: 50967 - DNA, 947 bp, Homo sapiens
tgaccattgaggaattcattgagtcttgtcaaaaggatgagaacatcatgaggtccatgcagctctttgacaatgtcatctagcccccaggagagggggtcagtgtttcctggggacctatgctctaaccctagtccaggcggacctcacccttctcttcccaggtctatcctcatcctacgcctccctgggggctggagggatccaagagcttggggattcagtagtccagatctctggagctgaaggggccagagagtgggcagagtgcatctcggggggtgttcccaactcccaccagctctcacccccttcctgcctgacacccagtgttgagagtgcccctcctgtaggaattgagcggttccccacctcctacccctactctagaaacacactagacagatgtctcctgctatggtgcttcccccatccctgacctcataaacatttcccctaagactcccctctcagagagaatgctccattcttggcactggctggcttctcagaccagccattgagagccctgtgggagggggacaagaatgtatagggagaaatcttgggcctgagtcaatggataggtcctaggaggtggctggggttgagaatagaagggcctggacagattatgattgctcaggcataccaggttatagctccaagttccacaggtctgctaccacaggccatcaaaatataagtttccaggctttgcagaagaccttgtctccttagaaatgccccagaaattttccaaaccctcctcggtatccatggagagcctggggccagatatctgggctcatctctggcattgcttcctctccttccttcctgcatgtgttggtggtggttgtggtgggggaatgtggatgggggatgtcctgggctgatgcctgccaaaatttcatcccaccctccttgcttatcgtccctgtttt

SEQ ID NO: 50968 - DNA, 576 bp, Homo sapiens
tttttttttttttttaaagtataaaataaacaattttattagatgaactcatttatttgacatattaaattagacaaagaaatatatatgtaaccagataaaaacaatcacattctcatactacttgaacacatagcagtggtcaaaaataatggattgtaaaatggaccccaggatttaatgcaaaaaccaccccatacgagaaaagtttcaggcttctaacttcactgaatccagtactaaacgtgcttctttatattcctcagcttcttccaagtctttttcattttctagtatccgttgaagatccaaatatgcggcttccaacctgcgctggcaatctgggatcatcatcctggattcttgtaggatctctgcctgctttttaatgtcataattttcaccgtcttcagctctcattttttcaatcttttcttcttgttgttttgcctctttttcatacatcactttttctttgaccaaccgcttcaccacgccggtcttgatcttgatctgtctcacgcgaggatcggccatggtccctcgagcgccgcgagaaggaggggcggagagccg

SEQ ID NO: 50969 - DNA, 375 bp, Homo sapiens
gccctcagcctctactcagtggctccagcctcatatttgcgtgctatacctttaacctcaagttctcttgctgcctaacttaagctgtgactgtccaggacctgcacacacacatatatgcacgcatgcacacacacacacacacacacacgcagaaggtgaacacacaggatgaggccctgaaaactcatttcacccgtgtacctcacccaaaaattcccctttgtactcctatctttatctctaacagacagcatgaaggtagcccgaagtcccctcaccctgtctgtcctcctgattctctagcccagttccctctatctccagcacagactcttatctccagccctgactgctgaaaccctccagccccag

SEQ ID NO: 50970 - DNA, 5190 bp, Homo sapiens
ttttttttttgaaaggaaaaaattcaaagtttattcaacattaagaataacagacagataaaggtttggacttaacagcataaataccaccaatatcatggtgtacaattaaactaacctcatgtcaacttgtacctgtttaacagatgcgatctttgtggtgttgccaaaaggataatggattattgttatgtttggtaaggtgctcaaaattaaagactttatgtcgacttattcacacacatacacacacacacacatggcacggcacacacacacacacacactcttacacttagcctcctgcaaaatgtattgactttagttgctatatccgattcggataaggctttgctcattttttaaatgacattattaattgcagaaaaaacgtggaggagaccttggccttgccagtgggggtacctaggagcagaaggtgatcgccacctggagggcagatcacttagtctcagacacctgcagggtgctgagaccccagtgctaaatccagatctccaattgccatcacacataggcaagcaggcctggtcccatgccttgggatcgctctaattgactgtgataaagattgagttttccttaaaggaagaatagggtaaaatgagataaactactagaaaaaccaaagaatagctttgcatttcacagaatgtctattgttttacactgggggcagtggggagggtgccactgataattcttgcttcttccgaaaacagaccctagacatctgattgtacatttggaattactgtgagttccccaccaaaccagtgggttagaaggaacctctgggtggtctagtacaggtttccattccacccaccccactgtggaatcccatctgtactctcctcaaagggtccttctgctttgagggatgggtcagtggaggcctgttgtatttgaagacaaaaggcctatcacagtcttgcctaatgtggtatttgaatggttcaaagtggccacttcctgaagagaaagaagtaatgatctacagccctcccctcaacaaactacctccttaaggcagcaccagcagaaagataggctggtcaatttttgcctttctttgccaagtctagttaaaagaaacaacaatgtgacctcatcaggaggtcctaagctgttccttccaaatcatgtctagatgatgtcagtatgatatgatttggattcattgttaatggccaaataattaatctctgaaagatgcttaggatgaaaaggtgaaaaatgacaaagggactctcataatagctgcagcgtggcagacatgcgtctgactccggttgaacccaaatcactccagagtcaaagccatggcctcccgctccatgaagcagatctgccttgtttggctagttaactgcccctggatggagaggcagccagtccagagggagtgttcgtgtgtgtgtatcgtgacaatgacctacatataaggcacctgtacagactccaaagtgtttaaatttgtaagacgaggtaggtttctgaaacctctcctggcacacaagagaatacattttattagaatctttttatttttttctgcagaaaacatttgagatgctcatttgatataaacatctaattccaagagagaccagtgctcaaatatagttttttcagctaccatttgatacggccataaatttggatggtccatgttacaatccttccacaattctccacttaaagacatcatttttctatgtttttaatgactattgccatctaacaattctacaattcgcctctttgcctgtaaaaaggccaactctacgtccacctgtgtctcatattgctatcttttatttatctctgcttaagattgcaaaagtttttgattttattattcacctgaacaatgtattgcaattccaatacacccccatctcttgctgttatctacagcttgtgacaaaatgaacaccttgtagaaatatcctactggttgggtttcccaagtctatgacactatgagagaagcattgctgatggattgacgaggagaccaccagatcattaaaggattagatactctgaaggcaggaaactagaaaatcccattgatgaaaggatattttaatctagcgtaaaatgtttctttgtcgtaacagcagaatttcttgacattttacaacttaatgaaacaaaagaacaatcatctttaaagtcaaacatctatcaaattataaaccaaacacatagcaccgatatcaacctcataaaacgtgcgggcccgcagggtagaaaagaactgtctggggcactggcagcaacgtgccattccaggaactcagaatttcgaagtgaacatttttgtggcagatgcttttcctaaaaaacactgtatcatccaataaatatttgactaaaatccattttgtgcttttgggtgacgttaactgacttctttctgaggcctaataagaaacaagaaagctccttgtgtattttagagcaggattcgtcatcacaagcctcgatactgtcataaaattttaatttaaagcagaaaacatgctgatgtgtcagtgatagggcttaaaatattaaagacttcaaaaacccccaagcacttcttctctgtacaacattggtgaatatatatctttgctatataatttaaaaacatggaatagttttcctctcctcttttctatatataatatatgtcttccaaaatacattgtcagtatttatatctgaaaaatactgtacaaaaaagaacttcctataattactctgtataaacattaaacgatttaataatctctccttttggtctatagtaaacatttaaattgattggattaaccacagtttgtgacaacaccatccccttctgagatacaccagtgtcttttacattcatttttcagaagtccactttataagagcacatacgttcaaaagcaaacagagaataagaaacataagcttcagaatcattaatttatgaggcattcaaaaatgacaccactaggaaaaagggccttagaaaacatcaacttattaacttaatcaactgattttctttttaaaaacaacaaagtataattcacaaaaatatatatattaccaaaaagtgggaaaactgaatcttaagtaactgttttgaatgtcaagagggatatggaaaaagttaactagaaaagtgggggcgaggcagggtgtgagggaaggggaacaacaaaaccgaacacatcaatgtcaaaggctaatccaagacgcagtttttggctcatgtactgataaattaacccctcatccttagacctcccatttccctctgcttccttgtcctagggaatagtctggccatgctcaaatgcattactttactttttgttttttaaaagacagtgaaattcttaggtagggaaaatatcctacgtccactagtaatactcaggcagcatgctctagcgtacaataggattattgctttaggtacagacagtgcaaaaacacactctgtgttctattaatagtactcttacttatctggggttggtagaattaaaaggaaacttagtagatagcagtaagtaaatatgggatctaataaatctaaacagcactttaatttgaagacgattatcaccaaaactgaaagtaagaggaaagcaacttataaaggactagagctgcggagtagtgctaagttattgtgtgcacctcattagcatggtaacttacggactaaacagaaacaagagcttgtactcttaaaaactgagatccactattttaccagggccctttttagtgaatccaagcagagagtcctggaagagtaggtaagctcgaacatgaagcaaagctgaggaggcaggagtgaaggagggaggggatgggagacccgcgagagggctcctcagtctagtaaagacatggcacctttctttgttggaactaaaagacgatgagagggctaccttaaaatggcaagagcaaaggaacacgcacacgcacataccgctgaccacacacatgagcacaagcacatatacacgcacacacacacagatgcacaccaaaatgggagtcagttgtgtttatgcctctggtaaagtgctgatgtcagaaaggttggtttgcgtgtggtgctatcagacaggaaacaaactgtccatctattccaaagccagcctgcaaaaatgccatcctacaggggcccgtgcctggcctcatacttggcaagtatgttcttgcatttgcccagctccttcctcaagtcagccacctcctggcggagggccgagttctccttctccaggaacgaggcccggatggcgatctggttctctttcagcctccgggcgtcgcgggagcgcttggctgccatgttgttctttctgcgccttgcccagtacttgtcatccttcaggtcatcagggatgaagactttgcgagctttcttgatcatgggctgtggcttcagttcttcctcagagaacttgcgtttgcgagggtcaaacatttcctggccagggatgctggaaagggcaagatctgctgggtctggctcataacccactgggacctggatggtgtcaggatcaatgggacttggtgtattgcggtttgctggcaacagctgacctggtctgatggggctctgcatacagttcggagatgggatgccagggtgaaggggtgcagaggcccggctgctgaggtccatgaccgagggggcagccgaggaagctggctgcagcccaggagggtgagggctgtggtcatgctgagatgggctggggggaatgccattttctgacaaaaactcctccaggtccatgtattccaactggaaagtatctccgtcatagggaagggttttgtcccataaggtaggccccaggaatgccgactgggggaccgtcgggctgttactctcatcatccagcttcttttccttgtctttatctttactaaatgcgtcttcgtggtgaagggggagcttcagcgggttctccagcagggacctgagcacgccgtagggaggcgggataaaggtgggattcagggggagcggtcgggacattttctccatcgcgatgcactcaaattttttccccttaaaaaaagaaataagaaagaaagaaacaaccgccccctaaaatgttgctgagcttttcctccgtcctagag

SEQ ID NO: 50971 - DNA, 824 bp, Homo sapiens
ggcacatgaaaatgagccgaagggaaatccgttccacagaagcaccttgtctttctgcagtttttgagtatatttctcaaatagccataaaagtttaaaaaatatatttgacagctaactctgggaacaaaacatgttatctaagatccctttttaagtaacacatttcctgcctgccttagcaggtctcttaagctgtaaaaatagctacccatgggcagtgaggatgaggatccctggaccttgcctttctgacctctttcccccaggggaggtccatgactgaccttcaggcagcagcatctctgcagggttccactgagcgctttcagatctccgcagactccactgagcgcttttaagatctccgcagactccactgagcgctttcagatctctgcagactccactgagcgctttcagactgggggccatgcctcagggggatgggctccccctgtgttggtttttgcctggtggccccacgaatcccgaaaaggccccatgctgcagcgtgcccctgctttgagtttggttgatatgccttaataagaacattagttttctgggagaatttggtagcacccgttcttcccttcactgtgtgggggaaatagtgttgattgaaaggaagaggactccgagattggattggagcaagaaagtgtgggtatcgtgtgttgtgactgtgtcttctccggggtgctgcttcactggaggtctcccttcagggtctggccctcatgcctggccccaggtgctcgtgtgcacgtgagcggctcttcctgctgactgactacagctaattgacaaaaggcagtttc

SEQ ID NO: 50972 - DNA, 3432 bp, Homo sapiens
  misc_feature (1)...(3432): n = a,t,c or g
gctcgcgcacggctccgcggtcccttttgcctgtccagccggccgcctgtccctgctccctccctccgtgagtgtccgggttcccttcgcccagctctcccacccctacccgaccccggcgcccgggctcccagagggaactgcacttcggcagagttgaatgaatgaagagagacgcggagaactcctaaggaggagattggacaggctggactccccattgcttttctaaaaatcttggaaactttgtccttcattgaattacgacactgtccacctttaatttcctcgaaaacgcctgtaactcggctgaagccatgccttgtgttcaggcgcagtatgggtcctcgcctcaaggagccagccccgcttctcagagctacagttaccactcttcgggagaatacagctccgatttcttaactccagagtttgtcaagtttagcatggacctcaccaacactgaaatcactgccaccacttctctccccagcttcagtacctttatggacaactacagcacaggctacgacgtcaagccaccttgcttgtaccaaatgcccctgtccggacagcagtcctccattaaggtagaagacattcagatgcacaactaccagcaacacagccacctgcccccccagtctgaggagatgatgccgcactccgggtcggtttactacaagccctcctcgcccccgacgcccaccaccccgggcttccaggtgcagcacagccccatgtgggacgacccgggatctctccacaacttccaccagaactacgtggccactacgcacatgatcgagcagaggaaaacgccagtctcccgcctctccctcttctcctttaagcaatcgccccctggcaccccggtgtctagttgccagatgcgcttcgacgggcccctgcacgtccccatgaacccggagcccgccggcagccaccacgtggtggacgggcagaccttcgctgtgcccaaccccattcgcaagcccgcgtccatgggcttcccgggcctgcagatcggccacgcgtctcagctgctcgacacgcaggtgccctcaccgccgtcgcggggctccccctccaacgaggggctgtgcgctgtgtgtggggacaacgcggcctgccaacactacggcgtgcgcacctgtgagggctgcaaaggcttctttaagcgcacagtgcaaaaaaatgcaaaatacgtgtgtttagcaaataaaaactgcccagtggacaagcgtcgccggaatcgctgtcagtactgccgatttcagaagtgcctggctgttgggatggtcaaagaagtggttcgcacagacagtttaaaaggccggagaggtccgtttgccctcgaaaccgaagagcccacaggagccctctcccccttcgcccccggtgagtctgatcagtgccctcgtcagggcccatgtcgactccaacccggctatgaccagcctggactattccaggttccaggcgaaccctgactatcaaatgagtggagatgacacccagcatatccagcaattctatgatctcctgactggctccatggagatcatccggggctgggcagagaagatccctgggcttcgcagacctgcccaaagccgaccaagacctgctttttgaatcagctttcttagaactgtttgtccttcgattagcatacaggtccaacccagtggagggtaaactcatcttttgcaatggggtggtcttgcacaggttgcaatgcgttcgtggctttggggaatggattgattccattgttgaattctcctccaacttgcagaatatgaacatcgacatttctgccttctcctgcattgctgccctggctatggtcacagagagacacgggctcaaggaacccaagagagtggaagaactgcaaaacaagattgtaaattgtctcaaagaccacgtgactttcaacaatggggggttgaaccgccccaattatttgtccaaactgttggggaagctcccagaacttcgtaccctttgcacacaggggctacagcgcattttctacctgaaattggaagacttggtgccaccgccagcaataattgacaaacttttcctggacactttacctttctaagacctcctcccaagcacttcaaaggaactggaatgataatggaaactgtcaagagggggcaagtcacatgggcagagatagccgtgtgagcagtctcagctcaagctgccccccatttctgtaaccctcctagcccccttgatccctaaagaaaacaaacaaacaaacaaaaactgttgctatttcctaacctgcaggcagaacctgaaagggcattttggctccggggcatcctggatttagaacatggactacacacaatacagtggtataaactttttattctcagtttaaaaatcagtttgttgttcagaagaaagattgctataaggtataatgggaaatgtttggccatgcttggttgttgcagttcagacaaatgtnnnnnnnnnnnnnnnnnnnnnnnnnnnnnnnnnnnnnnnnnnnnnncttaaggggacccacaagtattgccctttaacaagacttcaaagttttctgctgtaaagaaagctgtaatatatagtaaaactaaatgttgcgtgggtggcatgagttgaagaaggcaaaggcttgtaaatttacccaatgcagtttggctttttaaattattttgtgcctatttatgaataaatattacaaattctaaaagataagtgtgtttgcaaaaaaaaagaaaataaatacataaaaaagggacaagcatgttgattctaggttgaaaatgttataggcacttgctacttcagtaatgtctatattatataaatagtatttcagacactatgtagtctgttagattttataaagattggtagttatctgagcttaaacattttctcaattgtaaaataggtgggcacaagtattacacatcagaaaatcctgacaaaagggacacatagtgtttgtaacaccgtccaacattccttgtttgtaagtgttgtatgtaccgttgatgttgataaaaagaaagtttatatcttgattattttgttgtctaaagctaaacaaaacttgcatgcagcagcttttgactgtttccagagtgcttataatatacataactccctggaaataactgagcactttgaattttttttatgtctaaaattgtcagttaatttattattttgtttgagtaagaattttaatattgccatattctgtagtatttttctttgtatatttctagtatggcacatgatatgagtcactgcctttttttctatggtgtatgacagttagagatgctgattttttttctgataaattctttctttgagaaagacaattttaatgtttacaacaataaaccatgtaaatgaaaaaaaaaa

SEQ ID NO: 50973 - DNA, 914 bp, Homo sapiens
  misc_feature (1)...(914): n = a,t,c or g
gatctttttaaaaacaatttatttttttccaatgtaagaataacaagtttaatattgaaaatctgaaaaaggcaggaagataggaagaagaaaaatatcaaccatagtcctaccacctaaagaacactcactgacagtgtggccatgctcattctttaagccttaatttaggtcccatttctggtgtggtgccttccttgaacttcctcccccagatcttccatgtcatatctgtaccactcagttgtacatatcatacacttttgtgtataatgtgatgtatgtcttatgtttccaacgagattgttacatcttcgaaggctgcaaacatgagttgtacttgttagcttaccccaaaataatacctggtataccggacccaatatctgctgattgatctaacctaaatgaatacaaaccatttcagaaaaagatatacaatagaccacatatccaggtcatgaaaattaaagctttcaggtcacctagcttagtgacctattgcttttctgaccctagactcttgaaagcctatttaaactggcctctttctccacaccaaaactgataaaaaggagactgattatgagccaggatttacacagagattctctatataaggcataaaggtgagggtgaganananananananananananagagagagagacgtgagggagggagagaaaagagaacagacagaagataagagaagagaagggtatacagtctggtgctcaatccagtatgtgatttgcctccagcaccgtgtacaggatcccatccacttgttctgagtcatacccgatctcacgaagctccaagtgagggaggacagaagtaaggagatagctgacgtggatacgtagccgcgtaagctttgccaaagccctgagccttctgcagcattt

SEQ ID NO: 50974 - DNA, 361 bp, Homo sapiens
ggccaagctgacactggccccccacaatcccttggggctgctcctcctcagggagtggctctccgggtttcctgcttgactcctgctgctcttgtgttgaagggccgtctctgggcagctccccctggcccctggccagagagccacgccctgtcaggcacgcacatggaggatgagggaggtgcaagttgttttcacaggtgcaagactctagagggaccccacgtggactctgtggcttctgccccgacgcactcgcgggaggacacagctctgcccggaagggagagtgctgagctgggtccctgctgctcatctctgtggcatcaccctgtcagtccttccctgtcacacatatgag

SEQ ID NO: 50975 - DNA, 1365 bp, Homo sapiens
  misc_feature (1)...(1365): n = a,t,c or g
ctttggcaagaataacaagttcattggaatttgactttctgacatagagcagacagcccttgccctgtcatgccaggcctttcatgtgaagttaccatttattagctgcttctgtctctccagggaaggatttcccttttataagcctgggccagggggatgatagtaagattccccatgtgataccagagttggaataggctgtagtgagattagggccaggactgtcccattttggattcttgaatggtttctgttacaacttgtcatggggaaaaagtaacacttattttttttttcctccnttaaaanacaaaaatactaatgcatttgagaaagcggtagttttggggggagggggaaaaagcaactgctttcctgatctgcaacttggctggatgctaagatgtcagtggacatgaatagccaggggtctgacagcaatgaagaggactatgacccaaattgtgaggaagaggaagaagaagaagaagacgaccctggggacatagaggactattacgtgggagtagccagcgatgtggagcagcagggggctgatgcctttgatcccgaggagtaccagttcacttgcttgacctacaaggaatctgagggtgccctcaatgagcacatgaccagcttagcttctgtcctaaaggtatctcattcagttgctaaacttatattagttaatttccactggcaagtttcagagatattggacagatacaagtccaattctgctcaactgcttgttgaggctcgagttcagcctaatccatcaaaacatgttcccacatcccatccccctcaccactgtgcagtgtgtatgcagtttgtgcgaaaggaaaacctactctctctggcctgtcagcaccagttttgccgcagctgctgggagcagcactgctcagttctcgtcaaggacggcgtgggcgtgggagtctcttgcatggctcaggactgtccactccgtacaccagaggactttgtgtttccattgcttcccaatgaagaattgagagagaaatacaggcgctacctcttcagggactatgtggagagtcattaccagctccagctgtgccctggtgcagactgccccatgggttattcgggtacaggagcctagagctcgccgagtacagtgcaatcggtgcaacgaggtcttctgtttcaagtgtcgtcagatgtatcacgcacccacagactgtgccacaatccggaaatggctcacgaagttagcaagacgactctgaaacagccaactacattaagtgctcacactaaagactgtcccaagtgcaacatctgcattgagaagaatggaggctgcaatcacatgcaatgctccaaattgta

SEQ ID NO: 50976 - DNA, 423 bp, Homo sapiens
gctatgggaagggcttatgttctaaagggtgattcagtgtcaggcttatgagactgagagtaaagttgatgaggaagagaaggctcagaagtatctgaacaactactctatatgtttatatttttctgcttgaggggatagagatccctcctccatctgcatctgcatatagaactgcttaagaggacagcaagacaagttgctgcagggggatggagggtagacagaatgcctttttttaaaactgaaaattttattgagatacttaatccacctgcacttgtaagaaatcatacagagaaattctattttcctttacacagtttccctgaatgctaacatctagcaaaactgtagtacactgccacaaccaggataactgacattgatataatctactgatcttgttcagatttccttccc

SEQ ID NO: 50977 - DNA, 3451 bp, Homo sapiens
  misc_feature (1)...(3451): n = a,t,c or g
aagatggcagcccaggctttggcgctgctgagagaggtagcgaggctggaagcgccgctggaggagctacgcgcgcttcactccgtgctgcaggcagtgccgctcaacgagcttcgccagcaagcggcggagctgcgcctcggcccgctcttctccctgcttaacgagaaccatagggaaaagactactttgtgtgtatccattctggagagattgctccaagctatggaaccggttcacgtggcccggaacctcagggttgacctgcagaggggactaattcaccctgatgattctgtaaaaatcctcactctttcccagattggaagaattgttgaaaattctgatgctgttactgagattctaaataatgctgaattactaaaacaaattgtttattgcattggtggagagaatctatctgtagcaaaagcggctatcaaatccctgtcaagaatatcactaacccaagctggactggaggctttatttgaaagcaatctgctggatgatttgaaaagtgtaatgaaaacaaatgacattgttcgatacagggtgtatgagctaattatagagatttcttccgtgtcaccagaatctttaaactactgtaccacaagtggattggtaacccagctcctgagagagctgactggtgaggatgtgttggtcagagccacctgtatagaaatggtgacatcactggcatatactcatcatgggcgacaatatcttgctcaagaaggagtaattgaccaaatttctaatataattgttggggcagattcagaccctttctctagcttctatctgccaggattcgtgaagttttttggaaacctggctgtcatggatagtcctcaacagatctgtgagcgttatcctatctttgtggaaaaagtctttgaaatgatagaaagtcaggaccccactatgattggtgtagctgtagacacagttggaatcttgggatccaatgttgaaggaaaacaggttttacagaaaacaggaactcgctttgaacgcttgcttatgagaataggacatcaatcaaagaatgccccagtggagctaaaaattagatgtttggatgcaatttcatctcttctgtacttaccacctgagcagcagactgatgaccttctgaggatgacagaatcctggttttcttctttatctcgggatccactggagctcttcccgtggcattagtagtcagcccttccctgaactacactgtgctgccttaaaagtgtttacggccattgcaaaccaaccctgggctcagaaacttatgtttaacagtccaggttttgtagaatatgtggtggaccggtctgtggagcatgacaaagcttcaaaggatgccaaatatgaactagtgaaagcacttgcccaattccaagacaattgcagaaatctttggggaacccaaattatttgaggctcagaacttacctgagtgaagggccatactatgtgaaacctgtttccacgacagcagtagaaggagccgaatgatttcttctagagctcatgtagaggaccacgttttgaccaaaacttctcctaaggcatttgactccatctatatttcacaaaagagacttcctttccccaagaattatcatggaatgtcagatgttactttgttaccaacactgttatatttctacattgaaatgcaaagtggaactaggagtttggaatgcattaagagcagacaagcttggtcataatagatccagtgtttttcagattcctttcactgccttaatctttgcaacagggtggaagtttttttcttccctcaaaattttcatggacatgcaatcttatctaaaagcctgcttcagggctgggcgcggnnnnnnnnnnnnnnnnnnnnnnnnnnnnnnnnnnnnnnnnnnnnnnnnnnnnnnnnnnnnnnnnnnnnnnnnnnnnnnnnnnnnnnnnnnnnnnnnnnnnnnnnnnnnnnnnnnnnnnnnnnnnnnnnnnnnnnnnnnnnnnnnnnnnnnnnnnnnnnnnnnnnnnnnnnnnnnnnnnnnnnnnnnnnnnnnnnnnnnnnnnnnnnnnnnnnnnnnnnnnnnnnnnnnnnnnnnnnnnnnnnnnnnnnnnnnnnnnnnnnnnnnnnnnnnnnnnnnnnnnnnnnnnnnnaaaaacctgccaccaaattatttctggattctcttcactatctttttttttctttttggtcctttttccatttctgattccactttcaaagtcttggatatattctttgaaaaatgagtagtatggaatattaagattatgttccttatactcagaatactttttatgagctctcttgtttttttgttactattattcctttgaaaaaaagacaaaatatctaaaaaatgtttatagtgttcatgtaattttttttgctgtttaccaatgaactttgccctgttgtggttttgggggatcagaaggattcctaaactgtcatttcatttattggtaggtcatgattgctgagggttttgctttggatttttcatacctataaagtcaatcttgagttgatcagagaaagggaaacttactcctaataaacagactcagaacagaagggacatatgcataaatcaggataccatctcattaatttacaaaggataatctttcttttcattgacaacacctacacccacctgttttccagtgttcttctctctaaacagcaaagccaaagcactctgcacaccaaatcacctgttcagaggtttatgcatgagcatatttcttttaggccgtggtgaagttgataaaccacccctgctttgtaacaaaattattttaaagtgactggaattatctagtccccagattgatcatctcccctggcaacgtgactctgttttttgtgtgtgtttccatgctgactagtcccctactgttaatatcactactaattaggctataaccaggtctttcctggcctgagaaatattctcttaaaatgacctttgttttaatctcattcatgatgttgattttttttcaatgtggtgcaatatatacaataaaatttgtcataactattttaagtgtacagttcagtatattacatatgttcataagntgtacaaccatcaccaccatccatcttcagaattattttcatcttatacaattgaaactgtattcattaaacaataactgtctattccctcttttccccacgctctggcaaccaccattctgcttcatgacattgattttattcacttaacatcagattttggggggatgccctctctcctatgtatggtctacacattctgattttttttttagattgaataaaatttgtaaatcattattttcatttcataagtaaacacctgttggactgcctattatgttcttgggattggggaaggtgctagacattggcctaagtgccaagtgcatctca

SEQ ID NO: 50978 - DNA, 375 bp, Homo sapiens
  misc_feature (1)...(375): n = a,t,c or g
ggctgttctcctccttctctgattgcatccttttttctaaattttgcatttactgtactgccaagagggacatctgagctgtccctcaataatttaatgcagggccagatgtcacagatgaaggttactaacctgtagcctgttcaagtacatgactctaggtaacttacaaactttcaggtggagaccctaggattcattgttagttcagtacctcgattacaaaatctgctcaaaggaaaatgttacagaactattttcacattttggtcaagggagggacaggacaggataaggtacaggtatgacaatacacgggcagaagctggaggaaagtgacagaggtctggacccaggttggnctacttangaaca

SEQ ID NO: 50979 - DNA, 1078 bp, Homo sapiens
gtattttactgctatcaaatcagaatgaaatatactttaccatagatatttttcttctatttttggttttccaaagctatatgaaagacaaatttttaaaggtacagcgttcaaaaagtgcttaatgaactccaacagctgcctcaaataaaaatctgtatatgaatacattttccctaagcggtgatacattatccaaagatgaagagtgctcctatttttaataggtagaatgtacctttgtcagtcttgcagaaactttaatggagaagaaatggactttatttttgaaaggtgaaatgaacaggcatttatattattagagaatggtagtcttattttggtggaacataatgtaacaaccttgaatttcagaggactctgagtgcttctatgtccactacctattgttctattcttcaataatgaaaaagaattcaacgagccgaccgtgattccctctactacaaatattatgtcttgtaagttagcatttttagcacacaggagaaattttatgtaataaaattactgtatcttttggatttaacaaatgtgtatttgaaacacattctatgtctgataattcttaatggcacttttactaatttatttggggatcttggggtaccattcttaatttgtgtttattcttcacgcttgacttgcaagtgggatattcccctgccacaagtgtcaaacagtgatattcttcctgtgttgtgactggacagttttccagatcttttttgggagattttcctacagcttggttgtatgtcttgagataacaccaccaaacagctctcagaaattcttttttgattgatcagtagctatgatgattctcctccatgacactaaggattagtttatatatttaagagaaataattgctaaaattaaaatgcctctatcaaggaatgctattataaattattgttaacattctcaagtattaattttttaatttcattggtgtagcaaactctaagcccagccactcattttacatggccatggttaatctttttattaataaaaattatacttagaaaaaaaaaaaaaaaaaaaaaaa

SEQ ID NO: 50980 - DNA, 3337 bp, Homo sapiens
  misc_feature (1)...(3337): n = a,t,c or g
ccttcacacagctctttcaccatgcctggatcacttcctttgaatgcagaagcttgctggccaaaagatgttgggattgttgcccttgagatctattttccttctcaatatgttgatcaagcagagttggaaaaatatgatggtgtagatgctgggaagtataccattggcttgggccaggccaagatgggcttctgcacagatagagaagatattaactctctttgcatgactgtggttcagaatcttatggagagaaataacctttcctatgattgcattgggcggctggaagttggaacagagacaatcatcgacaaatcaaagtctgtgaagactaatttgatgcagctgtttgaagagtctgggaatacagatatagaaggaatcgacacaactaatgcatgctatggaggcacagctgctgtcttcaatgctgttaactggattgagtccagctcttgggatggacggtatgccctggtagttgcaggagatattgctgtatatgccacaggaaatgctagacctacaggtggagttggagcagtagctctgctaattgggccaaatgctcctttaatttttgaacgagggcttcgtgggacacatatgcaacatgcctatgatttttacaagcctgatatgctatctgaatatcctatagtagatggaaaactctccatacagtgctacctcagtgcattagaccgctgctattctgtctactgcaaaaagatccatgcccagtggcagaaagagggaaatgataaagattttaccttgaatgattttggcttcatgatctttcactcaccatattgtaaactggttcagaaatctctagctcggatgttgctgaatgacttccttaatgaccagaatagagataaaaatagtatctatagtggcctggaagcctttggggatgttaaattagaagacacctactttgatagagatgtggagaaggcatttatgaaggctagctctgaactcttcagtcagaaaacaaaggcatctttacttgtatcaaatcaaaatggaaatatgtacacatcttcagtatatggttcccttgcatctgttctagcacagtactcacctcagcaattagcagggaagagaattggagtgttttcttatggttctggtttggctgccactctgtactctcttaaagtcacacaagatgctacaccggggtctgctcttgataaaataacagcaagtttatgtgatcttaaatcaaggcttgattcaagaactggtgtggcaccagatgtcttcgctgaaaacatgaagctcagagaggacacccatcatttggtcaactatattccccagggttcaatagattcactctttgaaggaacgtggtacttagttagggtggatgaaaagcacagaagaacttacgctcggcgtcccactccaaatgatgacactttggatgaaggagtaggacttgtgcattcaaacatagcaactgagcatattccaagccctgccaagaaagtaccaagactccctgccacagcagcagaacctgaagcagctgtcattagtaatggggaacattaagatactctgtgaggtgcaagacttcagggtggggtgggcatggggtgggggtatgggaacagttggaggaatgggatatctggggataattttaaaggattacatgttatgtaaatttttatgtgactgacatggagcctggatgactatcgtgtacttgggaaagtctctttgctctatttgctgacatgcttcctgttgtggtctggccaatgccaaatgtactcgaatgatgttaagggctctgtaaaacttcatacctctttggccatttgtatgcatgatgtttggtttttaaacatggtataatgaattgtgtacttctgtcagaagaaagcagaggtactaatctccaattaaaaaattttttaacatgtaagaattttgtactttgaacaacaagattacagaaagtacctgtggtttttggaaaacatttctagcttggggaatgtgacaacattccccagtgtggtaaaattggggtaaaatgtggtaaaatgtgatacgcacaaaccctttgaaaatagcaaaacaaacatgccctttttctaaaattgataaatcctaaagaggaagaaaagagctgggacaataaaacactggctctggaatctggaatgttaagtccaggccagcagtgacaaaagttattgtaatgacctctgaacagagaaacactgccattgaagaggcttctggtatagaaaacatggtacattcaggagctgtgaatatagctctaggtgtgctcctgaatcagttcatggtagattatgctgaacaacagtgagatgttattggaggtgtggatgagggagtttgttgttgcagtccttctttgcaccttattttaaagaataaatgaaacatttttctggttacttttttaaaaatttaaaatggaagggaagaataggggcagggcattattaggctatttctgatgcttcagtgttataaattcaacatagaggctgacaacctaaattcatggtgtaacacagctcttttccttttccttttttttttntttttggtatctgttcaatgaaaataaggtatgacccaagtttttacctagtctgactagaagtattccacttcaaggtctgaagtaggacttttaccttaaaaaacaacaacaaacaaaactatcacacaggatagataagaagattggttaaacagttttgtgtagatctttttggtgctgaactatgacatgagccttatagattgtaaaatagggatagttggaactaatgtacagaactaaattttttaaactttatttgctgttaaattctgtgaagtttcagttatctaaaataaatatacacaaatatgaaatataatgtttcagattgcaaggtaatatgtaatagtagtgtttgtaagatactcttgtctaatattaactagtagtattttgatttgtacagtcataatttgttaaaatgacttcatttaacattcactgatgtagattaataatgtaagttctgatttaaagaatggtggcaaaatggtgcatgtaatacttttgcaagtgttggggagatcggtatgttttgaaaagagtaatttaacttttgggtgccaggaaatgggttttctcaaagtccattgccggcaatgggcaggcctgcaaatactggcacagagcattaatcatacaccttattaacggtgaggtgaataactttgaaataaagttttagagaaatgtttcagataaaaaaaaaaaaaa

SEQ ID NO: 50981 - DNA, 498 bp, Homo sapiens
  misc_feature (1)...(498): n = a,t,c or g
cgtcgacttttttttctttttttttttcaggtaacaatgagacatatgcagctttatttaataatctgtaaaaagtcatactctggcagagtgatgcattccttatctcagcagaaagcaaacagtctgtctgaaaagccccttcccaagatttggaactgtgtaaccctgagcttacatctcaatgctcccaagagctgggctcttgctatgtggtagttggtctccacaattctctcaccctccagcaatactctctgtctggctgtgactccctcacctaacagtagacatgaggctgaaaacaactttacctgggacagggctacccctacagattggccctttctctcctacaaaagggagttcataggattaacaatctttctaatggctgggagcaatgactcatgcctgtaatcccagcactttggggaggctgagggcaggtgggatcacccgagggtcagggagttttgaggaccagcnggggccaac

SEQ ID NO: 50982 - DNA, 678 bp, Homo sapiens
attttattttctatgttagttatttatttcaaaattaacattttagttgatttttgtctgataagtctatgttttgcactgctaactatgatgagggtttaaaaaaatgcttcttcagggtcctttcactgaggacctatgcagtctacttaatgctgtgaattacatttttcaaatgtttaattttttaaagaaaattaatattctatttttgttaggcttctctagaaatgcagcttttatttattaccccatttctttcaagtccttggaaaataacatattaagggtacaagaaattaacacatgatggaaaagtcattgtgacgccaatgaatttcattgagtataaactcatctacttcaaatttattttataagacaacctaagatactcaagataattatttaatggttagctcttaagttgaattggtctacataatgcgtgggaagaaaaccagatttttagccttcttgccaaatcccagacctctggttgatttttctttgacagaagatgcaagttattttccaatttcacaattaaatgtatttaacatgaacattattttgctttaaaaactataaacattgtaggagaattatagccagtcttcagttataaccactccaccctcctcactttctctctctctctctctttttttttttttt

SEQ ID NO: 50983 - DNA, 465 bp, Homo sapiens
tgccccaccttttcctgggtttcataaggatctgaagtggtggattccttgtttttgctagtatctcatttagagttgagatggaccttaaaactcatctgttttaactcactttttaatagatgagttaaacttaatttacttaaggatgtacagttagagcctggaacttcaaccattattcactccccatgccctgtttccccccacttcgaaattaaatgcggttagcatcatatagttcattttccccctccatgctgctgtgtgattcttgactttgggtatgagtttttcatccttcatgcagggttctgtcagttcatggtatagtgattcagtgttaaaatggtggtgtctcagctgtgctgtgcacatttccaaccttgtcaaattaatagtcctgagcaagcaagaaaaagaggtaataacataccatttctttatgaatatagcttataatat

SEQ ID NO: 50984 - DNA, 164 bp, Homo sapiens
gtgactctcaaaaaaacaaagataatgaactggtttgcatttcttttaaagagatgatagaggaaaatatagttttttgtaagaatgtttatctctcttaaaagataatcttttaattttcttcagataacaagttattattattttttaagaaagcaagtttc

SEQ ID NO: 50985 - DNA, 2235 bp, Homo sapiens
ttttacgtgtttctcttctttattaatcagtcgagagatacaaagacttaataaaaagttacacagaaggttcaaacatcactgagatcttcaggcatcactcgtttcacgacaatggccacctgttaagactatgaaacagaagctgggcgctcacaggcgcacaataattcaagtatctttcattccaagtaaacccgacatggaatttcaaacacaatgggctgccaatggagggaacctgtctgtggctccagatttgctgtaacatgtctgaggggcctttgggttaaagttgccacgttagtgggtcatgtctcctggaaaagtgagacagggccccacgaggccagccaggcattttccacagcaagtgccatgagaaggaggtgggcaaagtcctaagagaaaccatccaggtgtcccgagtggcaaagtgcacaggtagtaagtggccattgtccccagccgtgggagtggagaggatggctaggattatctctggaaaaaaaagagcagccctctaaagagggtgtcaaacagtggaagaaatctgagagcacacaatggcaaaggcatggggtgagggcatttcaggaaggctgtgcctccaggggatgtgagggtagcactattctccggaagaccaacgggaacatgaggatgtcaaacagccagaagtcccagttggctcctcggtcatggctgtggcgtggccaaccaggtttcccagtctgaccctgctagatgataatggaggagaagatggagggatgtcacggggcacactctacactctactctggcctatctggaagctacctcagtcatgagggcccacttctacaaatggggcattatttacccatttcatttatggggaaatgagttcatgggagatgaaagcttaccagaggctcaacagcagaggatacagaagaccaacccttaactagtctctctcaggcaccatggagttcaaccgtgggccaagtgcaggatggatgaacaggatgcactgtcccttctgtcccaactgtgtggttgaaatccctatgtcttctcacctttatggccgaggtctctgttctacatcagctgatctgcttccagtgagactatcaaactcagtgctgtcgaggagttgcagctccacggtgggcatggggtatgctcgtagtggttggtgcccagcaggagttttctggctgtggacagctgccctgtgtgcagggcttcttctcctactccgccatgctcttgattctgagcatctccatccttactccttcctacctgcctttcctccgcctcacctccagtttgcagctgccatcaaactgcacacaacaaactgctgcagataccacttagggaagcataaggattgggaagagctttgtccttttaagtgtttaaaatacctcttaacactatagggtctaaggaaactttgaagtgcctcacctggaatgttctctcttatccttccttttaggaacagaaaaaggggcaatttagacaaataagaagtttgatttccaacaagcaaaagtctcaactgtctccttttgtagcagaatcattctccagctgggcccctcagtgctggtgatcttgccgaggtaggaacacagcacattttcagaacccgggtgtcttggcatccagttgggtgctcactttccttgggtttctttctccagagtggccaggccacctgctgaggatattctagtttgcatagtgacctgatttgtaacatctagaaaataaggtcaccagctgtgctgccttttattctgaccttttctttggtgcagcgttgttcctgttgtctctccactcccaccccagctggaaaaactccagtctttggctcacaccagcagcacctgaggtgggggggcgggggtgagcatcatcagggagctggggagactgcccccttgcagaaggtatatgagagccacacatcagcccagccttccttacttctcagatcattttatagtcaagattcaacaggtcaataaaaattgccaaaaaggcaacctagtactacttttacaaatactggaaggggtctgctcattgactaggcttatagaggtggtagtcagttgactccaagggaagatggcttcaggtcttggtgctgttttagtgataacagtattgaatcatttttggttaagatccagcatgaactggagttttctggatggtgtccac

SEQ ID NO: 50986 - DNA, 543 bp, Homo sapiens
gatttcatgcccaatgcaaggaatagtggaaatacataccaactgcaaagaatagaaaaactttatcccaatatattatagaaagatcttcagttcaattatgtccagagtaatataatttggcaatgttaatgcttttaagatttgaacttgtcctcaaaccaaggagacaacaatagtgtaatactattggacttacaggattagttttaaagcaactttgaatagaagtgtttcagacataggacttctgccttgttgactagagtggatagttttctgtttaaatgcattggtcttttggctgtttgtaattcacttcagcttatagagaagttgatgaccttggatcatgctgggtatgattggtctttaaaaagcagtaatataccaccagcccaaggagaaaacattgtttaaaatggaaggagtgggtgggaaatagtgtgttgggaagaataaaaaatttagattggcacttattctaaagtgagctgtttttttcaagaatttactagcatttgctcgtagtatgatttctga

SEQ ID NO: 50987 - DNA, 897 bp, Homo sapiens
agtagatatacaagaacaggtttatcgtgtccaaaaactccaccatattctagaaatattagtcagttgcatgcctttcattaaatctcaacatgaactcctcttttctttaacacagatctgcataaagtattacaaacaaaatcctcttgatgagcaacacatttttcagctgccagtcagaccaactgctgtaaagaacttatatcaaagtgagaagccacagaaatggagagtggaaatatatagtggtcaaaagaagattaagacagtttggcaactgagtgacagctcacccatagaccatctgaattttcacaaacctgatttttcggaattaacactaaacggtagcctggaagaaaggatattctttactaacatggttacctgcagccaggtgcatttcaagtgaagtgtgctgatgaagtcctctataagcacaagccaaaaagagaaagagaaaaaaaggtaattattgtagaacctgaaaacagcaatgtatggaaaccctcaaagcagaaaagggaggaagatcctgaagattctcttatgaagctccaaaattgataatcctgtctcagctctgcctcctcaggaggagcattagtagaacagcagtgatgaggacacagagggagcagacagtgggtaccacgactctccgtaaccatttgcatgtgacttagcaagggctctgaaatgacaaagagaacgagcaccacaaatgagaacaggatcatatatagtaaatacagctttatcccaaaagctttaactgtattgggaaaacttaaaaaatagcatcctcaaattttctgattcttatttgccatgaaatagaacttagtaaattaaatgttatttgaaaatgttataagagctttgtagtcgacg

SEQ ID NO: 50988 - DNA, 2222 bp, Homo sapiens
  misc_feature (1)...(2222): n = a,t,c or g
gtacatgtttttactaataattcttgttctctagaaagctttctatttctaaccgatggcaaaatgaatccttcatgtcttctngttattgtttacacacttgcagtgtagcccagtttnaaatatttatttggttatcanctgcccatggaggaggctcttnatgatcccaggtctcctcgacctccatacaccacacaggcatttgtaagcacagtttccacaagcaccttgtaggaatatgggataagattagaccagcccctctctgtccactgggtttatttcttgaagaagatgcagatctggtttttccaatgtgccacagtctttccttatcctctccatgctgagcttgacaacactctgggaatgaggaacaagactttttctaaaaagatagtggaagttcaagggatgtacctcgttttcaggttcatccatctccagtggaatgttttcaataaaagatgaagaaaatgtgtgtgatctttaataacacatccctatagaaagtggataaaagatataccaaaactgtaatacagatatatacaaatataggtgcctttttgattactcttgtttgtctagtatggtcttggaaagaaaaccaagcaagcaagttgctgcctattctatagtaatattttattacacatgattgatatttttgtggtagggaagtgggatgctcctcagatattaaaggtgttagctgattgtattttatctctaaagatttagaactttagaaaatgccgacttcttccatctatttctgaaaggttctttgtggatttatatagagttgagctatataaacattaactttagatttgggatttaaaatgcctattgtaagatagaataattgtgaggctggattcactacacaagatgaacttcacttcataaattaattataccttagcgatttgcttctgataatctaaaagtggctagattgtggttgttttggttaaggtgatatggaggtgggagagcttttagttaagtaagaagctatgtaaactgacaaggatgctaaaataaaagtctctgaagtattccatgccttttggaccctttcctcgcaactaactgtcaactgttgatcaaaaaagtcaaggcattgtatgttgcttctgtggttattattctgtgatgcttagactacttgaacccataaacttggaagaatctttgagcaaattttctcagttgtctgtatgacttcagtatattcctgggaatgccataggattttttgtgcttgatacatggtatccagtttgcatagtatcacttctttgtaatccagttgctgttaagaatgatgtactttaaaggaaaagagaaaactgcatcacagtcccattctccagtgtccatgcaatgaattgctgagcatttaggaagcagcaccaagtctattacaggcatggtgtgaaacttgatgtttgacctgtgatcaaaattgaaccattgtacagtttggcttctgtttgcttcaaaatatgtagaattgtggttgatgattaatttgcgagactaactttgagagtgtaacagttttgaagaaaacattgaatgttttgcaaatgaaggggcttcacggaatgttacaatgttactaatataatttggcttttgttatgcaaattgttaacaccagctattaaaatatattttagtagaaatgctttaattcatatttttttcctctacactgtgaatctttaagccttggtggactagagcaacatcgtgctgcccaaaggactaacctatgcaaactagttcacattttagtggatgtcgcagttaatgtgtaataagacattatttcccctgcataatgtacaacagcattgaaatgacacattaagccctagccatcacattgtatagtacagtcactcacaaacccttcaaggctaccctaatcattaacattaatatttgtttaaaagcaaatcaccgatttatctattgaaactacttaaatgacggcaaaccaggaatgacagatggctgtgtcagcaatggctttaatgtgttccctgcaagtggtctcctatgatagaactgcgttctcaaatgcactctcttcagggtcttaatattctgtgttttctctctgtatttgtaaaacattataacacattaatttcctatctctacacatttggtttgcttaaataaatgcaggatataaa

SEQ ID NO: 50989 - DNA, 392 bp, Homo sapiens
aagcattttacttccatgtgtacttttaaataatccataccttgaagaagtttcttgtatactaaagagaaggagaactgtggttaatgttttggatcatcatttgtgaacaaggccagactttgcccattttaggctatccaggacttaaggtagccatctggatcataagaaggtcctgcagttgagacaaaatgacccaagtgtattttccacaagttttgatcctgtgtaatatttctttttccttccctagtgtatgtagatacaaggcatggaatgcagttccactttctccccagagttgatctttttgtgattgctttcccgtctctagtagtattctgttgtgtctagagaactgattttttcctacatacgcaaattgtaca

SEQ ID NO: 50990 - DNA, 688 bp, Homo sapiens
tttttttttttttttcaatggaaatagtggatttttactgggtagcaggacctccgcgaccacccgctgcgcatgcgcttcacttgggcgtcacccggggaactgcgcctgcgcggtctcgccgcttcccaggtccggctccgcgagtgcgagcgcgcgccaggcccacccgggcgctgctcttcatgtccccgcggtcgaagacggtcacatacgtccccaagaagacgtcaccgaggatccagaagggccctgcaggcggagggacatccagggcctggaaaccggacaagcagaggcggacgtcaccctgagtagtctggatgacgtaatcatgggccgtgagattaaaccagacccccccaatgaggagtgagactgcggggagctttgggatttctgagcaccggatgatgtactccccagccagcaaggggattcccccaatggctgcatgcagggcccggatctcctcagtgggtcctacgatgacaggtgtgcctgtatccaggatggcagcacagccctgggcacagagagtcagccgtgagcccaccttcacacgctccatgtggatctgccagtaggcggggactgtgactggcacgaaggtgaggggtgggatgtagtgtgccgggtctgaggcccccaggaccagctctcctccatcaggctcttcagggtccct

SEQ ID NO: 50991 - DNA, 1148 bp, Homo sapiens
tttttttttaatttaatttaattttaaaataaatgctgcattggtaaagctggcagttgaaaccagttggacggcccagcttgcgtctcttctgcctgagtgggcctctcaggtcactcgtgccctgctggaggacagaggggcacctcagccgcccccaagcccagagcacagcaataaggtcggcctgcaggagccggggtgggggtgggggtggggggggcaggaccctgagatgccaccaggacctgatgggccaggaagggcgtggacatggaggctgtttttacagttttttttttttgttgttttgtttttaaagaatacagaaggagccaagcttttttgcactttgtatccagctgcaagctcagggcagagtcaagggcctgggttggaaaaacctgactcacaggaatgcataattgacccttgcagctacccaatagcccttggagctggcactgaaccaggctgcaagatttgactgccttaaaaacacaaggccctctaggcctggcagggatgtccctgtgcccagcacagggtgcctggcagggggagaccacaggtatgcaggtggggggacatggtgtggcactgggggctcgaagactggtttctagcactaccggtcacggccatgtcgtcctagaagggtccagaagattattttacgttgagtccatttttaatgttctgatcacctgacagggcaccccaaacccccaactcccaataaaagccgtgacgttcggacaaaccgcgtactgtgaaccttccggccccaaagccccggcccggccaggtgtgtggagagtctcctccagcacctcttttgtgggcccgccaccccccagcgttatccccgtgtaatgggtggaggcggaacaggccacatcacggcatcaggtctctacagcttagcaaatactgacatttttccgtttgggggatggggggaaccacttcgcctaacgctcaaacacatcaaccccaggacttccttttgtgccagctccccctcccagaagcctgggccccaccttgtcctcagtggctgagtgggaggggcaggtgtgagacagacacacacaccgcccagcgagcttgtctttccaccacggttgggggtggagggaaccgct

SEQ ID NO: 50992 - DNA, 464 bp, Homo sapiens
  misc_feature (1)...(464): n = a,t,c or g
gatttcggcacagcagagaagttaggtaatcagcccaagccactactctaaggacagaccctatctacttttcctaatttgtcagaagactgcctatgatactactaataaaaagtcctatgaaattggtattgtcattattttacaaataaaataatcttcaatttttgtttcctctatgcatgggttacttagtattttgtaatttgaatttcaagcataattaaaaagaaatcaggtatctaggctgggcatgatggctcaggcctgtgnnnnnnnnnnnnnnnnnnnnnnnnnnnnnnnnnnnnnnnnnnnnnnnnngagtttgaggtatcttttgttgatctctacactgattgtattctctcttttattctatggaaagttaaaggatttttttcnggatactaccatattggtncagttttttttaaatactnaggtttgtggctaaaaggtaaacc

SEQ ID NO: 50993 - DNA, 458 bp, Homo sapiens
agacacagcgggcagtagaagaggatgggcatctcaaatgccaaaggagtgccaagccccaagatgctgttgtccccgagtccagcagctgcgcaccatccgcgaatggctggtgtcctggggaccgcatggggctgagccaggcccctcctgtgtcttggaatggagagcgggagtctgatgtggtccaggaactgctcaaatactcatctgataaagcttacgggagaaaagttctgacctgggatggcaagatgtcggcggtcagtcaggatgctattgaagacagcagacaggcccggactgagaccgtggttgatgactgggacgaagagtttgaccgagggaaggaaaagaaaattaaaaaatttaagaagagagaagagggagaactttcaacgccttccagaaacttcagactcgacggaacttctggtctgtgactcacccagcaaagg

SEQ ID NO: 50994 - DNA, 1058 bp, Homo sapiens
gtcatttcagtttttattccagggtcaaagcactgacatctgcattatttagaagcggctttcaaaactttttttgccataactcacagtaaaaaaaaatacattttatattgcaactcaagtctataaattctttcattccttcaacatattgaacacctactatatgccaaatatattttatgtggaatacagtagtgaacgaagtaaaacaggaagaaaggaaaggaggaagagaaagaaataaacaaaaattcttgctctctaagactttacatactagtggaacagacaattgacaaaataagtaagccagatgcagtggctcagccaaaaagttttcagttagaacaaaaatggaaaacagaaccacacaaactcatcatttatgtggtaacactaaataagaggatgtacaaattaaaaacctaccacattccctattatttttaattgcatctagtcacaacatttataagagcatatgtttataaaagatggttaagactggttagtaatttattcttgaggtttgttttaaagtgaaaaagggggaagtagttataagtccagaaagaatatttcaggatgatacatgttgactataaacgcaaaaggtatactgatagcaatcctataaacagcaaatatggatgcaattgatttaagcctattagttcattttttaaaagcagccttgtttctttaaagttaagtactataaatgattcttgaaaatctactgtggacatgatatattcagtcaaacttgctaggagttggggaatgacttcgtgaccatccagttcacagtctgattgagagttaaacagcattacaaaaaagttacagtcacggtacataatcaattccttggacgatacagcttccacagctctcatcatcctggttattcttctttcagctttcacttacacattcctttctttcagacaaacaaaaaatatcaaagttcaccaaaattcttaaagtcacagttcatgtagactgaatgatagtagctttggcatttgatattacaaagtcacttttccatc

SEQ ID NO: 50995 - DNA, 489 bp, Homo sapiens
gggctgaaatgggagctcccgctatggcactggctcaaggagctaatctaaagaatcaagcaaaagtagataatcagccagaagaattagtgcgtagtgctgaagatgatgagaaaccagatcagaagccagttacaaatgaatgcgtaccaagaatttccacagtgcctacacaacctgataatccattttctcaccctgacaaactcaaaaggatgagcaagtctgttccagcatttctccaagatgaggtgagtggcagtgtgatgagtgtttatagtggagactttggcaatctggaagttaaaggaaatattcagtttgcaattgaatatgtggagtcactgaggagttgcatgtttttgtggcccagtgtaaggaccttagcaagcagcggatgtaaaaacagcgttcagacccatatgtaaaggcctatttgctaccagacaaaggcaaaatgggcaagaggaaacactcgtagtgaagaaa

SEQ ID NO: 50996 - DNA, 1366 bp, Homo sapiens
gggtcgctcggcgcagctgttgcggggccatggcggggaccgcgctcaagaggctgatggccgagtacaaacaattaacactgaatcctccggaaggaattgtagcaggccccatgaatgaagagaacttttttgaatgggaggcattgatcatgggcccagaagacacctgctttgagtttggtgtttttcctgccatcctgagtttcccacttgattacccgttaagtcccccaaagatgagatttacctgtgagatgtttcatcccaacatctaccctgatgggagagtctgcatttccatcctccacgcgccaggcgatgaccccatgggctacgagagcagcgcggagcggtggagtcctgtgcagagtgtggagaagatcctgctgtcggtggtgagcatgctggcagagcccaatgacgaaagtggagctaacgtggatgcgtccaaaatgtggcgcgatgaccgggagcagttctataagattgccaagcagatcgtccagaagtctctgggactgtgagacctggcctcgcacaggcgcacacacaccgccaagcagctcagcattctcccccggcacacttagtgacagtgatgctctgtgctggtaccaaacaaggcagacttgcaagaaccacggcatcttttttttttttcaaacctttcctacttcaaacaggcttctcttctgaaatgatgacttaatgtcgaatattgacagcttactgcagttttacagtattcctcacaaagggcttcaggtagattatcagagctgtcagcactacctctccccgctgaaaccagcagttcatggcttcctgtggattccctccctccctggagtgttgagggggttgtacctgccagacttccaggggacgatggaatacccagaacgctccttctgaagaaatgggggccctgtagctgcagcacaggggaagggcccggcaccctttctgggtccttcctgggttccctgtgggccccatgaggagtccattacttcctttcttccttcatattttacaggcagatgcttttcttataatctaattacatcttttcatttgttatatattacaaaccatcacacttagaaatacttccaggaaatgcttttttgaagtgtgaattaataagaaatggggtaaatagaaaagaaatttattgctgattggccaggtgcggtggttcgtgcctgtaatcccagctctttgggaggccaaggcaggtagatcacaaggtcaggaaattgagaccatcctggctaatacagtgaaaccccatgtctgctaaaattacaaaaaattacctgggccgtggtggtgcacgcctgtagtctcagctctcaag

SEQ ID NO: 50997 - DNA, 1595 bp, Homo sapiens
ttttttctaatacaatttaaatcaaatgataatttattctaagggtttttacaaaatacgaaaattttacatacataagaagaacagtataactgagcaacttacattctaattaaaactttgttgcaaaacatgtttgtgactactcttatgctgctttcatatagtaaagttataagaaaaacaatcatatatatgcagggttttaaaaaaataaactcataaaaatacaggcttgagacctattttagaattaagtcaaaacaagccaacaactgaattgtacctatggccagtgggtggcactaaaatacatttgaggcttgttttaactgtttgttttctcaaggcagaaaaacaccagtagtttcagtctcattgccctaatatggaattccatattttattagagattacagagtaaatagtttcttaaggtccattttttttttatcatcactgatgtctgtctccattccctgctccactttgagtatctttctgcgactttttcccacaacctacaaaggtcctgcaagggtaccagaccctcttaactgtggcacagaattgtggtgtgaaacacatgatggcaaacaagaacattttgcttcttaacaataccccatgtttaatgctctggggcagctttttctttgaagcagcagcagaaattcaattttcctagcttgttcaaatatcttatttaatattagagtcacaaattacacattttgttatatttaaatcccttgggccttgtaatcaaagaagcacatgcagattgacttttacatgctgtgtagtattccttaggtgcaatagatagaaagtgaggatatttgtccacctactcagattttcaagatcagattccaccggtttagtagttttcagtggaggagccagtggaatttgggctcatttggaaatcttggcaatcaaaagcattctgagaggcagtgttgcttcaatccaagtattgggggagtttaccatcttctcccagagagcaacttcctctgaagtagagtccatccagtccacttcagtcccataacttttacctgttccaaagccaatacgaagacctcccaaaaattggttggttaatttgtaatggtcccagacagtaagctctacacaggcttccatcagatcttcaggcctgaacccatcatacaccatagtgtggttgaagatagggttggtggttttccctacagctcttgtcttctggcgacttttcctacttgtatctggaaggatggtacatttaacaaaagaatttagatgacttccccttagcagtggtagatcaaggcattccttcacccagatgtgcacttctccagttgtaggaagctttttaccagggactggctctgggacatactggagagctagtttcatttcacctctgttttctgcttcaagggcaactggtgctgtcttccgcttcagagggtaccatctcaattgtttattctgtttgttatcccagtcccatgtttccaaatcaagttccacctcccctaggaaactattgcgcttaaatgtatcccgatgccaaatggacaggttcaatttctgtg

SEQ ID NO: 50998 - DNA, 1474 bp, Homo sapiens
ttattttcaatgctgctaaaacctgtccaacaatgccagcattgttctcagatcacaccttcaggcactatgcctacctccgagacagtctttctcatcttgttcctgccttgaggttaccaggtagaaaactggtgtcatcagctgtttctcccagcatcatacctcaagaggatccttcccagcagttcctgcagcagagccttgaaagagtgtatagtcttcagcacttggaccctcagggagcccaggagctgctggaattcaccatcagggatctgcaaagacttggagaacttcaatctgaattggcaggagtagctgatttctctgccacctatcttcgctgtcaactacttctcatcaaggccttgcaggaaaagttgtggaatgtagctgcccctttgtatttgaagcagagtgatttggcctcagcagcagcgaaacagattatggaagagacctacaaaatggaattcatgtacagtggtgtggagaataagcaggtggtgattatacatcacatgaggctgcaggccaaagctttgcaacttatagtaacagcacgaactacacgaggacttgaccccttatttgggatgtgtgaaaaatttttacaggaagtagacttttttcagaggtatttcatcgctgatttgccccacttgcaggacagctttgtgggacaaactccttgaccttatgccccgactcatgacatccaaacctgcagaagtggtcaaaattctacagaccatgctgcgacagagtgcctttctgcatctcccgcttccagagcagatccacaaagcctcagccaccatcatcgagccagcgggcgagttcagacaaccctttgcggtttacctctgggttggtggttgccctgggatgttgatgcaaccctggagcatgtgcaggatcctcagaacactgttaaggtccaggtcttatatccagatggccaggctcagatgattcaccccaagcctgcagacttccggaatcctggcccagggcggcaccggctcatcactcaggtttatctctcccacaccgcttggacagaggcatgccaggtggaagtgaggctgctgctggcctacaactccagtgctcgcattccaaaatgcccctggatggagggtggtgagatgtcaccacaggtggaaaccagcatcgagggcaccattcccttcagcaagcctgtaaaagtttatataatgcccaaacctgcacggcgctaaggcaaaaacagtcttcccaaccgtggcctagagggcccttcttaggtgtcagaatgagccaagcctgaagcacttcacctggaattgatgtgtaggcttaaggagtatgtgacccttacagtctcatctggtatcaaacacaggataaattgtttcttcattaaaaaataaaaaaccttcaagtctacttacccttctcctgtccacaataaagttgagaaaacacc

SEQ ID NO: 50999 - DNA, 875 bp, Homo sapiens
ttttttttttttattttgtccatattcatatatttatagagctagtatgtcaaaaactttacacagtgacaccattagcccctggcccacccctctccttcccacttctgtgttcgaccctacttagaccctggcacacaaaggttgatcaaaggcagtggccacctcagactagtgcaatgccagtcctgcaggggagaggcctggcaaggtgagggtgagtctcccacagtccaagacaggtcccagaccttggcccacccagcgaggacaaaggggcctcaggtctccaaacttagctcatgtaagagcaactgcccaccattgtccctgccatgccaacttatataggcatgaccctggcccagcagtgaggcaggctgagggcatggcgggctcaggcccgagagctgagggtggcaggtgcggagtagcgctggcgggcatgcttctcacagtacagctcgtcacccacccagaagtgcccgcgcatcttcaggttcagcccacagtcggcacaggtgtagcagccggggtggcggtaccaggccctcctggatgcgcacagcctggttcgcgatgctggtactgcacttctcacaagtgtggagcttgggaggggtggccagggccctggaggcgggcagggaggactgggggctcagtgagctgggcaagaaggctggcgtgccacctctctcctcagcctccagggcttcctgcaagagccgaaaggagctggactgtcggggggccgcccgtccctcgcgattttcctgcagcatcttgaagacttccgagtcctcgtccaggaggaggcttcccccttccgagtccatgctgggcctggaggaacgagggcccggggaaggcgg

SEQ ID NO: 51000 - DNA, 944 bp, Homo sapiens
  misc_feature (1)...(944): n = a,t,c or g
aatgtttaatcacaagtcagtagcatgacatcattagtagagtagagtctgctgacattacaatctattgatctccccagagttaccaaaagtagttcacaatagttaggcttccttctgtccatagttcagggcatattcaaagtctctaaagctgacgtgaccatctgaatctcgatctacttccctgaatacctcaagaacagtcctttccggtaatttgggagccacctgcctaaatgcttttttgaaatcttccaaagttaaaaatccacgatagtaggtgtcaaaggctgtgaagatgtgtcttacttcgttccgatatcgttgagcttccttctttttcctgacaatatttaaaaacccctcgagtaatataccagaagtatttggatttattgaagacatcacagaatccacttctatcttggagggcttgtacccaaacagcattacaacagcagttttaaagtcctctctgctgagatatcctttgtgatcttcatcacatgctttaaataccgcggccacgcccaccgcggttcaggaaaaagaaggaagctcaacgatatcggaacgaagtaagacacatcttcacagcctttgacacctactatcgnggatttttaactttggaagatttcaaaaaagcatttaggcaggtggctcccaaattaccggaaaggactgttctngaggtattcagggaagttagatcgagattccagatggtcacgtcagcttttagagacttnggattatgccctgaactatggacaagaaggaagnctaantttttgtgaactactttggggaactcagggggnnngattccactnggctacagttnantttaaaannnnnnnnnnnntttncccttcttttttcnnannnnnnnnnnccccncttttnntttccannnnnnttnnccnnncncnttntcc

SEQ ID NO: 51001 - DNA, 757 bp, Homo sapiens
tttttttttttgatcaacttaaaaagttatttattaaacaagttaaacacaactaaaagtatatttagaggtccaagattcaagtatttttgtcaaactttctaatgataaggggaatgataaaaattgaacagatataaaaaatattcttaaacaaatattaaagcacatggaaaattcagaaataaaaacacaccaccatataaagaaatcaaaatatttcatatgtttttaaatgcttatggtatgagagccaaattgtctatttccaggttaataaacaatatataagctcacctttttaaaggtatcatactttgtgtcatatagaaataattttggaaacagtatgtgttgggtgtgtaaattgtccacattaagcaaaacatattttacatatgaatattttcatttatacttactggaaaacaaaacaaaaaaacttataatttaaacatcttgatttgaaaataattttggatttgatagttctgctaaattccaacatcgtaaccgccgaatgtgttatcaaaagatagttattcaaaatttttttaaaaaagaattgcttccccaaatctcagtattttagagcaaaaggaaaaataacatattctttgttcataaattctgatgcttagtttctacgttaatacaaaaatggtgcaataaggaagagtactgtagaaaagccactgtcttttcagtagttccaaatggtgttatacaatatttcactggagatagtggttgcacc

SEQ ID NO: 51002 - DNA, 218 bp, Homo sapiens
cctccccaagcctcggacgtgcaggttgctgcttcactggaattcttctctcctcctggaaacttgctccagttgtgtcacgatggccaccaggtccccgcagtccttcttgtggaactcggtccaggccttggtcttgcagtacttgctgcaggtcaggatcccgtagcagcgagggcagggcaagaggcggaccccgatggagcggccacactggt

SEQ ID NO: 51003 - DNA, 2022 bp, Homo sapiens
ccccagagatgtataagacaatctctcaagaatttcttacaccgggaaaactggaaattaattttgaagaattattaaaacaaaaaatggaagaagaaaaacgacgaacagaggaggaacggaagcataagctagaaatggagaaacaagaatttgaacaactgagacaggaaatgggagaggaagaggaagaaaatgaaacctttggattgagcagagaatatgaagaactgatcaaattaaaaaggagtggctctattcaagctaaaaacctaaaaagcaagtttgaaaaaattggacagttgtctgaaaaagaaatacagaaaaaaatagaagaagagcgagcaagaaggagagcaattgaccttgaaattaaagagcgagaagctgaaaattttcatgaggaagatgatgttgatgttaggcctgcaagaaaaagcgaggctccatttactcacaaagtgaatatgaaagctagatttgaacaaatggctaaggcaagagaagaagaagaacaaagaagaattgaagaacaaaagttactacgcatgcagtttgaacaaagggaaattgatgcagcactacaaaagaaaagagaagaggaggaggaggaagaaggtagcatcatgaatggctccactgctgaagatgaagagcaaaccagatcaggagctccatggttcaagaagcctcttaaaaacacatcagttgtagacagtgagccagtcagatttacggttaaagtaacaggagaacccaaaccagagattacatggtggtttgaaggagaaatactgcaggatggagaagactatcaatatattgaaaggggagaaacttactgcctttacttaccagaaactttcccagaagatggaggagagtatatgtgtaaagcagtcaacaataaaggatctgcagctagtaccctgtattcttaccattgaaagtaagaattaatcactctttttatcttttattctattaatttttttttccttaaaatcacttttcttcttctcttttttagctgatgactactagctcccctcccctctccctggaactttctctttcactccaactttcttactacatccatcttttctgtggcggggccaaaaaaggaaaccaggagtgccactatgctgacttcttattccttttcataacagtcttcaaagcacagctcatctaaagaatgcctacttcttttccaaataagcatcagatttatcgcctattatgcagtaacagtcaataaaatgtacttatgggggggaattactcaattattctatcagaacctattataaagactgtatttcccatagacgtttacagcaactatgtttaaaaaacaaaaacaaaaaaaaaacacacaaacctaagtagaatacattattttgcatgaaggaatgtcatttctgagctttttacacctaaaattaggctgaaatagctgagataattaatttggaacctatcaatttgagtggactttttctttagtagtacaccattttggttgttgtagtttcaaagtctttctgaagcagatatattgggattggagcggggtggggaaaactgtcactcctttcagaggaaaaggggaggagcatggagaaaaacaaaaattaaaggacttaaagaatggctatacagtgttgagtgttgaggatattaaacatgttatttttcaaacgtatgtaatatatattaaatttataaagcaaatttatgttgtgatcttgcctgaacaaattatattttaatgaaaaaactttctattaatagttcacgcaagagaaaacactttcaacatagtcgaaggcttcaagatctaagtgtatcagacttagggaaaaagtggcacaaccttcgatttaaaattctagtctttaaaatgagtttgtaaataattagctattacgttctattaagttgttttatattttaattttctggaagacaattttattttacaacgtgaacccaaataaagtaacttctgtattt

SEQ ID NO: 51004 - DNA, 313 bp, Homo sapiens
acagattttggcttttattctggccatcacacatctacttctaagacaacacagaccggcagtaccccatcccccatgaccactgtcacaaccccaatttcctcagccccctcctcccaccccaccccttctgccaagctccccgtatgggggctctgcctacacctcaccccgggcatgcagcatgaagtgcccgtgcagctcccccaggttgtcgaaggaatcctcacattccgtacagtggtaggttccctcctcctcctcttcctcctcctcctcccgcccagctggtcggccctccccagcccgaggt

SEQ ID NO: 51005 - DNA, 392 bp, Homo sapiens
acaaaattaagcagcatatcaaggttcatgtaagttacagttattaggtttaatatttagttttaatatttttcacccaacatcttgttgcatcttccagaataaatctggggtccataaaccaaaccaggagagggaaaatggaaagagtgggcagaaatctgacagctcttaggtttcttctatttgtgttaatactgagacttttaaaaatcatttttatatgtagtgtttattatgaatagttgtaatttgttctgataaattagttgtattaaacactgttatttggctaatattactaggtataataaaatgatatttagtgggaagacattcatcaaagtagaagtagttaatttggccaggtgcagtgctcacgcctgtaatcc

SEQ ID NO: 51006 - DNA, 1548 bp, Homo sapiens
  misc_feature (1)...(1548): n = a,t,c or g
ggctgtggagaaggaaatagggcccggcgctgagtgagctcggttgcgtgtcctttgcagacactttctggggcgaggtgacatggcgagagtcttggatcggtggacgtagacggtagacagttcgcgtgctttccttcgcctacttggcctacatgccttctgcccgtgaagcgatgtttcccctcgaaaggccgtagtacgccgtcagaactgcggtttttcagtgagttttgacccctccgacgctccgtctctgacagaactcgcggcgttcttcgtacccgcccatgcctccgcggacgccgtgccatggcgactctgcctgcgccctgtcctccgtcggctctgcgggctcccgggcctacagcggcctgcggcagaaatgcccctccgggctaggagcgacggcgccggcccgctatactcgcaccacctncccacctccccgctgcagaaagcgctgttggccgccggctccgcggcgatggcgctctataacccctaccgccacgacatggtcgcagttctaggggagaccacaggacaccgcaccctgaaggtcctcagggaccagatgaggagggatccagagggtgcccagatcctgcaggagcgtccccggatttcgacatccaccctcgacctgggcaagctccagagcctgccggaaggctccctcggtcgcgagtatctccgtttcctggatgtgaacagggtctccccagacacccgagcacccacccgcttcgtggatgatgaggagctagcgtatgtgattcagcggtaccgggaggtgcacgacatgcttcacaccctgctggggatgcccaccaacatcctgggggatgatcgtggtgaaatggtttgaggctgtccagactggcctgcccatgtgcatcctgggtgcattctttggaccgatccgacttggcgctcagagcctgcaagtgctggtctcggagttgatcccatgggccgttcagaacgggcgcagagccccatgtgtcctcaacctgtactatgagcggcgctgggagcagtccctgagggctctgcgggaggagctgggcattacagcaccacccatgcacgtccagggcttggcctgagctcctgagccagcggggcctggcctacctcccccatcccctgcttcccttggaggcagagggctcccttgactacctttgttcctcttctttgaacactgacccttggacaacatttatcataatttgtcataaccactgctgagtggccttgaggacgaaccccgcagggagcaagcagtacagtggcattcccagggggaccagcagctacccaaggagaaccatgcatgaacagtatcagtcgtctgggctcatgctgggatgtcgcagtgctcctgttgcaactcctcccagccagccaggtttgctgggggccaggctgggtgtcctcacaggagtgagggctacacccaattccaaaagcctgagaagagagaagtggagggggaggcgagtgtgtgaataaaggctcccatcaggtcaaaaaaaaaaa

SEQ ID NO: 51007 - DNA, 436 bp, Homo sapiens
catagagatttgctccgatatgccaagctgatggagtggctaaagagtacagattatggaaaatatgaaggactaacaaagaattcagatttggagatatcttaaggaaaaaatttacattactggaattctttgccttttgaagttttaggaggattaatattctgaataattaaacataaattatatttccttaagagttttgtgccaacaagtgctttgtcccctagtgaatattcaaataagtaatcaataagctttttgcctaattgtgttcccagtgagtattattgccctatctttatatataatgcagtattcatgaatgtaatttaaagtgaagaaacaagattagagccaacctagtaatgatttatggaatcattctctgctcagagtatatttttgattgacaatattaatgagctttttaaat

SEQ ID NO: 51008 - DNA, 663 bp, Homo sapiens
  misc_feature (1)...(663): n = a,t,c or g
ctccaacctgccacgtgaacacgtcagtctgtgtgctgcctcttggacacctgcccttgaaagcctcaggccctgggagaagcactctgtccagtcctgtccccggggggagngcagggcactgagccctcctcagatggttagtggcttccaacagccatcaggagtgtttcttgaatgccccaggtgtggaggacttggtctgtgacacctagaaccccagagctgaacaggaagccgtccctgcagcaacaagagggctggaagggggagctgcaggccaccctcggctctcccactgctggggcggtgatgttcgggtgacatgtttgaaaaatactcttaaagataccaactgttcccttatatggctaatggtttggtgcagccaccagcgatggcggcccctattagagaccaggtttgttaaaacaccaaatattgctgtccacactagacattaaccggcttcagaaaagatggacaccttttcccacgctgtttcgcttcttaactttggtccagctttagccaccacacagcgtgtgagggactgctgctgcggagtcagcctcgtttgtccctccgcctcccaccagcacgcgccgcttctgagagacaccagctccctgcctccaagcctgggtgccacaggcctgtcgt

SEQ ID NO: 51009 - DNA, 470 bp, Homo sapiens
tttttttttttttttaccttgtattaggtatttatttccacaaaagtttgatgcttacaacataaacccaacaacccacctggaataggccatggaaatctaacaagcttttcacacttaagatatacctagagatttctgcttctcaaaatgtcaccttgcagtgagcaacctggtgccttggaaataaggcaacccacatcaattttgggacatcaaaaatgaattattttaaacatagatatatagtgaaagtaaatgtaaaattctccagatttctataaaacaaaacttaaaagctcaaaacccccagcctgtgccactaagggaaactcactccctctgccattaggattgtcaccatgggaaatgagcagacctactggcctccagtggaaactggatctctctctccaatctagtgatccctctttctaaccagctagtctaattagcaaactattaaagac

SEQ ID NO: 51010 - DNA, 959 bp, Homo sapiens
ggatagcatttttaaaaagagaaaggatgatgaggacagttttagaagacgacagaaagaaaaaagaaagagaatgaagagagatcaaccagctttcactcctagtggaatattaactcctcatgccttgggttcaagaaattcaccaggttctcaagtagccagtaatccgagacaagcagcctatgaaatgaggatgcagaataactctagtccttcgatatctcctaatacgagtttcacatctgatggctccccgtctccattaggaggaattaagcgaaaagcagaagacagtgacagtgaacctgagccagaggataatgtcaggttatgggaagctggctggaagcagcggtactacaagaacaaatttgatgtggatgcagctgatgagaaattccgtcggaaagttgtgcagtcgtacgttgaaggactttgctgggttcttagatattattaccagggctgtgcttcctggaagtggtattatccatttcattatgcaccatttgcttcagactttgaaggcattgcagacatgccatctgattttgagaagggtacgaaaccgtttaaaccactagaacaacttatgggggtatttccagctgcaagtggtaattttctacctccatcatggcggaagctcatgagtgatcctgattctagtataattgacttctatcctgaagattttgctattgatttgaatgggaagaaatatgcatggcaaggtgttgctctcttgccattcgtggatgagcgaaggctacgagctgccctagaagaggtatacccagacctcactccagaagagaccagaagaaacagccttggaggtgatgtcttatttgtggggaaacatcacccactccatgacttcattttagagctgtaccagacaggtttccacagagccagtggaggtaccccctgaactatgtcatggggattca

SEQ ID NO: 51011 - DNA, 1890 bp, Homo sapiens
tttaagtgggcagaagtgtagggttcagtgtgtcctgactcccttgaggcttataatgggccaagttgaagactgttgatgatccctggtgggtaaattgcagacatcaaatgctagggattggcataggctagtgtttagcttgtctatttgccatatctattttttttaaatttccatacacttgtaaaagtagttagttgcttttgattgagttatataggcagtttttcatttggtcttccactcacctttcactatatttgagtgttcccttacagggtatgttggcatgtgttggaaaatttacacaattaggtttaaattcagtaggatgtgattttaggatgctactgatcaaagtgatatctgtgtctgttggaatcttgatagctgattaatttgccctcaattctgctccctgaacttcacacataaatcttcccaagtgggttttagggtgtatagatcccagcaggattaaggaggtggaaaagcagctaacatttcttgaggctctaccacatagcaggcactgtcacagagtaatggcattaatccccataataatcctgtgaaggtgatattctcatcccatcttagacatgaggatattggaactcagagaggtggctattgcattgcgcagaacgctacagagcccatgctcttcccagagcagcacccacaaaagcaagcattgattttgtgctcagtgtgtgccaagcactgtgcagagggtacacagttcctgccaggttaacaccctcccttcaggcctcccaaaggcataggcttgcaaagagcagaaggtgtgaaatcacactcttcctctgggcatcctggatccctgaattatccccccccccatgaagtacttcaagggccaagctgcccctttccctcctcttcgcccatgaaaatgcctccaaactgagatgctttcagctgagaacagatttgactcacagacattaccaaagaggagcttgtgaatccaggaaaagctccagggggctagctgatctgagcagagagctttcagtgacccattttcctgtctagactctgccttaagctagtgggcaactgctgggggccccgggtacttggggacatgggaaactcgttgggatgggctggggcagatgtaagcctgtccatgcagtcagccgatcctctgcttaggttcagctggactctgccatctgtgggcccagcatcactctgtaagttccttgaaaggaagaacaaccttagagtatttctgatacaaaatgagggcctctgcttttgatttaattataaaatgtctacgtctttctccagtttctgagccctatgcacattggcttgtgggcttgttcttcctgccaaatgatcagagaggaacattccatttatttgtagtggatttcctctggagggcatgtacccacactaaataccaactgctcttcctcagctgtagtccccaacatcagacttggcacgtggtggacactaacacacaggcactcaatgaatgagtgaaggaaataaaagtcaccccgttggtgagaggtgctatccctgagtctcagtgcaggaccagtggatgaaaggcaaggtaaagaggcccaagataggctggcttcccccgttcaaggtatagtctgcctttaagggagttttagaaccaacatgcaagacattgaaagaaatcttgcaagagccattattgacttagatccaaaacagcctctctcatgtctaaaaaggcacagaattttgcagatctgaggaagagggatgcattacctttttgcttcttttcaattgcttagtgtttctaatcatacttaatccacactaatgtgcgcaattataataaatggtaagatatcaaaa

SEQ ID NO: 51012 - DNA, 789 bp, Homo sapiens
ggtcgacaccgctgagagcagctgcagtagctgagtagtggcagcagagaggcagacgtgagctgagggcgcagaggcaggcagcatctctgagggtccccaaggaacatggctgggagccgtgaggtggtggccatggactgcgagatggtggggctggggccccaccgggagcagtggcctggctcgttgcagcctcgtgaacgtccacggtgctgtgctgtacgacaagttcatccggcctgagggagagatcaccgattacagaacccgggtcagcggggtcacccctcagcacatggtgggggccacaccatttgccgtggccaggctagagatcctgcagctcctgaaaggcaagctggtggtgggtcatgacctgaagcacgacttccaggcactgaaagaggacatgagcggctacacaatctacgacacgtccactgacaggctgttgtggcgtgaggccaagctggaccactgcaggcgtgtctccctgcgggtgctgagtgagcgcctcctgcacaagagcatccagaacagcctgcttggacacagctcggtggaagatgcgagggcaacgatggagctctatcaaatctcccagagaatccgagcccgccgagggctgccccgcctggctgtgtcagactgaagccccatccagcccgttccgcagggactagaggctttcggctttttgggacagcaactaccttgcttttggaaaatacatttttaatagtaaagtggctctatattttctctacgccaaaaaaaaaaaaaaaa

SEQ ID NO: 51013 - DNA, 808 bp, Homo sapiens
tcctgaagagccacctctaggaggcagcccctaggagcacgcacgttctgtcagtattaccccacctgtcctatcaggtgggccacaccctgcttgcccacaccagggtctgtcctggtcctcaagccacgcacccgctatgcctgcactgcagcccagccccggacagctccaggatccgtgcagtggctgcgcgccagggccaacaatggggaccctggggtggctcctggccaagtgttctctgttttcctcgcacctccttacactgtgtgacctgcagggcatgaaggtattgatgtgttcgggtttcctttcccaagccagcagatgcaggtgttccaaggtgtgttgctctgtgggatttgtggacacttaagaaacggactgagtgggaaccctgcagccaggggatggggagcctctgctccccccatgctcccaccctggctgagggccagcctcatctgcagagccctggaggaggcccacctatggacacagcccgagagatgggcgcaaggggtgctgggggaggcctgctatcctgcctctgggccacttgaggggcctcaggaagtgtgtgcttgtggctgcatctgcccgtctccctggcccaccatgtggctgcaggccaagctcttcattgctgaccatgaagagacctagttacctgccaagggattccccttccctcctcctcagggtggggtgaacaaggctcctatcccaccccaccccaaaaagagaaaaatgaaaaactcatagtttggagccaggaggcagggtgtcctacagggctgcacag

SEQ ID NO: 51014 - DNA, 1522 bp, Homo sapiens
gctagataccctccttggagttgcaagtattctttcaaggttggaagagggattttgaagaggtatctctccaagcaagaatgacttgtttttccataagggacatgagcattttactaggcttggaagagctgacatgatgagcattattgtatgtttgtatatacatttgtgatagagggctagagtttgacctagagagagtttaaggaagtgaaatatttaattccagaaccaaatgcttttgtaaaactttttgggattttgtaaaagcattttcattctcttagaaattccaagtattttcaaggggagtcatttgagatatatttattttactaggagatcttatattctagggaaatgctttaaatggtcaggctccaatcggaatttttttaagaaaaaagtagtttttaatacattggttaggactcagaggaaatacggaaaaaacattgtagatggttaatttacagataaaatcccaagagccttttaaacaacaaggtacctaaaatagggtataattatactgcttaaaatacagttagtgcctattaatagctttttatttcctatggggagatgcttttggtcttctggctgaagatgtaggcatacctctcactcatttcaatgttttcctgaggtggagccttcattggaaaggggaaagagggattctagggtttcatcagggaccaggaatgcattcctctgtcaggttccaatcaagagaagaccttttatgagatctgcctctgtatagatgttgtcagttaggaaactgaagccataggtcaggcagacatcagctcagcctgtgacccattgggtgatttcctgtattttaaaactgacagtagcctgatcaaagtgatacaatcaatttcaaaacaatcttccagagaccacttgaaggttcatagtttttacaataccctgagacttttcaggtgttggagcctctaaaatatgagatataaacagaaactaatacaagttgttctctggaggtttctatgaggttcttaggaaaaatttggttttaaaatcatttgaggacaggaatgtctatagcaagtttactcctattgcgaatcatgtatgctgggctttagttgtaacaaacgattttattctaagtaaggccaggtgctactataaaatcatatattcctgttgaagttcttttgaagtcctatctctatttattatatttggaaagttgtcagccaccagtcatccagaatttccttcctgaatctccatgctcatatgcaatgtcctacatcaaggtcttcttaatgactattattctcagggtttagttttctaccttctgcctactattttggtctgacatttttgtagccttctgttattattggaaatagtctcttacataagctgatttcgagaactttcaaaatctcacatagctaatggaagttgctttctgctttcttatgactgtttttataaataaactgtttcataaataatgtaaaaaaaaaaa

SEQ ID NO: 51015 - DNA, 343 bp, Homo sapiens
gttttaagaaagtttaaaaatttgtgttggacttcatgcgggccacaggttggacaagcttgccctagggcattgtgtgctttccgtaacttctcagttgtatttcgttatccatgactctccagtgttttttctgttggaccacacccgtcacagttcacagttccaaagagaaatttcccagcctattctaaatcttgttaatgacgaagagtccaatgtatctcattatttgtagccaattttagactcttttcaatacctcccccccattttaattagtattgatcatattcagtctttcattttactcttcatctgtagcgtgacctcaaggtaaaga

SEQ ID NO: 51016 - DNA, 1592 bp, Homo sapiens
gagacactccaggacctgctcacttcggactcacttagccacagcgatgtcatgatgacacagtcggaccccttgatgtctcaggccagcaccgctgtgtctgcccagaattcccgccggaacgtgatgcttcgcaatgatccgatgatgtcctttgctgcccagcctaaccagggaagtttggtcaatcagaacttgctccaccaccagcaccaaacccagggcgctcttggtggcagccgtgccttgtcgaattctgtcagcaacatgggcttgagtgagtccagcagccttgggtcagccaaacaccagcagcagtctcctgtcagccagtctatgcaaaccctctcggactctctctcaggctcctccttgtactcaactagtgcaaacctgcccgtcatgggccatgagaagttccccagcgacttggacctggacatgttcaatgggagcttggaatgtgacatggagtccattatccgtagtgaactcatggatgctgatgggttggattttaactttgattccctcatctccacacagaatgttgttggtttgaacgtggggaacttcactggtgctaagcaggcctcatctcagagctgggtgccaggctgaaggatcactgaggaaggggaagtgggcaaaagcagaccctcaaactgacacaagacctacagagaaaaccctttgccaaatctgctctcagcaagtggacagtgataccgtttacagcttaacacctttgtgaatcccacgccattttcctaacccagcagagactgttaatggccccttaccctgggtgaagcacttacccttggaacagaactctaaaaagtatgcaaaatcttccttgtacagggtggtgagccgcctgccagtggaggacagcacccctcagcaccacccaccctcattcagagcacaccgtgagcccccgtcggccattctgtggtgttttaatattgcgatggtttatgggacgttttaagtgttgttcttgtgtttgttttcctttgactttctgagtttttcacatgcattaacttgcggtatttttctgttaaaatgttaaccgtccttcccctagcaaatttaaaaacagaaagaaaatgttgtaccagttaccattccgggttcgagcatcacaagcttttgagcgcatggaactccataaactaacaaattacataaactaaagggggattttctttcttcttttgtttggtagaaaattatccttttctaaaaactgaacaatggcacaattgtttgctatgtgcacccgtccaggacagaaccgtgcataggcaaaaggagtggagcacagcgtccggcccagtgtgtttccggttctgagtcagggtgatctgtggacgggaccccagcaccaagtctacgggtgccagatcagtagggcctgtgatttcctgtcagtgtcctcagctaatgtgaacagtgttggtctgctggttagaaactagaatattgatattttcaggaaagaaatcagctcagctctccactcattgccaaatgtcactaaagggtttagttttaaggagaacgaaaaggaaaaaaaaaaa

SEQ ID NO: 51017 - DNA, 2861 bp, Homo sapiens
agaaacacaagcaaatataaaacattcaattctaagagaagttcatcagagacatccttcaggattgtgagctggattttcctctacgtgcttcagtcttctctacacaaagagctgcaaaccaggtctttgttttgcactcttatttcaagcagaatgagtgctcctaaactcctctctctgggctgtatcttcttccccttgctactttttcagcaggcccgggctcaattcccaagacagtgtgccactgttgaggctttgagaagtggtatgtgttgcccagacctgtcccctgtgtctgggcctgggacagaccgctgtggctcatcatcagggaggggcagatgtgaggcagtgactgcagactcccggccccacagccctcagtatccccatgatggcagagatgatcgggaggtctggcccttgcgcttcttcaataggacatgtcactgcaacggcaatttctcaggacacaactgtgggacgtgccgtcctggctggagaggagctgcctgtgaccagagggttctcatagtcaggagaaatcttctggacttaagtaaagaagaaaagaaccactttgtccgggccctggatatggcaaagcgcacaactcaccctttatttgtcattgccaccaggagatcagaagaaatactggggccagatggcaacacgccacaatttgagaacatttccatttataactactttgtttggacacactattactcagtcaaaaagactttccttggggtaggacaggaaagctttggtgaagtggatttctctcatgagggaccagcttttctcacatggcacaggtaccacctcctgcgtctggagaaagacatgcaggaaatgttgcaagagccttctttctcccttccttactggaattttgcaacggggaaaaatgtctgtgatatctgcacggatgacttgatgggatccagaagcaactttgattccactctaataagcccaaactctgtcttttctcaatggcgagtggtctgtgactccttggaagattatgataccctggggaacactttgtaacagcaccgaggatgggccaattaggagaaatccagctggaaatgtggccagaccaatggtgcaacgtcttcctgaaccacaggatgtcgctcagtgcttggaagttggtttatttgacacgcctcctttttattccaactctacaaacagtttccgaaacacagtggaaggttacagtgaccccacgggaaagtatgaccctgctgttcgaagtcttcacaatttggctcatctattcctgaatggaacagggggacaaacccatttgtctccaaatgatcctatttttgtcctcctgcacaccttcacagatgcagtctttgatgaatggctgaggagatacaatgctgatatatccacatttccattggaaaatgcccctattggacataatagacaatacaacatggtgccattctggcccccagtcaccaacacagaaatgtttgttactgctccagacaacctgggatacacttatgaaattcaatggccaagtcgggagtttagtgtacctgagataattgccatagcagtagttggcgctttgttactggttgcactcatttttgggactgcttcttatctgattcgtgccagacgcagtatggatgaagctaaccagcctctcctcactgatcagtatcaatgctatgctgaagaatatgaaaaactccagaatcctaatcagtctgtggtctaacaaatgccctactctcttatgcattagtatcacaaaaccacctggttgaatataatagattgagttattaactgtattttctttcactttattaccttctttctaatacaagcatatgttagcattaaagttctaggcatacttttcaaagctgggaagaccctttcagaatcttttcaatgggttttaattttcagttctatttaaaatggtgaatgacactaaactccatgatatttaaggatagtgtgaagatctttggcatgatttaaaggttgagtatgtgaagatataagtgaactaccatgctttgtttacgtgtaaaggaaaataatgtttgatagtaaatgtccacttaaaatacatgaatgggcatttctaaaatgttaaaacataaacacatttccattcatggatatttgtcaacagatttaaagaaaaccacagttattaattaaagaaaattaattatgtgtagttataaaccaatgaaattttgattaaccttttcaaattaatgttccagtttgaagaccaatcaaatatattatttagtcaacatatactatttagtctcaggttcaaggctacaacaaaaatcaccatctttgtcaaactttggagagggaaaatcttcactttcttaagcaacaatggatattgcctgtgtttgccactgtgtttccctgcctctcaattcgctgaaaaaggaactacctatccttacatttcacctactaatgtctcttctaacatcttagaggtccatggagaaggcatatggagaacatgttttatactgctctataaatagtattccaatcactgtgcttaatttaaatagcattatcttatcatttatcagccttttatgtattttccaagtaaaatattaacatattatttcattggtcttcttttttatctggttctatatgaatgctattttttcccttctcttctaacatgaaatatattttctctttttgatcttgtgctatgaaacaatcttaccaaagaactgtataaggtggtcataagtgaatattttaattaaaattggtaaaaataaaaaaaaaaaaataaaaat

SEQ ID NO: 51018 - DNA, 443 bp, Homo sapiens
gtcaggtcttctctgactcctaggacattcctctctctgtctttgggggttgaattccttgttagaactccatcttgttaaaggggcctcgcacctgcccttgccttctgcagcagccctccttaatcctctccaaactcccgtccccaggccacacagattctcctcaagagagccctataaggacattggtaaaatgtcactgccttcaggacacactacgggtcacactgatcaagttgttcaaagaagagcaagatgttgggatatttaccaaaggagatttagcagtaggtctgaacctgtcaatcctggcatgcattcttcatcccatcagcagcaagatggagatgcagcaatgcatggtgcccacatggactctccagtaagatacactccctatactatttcaccctataatcggaaaggcagttttcgtaaac

SEQ ID NO: 51019 - DNA, 96 bp, Homo sapiens
tcccccaggatacagggtcaaaggagagcacaaccatcgcagttggaagcccatggggcagggcccaggacacagtgagcatacaatagacattag

SEQ ID NO: 51020 - DNA, 352 bp, Homo sapiens
cagaaatgagaaaacagcttcgtagtgaagagaggcgtctacaagagcgattgctacacatggacagtgatgatgaaattcctatcaggaaaaaggaaaggaatcccatggatatatttgatatggctagacatcggttgcaagctcctgtcagaagacagtcccctaagggcttagacgctgccacttttcagaatgttcatgattttaatgagctgaaagatagagattcagaaacacgagttgatctgaaatttatgtacctggatcctccaagagatcatcacaccttagagattcagcagcaagccctgctaagagagcagcagaagaggctgaacagaataaaaat

SEQ ID NO: 51021 - DNA, 542 bp, Homo sapiens
gaatgaacctacaaattcataaatgcttctctttattttgaaggaaaaagatacttgtctgtatacgacataattgttttactcttcagaatgtgaaagttatattaatcactaaacactttaagaagtggttctggtaggatatcagtagtcagacttaattgaaaaactgtcagcgtctgttttgtatatagggattaaagaggataactttattttttcctttggaaagaataattcttttggaattttggaattttgattttcttagatgactttttagcaatttaatgataataatttctatttttcttccaaaactatggcatgttatagtagatcttactattaaagatcttttatattttaaactgtttttttcctattctgctttttgctgctctcaaagactgtgattgatgaacatcaccaaactttttttgtggcaaactgcttattttaataagtagctttatataagagaccttcttagaaaactatgtggctggttggttccatttagaaactcttaacaggtatgg

SEQ ID NO: 51022 - DNA, 267 bp, Homo sapiens
  misc_feature (1)...(267): n = a,t,c or g
cacatctagtaacagacaaagctgggatttcagtctatgtctgcctctctccacatctctttcatccataccacactgcctacatgccatatgacaggatgtgtaatgggctaacgtttatttaaaaagttcaggccaggtgcagtggttatnnnnnnnnnnnnnnnnnnnnnnnnnnnnnnnnnnnnnnnnnnnnnnnnnnnnnnnnnnnnnnnnnnnnnnnnnnnnnnnnnnnnnnnnnnnnnnnnnnnnnnnttttttaaaatt

SEQ ID NO: 51023 - DNA, 1313 bp, Homo sapiens
  misc_feature (1)...(1313): n = a,t,c or g
tttttttttttttttttttctagaatccgctttattatggcacctggtgggtctggtgggatctgagggaggaagaggctgcagtcttgctgggcagcccctcggtcagtccagcagcccctcaggccatgctgctgctcagctgcatggcaaagtcctgcacatgctccttcagagtctggcgggcatctgcctgtgcccgcttctcccgtgcccgctcctgctgcagcttggtcagtctcaaccgcagccgctgctcccgccgcttgcaggcctgcagctggcgctgggccttgtcaagggcatcaagggctgcctcggctcgccgcttccagagtaaggcgctgcccacctggtagctgtgttcattctggatgtaggctccggcgggtgggggcaggcgcagcatatacgctgagggggagactggccgtggttcgagaggggagggctgccgctctggtgaaggctgggcgctgcagcctgcttcatctgcctgggcacccaaggggcccagtaggtctgaaaaggggctgctaaggccaggctccagcctcccagctggggaggccggcaaagtggcaggtgctgaggcctcttccacaggaaagcaggtgacatcagcaggtggaggtggagaaaatggagttgtgggccctcggccctcggagcagcgcttcctgcatcgtctgagccggctgacttcaggggggccaggtgggtaactgtgtcctttggtcttggttgtccggcgcaacttggagaaagactcaaatatggtggggactgccccctcctttagcctgtgatatccactgattcccaccagctcaaagcagtcctcctcaaagtgtttggagcagaagtagatgtactcggatgccgggtcccacaggccctggccgctggggtccagccgctggcagttggccagccacaagcctcgcctcgggttgtccttcttgggaagtctgtggagccacaaacccgtgagcaccaggctgtccacagccctgggctcatgctgcccaagcaccccagaggggaaacgcagacccaacacgcgccgccacgagacctccctgcgaacccgccgggtaagcaccaccgcccgggcacagacgaggcaacggaggcctcgagaagaaaagcagtttcctcagcgtcatctggcaggtaacagagtggggcgggtccaagccggctagacttcccgtcctccccttcccgactgcatntcgatccgccgggaccgttccgcttcacctcccacccacaggttcaagcctcctcagtatctgagaaaggcgcgc

SEQ ID NO: 51024 - DNA, 498 bp, Homo sapiens
gatttggaactattccacttgtgttatgtgcagatcttaattctttgccagactctggtgttgtagaatatttgagcacaggtggagtagaaacaaatcacaaagactttaaggagttgaggtataatgaaagtctcacaaacttcagctgtcatgggaagaatggaaccaccaatggaaggatcactcatggtttcaagttacagagtgcctatgagagtggcctgatgccttacacgaattacacatttgatttcaagggtataatagactacattttctattctaaacctcagctgaacaccttaggcatcctgggccctctggaccaccactggctggttgagaataacatcagtggctgcccgcaccccctcatcccctctgaccacttctcactttttgcacaactggagctcttactgcctttcctgccccaagtcaacggcatccacctttcctggcaaggaaggtaagtcaagcaccttcagaggactg

SEQ ID NO: 51025 - DNA, 448 bp, Homo sapiens
tcaagcccatatccttgaaaacattgccatattttgagatcattaactagatgaataggaagtttagaatatgaatcttgttttatttccagaaaggcaacatttttaatgtaaaaatatttcctatagcttatatagtttatttaccagttattacccattaatgttcagcaaattagtacataatcttagtactgtcaattctgttcttagggatatttgtttctttgtcaaagggatattgtccatgtcatggaaatattgacaatatgataaaaatgtttgctaaattaggaaaaggtgatgaatttggaggaaggggaattgggctgcacctgtttctgatatgttcagaagcttaatgaatataatattctaatttaaataaactgtttgattgagaaaagaggtagcccattattgtttagaaatgatagactgttattga

SEQ ID NO: 51026 - DNA, 902 bp, Homo sapiens
ttttttttctctttaaaaaatacacacatttaatgttggtctgttttaatttctaagtaaagcaattccaaaaatacaaactgaacatcagagccatgtgaaccaccatgagaaaataaaacagacattcacaataattacgtctaaagacagttcagctggataaatcatcttccaagtatgttaaagaaaaatttctaaaaatactgctggtgttcagttagaattaaaggactttggggaaaatgaaataatatgatacaggtggagtgaataaggatacacgggatttacatttttcattacccctagatataaacaaacattcaaaaatcaacacaaactctgtgtgttattcaaaatattggcagctgcaggaaaggcaaccttaaattaatagctaggggaaaatcaagttttggtggaggtaaacagaagtaacagtttttaatttgcacttttgtaaagctcatttatacctggccaaccaggaaccaaatgcagacaatgaagttctctgcttcttttggctataatgtgacaagaaaggatcatcttttgaagatgtttaaagaaataaagcaactttctttataaacagtcaaataatcaattaatggaataaataagtactaacccacattttaaccactctgtaatcactacactttacatattttttattttggtggcaaattcccccataattagtctaaaatccaccaatcacttttaaaagtaaaatgaatagccaccaaaataagaaaatcttctgttcactctttggctaaaaaggaaaacaaataaaacaaaacaaaaagaaacagaagacaactgtaacactggtgataaaagaaactttttttttacaagtaaaataaagttatcaatttaaatcttgg

SEQ ID NO: 51027 - DNA, 691 bp, Homo sapiens
taagccaagaactgaatatacagtagcagtgcagactgcctcaaaacaagttgatggtgattatgttgtgtctgaatggagtgaaattatagaattctgcaccgcagactattcaaaagttcatctaacacaattgttggagaaggctgaagtgattgcaggacgcatgcttaagttttctgttttttatcgtaatcagcacaaagaatattttgactatgttcgagaacatcatgggaatgctatgcagccatctgtcaaggataacagtggtagccatggctctcctatcagtggaaaattagaaggcatcttcttcagctgcagcactgaattcaatactgggaaagccaccccagggatttcaccttatgggaaggatacaggtttgagattgccgcaggaaaaactttttaaccccaatactaacttatactttggggacttctactgtatgtacactgcttatcattatgtgattcttgttattgctcctgtgggatcaccaggagatgaattttgtaagcagcgccttcctcaactaaattctaaggataataaatttttgacctgtacagaagaagatggggtgctggtttaccaccatgcccaggatgtcattttagaagtcatttacactgaccctgtggatctttctctgggcaccgtggcagaaatcactggtcacagc

SEQ ID NO: 51028 - DNA, 544 bp, Homo sapiens
gcgtccgcttctcgaagctctccccgagcctcagcaatgttcctcgcggtccagcagcgggtttgcggtcccattcatggccccgcacctgcctcgcacccagatcggcgctctcccggtgcagccgcgatccgagcttctggcgctggcgtctgggaggactgtgcttccgggccaccgctctggaagacaaggagagccgagccggacccacccgggtccagaagcaagttctctcctctgcgtggggccccctgtgctgtttgaggcgtgaaactcacctcaggaaatgtatctgatccattagcgtggattcatattatttggtgatggagaatcttcagctgtgttaagtgttacccgtcagtttcagagatggcttctttgcaaaggaaagggctgcaggcaaggattctcacctctgaagaagaggagaaactgaaaagagaccaaactttggtgtctgattttaaacagcagaaattggaacaagaagctcagaaaaattgggatcttttttacaaaagaaatagcactaatttct

SEQ ID NO: 51029 - DNA, 1340 bp, Homo sapiens
  misc_feature (1)...(1340): n = a,t,c or g
gtaaaaggccggtgaaagaagttgttttaaaaattaaaaggcccaaaagtattacccccctggaaaaaattaatttccccccaaagtttttcccatatgtccatgaaaaccccctaatcctggaccctttatgaacacagtggccattaacactgatgttgggaaagccatgtgtgagatctgtgccctggtcgggagtcatatgcccttaaaaatgactgcgagtcagtgtgaagtagtataaagtggagtcctacgtgggaaaaagcaggctactgaggacaaaaacctcccaaccctccccaccttgttttccactgggaatgagaatttgatatgagaaacttcaaccttgcagaagtgtggatttccctctgaaatttaaatgtttcacacatttttgtaccttttgtaaccttgtggtatttactttcacatggctttttaaaaaattattttaatgaacttctatcacactatatgaatgatatgggggaaatactgaactgctcatatttccttttttggcaataaagcactgttatatgtaaatgtaagtgaaaaagaggttcaagactatacaacagcttatgtgtagtatatgttgacatccctaaggtattttgaaacatgaggtgacagacaaggacctcaaatttccagggaaatatttatttcacaacattaggagtgtagctcttcataatgaaatatcttctttctgctaaagattacaatttttcatttagggaactgtgaatattttctgtgaggtttacagaaactagtgtatccttttcactatgttgaaaagacaatctgaactttagctatttatatttcagtattaacacaccttcactgattgagagtcttgagcccttctctacttttataaagtgaatcctatttccaagtcatccatgtcttttgaagtctgtttcttatataagtatttattactttactgtttagcataaataggagacagaaaaggataataaactactaggtcctttattcctattaaaataaatttataaatcccttgaatcaactgaattctaagctttttgaagaggttgctgatgtagtgtgatcaaaagaatctaaggagaacctcctctccaaaatctgattggagctgttcaccctctcaaggacaagataaagattgacttcagagatatatcacatcaagctagaggaaaaaaaaaaaacctcaaataaaatttttcctcattcgaagggntccagggtatccttgggttatgtaggagggaatcatatttgtnctaatttacctgaatgtacttgtgtgtgaatccaatcttgattct

SEQ ID NO: 51030 - DNA, 949 bp, Homo sapiens
actccccccaccccacttcgcctgccgcggtcgggtccgcggcctgcgctgtagcggtcgccgccgttccctggaagtagcaacttccctaccccaccccagtcctggtccccgtccagccgctgacgtgaagatgagcagctcagaggaggtgtcctggatttcctggttctgtgggctccgtggcaatgaattcttctgtgaatcctgacaggtggatgaagactacatccagggacaaatttaatcttactggactcaatgagcaggtccctcactatcgacaagctctagacatgatcttggacctgggagcctgatgaagaactggaagacaaccccaaccagagtgacctgattgagcaggcagccgagatgctttatggattgatccacgcccgctacatccttaccaaccgtgggcatcgcccagatgttggaaaagtaccagcaaggagactttggttactgtcctcgtgtgtactgtgagaaccagccaatgcttcccattggcctttcagacatcccaggtgaagccatggtgaagctctactgccccaagtgcatggatgtgtacacacccaagtcatcaagacaccatcacacggatggcgcctacttcggcactggtttccctcacatgctcttcatggtgcatcccgagtaccggcccaagagacctgccaaccagtttgtgcccaggctctacggtttcaagatccatccgatggcctaccagctgcagctccaagccgccagcaacttcaagagcccagtcaagacgattcgctgattccctcccccacctgtcctgcagtctttgacttttcctttcttttttgccaccctttcaggaaccctgtatggtttttagtttaaattaaaggagtcgttatcgtggtgggaatatgaaataaagtagaagaaaaggccatgaaaaaaaaaaaaa

SEQ ID NO: 51031 - DNA, 513 bp, Homo sapiens
ggacagtgtcagagtagcagtggccacatggaggaggaggcccacccggaactctgctcacactggccactgcagttcagcccacagagccactgcaggcaggcctacggacgtgacacgcacgctggtggtcccggagccagggttgattcaggacaccatcttggactctttcctggcctgctcagcacctgcccagatggcctctgcgtctttcctgtgccccagccccaccttttccacctctcttcatgttctcatggagtgcaaagtgcaccagccagggcccctacctgggagagggtcagctgacgcagggctgagggggctgccacagggacgtacgctgtgtgttcttactgcttagaagggacggggtcactcaccactcccctgggtctccatctgggctccttggtcttccctgcccctcccctaaccgtgttctacctgccagtggagctgagcactgcctagcctgggccagaggggcactggacaagggcctttggg

SEQ ID NO: 51032 - DNA, 420 bp, Homo sapiens
ggacacccattcagtggctcttcagaaagaacaaattcactgggtggatataacacttaaggaaaatgctcaataagccacccattgagtctcagagcaacctgaccaacaaggtgaaaaccatttaaaagacacattgtcttgctggagaaccttcctcccctgggtttcaccatggaacttcagcattacatgactaatgggcacgtaaattaaatgttactaagcaagagactattctcacttcttgccaccctgagcagggcagggaagccagccagcagtcacagtgatggggacagccttaaaggcccatagtcacttggaagacaatggcagagcccttaggggtttgcccaagccaggtaggatgttagcaccagcctagtgctcaaggatgaggacagttacatccaccag

SEQ ID NO: 51033 - DNA, 399 bp, Homo sapiens
ccacgcgtccggttaagtctatggcagagtcagattcttttatgtgtctaactgttgcgaagtatagacttcttatatcttatatggtgaccattaacatataacgagcatgctagcatattgttgtctttgagagcaccgtatcaactttttgatctgtagaatgacagaagccacattcgatactctgcgactctggttaataatcctgctgtgtgcttgcggttggccatgatgcgtagtcacctgcaagcttatttaaatttagcccaaaaatgtgtggatcagatgaagaaagaagcggggcgaataagcacggttgagctacagaaaatgggaagttttataccctagtcaaaatgaaaaatagcaaaaaccgcactgtaaaaaaaaaaaaaa

SEQ ID NO: 51034 - DNA, 1138 bp, Homo sapiens
ttttttttttttttaaatagaaacctttatttacaatgacatccaaaatggtcagcaaagcagtcacagctcaccatcccccataagtcatttcatgtggtttcaattctttgcaagataaagaataatttctatttttttaagcaacataatgtaaacttgattgaaactgaattcattctcaagagtataagtcaattcctgagaatttaaatattgctctcatattttattcttcgaaactccatatattagaaaggaagagagaaaacaccctgctcgtttattaacagtgtgccttggagttgaaaacaataaatcaatccttgaggttttgctcctaggaacctaattgtgaacaaaactcacagcttctgcaaataaaaagggaactgggcaggcatacatgtaactggcaatccattctgtttactttcagctgcacccacctctggatcaaagaacttctaggacatcaagccaattatcttctgtaataccctacccctaatatagatacccccaactcacctcagatattaaatactgataactaagtagcactgttattgatatttacacctttcaatccagatgcagtttagaaaagtggcatcataatatgaacattaacaatgtaacttccgtttattttttaaaggaagaaacatgtatctcctttatatcattctgatctttataaaatatatatattttatttatatatctttggattcagcaaaaaaaaaaaaaaaaagtaggtactggaaatatcccacattctaaaagcagatgaaaagattatactgttcacccaacagataccaaggtttgaaaaaatggggggtgctggggtgtgaggagaggtagacagcaggagtacaaagaattacctaaaaaagataaagggcaatacaggtaaaaacaaattatctcaaagactgcacctattaaaagaaatcttgagtttgcaccaaatgaacaagtagaaaatataaaaacttataataaacttcatttttctactatataaaaaagagagtgctgccttccagttagcctggagccaggtttgaggaaaggattgcaaaaaaatttattttttttttgtttttaataatttttttaaagtcaagaa

SEQ ID NO: 51035 - DNA, 354 bp, Homo sapiens
  misc_feature (1)...(354): n = a,t,c or g
cccagcccagctctgactccctcccttcctgcagagtccgagcgagagcgagaccgggatatggcagacaccccctgtgagctcgccaagcgggaccccaagggcgtgggtgtgcggcggcggccggcgcggcctctggagctggacagtggtggggaggaggacgagaaggagtcattgtcggcgtcctcgtcctcatccgcgtcatnatcctcggggtcctcaaccacctnaccctcgtccttcggccttccgacaaggaggagggaacagggagagcaccgagggaggnaagagggagggcggaaggagggagganggaggaggaagttncccagggagccagtttttctt

SEQ ID NO: 51036 - DNA, 1747 bp, Homo sapiens
  misc_feature (1)...(1747): n = a,t,c or g
tttttttttttgatgtttcaaaaattatttttattgttacattccaaagaggacataggaagaaaaaagccagttatccaataatggttagacctttcagaagaggcacccacaaccccagccctagttcaaagctgcacacattggagctcaaacagctgcctctcaccacgaccggaaatgctgacaaatgtgtatatattatcaatccagggaggcttgggtttaaaataaaatttctttattgcaagtgtcccaagtccttaggatttgtccttaaaggtactagaagatgagtaagaccacacacaccaagactatgtttagtctttagagtaaactagcaaatggccagtttgttctaggatgcattgcatcagacatcacagtacatgaagaaaatctgctttttgtgaaaagccaccaggcattttagatcccgtttaccatgaagtgcagacacagcagatacccagataatacagtcagtgcaaaagtccaaatgagtaagtcagctctttgatgaggctggctacactgcaaaatataaatgaaactcgaaaatagaaggtaaggtctatttacaaaagtttgtttagtaaagtgacttgaaaaaagttgttaaccacttcccaggcatccctcccctctcccaccaaaacaaacaaacaaaaaacaacaacaacaaaaaccctgaaaattatcttgaaagtcaagttaaaactatgtggtgaaaaagagagtgcttgttccaggtaaaggacttcaagataatttacaggcagatttatttttattagtaaaagtcacaaataggaaaagacttattggctgactttgagctgtgtgcttttaaaaatgtctctattattacgttaacaagaaaaaaaaatcaagcaagtttttgcttccagttttgaatcttccagcaacagttggtgaaatcaacaaggtattaaaatgaaacccagcaaaacccagtcagttctttccagttgtctgcctgtttctttctagtcaccttgaattcaattcccaattagctgaggacaacatgccggtcaaagacagactttcgctgctcttggacttgaagcttccagcgctgctgtgcatattctaccttgttcagcacgttggctcgactgcgggagcgggctagcacatcgtgtgcatttgcaaaaggctggtgatccccaatatcatcatcactctgtatcaactgtgcatgtccaaagaggcgcctcttcagtatgggctcaaccagagtaagatataccatgtacagaagtagaaggcccaaaatggagagataaattataatggtaaccttgattgtgacagagcttctttcttcatatttgcattcacagcgtagacagtatgcttctacatcaggcccccgcacaggcatgggctccacaacatgaaggcaatcacaatctttctgagatatgttcttattataaatatgcccagaattttctttatagggagggcagatacatttacatctgacatcctcgaaattcttggcggcgtctgacagtgcgccagcagcagcacgaaagcgcaggcacgacaggctgagcaaggagccaagccgaagaaggcctccccacagggtcgccatcgctggggcccagcggtcccacagcccggagcccccgcgaccggctcccggctcgggctcaggctcaggctcaggctcaggctcaggcacnggcttgggacccggctgggatcc

SEQ ID NO: 51037 - DNA, 549 bp, Homo sapiens
  misc_feature (1)...(549): n = a,t,c or g
tgaaaatatgtgggaccctttttctacaacacagacttcaagaatggtgggaattacactaaaattaatcaatggatatccttcagtagtgaatgcagaaaataaaaatacacaggtatacctaaaggcacttttattgagaatgagaagaactttagatgatgatgtatttatgcccttatatcccaaaaatgtcttagaaaataaaaattctgggccttacttgttttttcaacgacagttttggtcttcagttannnnnnnnnnnnnnnnnnnnnnnnnnnnnnnnnnnnnnnnnnnnnnnnnnnnnnnnnnnnnnnnnnnnnnnnnnnnnnnnnnnnnnnnnnnnnnnnnnnntgttgtcttctcttgagcagtagatcatacctttttgtccagtcatgtttctgcatgcctgtacatatttcgttaaacctaaacatagtagacaatttctcctccatctttgggtcttcannnnnnnnnnnnnnnnnnnnnnnnnnnnnnnnnnnnnnnnnnnttatatgccttttctcctgttaaaaaaaa

SEQ ID NO: 51038 - DNA, 647 bp, Homo sapiens
  misc_feature (1)...(647): n = a,t,c or g
gacttgtagctttaacaaaaattaggttccctagttgcagctgccagggaaagctagtctaatatcaaagcaaaccatccttcttctcaagcacagagtttttaagataggagtgtgtgtgtattgacattttcctagcagtggctgaagtcaaggaccaggagatttagggcccacttggagttcttatggtgaaacagtagtagcttcctagagacctttaaagcttatctgtaatttgtatagttcagaagatactgtatacatcattatttctccctgctttcaaaacaggaagggggtgtggagagtaacacactaaaaaaaggataagtaattaatttctgggattacagccgtgagccaaccgcgcccggccgcatcctaggtaattcttatgcatgatacaggttgagaccagtgccatgtacagaagtgggaaaaatggcttatgaaactcagttgtatttagcacactgtgttagacataaaatttgaaaacccaccctggacaacacagtgagncccagtctctactaaaataaaataaataagtgaacattgaaaaccaatggatagtagaatgtattcagttcagtgagacatgaaacaatatttttgcttaattgaatcaaacatcttcttaa

SEQ ID NO: 51039 - DNA, 555 bp, Homo sapiens
  misc_feature (1)...(555): n = a,t,c or g
gcggcacgagcggcacgagcggcacgaggtaagctgtatggtccagaaacaaatatacctcgggagttaatgcttcatgaagtccatcacacataaaggcaaaaaagaactggtgccacctgcttctgactttagtttgttcacttttaggaagaattttcatgacatgttttcagaagccagaaagcatttgttaaacgcagctttggttataaacctgcaccattgaaaatttgcacatagaatatagactcacttgtacatagaattatttcttcaagtataattcaaaataatatggacattatcatgttctgcattacaataatgggatgtcatcaccattgctagaatactggcatgattcttctgagcggaagttgaaactgtaaatttaaaccttttaattatcaccttacctggaaagaggttatgtaagatattcacacagtatgtattatattaaccatatcacacttaagttattaaattcagactatttgnaacttattggtataggggcctgccgnatggcttaaggatatttgagnaatc

SEQ ID NO: 51040 - DNA, 537 bp, Homo sapiens
taaattttaggaaatttttttatcttgtaagtaagaattataaatctatctcagttaaaagtaggatctttgtttttattcagatattttgaaagtttagaagcattttgtatgctactttggtatttcttaagtatagtcagcaggaaagggtaacctgttttatgcaaaatttttttaatttgtcaaatgtttttagtgtgtctactttctgaaatagtctcaatatcctgtctgtatcctaggcagataactacacaagaacaaaacgctatatagaaaagaaaatatttgaggaaatcttaaattccataagaaagtaattcttgcaagaatgttggctacatatttttttttctgtcctgaataaattacatcattaggtctgttgaagcttttgaagctaccactattctttctgggataaaggctaattactgatttatctgccctcaaaatcccagagttaattctaattgagtactaaattaacagtaagtagttaacacagagaactaaaaatttaaccgcattata

SEQ ID NO: 51041 - DNA, 589 bp, Homo sapiens
cacatcagtcatttattaacaccaaacattatactttaacttttccccattacacagtacaataagcctgtcaagatttccaggaagtaatcatcagtacctactgtgcttccagcagccaaagctaagctggctgggtaccagaaatcaacaccttcaggagaatggcatcacaagattgcatggactcatattaactattacaaggggcactggaaaaaaaggtcatttgctcatttacaaaatcctaattgaactaaagctctgtaattatagccatggtatcagaccagctttttcgcacatcctatcacatcgctgcctgctgatgttttacactgcctataaagtctcataattttaaaagggaatgaaacagaatgccacaggtgaccgacctctgctcctgctacttgggagtcacgttgtcttggcttcgtcctggctcaaggttactagtctcttgctgctttgggccaaatctcttatctctttacatttcctcctctcaggctgagtcaaaagtaagtcacatgtataacaaaactgtcttaaaatacctctgtttttcagccaagagaattacgga

SEQ ID NO: 51042 - DNA, 1222 bp, Homo sapiens
ttttttttttttaatttataaatcagtttatttacagattttatctttcttaaagtatatttcagttaacaaatctatttacacaggtatacatgggaattcatcccagttattttacagatcgtacttacaaaccacacccttaagtgttcggtgcaaaattgcactggatgtgactattggctgaaaatggcctgatgaccaggctatttacacgcacacagtaaacgggtttattttttcatgtctgcacagtacagtacacacaaggaggctgaacctcccagagaatgctttgcaatgtgtttgccaagaaggctttgcaaagtccagaaggaaaagctattaaacataggttaattaaaatgacagtacctcctttacatcagtttacattttttcttcacatttttataatacaaagatattttattgaattgctgcacaaccagttgaagatgatttgtaaacatgtaaattcctacaatttgcattaaatgtcattgtagtttctataatttgctctttgaattaatgttttattcactagtattcttaaggtagtaaaaggaagatgtaagtttgtatttcttgcagaaaagttatgagtctctaatgctgtgctacagaaattcttttgcgagtacacactttattcaagtattgcaaaaagctaaggccacttttttttcaagacaagaaactgaacaaaattgtttttatcaataggccacaaccactcttatgagcaatgaaatctcttttgaaagataatttcctcagagacctgtagtcacagaaggaattttcttttcttttaggtaaaagaaaaacaaattaccttccttattaactacgtttgagctctccccacttttccctatggtaaaaattcctgtgtagacctgaagagggaatctataccctgtacttgtttaacccagagttaactaccctggatagcacaaattgttttggactcagaagtaaatctgaagcctgtatgttggtttactgctaaattctgatagtgctattctaaaagatattactgctgatgcaaagatatttttcttagaggaattatgaaggaagagtgaaagaggatgagggtgtagggagaaggaacaaagattagaaagagggaatatttaggttcttgattaagaggcagagctgatttaaaaagataccaatatggaacgagtggctgggtatccac

SEQ ID NO: 51043 - DNA, 148 bp, Homo sapiens
ggaaagttaatgatgaaggagctattggaaaagcagactaaaaggtagtgaggggctgttgaagcggtgtcaggagagagtttagttagttttcatggctttaggtaactgaagtttagtagccatgtggtttaaaactggagggtac

SEQ ID NO: 51044 - DNA, 163 bp, Homo sapiens
gagatggaggtctcgctttgtgacgtagcctggtcttgagcgatccttttgccttggccttgcaaagtgctgggattggaggcatgagcactgcacccacccctgtttttttttttaagtaaaccattataataactcatttataaaaaggttacttcaagag

SEQ ID NO: 51045 - DNA, 506 bp, Homo sapiens
gttgtaacaaaaccgctcaagtctgccttaaagagccttacaagccagccagtccctgcagctccacaaactgacccatcctgggccttgttctccacagaatgggtctgctccttcccctggcactctgcatcctagtcctgtgctgcggagcaatgtctccaccccagctggccctcaacccctcggctctgctctcccggggctgcaatgactccgatgtgctggcagttgcaggctttgccctgcgggatattaacaaagacagaaaggatggctatgtgctgagactcaaccgagtgaacgacgcccaggaatacagacgggcaatttcaaaaaaaaagatttacatgacgtgccctgactgcccaagctccatacccactgactcttccaatcaccaagtgctggaggctgccaccgagtctcttgcgaaatacaacaatgagaacacatccaagcagtattctctcttcaaagtcacccagggcttctagccagtgggt

SEQ ID NO: 51046 - DNA, 242 bp, Homo sapiens
ctatgatccacagtaagaagcagtgcatgcgtgcccacacatattcacattcgtacctacacccacaactgaaacaaaaactttgagacagtacttaatcttactgtgaggcaatctgttagaattttcattctggtttatttcatttagaaaaattgggttggtatgggcactttgaaaaaaacactgccctatatagtgcttaacaaaatgtattttcccaggaggtggaggttgtagta

SEQ ID NO: 51047 - DNA, 1041 bp, Homo sapiens
  misc_feature (1)...(1041): n = a,t,c or g
gccacctcaagccagctgggctgtgggcggcacctgtgctctgcaggccaggcagcgatagaagcctttgtctgtgcctactcccccagaggcaactgggaggtcaacgggaagacaatcgtcccctataataagggtgcctggtgttcgctctgcacagccagtgtctcaggctgcttcaaagcctgggaccatgcaggggggctctgtgaggtccccaggaatccttgtcgcatgagctgccagaaccatggacgtctcaacatcagcacctgccactgccactgtccccctggctacacgggcagatactgccaagtgaggtgcagcctgcagtgtgtgcacggccggttccgggaggaggagtgctcgtgcgtctgtgacatcggctacgggggagcccagtgtgccaccaaggtgcattttcccttccacacctgtgacctgaggatcgacggagactgcttcatggtgtcttcagaggcagacacctattacagagccaggatgaaatgtcagggtggggttacagaggaaaggcggggtgctggcccagatcaagagccagaaagtgcaggacatcctcgccttctatctgggctgcctggagaccaccaacgaggtgattgacagtgacttcgagaccaggaacttctggatcgggctcacctacaagaccgccaaggactccttccgctgggccacaggggagcaccaggccttcaccagttttgcctttgggcagcctgacaaccacgggtttggcaactgcgtggagctgcaggcttcagctgccttcaactggaacaaccagcgctgcaaaacccgaaaccgttacatctgccagtttgcccaggagcacatctcccggtggggcccatgggtcctgatggcctgaccacatggctccctcgcctgccctgggagcaccggctctgcttacctgtctgcccacctngtctgnaacaagggccaaggttaagatcacatgcctcatgtccaaagaaggtctcagactttgcacaatgccagaagttgggt

SEQ ID NO: 51048 - DNA, 454 bp, Homo sapiens
gtctcctcttcagctttcatttggaaggcatcttctaaccaatctaataatttgtgtgtaaactcactcacatcttgctgctgtgagtcatttgatttgaaagcatccttaagaatttcaactgctcttgatggatcaacatacttccttttggtaccaacaagaagtgcaaatagatacctcagctcacgcataaaaggcaaattccgatgttccttttggtttcggggtaaatcttgagcatttgatggaggcttgtaattcagaactaatcttctaaattccaaaagattaaataatgactgaataacagcactaaaccaacaagtattgccaacattctttagcccaacgggagctttgtcctgtctttttctatcataagggtttcgagaatccctccaaacttctgtaggtgtcctcttcaaacatgctttattctctgctatgctgg

SEQ ID NO: 51049 - DNA, 310 bp, Homo sapiens
atttcatgcaacccaaattcttcactttcaaagagcccattaaccattaaaaaataaggcaccatgacacggaatgagcaaatacgttttataaaatcattttccaaattaaattatctattttatatcattgcctgactcttttttaaaaaggcataatttaaaattctgtaaaaaataagccttacattatccatttgttagctctggcttcaaaaaatcttcagaatccaaacattaccttcaccactaaaacccttgtccaggaatttacctttatgtctaaaatagcccctaaccagtcaccctg

SEQ ID NO: 51050 - DNA, 417 bp, Homo sapiens
gcaatacatgttccaagtgttcaggattccatagctgcttcacttgtgcttgtggtcagcctgcatatgcccatgacacagtagtggaaactaagcaagaaagattggctcaggaaaaaccagtgggacaggacattccttatgcagccatgggaggattaactggtttcagctcgctggcggaaggctacatgcggttagatgacagtgggattggtgtaccttcagttgaatttttagaatctcccattacggcagtagacagcccattcctaaaagcatttcaagcatcatctagttcttctccagaaacgttaacagatgtaggtacaagtagtcaagtttcttcattaaggagacctgaagaggatgatatggctttctttgaaagacgataccaggaaaggatgaaaatgg

SEQ ID NO: 51051 - DNA, 1576 bp, Homo sapiens
ttcttggtacttatactttgaactatgatgtacatatttatggcttttggcttttaatataatggacttgcaagggctgccagaggttctgatatgtaagaaaactgcaaaaacaaatatagacaaatattttgattctagagaacgtctcagatgtgcttataaagcttccaaatacaactccagtaagacatccctttccctgcaggagtgtggtctatattctttagatagttgtttagtcaaaagaccagacaagttacaaactaagagaaacaatatttcacaacacagtaaagtgtgatgagaggtcaggggaacatcccagtaaaagagaagagtcacaggaagctcatctcctccctggattctggattaggagcttctgaatcttttccagggataggcaggtagctcactcttggtgcaatttcttgaggatgggaacatgtagagctgctggaaggagtaattctgtgcttgacaaaggacgatttctcctttatcgtgaccagtgctgccgatttcctgacagaggagcttacactctgagcaccttgttttagcgaactctagcaaaacttgtttagcttagcaaaaacaaacacacaaaaaactgagaactctgctgtttcagatatgccataacatacatctgaaacacatgtgtaacaatcaaaatggtgggctctagaatggttttggagctcgagatcttcatgggttagacttgctggtcagacccaggagcacctgtggctcacaccttctgttcccctcctggcctgtgcagaatgtaaacagcagactcatactcaatgggcactacaggccttatcagacgttttatacaagcctggattgcttagtaggggaataaggcattctctgagggggcttccacttagattgagaattttatttgaaaagaatctggtttaaatggcattgtggtccgaggtagctgctctcccactgagagctgagccgaaatataagaataatatatttgtgcttcgagttggtgtttctttcagtgtaatgcatgcagtggtcacaacccagttactcataatatttggattgtatttgttcgtagatatgcccagaagactagagaattagtgttatataccatatagaacttactgtcagtcaactataaacaggcccaattaaaaactgttccattactacgcaaacacatattagaggcctttgctgatgacacattagctggatcttagccaccccagaaagggtttgatttgaagctgattgttgccagatatgcatattggaatcccatctacccatagttcctctgaaggtgattttgtaatttgcaaaagggtataggaaaatatacctaaaagcgaatttgtggctgagaggataaacagaagctgtttgctcatgttctgtgccccacacccaccaatacctaaatctgttaaggaagacagaaaatgttttctttgtgctcattgagtagttccagacagaagaagaatatactctttaaaatgtatttacctgttagttggaagtacccagaattatcagaaacgaatgc

SEQ ID NO: 51052 - DNA, 335 bp, Homo sapiens
aggaggaggcaaaggtgccagtgggtagaacatggtagacatcatctgtcccacagccttgctggcctccttcaggagggcgatggcaatacgaatccgctgccgcaggaagatgagcaccagcagcaggatggcttcaagcaccgccaacacgatcagggcggccagccaggtctcctgcacgctctggtaggcactgaggttggtggtgaaacccagctgggagatggaggcgcccttgtcccgcagcactcggtactcctcccagcagtagtagatgccgtatgccagcacgcccagcactcccaggatcagcaccagcaccaggggcccag

SEQ ID NO: 51053 - DNA, 648 bp, Homo sapiens
cgaatttttttctcacccccttttcaaaaattgaaaactctatgagtgtctttttgagaccataaagcagactttagtaactttctatttctgtaagtactaaatgtctggcattttaaacttttgtagaatacattatgttggacactggaataatactatttattttcacctgtgaaaaatgacttcattgtacttgaaacacctcctttgcatttctccatttgtgccattcactagtggaaataaattgtattataccatgatctactggctttttaaaactgtattaaatatgcacatttttggtatagctattatcatttgtatgtatatattgtatatacatatgagtgtctgtatgtgtgtatagatggatggatgtaactcatactgtacatttccatcagggcacttaaaagttctgttatttttgtttggttttgttatttcagtcctcagttaaggcaagaatgcatgtgtttcttaagaatgagtactctgcgttgatgtttatgagaaggtggtcattagatgcagtcttttcctttttaatcccctcttagcacttctgtgagtggagaggacattaagtaaaatttggaatcataagttgcaatgcagtaaaatggtgctggggaaggagcc

SEQ ID NO: 51054 - DNA, 1526 bp, Homo sapiens
ttttgtttttcctgtgacagcccaaactatattgtattaagttcattaggacttacatctcatacgtgtatttttgtttcctcacctctaggcacagaccccacaggctcctcggacactgggtccatcacctcctgccccatcatccactccaacaccaacagcccctattgccactctgaaccagcctccaccacttcttcgtccaacactgcctgctgccccggctcttcaccggcagcctcctccactccagcagcaggctcggttcatccagccccggccaactttaaatcagcctccaccacctcttattcgccctgctaattccatgccaccccgtctaaacccaagaccggtgttgttcacgggttggtgggtcaacaagccaccatcacttattggaattcagacagattcacagtcctcactgcactaaaaattaaattggacacagctgcagtaacttttcaccccatcattataccagtgctcatctgactgatgaaaaagaggaaagaataatcatttctagatactgaggctgcgaactagttctgtggcagtggactagcataagtggatgtctaagaaatttttcagttcactagactaaaatgttttacaacaaaaagcctccagttagcctcctttctagagtatatgttcagcaatgtgatctcataaaaggaaaaacaaaagatttaagtattctatataccaagtttttgttttgtttttactgtatttattttattgaggttctttatattcctgcctcttcatagtcaaggctcttagtacaggaatattgacttaggaattgtgaaaactccttaagtttcttaagttaaggatgtttggcttttttctttaattttttaaaaaccattttcctatgttaggagtgcaagaatagccagcatttccgattttgacatatgttcattttatgcatatttaagaaattatagctgcatatcccttctttcaaaaaatgttgcttttttttttaagggaattttaatatatccctttaaaggaagccaatttaatcaatggcaagccaattatataaaacccccaaagaatgtactgaacctactaaccctttaacatacagtttagggtcctagcgcagagtccttgttttaaaggtcattgactcatcatctgtcagtaatgagaggattggaagaataattttgcatacaaatgaggacttaatttgttgaaatataatctctttaagttccttgaaaatggagttggttttttttgtttctaaatgctatctgcttttaactagtagttgcctacatctggggacttcagagaagaattatattttgttagttaagtagacacagtggttatggaagcatttctttacagtaccctttacgtgtttggtttctgaacttaaaattgccctcatacttaataatatggtctgcatttaatatgaaaggtgttttattgataaatctattgtactatttggaaaaaaaaaaaaaaaaaaaaaa

SEQ ID NO: 51055 - DNA, 1515 bp, Homo sapiens
tttctttatatattcacctttatttatatctattttactcaattgcaagcttattaagaacataaaaagtttgatcataacttactcttacctcatccatattacactagaattaaatcatatagaaaaacattgtttccattagttttataagatgtatccacagtgtggtttatttttagttatgtaattttaaaaaaccactttggtgtagatttctcaaaaatgataaccctgaaattaatgaaaattgtcattaaaagatttctagttttgcttttataaaaatcattatttcgaatttcacagtgaagaggtactaaattcctcatagaacatgaaattatataaaaatagaagacatagacatctttaaatctttaatcctttgattaagcagcaagcatatcactcttccaggccaaacactgcttaaacaaaaaagaaaaataatgacgtgcaaaatatttacaaaatatgcaaagcacacaataaagacatctcactatatacatgtgtcatattactaatgaagctaacgtttttctactgtgtgctctaatgcatgtaaatcaaattacagcacatccctcagatacagcaccttggcccatgtctggggatagaagagattttttaatgaatcacaatatactgaacagctggacagatgctggtgctgaccaacttgactgacatatcccacatactgtgtactgaaggtctactgacaagagacaagacaataaacgctgtaaaggtatagtatgcacatacgtaagacaatctaagtgctttaaaaaatgttttagatattttaagatatttaactgtcccctgtggcttttaaggaaaaaataagtataaattcttgaatattaagaattttaaatcagctaaattcagggccaagaactatttaagatgattccaatgagaaagaaaaggacctaacctggaaaaagagtttccaaatatgcccagtaccgtagggtatttatggaaatacacagtcctaaaattaaaaattaaaactaatcaatgaatttaaatctatagcactttaaggctgtggagcccaacaatagggaatactttgggaacacatgatctttcaaaacataaattagggccttagatgttgactattttgtgaagtattctacacgtgataagaatgtgaatgtgcaaacatttagcctatgtccactagtatagcaatctaagtgatctgtctgtccctttgcacaaataatgattccaatatgaaatcactgtatcaaaaatattaattacacattgttgaaatactatcacttgtaaaatattctttgttaagtacttaatgattatgggttgaattaagaagacttgatgtctttttgtttttctataaaaaggggtctcagcatttttagttaacagcacaactgtgacaatatactgatacatctttagataacacagaacaaattcttattttatgaaataatgttgatgatttaaccctacacc

SEQ ID NO: 51056 - DNA, 512 bp, Homo sapiens
  misc_feature (1)...(512): n = a,t,c or g
ggaaaagaccaggaggccagcaggggctctgttccttcaggttccaagatggacaggagggcgccagtacctcgcaccaaggccagtggaacagagcacaatatgaaaggaaccaaggaaaggacaaatggtgatattgttccagaacgaggggacatcgagcataagaagcggaaagctaaggaggcagccccagccccacccaccgaggaagacatctggtttgacgacgtggacccagcggatatcgaagctgccataggtccagaggcggccaagatagcgaggaaacagttgggtcagagcgagggcagcgtcanctcagcctcgtgaaagagcacggccttcgcggcctgacaagagccttagccttggactgtgagatggtgggcgtgggcctaacnggggacggagagcatggccgcccgtgtgtccatcgtgaaccagtatgggaagtgcgtttatgacaagtacgtcaaaccaaccgagcccgtgacggactataggacagc

SEQ ID NO: 51057 - DNA, 671 bp, Homo sapiens
gtagcttcagggcagaagagccacagagccaaatgctgcagagatgaagggagacggaaggagccaaatgctgcagagatgaagggagatgaaaggagccaaatgctgcagagatcaagggagacggaaggatgtcacctccagagctggggccacgggcagcgccagggcaggttcatcactgatggcaagtctgtggctgaccacgttcacaggggtggccctgagcaaaggtcggacatgaggacccaggagaattcaggccccggctctgggacggctgtgcacccccaccctggccgtggctggcacctcagaaggcacagctgtccttcactcgcaccggagcaacctcgggacagatggtgggagaggaagggcaactcgaggaggcacattttaggaaactgcccacggagccagtttcgattctccaaacctcgtcagcatgcagaggctccctgactcggcagcaaggagggcctcaccagccgacccccatgcccggcacccccttcaccagtgggtaaactatgctcgccaccactcagcactcacctcttgggctcagagggcagaaagtctgacccttctctcttaaaagcagggtcctgaaaactccagagagcagtgccctgtgcattaaacacagactgcgcccttgtactcaa

SEQ ID NO: 51058 - DNA, 414 bp, Homo sapiens
ggaatccgtctctgctcttctgcattctccacctcgggagcccctggggactgtgacggcctctgttgccctgtgatctgtaggtccttggggacgcacagttaaggtgccaggacatcctggaagctgggaaatgatatgtattcatttcctaccaccgtagtggaagagatactatccctatctttacaactgatagcatttccaacagtaagctgtgagattctgcttgaaatcacctctcaaacaaataaaaaacagacccgggagacatgctacgctcattctgctgaagaaataggcatcatagctgggaaacggattcacaagacccaggctgttccctacatatgtttcctcctctgacatcagttcatcagtcaatcaagccatgtgagagtggaggccttgtat

SEQ ID NO: 51059 - DNA, 673 bp, Homo sapiens
ttttttttttttttttgcgcactgaacgttgctttattcattggttaattttcctaacagcgttgtaaacccaggccgggatgtcctgagcgttctggcagaggcccgtgcagcctcggccccttccggtccgcgctagcctggcctttgccctgagctccctcagcttcgcaagatgagcttcccagacggggccggggctgggctctgagggaaaggcgttcccgccaggtctggggccgccttcccatgttctctaaagcccagcacctgtggttcgttggcggggctcgtgggattggggtaagggctgtggtttcgaggccgtctgtggccgcccccagcccctagtctgcgagacgccggccccgcctttggggccttccctgcctggggggcctccagcttggctacgcgaaccggaaccttgaactcccgtgcacgtgttgcatgcctcccacagagatgggactgcttagtaagaccttgctcaggtcagtcaggaagcgggttggcgggcaccgcgggacactcagactggcaaacaccctctccgagtgctgctctcttgatcccacttagcatttttgtctcggggttgctcacatggaggactgcttggtgagaggccggtagcactgaaaagggcactggacgatctgcttttagcatt

SEQ ID NO: 51060 - DNA, 367 bp, Homo sapiens
actgacccctgctgagccaggctgttttcaacattcaatggtcattgactatctttggcgtttaggagggccctccagggaccaggcgtaggggcatcagtcaccccgccctcacaccccaacctgcagccacacttggttcaatcccactgtctagcccgtctgactcagtagcccctcccgagggagcagggctaagcaaagctggtttccccacatgcaaggcactgcaggccattctattctgggccttctcatccttcataaagtgaggaggcctgaacagggctccccactagccccgagagcacgcaattcctgaagatttccaggattttcttaatatcagttatggcttacggttatg

SEQ ID NO: 51061 - DNA, 669 bp, Homo sapiens
  misc_feature (1)...(669): n = a,t,c or g
gcatgacggtggtgattcggaagaagttctcagcctcccggttctgggacgattgtatcaagtacaactgcacgattgtgcagtacattggtgaactgtgccgctacctcctgaaccagccaccgcgggaggcagaaaaccagcaccaggttcgcatggcactaggcaatggcctccggcagtccatctggaccaacttttccagccgcttccacataccccaggtggctgagttctacggggccacagagtgcaactgtagcctgggcaacttcgacagccaggtgggggcctgtggtttcaatagccgcatcctgtccttcgtgtaccccatccggttggtacgtgtcaacgagggacaccatggagctgatccgggggcccgacggcgtcttgcatttcccttgccagccagggtgaggccgggccagctggtgggccgcatcatccagaaagaccccctgcgccgcttcgatggctacctcaaccagggcgccaacaacaagaagattgccaaggatgtcttcaagaagggggaccaggnctaccttactggtgatgtgctggtgatggacgagctgggctacctgtacttccgagaccgcactngggacangtttccgctggaaaggtgagaacgtgttcaacancgaggtggaagggcacaat

SEQ ID NO: 51062 - DNA, 1152 bp, Homo sapiens
ttttttttttatttgaaaaggaaggaaaatattttattaaaagttttttaaagtttatgaattgaagtctatgaaaacaaactacttgatacaaaaacattcagatattagatgtcaaaataaatcagcacatttgaaaatactataaattatatttcaaacaaatatatacacattatgttaaccttcaacaggatccattatcactacttagaacactgatatgtttatctcttaagtatgtaaaaattacataggctgttaactttgtatggcaattcacctataacacatttaagaaagcattacaaaattcattatatgataattctacaaaagttttctcacatttaccaaagcctactaaagtccagagggcacaaatattggccaaatagttcttttatcttagacataaagatgtttttgctgttttttagaaccattaagatggctaagagaaccaactttacggagcttagctgttctcaggcatctgaatgggggtgtggagaagtcctcaagttacaagaatcacagttacttttttaggatgaaaaaataaaaacattgcatttgatgacattacagtcaaaatgagctctaatacaaatgtatgtggagaggttttgaagaataaatcggatatcccagggggaggttctgctgcttgtaccgtaagatttcttaaaagtagtggatgagcttgtatactataacgttcttcatcatcgtttgtggcataaagtaattcccatgaaagattggcccactgacctctaacagcttcaggatttaactttcccacttggatcaataattcttgaaggctaagcactctcccagtgtaaattcccatattagaatcataccccagagaaaacaagtatggcttttcttgtaaaattgcttccttccacttttcatcagataccaaaccaatgtaccagtcacgttcatattcttcaaggtacttaatcagttctctaaagtcttctattggacctaaacttgctttatcaatcattagtttcagagtatacctgaatgctttcagtgctagttgaaacagttctggcttttctgtgagccagtccaaagcaacagaccaaggcaaaacaccaccgtaaactctcaatatatgaccaggac

SEQ ID NO: 51063 - DNA, 2221 bp, Homo sapiens
ggcgccggcgatcgcggcctgaggctgctcccggacaagggcaacgagcgtttcgtttggacttctcgacttgagtgcccgcctccttcgccgccgcctctgcagtcctcagcgcagtctttccacaggagccagcatacttcctgaacatggagagtgttgttcgccgctgcccattcttatcccgagtcccccaggcctttctgcagaaagcaggcaaatctctgttgttctatgcccaaaactgccccaagatgatggaagttggggccaagccagcccctcgggcattgtccactgcagcagtacactaccaacagatcaaagaaacccctccggccagtgagaaagacaaaactgctaaggccaaggtccaacagactcctgatggatcccagcagagtccagatggcacacagcttccgtctggacaccccttgcctgccacaagccagggcactgcaagcaaatgccctttcctggcagcacagatgaatcagagaggcagcagtgtcttctgcaaagccagtcttgagcttcaggaggatgtgcaggaaatgaatgccgtgaggaaagaggttgctgaaacctcagcaggccccagtgtggttagtgtgaaaaccgatggaggggatcccagtggactgctgaagaacttccaggacatcatgcaaaagcaaagaccagaaagagtgtctcatcttcttcaagataacttgccaaaatctgtttccacttttcagtatgatcgtttctttgagaaaaaaattgatgagaaaaagaatgaccacacctatcgagtttttaaaactgtgaaccggcgagcacacatcttccccatggcagatgactattcagactccctcatcaccaaaaagcaagtgtcagtctggtgcagtaatgactacctaggaatgagtcgccacccacgggtgtggtggggcagttatggacactttgaaacaacatggtgctggggcaggtggtactagaaatatttctggaactagtaaattccatgtggacttagagcgggagctgggcagacctccatgggaaagatgccgcactcttgttttcctcgtgctttgtggccaatgactcaaccctcttcaccctggctaagatgatgccaggctgtgagatttactctgattctgggaaccatgcctccatggatccaagggattcgaaacagccgagtgccaaagtacatcttccgccacaatgatgtcagccacctcagagaactgctgcaaagatctgacccctcagtccccaagattgtggcatttgaaactgtccattcaatggatggggcggtgctgccactggaagagctgtgtgatgtggcccatgagtttggagcaatcaccttcgtggatgaggtccacgcagtggggctttatggggctcgaggcggagggattggggatcgggatggagtcatgccaaaaatggacatcatttctggaacacttggcaaagcctttggttgtgttggagggtacatcgccagcacgagttctctgattgacaccgtacggtcctatgctgctggcttcatcttcaccacctctctgccacccatgctgctggctggagccctggagtctgtgcggatcctgaagagcgctgagggacgggtgcttcgccgccagcaccagcgcaacgtcaaactcatgagacagatgctaatggatgccggcctccctgttgtccactgccccagccacatcatccctgtgcgggttgcagatgctgctaaaaacacagaagtctgtgatgaactaatgagcagacataacatctacgtgcaagcaatcaattaccctacggtgccccggggagaagagctcctacggattgcccccacccctcaccacacaccccagatgatgaactacttccttgagaatctgctagtcacatggaagcaagtggggctggaactgaagcctcattcctcagctgagtgcaacttctgcaggaggccactgcattttgaagtgatgagtgaaagagagaagtcctatttctcaggcttgagcaagttggtatctgctcaggcctgagcatgacctcaattatttcacttaaccccaggccattatcatatccagatggtcttcagagttgtctttatatgtgaattaagttatattaaattttaatctatagtaaaaacatagtcctggaaataaatctgcttaatggtgaa

SEQ ID NO: 51064 - DNA, 424 bp, Homo sapiens
  misc_feature (1)...(424): n = a,t,c or g
agacacatgcctcttatcagatacatgatttgcaagtattttctccctattgacggtactcacccttcttgcgatgatgtgagatgataaaatgcctacatgatgagatgaagtgagatgaaaaacataggccttgtgatggaatgggaaattccagagataatttgcacctgcgctaagctgcggctacccccgcaagcaaccttccaagtccttcgtggcaatggtgcttccgtggggaccgtgctcatgttccgctgcccctccaaccaccagatggtggggtctgggctcctcacctgcacctggaaggggagcatcgctgagtggtcttcagggtccccagtgtgcaaactggtgccaccacacgaaacctttggcttcaaggnggccgngatcgctccattgngagctgngccatcat

SEQ ID NO: 51065 - DNA, 885 bp, Homo sapiens
ttttttttttttaggatgtttaaagataatgctttttaatatttcaaatatttttttaaatctcatcaaaaatgttatcaccttaacagtactttgcacatgtggaatttcatacctaaatttgatactattttggtttatttatggctacttacaagagtcacagtaataatgtccactcatcagagtctttctttggtagagcctaatgggaccagacagatgaactgttatgcaaatgagatggataaagcaaattcatgatagtatgaattataagggtttttgtttaatggaaatacaacttaaaaaggatttccatatttatccccatcattattttggaagcttaataccctgttcaggggttgaagagtttgaatagctcacacaatcctgtaaaaatgacaactggctgccctttaataaataaagtcattgtaaagaattacatttacagagtgaaaagtgaatacatagcatttcaaattcaattttggaagtactaataagtactgacccataacaatatacactagctatctttttaactgtccatcattagcaccaatgaagattcaataaaattacctttattcacacatctcaaaacaattctgcaaattcttagtgaagtttaactatagtcacagaccttaaatattcacattgttttctatgtctactgaaaataagttcactacttttctggatattctttacaaaatcttattaaaattcctggtattatcacccccaattatacagtagcacaaccaccttatgtagtttttacatgatagctctgtagaggtttcacatctaaattaccaagaaagcccttccctccctcatcttgcactcagcctaattctatactagtcc

SEQ ID NO: 51066 - DNA, 1256 bp, Homo sapiens
ttttttttttgttcaaaaacttttatttactataaagacaaaaacaccaaaataggtacaaatactataaaatcggttcaatggggtaaaaattttaattaaaatatctcaatatatttaaaataacaaaggatacatttaagccaaattttcttaacccagagatttttttttttttttttgtaacatttgcttacacagtaaggtgctaatagaagttagcccttaagccctggaaatcttaggaatcatagtcacacagcaaatataatttcattgtgaaagtgaactttggtagaagaaaaatctataggacacctgaggtagtagaaactggaataaacagtagtagacgttatttacaacttgagtaccaaataacattaagaacacaaaaataattacacgatacaatttccagtccagctttgatccaaagaaaataagaatattacatcacatttgcattgaaaacaaaacaaaaaacaaaacaccacaattaccagcaagctgagggaactgcaaacaaactcaaacacaatggattttgaaatctacagatagtttgagtttgaaatgtggtgggcatggtgatctgcaagtaatactgattaaccgaggttcctcagtttatacagtttacatttttgtcagacacagtattcatctgaccatggatcttccagtacataaaatggcaagagtgcatcctttaaagcttgcacatgagagacttggaaacaatcttattagaattgtgaaaattctaagtagtcaaaaaaaaaaaaaaacaaaataaaaaagaaagtcaagtacaacacatttagagataccaaacttcacatttctgtactatttttaactcttcaaatatcgccaatcttccaaaacaaaggaatgtaaaatttcactaagaaacatattcacataaaaaacaaactgccttttaaaaattgtaagcaatatatccctgtaaacttatcttgtaacttattttatttccaatttgtgttgtacattttaaatgtactctatatatagcttatttagtttatcctgagtctttgagaataaccaattctatttcacactggcttctgaagagttaaaactaaaatctcaaagttgtacttaatagttaatcagtacttgatttaaaagactcacacacacacaaaaagattaaaaagctaccattttccttcaggattccatgcatctgaatttaactccagactaaaaccgttaggtaactg

SEQ ID NO: 51067 - DNA, 978 bp, Homo sapiens
tgaaactgacatttggttttattgtgccaaggacattacagatggcggatcttgtcaacacctgcagggcacgggtgcccatctgccaaggctgctcccacactccctacactcaaatcccgggtggcagccataatccccaaagatgacccccaccccaagattccaaagaagctagtggtggtggaagcaaaaggaatgcagcaaggtcagggtttcattgtccaagccggcctgacacctgccgccctgcccttgcccagtgcacaccctagaccctgggccggcctccatgcagctggaggccagaagacagcaacccatatctttgcaccctcctccatgccccatggcctgcctgcccagaaagatgccaccttcacagagccagtgctgtcgtctatatcatttttgattagttgattttataagataaaagtaattttaataaagaaaaaattcaacattgaaggctcagacgttcttgggggtactgggaagggaaatttcccacttcttcctcccacctccctggcatcagtgtcggggggtggcggcaagtttttctcatcttggaaggaatgaggggcagggagactttcctctgtctgaatgtctctctcctctggggctgcctgggctgccagttggtctgtctctgtgtgcctcttgtctatcttcggcacccttgcccgagtccctggggttgggagatggtgtccaatccctgggtctccatcaactcttgtctgggggcgggtctctgtgcactttgtttttcttcatactgtctaggtattcctgttgggacactgccagccccgaagttaggatctcatcatcatcccagtcattcagaccaaaggcagagggggacatctgctgaatgagggcccggccctccaaagcagggtagagggacacaaggggggaagttgcccggtcgggcccctgccgagaactgacttgctttgtaac

SEQ ID NO: 51068 - DNA, 219 bp, Homo sapiens
ggaatcccatctggagactcgctaagcgtaccagccgcatccctcccgcagcgacggcggcccgggacccgcgggctgtgaaccatgaacacccgcaatagagtggtgaactccgggctcggcgcctcccctgcctcccgcccgacccgggattccccaggacccttctgggcggcaaggggagctgagccccgtgggaagaccagagagagggttttg

SEQ ID NO: 51069 - DNA, 82 bp, Homo sapiens
tgtgtttcaagaggattaagcgtaaacacatctatgatacagaatccttaattttgcactttttttgaatatttgtacagag

SEQ ID NO: 51070 - DNA, 380 bp, Homo sapiens
gcggcacgaggaaaccaagttggaaggcagggagggaactggctttgagatgacagggtccaggatgtgaatgcagctgagactggttcttgtccctccctcttgtccctcggattgataacttgtactcaactacatgcttttgtcagggaaccctggctgctggccttctgggtcccctaaccataagaaaaaggaccttccgttagtgtaaagcccaaggcaggattctgcttggctgggcttcgatctggtacccatagctggaccaatcatgacatcccagatggggtcacgtggccaacctgccgcaaggggggtggggtctgtaccggaagacaggaggggaggggtgcagatcggacaggaagtaatggcat

SEQ ID NO: 51071 - DNA, 449 bp, Homo sapiens
gtcttttcagaattaaataatgacaatgttggctagggggaagacaaccacttttaaagagtagagctatctgcgcattaacataagagcattttctctcttcagcttgtttgtaaggtctgatggcagatatttctttgtatcctactgcacggtgtttctacatatagtaggtgcatgataaatattggtgatgattgggaatgttaacatttactgttgcacagtgtgggaagggaacaagtataaactagagaagtatagatgtctttaacatagcagtggtgactaaggaggagcaaagttgtactagtacttttatgagtaataggaagtagccattgtctttattattaggggtcagatggccttagagaattctcaaaatatgtggaattggggtaagttttttttaaagggtgaccctaattaattattttgttttggtg

SEQ ID NO: 51072 - DNA, 276 bp, Homo sapiens
aaaactgtattcattggtatctgaaaagaagtcagctcttgcctcagttataaaagagctacgacagttgcgtcaaaaatatcaagaacttgacccaggagtgtgatgaaaagaaatcccagtatgatagctgtgcagcaggcctcgaaagcaatcggtccaaattagaacaggaagttagaagactccgtgaagaatgtcttcaagaagaaagtagataccattatacaaattgtatgattaagaacctagaagttcaacttcgtcgtgctctgg

SEQ ID NO: 51073 - DNA, 932 bp, Homo sapiens
gataaacggaaactattattatggttacattttatcttttggaagtccatgagtcccatgaaattggaggcaaactctattcatgtatgtattaataactctatgagcatatatggtttttctctggggagatgatcagtagtcttggtcagattttaagcagcctgcgaacctgaaaagatcaagactccatgccatggatgatggttctgatcactccccactggccctgtccccacaggctgcccagagaaaactgcgccaggccagcaccaacgtgaaacactggaatgtccagatgaaccggctgatgcattccaattgagcctggagataagcgtccgtacaccagcagctccttctcaggcttccagccccctctgcttgcccaccgtgactcctccctaaagcgcctgaaccgctggggatcccagggcaacaggaccccctcgcccaacagcaatgagcagcagaagtccctcaatggtggggatgaggctcctgccccggcttccacccctcaggaagataaactggatccagcaccagaaaattagcctctcttagccccttgttcttcccaatgtcatatccaccaggacctggccacagctggcctgtgggtgatcccagctcttactaggagagggagctgaggtcctggtgccaggggcccaggccctccaaccataaacagtccaggatggaacctggttcacccttcataccagctccaagccccagaccatgggagctgtctgggatgttgatccttgagaacttggccctgtgctttagacccaaggacccgattcctgggctaggaaagagagaacaagcaagccgggctacctgcccccaggtggccaccaagttgtggaagcacatttctaaataaaaactgctcttagaatgaaaaaaaaaaaaaaaaa

SEQ ID NO: 51074 - DNA, 674 bp, Homo sapiens
  misc_feature (1)...(674): n = a,t,c or g
gagactgcagagggagataaagagagagggcaaagaggcagcaagagatttgtcctggggatccagaaacccatgataccctactgaacaccgaatcccctggaagcccacagagacagagacagcaagagaagcagagataaatacactcacgccaggagctcgctcgctctctctctctctctctcactcctccctccctctctctctgcctgtcctagtcctctagtcctcaaattcccagtcccctgcaccccttcctgggacactatgttgttctccgccctcctgctggaggtgatttggatcctggctgcagatgggggtcaacactggacgtatgagggcccacatggtcaggaccattggccagcctcttaccctgagtgtggaaacaatgcccagtcgcccatcgatattcagacagacagtgtgacatttgaccctgatttgcctgctctgcagccccacgggatatgaccagcctgggcaccgagcctttggacctgcacaacaatggccacacagtgcaactctctctgccctgtgaccctgtatctgggtggacttccccgaaaatatgtgagctgcccagctccacctggcatggggttagaaaggattcccaggggggttcaagaacaccagattcaacagtggaaggncacattttg

SEQ ID NO: 51075 - DNA, 3105 bp, Homo sapiens
  misc_feature (1)...(3105): n = a,t,c or g
tttctttgcgtaaccaatactggaaggcatttaaaggacctctgccgcctcagaccttgcagttaactccgccctgacccacccttcccgatgcagtccctgatgcaggctcccctcctgatcgccctgggcttgcttctcgcgacccctgcgcaagcccacctgaaaaagccatcccagctcagtagcttttcctgggataactgtgatgaagggaaggaccctgcggtgatcagaagcctgactctggagcctgaccccatcgtcgttcctggaaatgtgaccctcagtgtcgtgggcagcaccagtgtccccctgagttctcctctgaaggtggatttagttttggagaaggaggtggctgggcctctggatcaagatcccatgcacagactacattggcagctgtacctttgaacacttctgtgatgtgcttgacatgttaattcctactggggagccctgcccagagcccctgcgtacctatgggcttccttgccactgtcccttcaaagaaggaacctactcactgcccaagagcgaattcgttgtgcctgacctggagctgcccagttggctcaccaccgggaactaccgcatagagagcgtcctgagcagcagtgggaagcgtctgggctgcatcaagatcgctgcctctctaaagggcatataacatggcatctgccacagcagaatggagcggtgtgaggaaggtcccttttcctctgttttgtgtttgccaaggccaaactcccactctctgcccccctttaatcccctttctacagtgagtccactaccctcactgaaaatcattttgtaccacttacattttaggctggggcaagcagccctgacctaagggagaatgagttggacagttcttgatagcccagggcatctgctgggctgaccacgttactcatccccgttaacattctctctaaagagcctcgttcatttccaaagcagttaaggaatgggaacccagagtgttttaggacctgaagaatctttatgactctctctctttcactcttttttttttttgtcactaagttaaaagcgaagtgagagtattaacgtttttgttctcctccggccccctgttacaatgaaggggcaaaagtatttgctcttagtctattcctcccttaacttctgtgactaatttttatttcctttctagatttgcccaattaatactagggtgcagtgtatcctggagaggtagggtgtgtgggggaggaatcccttgggggagatattaggagtgctctgttgtttacaaactcaggtacccgcagggcctagcaagagacttaaatgactgataagaaccgtgagaaacatgttgcttccaggcttgatttcgatttttcgctttttttttttttngaaacanagnnncgtttngcccccnggnngnagggcaggggggnannntnncctnanngnancctccgcctccggggttaaancanttntccngcntaanccnccnangnacntggnantacnggccnngccacnaccccnggtnaattggggnnttttnagnaaaaagggggtttnnccntgtngnccagnagggnctcnatntttngncctcggnanccgnccncntnggccttgnaaagcncnggattacaggcatgagccactacacccagccgatttttcctttttgattaaagatgctattacaatgtaaatatttcttacacagaaagtcacagcacatgtgcccattgatacaaggctgctgaggcctggtctccagttggaaatataattaagggtggcaaggactggagtcagttggagagtgcatagccagtctgtgaagacaactgccagatactggcaatactccagcctggtgacagagtgagactctgtctcaaaaaaaaagtttcaatgtttactcctagagaagccaaaaatccagatttgtatatgaaatcttaccattttaaaagattggcagctaattatttttttaaaaagctgtgcagtgtgatgtgtcccaaacggactggctcatggggtggccacgtcacaacctctgatctcagaccgtgcatgcccttgtcctcttaagacaactcctgtggcaccgtttctccctccacaggggccaaagccatagtgtccggtcccaaggacaaggctcttccagtgctaggagaggtatgagcagcctctcacctgtgagctgtggggatcacaaggctgcctgcctcagtcttggagtcctgttgggtgaatgaggcagatgggaaagagcctcaccagcagctgcttttggagcaggggtccaaggaagagagggtggcctcgacatcaaactgcctggatttttctaccaccctgttacatcataacaacttctgaaacacacaccagccctgagttctgggctcatttgaagcctggaatagcaataaatctttttaacttgcggacagtttccccttgccttggctgcatatttcactgatcacatctcaggatttcaaaagcatttttggggtggggctcttttggttggaagggtttgttggaacggtacaggtgagccgaggtgattccagggacggacccttctgcaggagcttgagcttgcttgttgtctctgcttcatcgccatccagctcccttgtttgctattttgctttccatcacatcatgactgcggagagcaaaaatcacctactgaccntagncantacaanccngaccagatngttntngntgncgannntnatgngnnagctaccatcnctatgaccgnngnaaggnacnncccanntactaccccttatttggggaaaattaaaagtaattagactttcctattatctaaagcaggcatctggttccagatttcttttccccgaaaaaaaccttagaagtaactaaaatttctgtacatctccggaatgccatgctgaaactcactgcaaccccacggtcccgctttaaggtccataaatatccctaaggaaaaatccacccgtggtacattcagtcctctcacccgaggtgccccatggcagtcttctggaagcattcttctaatacctttcctttttcaaacct

SEQ ID NO: 51076 - DNA, 494 bp, Homo sapiens
tgcccttcttccagctaacagagctatggcctatctgaagattcagaaatatgaagaagctgaaaaagactgcacacaagccattttattagatggctcatattctaaagcttttgccagaagaggaactgcaagaacatttttgggaaagctaaatgaggcaaaacaagattttgaaactgttttacttctggaacctggaaataagcaagcagtaactgaactctccaaaattaaaaaggaattaattgagaaaggacactgggatgatgtctttcttgattccacacaaagacaaaatgtggtaaaacccattgataatccaccgcatcctggatcaactaaaccactcaagaaggttattattgaagaaactggtaatttgatacagactattgatgtgccagatagcactactgctgctgctccagagaataatcctattaatctagcaaatgtaatagcagccacaggcaccacaagtaagaagaatt

SEQ ID NO: 51077 - DNA, 297 bp, Homo sapiens
cttgattatcacatccagttgtgcacatagaaatctctaaaggattacctcattaggtgctttcctttgaaagaaagaggtgccttttaagggtttaatttaaatataggagaggagtgccaggatagctccttgatttcttatctctagctgtaaactgtagacccaaaacatcctctttagtggaagaactctaaatcattttggttgtctttttttatatgtaagcaggagtcatttttctatttacttcctcttggtaaatttttaattttttgtttttgaataactcctaat

SEQ ID NO: 51078 - DNA, 396 bp, Homo sapiens
gagttaggcttttgttaaacccaagtcagttaagctgtagtagaagttttctttgaaggcaggctgttagggagaacagagagctctgggcatatttcagaatggttaccttctcatgcttctgctggaaacataaaggtatttttctccagtcttcacagtgagaatctggtggaattcctgggaggtaaaactcaacaaaagtgtaagtgtgagggttcccccctgccctgaacccttgggagttttgaacactgaagctagtctacactgagcctccagcagtttttcagttaagtcttcctacctgtattggctccatctttgatcttctggctcttgggcttctgcttcttgtaagctgtgactctgtttccacctgctgctctccagttg

SEQ ID NO: 51079 - DNA, 876 bp, Homo sapiens
gaaattcatgcaagcttccgaagatcttctcaaggaacactacgttgacctgaaggaccgtccattctttgccggcctggtgaaatacatgcactcagggccggtagttgccatggtctgggaggggctgaatgtggtgaagacgggccgagtcatgctcggggagaccaaccctgcagactccaagcctgggaccatccgtggagacttctgcatacaagttggcaggaccatggccaacctggagcgcaccttcatcgccatcaagccggacggcgtgcagcgcggcctggtgggcgagatcatcaagcgcttcgagcagaagggattccgcctcgtggccatgaagttcctccgggcctctgaagaacacctgaagcagcactacattgacctgaaaagaccgaccattcttccctgggctggtgaagtacatgaactcagggccggttgtggccatggtctgggaggggctgaacgtggtgaagacaggccgagtgatgcttggggagaccaatccagcagattcaaagccagggcaccattcgtggggacttctgcattcaggttggcaggaacatcattcatggcagtgatttcagtaaaaagtgctgaaaaagaaatcagcctatggtttaagcctgaagaactggttgactacaagtcttgtgctcatgactgggtctatgaataagaggtggacacaacagcagtctccttcagcacggcgtggtgtgtccctggacacagcagcagtctccttcagcacggcgtggtgtgtccctggacacagctcttcattccattgacttagaggcaacaggattgatcattcttttatagagcatatttgccaataaagcttttggaagccgg

SEQ ID NO: 51080 - DNA, 1650 bp, Homo sapiens
cccctgggttcgaacacggcacccgcactgcgcgtcatggtgcaggcctggtatatggacgacgccccgggcgacccgcggcaaccccaccgccccgaccccggccgcccagtggcgctggagcagctgcggcggctcggggtgctctactggaagctggatgctgacaaatatgagaatgatccagaattagaaaagatccgaagagagaggaactactcctgggatggacatcataaccatatgcaaagataaactaccaaattatgaagaaaagattaagatgttctacgagggagcatttgcacttggacgatgagatccgctacatcctgggatggcagtgggtacttcgacgtgagggacaaggaggaccagtggatccggatcttcatggagaagggagacatggtgacgctccccgcgggattctatcaccgcttcacggtggacgagaagaactacacgaaggccatgcggctgtttgtgggagaaccggtgtggacagcgtacaacccggccccgctgaccattttgaagccccgcgggcagttacgtgaaatttctggcacagacccgccctagcagtgctgcctgggaactaacacgcgcctcgtaaaggtccccaatgtaatgactgagcagaaaatcaatcactttctctttgcttttagaggatagccttgaggctagattatctttcctttgtaagattatttgatcagaatattttgtaatgaaaggatctagaaagcaacttggaagtgtaaagagtcaccttcattttctgtaactcaatcaagactggtgggtccatggccctgtgttagttcatgcattcagttgagtcccaaatgaaagtttcatctcccgaaatgcagttccttagatgcccatctggacgtgatgccgcgcctgccgtgtaagaaggtgcaatcctagataacacagctagccagatagaagacacttttttctccaaaatgatgccttggggtggggagtggtagggggaagagctcccaccctaaggggcacacactgagttgcttatgccacttccttgttcaaaataaagtaactgccttaatcttatactcatggcttggagttaccttatattcaggtatatgtgatattttgcctggtttgttaaaattgccccatttagattccttctataattgttcttatagataagtaatttatatatgagctgtgttagtattttttcagtgtggagatctctggattctttcacaatcaagctgttgaattttaacaagagtattagtacataaattttctactcaacaattccgagataggattatgcctagtttgtcatatcacagaaaaactccaagttaacttcatgttttggaagggcaggtcgtttttaaagtatttctttttttaactggatgaaaaatcttccatgttaggattaattttcttaatcacctccacactgtaacagaggaaactcaagccttaaatgtttaagtaaactctgtcctcagttttaggattaaaatacccaccggtggtgtgatgatgcccatataccgcagggcttgcttctgtcaagtgtgactctatctcagtaattaaaataagtgctgatctaaaaaaaaaaaaaaaaaaaaa

SEQ ID NO: 51081 - DNA, 911 bp, Homo sapiens
tttttttttttttaagagtgttttcagtattttattaacaaatgagctggcaagaggacaagtgatctagtagtatcacccccaccctcatggagcagccaccacaagcccaccatggtggggggtgtccaacatgctctgctggcccagttcccagccgatcccctgagtcttggcgcccgtttagtcacccttcagctgcttgggaggcaggaagagacttcccctcttcacgaggtaagggagacaaaagcagccatttggatgccagggccacaggggcaagccatgccctatttctttggagggacagaatcacttcttcccaaggccagacactgtagcccatggtactcagccttctagaggagggtagcctagcagaggagaagccctgagtggaagcagcattttgaaggcatcgtcattcttagaccagctaagagctgagggcattctctatctttgccagcagacagtgagactccaggattaaaattaaaagcccgtggtgcatcctttccttgacattaactttccacaaaaccttggaggagtcaaatcccacactgcacatactccggtgtctccagctgtgaagtgggaccagtatcaatacatgggaaagtgctgagaaggaagaaaatatttcaggtataatactaatccatcaaacacgttttattcaagaagcttggcaccaactttgtgccacatcctcaactcttcaatgaaaagagcggtgaccaactcgctcccgttggtccctatggcaggtgttggaatgaggtgaggctggcctcctctgtttgctcacagctttattcctctagcttcagataaaaataattataataggcaataaagtctcttcacagtgtatttactgtaactacaacagctcgcaagac

SEQ ID NO: 51082 - DNA, 426 bp, Homo sapiens
tttagtgtgtttgaccactgaggctagctgggaggtgggagcctggaaccccaactaatgtttgctcaggacaagagagttcacaaaacaagacacattcacacctcataatcttatgcaattgtcccacggcctggtgattttagcaaggagataagtggatgtcagaaatgaacgctcgagacactgctgggtgccggttccacactgacactgtgctccttggtttaatcaactcatcagccttttggaggctgcagcttttgttactagcattttgctgctgtgcaaaccagcttagagaggtgaactgacctgtcttaagtttgcacagctaagaatggcagaagctggagtgggagtgagaaggggaactgctccttctgaacacctgaagaatatttccctgcaggctgggcgaggttg

SEQ ID NO: 51083 - DNA, 858 bp, Homo sapiens
aattttagaagcaaatgtgatctatttaatctgttaggaggcgctaccatgctgccattccagctgccctgcggtgacccagtggcacttcacccgctcactcgtcagaggcctgagagggtctgtgaggctgggtcatgaggcgggtgggaggggacaaggagcatgcatcctggtgtttgtcatggctgtggtcttgctgaagaggcgggggtcagtgacaacggagaacaggcacctcgaagtgctggagccagggcacgacccagacttcagagtagcagctcagagtctgcttcaaggtgtggttggtttgggagtcacagtcatccagacgcaggtgctggtttttcttgcaggtagttctgccaatttccacctcgagcatatatttcaggcctttcactatctgaactagggcgcttgtgatgcggggactccttgacaagaacatgtcgttcgtgcagttgttgaacttttcaacactgtatctggctgcttggaggactcctgggtcattggtctttattgttttaggaaatcctggcttcacacgtgagttaaggtcctgggaacaagtatctggggaagggcccccagtggtgctcaagaccaggcagcagaaggccagcagagttccagccgctcgcatggctgcccgggtagggacagtgcggggcagttgggggtggccgtgcagtgccttctcaggcagcatggggcagttggaggcagtggttggtgcccgtgccgagccttcttgggtagatggcgcagggcaggtgggggcagtggtctgtgcccgtgccaatccttctcaggcagcacgggccagtgccgggcaatggtttgtgcctg

SEQ ID NO: 51084 - DNA, 759 bp, Homo sapiens
  misc_feature (1)...(759): n = a,t,c or g
tttttacagccagggcatgtgctcatttattagggctgactctccgtgtccgcttcctgggaaagaaaatccctgtgacatgaaccgatgaagggacagaagctatcacagatgctacagggctcagagaggggccggggcaatctacactacagaagtaaaagcaacgtaaaatgtttctgggtttcctttcccttcactcaaaaccactatttccttagttctatcaaagtacgtaaggggcataaaatagactcaggaactcggggctaaatcatccaaaaatggagccaaggctctaactagaaactgtctctgtcgtccctgttggcctcaaaaccccgaggtaaaaggctggtctcggctcctcccaggccccctggctcccagcacagtgccccgtcctctgtgttcatcatcatcgtttttttaaagagacaagggtctcggcttcttattgccccagggttggcctttgaatccccttggacttcaaagcggtaaacnttgcccttggcctttccgagtagcttgggatttcntaggcgcaatgcccctgcgccgggctgccctgctctctgcaggtgccttctctgcacgggcccagtgcctggatgccagtttgaggctgcgccacatgaggacacagcagttccgcctctcttctccccgctggccccaactgctgtgagccggcggaaagccccgacagttgcagtcatgcaaggaggagctccacccacttgacccagtcccgcc

SEQ ID NO: 51085 - DNA, 602 bp, Homo sapiens
ttttttttcctgggtctgagggtttattggtcagggcccaggcagatgtcatgtgcccctgttgtccccacgcaggcccacagacatcacaggagaatgatttacaagccacttggggcctgctggcagtgagggtttacccaccccccgccccagcttgctccagtgccgccgtttacgtcatgggtacgtggcctgcagttcacggatctccaggcccatcctgttgactgcatacccagtgaggcttcgagcctgccagaggtcaatacagcccagcagactaaagtcagttttccaaaaggactctggaattcagcaaaatgaatggaaggtcctttacagcgtactcactccaccattgtacagatggcagcactgaggcccggagaggctctggaacttgggagaaaggctcaggctaagagaagccagggactcctcacccccagcctgtgagctgctgcagattaaggggtcattgaagatgggctagtggccaagggaaaaccaccacatccagggccacacccgtcacccctcaccctcatcccagtcagggcagcagcagcatcttcctgtgcaaaacaaaatgtcgacgc

SEQ ID NO: 51086 - DNA, 1031 bp, Homo sapiens
  misc_feature (1)...(1031): n = a,t,c or g
ttccggatggcaaacttctctgtgggtagagatttcccagcaatcttgagcttcaggcctggcacagctcgaaataattccacttcgtcgtccccgaacggcttgtggtcctccttcccaaacatgctgaggtaggcggccttcatgtaaatgtaggtggccttggaccagcagttctccttgctgagcaggtcggcgtagaagtaggacatcttccactggcccttgtaggtgaagcaccacatcagctcccagtagcacatgtggtggaactgcttccagtgctgctgggcctcacagcactcctcgaaacgccggatggctgcatcaatgttgcctttaatgacttcaatcctccctgcaaggaacaggaagatggcacccccaggganccctgcccgcggggactcctgagagcagcctccatgaggccctggaccagtgcatgaccgccctggacctcttcctcaccaaccagttctcagaagcactcagctacctcaagcccagaaccaaggaaagcatgtaccactcactgacatatgccaccatcctggagatgcaggccatgatgacctttgaccctcaggacatcctgcttgccggcaacatgatgaaggaggcacagatgctgtgtcagaggcaccggaggaagtcttctgtaacagattccttcagcagcctggtgaaccgccccacgctgggccaattcactgatgaggaaatacacgctgaggtctgctatgcanagtgnctnntgnattcaagnagccttgacctttctgcaggactataacattntnntctttattnttatntnttattattgttcntacntttannttactntcattgtnattacattnttnttnatatcttttntttcttcatnantnttgtagnattnttnanttnntntatgntntntatatnanttnnttnatgantcttatangnantnttntatctcgtatttntaatnttattctnttttttntttntnnntnagtatnttctttttntttttcttg

SEQ ID NO: 51087 - DNA, 133 bp, Homo sapiens
ttatgattcaagccttaaatcagaagacaagtgaaaaaatgaagaaaagaaaaatgagcaactcctttcatggaattagaccacctcaacttgaacaaccagaaaaaatgcctgttttaaaggctgaagcgca

SEQ ID NO: 51088 - DNA, 1164 bp, Homo sapiens
accgtttgacatgattacgaatttaatacgactcactatagggaatttggccctcgaggccaagaattcggcacgagaagtgaagagcaaggagctgaactccacgcagaacacagcgcagcgtcctttaaaggaaggccaaaaacaacccaacaaaaatgccaggtgatcaaagcggtcacagcacaatgtccacatccaacgagaaattgctactacgtccagacgcagggaaaggtggccgtgggaacgtgagtcagcagcaacaggcccagaagggcagccacggtggacttgtcagacgtggaccctgaaatgacaatcacagcatgatttcaggcaggagcctgaaatggtacagctttggacatcggtttggcaaattcttttagagagaaacacacaccttccctaggacccagcaactccactcctaataaccaagtgaaatggaaggagttgtcctcagcaaaacgtgtgtgcggaagttcacagtcactttctcggtgataaccaagagctggaaaccactgcaacacccaccagcaggtgaacggattaacacactgggctagggccacacaatgagatgctccgtggcaacacaaaatgaaccgtggacacacactgcacggcggatgaatatgcagacatcaggccacgtgaagggagccaggccccgaggcgccacgctttgtgattcagggtggtccctctgcgcccaagacccggctgcctcctcctcttcctggctgcagggagtgcttgtgtctgaagaacgccaggctggtgtccccagagggcggctggaggggctcagaaaccattttcaccttctgtctcctccatgtctgcactgtttgggtttgtacccgcctgtgtcgcttttgcacggggaagtgagatggagagacacgtgaaccaccattgctggggttccagcatggggccccaggggacccatggctttcccagaaggaagctctgccattggacagccggtctcaggctgctgcacaggcccctccccgccctcagccctggcctgcgggaatcaggaaagggtggggtccagctgcattgcgaatggactaaagccactgatttgcacacttgccaatggctgaaatggtcaataaaacgtcatgtaccttttgccacagg

SEQ ID NO: 51089 - DNA, 817 bp, Homo sapiens
ttttaaagttggaaataattttattagttttttaatgcataaatccaaacatatatttgtactgaatattttattagctaatacagtaccattttaaaagttctaccaacttatttaaaatatttcctgtaaaaacatcatccaaaatatactttgttaatttttatgaatgttaggtgttatgtctcttttctttgacgctctccttttttatcctgtgcttacaccaaaaacaaattatttgaaaatgctaaaataaaatgtggcatgttttcttagctgttttgtattctgttataagatattttacaactatgaaagttgaaaaataactttattggttttgctgcatatagctgcctgtctactataagagaactaatccataaaattaaggcattttgttatttcaagtgtagaggggcaagaatgtaaggggattataaaaaccccaagatgactcatttaaagtagatgcacattaaaatactatagatctggcatatttcatatttataaagcagacaaaaagaatgtttatctttgcatttggcaagagtatcttcaagataactaccacttttcaaagcactattgttgggtaggttttattaggggagaggacttagaaaacatgactttcctcacccaaaaccaaaaataaatgagggcttaaaaatatattatttaagaagatagtggccagaaataaagaccatgaccaacaagctttggggccatcaagatgaaaagacctttcctttattcaagatctaggatctgaaaatctcacttcataaatttaactggattttct

SEQ ID NO: 51090 - DNA, 501 bp, Homo sapiens
  misc_feature (1)...(501): n = a,t,c or g
cctgatagcaagcatgttatattcccatgttgtctgtccatttccaaatgcgatgggatgattcctcttcctaaggccaatccaatggtcagaagggcctttgtatcttttcaggaaattctgacaaaacaatagaaagtgcaatcacacttgtagtcaggactgcaatgatgaacaagcaacaataaaccttgacaggagttactggagatataagtgctagacattgtctttgcagagttttatctgtaaaatagaaacatcagaatctcaatctcaggaatatcgtagggagaaaaaatttatcatagaatcaacactaagatcagatgtacttcaattctcctactgccaactcctttcacaaaagggcttggttcataaatgagaataatggcccaaagagggctaagagataaaaatccgaattctccccacccccagggaatcttccagttactggnaaaagagtaggaaattggggatggaaaaggaacnttt

SEQ ID NO: 51091 - DNA, 450 bp, Homo sapiens
ggcaggagtccatatgacacatccctcaatgaggacggagaggctgtgagcagctcctacgagtcctacgatgaagaggacggcagcaagggcaagtcggccccttaccagtggccctcgccggaggccggcatcgagctgatgcgtgacgcccgcatctgcgccttcctgtggcgcaagaagtggctgggacagtgggccaagcagctctgtgtcatcaaggacaacaggcttctgtgctacaaatcctccaaggaccacagccctcagctggacgtgaacctactgggcagcagcgtcattcacaaggagaagcaagtgcggaagaaggagcacaagctgaagatcacaccgatgaatgccgatgtgattgtgctgggcctgcagacaaggaccaggctgagcagtggctcagggtcatccaggaagtgagcggcctgccttccgaag

SEQ ID NO: 51092 - DNA, 368 bp, Homo sapiens
gaagctgaggtgaagcggtacacagaggagaaggagaggcttgaaaagaagaaggaagaaatccgggggcacctggctcagctccggaaagagaaacgggagctaaaggaaaccctactgaaatgcacagacaaggaagtcctggcgagcctggagcagaagctgaaggaaattgacgaggagtgccggggcgaggagagcaggcgcgtggacctggagctcagcatcatggaggtgaaggacaacctgaagaaggctgaggcagggcctgtgacgttaggcaccaccgtggacaccacccacctggagaatgtgagcccccgccccaaagctgtcacacctgcctctgccccagactgtaccccaat

SEQ ID NO: 51093 - DNA, 248 bp, Homo sapiens
agttgacaagctaaaaaccaaatttatatctgcttggaacaacatgaaatatagttgggtgttgaaaacaaagacgtattttagtagaaattctcctgtattattgcttggaaaatgttaccattttaaatatgaagatgaagataaaacgttacctgcagagtcgggatgtacaatagaggatcacgtaattgcaggaaatgtagaagaatttccgtaaagattccatttctagaatatggctgacc

SEQ ID NO: 51094 - DNA, 2366 bp, Homo sapiens
  misc_feature (1)...(2366): n = a,t,c or g
caaaggtgacggatggacaagagctcggagacagaacggtgaagaaggctacgttcccacgtcatacatagatgtaactctagagaaaaacagtaaaggttcctgaagagggtttctgaggaaatgggcaagatgttgaaggaggttacatgcagctgctttnnggggagggtattagagttgtcaggctcaaagagagtgagagaagcaagttgcatgagtgcatgcagacatgatttttttnttactaacttcattagcatttccatacattgtttttaaaaatcataataccaacccttaagttcctagttcacagttattcccacaaaagaaaaagccaacaatagtgtaccatttttctattttattttattgctgtctaatcaataaagaatgcagagctgtcaaaaaatgtgtcttacatttagctgtcccaacaggattgtcttccctcccagctctgttttaattggcttttagacccactatctgtcagatccttgccatctgtcagtgtctgcctgcgccacctccgtgcttgcttaacatcctgttgcatgtctagcgtgattgagctagatttttcaggcatgtctttagattcccttgttcttgtcaaagccttgttttgttttacatttgtagtgcaaatcactttgtcaaacatctccagcactaatgtttccatcttagtatttgtgcacactgctataacttccccactgcaaacattccagttttggcattacgaagaagtagctgtgaacctgaagtatttatgataagaaaaagaaaacatctctgctgtagcctacagcccagttgaaagaactctttgaaacgtgatacatcttcagcacctcagtctgggaagaatctagtcagcactgaaatcctggcataataaacacagaagatattcaccacctcaagacaaaggactattgtcaaaagtcagctgcttccattcaaatgctgccttaaacttgagtgcctaaatctgttgattgccaacactaccactacagtatcccacaaagggctttatgtgtcagctcagtgcgacctgctttaactctgcagcaccgctgagcgtggccgatgtagcctcggtaggtggctattagagctctaccatatacagtggtgcatcttcaaatttatgcatcaaactaaagacatgtccaagtccattttaatttcctcagtggttttatgagaagttttatggggcctcccccaattgtctttttattttggggttatgacgatcatgtttgataattacaatgatagtctctttccacgtgatgcttttgtttgaacctgataaaatttagtgaaactttgtaatgatctatgtgcacttttacttgtaaaatggaatttctgtatgtttatacttgtaaatatgattgttgttagtgctcctgttgctcatggtgtcctgcctcgcatttgtgattctgttaatgacatgtatcttaactaattccttaagtggtgttgtaatagggagatggggcaggtggggggttatttgtaccactgaatcttcattaatttggttctttactgttttgaggggagaaagaacgtgaaatggtttgtgtattattgaattttaagcaatattttagaagctgtgtgactgctttaataactttttcccagtgttatttgaatcatactacccgttatactaaagctgaatgacaattgtgtgaaagttactgccttcataagatcaagtcaccactgttacacagctgacatatagtgtattacctttgcagctagtaaactataaagtttagatattgaatctcgttacagggttatttatataatgtgacattattcagtactgacagactacatgaagtagttttaaaatctagtgctatttttattttaaaggttagcaatgaggaggaaatgtgatctggctgtgtttgtcttctgtacaaagcctgaagtgcttatggttttttggctaacagccacagagggcaaagtttaagactttcttgtaaggactaactgttcttttcaagctactgtttgtttttctaaaagcaggatttgcttccgtaggaggcaagttccttgatgtggaatagtgcaacctgtatatgggttattataataggaaagacatttgtacttgcacagtttaaatcattcttaaattttgaacatgtgaattgtcccaaaaaatctttaattttttggtaatttttactctttttgtgcacatgttgatttcttaatggtaaatccttcatttaaagatagtgttctctgttgagaatatttacatggaataaaacaatcttttcatggcctgttaaaaaaaaaaa

SEQ ID NO: 51095 - DNA, 1277 bp, Homo sapiens
tttttaactgaggcatcatggcagtttaatagtgaggtatttaattgcatttttataaaaaacattgcaaaacaaagtgacaatagggacctaaattctttggacttacggtagagatgcttgaggatcctaatattctacttctgccaacatgtcaggtaggaagctcacaatgttccccataagccattacaaactggctaaggaaaatcagtcatgactaagtccttgtctgcatcacgctcctgcccctccacacactgtctgagcgtgcacttttctttcgaaggctaatttatgagggcattctgcctgagtcagggctattgctaagtggaaggtttgatgaacctcccagtagaaaatgcaaggcctgcaaaaatgcgaacagctcgatttactatggcttataatcaaggcaaactatacaataagaggttgtattttcatcagatctgcaaaaggtcaaaagcttacagcaaaagacaaaaggaagaggtatatatcttagagacaagctcacagcacctttaagtggggagatctcatggccaaccggtgactcaccgtgtgttgttttccagacgtgggcagatggcagctctgctgaccccacaacccacctacacgatcttcagcatttcaggatcaccggagcttgtttaaagtgagtctacactgctgaatttcccatcatccccctcgggagcagccctgggcaaatggctgcactgacagctgtgactcaggcactggttcccagagatctagaacccaggccagcaccgaggcctagacagctgtgactcaggtgctggttcccagaggtctagaacccaggccagtcactcaccactgatttatggaatggaccatatacgtatttatcaaccaagttcccaaacttagggtgcccaatgtccctcaccttgaagttagcaagagaaccacaactttgcttctctgtagacagatctcccaactttcccatctgttcctcacacacattcatttaaaaacagctgagagagctgggtgtggaaccttattacaaataccttctgaggactcatgccaccaccagaccatgttacctcaaagtctcctgcctccatttccccattttatacacagttcatgcttttaaatacagaactcccatgccattggaagctgttcccagaaagcgtcgagattttcatccagatgcctctgtccctcacccgtcagaacagaccatcaggtaccaccttctaacagggatgcctgagtgagcc

SEQ ID NO: 51096 - DNA, 376 bp, Homo sapiens
caaaaaggtgccaaatgcatataaatcttgataaacaaagtctataaaataaaacatgggacattagctttgggaaaagtaatgaaaatataatggttttagaaatcctgtgttaaatattgctatattttcttagcagttatttctacagttaattacatagtcatgattgttctacgtttcatatattatatggtgctttgtatatgccactaataaaatgaatctaaacattgaatgtgaatggccctcagaaaatcatctagtgcatttaaaaataatcgactctaaaactgaaagaaaccttatcacattttccccagttcaatgctatgccattaccaactccaaataatctcaaatgaattttccactt

SEQ ID NO: 51097 - DNA, 364 bp, Homo sapiens
ccagtttgatgaaagcattcataaatttcaaataattagaggaatatctgctcaagaaatacagactggaaatgtgaaatctgccaaatggctgtacgaacatccccaccttggatctcctcctgttttacagtttgcaatttgactgctgtttcagagtcatcttttatggtatcaagtggctgagtttcaaagagccaagtacaagttttgacatctcccttatgaatttcttcactgctggtcattaacgaaactttttcataaagagactccattggctgggtctcaaaaagccatttacaggttttgacatcccctttaacaatatctctagtttgttcagttttactttctgtttctt

SEQ ID NO: 51098 - DNA, 919 bp, Homo sapiens
tgatgtcgcttataaatataaaatgcttcaaaattaggtttatcaaatcactttgattgcagaatatcactggaatccaactgtggtctctataaaatttgcagtcctcagacaaaatacatcattataccattctaaacctggtatcctttgatacttgaattttcaaatagaaattgtggctgaagaaactttcagaaatgagtgacagtccaaccaaaagacaagtccatgaatcttctcacgtaaatatttgtagtggtatcagatcattaacattatctttttaaaaataaaaaccaactccatcttttggtccacaaattggatgaaacattctgtgaaatgggctagtggtttaacctttcaagttctgcttctgggttttatactgctgtccatttcctgccgcccctttgacaacctcaggttcccagcagcttaggaatcacctctcattaaggctgcaccctgagacagacaggctaaatggagtttggaaaatctcagttgcgcccgcggcccccttctgcagccaggacttcaacttgggtgccaggagaagggaggctgcaaaggctggggtccagcccctgctcgggcggccgagggctccgcggcgttttcagctcctccaacctcccggctagaggaactgtcgggggccagccacggcggtgccttggtttcacctggctccgctgcgttttctacgccgcccgcctgacctgaggagtgagctccgccagctccgttggcaaggctgggttcctccgcgggtggggctctcctccgacgccaagccgcccaaacctcccgagcgcaggtgccctctggccgggaagtacttcaccatttactagccttcatctcaaccacaacagtcccgccctgcctctaccggggatgagggaaggcg

SEQ ID NO: 51099 - DNA, 1243 bp, Homo sapiens
  misc_feature (1)...(1243): n = a,t,c or g
cgtcgactttttgtgtttactacaaactgtttaattgtttcttatcccaataactttacaaatatagaaccacatgctagtctgggggtgctgtgcagtgagtcactacaaactcgctcaggcacagcttaatgccgctgagatccatctaggagcagtcccagcggtggcctcagccacgtgaggaagagggctttggaggagggctgccaagtgtggccaggggacccggcctcaggtctgtggaggtgcttcaacagcacgatgctcattctctgtccgtagtgtctccatatactttctcatcttctccaccatccaggagggtaggacaaaggatttcaattcctctagcttcagatccaggcatcctctgtaatcatcactggccgcaaggtcccggatgtcctcctcgatgaggaggtaggccatcttgccccctgttgcccgcatgtgatgctgctcagccagccagtgcttatcctgggggtcagctgcatacttaaagaggtgtgggtgcttgatgtagattcttcctctggtgccccccatccccagggctttgttggctcgagatcccaacacaaaggtggtagattcattcaggcgagctgggtcccacttggggccttcccggcgaattggttcacaggattttggtttccataccatgccggcggctgcccggtcgcttgacaggatgtgtccaggaggccgtcctttcctctttttaggaagggggcttcctcgatgggcacattcttcttccctgacggccacgctttattcctggaagctcatgggtcaatctgggtattactttttctccatctgaaaagagcagtttagcctgctccaggcagctccgacaggcttcctggatcagctgctctgcgtccacctcctccccaacattgtctcgcacgttcagtgctgccttctggaagaactttcatgtacttgttgaagacagtctggatctcctcgttgatgctgggctgcaggacagctcggaggagatccatggagatggcaggatctgtgaaacttgttgtcatctgtgagcggcggcccctcncagacatntgccggtgctttatcattatgttccaagggttcgtaagaaccagctgccccgtgcgcccgcatcccccagctccaagccgcccctcttcgccccgctgggtcctcgcggctgctcggctgtgccagtggctcccatggcgccccggcccccacaact

SEQ ID NO: 51100 - DNA, 317 bp, Homo sapiens
ctctgacttacccggacatgtacatgggaatgatgtgcactgccaagaaatgtgggattaggtttcagcctccagctattatcttaatctatgagagtgaaatcaaggggaaaattcgccagcgcattatgccagttcgaaacttttcaaagttttcagattgcaccagagctgctgaacaattaaagaataatccgcgacacaagagttacctagaacaagtatccctgaggcagctagagaagctattcagttttttacggaggttacttgtcggggcagagtctggcagaaacaatgggaacaaattcaacggg

SEQ ID NO: 51101 - DNA, 1848 bp, Homo sapiens
attacatttcacttggttacagctgactggggattttaatcatttggagccacactgaaaaaaaaatttccccctgcaatctactcttaactgatagtcgctaactttggttatgtgtgtctattcagaatattacattaattgatttctcaaacaaaggtcctttctgaaatggtatctatgattcagctattcaaaacctaatgaagttggtgactatgacaatgtggagaaatcatgacagaaaatgtggtttgtactggggctgtcaatgctgtaaaggaagtttgggaaaaaagaataaagaaactcaatgaagacctgaagcgagagaaggaatttcaacacaagctagtgcggatctgggaagaacgagtaagcttaaccaagctaagagaaaaggtcaccagggaagatggaagagtcattttgaagatagaaaaagaggaatgggaagaccctcccttcttctctggctgaaactgaatcaactacaggaatggcaacttcatagaactggtttgctgaaaattcctgaattcattggaagattccagaacctcattgtgttagatttatctcgaaacacaatttcagagataccaccagggattggactgcttactagacttcaggaactgattctcagctacaacaaaatcaagactgtccccaaggaactaagtaattgtgcccagcttggagaaactagaactggctgttaacagagatatatgtgatcttccacaagagctcagcaatctgctaaaacttactcaccttgatctgagtatgaacgattttactacaatccctcttgctgtgttgaacatgcctgcccttgagtggctggacatgggaagcaacaaacttgaacaacttcctgatactatagaaagaatgcaaaatctacatacgttatggctgcaacgaaatgaaataacatgcttgcctcaaacaatcagcaatatgaaaaatctgggtactcttgttctcagcaacaataaactgcaagatattccagtatgcatggaagaaatggcaaatctgaggtttgtcaacttcagagacaacccactgaaattgaaagtatcacttcctcccagtgaaggcacagatgaagaagaggaacgggaattatttggccttcagtttatgcacacatacatacaagagtcacggagaagagcagatcaccaagtcaacggttcaactactttaccaatctccataaatacggatggataatataattcaagatgcccttctaaagaggattactttggtgaattctctaatgtttggatttctgaagtaaaaagaaaagctattaccaaagtttaatgaggccacagcattttttaaagttcatattatttgctatttaaagtatatatttttttgatataaaaatataattaaaaaattttttttggtggaagacagatgatgctcaaatttcttttccattaagcagttgtttctggtgatgaagaatgatttggtaaagcagttaacaaaacattttccaaagacaccagagggtctgtatagtactgcaaagcaggactgaatcccttctgctgcaaatactggattcgaccttggtcaatcagcaatttacaaagatgccctattttcttcttttcttcaacactaagaagcctaaattgaataaacacacacaaaacattgttaaaattttgcaaaagtttataaaaaattatttttgtcactatttattgagagactgttaactaacccataatgtactaagtactttgtcccatgcttccaagacacattatatttatgaccacaataaaagatgtgtatattttaaaaaaa

SEQ ID NO: 51102 - DNA, 517 bp, Homo sapiens
  misc_feature (1)...(517): n = a,t,c or g
ttttttttttttttactatgaaatatttttaatcctagaaaggatgtgattactagtaactaaagaggggaaaagtcaacaataatgaaattcaggttttttaattcagtgaacacatatcaaaatgctcaatgttgttaaatgacataatataatttatccacagaagacatgttctcatccattggaaaattgatttaaatacgttttgacgagtgctaagagatgttataggcaacagttgacttaatgaagtagttaaggcttcaaaattgtgccttttagaaaaataacaaataacttcttctaccacttaggggggaaaaggaacaagtgtcaatcaaaagtcacagaaacatgattaatttattcctttcaacatttcactgagctttgcaaaggccaggcttaaaactaaagggaattttattagccnggattgggcntaaatattttcccccataatattcctttcccgggcatacttccttccagtggctggaaatnaaatgaccaa

SEQ ID NO: 51103 - DNA, 130 bp, Homo sapiens
ccccgcgtccgctcccgaagttaagtggtataaagaatatatgtgtattgagccagataatattaaataccgtgattagcgaggagaagggaagtcacactcttaaaaattcggaaatgtctggcttctg

SEQ ID NO: 51104 - DNA, 466 bp, Homo sapiens
ggggcagaaggcagagcatgtgtcccagggggacccacacgaagtcaccagcccataggtccagggaggcaggcagttaactgagaattggagaggacaggctaggtcccaggcacagcgagggccctgggcttggggtgttctggttttgagaacggcagacccaggtcggagtgaggaagcttccacctccatcctgactaggcctgcatcctaactgggcctccctccctccccttggtcatgggatttgctgccctctttgccccagagctgaagagctataggcactggtgtggatggcccaggaggtgctggagctaggtctccaggtgggcctggttcccaggcagcaggtgggaaccctgggcctggatgtgaggggcggtcaggaaggggtacaggtgggttccctcatctggagttccccctcaataaagcaaggtctggacctgcaaaaaaaaaa

SEQ ID NO: 51105 - DNA, 2274 bp, Homo sapiens
ccatttcacctcgtcaccccagccctgcgtccggatgaggggacttctgcacaaatgacagaatctcggctggtggacagatactacagctttctcctcctccttgtgttcgtgttcagtctctgtggagactttcttttccattcaaatgacagtgcgcacttatctggtttacacaatgataccattttgaaagttggaagcctcaaactgagacgacagtgcagaacaaaacaaaagtgagttagggtcgttaaaattgaagtgttcttcttagggcaaacatgttgactccgagtattgtgtatgaatgtgctacgagaaacttccaaagagcaccattcacaatttggcattttcaaagaatgttccagccctcaaaggggcaactctttaaagtccttgttggcttttatccaaaccttgtagaaattgggaaagctgatagaggtaaggaagacgagtgaaaaggacaagaaggccaaacaccagccaaaaagaaactaggaaaaaaagattttctttgctaatatagatgtaaaaataacatcagacatctttgaaaattagcctctaaactcttaatacatacgttctgtgtgtctctacctggcgtctttaagaatatcctctctgggctctgaaattttaggagtgattcttatccactccaagttgtaagtatttgtagaaatttgtgcaaacaaacaaaaactatcaaatgaaaagaaaatgtactcaacctaacttatagttagcagctggaattctcaactcttccctgccagcactataccacagtgtggaagaaattagtcaaatgcttgttttcctgcttctcttttcaactgttactgtgctttgtttgaaagtagttttctctctcaaagccgttgcttatatcgttaagaatgaaggtttgtgtttaaaatttattgcattgcaaagggtagtttcactgaagtcatgcaccattaaataagatgaaatatttgtatttattgtcctacttcctaagccgtaacttcttttcctctgtgaatttgcattgagtcactcatgctacactacatcgctttagtatttgagatggcatttatgtttcctctcgtttatcatgaaatggggtcagattccatcagattccacctctgtcaggtggactcttgtctgccttccatgatgagattttttttctccttcccctttctttaagagaggctgacagatctaggtgtcaatcaattggaaaccagtctctgattttttttcattagttattttctatcattagtttcactgtgtaaattagatatcaactgcacttctttaaaaaaaaatacatctccctattacctccttgaaagatttacttctgtaggcctttttcaataggctcatgactgcagacaaggaaaaaaaaagtaaaaacaaaaacagtatgtgcctgaaaatgacaaaaaaaaaatttgtaacatttaaaaaagaaacctgaatagcctttaattctttaataatacacttaaattttatgtaaatcggttttcgccacgtgtgtttgttcacattctaaatgacttaatgggattctcacggtctgtgtctttgtgtcacgtgtataaaatgggcttgtgatgtaagcgtttcatctggtcagtggttcctttgatattgtactgctgctgggagtgggctgtggaacctgccttcgggtaactgggttcctcttgggtagattggagagatgggggtgggcgtgggcaaattctcacacatgttttcttaacctatttgcagaaactttcaaaaggcatttgattaaacctcttggcagtacagtattcttgtatttgttaacgtctgtgtttaggtactggtacctttttgttttaaaatgttctaagtgttggctttaaagtgaatttatctttagtatgatagttatatgaaaattataggatttgtgtgcagagaatttttttataaagtgctttgtaaaaaaaaaaaaaatgtattctagcttttgcggtacatatgtgtgataactttaatacccatgacagttaagtgcaattatttcatcactctaaaaatgctatttttgtgtcagttcctgcaggtgttttcatgtctttgcaaagtgacacattttgatgccttcttgataaagtggtagacattttgtagctttctagaaactttgtattcatacggtatcaatgaaaaataaagaaaatgaaagtgtgggtcaaaaaaaaaaaaaaaaaaaaaaaa

SEQ ID NO: 51106 - DNA, 650 bp, Homo sapiens
ttttttttttttaagcaaataaaagagtaatttaattatgtaatagtagtccaatatgtttttatatattgtagagaataaacacatttattgtagagaacaaatacattttatatattgtagagaataaatagaataaacacaacatagaaaaggaaagagaataacctatagttataggcacatggcagtaaaactaatcagtgaatcaatcaaccctactgtgggttaggcacttgtattaaattccaagggcacaatggcaaacaagacatggtcccgaatctcagttatcagttacttagagggtcttctggtatctaatctagagctgagtagacttttaaatggatcatgagtaagagtacaaaaatagatggtgcataattgtttatacaaagtcttttccctgtcaatgacataagtaaccctggtattttaatataatgctttatgcatttattgcttcttatgagattaaggagttatgatttaaaaattgatttgactaattaaatataaaatttataaatgtaaaatctgatttagttaaggtggtcatcttttacagatatgtacctatatagtcaaatattatttcaaggtgaatctttttatattcaatagattatatgtataataaatggtta

SEQ ID NO: 51107 - DNA, 973 bp, Homo sapiens
cggccgcgcaaggacccgctgcggcacctgcgcacgcgagtagaagcgcggaccgtcggggtgctccggcggcccaaacaccgtgtaacctgcaggtggtggcagcgggtaccgggactcggggcgccgcgctctacgtcttctccgagttcaaccggtatctcttcaactgtggagaaggcgttcagagactcatgcaggagcacaagttaaaggttgctcgcctggacaacatattcctgacacgaatgcactggtctaatgttgggggcttaagtggaatgattcttactttaaaggaaaccgggcttccaaagtgtgtactttctggacctccacaactggaaaaatacctcgaagcaatcaaaatattttctggtccattgaaaggaatagaactggctgtgcggccccactctgccccagaatacgaggatgaaaccatgacagtttaccagatccccatacacagtgaacagaggaggggaaagcaccaaccatggcagagtccagaaaggcctctcagcaggctcagtccagagcgatcttcagactccgagtcgaatgaaaatgagccacaccttccacatggtgttagccagagaagaggggtcagggactcttccctggtcgtagctttcatctgtaagcttcacttaaagagaggaaacttcttggtgctcaaagcaaaggagatgggccgtcccagttgggacagctgccatcgctcccatcattgctgctgtcaaggacgggaaaagcatcactcatgaaggaagagagattttggctgaagagctgtgtactcctccagatcctggtgctgcttttgtggtggtagaatgtccagatgaaagcttcattcaacccatctgtgagaatgccacctttcagaggtaccaaggaaagcagatgcccccgtggccttggtggttcacatggccccagcatctgtgcttgtggacagcaggta

SEQ ID NO: 51108 - DNA, 131 bp, Homo sapiens
atttattttataaattttatatgtacatttatgcatatacatatttgaattggatggtagacatataaatgaataataaagacatgacccaaaagttttggtgctagtggtctctcaatgatgcaggtata

SEQ ID NO: 51109 - DNA, 607 bp, Homo sapiens
actccatctcaaaaaaaaaggtttttttttaattataaaaattaaaagggggaaattgtaaaatacaataaaattcctcttcaaaggtttagtcttaactttcttgttctttgttctcaaactcaactttcttgttctccatgcctccttgcccctagttactgtaacaaccttccttcccaacagctctaatcaataattcacatctgttcccttgattactcactctgcagccttcccacccttcaaaaccacacgtcccaccactgtgacttatacatcccccttcccttccttatttgggaaaatatcccacaaatagcccaatcaggtcaacttagaatgtgcagtctgacccgcctaccccccgcccatgggggagtaacacagaggaagagactttacgttaaaaataaaaaccccttccctcctttgttcagggtgctcttgcgatcgtgattaatgcaaacaaaaaccttttgcagaagtaaattgccttgctgggaaaacttttgcccgagtgctggtttcactttgcgaaccgagcatttatctccaacatagacattgacttaggcaaggatttcatgaccaaaaacccaaaagc

SEQ ID NO: 51110 - DNA, 491 bp, Homo sapiens
gaaaaaagccagcatcaggtcagggcaaaaataacagcccatgttgaactcggaatggggacctcttgctaagtcattccactcctcaagagaccattccacagaggggggatggatcattcagctctcctggtcccaagattgtgctgaagggaagaaggaatagaatctggagatctggactgctgccccttagatatgcagaggtccacatctgcctggggctacagcttgtgggactccatcaaaccaggccgaaatggcaaagacagtctaggaggaggaggaggtagggtgtgaaacagccaggctctctccaaatcccaagtgttgacacagccatcttgtcccatccctgggaagcctctttggaaaccacatagagctgtgctgggctcacgggatgtcctgtttgcttctgcctcagttaccttactttgcccatgggtctaccacaggcgctacctcattgtgtctgctgagaagtttac

SEQ ID NO: 51111 - DNA, 393 bp, Homo sapiens
gcccctccctcatcaccagcagtgaaaatctagagctggagctcagcctctgggaaggcccagcatggaggcagccacagctccggaggtggccgcaggatccaagctgaaggtgaaagaagccagcccagcggatgctgaaccaccccaggcttcacctggacagggggctggcagccccactccccagctcctgccccctatagaagagcaccccaagatctggctacctcgggccctgaggcagacctacatccggaaggttggggacacagtgaacctactaatcccattccagggcaagcccaaacctcaagccatctggacacatgatggctgtgccttggacaccaggcgtgtgagtgtgcggaatggggagcaagactccatcct

SEQ ID NO: 51112 - DNA, 775 bp, Homo sapiens
  misc_feature (1)...(775): n = a,t,c or g
ataatgggaacctttatggggtttttttttttttaaaggtgggttttggggatgtttaccctattgttttttatttggatgccctaaggcatataaagcgcatagtgaattacctactggaatgtaaatggttctaaaattaaaactgttaaaatagaaagagggaaaaggaaggcccaagaactcttaaagagaggctgagaacaagaacaaaaaaacccagaagtgtaggtaatacgtaacagcgcagacagaaccgttgtaggccatgtataataaataatgcatgccccaaatttcagttaatcatataatttcaacttgagttctaatactggaaccagccaaccacttgggcttcaacactgtactagatgtcagtagaatcgcttgatggaattacagccttgttacagttgagatcaagagagggtgcttttttttttccttcttttattaaagctatcattccaggctttgatcnaaagancccaagaatattgntctaccaggctggaatgaatgtggtttggaagttcagagtacatttaaaagctgcaacaaaatataggtagccaacaatctcagaattttggatcagcccagatggagatagcaatttgaaatgtcttcgatcccttacttaaatgacgaaatgtctatcagcccagatagagcaatttgaaatgttttcgatcccttacttaaatgatgaaatgtatatcatactatctgtaaattggatattccattacagtgataacgtacagaattc

SEQ ID NO: 51113 - DNA, 286 bp, Homo sapiens
  misc_feature (1)...(286): n = a,t,c or g
atgcccaggctaatattgattttttttattgcttttactccatttaattttcaagccttgcttaaattagtattctaaatgtttaaaatacttagatccatttgaatcaaatgaatctaaagaagttcacggcacagggtcaaattgataaagggtgatggaacttgatacaggtttttcttttcacaaaaaatcttgcacggactacaaaaaaaggtagggcaaatccccaaaacagaggaaaatgtggtggtaaaggccncctggatggtggacccccancaca

SEQ ID NO: 51114 - DNA, 399 bp, Homo sapiens
ttttttttttgatgtttaacgtgtgttttattgttgttggcaccagaaaagctcatgttctatgttatgtcactgtacatactgtaaacaagactgcattaatattgttttcttatgatttgtttcaatgactctagattttaaaaaatacattcacaaactaccttatgtttaaacacaatgattcccttttatttcttaactgtacccaaaatcccacaataaaaaaatcatttaaagctgtgtgtttcaaacttatcacttagaaataaaaacaaaacaaaacataaaaacaaagatcagtttgcaacataatttaaagaagcttctggtttaaaataccacagcagcaatataaagagctggtggcaatcacattcgggagtgaaatcgaaatca

SEQ ID NO: 51115 - DNA, 742 bp, Homo sapiens
  misc_feature (1)...(742): n = a,t,c or g
gttcacggggcaaaggaaatgaacagcagcctcctaatagccagccttctttgtgatgtggaaataattatcagcatgtaaaagactatatatatattcaacaattctgatcccctgaaaaattcaaatctacaactgatttgcttcctgggctcctgaaaacaactttgtcaaaattcgttcagaaatataatcagccaatcgttgccccttgggaccgcaggataaagcaagtcagccatgaccaatgaggagtcggccgtgcacaattacatgcagacctgcaggacatcgagtccctgctatggtccctccccagtcaggcccccaattgcctgggctgcagccagaagcattcaggcacaagtgccattccaacaaaatacttatttnaatggtattggtggttagagggttgcgattgattaaggcacattaatggatccgtgtcctcccctgtatcccaagattctgccatttgtctctgcagttcctcccactgaagaatcggagtatatttctccagtccctaatgttgggtttagtcatgtgtcttagcttttgcccactgggaattatttaatctgtatgaccaaaaacttggaaagtgtgaattcatttctgctcactcactcctgctatcaccatgagaacaagcccaggccagcctgctgcttccagcagaagataagagacaccaagagcaaagtcgagcttcccagacatgctcatgctagattag

SEQ ID NO: 51116 - DNA, 214 bp, Homo sapiens
ccattttattagagatagaaaggatggggagaaatgcccaaaatttaatttagctgttctcggactcattttctctcttttcctctcttaactctttttctctttctccgttgctgggttgtttctagattttctcattagaaaaacttagttgcatcacataggggggactccctttcagagaatatctatttaatgaatgacctgtttaaga

SEQ ID NO: 51117 - DNA, 480 bp, Homo sapiens
ttttctttcacttctaattacaaataagttttaccttttattgtattccattatacaattttacatagtaccattattttaagcaataattaagcaaattgaactactgtttttgagctctacttttcagcatatagatttacctaaaaaagtacaaaccaagcacagtggtgcaattttccaggcactttcaagttgcttatttacaaatatgtaagcaccctgttggaacacatgaaaattttggtgtcgagaagaaacactccatgtatatcaaatctttaaattttaacatttgcacagctccaaatattcctgagaaaggtcagtctcattgtcacgtacatctgcatttcctcacacttcagcgtatcttggggaaccataacctcggtcacttgatgtaccactaattgcacaaaatacatgtaatgtgttgctcatccggggagaatggcttgtgtcttcttgtatatcggc

SEQ ID NO: 51118 - DNA, 339 bp, Homo sapiens
ggatggcttaagttttaacggctcagtgggccctctgccttttcacatggggcagttggtctccaccagtgagggcagagggtcagtgtgacagcttttagcatccacacctgtggcacccacgctcttgttcagcatccaggaaaaatcagatcacatgaacaaatcgaagggtggtgaatacagaggattttgttgccaatgaaagtggctctcagtgggaagaggagctggaaaggggatggagtggaaaaataatcttctcctggagtctgtctggccgtccccagctgactcctctccaaaggaatgctgtcaagctgccctctgaagttaaac

SEQ ID NO: 51119 - DNA, 246 bp, Homo sapiens
taattacaaataagcttgagcccctttttgtgtttattggctatttcacttttgataataggtgatattagggaataatttaagtggaatgttattttagaaatccatactgaaatacttaaggatgtaatacttaatttactgtaaaatatttcagcataaaaaaagtgcagacatagataacatttcactgacatcagaaaatattacctgggaatacatcaaaaagtattcaagaactccatc

SEQ ID NO: 51120 - DNA, 373 bp, Homo sapiens
caccgtgctggcttgcctttggttctctgaactactccagttctttccactaaatccacccccctcttttttcccctttggttaatcagaatccatatcttttgctccagatcaaagaaccctacccgatgatcccttctccattcacaaaatcaataacatactcaaaatcaataaacagctgaccgagccaccatgcctggccaagaaacatgggttctaatcccaatgcccccgcttcctagctatgggaccttgattgagtcctgtaccgtgcctcagtttccccacttataaaaagaggttactaaaaaggatgcttcactcaagggtgtgaagacccagtgaatgaagtgttaataagaaaaaaaaa

SEQ ID NO: 51121 - DNA, 187 bp, Homo sapiens
cacagtaggatcaagagtttactaaaacactgttcttcctcaaacaaactgcataacctaggagaatgttaaccgcaaagtagagatatggatggatgcagctttaaaggtatctccttgagaaatgaaaacatatacccacagaaaaacttatacacacgttcttagcaatactgcaatattattc

SEQ ID NO: 51122 - DNA, 658 bp, Homo sapiens
  misc_feature (1)...(658): n = a,t,c or g
gcacgagacaaaactctgtaaaatcattatagcttttgtataataagagtagtttacaatctcgggcttatagaataccaaactgaaatcttagttcaatctgccatagacttaagcttttcatttgttactaatatccatgacattcagtggccttgtgcaaatacgatatgttgcttaggcatatcttttgtcctatgcagaacctttcattttgatttttatgaaagttgcaattcatgtaatttatataaactttttaaatgtagaaactttttacttccacactcagttttggagaccctagaataaaaggcttcaatactctgcattccatgccctctgccacctgcttttttttcccctttgttctttgactcaaatggtattgagctgtttgttgtatatggaagcataggtgtctatatccttactcttttatataacacaataatggcgttttccttctaatttctcagttgttaacttctttctctttttttttaggatagggccttgctctgtcacctgagctctnnnnnnnnnnnnnnnnnnnnnnnnnnnnnnnnnntactcctaggctcaagttaactattcttgatcctttattattactaatattctacaattgtttaaataaaaggaactttataatgaa

SEQ ID NO: 51123 - DNA, 382 bp, Homo sapiens
gggctattgctacaatatttttaaaggtttcttttttaactttgaaattttttgtttttccttttctttttataaatgtaacagagggtttcaaagcatattatttttcagagagatttagttttactttaatggagtgactgtgaagtggttgggattttttgcttgtagaaagtagacttgctctttgtcagatttccaaacaaccttgccagccttggctgtcaaaaggaggcaggagcagttctcaacacaccaagccttattcccactcccttgggttgctgctgagccaaatagcatctttacagaggaagtgggatcagaggcaggaagtgtggaaagttgctaagaagcagggcttgcctcttgtcctcccggg

SEQ ID NO: 51124 - DNA, 511 bp, Homo sapiens
tgaatctaacacactgacgtttggaaaacttgatcaatgagcttttaaccacgatttctcccgcaatttgttccttctttttacctttttaaaaatctgttagaagaaaaaaagcagcagacgaaagagaaaaaccctcctctggtagttctgtgtgtgcccctcacccctgtgtgctagtgtctgtgaagtttccctgaaaggtgggaggcgggtgggtggtcttttggagggttcctcatgaagtgtgcttgaggaaagaaattctgattctaggcagaggaaggggaaccaatttaaatattggtgcatctcagatgcacttgacttcaagccttcctcaaccaaactggtccattagattccgaaaaacaggtagacgaggaagtagacagtggaagtgagtagtctccctccatctgcctaatccccaataactgtggtctggcccctgtgttcagccccagagtttgtaaaacaggtccccaggtaggtgtataagatgagttgc

SEQ ID NO: 51125 - DNA, 372 bp, Homo sapiens
gcctggggggcggctggacatgaaccacggcttcgtgcaccatatccgacggaaccagatcgctcgggacgactatgacaagaaggtgaagcaggcggccaaggagaaggtgaggaggctggcacacgcccgcgccgacgcggccccgcaagccagacctgcaggtgtacctgccgcgacaccgaggttcagctcatctcgtctctttccggaacctccacctcagcgctcccaaatctccgctgaatgattctcaccaagaactgggacgactcataagcccccaatgtctctgcccacccacgcaacccagactatgaagagtacggtgaaagcagcagtagtggaggctctgagctggagccttctggc

SEQ ID NO: 51126 - DNA, 1279 bp, Homo sapiens
tctgtggaagggagctggtgctcgtgtatttcgatcctcaccccagtttggtgtaactttgctgacttacgaattgctacagcgatggttctacattgattttggaggagtaaaacccatgggatcagagccagttcctaaatccaggatcaacctgcctgccccgaatcctgatcacgttgggggctacaaactggcagttgctacatttgcagggattgaaaacaaatttggactttacctacctctcttcaagccatcagtatctacctcaaaggctattggtggaggcccataggaagatcagccctgggatagtgctgtctttttgtgggtactgcagtaaagaacatccctcctgggaatgaagcaatgcttcatcccttttacgtccatctcttgtttaaattcaagtccaggtttttttatcatgtgaaatcattcattttctgggtgttttcttaaccagatcattgtgaaattattcataattattatttggccctctgcccagaaacctttgtttgcatctgaaaattgatgggatttggtcaacactaacatgatttggggaaaggagcaagtcagaatagaaattagtactcccctccttgaactaggattgtagtcccaaagaggctactgtaaggcaatcatggtgctcagagcagtgtttcgtgtgtgttttaaactggtaggaaactaggtgcatatttataaaaataaaaaacactgggagaaatgaaaaaatatatatcaaatatattcagcctggcttcaaattgtaagcatgcacaaattctgtctctggattatattatgaagcttttatgtgaaacatgtttctttgtaatgaaaaccacattggagatgtttagtaatcatattgttactggtaccaagactactagggaaatgcctttgtactttagggaagtacttttggcattttactgtacagacagaaaaaactgagatgtagcccctctcctggaagtgctaattttgaaaaactgctcatatgatgtacatgtactgattactgcctattttaataaacactcttgaaaaatgcatgttgccctgttgctgcctgccctattctcctcatctccccatcattggtacccacttgcttttaaaatccactttatcttgaataatgtaagacaaatatgttctgacataagtatttaattcatgttgccttgcataatggtcagaggcgcatgaatttgtgaaggtggaaataaactatttgtaaagtgaaaaaaaaaaa

SEQ ID NO: 51127 - DNA, 340 bp, Homo sapiens
ggttttgtgttcctttgtcttcttttttgtgttcttttttgtctccttgacaaatcctcatctaacctttgcctaaatatttctagagatagaggcttgctactacatactgagaaagccatgtccttttttcactagctctaattgtcacaaagttttctcgtattgatctgaaaactctagcagatttatcacttgagcaagaacatgaacgctcaactgcagttaacagtagatctagacctctgcatatttttacattggggttgtaggtaaaaccttttctctctaaaggatcacagtgtttggcaaacagttttactggctggccctgtgatgg

SEQ ID NO: 51128 - DNA, 1837 bp, Homo sapiens
gcttaagatgagaacaaaagttgagaccacccaacacagctgggaccttactgcccagtgctcccagtggtctgacgaaaaccccacaccagacagtacaaaggcccactcccgagctgccgcttacggcccagcgggaacagactgtattcttatctttcggcatttctctgcaaataaaaaggtgccactgcggtccggcctttgtgcacttgcccttgtgctgagcaaggcgggtggcctgttcttaccgctgggttctgctgcccccacccccatttcggtgactaaacctgcagctctgatcctgttcccaaaggggcaggaggccgggctcaccccaggcagcccctggcctcctgacggccccctcgggaggggttccgtgctttgatcgcctttccagcgccgatactgcagtagctgggcccggccgagagctcgcggtcacgaacaccggcagcctcttgcctacagtgtccgcgctgcagaagagcctgccctggcgctgagctggtcgtggctgcttcagcagtggcctgcgcctccttgtagccagccctggcccagatccaggtgcctgccccggaagcgcgcggctgcccggggtgaagccggagggcggcgagcggctgtttcggccggtaggtggaggcgttgaccagcctctgggaacggggcgggacctagttgcgtgccgccccctccccaggaggcgagctcagcccgcgacctttatcccgcgcgttgcggtcaagatggcgctggtggcttctgtgcgagtcccggcgcgcgttctgctccgggcgggtgcgaaacccggggtgggcagggatcgggccggggccggggccaggaccgggaactaacgggctcccccacgctgccttcgcaggggcccggctcccgggcgcggccctcgggcggacggagcgggcggccggcggcggagacggcgcgcggcgcttcgggagccagcgggtgctggtggagccggacgcgggcgcaggggtcgctgtgatgaaattcaagaaccccccagtgaacagcctgagcctggagtttctgacggagctggtcatcagcctggagaagctggagaatgacaagagcttccgcggtgtcattctgacctcggaccgcccgggtgtcttctcggccggcctggacctgacggagatgtgtgggaggagccccgcccactacgctgggtactggaaggccgttcaggagctgtggctgcggttgtaccagtccaacctggtgctggtctccgccatcaacggagcctgccccgctggaggctgcctggtggccctgacctgtgactaccgcatcctggcggacaaccccaggtactgcataggactcaatgagacccagctgggcatcatcgcccctttctggttgaaagacaccctggagaacaccatcgggcaccgggcggcggagcgtgccctgcagctggggctgctcttccgccggccggaggccctgcaggtgggcatagtggaccaggtggtcccggaggagcaggtgcagagcactgcgctgtcagcgatagcccagtggatggccattccagaccatgctcgacagctgaccaaggccatgatgcgaaaggccacggccagccgcctggtcacgcagcgcgatgcggacgtgcagaacttcgtcagcttcatctccaaagactccatccagaagtccctgcagatgtacttagagaggctcaaagaagaaaaaggctaacgattgggctgccacaggcttacggccacacgtgcccctgtgggtcccagggaggtcttaaacaaggtatttttcaacttaaaaa

SEQ ID NO: 51129 - DNA, 121 bp, Homo sapiens
gtgtgtctcttccaccatgcagcagtcactgtcttaggaaccatggagaaggccacagacacacctcagcaccaatcaccagagtgtcaccagagtaacaaaaactgccacctcgtgccgc

SEQ ID NO: 51130 - DNA, 348 bp, Homo sapiens
ttttttttttttttggtatggttctgtaataaagaggaataccttagaatagaacccaagcttaggccccataagccctgctgtttaagtcagcccaacaaattggtcagttacaaactttgctgaaggtctatgaagaaaaataaataaagtaaaataaaataaaaataaaataaactggatgacgtcctcatcttgttttatgtccttggacatttgacatgttaaccatgtggcagtactttcttttggtctccaccattttacagtggtggcccaggttcaatcctggcttagggaataagtactttctggttgagatctgtgtgacctttaccatttgctgat

SEQ ID NO: 51131 - DNA, 555 bp, Homo sapiens
gtagagatcttttccccaagtattttataaaatattccgggtttgatgaaggtggtagataaatacaccagctgtcagatgcctataattttcacaaaatgtgaagaattcattgtatcttaggatgaccataaaaaaattcatggtgtggaatctctaagcattaatagagacaacagcgctactgcagtaatacacagctactacaaatcagtggcagacaagaataagtggtgtatcaggcaatgtaaagtttttgccttttctcctaatgctgtggttgagttttcctggaaatgaaggaaaaaaacatagcaaaagtagggtgtgttaatgaatctgatgagcaacaagtctaaaaatagcaaaagtgcaaaatggaagttaaaaaaacgcaactggcacctgaagcatatttccccttctttatctccagtgctatgcctctgctaaaaatatgaatcacaaagcaaaggaaaaagagacaaaaagtgttgtaatacagtaaaaatcactataataaagtttataagaattgagttttttgggattgac

SEQ ID NO: 51132 - DNA, 1041 bp, Homo sapiens
acagttcactgcctttcaaagtgtttattcagaattatactagaagtaatttcatgaaaataatattgtgcaaccttttcattctatttcaatgaaaagcaggcatgaacattactcaagcttgaaattttactgaaaagtaaacatttcaattaagcttaaggaaaaaagaaatttcctgagatttccagtgtatacagaagtgtctttccattaataataattaaaagttaaaaaatatgctgataacttgccacaattgacagaatgcagattaataggataaatggcaaacaaatctataaaaatgcatgcagagaatcagagtgatcaccccaccaagcaatggggtatagatggtgatatacccttgtccttaggggagagggagatggggaagtgtgggtaatttcagggggctagtaaatgattttcaggggaattcagtgggcttgaagaacatacagtggcctgggacaaagtctgttgggctcacagagcagacaacggtttgcaaaatctgtccaggtatgtgagcaggcttcagtctttcttcctgtgacagcagttcagtcagagaaaactccgggaagggaccagtggtcattgttttcttctttggtgggtccagacttaaggcagatgaggaacttcagagaacttcctcctgtgctctgggaaaacagaggattaagaaacagaggttgaggaggaggtcagagagacctcgagtcttctttagttccacctgtcaaatcactatatgttagggtatccgtttctgagccccaacaatagtttggaaatatattctcccaatctgtaagttgtctctttactccattaattatttcctttgctgtgcagaaacattttttattttatgcaatttcatttgtttattttcactgtggttgcatctacttttgaggtcaaatccaaaaattattgcccagaccaacgttgtgaagctttctccctatattttcttttagtagttttacagtttaagtctttaatcgattttcagttggtttttat

SEQ ID NO: 51133 - DNA, 326 bp, Homo sapiens
cagacactagctgggtgttctgcaattcagttcaattctgacactgaagacctggagttaatacagaccccacaggttaagggtttagtcccacaggactgctaccacttcagataacaattacaagtctggactacctgtatgtctgacctactggcaataaagttgatgggggtgggggtttccacaacctgttcctgaagtttgataatttgctagaatggctcacagaactcaggaacactctacttatggttatgggtttattataaaggatacaatttgagagctgctaaatggaagcgatgcatagagccaggtataag

SEQ ID NO: 51134 - DNA, 1012 bp, Homo sapiens
aattttaaagtgtggttttattaatgcacttcagggtaagtgccagtcttattttagcttcttctggaagaaatactaccaattataaataatcacagcaacattttcattagacaaaaactgtgtgtgtgggtgtggtaggggggtatcatttatagcatactgcaaatataaactcaattcttgagctatattaacaacactgagcaacaatatttctttctaaaattttcttttctttaaggcagatctgtttattactaacatggtgcagtgtagttttagtaaatttactattttagtttctcagtgacaataacacagatggtcagaaaacaggcaacaaaatctcttttctagttcctctacctggccaccatttaaaaaacacaagttcctcatatatatagatatatttatatattactgtatcaaaacacattttaacacacttcacagctcatttaaagcttcagtttatagtcattcatgtgaaaggtttctataaggaatgttcacttagaattcctcactgggattccagtgttctatgtcagaaatgcagaagtcctttttcagtgcagtgctagacatattacctttgttcattcatgattttctttcaaggatttcctaacttcacttttgtatcttcatttttgtttgcttgactaatttcctttagtatacgttcaggtaaggtaggttgatatctgtataaataaccatatggacgaagatgataaacgaggtattctaactcatacatggttgtagaatcaacatagtgaaaagaaactgcaagatcagagcagcaaccaggaccctctacaggaggataatagttgtaattccagtaccaaaacgttctaggtagataacctttaattaaatggtgttctggcacaaagggatgaaaagtttcttttccaatggtatctctggaatctcctgcttctacattcataatttccatgcatctccccagtgctaagtcttcaatggaggaact

SEQ ID NO: 51135 - DNA, 8985 bp, Homo sapiens
  misc_feature (1)...(8985): n = a,t,c or g
ttttttatgcttttagaattatttattcaaaaacactttataataaattcaggtaacagtaaagtaatacattcaatagtactaaaatctatagaaaatagataatttcattaaggtgcaattaaaatacttgaaattgggacacatctctatatttcaaaccaatatactggctttctttttaaaagactattctagtctttacgatgtccaaagtttttcctctttgcttttatttgctttagaccatatttaaatttttagcattcctaagtgcatacattttaggcatatactataatgaccaagagtttgtgaacctactgattaggtaaacactttggggaggtatgacctgcacaaagtagggtgggaaagctattatctcccttaatctggacacaactgttcaagcagtctataatttattagcttctctgatagcttcactatttggttttcattgaccttttgagcaactgactggcaaaccccagattcttttcgcctgaaatcttttcaagttagatactgtccatattacacttgtacttataatttactatcttcttgccttggacaacttatttctccaaattctgatttctccagcagtgtattgggatagtatcactaatcttgcaaagtaaagatcagaaatgctgtacataatatgggtcagtgacttagcatacaacaactattctatgattaatattttcaaaatctaactactcctcatttgtccttggcagttttctatcttagtcatttgcagaaagagttccagcttgccaaaannnnnnnnnnnnnnnnnnnnnnnnnnnnnnnnnnnnnnnnnnnnnnnnnnnnnnnnnnnnnnnnnnnnnnnnnnnnnnnnnnnnnnnnnnnnnnntcttttataatcttaattctgtcatctgtgaattagttatttctcctaggcttgtgatctgtatgtaaatttgataaacttttcaaagccattgattagaatacttgaacagaacaggagcctcatagcataccatgcaaggctaaagagtagattaatgatgttattcaaagctctctggatgcaacaactagcaagaattagctacaaattcatttatctatactattatctagttgataatttctaatttcacccatgaagatttcagggctttcttaaagacattttaagtttactgcatttccttgatttactatagtaataaaactaccaatatataccaaatattcatttaggcagcttgtaagaaaaagatacaccaaggtaagtttgtaatttgaaatgcaaagtaatattctgaacagttctccagaagtcaaaccaagaaatttatagtccaaaaagttctggagattggttttaggggaggggaaggtgaggagatcaaatatgaatgagtgccctgccattggcaataaaaagaaatgccaactcttcataagaaaaaaatttatataaccttcaaggtccaaatacgaggagaaagctcaatcacccatttgttaatctccgcagctgggatgaacattttcctaaggatggagaagagattatactcactaatacacgagtcagtagttttactttcaggtggctttttatctgatgtttatcttatatgatgacagctgggggacagagaaatgttccacttctacctatgtatcaaactagatacctaagcccttcccttccaacagaacacagagaaatgctggataaaatgtagaaaacattcttttaaatacatagcagaacttacaagaaaggggaaatccttacggtcaaaaatgaggggannnnnnnnnnnnnnnnnnnnnnnnnnnnnnnnnnnnnnnnnnnnnnnnnnnnnnnnnnnnnnnnnnnnnnnnnnnnnnnnnnnnnnnnnnnnnnnnnnnnnnnnnnnnnnnnnnnnnnnnnnnnnnnnnnnnnnnnnnnnnnnnnnnnnnnnnnnnnnnnnnnnnnnnnnnnnnnnnnnnnnnnnnnnnnnnnnnnnnnnnnnnnnnnnnnnnnnnnnnnnnnnnnnnnnnnnnnnnnnnnnnnnnnnnnnnnnnnnnnnnnnnnnnnnnnnnnnnnnnnnnnnnnnnnnnnnnngaggggaatgaaaaaccagagaggtgaatatgtgagctgatgctgtagctgtcctggaacaatttgccagtctcattaacccacggcttttagcttagacatctatatggggagcaaagaacccagggctttccaaaggcaggcagtgggaattaaatgtacctccttccacccctgccataaaggtgggacacatggaagcttatactctcagtgaaaaaggcatcaatcaaatattctgcccactagcacaaggagatgaggaggaagtgtgtttgccttggcctgggaaatctcctatcagtatttatgctacacttcaggtatggaaaccctaaagccaagaaattaaaataagaatgggcttgtgtgcagcaacagccctgggaatatgacataaacagacactcaagattcccatagataaagccttgctgaaaataaactcacttttcaaaaagacaaaactggatgaacagcctatcaaatacaaaaatcaacagatataaacagcaggaactaaatttaatagaactattacagtgtctatcaggtacagacatttaaaataattagtgacataaaaaacattaaaaaaacattaaaaatgacatcaagaaacagagatctgaaaaatgatgcataattagaaatgaaaaacaatttctgaaagaagaagcccaatggatagggtaaaagagattatatacatctgacaagagaattcatgaactagaaggcaatctatgaagttatcacagaaagataacatacatggacagtacagaagggcttaaaagataaagagaatagaatgagaagttttaatacacacttaaaaaaatagtaactacactaactgtgtctttgaaatttgttctccataacaacttcattatttagtaacactgagtgatcttactaggaaaaatccaaataagtttctgnnnnnnnnnnnnnnnnnnnnnnnnnnnnnnnnnnnnnnnnnnnnnnnnnnnnnnnnnnnnnnnnnnnnnnnnnnnnnnnnnnnnnnnnnnnnnnnnnnnnnnnnnnnnnnnnnnnnnnnnnnnnnnnnnnnnnnnnnnnnnnnnnnnnnnnnnnnnnnnnnnnnnnnnnnnnnnnnnnnnnnnnnnnnnnnnnnnnnnnnnnnnnnnnnnnnnnnnnnnnnnnnnnnnnnnnnnnnnnnnnnnnnnnnnnnnnnnnnnnnnnnnnnnnnnnnnnnnnnnnnnnnnnnnnnnnnnnnnnnnnnnnnnnnnnnnnnnnnnnntgaccattatttctaaagagtgaaagcagagatgttccttaagaccatcaaaacatttttgagtggtgattaaatcaagtattaaaaccaacattcaaaaaaacccacaatagttcacttaaatattaatccctacttaaagtatgttggcaggttaaaaataaaggctaaaatataatttctaaaggctgaatgaaagggtaattcatatactgaagatcacacccaagctttccatcctgggaaaagtcggctgagatttttggggtctatggcctgctgtatgagcaaattcacctgtccaccaacactgagcacagtgccttcttccactcctttcagtttctcttgtagtctcattaagacacgttcagctactttgtcgaaactctggtcaatatcactgagatttcgtttgcattcttggtcatctgcattcagagtagggtgaagctcagtttcatcttccggcctctgctgtaaatacaaagctttcaaaggattcatggtccagtcaaagagtggatcatatagaaggacctctacaatggttaacagagtttcctgagagtttctcatcacttccatggttttctcacagcatcttctgaagacaccttcaacacccgtaatgcccatgccatccacaatatctctggtgagtctaaaaggaactgtctcaggagtaggaaggattttgccctgttcaaaagcaacacctagatctatatgtacaagttctgctgactgctcatttatcaagatattctgtacatgtctatcaccaagtccaagtatgtaaccaacaatagaagaagtagctacactgcgcgtataagccaatcgcttctcaaaccaaatagctggatccaagaatttttccatgcagaagtaacggaaaactggttgaaaattttggcaaacatccatgaagacttcatatttctcttcaaaagactttttttgcacctccatcattttcttttggcactgaaaggcactgaaatcatttggcctgtatcttttatgagcaccatcttcattgttaacaagaaattcaccaatggggacagttcctgtgcaccattcaagaacaccacttcgctgagagaggggaaccaccttataagtacagatagttaatttcctcttcctagtttccgtgtttctctgcagtaatgtattacacatctggaagacctgttgcatgacagcatcttgtctcaggtcatcacggcccttaacaagctgtctcctctccttgccatcggaacctacacaatctattatttttggtaaatttacacctcctgctaagcgaaattctgctttaaatgactgtatagtcaccagatttccatattctcctgtgtggtccaccttaatttccatagtagggacaacaacatcttctaaattcttaagtttagtaattggctggtctgctggaatatttatgccttttctctgagtcttccactgagtggcatctaagtttgctaatataatataagcatcacaaagtgcctcaacacttctgaccatctgaggtctcctacttctgatagtacatattattctatttgcagcctctgttcgatcctcatcaagctgagagctttgtttaggcacatttttagttattctgcttcttctggctacctctggtttagtcagaaattcatctctgtttgcatttgctaaggccagtataataaacaaagtgtgatgggggtgatccattgaaattctagagattagattattgaggacttcatgaaatcctaggcctcccatcatcttggtccccattctagcagccaattggtacataagaggcaaaaatttatatgttggaatcttcattccgtctctcttcatcatgccattgacttcagaaactccagaattttcaagccagagggaacaaagtcggaatacccacatatcatgttcttctccacttaataagcagttgatataattttcaactgctttacataagaagcgtttacgatcctctttcagtgcacgcagggctaattcatccaactccagctctcgctgaacctttactgtgtatctgtttgtctgaattttatgttccctaaggagacctacttcctctttggctcttttcaggagagcttgcttgttttcaaattccgatgatttcatgtagttttcaattctttggtattgagtatctgaaaaccgggctaatgagagaaatgccttcatttttccatttcttagctcatcactactttctccatcataatttccagcaacttctactgccttttctagataggtctgcatgatgaccgcaggattttctaagcacgtttctgctaaccagttgccacaaaccctcagacattctgtgtatgtaagttttaggctgggattgttcgctgcacagctggcatccaacttcttgatcatttgcttgagaatactcagggcaagactctgctccttttttgcccagaatacttgtgcttcttccagctgccactcagagactccacagctaactgaattgtactgtttaatttgaaatattgccctttcagggagctgagtgttcttgaaagttctggccagtatagagagttctacaaggtgtttggtgagaatgtccttaatacattctctttgtgagttgtccatttccttttccatcaggatctccaaaatgactgtgcgtagagccatgataggctcctgaaaactaaaatcactgtccttgagaagctgggagtgtttctgccacttaatatatacttcagagagttgtctatgtgtgactgatcttgagaaaagctccccaatgctttccagctctccaatggcctgcaacctgctaagtgtgggatagagcgaatacacagactcaaggctgcgcttacacatctcttccacttcttttactctggcatatttgagactttcataaaatgtagagaattctctgtctcttagagattgtagagcattgtacaatgattcatggtaactggttccttctacttctttgctgacggaagtgcaatggtcccactgcatattcctccatgctgcttggtaatgaagttcttctagttcaggacaccagtctttattttcataatccaatccttttaaatagacggaaagaatatggcagagtcccaaattctgcaaggcctgaatgattcctgcctggcgtgttgatgaggggattgctgtttcgaggtcatatgttactagggctttgccccacattgcttcgtgttcatatgttcgtagtctagtaatgggttgtaacatcttccctccaccacagccatacaaactatctggctcccctatacttctgtagatttctaagagaagatcctgtaaacttattccagtttcttctttacttttttcactcaagctagaaatagttgtactctggcttccttcttcaaatgcaagacttcttttctcttgatcatccatacttttcttatctgcatagatttctgcatagagtaaagctgtaaagtgagcagcacaagactgagctaccttggcaacttctagataatttaaatccagccagaaagcatcattaaaaattgttcctgaagaaggtctcttttgtcttctcatgtagtccacaacagcaagcattgttctttgtgattttttatccaaacagcatcggaaaaagtgctctgactctgaatccaagtttgcaggggttgtggatcggctcgtttgcgagaagtgtcgaagacagctggtgaaaaatccctgaacatgtgtagaaagcagatttctccatgattcatttgtatcttggagtaaaatatcatgaatcaagtatggaagtacagtctgacaaaagtcagttttcacttcacacattggctttaataattgaagaatttcacattttgtgcctccactgtccaaaaaagcacaagtcagtgtctttatccaaatgtcatgattttcacttagaggaatccacagatttatatcatccaggccttcaaaagggttttctttgtcaaatctgggtacttctaaaaacttttttcttgatgttctaaaaggctgtagataggccagcattggatctgttgtcatcttataaatctcccagaaactatgtccagtctttgtggctaaaatgtttttcaaacaggtaacagctgctgatcgaactttgacacaatcttctaccagtgtgttattcaggtaggtcagcattatgaaggtccactgaagttctttatcttcaaataacttaagggccttggtataagatgcatctttactatgttgtatagctatggtagagaaatctataggacccacttctcccaagcagcttccaacagcctctagaacttctttttcaccagtgtggtttattgccatcttggataactgcaacaaattgacaactagtttcaccataatcccatcttgcggattatcctgagaagctctcataatgtccaccatctgatctttatgtagttccagttgtcttcgaagatcctttagtccttcaagtcttgtcaatggaagtgcatcataaacacttactgagagaaaatggttaatttcctccaagagtgaaaagggtcctctactgtatttgattttttgctgagtaatacgcaaatccttaaaaacaacatggtcaggaaaaggatctaaaagcttaatcgtgatatagaggttttcattatccttgttatctatcactaagtatttcaacaagtccaatacctgtttctgaacctccacctgctcatacacaaggggtataagtgtaccaacaataacatgaagatggttttctagagcatccttacagtaagtcacggctgtctggcaaacctgacttaataagtcacaacaaagggagaagctacgtaatgacacatccatgatacaagaaggcctttggttgatatagtgaatcaaagtataaataacgtctcgaagaacaaaggcccaagctcctcctaagccactttttatatctttcagtaataaactaacaaacaggtgatatattttaagaattctgtgcttcttataaacattatttgtttcagctgcttgctcacatatggcaagaagaattttctgataggaatcagggcttttggaaagaatttctaaaatgctttttaacttggttttatgacaattgctgatataggcaaatgttgctttaatcacatgcgatggaaaatgaggtggattaggagcaggatccaaatcccctgaaaagtcacagaggtcagtgctctgactggcactagaatttgctggctcatgtaacgtcatcaataactccaccacaatctctggtaaattactaatgaataagtgatcaatctgcaagggcacaaaattaaaatatatttaatattttatatctgtgaacgtcaagacagctcaaaaggcatatattaccttatttccaaaagtattcgatgactgtaaaagaaaatagatgactcaaagtccaagatttacaagattataaataactctacctttttcttctatgcagccaacctgtagactaagaggaaaaagtatg

SEQ ID NO: 51136 - DNA, 1058 bp, Homo sapiens
tttattaataatacttattttaatctgttccctttagtatgtctttatacagttcccctcgtgtatatacactgatataactacaatttaaaagccactaattaatctgttttttattttgtaagtaacaagatatagacatttgaatgccaatgtcttattctggagagacactggagctgaagttcaacaatgatcacacttattacctggcaataaaaacacaaccatctttccagtcaggtcaaaatatcctactttttgcctttctaccaattcccaaacattcacagtttttcaaggaccactaataaaatacaggaagcttttaaagacagtaagagaacacctagtgtaagttaggtgaattaaagatggcaaaggagattacatcctcaacactgacagcttccaagacttagaaaagagattgttccttgcttctaaaattgttctattttcctctgtaggaaaatgaaagttttttcttacaaatattaaataatcaaagtacttacgcaaaattaatctgctcctcaatgaggatgagcactccatttaaatgatctttacagatccctgaagttgctgtcctgtcactgtatttaagtgatggatattcaattgaattattctgcataaataattctgttcaacccagaagtatagtagtatgatgggtcagatacagtcaactgttccaataaaaatggcagatgtcctgaaaattattaaaatgtacttaaaagtaacaaactgtatcacacacttaggcttagaagtgttctttcaagttttttcttttaaaaaagaaaccagtctttgaagatttttgttgaatatagctattttccaagcttcatcttctttttctttggtccattaaggtccatgtttgaagtatcagtaggaatgcttattcctggtatctgtggttctaccagggacattcggatcttctgatgttgaaggattaggatgagtctaacatgattttcactttaactttatcaaatacatgggaccactgtatcttctattttaagtgagggtatctc

SEQ ID NO: 51137 - DNA, 432 bp, Homo sapiens
cggcctgcaggtactgctgctcgtgcctccggctccggcccctgagcgatggtcctttccttctgccacggcgggatcgggcactcacccagttgcaagtgcgagcactatggagtagcgcagggtctcgagctgtggccgtggacttaggcaacaggaaattagaaatatcttctggaaagctggccagatttgcagatggctctgctgtagtacagtcaggtgacactgcagtaatggtcacagcggtcagtaaaacaaaaccttccccttcccagtttatgcctttggtggttgactacagacaaaaagctgctgcagcagggtagaattcccacaaactatctgagaagagagattggtacttctgataaagaaattctaacaagtcgaataatagatcgttcaattagaccgctctttccagctggg

SEQ ID NO: 51138 - DNA, 129 bp, Homo sapiens
caaaagtgaagctttgtggtaagaaactattcagtttttttatttgatatgcactttcatgtgtcttggtgcatagtgctgatgggaaaagaatgaaatatatgatgaaatactgtgcttgaagagcac

SEQ ID NO: 51139 - DNA, 324 bp, Homo sapiens
agagaactagaagaatttttaaagttctttctattagaaactattatcaataggttgcatctttatggcccaactgagttgaaattccaaataagatcacttcaaatttaataaatggcattcttcattaacagcatttaaaaaataatggctgaaacacataatcaacattacactgaagttctatctgaagacagaaaaagttgccatccacaccaaagctacacatataccttctgattttatagaattggtccaatatcttttctgtcaatatcattaaaatcaccctacctgtttggaccgaggtctaccaggagaaaa

SEQ ID NO: 51140 - DNA, 228 bp, Homo sapiens
taaaaactatctcaacaattttattctctccaataaatgtacatctcatctaaattttggtattgagcttttttatacatcctatttccaaccaaaaagacttgtttttaaataaatgcaacttaatcatcctatttctattatttagatactatcattccttctatcctggaggctctgtaatggctgtattaacagtactcaaaagtaatgtggataataattgtg

SEQ ID NO: 51141 - DNA, 483 bp, Homo sapiens
  misc_feature (1)...(483): n = a,t,c or g
ttcactgaatcctggcgttcatgttgaagcagacaaaatgagaaaggaggagggcattgctcacctctcaatagcttttttcgttcaagttctatgtctttatcagctcttgccggtgattttaccccaattcaaccttgggagtgggaagaatatgaacagataacccttggcctaacagctccatcaaacctccttgagagcaactacctaggccaggctagtgagtgctttgtgaggaagctggtcagaaggttccctcaactccttcctggtcctcctggacactgcaagaaaagactttaggggatccccaagcagaggccaattgctctccttccttccctgccccaccaggaaaggaataacgtccacagactttgaagcagatagttgaagtagatctgtgagaaggtctagggtacttagtgtggtagacnttggacgnatattctcaagtttgggagccctggtttaaaaatt

SEQ ID NO: 51142 - DNA, 384 bp, Homo sapiens
gttgttgttgttgttttacggtctctgagggaatatagtaaaaatgcttccaaatctatacatttcagaatatgggaattttcttcctcttcttcccccatatcccaacatgaaattctggaaaactgtgcctcttcccctgttctgccttcatgggggagagactggatgaaatctacaaaaacagccaaaagtgccaccctggcttcatgtcttgaatttctaacttgctcttggcaaaggtcgctttattttttaatttttttccttgcattttcttttttattctattgctgctgcaaaaattaaggcaaaagtagctttcgatctttcatatttcatcctggtttcacaaggagtcacttatcttaggaggtctgtaag

SEQ ID NO: 51143 - DNA, 344 bp, Homo sapiens
aaaggcatgttttacaatatccacggcaatttctgatgcaattaccatacagacatctggaaacaacacccagagatgatctggattccaagaaaactgttccatgtttcttagacacactatcagtaaaagcacataatttgtgaatcgttccttaatatcgctatttgacatttgaaagagattgttcttttcaaacttcttgaaaacacttcctttaatttcaacaaaattattagacatcatgatagtaagcaaagacttgttgtgtgagttaaaagctacattgagagttgttgcttgaaccattataagaattgcatgcaaaaagacatagagaacag

SEQ ID NO: 51144 - DNA, 853 bp, Homo sapiens
  misc_feature (1)...(853): n = a,t,c or g
agatgctgaaggccttgccattacaaaggagacaactgagttccctgggtcataaggagtccagaaattagtgtgagaaggtccttctggaagttcactctcaaaattcatgtccagctgtcatcgttaaacccttaggcanntgagtataacccattctaacctcttggagaagggagtgtgatcactgtgaatcacattagtattgctcatctgagacattcctcttatatccaggcagctatctcccatgagtgcaacatcccagtggtttcagaaaatcatgtcctgaacagattctagccagccccacaccaccctggccaactgcaaccgctgctgctctaccagtctgggtcaattcctacaggcttgggagcccaccccagggaggcttttatctcctgcagcctcatccccagcaccctcaaggtagactactcctcagcctgaatcatgaatgaaacctgaacatctgccaacttcattatctagcccagtatctcttccctcacagagaagaagaaaatgaaatacaaagttgatccatttgttggctttctctggccggagaaacctctcgggttgttgctgtgagctttgatgaagttgtgataaccagggccatttgcacataggtttttttaaaaaacatgaaaagttcccttctcctttatttagcagtgtttccgggctgaaagacgccctcctccccctctgcgcttacccaggacgttaattaattgcactgtcatttaaaatattatgttgttaattactcgtttgtgtcttcccacccgtgtcacagcctggagtttttattcaattaaatctctgtctcttgcccaaaaaa

SEQ ID NO: 51145 - DNA, 302 bp, Homo sapiens
gtcactaggttagaactgtaggcatactcagtggagaggaagctacctattctattctaactattctgaggtcttcctggagagggattgttttagcagctcctctccagagggggctggaagtccagtttcaccaatgaccaagttttatttccttgtccttgttttagttttttcattttgttttcagtccaggtgcctcgcagctccttttggaatgggccagcattagtctaattttaagcgctatgtgttttgtacccttgcaaaagagctgcgaggcacctggactgaaaaaaaaa

SEQ ID NO: 51146 - DNA, 1138 bp, Homo sapiens
  misc_feature (1)...(1138): n = a,t,c or g
ggtggacagaatatgaaagtatctgcctggcagtgcagtaaatgaaaagagaagatagatgaatagaaagaaaagttataaataacagtaggaaagagagagtgcaggtggaacgagcctatcctgtggtgaaatgacaacacattctgcagtttttaaaatctaagaggctcattgacttttcttcattcatttaaattgatctccaagaaaactatgtattttaaagattccataaactgaatatatgaatgagaattaagaagagaggggctgcttcctaatctgtttatataaggtatagtatagtataatctgtttatataaggttagtagagaggagacaccaggtgctggccataaacctaagaagacattgaatcccattcactccttaacattccttaatatacattcatgagctacataacattttaatcatcaatgatggaccatataccatatacgatatnnnnnnnnnnnnnnnnnnnnnnnnnnnnnnnnnnnnnnnnntgctagtgatgtggtcattgtaaagctgtagcacaacacatttacccacgtttgtggtgacagtcatataaaagtatggtaccatataattatgtacagtgcatacataatacttgataatatgttactggtttgtgtctttggctatgctttttatcattattttagggtatactacttaaaatgttaactgtaaaccagcttctgacaggtccttcaggaagtactcccgannnnnnnnnnnnnnnnnnnnnnnnnnnnnnnnnnnnnnnnnnnnnnnnnnnnnnnnnnnnnnnnnnnnnnnnnnnnnnnnnnnnnnnnnnnnnnnnnnnnnnnnnnnnnnnnnnnnnnnnnnnnnnnnnnnnnnnnnnnnnnnnnnnnnnnnnnnnnnnnnnnnnnggtttttccaatgttaaaaaaaatnnnnnnnnnnnnnnnnnnnnnnnnnnnnnnnnnnnntattttgtacagctgtacaataagctaagcattattaccaaagagtcaaaaagttttaagaaattaaagtttataaaccaaatgttcattgtgagccaaggttaatttattgaagaaataaaacatttttaatgaaaaaaaaaaaaaaaaaaagtcgacgcggccg

SEQ ID NO: 51147 - DNA, 571 bp, Homo sapiens
cttttatttcaacgtgctggtagcacatctgatgaatgtcaacttaaaaaactcagttcaggtatccaggtataactcagccaaacagattttaaagctgcatataactctccagcacatggtgcctcacactcttatagtggcattctatatattcagttattactactgagcagataatatgggggttcctgttaacagtgtattttttaaaaaaagcgcataaatgtatagccagcacactacacacacacacacaaacatgcacagttaaactatatatttttaaatgccactaatagccagcacaactaaaacaaaagacattcctaactgctctgtaagctgttaacagatgcagttccttcttgatgtgggctcttgcttcttcacgataactactactaaattcaagcactggtccttgggtgtctgacctctacattctagtttatgcaatgtctttaggagaattttgtgcactggccactgtgatggaaccattgggccaggagtgctttgagtttatcagtagtgattctgccaaagttggtgttgtaacatgagtatg

SEQ ID NO: 51148 - DNA, 1493 bp, Homo sapiens
tttttttttttcacgagttgtactgactttattccccttcatcctctcactcgcatgcctgctgtgccccatgctctggggctgtggggtgcctgttacacgagcagttgtcaatggtctcaacacacacctgggcatggccattctgccactaccaagccctctgtgaagggcaccgtggagactatggcagcatgagccagggttgaaggctcccagaactgtggccacagggcttgagttcatcactctagccacccatcgccagctggcctgagaccagagagccccaaggagccggggagggggcagacccagactccaggcctgagttctagccaaacaggctgtagtggggccagcaggtgatgacaccaccagtgcctgtgggagatccctggtgcccagtgatgggggttggaaacccatggaggaccctgcctacagcccactgggagagatcaactttttttgggaaaatgtgagccagctccaaagagctgccaggcactgggactagagattaaaaatagcaacagggagggggggacccctgaggacatcacggaagcccaaagatcaaggagtgcaaggaagaaaaagagctacagtaaagcaggagcctggagtccccagccttggggtgggggtcctgaccagaagccttcttcctcggggaggggcgaaccttctctcccccaggacagcaggagcgcctgagcgtacgtctacagctccaacatcaattgggcaaggaagctgctggcactgtaccctccaagcccagagaacaaccagggtggtgtggcttggattataaatcctcagatcactcgggcaccttgggcctgcccaaatctgtacagaataaagtgcttcgtttattgatgattaaaatgtccccagctccctgccccagtgccatgggcctcataaggtcagaggggttcagtccccctaaccattcccccggggcccaagcctcttcccactccagccatgctgggaaggcaatagtgtcggggagtggtgggggtttaaggtgcaaagagtataacaaacaaaactgtataaacacaataggaaagagcttaactaggaaacatgtagcttatggaaccttcctccccatattaaaggcaggaataaagacattaaatgacaacaaaaaagggtttcctattagtgctagcctcatgggggcaagcaattgggtctaggctgcgcctccccagtccccccaatcccccgaggggcctgaacatgcaggctcctttaccggcagtgctatgggcgccccacccaccggtgcacaggcccaggagggacgaggacgctggagccagccagggacaggttgtggcaggacctagagggaggataaggcctagagcgggcctttgggggagcagagatggacacagccacacttgttccttctggtgtgggatatatggccagagtagctggtgaggaactggggtgctctgtga

SEQ ID NO: 51149 - DNA, 321 bp, Homo sapiens
ttttttttttttttatatgattatataatgattatggtatattaagtgcatatatcacttatcctatcataattcatttagttgttcacgtttccctcctataaataatactgtatgagacatttgtatgcatataaatctttccttccctatgtcctcagggcaaatttggtagtgggaaattaatccactgtccaggagtatgttcttgttgctgccaacaaggggcagcagggaatgttctagacgaattctacctgaagtcaggaaattgcatcaggtgatatcaccaggctgatatctttaggttctgattcttcc

SEQ ID NO: 51150 - DNA, 3967 bp, Homo sapiens
agtccagagcgagcgggttatgcctccgcctcgttgccctgaatgccgcagcgacacaggaaagggctaagattcggccatgagcagcgcccctcggctgcccgccaagggcgcagattctttctgtacgccagagccagagagcttgggccctgggacgcctgggttccccgagcaggaggaagacgaacttcaccgcaccctgggcgtggagcggtttgaggagatcctacaggaggccgggtctcgtggaggggaggagccaggccgcagctatgggatggaagactttgagtaccgccgccagtcctcccaccacatccatcacccactgtccacccacctgcctccgggtgcacgccgacgcaagacaccccagggcccaggacggaagcctcgaaggcgcccgggagcctccccgactggagaaaccccgaccattgtggagggggaggaagatgaggatgaggccagcgaggctgagggggcccgggctctcactcagccgtcccctgtctccacaccctcctcggtgcagttctttctccgagaggatgacagtgccgaccggaaggcagagaggaccagtccatcttcccctgcaccactgccccaccaggaggcgactcctcgggcctccaaaggggcccaggctggaacccaggtggaggaggcggaggcggaggcggtggcggtggccagtggcacagcagggggtgacgacgggggtgcctcggggcgccccctgcccaaagcccagcctgggcaccgcagctacaaccttcaggagaggaggcgcatcgggagcatgactggggctgagcaggcactgctgccccgggtccccacggatgagattgaggcccagacgctggccacggccgacctagacctcatgaagagtcaccggtttgaggacgttcctggggtgcggcggcacttggtgcggaagaatgccaaaggttccacacagagtggccgagaagggcgggagcctggccccacacctcgggctcgaccccgggccccccacaagccccatgaggtgtttgtggagctgaatgagttgctcctggacaaaaaccaggagccccagtggcgggagacagctcgctggatcaaatttgaagaggacgtggaggaggagaccgagcgctgggggaagccccacgtggcctccctctccttccgcagtctcctggagctccgcaggaccctggcccatggggctgtgctcttggatctggaccagcagaccctgcccggagtggcccaccaggtggtggagcagatggtcatctctgaccagatcaaggccgaggatagggccaacgtgctgcgggctctgctgttgaaacacagccacccaagtgatgagaaggacttctccttcccccgcaacatctcagctggctccctgggctccctgctggggcatcaccatggtcagggggctgagagtgacccccacgtcaccgagcctctcatgggaggtgttcctgagacccggctggaggtggagcgagagcgtgacgtgccgcctccagcaccaccagctggcatcacccgctccaagtccaagcacgagctgaaactgctggagaagattcctgagaatgccgaggccacggtggtccttgtgggctgcgtggagttcctctcccgccccaccatggcctttgtgcggctccgggaggctgtggagttggacgcagtgttggaggtgccggtgcctgtgcgtttcctcttcctgctgctgggcccgagtagtgccaacatggactaccacgagatcggccgctccatctccaccctcatgtcagacaagcaattccacgaggcagcctacctggctgacgagcgggaggacctgctgacggccatcaacgccttcctggactgcagcgtggtgctgccgccttcagaagtgcagggcgaggagctgctgcgctctgtggcccacttccagcgccagatgctcaagaagcgagaggagcagggccggctgctacctacaggggctgggctggagcccaaatctgcccaagataaggcgctcctgcagatggtagagcggcaggggcagctgaagatgatccccttcggcggacggggcggcctttggggggctgatccgagatgtgcggcgccgctatccccactacctgagtgacttccgagatgcacttgaccctcagtgcctggccgcagtcatcttcatctactttgccgccctgtctcctgccatcacctttggggggctgctgggagagaagacacaggacctgataggggtgtcggagctgattatgtccacagcgctccagggcgtggtcttctgcctgctgggtgcccagcccctgttggtgatcggcttctcagggcccctgctggtctttgaggaggccttcttctcgttctgtagcagcaaccacctggagtacctggtgggccgtgtgtggatcggcttctggctggtgttcctggccctgctcatggtggccctggaggggagcttcctggtccgcttcgtctcccgcttcacccgagagatcttcgccttcttgatctcactcatcttcatctatgagaccttctacaagctggtgaagatcttccaggagcaccccctgcatggctgctcagcctccaacagctcagaggtggacggcggtgagaacatgacatgggccggggcaagacccacgctggggccgggcaacaggagcttggctgggcagtctgggcaggggaagccccggggccagcccaacacggcccctctgtcgctggtgctcatggccggcaccttcttcatcgccttcttcctgcgcaaattcaagaacagccggttctttcctggccggatccggcgggtgattggggactttggggtgcccatcgccatcctcatcatggtgcttgtggattacagtattgaggacacctatacccagaagctgagcgttcccagtggattctcggtgactgccccagaaaagaggggctgggtcatcaaccccctgggagagaagagccccttccctgtgtggatgatggttgccagcctgctgcccgccatcctggtcttcattctcatcttcatggagacacagatcaccacgctcatcatctccaagaaggagcgcatgctgcagaagggctccggcttccacctggacctgctgctcatcgtggccatgggcggcatctgtgccctctttggcctgccctggttggctgctgccactgtccgctctgtcactcacgccaacgcgctcactgtcatgagcaaggctgtggcacctggggacaagcccaagattcaggaagtcaaggagcagcgggtgacggggctgctggttgccctgcttgtgggcctctccatagttatcggggatctgctccggcagatccccctggcccgtgctctttggaattttcctgtacatgggagtcacctcccttaacgggatccagttctatgagcggctgcatctgctgctcatgccgcccaaacaccacccagatgtcacttacgtcaagaaggtccggaccctccgtatgcacctgttcacggccctgcagctgctctgcctggccctgctctgggccgtcatgtccacagctgcctccctggccttccccttcatcctcatcctcacagtgccgctccgcatggtggtgctcacccgtatcttcaccgaccgagagatgaaatgtctggatgctaacgaggcagagccggtgtttgatgagcgggagggtgtggacgagtacaatgagatgcccatgcctgtgtagccgccaccgagggacagccgagggaccgatggacgaggggacaggctggtgggatggggttccccctcccatgcccctccctcctttttatttaagtgaataatttaaagtcttctcctcccccactgcccctgcagtaaagtgctttggcccccaaaaaaaa

SEQ ID NO: 51151 - DNA, 418 bp, Homo sapiens
ctccttgcaggtgcagccctttgcctccctcatcagcaaggcacccctctccacccctcgcctgctcatcaacaaggagaaagctggccagtcggaccctttcctggggatgattatgggcctcggaggaggcatggactttgactccaagaaggccttgctgagctccttggatggaagaaggagctggaggaccttgtccggagggagcacgccagcatagatgcccagtcgggggcgggggtccccaaccccagcacttcagcttcccccaagaagtccccgccacctgccaaggacgaggccaggacaacagagagggagaaaccccagtgacagctgcatctcccaggcgggatgccgagctcctcagggacagctgagccccaaccgggcctggccccctcttaaccagcag

SEQ ID NO: 51152 - DNA, 454 bp, Homo sapiens
  misc_feature (1)...(454): n = a,t,c or g
tttttttttatagattatttacattttattctatatacttacaaaagtaatatcatagtttattgcaaatactcatatttactatgtcaaaaatcacatttttgcaactatatnnnnnnnnnnnnnnnnnnnnnnnnnnnnnnnnnnnnnnnnnnnnnnnnnnnnnnnnnnnnnnnnnnnnnnnnnnnnnnnnnnnnnnnnnnnnnnnnnnnnnnnngttatgtttacactcaagtcgatnnnnnnnnnnnnnnnnnnnnnnnnnnnnnnnnnnnnnnnnnnnnnnnnnnnnnnnnnnnnnnnnnnnnnnnnnnnnngacagaaacccctcctagaccaatatcaagcgctgaagttgaattagtaataaaaaacttaccaaccaacacaaaagccctagaccagatggattcatagctgaattctacaagatgcagaaagaatactggtacaa

SEQ ID NO: 51153 - DNA, 340 bp, Homo sapiens
  misc_feature (1)...(340): n = a,t,c or g
cggacgcgtgggctactctggacatttcatatatctggaatcatgtgatatctcttttgtgactggcttcttccactgaatgttttctagggccgtccaagttgaggatgtnnnnnnnnnnnnnnnnnnnnnnnnnnnnnnnnnnnnnnnnnnnnnnnnnnnnnnnnnnnnngtttattgattcatcagttgatggacatttgtgnnnnnnnnnnnnnnnnnnnnnnnnnnnnnnnnnnnnnnnnnnnnnnnnnnnnnnnnnnnnnnnnnnnnnnnnnnnnnnnnnnnnnnnnnnnnnnnnnnnnnnnnnnnnnnnnnnnnnnnnnnnnnnnnnnncgtg

SEQ ID NO: 51154 - DNA, 790 bp, Homo sapiens
  misc_feature (1)...(790): n = a,t,c or g
acaagcagataccaaaagaatggtggacattctacgggctttggagaaattgaggaaactgaggaaagaggctgcagcgaggaaaggggtctgtcctccagcctcagcagatgagacttttacgcatcatcttcagcgactgagaaaactcattaaaaagcgctctgaactgtatgaagctgaagagagagccctcagagttatgctagaaggagaacaagaggaagagaggaaaagagaattagaaaagaaacaaagaaaagaaaaagagaaaattttacttcagaaacgtgaaattgagtccaagttgtttggggatccagatgagttcccacttgctcacctcttggagcctttccgacagtattatctccaagccgagcactccctgccagcgctcatccagatcaggcatgattgggatcagtacctggtgccatccgatcatcccaaaggcaacttcgttccccaaggatgggtccttcccccgctccccagcaacgacatctgggcaactgctgttaagctgcattagtaaagatgctccaggagtgtggtccagccagcgctctttccagctgtaaatattagcgatggtgccatcttttgctgtagactaaactgcaacttctaaattccatgtgggcattcccctaccctgaagttatgctttccttctgtggtctgtgctgggccagaggtggccttttggattcaggttaatgtgggttttttcagggnaaggggtttagggtggaattgagggttttttaaccacaggcagtgnatt

SEQ ID NO: 51155 - DNA, 154 bp, Homo sapiens
gtttcctcatcaccggttagcccaccagccagtagacctgagggaaggtgtggccaaggcctacagtgttgtgaaagagggaatcacagacacggctcagaccatttatgaaactgcggctcgagaacacgagagcagaggggtgactggtgcc

SEQ ID NO: 51156 - DNA, 895 bp, Homo sapiens
ttttttttttttttgcttttccaactttatttagaaaaacaaatccaggtcccagtgccccctgtaccctccccgaccccagccataatttaaataacttagagacagagttggagggaggggacaggagaggttggggtcacggtggaaggaggaagagagcccactacagccgccgcagcgcccgcttcttgtccgtctttttcttggccgccagcttcttatcgcgctcgccagcatgcttcttggccatgggaccctcagcccctcccgggccccctggggccccagggctcggtggaggaagcttcagtgccactggccagggcccgaccggcttcggccctgccgctgggcccgccggcgcccccgtggatctctgtgagcagacgggcccgagctgcatactcctcgtagttctccaagagcaggcggcccgcctcctcgttgagtgcagactcggggttagggtggatcagcaggcacttgatggtcagcagtacgtgtcggatgcccagctcagccgtccagtccctcttgagcacgttgacgcagatctcgccattggcgcccacgttcgggtggaagatcttggtcaggaagtagcccttgggtggggaggcagggaagtccttccccagcaggagtttcatgcggaacagacctccagcatatggggtcccctcagggccctcgatggtgacctggaggtcggtgaggtcctcctcgttgggaaagaccttgatgccatcgggtgggtctgcggtcagtgtcgtcacctccttgtacaccaggcggatgatgtgcgggggtaggttctccacgttggagttcatggctgcggccggccgggggcgggtccccccggcccccttcctgcgttcttcggtccgcc

SEQ ID NO: 51157 - DNA, 585 bp, Homo sapiens
ggtatagaatgatctgataggtttcctccatgtttctacagtccttgtgtgcactctggcatgaccatcagcatgtggcagtgtggtgttggatttggagtattttccatgcctgattgtaaatccctcggggtagggaccgtgtcttcatctccctaggtcgtagcgtgagaaccggcacgtgtttcccgctttacagatgtcccagccgtggaggcctttgcgatctgttgagatggcctcatgtttcttcttgcccccacaatgtgattcagcaaaaagacaactgggtaacagacgcatggagcagtatttcttggatcccatggggcttgctgtgttgagactgggctttcgagtctgaattcaactgagagtgaggtgttgctgatgcagagagactcatgggcccagccccttgtcctctgtaaagctgggaacagaagctaagtctggagagtcgaaccccagagttttagagatagaactgataggcaggtcgccgttctcctggggaccccagtctttgtggcctttcccagcagctggaactttggacccctctctctgtgacatcctgctcct

SEQ ID NO: 51158 - DNA, 656 bp, Homo sapiens
ggcacgaggtggggtgccgaggctcaggcagcatgacgacggagacctttgtgaaggatatcaagcctgggctcaagaatctgaaccttatcttcattgtgctggagacaggccgagtgaccaagacaaaggacgggcatgaggttcggacctgcaaagtggcggacaaaacaggcagcatcaatatctctgtctgggacgatgttggcaatctgatccagcctggggacattatccggctcaccaaagggtacgcttcagttttcaaaggttgtctgacactatatactggccgtgggggtgatctgcagaagattggagaattctgtatggtttattctgaggttcctaacttcagtgagccaaacccagagtacagcacccagcaggcacccaacaaggcggtgcagaacgacagcaacccttcagcttcccagcctaccactggaccctctgctgcctctccagcctctgagaaccagaatgggaatggactgagtgccccaccaggtcccggtggtggcccacatccccctcatactccctcccacccacccagcacccgaatcactcgaagccagcccaaccacacacctgcaggcccgcctggcccttccagcaaccctgttagtaacggcaaagaaacccggaggagc

SEQ ID NO: 51159 - DNA, 2195 bp, Homo sapiens
  misc_feature (1)...(2195): n = a,t,c or g
gcgcggacgcggcctccttacctcatttgtcctcgcccctccccgtccctctacgcgttttggtccctgtttggtgctttctgtttgcagctacggcagtgagtatgtatgtgacggaccccgagtcacccgcggcctgggacccctgcctaccctccgtctcgccagccgagctgtggaactagcgcgtgccccctcgccgacctcggctncttccggtccgcccctcacttgtggtggggcgcagctcctggtccctcagctgcgcgccgccccacgcggccgggctgggggtctagggggtccgcatctccctggctttccaagggctaaggtcgtgattctagggcggctgggcgtccagggcctcggtgggggtggcgtgtctgccctttttatctccccgcaaggcccccagtcttctagggaagccagtcagtgaagcgcggaggtccgggcgcgccgagagagagtccagtctttgaggaccgagtagtcctgggccacctcccgcctctgctgtcagaagcagcagctgccgccgtggaatccaaaatttcgggagctgtgaccctttcctcatgtaaaacgagtagtcttggacgatctgggcataggaaccaatcagaaacaatcgcttcagcaatcaagaccattgttcatcatggaggaacccatggatacctctgagcctctatctgcattaccattcactgggcagcagtcttttgagccaagtggcaaatttggacagtatccatcgatgcagatgaaccacatccaggcactggggaagtggaggacatagaacagctcaatcagtgtttgatccaacacttccatctcattaagacaagtttgatttttctttgctttttatttcatggaatacatgagaatctcttaactgttggagtttccaaggaggcatacctcgtgacttcagttaatggaaagaacaaaactaaaatgctgtatggccaaagccacaaagggaaggatcccgcaatttacattcttggagctatcatctgtactgtactgttgtgatctactgattggcattggcatagtagtaggggtcaagtgacagaatccgtgccagcagtctccaggttcagaagcaattcaagaccctgatgatagctctccagcaaccaacacatggtgattgtgccaacttgttgctcagttataatgcagggccagtgattggtttaagtgaagaccatggttgagatcatttgtctttggtctaatagaatttgagtctagtagaatttgagtctccagggaaagagctacttgaccaaattaaactagtagcaggtagagcatgaatgacagcatattataccatcaagatgttcttagagcagtgtatggatggatcgattgtactgccatcagttgtgactgacgttgtattcaaggagaaagagaaacttgtttagaaagcactttgaaagttttttgagtacgggggtgccctgtatcaccccgttatggttgaactttctccttcaaaattaccagacttggcagcagtggcaaattattgggctaaaagacttaatcagacatattctgggttcaaggctcctaatataatacctggtgcaaacattatacttccactcattcagatggttgcatcctgccaggcatccagtgggactgggaatatggacacttgaacattaaacatcctgaagaattttggaatgacaggttacaagtgaacataatcagttctctatattaaaaaaaaaaaaagatttgggcatagattgggctcacataatctttagagngattttttcatttttgtgaaagtacagaaattcttaactgcttatgaaatgctgattgttaaacagcatccacagctattttgtgttgtttccctgaccccaccctgaagaaaagaaaaattatggcatattgaaaacagcagtatgatgtaagagaaaagatcacaaattccttgagggtgggtcttttccatactcataagcctatttataatattcagagtaatttattgacacatattaatattccctcctatcccattaattgccaaatcatcaaacatttattgagcatctactctgtgtagggtgtaagcagtactggggacttacagtgataaaagacatagttttagccttaagtgatgtactgtttcactg

SEQ ID NO: 51160 - DNA, 501 bp, Homo sapiens
aacacatttcttctttgtagaaataactgctcaagaagataaattgttacctaacagttgattgatgaatatgaaatcagagcaagaggggctaattagagattttactagctagggctatttacccaaaccatctatccagactgtagacatagaatcaccagatggctaggatcctggtgcagctggttcccctttttccttaccctgaatgtcattaaggatgcattgccaaatgctgcccctctggcctgatgactacactccatattggtcacctgccttctttttcctacagtcttcctccagacaggcacgccatacaaccgactacacttgggctcactgaatgaatcacattcttctgctgtgcctcccagagatttcatcaaagcacccgcagtggccttctggaggctcctcaaactctccactcaatgtttcctgaaagtgtcgtgtttctcacctctagattgttattctcatcagttacatgtgggt

SEQ ID NO: 51161 - DNA, 1185 bp, Homo sapiens
  misc_feature (1)...(1185): n = a,t,c or g
tttttttcaaattttcagtagttttattgaaaaatgcctcttttgtttcagaaataaataatataaggcagtgaaattcacaatctgcagttaaaatataaaagcagcaattctatgttcatagtcttgcaaatgttttccaactacttttgataactaagaaatattatattctgaaaaaagttcatactaaatatacaacacaaacatgcaattccctctctgcagaataatctgcaatttggtataaatgttagtgtgtctaaaacaaggaggtttaaggcaatatggaactgtatcccgttgatgcactaacttcatctacatggcttaaggtttgtggttgttaaagagatgtatacgagcattctatgccccggcgtataacagagatagaagaggaagataagtaattgcaatggagttgacgtttccctcctttttggttttaggaggggaattatttgaatcgtggtgtaattgaattgaaaataagtatagcaaaagataaactgcccgctcgaaatacacagcagctctgggttccaggacttaactgcttaacctaagagtttcactgaggctgcccgctgtgctaactaaaggcacacggcatgttctctctttgcagcttttgttaacaaagtattttgcaagcatttcaagggcaaaggcaaaaatgtctacagactgcgtgcttggagctaggcttcctgcagaaacaaggttctctacaatcagaaagggtactcctggatgagcaacgctggaagaaacacctcagaaaagacgtacactgctctatctgacctgtaaatgagaatttcaacacctcccccaacctccggccggcgcgtgatctctggttcactgcccgggtccgtggggcaggggcggccgccagcgccggtggggctcaggaggctcctctgcaggctcgtctgcgccgtagtcctcgtattccgctgtccgctcgggctccaccggcacgatgaagggtcgcgctcaggcaggtaggccccncctcgggcacgtaaggctctgtccgattcaacattacaattatggcatgatttggaaggcacacacacacacacacacacagcaaaagctaangtcatcacccgcggtgatggcactccagtcttaatctcataactataaatagataagttacaatgtccc

SEQ ID NO: 51162 - DNA, 447 bp, Homo sapiens
  misc_feature (1)...(447): n = a,t,c or g
tttcaatgaaaagtacattagcagtatgaacttctggtccagttggaagtttttccatttgaaaaatgtgatgtttgcatggaactgtttgaaacttttttattttctagtccccctcccccacactggatagaatttagcctagaattttccctttggataaaagaacaaaaattgaacatgttatttgtaaattgatgtttagtaattagtgataaacttgaaatactagcatatattataagccttaatcttaggtagtcttatgaaaatgaatctcttaactatcttttgaacctgtattcacattggttttcaagatattttaagttatattttttcctcttttcagagctgcttcttattctggggctacttttttttttagttgtgtaattcacaaagggctgcattttttttttttttaataaggcttataacnatggc

SEQ ID NO: 51163 - DNA, 446 bp, Homo sapiens
ttttttttttcggtttttaaaactttatttcaacataactatgcttacagaaatacactcatattggttaatagaatgcaatttaagtttaacttatcctacataatttggaccaaaaacttggtacatggtttaggattttaaaaaaggatttgcaatctggtttatttttatctattacaaatgtataaaagatcttccatcaaatgctgctaaagaaggcagcaagaaccttgagaaatttacctttggtttgcctcagaaaagtaacacgtattgcactgcttaagtttataaaattggtgcaacaaaacattgttgtaatgtttcaatgccagtttagaaagttcaataactaatggatatggaagggaccgggagggaacctatgtacacatgtgaaactgtaaaagctatctgatttagttaatattgcatgtagattg

SEQ ID NO: 51164 - DNA, 802 bp, Homo sapiens
ttttttttttttttttttgaggcatcaaaagtttgctttattgacacttataaatctaaataaatatggaaccaatagcaaaagcatttaaaaagtatgttggtaaaggaagtcctccaagtgtttcctgttgttaaaactatccgagttttctgttgcaacaaacaggacaatgttttaatcaaactgtgactgtgttcatttcaggtttcctacatgaagaattgtcaatactacgctccctcaactatattcaaccaaggatctgcgtgaaactttttctaaggtaccatctcaaatatattcaaccacggaactgcgtgtaactttttctaaggtaccatctcaaatcacaaggcctgggattgggaaattgttttactttactaaagaccactgtaactcaataaacgaacttagattagaaaattagaggcagaccactactcctctcggactgcatggccactgtcttcagctgttttccgtagtgattgtttctaggtattttacctattttaccaacctttttcactttttgcactgaatagtgctaagggaaaaaaaggatggggaaaggaggagtggcagtatctatagctagagggtcatcctatttgtggaaaactttattgtctactttagtgggtcctgaatattagtccagtccttactgcccagcacttaaggaagaaaggtctaatgtgactgtatgggggttgaagtaggtaccaaaggaaaagcagttcccaccacctccaaggagcaggagctgttgctcttcaggaagaaggatactagt

SEQ ID NO: 51165 - DNA, 329 bp, Homo sapiens
ggcacgagatccccaaggcctctgcctctcagcctcttccatggtcggtttaggctgctgagttttctgtgcttccccaagaaccagtgggatcaatgccggcggcctctgtgatggttgctgactaatccgggatttcatgagtcagaggcaccacccctcaccccagctgcctgctgcttctgacggatcttggtgctcaggctgcctgggctctccgagtgaggacgcagcctccatatttgggtgcactcaggcatggctggggacaagccagctgcccagggttcttcccctggtgattctcgcctgctttctcatctcaaggg

SEQ ID NO: 51166 - DNA, 724 bp, Homo sapiens
ttttttttttttcctcagaaaactaccattttattacttttagcattagatacgtttacaataaagaattatgttaatagagcctaggagttccaattgctagttgagaatcacctcaagaaaaatagaaaatttgtagaaataattattaaattttaaaaatctaagccttttagacttttcaaaataaaaatttaagtatgctgccttcacagtgaatttaatgtgataagattttcattcaaatgacattatttctatttaatgttttaatacagttacgcatgaaatcaaattccaacttcttaaaaaatgtggagtttttttggatcatttgatcatttcctataaaccatgtattccggtctctatattactgagagtgatgttagattcttggtctactgttgaagataccaaacacatgcaccatttgaatgtgttcttgaactaagtcctaaaacaaagtgaagcagtgtgtttttgtagagctcaggtctaggtgctgccaggtggggtagtgccactcctccagaaggccctggtccttgtgaggcccaacagatgtcatattctttgtttatattcaattcggcattgcccttccggctgggggacacccaccaaatggagataactctgtttgggtaatgggtccagaagactacagtcatatttataaagtattaaaataatacacatctgaacctctaacagagcaaac

SEQ ID NO: 51167 - DNA, 291 bp, Homo sapiens
attgggcctggcctcaacgtattttattgaagttatctaaaagtatcttatgttttatgagaaggcctatgaatgcagttttgttttttgatataacagtaaatagtatttttaaaaaaatgtttctaatagctttttgctggcatttagaaatactattgattacatatatagaacttgtactttactcccctgctgaactcactattctagttgccttttcctagattctatggggctttttacatagatgatcatatactctgcaaataaagacagtattatttcttg

SEQ ID NO: 51168 - DNA, 1435 bp, Homo sapiens
agtttctttagttgtttatggtccattttctattttagcatttattattctatgtagtctatccaaagacgattaagggagttccacatgttttccggaacattttgaaaagagagcttatccagtgtacagatcctaataaagtgcacattcagtgtaattttatttttttaatatcttttttaatcctatttttcttcctcttttgctcagtaaattttgtatgaaactttaaaaggacttatggcatgtaaacattatttataaagtaagtcatggttataattatttttctcctgcctccttatgtatttatttcagaaatgagccgtcagactgctacagcattacctaccggtacctcgaagtgtccaccatcccagagggtgcctgccctgactggcacaactgcatccaacaatgacttggcgagtctttttgagtgtccagtctgctttgactatgtgttaccgcccattcttcaatgtcagagtggccatcttgtttgtagcaactgtcgcccaaagctcacatgttgtccaacttgccggggccctttgggatccattcgcaacttggctatggagaaagtggctaattcagtacttttcccctgtaaatatgcgtcttctggatgtgaaataactctgccacacacagaaaaagcagaccatgaagagctctgtgagtttaggccttattcctgtccgtgccctggtgcttcctgtaaatggcaaggctctctggatgctgtaatgccccatctgatgcatcagcataagtccattacaaccctacagggagaggatatagtttttcttgctacagacattaatcttcctggtgctgttgactgggtgatgatgcagtcctgttttggctttcacttcatgttagtcttagagaaacaggaaaaatacgatggtcaccagcagttcttcgcaatcgtacagctgataggaacacgcaagcaagctgaaaattttgcttaccgacttgagctaaatggtcataggcgacgattgacttgggaagcgactcctcgatctattcatgaaggaattgcaacagccattatgaatagcgactgtctagtctttgacaccagcattgcacagctttttgcagaaaatggcaatttaggcatcaatgtaactatttccatgtgttgaaatggcaatcaaacattttctggccagtgtttaaaacttcagtttcacagaaaataaggcacccatctgtctgccaacctaaaactctttcggtaggtggaagcatatttgcctgttgtctattcagacctttttgatatttccttcctctttcagcatttttgttttttaagtgcagttttcattgtggtatccaccaaatgtttgtaaaacaaacaaaaaaaatgagcattagtgttggaccataaatccctcgtgccaag

SEQ ID NO: 51169 - DNA, 3052 bp, Homo sapiens
  misc_feature (1)...(3052): n = a,t,c or g
agttgagcgcagtcgccgctccagtctatccggcactaggaacagccccgagcggcgagacggtccccgccatgtctgcggccatgagggagaggttcgaccggttcctgcacgagaagaactgcatgactgaccttctggccaagctcgaggccaaaaccggcgtgaacaggagcttcatcgctcttggtgtcatcggactggtggccttgtacctggtgttcggttatggagcctctctcctctgcaacctgataggatttggctacccagcctacatctcaattaaagctatagagagtcccaacaaagaagatgatacccagtggctgacctactgggtagtgtatggtgtgttcagcattgctgaattcttctctgatatcttcctgtcatggttccccttctactacatgctgaagtgtggcttcctgttgtggtgcatggccccgagcccttctaatggggctgaactgctctacaagcgcatcatccggtcctttcttccctgaagcacgagtcccagatggacagtgtggtcaaggaccttaaagacaaggccaaagagactgcagatgccatcactaaagaagcgaagaaagctaccgtgaatttactgggtgaagaaaagaagagcacctaaaccagactaaaccagactggatggaaacttcctgccctctctgtaccttcctactggagcttgatgttatattagggactgtggtataattattttaataatgttgccttggaaacatttttgagatattaaagattggaatgtgttgtaagtttctttgcttacttttactgtctatatatatagggagcactttaaacttaatgcagtgggcagtgtccacgtttttggaaaatgtattttgcctctgggtaggaaaagatgtatgttgctatcctgcaggaaatataaacttaaaataaaattatataccccacaggctgtgtactttactgggctctccctgcacgcattttctctgtagttacatttaggataatctttatggttctacttcctataatgtacaattttatataattctgaaatgtttttaatgtatttgtgcacatgtacatatggaaatgttactgtctgactacaacatgcatcatgctcatggggagggagcaggggaaggttgtatgtgtcatttataacttctgtacagtaagaccacctgccaaaagctggaggaaccattgtgctggtgtggtctactaaataatactttaggaaatacgtgattaatatgcaagtgaacaaagtgagaaatgaaatcgaatggagattggcctggttgtttccgtagtatatggcatatgaataccaggatagctttataaagcagttagttagttagttactcactctagtgataaatcgggaaattnnnnnnnnnnnnnnnnnnnnnnnnnnnnnnnagtaacctgtaactctcaattccctgaaaaactagtaatactgtcttatctgctataaactttacatatttgtctattgtcaagatgctacaatggaaaccatttctggttttatcttcaaagcggagaaacatgttgatttagtcttctttcccaatcttcttttttaaaccagtttaaggaacttctgaagatttgtccacctctgattacatgtatgttcttgtttgtatcattagcaacaacatgctaatgacgacacctagctctaagagcaattctgggagaatgaaaggaagtataaagtaacccataatctgcttggcaatagttaagtcaatctatcttcagtttttctctggcctttaaggtcaaacacaagaggcttccctagtttacaagtcagagtcacttgtagtccatttaaatgccctcatccgtattctttgtgttggataagctgcacatgactacatagtaagtacaggaacagtaaagttaaaacgggtgtctccattgatctgccaaatcgttatagagagcaatttgtctggactagaaaatctgagttttacaccatactgttaagagtccttttgaattaaactagactaaaacaagtgtataactaaactaacaagattaaatatccagccagtacagtattttttaaggcaaataaagatgattagctcaccttgagataacaatcaggtaagatcataacaatgtctcatgatgtaaaaaatattaaagatatcaatactaagtgacagtatcactctaatataatatggatcagagcatttattttggggaggaaaacagtggtgattaccggcattttattaaacttaaaactttgtagaaagcaaacaaaattgttcttgggagaaaatcaacttttagattaaaaaaattttaagtatctaggagtatttaaatccttttcccataaataaaagtacagttttcttggtggcagaatgaaaatcagcaacttctagcatatagactatataatcagattgacagcatatagaatatattatcagacaagatgaggaggtacaaaagttactattgctcataatgacttacaggctaaaattagttttaaaatactatattaaattctgaatgcaatttttttttgttcccttgagaccaaaatttaagttaactgttgctggcagtctaagtgtaaatgttaacagcaggagaagttaagaattgagcagttctgttgcatgatttcccaaatgaaatactgccttggctagagtttgaaaaactaattgagcctgtgcctggctagaaaacaagcgtttatttgaatgtgaatagtgtttcaaaggtatgtagttacagaattcctaccaaacagcttaaattcttcaagaaagaattcctgcagcagttattcccttacctgaaggcttcaatcatttggatcaacaactgctactctcgggaagactcctctactcacagctgaagaaaatgagcacacccttcacactgttattacctatcctgaagatgtgatacactgaatggaaataaatagatgtaaataaaattgagttctcatttaaaaaaaaaa

SEQ ID NO: 51170 - DNA, 2239 bp, Homo sapiens
cctcgccgcatccactctccggccggccgcctgcccgccgcctcctccgtgcgcccgccagcctcgcccgcgccgtcaccatgagccaggcctactcgtccagccagcgcgtgtcctcctaccgccgcaccttcggcggcgccccgggcttcccgctcggctccccgctgagctcgcccgtgttcccgcgggcgggtttcggctctaagggctcctccagctcggtgacgtcccgcgtgtaccaggtgtcgcgcacgtcgggcggggccgggggcctggggtcgctgcgggccagccggctggggaccacccgcacgccctcctcctacggcgcaggcgagctgctggacttctcactggccgacgcggtgaaccaggagtttctgaccacgcgcaccaacgagaaggtggagctgcaggagctcaatgaccgcttcgccaactacatcgagaaggtgcgcttcctggagcagcagaacgcgctcgccgccgaagtgaaccggctcaagggccgcgagccgacgcgagtggccgagctctacgaggaggagctgcgggagctgcggcgccaggtggaggtgctcactaaccagcgcgcgcgcgtcgacgtcgagcgcgacaacctgctcgacgacctgcagcggctcaaggccaagctgcaggaggagattcagttgaaggaagaagcagagaacaatttggctgccttccgagcggacgtggatgcagctactctagctcgcattgacctggagcgcagaattgaatctctcaacgaggagatcgcgttccttaagaaagtgcatgaagaggagatccgtgagttgcaggctcagcttcaggaacagcaggtccaggtggagatggacatgtctaagccagacctcactgccgccctcagggacatccgggctcagtatgagaccatcgcggctaagaacatttctgaagctgaggagtggtacaagtcgaaggtgtcagacctgacccaggcagccaacaagaacaacgacgccctgcgccaggccaagcaggagatgatggaataccgacaccagatccagtcctacacctgcgagattgacgccctgaagggcactaacgattccctgatgaggcagatgcgggaattggaggaccgatttgccagtgaggccagtggctaccaggacaacattgcgcgcctggaggaggaaatccggcacctcaaggatgagatggcccgccatctgcgcgagtaccaggacctgctcaacgtgaagatggccctggatgtggagattgccacctaccggaagctgctggagggagaggagagccggatcaatctccccatccagacctactctgccctcaacttccgagaaaccagccctgagcaaaggggttctgaggtccataccaagaagacggtgatgatcaagaccatcgagacacgggatggggaggtcgtcagtgaggccacacagcagcagcatgaagtgctctaaagacagagaccctctgccaccagagaccgtcctcacccctgtcctcactgctccctgaagccagccttcttccatcccaggacaccacacccagcctcagtcctcccctcacagcctctgacccctcctcactggccatccctcgtgggtccccaacagcgacatagcccatccctgcctggtcacagggcatgccccggccacctctgcggaccccagctgtgagccttggctgttggcagtgagtgagcctggctcttgtgctggatggagcccaggcgggagcggtggccctgtccctcccacctctgtgacctcaggcactagcctttggctctggagacagccccagagcagggtgttgggatactgcagggccaggactgagccccgcagacctccccagcccctagcccaggagagagaaagccaggcaggtagccagggggactagcccctgtggagactggggggcttgaaattgtccccgtggtctcttactttcctttccccagcccagggtggacttagaaagcaggggctacaagagggaatccccgaaggtgctggaggtgggagcaggagattgagaaggagagaaagtgggtgagatgctggagaagagaggagaggagagaggcagagagcggtctcaggctggtgggaggggcgcccacctccccacgccctcccctcccctgctgcaggggctctggagagaaacaataaagagattcacacacaagcca

SEQ ID NO: 51171 - DNA, 117 bp, Homo sapiens
cggtgtctgttgccaggcgcgggcccagtgggccgtaagtcgacattgttgccgtcgtctttccccccccagtcccggggatggagatgtcgggactcagcttttcagagatggagg

SEQ ID NO: 51172 - DNA, 1375 bp, Homo sapiens
ggtgaaacaggatttaaatgcaaaaaaaacctattggaggcttttggcaccgtggctcactagagggacccagcatagtagaggtttctcttgttgcagcttctgaaaagttcaaaaaagaactccaggccgttcttccctcaaacccagtgagagtttgcagagaagtgccccctgcagggctcccgtcccagaacaccagcaccagagagggtcttcccgatgccccccgctggacttgcccaagcctctgggagcccctcatctcagatccctgtgttgaacatgacactgactgtcccttatttgttaaaatttgcaatatctctcaagtaaataatagccaacatttgttgaatgctttcatgactcccggggttaaggcctttatgagcgttgtctcaaggggccccaacagccatcccacagggagggggataacagcccccatttatagataagggagctgaccggatgctctgagaagtggcaggtgttgaaggaaggataaagcagtgatgggccagaatccccaaggttcccttttttgttcatcaggcccttcctgagatgtgatttttaatcttttaactttttttaattaatagcaatgcgtggcctcatatttctatgaaccatttagtgatactcccgcttcctgcatgccacacactgtgctgggaattgctcatgggttgtcctgtttcatcttctccgtagccctgtgagatcggcaatattagtccccctacagccaaggaaactgcccagagccacacaactcttgaggggcgaggagggcttgaacctgagtctgcccagctccagaactgagcttgcagccattagccacagctgtctcctgcatgtctgagcaaagaaaggcctttacacagcatcaccctttgccatcccatgcaccgtgggactcagctaaaggactgtgcaaagagggggctcctgagttggatttaggcaaaaggggcagaattcgtttgatttttagagaaaatctctggagagtttcttttgattcatagaattccttttagatttctttccagcataccaactagctttagtagtgctgctacaaccagctcttataagtaagagtgaaaaagtattcttttcttctttaaaaaataagtttttcttgcttatagttaattctagaaaggcaatactaaaggtatatatttttttcaaaatgctattttttactgcacttgataattatcctgacagctctgatctctgtaatagattcactcttcagctctgggcagaaccagaggcagggttcacaccaaatttgtaaataccatatgtgggtctggtgtccaggaacttttttctttctgttaaaaaaaag

SEQ ID NO: 51173 - DNA, 1393 bp, Homo sapiens
ttttgtcttttaacctacacctttatcattactctaacagatttagggcttctctttctctacagctaagtaagggaatatgtgcaattatgagacatacaaaaaaggaaagggaaaggactttctaagtagcaaatctgtgccatgaagtagatgtggcgtgaagatacagagcctgaggatagtaattttccctgagccacgcacacaggcttttatttcatgccttttctctttctgtgccgtcacctttgaggaaaaacgattgcaccttctccaagtctggcctttttaacagctacagttaagttgggccaaggactttccccagctctgaatatagccatttgccgactccggcctctttgcgagactgactcaaatctgtgatcttctgttcagcatacacatcagcaaagtgagaagatgagcactaaatataggctctattaactttacttttagatttactgccttcaaaaagtgcctattctgagcaacataaacgttattccttacatatgtatgtacacacggtacccagagtcgtactgtgcagccttcaaaaacataccatcagaaagagtaggtgctgagataaggaaactttgccaaatgaaagaaagtcactcacttccaatatcccctctcaagcggctaccgtgaaacgggctgcaaacacattccctgagcatcccttgctgatacagcttctttatatttatatcctactggatggtagcatattgctaaggtttcctgtactctgcttcaagggaatgtaagctttatggcattgaaacatttaggaaaaaaaaagatgtttaagagaattaatagagccgtagtctgtattaggatgtgtgtcatatgtgtgttctataaactaagcatcggtgggtttagagtgttaaagtgtcagcacattccttctccttttgtctctcaggctaacatgagagaaaatagaaaagtcttggctgtggggattggaagctcagggggccaaatgtccttgccagatccttagagcattactttgactcctaaaaatagtagtgtatgttatttgatggcttttgtttccatagttccatcactgacaaaactgtcaatactgttgatggagcagtagcatagcctagagtgatgcattcttacccagaggtggcaataggagagggtccatgtaaataggacgaggtagacagtgcatgattgtaggagaagggttgaagggaggacatgattccaaaaaagatcgttctcaatgtgtcgtcttgactcaaccagctgggcagatttacacttgccaagtcgtttcccttttccttcttaagttcagtttggctccatattccacttggattatggcctttgttttggggcaaag

SEQ ID NO: 51174 - DNA, 504 bp, Homo sapiens
  misc_feature (1)...(504): n = a,t,c or g
tttgctattggagaaagcaaacacagagctttcctggccttccaaagaagatagccaggaaaaaattaaactacctcctgaaagattcttccagaaaccagtgtctggcctatcagtggaacaggtgaagtcagaaacaatctcctcttctgtcaaaacagcccatttcccggcagaaggtgtggaacctgcattgggcaatgaaaaagaagcacacaggagcacacctccttttcctgaagagaagccattggaagaatcaaaaatggttcagtcaaaggttattgatgatgctgatgagggaaagaaaccatcacctgaagtaaaaatacccacacaaagaaaacccatctcctcaatccatgcaagagagcctcaatccccagagtcacctgaggtgnaccaaaatccacctacacaaccaaaggtggctaagccggaccttcctgaggaaaagggaaagaaaggaatttcatctttcaaatcgtggatgtccagcttgtt

SEQ ID NO: 51175 - DNA, 688 bp, Homo sapiens
  misc_feature (1)...(688): n = a,t,c or g
ctccatctaaatggaatatttctatttttaaggaagagccaagaagtgatcaaaaacaaaaatcactcctttcatttgatgtagtagataaggtgccacaacagccaaaatcagcttcctccaactttgcaagtaaaaatatcacaaaggaatcagagaaaccagagtcaattattttgccagtagaagaatcaaaaggcagtttaattgatttcagtgaagacagactcaagaaagaaatgcaaaatcctacttccttgaaaatttctgaagaggaaacaaaactcaggtctgttagtccaactgagaagaaagataatttggaaaacagattcatataccttgggcagaaaagaaggtgctggcagaaaaacaaaactctgtggccccattagagcttagagatagtaatgaaatagggaagacacaaattacacttggatctagatctactgaactgaaagaatcaaaagccgatgctatgccacagcacnttctatcaaaatgaagactacaatgaaagacccaaaatcattgttggttctgaaaaggagaaaggtgaagaaaaagaaaatcaggtatatgtgctttcagaaggaaagaagcagcaggaacatcagccttattctgtgaatgtagccgagtctatgagtagagaatcagatatctctttaggtcattctttggg

SEQ ID NO: 51176 - DNA, 682 bp, Homo sapiens
  misc_feature (1)...(682): n = a,t,c or g
ctttcaatggggtaactttttcatcttctaacctgctctttaatgttttatgacaagcaactgtttcactatcatcagggagtggtatggttttaaatgaggctttctcttccaaatattctaatttatcttgcatttgttcactttcttcctgatcgattgaagaaataaaggccggagcatgaatattcaatatctcacagccttcagaaatgatactaaaggcagtcttctgatcttctgaaagtccggctggcttactagtcactgtaaagtcttcaccttttgcatatgtgtcttcaggttccttgggcatttctttattagaaaccattttatcagcattgcttgctgatgtattagatataaattgagcatagttgctttttgctgaagacagtggttcctttacacgggtatcttccgcagcctccaagtggtgctttgaaacaagaacagattgtttaggcacatcggatgtgtcatctttagatgtctgaatagtatgaactgtatgccttctggagtcaattctgatcgtggcatttcttttttcttcactgcgttaatttcggagaagctccgaagcaagagtttgtggttttacaggtgacagcaaatatgggcggtgtttcgagcnctagtttcatccaaaggacgagctaagtccttcggattctta

SEQ ID NO: 51177 - DNA, 543 bp, Homo sapiens
ttttttatggaaagttttatcaaagctaaaatttatttggtgcatactcctcttgatatcaggtatgttcgcatatacctttttctttcatgtgtaaaaacaaccatgtgaggtattttacaggtcaaaagaaaacaaaaactacttccttattcagtgtaaaggaggcttataagcattccaaaataaaaacaaacaaaaaccagacaagtacatagtctatttccatttccttttatacatcctctctatatatcacacatttagcaataggagaatagagaactaattcaaatgcaagggaatcttttttgtagattctgttgacagatgctctttaacctaaacattttctactctaaacataacggacttaattgtcttcagtacgtgaaataattttaaggtgatctagtactttgaaaatttcattcacttaagaacacttaagctgaaaaatagcactatttttcagaggcaatttctcaacagaaaaaggcaatggtaacagttcaattgatggaaatggttgaaataaaatac

SEQ ID NO: 51178 - DNA, 575 bp, Homo sapiens
tttttttttttacagaagtaaagtttattacatttgaaacaatacagcagaaacctcaaaagtttactcataaatatagtttaattcttacaaatcttcttttgaaaatgcaattcatatatgctgcaacctcagaagtttgaatttgaaatgaaatatgaaggtagtagtcagggaagtcacatcagagtgccttgtcaaatatccaaacaaatcagcacatacctcttccttgatacaggaggaaaaaagtgattctaaatatatccaagtgaatgcagaaaaatacattactatttgaggcagaccatgctaaaatataatttacaatgattagtttgcacttaagatggttaataacgcatttaaaccaatgaaatgaaggttaagttgaattttgtagtatttgctcagtctctgtactaaacaatagttcatctgaaaagtttggaaaaagcaaataacctgatacttctctttatgcttatcattttctcactgtcatcttgatgctgtattgatttgtttgcatttaagatgacagtgagaaaatgatacttctctttatgcttatc

SEQ ID NO: 51179 - DNA, 1083 bp, Homo sapiens
  misc_feature (1)...(1083): n = a,t,c or g
gcctcttgnaaacttgaaatgaaaacattctttcaaatctgagcaatagaaagcacttggaaaggtcnttttttttttttttttttttgacatgataaattcagcctcactgtagtccagagtgagaattagaacataccaacttccaatctgcctaaatgtgacagcctctgcccaagactggctcactgaggcgtcttggctactggatgtaaacaaaaaatgcaatatccgtgcctcccagttctttgaaggaatcaattcatccttggttatatctatgctggaaaactgtgggtgtcctttggataaagcatacaggagttatctaccaggatttagatttggtcccttctgtaaatattagcctgaacgttgagttctgtgaacatgaattcttttcgaattccattacaatgcagggcagggttttggtgtcaattttttaaaatcaaaatcacctactaaattagttattttggggggaggatctagacacttgatgattctcagtgaccagatccaggctcagggctgaagtcagcataattcttgagcaagaaaaaggtgattccttcttccacaaagccattccttctcctgagatgccatcttctagagaggtgactaacaggctctgagtgggggttttattatatgggtttttgtttcctggaatgagtaacaaatgtttcaagaatacatcatttctcttaaaaaaaaaaaaatcaacctatgtgtaaaaagagacatttaaaaagatttctgaccatttataaatataaatctaattccaacaggggtgtaatattttgaggacaggtaaaaagcataaaaatacaggtaagaaaataaaatttaataacatactaatctggattgctatacatattatcaagcagcagcatctttgtacaatacaggaagacttgcaaactttggaaatatactacattcagcaacacggtagacctgtcagagtgctacatatttacattaacttagatgtagcagtgcaaaccttcactcaactgagatccttctaacacacgtgcaacacacccatctttaccatttagacac

SEQ ID NO: 51180 - DNA, 988 bp, Homo sapiens
gccgtgctaggcagagtttactttctcgcgtttcccaaagtcgtgtgcaaggacgtgggtggccccagccaggtcaggccgcggtcccttcccaggcccaccctcagtaggtctgcgtctgcgtgtggatgacgcgcggggtctgggacttctgggtcccctgcatcacctggacctccagccgccggcgctgctccttctcgctcttcagctcctcccagatgtcggtcagcttcctctccagctgcacctccatcagctccagcgccctccttagagactccacctcgcccctcagcgacgttacatcaactccttcattcttgttttccgtgtagttttgcgggaccagcgaggggagcgcgagtcattcttgggagtctggaggcggcttgataggacgtgttttttgggcaaaggctctttctatggggggcacctcctcttttggagccacttccctctttagggggcaattcctctttcagggtcacctcctctttggaagccactccctctttggggagcacctcctctctcagaggcctctgcctcgttggggggcgcctcctcttcaggggtcctctcgtcattggaaggtgcctcctctggaagggttgtagcctcttcgtgggggtggggcttctcaaagggcaggcctggatgctggcccagactttcaactcagcctggcgtggggagctgtccccttctaactagggtacatttcatctctcccaggcacctctctgaggaaggaggctggggtgggggtgcctctggcgtgtgggcctcctcctgggatgatggatcctctttggctacaaagtacttgaccttctgcagggcttcctccgaagagaagtgatggaattgaatgtcatctctggtggacacctcttcttcagaaagctctggggtcaagaccttttctagagtgggggcctcatcccccagaggggccatctttggattagggactttatcc

SEQ ID NO: 51181 - DNA, 666 bp, Homo sapiens
  misc_feature (1)...(666): n = a,t,c or g
ggaagaggcggactaatagccagagttaaatataaatncaanttaataatacatagagaacagcaataccagaaaaaaagaattctggtaaaatgatgtgaaaaattgacagctccctcactcttaaggttgttgctatatacagtctaggttttctgtttggaaataggtagggtaaaatctaagacctgcacaagggcagtgagagacatttacagcctcctctctatttgtttttttaaggaaaagtcaactcctgaaatgtcccttagctataatcagaaactaagaatattatctgtggcaccatgtatttatggagagaagtaaaaataagttccacagcaacacatttacatgaattatgaactaggattcttggatttcataatcactccaaagctttttggggatggtgtgtgtgtgtgtgtgtgtccgtaattgttcatcattactttttttaacctatctttttgcttgcttaatcttctctgccccagttcttcctgagtatatgaatttgatttctaaaaacaatttattcaacactctatcacccgtattctctctctggctctgctgcaggtctctgcactcctgattttgctccatacttttaaataacaataataaatatacagttttcatttctcatttaaaaaatag

SEQ ID NO: 51182 - DNA, 460 bp, Homo sapiens
gaatgaacaaaagagcttacatttattgagcatgcttgtgctaagccctgggctggcctttgtttcattggcacaacagccttgagaggttggtccattatcacccctcagttcaggtaagtggactgaggctgagagaggtgcacgggtttgtcagggtcacatagcacatgaggacagagccagaccaggagccctgtgacatcctcggccaggatgctaaccctaaggacagtgaggtcactcttcacaccgctgtgaagggagaggctattgctctgcacccacagctcagcaatggggaccatgaacgcctctaggcagcccatgtatggggccgctacctacctggtaactgtccacggctgtccatttggaagagatattgatgtgtttgttttctcctccccagcctgtgggctcctggagccaaaggaccccacctaattcatcactaggc

SEQ ID NO: 51183 - DNA, 602 bp, Homo sapiens
ccgggatatctttggagttatcgggtccacctcagcccccagcctcatcttcatcctccccagcatcttctacctccgcattgtaccctctgaggtggagcctttcttatcctggcccaagatccaggccctgtgctttggagtcctggggagtcctcttcacggccgtcagtctaggctttatgtttgccaactgggccacaggccagagccgcatgtttggacactgatcaggccctgctggcccaggtccctgtgcgcatgcacatgcgaggggtcagggccgctccctagggtccctcctgcccaacatgtggaggtggctggttcccatgaacgtggttgtcagaggcgggggacagcagaggctgcagactggcccacttccctcctccccagggatgccaagcttggatcatggccctaatcccaaccccaaccccatgggaggaggaggaggaggaagaagaggaggaggaggaggaggaggaggaggaggaggaggaggccaggtcctggtggagcctttgcccagcccagtcctctctgcctcctcctggctgaagctgtttgtcaggattaccctcgggctaaagaggaaa

SEQ ID NO: 51184 - DNA, 524 bp, Homo sapiens
ggagatgtcctcggagaccattcttgctatgacaaggcctgggagttgtcccggtaccgcagtgctcgtgctcagcgctccaaagccctccttcatcttcggaataaggagtttcaagagtgtgaaagagtgcttcgaacgctcgattgagacaaatcccatgcagctcggggtgtggttttctctcggttgtgcctatatggccttggaggactatcaaggttcagcaaaggcatttcagcgctgtgtgactctagaacccgataatgctgaagcttggaacaatttgtcaacttcctatatccgattaaaacaaaaagtaaaagcttttagaactttacaagaagctctcaagtgtaactatgaacactggcagatttgggaaaactacatcctcaccagcactgacgttgggggaattttcagaagccattaaaagcttattcaccggctcttgggacttacgtgacaattacaaaggtgttcaggtccttaaaattctagtcagggcagtgattgatggg

SEQ ID NO: 51185 - DNA, 405 bp, Homo sapiens
caacattatgttgtcagtaagtaataggaatctttcagctccctaataatcttaacgggaccaccatcatatatgtggtccatcattcgaccaaaaacatcattatgtagtacatgactataccttgaatttcgatcttttcctaggctagtgatatgcagtacatgagataatcaatgcttccttacaaaatgggcttatgttagaagacttttgcccagctgcaggctattgtaagtgttctgagcacatatgagataacctgggccaagctatgatgttcgatacgttaggtgtattaaatgcacttttgactgccatctcagtggatgacagccttctcactgcagcagagagatcttcctcactgtgccagtggcaggagaaagaacatgctgcgactgg

SEQ ID NO: 51186 - DNA, 796 bp, Homo sapiens
gacccacctttgtttcctagtgagaaccgagtcagtgctcttacccagatggaatctgcctgtgtttcaattcacgaagctctgaagtctgtcatcgattatcagactcatttccgtttaagagaagctcaaggccgaagccgagcagaggatctaaatacaagagtggcctattggtcagtaggagaagccctcattcttctggtggttagcatagggcaggtatttcttttgaaaagctttttctcagataaaagaaccaccacaactcgtgttggatcataactacgttttgagaattgatgcaccattgccactgtaatattgctgtcctctaattaattttaggtactgaagaacttaatattggcaacatttttaaatccttactcatacacttgttgggagggatgtacaatgcatattcccaaactgtggaaaggacacctttttttatttgtaaaggtggaaaaactttggaactcattttgggctattcatgttaaatattcaacaccaatgatctactctgttcgcagttgtttatatctactcttcgcacactaaactttggtattttgattccttttaaccatttaagactacttttcttataggtagttgatattttaaaaaccttagatttaatgtctacatgtgttagggaggaagaaaattgccttttaattgttaataagaaaaccaaatgtgatgaactgtagcccaagccctattctgcactgttcagttttatggaggaaaaataaatctaccataggaatgttaaaaaaaaaaa

SEQ ID NO: 51187 - DNA, 554 bp, Homo sapiens
  misc_feature (1)...(554): n = a,t,c or g
tttttttttttggcttttccaaaattcccttctttcaccattttgagttgaaaagtcaagataaatatttatgctgtataataacccacctctctgctacagcaaccacaaatgtcacaggttcctaaagcctccaagaatatttgttttacagcaagaagtagttgctttttctaaaaaaaacacacaattttctcctccaggatagacaatgggtaaaaatctagctgttaactactagccagagttatgggaaggaaaagaatccctcctttttctctcaaccagttttcctttctaacccacttcctttgccaactgctgatgaggcatgtctaattttgcagagtgatactagaacagtgagagggcactgccagctccttcttccccggtccaaagcacctccttccctgaaacacaaccttacaactgcaagtattaggatgttcacagcggaggcaagcctttagggaggattattttttaaaatggacccaaatattacaccagttagggaggaaaacttcttggaaaaanggctctgttatggc

SEQ ID NO: 51188 - DNA, 394 bp, Homo sapiens
ggcaacagcagttgaatgagttcagggagaaaggcataatctacaacatgatactttctcacttgcttcacctctgtgcccacacctgtgaaggcctcggcccagcttcgacaactgctttgcctcaaactcagctttctaccagcagacaggacggcattactgttacgggaggccctgaagtctgagccagggccatggaggcctctgtgctgagccccacatcctgggagaaacggcgggcctggctccgtcagagccgtaactggcagacccaggtcctagaagaggaggctgccgccgccctgcaggatgtcccagatcctgagccttccagcctggatgacgttttccaagaagggaatccaatcaataaaattgaagactggctgca

SEQ ID NO: 51189 - DNA, 1563 bp, Homo sapiens
atctcaacaacgagttaccaatacttgctcttgattgataaacagaatggggttttggatcttagcaattctcacaattctcatgtattccacagcagcaaagtttagtaaacaatcatggggcctggaaaatgaggctttaattgtaagatgtcctagacaaggaaaacctagttacaccgtggattggtattactcacaaacaaacaaaagtattcccactcaggaaagaaatcgtgtgtttgcctcaggccaacttctgaagtttctaccagctgaagttgctgattctggtatttatacctgtattgtcagaagtcccacattcaataggactggatatgcgaatgtcaccatatataaaaaacaatcagattgcaatgttccagattatttgatgtattcaacagtatctggatcagaaaaaaattccaaaatttattgtcctaccattgacctctacaactggacagcacctcttgagtggtttaagaattgtcaggctcttcaaggatcaaggtacagggcgcacaagtcatttttggtcattgataatgtgatgactgaggacgcaggtgattacacctgtaaatttatacacaatgaaaatggagccaattatagtgtgacggcgaccaggtccttcacggtcaaggatgagcaaggcttttctctgtttccagtaatcggagcccctgcacaaaatgaaataaaggaagtggaaattggaaaaaacgcaaacctaacttgctctgcttgttttggaaaaggcactcagttcttggctgccgtcctgtggcagcttaatggaacaaaaattacagactttggtgaaaccaagaattcaacaagaggaagggcaaaatcaaagtttcagcaatgggctggcttgtctagacatggttttaagaatagctgacgtgaaggaagaggatttattgctgcagtacgactgtctggccctgaatttgcatggcttgagaaggcacaccgtaagactaagtaggaaaaatccaagtaaggagtgtttctgagactttgatcacctgaactttctctagcaagtgtaagcagaatggagtgtggttccaagagatccatcaagacaatgggaatggcctgtgccataaaatgtgcttctcttcttcgggatgttgtttgctgtctgatctttgtagactgttcctgtttgctgggagcttctctgctgcttaaattgttcgtcctcccccactccctcctatcgttggtttgtctagaacactcagctgcttctttggtcatccttgttttctaactttatgaactccctctgtgtcactgtatgtgaaaggaaatgcaccaacaaccgtaaactgaacgtgttcttttgtgctcttttataacttgcattacatgttgtaagcatggtccgttctatacctttttctggtcataatgaacactcattttgttagcgagggtggtaaagtgaacaaaaaggggaagtatcaaactactgccatttcagtgagaaaatcctaggtgctactttataataagacatttgttaggccattcttg

SEQ ID NO: 51190 - DNA, 330 bp, Homo sapiens
ccctgggagataggtattcttttcatccccactctagagatgaagacactgagccctgaggtgttaacttgctccaggttgcatagtaagtggcagaggcaggactgatacataagcaggctgacccagggcccgcactctcaacccctgccccacactgacccaccccctatcttgtcagccataccggtggctccaccaccagaccagcccaccccaatcccatccccatgcgcactgaggaatcagacttcctctcagcttcttgtggcctttctagaacaaaaggatctacaactgcatgatgatctcttcaagaagagtgatctc

SEQ ID NO: 51191 - DNA, 198 bp, Homo sapiens
  misc_feature (1)...(198): n = a,t,c or g
gtaacagttactgaaagagctgagaaaaagaacaatgaacagcaacgatcttgactgtgcaactcagacattcctgcagaaaagacatatgttgctttacaagaaggccaaagaactatggggccttcccagcatttgactgttcattgcatagaaatganttaaatatccagttacttgaatgggtataacgcatga

SEQ ID NO: 51192 - DNA, 2224 bp, Homo sapiens
ccaacagagccattggagagaaaagagctgctccagactctggcaagaagcccaagactccaaagaaaaagaaaaagaaagatcccaatgagccacagaagccagtgtcagcatatgccctgtttttcagagacacacaggctgcaattaaaggtcaaaaccccaatgcaacctttggagaggtctcaaaaattgtagcatctatgtgggacagccttggagaagaacaaaagcaggtatataaaaggaaaacagaagctgccaaaaaagaatacctgaaggccctggcagcatacagagccagcctcgtttctaaggctgctgctgagtcagcagaagcccagaccatccgttctgttcagcagaccctggcgtcgaccaatctaacatcctctctccttctcaacactccactgtctcaacatggaacagtgtcagcatcacctcagactctccagcaatccctccctaggtcaatcgctcccaaacccttaaccatgagactccccatgaaccagattgtcacatcagtcaccattgcagccaacatgccctcgaacattggggctccactgataagctccatgggaacgaccatggttggctcagcaccctccacccaagtgagtccttcggtgcaaacccagcagcatcagatgcaattgcagcagcagcagcagcagcaacaacaacagatgcaacagatgcagcagcagcaactccagcagcaccaaatgcatcagcaaatccagcagcagatgcagcagcagcatttccagcaccacatgcagcagcacctgcagcagcagcagcagcatctccagcagcaaattaatcaacagcagctgcagcagcagctgcagcagcgcctccagctgcagcagctgcaacacatgcagcaccagtctcagccttctcctcggcagcactcccccgtcgcctctcagataacatcccccatccctgccatcgggagcccccagccagcctctcagcagcaccagtcgcaaatacagtctcagacacagactcaagtattatcgcaggtcagtattttctgaagacgcatatggcagacggatttgcgtataccaaggagagtggcataggagggaaaagcatatgtggctgaaacctgtaagttggtgttggttatgcagaaatgtgtaacagatcaaacggtcctctcaagtgtctattagataggcaataagaactgcagtgtagctgagtaacatcttttagctgactataaatcactttgtttttaaacaagaaaagctgtgctcttttatgtgatgccttttttatttattcaggctatacctacaatatgtgaatcaaactgtttaatgaatcctgggacatactgatgactataaactggcctctctgagtcatagaaaaatggccttatttctccagaagtgagtaaaccacacttccaggctatctgaactcctgaagccctaaaaataaaaagcacagttgtaactacctgaaatatgaagatccagtttcatacaaacatttgtatgacgtgaatagttgatggcatttttttgtcatgaaaaaaataatgtaaatcacagacttttgccaaagctcttattttttttcctaaatctctccagaaaaaaaaatgcaagtgactaaattcaattattgactaatttccactttttatccatgacttctccaaatcaaaccacagtatatgttgtaacaaatatctatgaccactgttagcccattatattcattccaattagaagaaaagaaatgtgaatactatattccgtgttttgagtgacaagtttcgaaaaataaaaacactgtatttttaaaagggaaatgcacttaaatgaaaacagttattaccaaaagttaaggatttaaaaaggaaaagcaaggagtttttattatggatgtaataccagtagaatatttaaaaggcacaccacatctgaataatcaatgtaaatattttctttcaaagttgtaagttttcatatcatgtgctgtaaagttttcctaaatgaggctttaacgtaaacactggtgacataaaccattcattgctacgttgcttattgtgtttttatgctgttttatacttttttatgagttatgatagcagcaattaagttgtttgtattttgcttaactaaaacaaaaatgcttttatcttgctatagaataaacacatttcagtaaaaaaaaa

SEQ ID NO: 51193 - DNA, 998 bp, Homo sapiens
tttttttttacctttctgaagaaaaaactttttatgacttcaatgacatgttatttttaagcagcagcggaagtcttaaacacctttacatgcttcgaaatactgttgatgatctgattttcaatactgtattgggtgccattaaagagaccattgttctttgaatcagtctctgtgttgctgtgggaaacacggtaaggcagaagcactagaatcatggaggcaaattactgaaacactgtgatactgaaatactgctggcttctggaataatcttctgacatgtggaattagacatctgaagtgtcgctccaatcagtcacagttactaagctgctttttaatgtgcttgattcattttcttgaagtccttctccctttggccccttaggattaaatgcgccccaggcatttagcacatgagcaaaatgtggttcatttttcgcaggtggaggttccttctgttctttcccagatttttttcccaaagatatctcttcctctagggatgatatgtcccagtcttcatcctccacatccgcacactttagttcttgtaattcttcttttttgataaacatctcagggacattagttccaccgactggtttgttcacatttttgcgatgtggaaacatcttttcaactttttcagtaggtgttttaacggcgactcctgcggggcttgggagaatcatcagtgtcctcgatttcgcttccctcggtcccgtccgcgtcacttttcactgtgttcttcccgaagctgcccttgttttgtggtggcggcacaggaagtgggcctggggatgcgtatgcccggatgaggtcgtcgtcctcctgctcctcctctgaactaaaaggaggggtcctacacaaatcaacaccgagataggggcgctgttttcgtaacgctttaggatttataatattaagagatgtgcctcttaaagtggtggcacctttctcaggtaattctcacgtggacaagtcctttgggc

SEQ ID NO: 51194 - DNA, 385 bp, Homo sapiens
  misc_feature (1)...(385): n = a,t,c or g
gagctgtgacacgcaggcctctgaggccagggtcccaaagaaagggcccgtctctctggggctggccacaggggccagttgtccctcctgcgccatacatctgtgcctgctggctggagggacaagctgtggcgcccgagcccagccgttccccttccctggcattttcccaaaggaagggcccattcgtgcggaaccccagcagccagaaaacctgagtagctgacgtcctgggcggagggagctgcaggagtcggagctgccctgatggattggcggggggaagnagcacaggtggggnggatatgccagcacccccctagactgatgtgagcttaggggtcccacctcataaatgaggggnggcaatgcccagactctctgg

SEQ ID NO: 51195 - DNA, 1878 bp, Homo sapiens
gcgttaatatgaggtctatccaggaaaatggtgaactaaaaattgaaagcaagattgaagagatggttgaaccactaagagagaaaatcagagatttagaaaaaagctttacccagaaatacccaccagtaaagtttttatcagaaaaggatcggaaaagaattttgataacaggaggcgcagggttcgtgggctcccatctaactgacaaactcatgatggacggccacgaggtgaccgtggtggacaatttcttcacgggcaggaagagaaacgtggagcactggatcggacatgagaacttcgagttgattaaccacgacgtggtggagcccctctacatcgaggttgaccagatataccatctggcatctccagcctcccctccaaactacatgtataatcctatcaagacattaaagaccaatacgattgggacattaaacatgttggggctggcaaaacgagtcggtgcccgtctgctcctggcctccacatcggaggtgtatggagatcctgaagtccaccctcaaagtgaggattactggggccacgtgaatccaataggacctcgggcctgctacgatgaaggcaaacgtgttgcagagaccatgtgctatgcctacatgaagcaggaaggcgtggaagtgcgagtggccagaatcttcaacacctttgggccacgcatgcacatgaacgatgggcgagtagtcagcaacttcatcctgcaggcgctccagggggagccactcacggtatacggatccgggtctcagacaagggcgttccagtacgtcagcgatctagtgaatggcctcgtggctctcatgaacagcaacgtcagcagcccggtcaaccctggggaaccccagaagaacacacaatcctagaatttgctcagttaattaaaaaccttgttggtagcggaagtgaaattcagtttctctccgaagcccaggatgacccacagaaaagaaaaccagacatcaaaaaagcaaagctgatgctggggtgggagcccgtggtcccgctggaggaaggtttaaacaaagcaattcactacttccgtaaagaactcgagtaccagggcaaataatcagtaccatcccccaaacccaaagcctgcccagaataaggaaaggaccggacttcgccacagctgaactcctccactttttaggacaccaagactacccattgtacacttgatgggatgtatttttggcttttttttgttgtcgtttaaagaaagactttaacaggtgtcatgaagaacaaactggaatttcattctgaagcttgctttaatgaaatggatgtgcctaaaagctcccctcaaaaaactgcagattttgccttgcactttttgaatctctctttttatgtaaaatagcgtagatgcatctctgcgtattttcaagtttttttatcttgctgtgagagcatatgttgtgactgtcgttgacagttttatttactggtttctttgtgaagctgaaaaggaacattaagcgggacaaaaaatgccgattttatttataaaagtgggtacttaataaatgagtcgttatactatgcataaagaaaaatcctagcagtattgtcaggtggtggtgcgccggcattgattttagggcagataaaagaattctgtgtgagagctttatgtttctcttttaattcagagtttttccaaggtctacttttgagttgcaaacttgactttgaaatattcctgttggtcatgatcaaggatatttgaaatcactactgtgttttgctgcgtatctggggcgggggcaggttggggggcacaaagttaacatattcttggttaaccatggttaaatatgctattttaataaaatattgaaactc

SEQ ID NO: 51196 - DNA, 398 bp, Homo sapiens
tttcaaaagtctatacccagacgttttatttatttattttttttaaatcaaggcgtccctgcccgtgacggaaaggctgtcactaattcctgccaagaacagcccaactgttttccaaggaccaccccggccactttcaccagactgcagcgtagatgtgctattacatttccctctacctttgtcagtgctgtgccactgtagaccccaccctgaccgccctcctccacctctgggctgggaggcagggtcctggtttcccaaagattatcatttacttcctgccaggaccagcctggcttccttcgtaccgaatacgctaagagccccatttcctatgttccagatgacatcacaactcactcactaggttattaccctttgatgacatttcaagc

SEQ ID NO: 51197 - DNA, 657 bp, Homo sapiens
gggaaggtgttgggtaggaagagtcacatttgacagaattcataaataatgtgtcctgaagtcagaggatgactgcaaagaaacacctcatgattccattaaatataaagagataaggagcaaggaggaaaaaagagaaagaattggtctttatttttcttgctaagaactctctggagtattgaaagacattgaaattatccctaaaattgtcacaacttttgtgaatactggtatacggttggaggtgtttttaaatctttatttcctctctttctttgttctagtgacttgtcttgctttaagattttttttaaagaattgttttattcaacatatatcaagttcttatggaatgccagtcatggtactagccccttgggatgtagtggttgagtgtgttcaatggaaacagccccagtatacaaagacagttcactctggtgtgctgtaggattggaaagggagtggtaccagatgaaaatgaaaccctaaagaagactgctgggccaatgagttgcttccttctcctccaccttaaccctctgattccagaattgcagtcattttcttctgccaaggaaatccattaaaaactgcagccacactgcaatttcctaatgtagaacaagatataaagtgccataaagacataaa

SEQ ID NO: 51198 - DNA, 275 bp, Homo sapiens
gaatgtaaagaagaactcatttacatgccaggagggtggaacaccccaattccatgaggataactgctcctgtactccagacctcaccccatgtgtctcttcatctggctggttatttgtcctttaagatctccttactcaaccagtaaatgtgtctttacattgttttagtcttgaactagaagatgaaagcatcaaataaagaaatatactgtgggtatatggattacaaaaaaagagatctgtggaagtttgaagttgagaatgatgaccta

SEQ ID NO: 51199 - DNA, 733 bp, Homo sapiens
ggcaaccttgccccccacccaagaagccctgccctccagccacagcagtccacagcagcagggttaagactcagcacagggccagcagcagcacaaccttgaccagagcttgggtcctacctgtctacctggagtgaacagtccctgactgcctgtaggctgcgtggatgcgcaacacaccccctccttctctgctttgggtcccttctctcaccaaattcaaactccattcccacctacctagaaaatcacagcctccttataatgcctcctcctcctgccattctctctccacctatccattagccttcctaacgtcctactcctcacactgctctactgctcagaaaccaccaagactgttgatgccttagccttgcactccagggccctacctgcatttcccacatgactttctggaagcctcccaactattcttgcttttcccagacagctcccactcccatgtctctgctcatttagtcccgtcttcctcaccgccccagcaggggaacgctcaagcctggttgaaatgctgcctcttcagtgaagtcatcctctttcagctctggccgcattctgcagacttcctatcttcgtgctgtatgtttttttttttcccccttcactctaatggactgttccagggaagggatgggggcagcagctgcttcggatccacactgtatctgtgtcatccccacatgggtcctcataaaggattattcaatga

SEQ ID NO: 51200 - DNA, 656 bp, Homo sapiens
ggctcgagataagaatggcccaaatccagaacattgacaacaccaaatgctggcaaggatgtggagcaacaggaactctcattcattgctgtgggaatgcaaaatggcacagctacttcagaagacggtttggcagtttcttacaaaactaaacattctgttaccatatgaaccagtaatcatgctccttggtatttacccaaatgagtcaaaaacttagatctacacaaaaacctatgcatgaattttacaacagctttattcataattgccaaaacttggaaaccaccaagaagtctttcaataggtgaatggataaactattcatctagacaatggagtattattcagtgctaaaaataaatgcactattaagccatgaaatgacatggaggaaccttaattgcatattattaagtgaaagaagccagtctgaaaaggctacatactatatgattccaatatgacattctagaaaaggaagaactatggcgacagtaaaaagtggttgccaaagaaagatcatgtcctttgcaggaacatggatgggggctggaggccatttatccttaacaaactaacattaggaacaggaaaccaatattccatgttctccacagtgggagtgaaataacatggacacaaaggaataacat

SEQ ID NO: 51201 - DNA, 345 bp, Homo sapiens
gaaatggtcctaattttgttgctaaaatagctcttttgttttcttttttggatagaatgtcaaaactggaccaatggggccaggctgaagtattgaactttctgctacgctaccaaccccgcagtgaggaagaactatttgacattctcaatctgttggatagtttcctcaagagcagtagcccaggtgtggtgatgggagctaccaaactttttctgatcttggcaaaaatgtttccccacgtacaaactgatgtccttgtgcgggtcaagggacctttgctagctgcctgttcttcagagagccgtgagctctgttttgttgctctttgtcatgtacgccaga

SEQ ID NO: 51202 - DNA, 2399 bp, Homo sapiens
ccaagatggccgacttcgatgatcgtgtgtcggatgaggagaaggtacgcatagctgctaaattcatcactcatgcacccccaggggaatttaatgaagtattcaatgacgttcggctactacttaataatgacaatctcctcagggaaggggcagcacatgcatttgcccagtataacatggatcagttcacgcctgtgaagatagaaggatatgaagatcaggtcttaattacagagcacggtgacctgggtaatagcagatttttagatccaagaaacaaaatttcctttaaatttgaccacttacggaaagaagcaagtgacccccagccagaagaagcagatggaggtctgaagtcttggagagaatcctgtgacagtgctttaagagcctatgtgaaagaccattattccaacggcttctgtactgtttatgctaaaactatcgatgggcaacagactattattgcatgtattgaaagccaccagtttcagcctaaaaacttctggaatggtcgttggagatcagagtggaagtttcaccatcacaccacctacagcccaggtggttggcgtgcttaagattcaggtttcactattatgaagatggcaatgttcagttggttagtcataaagatgtacaggattcactaactgtttcgaatgaagcccaaactgccaaggagtttattaaaatcatagagaatgcagaaaatgagtatcagacagcaattagtgaaaactatcaaacaatgtcagataccacattcaaggccttgcgccggcagcttccagttacccgcaccaaaatcgactggaacaagatactcagctacaagattggcaaagaaatgcagaatgcttaaaggctgaatgtaggattcttcagtatgtggaaagacaaggattcaacgtgtggtcatatgataaataagtgatttataaacaagagtgatattttgctagggctttcaaagttaaccggttttctagcctcatggaatactgttgaacctatagcgttgtcttgattcttttgtgttctctgccttgtaattttctgttactgctatatctacgtgtaaatctttttaaaaaaaattttttttttttttttggttaattctgccacatttaatgttggtgagagagtgatctatcctaatgacattttactgtttaaaaaagtttcctagccatgaagccctgctactgatttagacaaggtattatggtcattactttgtacccctatccttccaagcacttctggtacttcagtcgtttttactgatccaccaacacctaaagaggctatgctacagtctctagctaaatggaagacacattcatccttctccctctgactgctttgatcatcatttattgcatcgtcatatcatcatttattgcatctcataactaattttctaaagtttggattgggacttttcaggtcctttttggagggcaaaggaagtgccagcttctctggggaacttgtttttaaatccaaagacttgaaccacattccctgcacatgaacatgtttgcttttatcccttctctcattgtctccttcccatcttagtaccattgtagttataaacatctgcattttttagaagcattttacccatttatttttttaaacattcaagaactgctgacgtactgtggatgtagagtataaaacttgaaaaatgcagatgttgaaggaataataggtatcttgtgctttaatactttatggcaggattgtactataagcaaatgaattaaacagctatgtaaatcataaagaaaaactaaaaatgaaccaaagtgaaaggataacttccaggcagtatctttctattgtaacctgttatttaagggaaatactagtgatttcttctaaataggatgtaaaacttctttcaaattactcttcctcagtcctgcctgccaaggaactcaagtgtaactgtgataaaataacctttcccaggtatattggcaggtatgtgtgtaatctcagaatacacaggtgacatagatatgatatgatatgacaactggtaatggtggattcatttacattgtttacacttctatgaccaggccttaagggaaggtcagttttttaaaaaaccaagtagtgtcttcctacctatctccagatacatgtcaaaaaaagaaaggtgtttgtgcttccgttttgtttctgctcagtaatatagtcaagcaagtttgttccaagtgacccattgagctgtgtatgcatttttgtttatttcaataaaatatatttgtattatttgtccttcatactatccatccataccacactatcttctgtatcaggtagtctaatagaaatatacctgttttgttctaaaaaaaaaaaaaaaaaaa

SEQ ID NO: 51203 - DNA, 1213 bp, Homo sapiens
gttgatacccaatactgtaaaagtgggctgaagagttaccactaggtaaacacattaagctaaaaaatcaataaccactaactctagtttcagatgcacttctatagtttctcaagggtcattagtataccaaagtcactaagaaaaactatgacagaatgcctaaagtatcttatgtgtgcctcaatgtccaaacaaatctggcttaaaatttccaactcaagccatttaatagggtatgtatgtttccaattaaatgaaataaaattaagagaattaaaagtgatagggaaaggtggtacagaaaatctaaaaagtctaaattagctagcttattttgataaaacatacaaaataacaaattcacatctcttaaaatatcttaatcagaagtcaagacagttgtccagaaaatgtcacattattcattgttatctactttttatttataaacagtggaaccaaagccactacttgagttatacttaaattttttttcctgctttatttcaccaaatttgttttcaaaactatactcaaccaaaacctatttggcatttattgtcactaagatgtagcaaagaaaagagtttgccaaattttaatcaagattagataagattttaatacaacatactctgctcatttgaaataaaccagtatcttccacggtttcttcaaaatatgcgacatctcacagaatactgtaaatttcagtgcaaaggatgccaccccagagacactgttgacttggcttgggtaaaggtacacatgaaaactgcttaaattaaatatctacaaaaaagaaagccaaaagacttgttttggttgagaacaataggagtccacataagtcttcaattctaggagcttcaaaatgaagaaaaggctgagatgtgttgtccttcatgttcctgttcatccaagttgcttccctttgaagaactaagaaaacactacactccataatgtattcttttggaggattccataaagtttaagttcaacatctcagcataaggatgtatgctatagagtagctaaaatccgtaaaaaggagaccacccaagacgcaaaatgtctgtccagtgcccagtgtgagggcttcaaatgggtatcatttccttccctgctgctcggtaaactccagcaatagctgcaccatatttgtgatgtctgagggtgaagagggccagtaatccagcagggacat

SEQ ID NO: 51204 - DNA, 1431 bp, Homo sapiens
ctcaggctccctagccccttccccgtcccttccccgcccccgtccccgccccgggggccgccgccacccgcctcccaccatggctctgaagagaatccacaaggaattgaatgatctggcacgggaccctccagcacagtgttcagcaggtcctgttggagatgatatgttccattggcaagctacaataatggggccaaatgacagtccctatcagggtggagtatttttcttgacaattcatttcccaacagattaccccttcaaaccacctaaggttgcatttacaacaagaatttatcatccaaatattaacagtaatggcagcatttgtcttgatattctacgatcacagtggtctccagcactaactatttcaaaagtactcttgtccatctgttctctgttgtgtgatcccaatccagatgatcctttagtgcctgagattgctcggatctacaaaacagatagagaaaagtacaacagaatagctcgggaatggactcagaagtatgcgatgtaattaaagaaattattggataacctctacaaataaagataggggaactctgaaagagaaagtccttttgatttccatttgactgctttctatgagcccacgcctcatcttcccctgtgcacatgtttacctgatacagcagtgctgcgtgttgtacatacttggaacaacaaactagaaatactgtacttctgtaccaacattgcctcctagcagagaagtgtgtgtgtgacaagccagttctacaggcattacctaggtgtgagactaaaagcttttcttattgacttaaatttggataacagcaaggtgtgaggggggtggtgggtatggtgtgtgcttggatgggaaagaaaaggctccactcacctataggagattatttttaagtggaatccatttaaactcaaaacagttatgaaaagcaaggtgaagaacatgaagctgtgtctgtattcattttattccgaaggagctacgtcttaggtgaaagttatgaccaaccagattaaactctacccacatcctgcattttaaggtctaagtttaactggtcaacatttaaatggattggagctattagtacatcaagtgtgatgggctttgttcccaactcttttacatctccctaccccttcaacctttggcctttcagcccttctttctctcttccatattctttggtttgtatgtggtttctcagttaatacatagctaatagctcttatttttcttatgtttttaaccgcttaggtctatttggatgtaagggtgaaaattcatttgatggaaatacttgtgtatatttaaagacccaattgctcctctggagcttgtactttcaagaatgattaatctgtgtaataaactggttactacagtcattacatataaaaaaaaaaaaaaaaaaa

SEQ ID NO: 51205 - DNA, 581 bp, Homo sapiens
ggtaagatccatggttttccttggtggccggcgcgtgttcttgacatcagtctcggccagaaggaggacggagagccgtcttggcgagaagcgaaggtctcgtggtttggttctccgactacgtcgttcttgtctatttcaaaactctcccctttctctgaatttttcaaactgagatttaatcgtaagaagaaggggatgtatcggaaagctataaccgaggctgcaaatgccgcaagacacgtggccccggaaatcagggagctcttaacccagtttgaaacgtaactggttccctgaccaggtcaccgacgatgagggcgcacctgctgtcctggagcttccgatctctgttcggggaccctgtgagccttctggccggctgcgtgcagagcccactggaacggtggtcggcctggtgtgaggccccccggggaccggcagtgtgtccagggaggggatggccctgagcccagcggctcctcccgctgagtgtatttcttcccaccactcagcgcatggctgccctggctcacgaggcagtcgggactcgtgacttgctggctgctggctgctgctgc

SEQ ID NO: 51206 - DNA, 1399 bp, Homo sapiens
aaaattgtatgttaatgctggaaagaaaaaaagaagaaagaaagaaaccatccctgtccttcagtttataatctagttggagagataagaaacgtacaaaccaaaagataacagaatatctgaagcatgtactcattgtcagatgttccctctgagagcacagaggaggcaaaagcttctgtgggatgtgctagtcggctaaagcttcacagaggaggtggcaattgaaaatgagtcctgaatggggtagggtggttagggaattccatgagacaagacaaggggggcatggtgtgagaaaggcatggaagtaggaaccctcttcctatgacaggagatcattctgcttagagtggagagtgtggagagtgggagtagataattttggaaagctgggtgaagcaagttgtggagaattgtttgaatattatcccattgaatacccagagccactaaatctttttttactagaaaataattggggtccatatgaaagtctctattactgagtagtgtcaatgagggtgtggcaaaatggagcctttcacatcctagtggtggccatttggtaatacagatataagccttaaactatgtaaacccttgtcctaaggaagtaattgaataattgcccaaagattgtatgtatgaggctgttcatcccagcactgtctaagctagtaaaaattggaaacaatttaagtatctagcacattggattggttataaagcaaggaatgttcacacagtaggatattataagtatgctgatggaaatctatattgccaggaaaagctattcattatgcgttgtgaagtcagaaagtaaaaaagggtagatagaagtattcgaagtatagttccattttctgagactaataaaacatatgtttaaaaggacactaaaaactggagttatagatatccagatagaaacagtagttatctttgggtagaagaataatgagtgatctttacttttttactttttattcatctttgtgtttttatttatctaaaatgggtattgatttttaggacggttttgaaaaagaaaagtgttgggaatgaagcaagtgattgattggaaaacatactgaatggaagaaatatttagattaaaaatgaggtaggttgaagtttcttctctgaaatgatagataaatggtgaagataaggcttattgtgaggattcagtgaggtaatatatgcaaagtacttacaatgttctggcacatagtaattaattaagaaaatcgagcacccttaattacctagaatgcagggttgttagttttttggttgacttttgttttgctggggcattctgccatgttttagtgtcatttaataaataatagtaacaataaaggttaacatttattaagtgaaaaaaaaa

SEQ ID NO: 51207 - DNA, 685 bp, Homo sapiens
  misc_feature (1)...(685): n = a,t,c or g
aataccccatctcaccatctcaaaacaaaacaaaaaaaacagccatactaggaaacagaaccaacacaaaaacaaatgtgttaaaaactgaaatactattcaagtaacaaagctgcaatatggtaagcaaccagggtgggtgcaagaaccggtaaccacactgaaaaaaggtttgagtgagactgaaaaaggccttccttatagttctttagcatttcaattctatcatattgaatatccacttatctgaaaagaaatggnnnnnnnnnnnnnnnnnnnnnnnnnnnnnnnnnnnnctcataagcagcatgaaagaagtaattcccacagaagtaacgaaatattctaacagtcaggggaggagctaaccttgggcagtagcattaataatgaagagaaaagaagagatacattttagtagtacctcccagcacttcacagtacactgaagaactcagtatttaaaaacaatccttattctggttccgattatatcctcactacccatatattcaggttttacagtgcttcaannnnnnnnnnnnnnnnnnnnnnnnnnnnnnnnnnnnnnnnnnnnnnnnnnnntactacaggtgtgtgctcgagtggcctggactacaggcgtgtgcccaagtagctgggactacagacatgttcctggctcgcatcaattctttacacatta

SEQ ID NO: 51208 - DNA, 367 bp, Homo sapiens
ttttttttcatttctatatattttttatcaggaagaactcttaattactttgaagtctccagtggcataaaaatcagagtcacacttaaaaggttcattagaaagagtcacataaatatttccgttgtctactgtcactgtgtgaatcctttgctttattcctttggagcaccacttgggttttgctgatggatctttagggtttatagactggtacagaccttctcctgttgccaaagtaattttgtatttatgccaggggcaaactatacacggtcgtccatcaaaatcggtaacagcgaatatccatagcatgatattctcccttgtggtagaaaatgaccacttctctatcatggacaacagc

SEQ ID NO: 51209 - DNA, 673 bp, Homo sapiens
attcaaataggaccgctggtttttaatttgtgaatattcttatttaaaaacaaaacaagctctacttcagatgtccaaacaaaaatcacacagtagtaaaactgctacaaaatggtactgtcaacaggctggaggtgggggtatgggtgccttctgtgtgtctcagtcacaccggggagttttgcttacctaattctgcttctgaaataagcaacatcaaaacagccaggtgtcaggaatgtgccatttaccgggtggtccccagactctgctgctccttcccagcattactaaggtttctctcccagattccccaccacccaccatacagctccctttgtgggattgatgcaaggtaggccccatcttgaagagtgacctagaacagggtaccagggcctccagctggaggacgagagagccacccctcctcaagaaacacccttgggtgacagagacagcatgatattctaggcagtgctgcccagcccagactccacaaacaacccttctgaccttgcagaggcagtccagagctgaggggccagcttgagccagcttgcaatccctcgggagtttactgagggctttctgttgttactgatgaccacaattcctccttgtaaatgaccacactacgactccctgtaactcaaaaagcgggaaggaggcg

SEQ ID NO: 51210 - DNA, 589 bp, Homo sapiens
atttagtagaaacaacagtattttacagttccaacatataagagaatgcagctgtgttaaatgacaaaaatcatgtattctattttgggcttctcaataactaagaaatagaactaaaatccttttattcacttattcatccaactatgggccacatactgtgctaggagctgtgggtacagaggtgacctatacagaccagtctctctctttgtggagcacatagtgactaactgggccttgacaattctggttaaaattgacatccacgaaagtgtctacaactaggatggaatctctttcctaaccccgtttctttcatactcactaggaaagcaacctttccaatggatcagggtagatttatgactcatttgcaaagcaaaagcaaacagaatgtagaaaatggaagtcttaccactaataaatatatagattgcagattctgtttccttcttctttgaagtaggtacagctagatatttgcagctgtagaagccagtgtggtttgcttgagctgtgttcaaggttaaagtactgcagaattgtttgccatttcctcccacaggcagatttagttatgctcagc

SEQ ID NO: 51211 - DNA, 462 bp, Homo sapiens
ccaaattataaccccttcacatggatgtctttcctggtttcatgtcctaactacacctatgagttggaatttttacacttctgatgagtatccagatgtctttgtgggcacaaaagaaacataagatttatctgagaaaattcaattcatatattcatagaaaatcagcaatgattccattcatattgtaaaaacagaatcttatctcctatagaaaacagcaacatataaattcaataactaagacttagttaaggatagttaactattatactccaacaattcatgagcaacagtatatacactgagtaaaaatataaaatagtaaaatttcactaaatttagagaaatgcacatggtaataaaaagtataaattataaatgcaattaactaagaacagctctgaatgtatttgcatgggattggtccttgaataaaattgtcttacttcattaaaaaaa

SEQ ID NO: 51212 - DNA, 1011 bp, Homo sapiens
cttgtggcaaattcttcctccaagcctcaaacctttattcagcatcggcgcactccacactggagaaaaaccgtttaagtgcggagaatgtgggaagagctacaatcagcgggtgcacctcacccagcaccagcgccgtccacacaggggagaaaccctacaaatgtcaggtgtgcggaaaggctttccgggtgagttcccacctggttcagcaccacagtgtccacagcggagagaggccctatggctgcaatgagtgtgggaagaacttcggtcgccattcgcatctgatcgaacacctaaaacgccacttcagggagaaatcccagagatgcagtgacaaaagaagtaagaacacaaaattaagtgttaagaagaaaatttcagaatattcagaagcagacatggaactatctggaaaaacccaaagaaatgtttctcaagttcaagattttggagaaggctgtgagtttcaaggcaagctggatagaaagcagggaattcccatgaaagagatactaggacaaccatcttcaaagaggatgaactacagtgaagtcccatatgtccacaaaaaatcctccactggagagagaccacataaatgtaacgagtgtgggaaaagcttcattcagagtgcacatcttattcaacatcaaagaatacacactggggagaaaccattcaggtgtgaggaatgtgggaaaagctacaaccaacgcgtgcacctaactcagcatcagcgcgtccacacaggtgagaagccctacacctgtcccttatgtgggaaagccttcagagtgaggtcccaccttgttcagcatcagagcgtgcacagtggggagagacccttcaagtgtaacgaatgtgggaaaggctttgggaggcgttcccacctggctggacatcttcgactccactcccgagagaaatcccatcagtgtcgtgaatgtggggaaatcttttttcagtacgttagcctaattgaacaacaggtgctccacatgggtc

SEQ ID NO: 51213 - DNA, 186 bp, Homo sapiens
gaacaagatgtggacggtgtggcgagtgggccaattgttttacactgtgctgccgagctgtagggtttgaagctcgctatgtttgggattacacagaccatgtctggacagaagtctattctccttctcagcagcggtggctgcactgtgatgcatgtgaagatgtctgtgacaagccactccttt

SEQ ID NO: 51214 - DNA, 539 bp, Homo sapiens
tggaagctttttggcaagagctaaatttattcctcttattactgtaaaatcatgcctagatcttttggttaactggctgcacatataccttaataaccaggattcgggaacaaaggcattctgcgatgttgctctccatggaccattttactcagcctgccaagctgtgttctacacctttgtttttagacacaagcagcttttgagcggaaacctgaaagaaggtttgcagtatcctcagagtctgaattttgagcggatagtgatgagccagctaaatcccctgaagatttgcctgccctcagtggttaacttttttgctgcaatcacaaataagtaccagctcgtcttctgctacaccatcattgagaggaacaatcgccagatgctgccagtcattaggagtaccactggaggagactcagtgcagacctgcacaaacccactggacaccttcttcccctttggatccctgtgtgctgaagaggtcaaagaaattcattgatcctattttatccaggtatggggaagacatgagt

SEQ ID NO: 51215 - DNA, 266 bp, Homo sapiens
attcttccaaacttaggataaatgctaaaaacattaaccatacaagcaaagattaaattagcctatattaatcataataactgtttatcgcacatgtaccccttaacctaaaagatgaagaagaaaataaaaaataaaataaaatttgaagaaaatgttaaacaaaaatgaaaccataccagtactagaagaaaaatgggtgaattcctctttaacctaggccatggaaaggcttctctggctcccaatctggatttaattaatcc

SEQ ID NO: 51216 - DNA, 1984 bp, Homo sapiens
ttttttttttttttcttataaaagtattttttaataaatcaatgtatttcaatgttgtaacatgatagcccaatgctatatcaaggtagcaaaagtgaagattcctggtattttgatataaacactatgaatgacagtacacttgcattcaacttcacaagaaattatcttcaggtccatgaagattctttgacagctgtaacacttttcaaacagtaaagatgtacatgtattgaaagagaagacaacgaaagcctactaactgatctgggctctaaaccatactgaagagaaagagatacaatggttgtatggctagcttgctgaaaaaacatctaaatcttttaaagaaagaaaatacagcatatatcaaagttacagagtagcttacagaaatggagtcataaggagacacacagattagaaccctgaagcagtgaatgtgtttctacccgttttgtgatggaaagaagccatggatatcgagtcctgcagctgtctgtggtgttgaatctcctcatacacacaatgctaccaatggactaaaaccagaattccctgctctgtacaaatgctggtgatgggtaacttgctctattgctgtgggtcagagcaacagctggctggattcaggcatcaggacgaggctaagatcatacaccactgccttctacactcctacagagtcacactttccaaagctgatgctccccttgtaagggtttaaaaaaaaaccccaaggggtatttaaagcaaacagcagaaaccagaagcttctgaccctctaacatgtattactgtccaacccaccatgagaagtatgttcacttggtgacaacaaagagactccgtatcatatgtatgttaatgaccagattgttcatatgggatttttcttaacagattatcaggttgagaatgattctttttctccaagggcaagaaaaagctggctaaatgctagttaattaaatccattctcaattttgaactgtagagaagaacctgacttgaatgagattttctaaaggaagacatttcttgctcaacctcaggtataattagattataaggaatctcacgtccagaattttatctgctgattgttagtatggtaggtaattggccttaggacactatttctactagaaccctttacattatttttaaactccaaatgctgcagatgaaagtaaatacaacaaatgcaagtaaatacaacaaaataacaataaaatcacttgtgtgctgacttgctggattctggttaagcacagatgggatgttcctgatattcactaagaagagtctaactaatggctactgtgtgtgtgtcagtagcccaggtttaaatcatatatacttgaatgaattagaaaacactgtactccctccacattattaaaaatattacaagcaaactgtatccaaggctttgtactaaccgtctggggacaggactcctcctcctttttaagtgaacaagtcactgctagagccttagtgttttgccctcatttttagacctgaaccaagtcgacatctcattaagttcatatattcctttcttctgtcaaacctcttgaaacaagccttctgcccctaaagaactgagagtaatttgtaaaggctttccctctctggaaacagaacagtcgaaagcataaattaggttaagtggcttcattgtcctcaggctaatgcttataacccaaggtttattttccctatgaacagggtgtgcttacgttgataaaatgaaccaaaatcagcttatggaaaagttaaaaatacagtttactgaaagattatgtatcctcacacagagcaatagcaaacaatccaatctaaaagtttaaataaatgtcaataattttaaaactaactatattttatatgtatataaagctgaagtcactgccttggatagtgttaacactgcatccaatattttatgaaggacattcattcttaaggcaaacct

SEQ ID NO: 51217 - DNA, 568 bp, Homo sapiens
ttttttttttttttgcttttgtagtgcagagctttagagcaagcacagttttatttatttgccttaaaccaatatttccggataaaaggtatatttttcttgtggagattgtagaataactatcattagcaaaggcagaaagtattcatttcaacttagtaaagacatattttttcactatcacagaaagatgacctttacataaaaattgttacatatacttccatagatactaatagtaagtatgatttttttttaaaaaataactttctaagacaaatggcaaaggctttctttttcatgaattctttggttataaacaggttttgagtgatttttgttctatgaagtattaagtgattctgctgatatctgttctgtgtgtcctttgaagaccagaatataattaattttattctggtctaacatatttattctgatttacattgcttttatgtaacataattacagaaggaaaatatacctttagatctgacatatatcgttgatgaagctcctgctgagcatgttgcataagcttttcatccttttaaaactaaaaactcag

SEQ ID NO: 51218 - DNA, 134 bp, Homo sapiens
gacaatatggtattagcactaacctctccaacaggatctggggaaagcgccttgtagttgagtcacaaataattcttcacatgacttacatataaatgaaaaatgtaatgtcagttcacatttaggccacccaa

SEQ ID NO: 51219 - DNA, 1098 bp, Homo sapiens
tttttttttttttttttgagattcatattttatttacaagtaaatgaagactgtccctgtaaactctaatttgggatatgaagaacaatataaagaagtagttgctggtgccacagtgatgtgtgaaggagtctatgccactgtttctttaaacagtgattttgttatttaaaaaaaaaacccacctacacgatttcttcatgttgcatatgtaaaataattaaaaataaaagtgacttttcaaaactctacagtctgtgatcaaatgcgtgaggtggccaggatgtcactttcactcagtgacagcccctactcttcaagagccaacagcctctgggcaaaagattagtactcatcaagagtatctgctcgaggaatggaaagacctcggtccttcagggcctgcactttcaacttctctgcttccagcttggtctgctgttccaccctttgttcttctagaatttcttcaatggatacttgctggaggggtgtgtcactctccttttccaagtctatttctcctagtaggaccacattttctcctctgaccacaaaaatccctcgaggaatatcaccgtattttttgcccacatgaatacgctccacagtctgatgtagcactaagtttgcaaattgatcaatgcttcttaaaaagcctataagtgtccttccatctcgaagcagaaccaagtgctttttgtcaatgtcctcgatgaggctggcggtgccaggcatatagttcattttgaactgaaataatgctgcaatgcacagcggcgggaggccagcgcgtccaaaacctcttccctcctaccgcagtcgccgcctcggtgggaccaagcccggaatcccgaccgagaccagcacttctgccccggctttcagccgccgggggcctgccggaagctcctccatattacccttacccacttcctgtaacacgtgtgggcccccaggaagaggcggggcagccgtaccgttgggggacaccctttccctgttcctgttaagtaggtaagaggaaactccattggataaatggcgaggaaacgtatactccctcttaaggaacacggtgtcttccttcgtctccgg

SEQ ID NO: 51220 - DNA, 1808 bp, Homo sapiens
ttgtgctttgtctttttattattctttattggtcctaccaatgtgactctttacccaggcccactgttcctatgcgcactggctttgtaggcattcacatcatatgtctgtgtcctgaaaatctcaattaatttctccttcctattccttttccatgctctgcctcattttctcagaaattgaaggcatttgattattatttttttgtttgggtctgtgtaaaggttccttggcaggagaacatgcatatgactttaaaataaagaccaacattctgacactaaggtaatgcacagaaaaaatacagtactcagacatcattgcaaataaataccccatacagatgaagttatctcaaatgtaacaatatttcttatgaatcaacactgtaacggaaggtaaaaataggagtccctacaactaggaataagaaatgcttattccaggaaacagaattcttttatttttgtcatttatattattataatttttccttttttggagaaggaaggacagtttttcttcctccaagagtaccaatttgaccactcccactaacctcactcagcaaacaaaacaggatgtagacctggtttgctaaggagttttaatgagttctgtttcctgaaattaacagtgattagttacaccaagcaagagaagatataatgtctcgctttcacatttgcaaagaatactatggctaaccctcatcccctactgcgcatgccaacacagcgtcggccctcctgataccctcagctcttcacaaacgtggcgttcatacagcttgctcagcttgtcccagaaggtccatttggttcccaaagcacactcaaggttttgtgtttgctttcattttctaagcccctgaatttgcaagtaaagaatcactgactaacagaattttgcacaatgactgttttctttccctcaatgaagatgcccaggtctgggtgtgaggagcacctggcctcaactggctggtccacgctggccttcagcatgcccactagctcttccctgctcggcttttgagaatgatctgtgctgggacacctcccttaactgatgaaggcactactggcaatgattactaacaaaaaggtgttgaaagagaacaccctaaaaatcgacgactgtagaattttctaagtgtaccacaatttggcacaacaaccagagtaacaaaacaattccaatttggaattttattggtacagttgtataaaattctgttaatcagtcatgcttcacaacgtcctaaaacccagaaaattctggaatttgtaggtaatactactcattcaataatttatctttttttttcaagtgcctattactgttttaaccagagcaaaggtcaagttttcttcttgttacattgaactattcctaagaataataataatacaatatgaaaaaccccagaatctgaataccctggatttcttaatgaacatggcatttaaaatctgtaatttcaaacatgaaccacaatgccgtatgatctaaaggctgctgaaccacagcgtggatacacttagctgagctcctcgctgggtcaaagcactcatctccgagtctaaagctacacgctatggagcacacagctctgcctcgtgctgacaccagacaaacacggtgggagctgaggcggacagctacaggaccacgagcatagaccacggcacctgagaccgtctctacgcgaggaattaaggaagcaaatataatatcaaaatatcaaaagtgcacaggttgatcggataaaaaaagaacatgtgtaacaaggagcccccgtggag

SEQ ID NO: 51221 - DNA, 287 bp, Homo sapiens
ccaagccccacacacacaccggcccctaggaaggcctagccgaggggctcaagtccagccagcagctcaggctggccaggccacttccaagcagagtcctggaccagggttctggtcccagctcccacaggacctgactactgcctcagtttccccatctgtcaatggagccagcaaggcctgtctggagtgcaaatcttgaccaagtcaccccggaagtcccttcaaaagcaagaccaggggttgtgggccggtcccagaggagaagccagagctgctagtcctcc

SEQ ID NO: 51222 - DNA, 367 bp, Homo sapiens
  misc_feature (1)...(367): n = a,t,c or g
cggacgcgtgggtggggttttgccagggaagtaaaaggagttgagagaaagatgggtcagttcagaagacatacacaggagctagtgattggatgaaatgtgcacgctaaggattactctgaccactacattggaattgaaaactggaggtgactatggactgattaggacaattagatgtcttgccccgataaanactccntnntgntnangngttggacacngannnntatntganntttacaggactgctttgnanantgagangtgnatnnatctctnntnaanggctaantaaacggtatgacctgctttgctgccagancccggngganccttagtaactaattctacgtttgccactttg

SEQ ID NO: 51223 - DNA, 408 bp, Homo sapiens
  misc_feature (1)...(408): n = a,t,c or g
acatgattgagattaaacactaggtatcattttacatttnactttttgcatttaacattgtatcataacctttctcatatttgatttnngnnnnncnnnnnnnnnnnnnnnnnnnnnnnnnnnnnnnnnnnnnnnnnnnnnnnnnnnnnnnnnnnnnnnnnnnnnnnnnnnnnnnnnnnnnnnnnnngattctcccacatcgggccccctgaaggtaactgatagggtgtgtggtcaccacacctaggctaatttttacattttttgtgggggatgggggggtctcactatattgctngggcgggattcccaaactcggggggnttaagggggatttttcccaccttgggggnctccaaaggtgctggggggattaaggggcatgaggggnaatttaaattttnctat

SEQ ID NO: 51224 - DNA, 385 bp, Homo sapiens
tccaagcccagttttatttctaagagaaatatttctctacaattacaatcttctataaccctataaaacagcttcttcagttcagattcttcatcagaacatttctatttttcaaatgctggcccctgcagttgattcgattttgtaatggatggttttgaagctatttctggagcaagtgtcggagcttaggaaacagttttaatgcattctgtgtcgtcacttctataacttcttccactgagatccctttcacctgggcaatatattctgctgaaatagaaatgttccagggctcattccgtacctgtttttctggtcctagtgcaggtgaatctgtttctaagcatatagaagttaaaggcaattgtttcacaagtttctg

SEQ ID NO: 51225 - DNA, 234 bp, Homo sapiens
agtgggtgaagagtgagcaccctgtcctgtcccccatccttagagggaatgccttccaggtttcccccccattcagtattatgatggctgtggctttgttatagatggcttttattacattaaggtatgcccttgtatgttgattttgctgagggtttgatcataaagggatgcagggatggtttaacatatgcaagccaataaatatatttaccacataaacagaatttagtt

SEQ ID NO: 51226 - DNA, 537 bp, Homo sapiens
ttttttttttttttgcattttaataaacttaatttaatgaagcgctgcattccacaagtacagtcagtacagtagctctcctttgggatggaaaaattacaagaagcaatgccgaggaccgtgaactgtatacagaagccttgtggatctagaaaccaacagtgtgtgaacttaggacattctcaagttttaaaacgtggccattataatatcatcacattacataaatatcacatcaccaatattcgttttgtttttttcttttagaaccaaaaaaaaatgcttgtaaactgcaaaattactttagatcactgcgataaatctgaattaactactaggtaccgtcagcccttcatatttgtgagttacacatctgtggattcaaccaaccctggatggaaaatactcagaaaaaaaaatcagtacagagtagtgtcgtgtactaaacaggtacacacttttttttcttgtcattattcactaaatacagtaataacaactaattacatagcatttacatattaagtattatatgtt

SEQ ID NO: 51227 - DNA, 518 bp, Homo sapiens
gaaaggcggcttttagccaggtatttcagtgtctgtagacaagatggaatcatctccatttaatagacggcaatggacctcactatcattgagggtaacagccaaagaactttctcttgtcaacaagaacaagtcatcggctattgtggaaatattctccaagtaccagaaagcagctgaagaaacaaacatggagaagaagagaagtaacaccgaaaatctctcccagcactttagaaaggggaccctgactgtgttaaagaagaagtgggagaacccagggctgggagcagagtctcacacagactctctacggaacagcagcactgagattaggcacagagcagaccatcctcctgctgaagtgacaagccacgctgcttctggagccaaagctgaccaagaagaacaaatccaccccagatctagactcaggtcacctcctgaagccctcgttcagggtcgatatccccacatcaaggacggtgaggatcttaaagaccactcaacagaaagta

SEQ ID NO: 51228 - DNA, 2318 bp, Homo sapiens
cggcattcctcctgtagctgcacgaagcaccttggaagttgttttcaaccatatccaagcctttgcccgaatacatcctatctgccacacatccagcgtgaggtccctccagctacaaggtgggcaccatggcggagaagtttgactgccactactgcagggatcccttgcaggggaagaagtatgtgcaaaaggatggccaccactgctgcctgaaatgctttgacaagttctgtgccaacacctgtgtggaatgccgcaagcccatcggtgcggactccaaggagggtgcactataagaaccgcttctggcatgacacctgcttccgctgtgccaagtgccttcaccccttgggccaatgagacctttgtggccaaggacaacaagatcctgtgcaacaagtgcaccactcgggaggactcccccaagtgcaaggggtgcttcaaggccattgtggcaggagatcaaaacgtggagtacaaggggaccgtctggcacaaagactgcttcacctgtagtaactgcaagcaagtcatcgggactggaagcttcttccctaaaggggaggacttctactgcgtgacttgccatgagaccaagtttgccaagcattgcgtgaagtgcaacaaggccatcacatctggaggaatcacttaccaggatcagccctggcatgccgattgctttgtgtgtgttacctgctctaagaagctggctgggcagcgtttcaccgctgtggaggaccagtattactgcgtggattgctacaagaactttgtggccaagaagtgtgctggatgcaagaaccccatcactgggtttggtaaaggctccagtgtggtggcctatgaaggacaatcctggcacgactactgcttccactgcaaaaaatgctccgtgaatctggccaacaagcgctttgttttccaccaggagcaagtgtattgtcccgactgtgccaaaaagctgtaaactgacaggggctcctgtcctgtaaaatggcatttgaatctcgttctttgtgtccttactttctgccctataccatcaataggggaagagtggtccttcccttctttaaagttctccttccgtcttttctcccattttacagtattactcaaataagggcacacagtgatcatattagcatttagcaaaaagcaaccctgcagcaaagtgaatttctgtccggctgcaatttaaaaatgaaaacttaggtagattgactcttctgcatgtttctcatagagcagaaaagtgctaatcatttagccacttagtgatgtaagcaagaagcataggagataaaacccccactgagatgcctctcatgcctcagctgggacccaccgtgtagacacacgacatgcaagagttgcagcggctgctccaactcactgctcaccctcttctgtgagcaggaaaagaaccctactgacatgcatggtttaacttcctcatcagaactctgcccttccttctgttcttttgtgctttcaaataactaacacgaacttccagaaaattaacatttgaacttagctgtaattctaaactgacctttccccgtactaacgtttggtttccccgtgtggcatgttttctgagcgttcctactttaaagcatggaacatgcaggtgatttgggaagtgtagaaagacctgagaaaacgagcctgtttcagaggaacatcgtcacaacgaatacttctggaagcttaacaaaactaaccctgctgtcctttttattgtttttaattaatatttttgttttaattgatagcaaaatagtttatgggtttggaaacttgcatgaaaatattttagccccctcagatgttcctgcagtgctgaaatttcatcctacagaagtaaccgcaaaactctagaggggggagttgagcaggcgccagggcctgtcatcaacatggatatgacatttcacaacagtgactagttgaatccccttgtaaccgtagtagttgtctgctctttgtccatgtgttaatgaggactgcaaagtcccttctgttgtgattcctaggacttttcctcaagaggaaatctggatttccacctaccgcttacctgaaatgcaggatcacctacttactgtattctacattattatatgacatagtataatgagacaatatcaaaagtaaacatgtaatgacaatacatactaacattcttgtaggagtggttagagaagctgatgcctcatttctacattctgtcattagctattatcatctaacgtttcagtgtatccttacagaaataaagcagcatatgaataaaaaaaaaaaaa

SEQ ID NO: 51229 - DNA, 1494 bp, Homo sapiens
  misc_feature (1)...(1494): n = a,t,c or g
ttttctaatatattttactgacaagcccttgagagctgctttgctacttgcatgcaggcctctgtgtgaccaggcacacagactacatgtgctccatcttgtctctccgctgctccaggggccttgctcaaaaaccccctatattactggaaactgctggttttacctatgtgcttcttcctaaggcatgcaaaaaaaaatatgtgaaattcagaaaacatttacagttcaggcagctgaggcactgaagtcctaagagacatcacctaaatatcagtggctgtgactcccctgtcccccaaaccaattatgaaggtcaggcatgggacacacttgtaattcccctctgctttatggtccagcttaaaacgatgccattagaaggaattctaactcaggtattgcaattatttgaaattcccaatcctcaggagccacacaagcccagggccagcaacaacactttggggagcggggggatgagtttcctgaagtttgtggctgaaaagcaggccttccttggcaaggcttgtgggagcgctgggtgctggagactgaccccacaagtgatcagccaccaggcctaagactaaccagctgcaggacgcccccttccacagtgaggtgaagcctcgccagggggcctgagcagcaggcttgctcttgtccctacattaggacacccgaatggtgtgacaggagagctaaagaaccacccacaaggggaaaagctgatgtcaacttaagagccacacacctctggaaagcaacaagcctctccttcagtttagtccagaagggaaatcccctcatttgtgaaaaacatcattcatctcaacccaagctgttggctctgtggactgggcctgggnaaaggctgtgctgctccttccccaggacttggccacgcagtacggcantccttcaggaaacgggcctagcaggggaggcaggcactccactggggaagatggctctcgtggagcagcatctgaggcttgaggcctgtcgtgcctcgcctcccagacacggccacagttcaggcagccagggttccttctaagtcccagtagctcctctgtgtaatcctaatgcttctccccaacctcaagagcccaaaggagatcctgttatcagaaacccagagctcctggactgccagttgcacacgtagacgggcaggccccatctgctcatccttgagtattcccccgacccccaaaatcaatggtgcaggtgatgctcttcagcgctatacagggaataaagacaacatgcactcaagccagcccacacaggccaaggagaacaaagacagccccttaagggagaggcctccagcagagctgaggttaagacacccgttcgtccatctccaaggtggacattctgcaggacgtacgggcccagccttcctctagggcttcagctcaaagaggtcatgatactcctgctgttccagctcctggttatacttctcaatttcccggttgg

SEQ ID NO: 51230 - DNA, 765 bp, Homo sapiens
aaactgaagggggagaaaaatacaccattaccacagcaacaaattagtttatgctagacaacttgtaaagaataaattaacttccaaatgcctatagacatggatattagtgacacaagagattttagacttttggagggttcttaaaaaattgtgctttaaaggaagagactctacattggatgcagccagtttttaaaaatgtgtctgaagcatttggtgatggtttctgcctgttcagtaaagaagcaccggctcagaacctcaacttctgggacttactcaagtttgcagaactcctccaaaggcagtcgagtgctctgttctctctgcttggatgttcttgttgtgaaatgaacctttatgtcttgtagagcataaggaaaccccagccccagagcccacgagcctcagatgagggaggggctgcctagccagccgatcaaccttagggacaatagccccgcccccagcatttcaagccagagcccgccccaaggtacgtggcctgggaagccccaggatgggaaggaagaggaagcagatgccctctgaagcctccctggacggcccagggaggagcatgcacactgagatggtgtttaattacggttctgactcactgtgttctctattagagcctatcttttggcctgttgggtgaactcccaaattagggaagggcaaaaaggaaggaaaggcaatattaggagagcatatgattttaggactgttagtgtttatttaatttactcttcttgtaaa

SEQ ID NO: 51231 - DNA, 571 bp, Homo sapiens
tttgcagcggtgtaacaaattttaattcaaaatagacactctgaaaacaataggtaaaaaaaaaaatgttcaacaagctctctttgaatttacaacagagtacaccaacaatcataaaccagtttcacaactgcctcaaatatgaacattatagcaattacatgcaagtattatattttttaaaatccacatagtaacattatgtttctcagaggctgtcacatcctccaaatatttctacctaaagatagagtgaaggggttcctctgctgtgtaccaccagaaatatgacttaccatctaaactggctggtctccatgactggttctggtgctttaagttttaatatcgtgtggggaaaaaaacgaggtttaacatccacaggacagtgacgacaatggagattctttaacaatatgccatcccatcgacccggacacagcttccagcctaaaccagctagagaaaagcccgtttctccactaaacatgaccttcagaaaatgtggtcaaagacttactgtaccaaccatggagactgagatctcagtctgtaaacttcgccatgtccc

SEQ ID NO: 51232 - DNA, 2724 bp, Homo sapiens
ttttttttttttttccatatatttactttttattgaatttgttaatgttacagaattcttgcactgccaaaccatgcctgagaattcaaacaaatggtacaatggacagcctcatccacccatcatacagtatattaaaacttgattcatttatattttgatattttcacaatcttttaaaaagttataacaagagttgtaatttaaatctgctgcaggtcttcagatttccgagtacaatatgcctttacataacacctccacttactcatctgttcattcttcagtaacataacccccaacaaaattttgttgggaaaaaatgcagggaaaatgcacagttcaacgatgaagagatttttttaaggtttttcattcccaaataaaagtcttcagtttaccaagaatcccatttctgatttaatcattcaaccttcccttggctggctcagttactcacccaaatatattagagggcaggcatcctgcctgccacctcaaatgtcaaccattgcccagatgcgagtggcaggtcccgtcaggagatactggtaccctctccggagtccaattcctgcacggacactttcgtcaagactaaactcctatctgaaaacgctcccacgtcaaaatagttttactcacccacttgcttcactcttgccagtagcaagtctgcaactcatgcatttggcaaagggatttattatagagaaacccggactctgcatcaaatgatgacattaccactttcacatatttctattgaaccagatacaaaactaggaaactgccagaccatcttgttaggtggacactcttctgtaatcctgggtagcttcctcaagtccctttaaatgacccaaaactattaataggtattttaagcaataattattaaaaacagaagtgctacatcacctgtctttcgccctgactctccaaatgaacataaagacacaccaaaaggctggtaacagagctagctgggacaatcactgcatctatagaacagccaataccttgaaaaactaggcacaagtacatgaggaattcttatcaaagatcatgcacaatccatgccacttaaatgggttttagctgaggttttgctcatgttactctgaatttctaaggacagatcagtgaccctcttagcctgagcagaaagcatattcttcccactgcagtttcctacacaatttagtcctgattagatgaggcattatagcagcacctgaagtagagcctccagaatccactgcccttttcatcaaaggctatttggttccaccctcaggattggcatactcacgagacatttcacaatcctaatgcatactttaggttacttaattaaccaagcaatatgctctgtcaaagaacttatttcaagtcaaagcaaaaaaggccttaatgcagaacaaaaacaaaacaaaaaagcactatccaaataaaaaaattaccaaaaaaaaaaacccccaagattattctctcccttccccttcccccacttggtggaccccagtttggttgaatttattttgtggttacctcagaatacaattagtttaaattacaaatcacagccctacacagatgatctgaacacatcagttcttttcagcggtgtgttccaggaagtctaatataacaacagcctactacagagagtattccttaagggtagggcacaggacaggttaattaaggtcacttaaatcttcatcttttacagcagatcagaacccagatggctgactttttatgcaggatttctgataagaatccagtagagctggttgcaaggttcacatcgacacttaatagttgtaatcttcttatccagaagttgtgatccacatgaagtccacaatgagtgcagcaaatctgaggtagtcaacccttatgaaggctcagtatctgaacataaaaagattttgaaatgaccactggctgcaggttttggttttttgtatttgcagagtaaatatgaaagaacactgttgaaactagttcacacatttatgtaacaatgaaaattcccctaaatccaatatgcatagagcagtcgtgacactttaacttccatagtgcaatagggccggtcatgaaatcgagtggtctgcatcggtgtctgtagatccagcagagatcagatgatgaatggctgttggtggtggttagctgcagtctagttacctcagaagggttagcaaagcccattccttaattgtattgtgagtggctgcttttctgattttcaagcacagcatattggttgtctagctgaagtttaagggcctggttttttgaaacctcatccctacctctatttttgtgtcttactacttcaaagctcttctccatttctttatccttccggctttctacatgcttggcagttgactgcagggatgggaactgtgtatcactgtagatttctggtggtccttgtggtgttttccttgttgtggttaacctggccccaggaggcctatacacaccactagtcatcgctggttctggggtttctgtaacaattactggagcaggaggtgcttgtactggagctgttttattccagggacctgaagatttttccatacctccaccaccacctccaccttcttcccagttatcacctggatcttgtctcttttcattatcgtcttcttccttttcactgcttatttgcattgcctgaaccctgaggccgctgta

SEQ ID NO: 51233 - DNA, 751 bp, Homo sapiens
  misc_feature (1)...(751): n = a,t,c or g
cgcaatccctggtccactggaggatggactgttccccccttcaggccggggccaagagtgagctgctaacacggcatccaagaatggcccagctggtaggatccttgctttccccatctgttggaccaaataatctcaaaggcccagagaggacagtgaccatccacagacacacagcacaggcgtgacagttctgaaaagaagctgagttgtctccaggctgctgtcactgcatccaggactctgtcagcctctgctgcccacatgcacccctggcctcagcatcccggttcccccagacaagagagggcaagtcagccaggaactgcctcctccctgctctacagctaagaaaacaccattccatgacttcccaccagcgccctcgctcctacctccccacacctctctctgagtccccaggaacacacagaggtgcacatcacattcccttgtccacactgcccgcctctcccacatgccacccccttccctgtccttccccaactccccagctcccaagagtgggaagaaatccccaagatcatctggggtctccctctccacacccagaactgaggcttggatatcttcttcaacatccttgccaagacttctccaccctcttgcatacctccagggacagagagcttactacctcccaaggcagcctcctgcctttggactgctctgactttagcatcagcttaatacacagaagaggtttctgtttaaaaaanaaaaaaaaaaa

SEQ ID NO: 51234 - DNA, 1773 bp, Homo sapiens
ggcacgagctcctcccgccaggcgcttttctcggacggccttgcccagcgggccgcccgcaccccctgcaccatggaccccgctcgccccctggggctgtcgattctgctgcttttcctgacggaggctgcactgggcgatgctgctcaggagccaacaggaaataacgcggagatctgtctccctgcccctagactacggaccctgccgggccctacttctccgttactactacgacaggtacacggagagctgccgccagttcctgtacggggggctgcgagggcaacgccaacaatttctacacctgggaggcttgcgacgatgcttgctggaggatagaaaaagttcccaaagtttgccggctgcaagtgagtgtggacgaccagtgtgaggggtccacagaaaagtatttctttaatctaagttccatgacatgtgaaaaattcttttccggtgggtgtcaccggaaccggattgagaacaggtttcccagatgaagctacttgtatgggcttctgcgcaccaaagaaaattccatcattttgctacagtccaaaagatgagggactgtgctctgccaatgtgactcgctattattttaatccaagatacagaacctgtgatgctttcacctatactggctgtggagggaatgacaataactttgttagcagggaggattgcaaacgtgcatgtgcaaaagctttgaaaaagaaaaagaagatgccaaagctttcgctttgcccagtagaatccggaaaattcggaagaagcaattttaaacattcttaatatgtcatcttgtttgtctttatggcttatttgcctttatggttgtatctgaagaataatatgacagcatgaggaaacaaatcattgggtgatttattcaccagtttttattaatacaagtcactttttaaaaaatttggatttttttatatataactagctgctattcaaatgtgagtctaccatttttaatttatggttcaactgtttgtgagactgaattcttgcaatgcataagatataaaagcaaatatgactcactcatttcttggggtcgtattcctgatttcagaagaggatcataactgaaacaacataagacaatataatcatgtgcttttaacatatttgagaataaaaaggactagcaaataaaactcattttgcatttaaaagttggattatattttagtcccaagaagacaaagtcgcagattaacaacactttaaaaatattactcccattttattgtgttagattgcagtacaatgaatgaataaggggatttatttaaaagatcttaactttcttgactgatttaaaaagctaatcaatttattaaagccagaaatgttctcctctgggaaagcaatttctatctatttatctaccaatccccactcacatgtatatgtttgtgtttacatagagatagatggttttaagggttttcctattgttaaattatttcctaagacattgtgggttggagaccactaaacttataaaaaaccaaggaaagtaaagtttttcaaatgtttatactgtttaaggtgtttatttatataaaccatgcatgagaaaccatgcataaatttaataatttaaatttcaccagtaaattatcattgattaaatatggtcataccaatgaaataggttttttctttctctgtaataaaacaatttttctaaattcttatgttttcatagcaagattaacatatttaattacaaattaaatatgcaaaatgaca

SEQ ID NO: 51235 - DNA, 1077 bp, Homo sapiens
ttttttttttgaagtttatgcattttattagaagaacaaaaaataaacatagaagtagcatactaaaatgagctgcataatgtgcacttttaaacataaacaagcactacagcactataacttgaaaaaaaatcaaagcgtctgcagttgagggaatgagctattgcattttggaggaaaattactatgggaagagttggtactcatgaaatattctggtcattatttaaatatgttacacatggctaataattttcttatatatatttttaatcgccattttccacccaaattatgtgcctccatttttcacattattccaaattgttgttatatgaatgcacaaagttagtcctttaaaaaagaatatatttaggaaaatccttcaaaagttttttaatttaaatcattgtaatttgggagcatggggacaaatggctcattttctgttaaagcagcaacaataatattaaaatattattaatattataatattaaaataatattaaaatattaataaataagtttattttgaaaagggcattcattcccataatccagtgatatgatggtcatatcattctctcaactgctagacacaaaagacatagaacaaagtaatttgtttccatcactaacaaatagcatctctacacagaaataaagctctggaaccatgcagttttatgacagataaatctttaggttgtgtgttttcagagaaaaaagcactgtcttaatagttaggttacttttaggtcttgttacagaggtattttttaaaaaactaatatgatgtcagatgcctagtcaaggattttgcaatatctgcaaagagtctgcgacttatttcatagtcatacattttttttacatataccataattgtggatggattctatttaaagataaaatttctcttcaataatccagcttttgagtattagtgattctcttacaggcaagaacaagtagaagagctggaaactgcacaaattagtcaaactaaatattttcttgaggttagtaatagagggctttttttgggggggggcctcagttacacccatttgtttt

SEQ ID NO: 51236 - DNA, 345 bp, Homo sapiens
aagggtgccagttaaagaggtaggatttctttttgggataatgaaaatgttccaaaattgattgtggtgatgttggcgcaactctacaaatataaaaaaggccattgaattgtcgttttaagtgggtgaaacatatggtatgtggattatatctaacgctttttaaaaacttaacacatttcaaagaatagaagtcatacagagtgtgctctactggaatcaaactagaaagaggtaactggaggataacgagaaaagcctccaaatacttgaaaactggacagcacatttctaaaatcatccgtgggtcaaagatactcatttctgatattcatttttattgtg

SEQ ID NO: 51237 - DNA, 651 bp, Homo sapiens
ttttttttttttttttttaggaaaatcaaaaattttaatcttatcatctttacatacaacaaacatgtcaagaccccctattgtctttgaaaaggtcccccctcccccgccaaaatctgtagaccataagtcttggcctacactgacctggtttgtaaaatatcttcctctgtgtacttttcccttcagcctcaggctcttggctgattcgctcacaacagaagcagcttggctttcctctggaagtaccaatttgaaagcccaccagcccgcaaacctagagtgtattctccacccctgggtcaccagaacttcgttctccccggctctgtaacccaaggaccctacagcctctgaggcctaacacccaagctcttccttgcagaagagctgagatgctaaggagaccatctggagtgtcataataagcccttgggatttgctgagctcccacatggctttcttcaaccacctggcccactttcttcaaccacattccactttggaatgcgtgtctttaaggcaccaagtgatcttaagaatgggctctgtttttgaattcagcaatccaagttcctatctatctcggtgggacctccaaaaaaaagaaaaaggattggcttggcttctaatgtaaggcctgccttttac

SEQ ID NO: 51238 - DNA, 536 bp, Homo sapiens
taacaagggggcagtcatttaatgcagaaatccagttaacataaagagacagaggttgaacaacaggtcttcaaacaatactgcatagtgtcacgagttagctcttaagcacgtttgatctgtttatcttatgatttcgattccagtacaaagacagagaagagacttaaaaaaaaaaaaacaataaggcaacagaagaagaatcttcctgtgacaaggaacgtccacaaataatgcacaaatatttggtgctgacacaataagacaccatcaggacaagttctgaagatgctgcattaaaatttaacaagcatgatacaatgacaagaaaattatactcgctttgttacgaatccttttgcaagtagaaatgactctcgggtaattgttacatacaaactttctgaaataaatggaaatcatacaaatttttccattgcagtttcttctttctctacacctagaaatgtcccatgggcactgctccctattctcacagtcaacgcataaatagtcattaaagcacttgaatccac

SEQ ID NO: 51239 - DNA, 1149 bp, Homo sapiens
  misc_feature (1)...(1149): n = a,t,c or g
ttttttttttttttttttaaaggatgtatatttaatgagacagtgacagcagcattgttacaactgggcatccctcaggccagcctggtcccatgctgtgggaccacccatgtgtggtcttccacaaggtgctggcggcacggagctcttcctgctgtgccacagacccacagaaagaaccatacgtgattccgtttaccggctgtgtcacccagaaggggcaggtgggggagatgctgggtggcaggtaaaaataaaaggggcccaaccctttgtccagcaaataccagcacagtttttctatggacacagtgatttgtaacttgaataatgtgaagttgattacacagatttcggaatggctaatatccatatgacagaaatgtgatgcattcatgagacgtgtgcagactttggggtgttgggaaacagcatttggcctttaacctcctcctcagccccaaagaggaaggggaaacaggacaggaacccacactgttgatccaacctcacatcacattctctgaaggactccgacatgttccctgctcaccgttccacctgaggtaggtcaggacccctgcccccattttccagatggggaaaccgaggcagagcagacaataagaaccttgcctaaagccaccacagtggggagtggacaccatccccttcctgatgccggaggacaaagaggagaccctgccgtctctcccactcctggaatgagcccacntgagccaggtggccttnctgctgactgaggtgtctcctcttgggtttcctggtcaaaggggaccaataaccaagcagtggcattctctgccctctgcccaccgtgtgccaaccatgtgcaccaacagccaagcacagtccagggtgtgggggaaaaggacagacaggagcacccccactgcccaaggcagaaggctgggaagccacgtcctgacacgtcctctcctgaggcccctcgtggaccgcaggatctgtaaagtgcaaacaccaaagccaagtgtcccctcacccagagctgtaggtttcctctgctgtccaggggcctctgtcccgtggagtgagggacctcccacacgcctgccctgatcttcctgaatgtgctcagtcgagcgaatactctcagctctcttgacc

SEQ ID NO: 51240 - DNA, 262 bp, Homo sapiens
tgagctcgtccccaggggggcccccaatggcttcagggcagagccaggttcatacatggaaaaggcctggcgatccctgcggtgtgtgctcccgcctggcgccatgggtgtgtgttccgccgttcactggggagtggaggtgtgggcaccggccctggaggctgccggagctgcaggttctccgcctgcagcttgtggatctctcgctgcagcctccggagctcgtcgctcaggctactgttgaccttcatgagctgctgca

SEQ ID NO: 51241 - DNA, 12648 bp, Homo sapiens
  misc_feature (1)...(12648): n = a,t,c or g
ttttttttttttttttttggttttgaacctttaataaaagtaaaaaatgaatgcaaaaagaacacaatgttgaaaacttagtatgaatgtgaacctcactagatgttcaaatctggtagagtgcaaattttgttcatactattttacatttttacaaactcaaatcactttggttcatatattttctataaactattggcaaaaaaatcctcaaatttacattcttttggctacattatttctaacagatatagatttacttccgggtttcggagagaaagacttattgtgtgtgcgtgatcaagtctgttttaaagattcactcgctggctttcatctaataacttctggtttttcataaaatgctgacatcttcattggaaatttttttcatgtaactgttttcattttcagaaaatatataagggggtcattccaaagttcagaatgatcctatttttttaaaaaacaaaattcctgtaaaacaaattaactccaggaacttaaaatttactccaagacatttccctcaaaacaaagcaaaaaaccccagcaaagatcgttacatcacaaaaccaaacacaaagaccagcgctcacaggcaagttcctctaagcttccattctgctgactggtggcttccatttaaaaggagtcttttaatcaagccactttcacagaatttaaaacaaaccaaacacatgtaaattgcaaaatacaaaaaggtaaatttataagtaaaaatgaccaaacccacaaaactggagtatttcgaaggttgagggttcagtggagggtgtaacacgaaaggaacttcacaactgaaagaaatcattgccgagtttcctccaggcagcactgaaatgaatggagaaccttctctcgaacatctcacacgttaaaaaaaataaatatttaagagatacaaggctcagattggttttcatatacattgcacttgaagtttaagacccaatacttgcaaattaggtctggtatggtctatgccattaaatgaatacattgtgctcaccaatatcattgactagaaacaccacacgtttaatgcagtgccatatgcactctcctttttacaaggcaatcacagattgcaaattccatagggctgtggcaaaaaacagtcatctctattctgtagtaacaaacaaacaattttggctcactaagattgaaatacatggcagacaggtattcattcttagatgactatggatttcgaaataaacttcataaactgaggtgaaaattccaatatatcgcagtgtgggaaccaagacttttcattgccttttgctcagtaagattgtctacacaaactgccacgggaggaatgacaagcagttgacccactggtgatacacacacgtgtgaccatgtaaacacgccactgcaggacggacgagcgtgaccgtgaagcgtggccacgccgcgaccccacttagagtgtgacctctctataatcactgctgcttttcttgttttgtttttttttttaaacacagccctatttttaaaaatcttttggataaatattattcctattacaccatacttcatgtttgttaagcaccatcaacctacctcctttgggcactgacacaaaactgcgggttggtaattgagtcttagttcaaggctttgaaatatggcaacttgttttaatcacatgaatgaaatcgaatacttgggaagctgccacctgcctgaacccacgtagcctgggcagaatgctccagggcacagacaggcgccagtgcgggcagtcaagggaagacttcagggtaagtcatcattctccacctccctattctagactaggtgaagagttttttccaggagtcatttgtacagtcagcccgatctaaatagattacttaagaaaaaagataatctttgtcataatccacagtcagattttcttccaaaatcttccttgctctcagaatcggtggttttgaagactcaatcactatggggcttttcaggaacaccctatgtgtagaaaggaaaaaaaaaaggaaagagaaaattagcactaaatgtataaatattttaattaccaattaagtaggtcctaacatgggaaatattgacactttctttgactgaagcaacaagattgagaggtgggacatgtgcagagaactggagaccgaggccagctctcccagctcccctgcgccgtcttcatggctctggccccgtgagccacagctctcacctgcaaaattaggataattctctgcctcaggtgaaattacgctgctgaggcccttattaaagccaccatgtaagtgtaagacttggtgaaagtttaactaaattaatatctatataaaggaaacacccaattttatcaaagcatggtgatgcttagggtatgataggttcctgaaagttctaactgcaatttaagggattgaacctttatctgaagggaggtttctgccacaaacctttattagtatctgatgcctgtgttataacccaccttaccagcagtttgttgaaacagacattggaaataggtcatgctttgtaatactgaagctctgtgtgccctcaattcacacagagcttcacagttgggaaatcctttctacatgttcttcctcatctgaccctcacagagcttctgagaggtagacactacagttactactatgaccaggcacctcagggtaaattcttaatggagaacagtatttcactgatgaagaagcaaagacagagagattaaatgaccttcctgaggtcacggagcttctgctaaagggcaaaagagaaactccatacagaatttttttccctcagaatcgtgacttcccacgttacttaattgccctccactcactttaagaggaaggagctgagctcctcacttcagcaatgacggagattactcatccagaaaacaggccaaaagagcctctcatcttgaacaaaaccagggcaggtaagaaagtcatgagtctgggttggagtcaaccagggtattgccagggtactacccctgggggacaaaacacaattaaggacttccttagggaaacaatacaatgctttcaagggaattggaacaaaggtgaaaaggaactgcccaagtttcttgggtttttgcacaactggggagggggttcttattcaaaccgtggggggggggaaaacaaaaaacgggcaaacttcttgggcaagcaaacccgggaaaggaaacttgggccaacaaaaatttgactccctgttccctaatgtactgaataaatagatgggaagtggacttttagaatccctggtcgacagagaccccagtgaggcctggcagagacgccagaggcgggcgacagccaggccggggcggacctgacacgtggcacagggacttccagcagtgttgcctaatggtggcacattgtaaatggcaacccagacaccaacgcaggctgctgtaacctgcttccaggtgagacagtgcgagcattgtgttggtattggcagtgtggtatgctaatgagaagtcggcttgcaacgtcgacctctgccacccacctggtcaagctgtttaatcttcctaagctgctaattccccttttagaaatgggctaataatagtttctactccaaagacttgtgtatgaggactaaactgcctaacaatggaaacgctcagcacaatgcctcctgtgcagcagtaagagcccaacaaatgtaaaccctcaataacaataatagtattattatcattagcagctgtattgggtcaatcacaaacaggaccgccaaatcaaattccaatctgacactgaggtgggggggactctccctccaggtgtcccagtggggccgggcagtgtcaacaggacaggcttgatttctgttggcagtttgcagcttactcttgaggaaggacttgaagctacacacagcaacatactacaagttctaataaatgatggttacagactcattttcctttttaaacatacagactnnnnnnnnnnnnnnnnnnnnnnnnnnnnnnnnnnnnnnnnnnnnnnnnnnnnnnnnnnnnnnnnnnnnnnnnnnnnnnnnnnnnnnnnnnnnnnnnnnnnnnnnnnnnnnnnnnnnnnnnnnnnnnnnnnnnnnnnnnnnnnnnnnnnnnnnnnnnnnnnnnnnnnnnnnnnnnnnnnnnnnnnnnnnnnnnnnnnnnnnnnnnnnnnnnnnnnnnnnnttcaaannnnnnnnnnnnnnnnnnnnnnnnnnnnnnnnnnnnnnnnnnnnnnnnnnnnnnnnnnnnnnnnnnnnnnnnnnnnnnnnnncaaaccacaagcaaacaaaaaaaccgtaacaggctgataacaaatgtttctgctgtattttcggacacaaaggacaacggcatgtgtggggggaaataccacatagaaaagctaggaagcccatataacttgaacccaaacccaacttgtaactttttgagcatggttattcttgccaattaactatgtttcttcttaagggagggaagcataagttaagacccaaggcatctgaagagacctgagacagctaagaaggagaggttgtggagtccactggccaaaaccatcagcacccaaacacagacctcaaattaccctggatctgggcgggtctggtcccggtgctgaactgaccctcggaatctcttcaccttcagactgtcaacaacttcactctcgtcatctcccttcacaaagccttacttggtgtaggtttcaaccttaaaccaatagctcttagacactatccctggaacattcagccacttccattttgtgagtcaacagtatgacaagagtggaatgtggggaaggctgccctgggagaaaacacgcaccacgaatgcaacctggggcacagcctgaggaacggatgcagcaggagggaggggactgcactgtgaagcccctgggccatttccggggtttgatggatagaaatgagtttgcaaattttgaagtgaaaaaaagagtaacagttgggatccagaggtaaggatttaagtatttatgaataaaaacagtggtaggcgggttaggcttagaacctcagagctcagtttcatgtgatagcccagtagggaaggggattaaggtggtgatctctcttctccannnnnnnnnnnnnnnnnnnnnnnnnnnnnnnnnnnnnnnnnnnnnnnnnnnnnnnnnnnnnnnnnnnnnnnnnnnnnnnnnnnnnnnnnnnnnnnnnnnnnnnnnnnnnnnnnnnnnnnnnnnnnnnnnnnnnnnnnnnnnnnnnnnnnnnnnnnnnnnnnnnnnnnnnnnnnnnnnnnnnnnnnnnnnnnnnnnnnnnnnnnnnnnnnnnnnnnnnnnnnnnnnnnnnnnnnnnnnnnnnnnnnnnnnnnnnnnnnnnnnnnnnnnnnnnnnnnnnnnnnnnnnnnnnnnnnnnnnnnnnnnnnnnnnnctctcctccagttttaagatacgagaacatccaaacattttcccccaagcttaaagaataaaaaggatgaagagaaagctgaagtaaggagaattataattacaccaactatcctatggggagttatctttaacatttttttctgtaagcaaaggagcacagcagggattacttaatgaaactatcttcaaaacgaaaatgtttcctccaaccatttctagatgtttagaacttatgaatgttgtgaaatttctacctccaccaaaataatgcttatttcttaaaaccgatttaaaaaggcttgacatataacaagcatccaacctatcaaacaagaaataacccaactctttaaatgttattcaagttgtagttataatgtgtaattagtcaatctggttgaggacaattttattctttaaaaaccttcttagggaattctctcccaaagagagttcccgaaacaaaaatctcaaagcaagaaagcaatgatggaggttgccagctctcctttgggaagactattaacggggatgatggcgaatgcatgaaaacaacatactatttccatgtgggaccatccgaccagatttttaatattaaaaaaagcaaggccannnnnnnnnnnnnnnnnnnnnnnnnnnnnnnnnnnnnnnnnnnnnnnnnnnnnnnnnnnnnnnnnnnnnnnnnnnnnnnnnnnnnnnnnnnnnnnnnnnnnnnnnnnnnnnnnnnnnnnnnnnnnnnnnnnnnnnnnnnnnnnnnnnnnnnnnnnnnnnnnnnnnnnnnnnnnnnnnnnnnnnnnttgatccggactccaagcttttctcagtagttgtcactcaagtctgaaccagaatatatgaacgcaaatttgaatgtatcatgtaaagtcattctatcaaggtaaagagaagcaagttttagaagataatatgatcatttcacttaccatagctaactgtcgtcctatgttccccaccgtgacgcctcctgagaaaaatatacaagggagccaagaacgaatatagaggaaatctggggacgtatacctggagcgagaaaagaaactgtaccttagcagtcaatttcacctggctcaattctacatcacagattctctgtagtggggatatgcagaacgcatatcaaccatccaatgttacgaatgttcatatttgtttggttgtaactgctactacttggttttcctttgcgttacattaagttatggatagcagcatttttgagaatttcatgcctaaatctgtatcattctatataaaaaacaaataaaatatgaaaatatctaagctttccaaagccaatatttgaaaacacacacttactgtatactgatagacaccattatacacgagaaactgcgtgatcagcgtagctagaaaagctatggtgatccccagcccaaggccacttctggaacgatcaaatgtccaccaaaggcccaaagatagggctgctaaagtcaaggacagctggacattattggcaaaatccaatttctggtgatataaaagttaaggaaaagttcggtgactcttattaagataaaaaaacgtaaaaccacaagggttaaaaacatgggtattttattattgtcccacagataattcactgtccataaagcctgtgtaatgagctaaagaaaggatttgttggatgcaggttacagtaatcattaagatcacctgaaatctccctgccatcgctgagtcagaaacttagccatgagaatgaacttgctgaaagctatatatggagtgcttatatatatttatataaatatatatttattatatattttatatatatttttaaaaatttttttaatatatataaaaatttaaataattttatatttattttgaccataaaacaatatattttgctatgaagtcatcgatagccccattcttctttctctttttagtaatctgaaatgggtaggtaccaccatcatgtctgtattatgacatggagtcatttgagtatataacaaaacaaaatgcttcaatatataacctaagaagatactctggacgtagcacagaaaattaaggatacagcactggcgtggttaatgccaccaaaacctgctatgcagcgcatgacactggcccattctctcttaaatttgtggggttctccgaggtgactgtcgatacaggggtacagtaggccaacaacagctgttttaaaaaaagttgccaatgttagaatacagcagattccaagttccagaatttccaacgtggtcattagtaacacagtacattactcaaaccagtccttttcctagaaaaaattatcagctataacttcagagtgattttatattcttgttctctttgagtaccactcccacaaaattgtactgtttgggaaaagttttttaaaaatcactattatttagtgtagttgaacatgtctcagtaaacacaggaaggaatcaagcagggattattcatattaatatgagcaatattgtaaccttatatttaatatccacatttgcctaaagcacacagaacttaaatgactatgtagttccaccttgtcttttcatccggtgtgatttctatcttacaataaaaaggttagcatctgtccaccccctgtcacatcacagctcttgacactcctccccaccacccagtactgggcctggggcacgtgatgagatacatatttgctgatgtgactttgacagtctgggtcacatgctcctagagtgaccctggagttgattttcgggggttctagcatgttctgtacgaggcactgagcacctactgtgcacacatgcacatgggcaagtacggggcgagacagccccacacaggcttcgcttattctccatctggttcccgcatggtcaagcctcaagctgcggaaagaacaccagaccaagaagagaaaactcagcctcaaatcccagcttgccctctgatgggacgtggctctgcatgtttgttttctcatgtgtaaaattataaggattatgtaactgggacacagagaaagagatcactgtggtctggaatagttattctttatagacacgaacttggaatttggacaggtgggaaggaatggcattcccccaagagaagtaaaatgccaaagatgaaggcaggaatgaatgtctgtaggggggagtggggtgccgccccgtggggttggatgctgggacacaagggtcactgtgtcccagggctcttgagaaccctgcaattgtttcacctcagtctagtatgaaagaaatataccttttaggttcaactgagaaacaagaaacacagtttgcatcaaacattcagataaaaaatgttgttttcaatttattatacttcatcaggttctaattttggagttctgaaaaatggaccccccaaattaactttacctcactatagcttaataaataaataggtaaaaaacatactatgaaaaattttacttatgctcttggctgatggtttaaaaaaaagtagaatatgagagtatgagaaattgtccagatattcctagaaacccttgaggatccaattacaactactgaaggctacctatctcatttctaagatcaagttttagggttaaaggaaagaaactattctgccaactgtatatgaaacatggaatttcaactctagatatcgttctcaaaaagtgttcacttagaacagccacataatgtgtttcgacaaacgacagaggaacccgtccctccgagaacacatatgaaaacattctacccactactttttagttacagacacctgtcctagttcttcaacacggagccccctgtttaatctgctacaaacctctctgctgcttgctgttttcagtgagtcaactgaggcaatgtgtttccacagtgcaggagacacaccctaccatggcaagaaggagcagtctaccaccgatggcttgggccctttctacctgcgccaaccttgggcttgacttcaactgtgattcagttgccacatctataaatgaagctacaaatggcattgctgtaaggaatgaacacagcaaagcatctgaagcctatggtcagcagtcagctggcaggcgtcagccacaaagcaaacaggatgctccctgccctgcactggagtcactgacatactggtttgttttccccaccagactctaagctgcttaaggataggggcttgtggtgctcacttttggattaacatttcaacagcttatagagttgaggttgcagaaagcacccgacaagctcgttaaataaacaaatgctgtgtgactacaggagcagtaagtgatctgctgagccaagatcaactcaacatttctataaaagcgggtcaatgatagccaagaaagtctagtacacacacccagcagtccccgtgtccacagttcagactgactcagtgttacgttgtacagcatctatgctactgcttgggtgtacgaaaatctaaacgccgtaaggggtatcttttcttaagaacgtaatctacagagctctaacagttcagggtgtaggcggtttggcttcagaccacagtttactcagcgacccggcaaaaggaagtgctgagaagttgctcccctggcaaccgcctcctgaacccatgtgacgggtttgttttcagttatccagcagggtagcatgtttgctgccgcgaccaatggcctttcagtcccgctgctcaccagttccccaggcggccaatccggggcggctggcgcgggatgacagctggggctgtacccggacgccaggagggaagggccctcagtcaacttggcacagcacctgcttgaacagccaattatctccctgcctcatctccatcactgtgcttcctcaaacttcagagagctgtgtcccgaacccgccctcgggggtgccaggtcctctctacccctccttcatttctctaaatcccaagactggagatgcacactttcaatctgtggatagttccagtttcaaatgcatgtttcttataggctgaaaagtactttcaaccgaaaagacaccctttttacttccagaagaaccaggaggggtactcaccagctgctgtcccgcagcagggagggacccaccaggcggaggaaaagatggtggcgatcacctcctcggggaagagagtgacattcctctggatctgcagcaggttgagcaccagggctaggaccaccccaaccgagaagagcacgaggctcctctgcaacaggcgatgatgccaggtgttggggtaggggctgccgggctcggggccgctcatcgcagcactgcgtcccctgggcgcgtgggtcagcgtccggggcaccgtgggccgccagcagggagggcccggacacggaaacgttgatcatctccccaaccttgggcggcagccccgcggtgctggctcgcggggggcctcggcgcctcgcgctgtgcgcacaggagcagctccagaagtggtcgtgcaatctgggcatcggtcacacgcgtccaagaggcgcttcctggaagaagggggtcatcaagttcactcagaagagacaaagagcgaggaaggccccgcgggacgcgaaccccggcacccgggacaggcgggagcgccgccccccaaggttagacccccgtgcgcccgcccggggacagggggggacgggaccgcgctcacagagaggagcatccccggccccagcgggacccgcgtcccaaagacccaacagggcccgcgcccgcctacctccggggaggaccggctgctgcgcgaccaaagcccgcccgcgacccctatcccagccggccgcgtacctggccgagaggcgcccgcccgccggctctccgaacggaggcggggcgggggaaaggaggagtcacggcccgggacggccgcagcgcctggcgggcgcgcgggtttatatccgcgggccgcggggcccgcatcacgtgagcctgcccggcctacccaccgcccgcgcgcaccgcccaggggcgtggcctgagcttgccccgccccgcccgcgagcccgtccgcacgcggtctggtgaggcggccgcggagctggggcctgggaggggacggtcctaccgggaggaggcggaggcaggactgggtggggttgcgggcccggcccctcccctcccggctcctgtctcccctcgcctggtgtcccgcgcctggtcgggaggcggcgggtctcgatcgcgcgggcctccctggaggggcgcgggctctggcggcggggaggcccctgctcagcgcaatggcgggcttgcatccttgggtgattttttcgggccccttgtggcctttgctcacgcctagagagcaaaccacccgcaccacccaggagcagataaaatcgagaccacagcctccaagggagcgcgcctccatcctgtttgcccctcgggtcgccgtctgagggcgggcccgtgcccgctcagagcctacatccgagtcgtataaagcgctgacagcagagaaagctgcggctttgctccgtgcagatgagcaggggctgagggaggacgctgtgctctcagtagccgcgcttggcccggggaccctgcaggcttagaaacgtgagtcacgcctgcagcgtggcgaggaaacgccgttgatgtggcatcctcagcctggggttgtggctttaagccagaaggtcaaaaaaagaagtcttcctgagctgagactgccctgagtcgctttaggggcgaaattccgagcatccggttgcatttcctgaggatgacacgcgtggtgggtgtggacggcctacaggggtccatcctcagcggcccctctgcagggcagtctcgctctcactctcccagctgactcctctcaagcctgttaaccattgtacacgttcccaaggactccaagcaggttggacttcagggaacattgcagtttgggtcttggccattgtttacactccaccttgcataagtgcttgaggatcacacaaccagatacgtagatcatccgtagatcatcgcagtcacatcgaagatttgtttataataggaaaaaaaaaagctacccactgtcatgcgctgggaaactagtgagctgaaggatgacccatctgtaaatggggtgctccctaatggacagggcacctttcagaagcctgtgctgtgtctcctcgaccccactgtgagct

SEQ ID NO: 51242 - DNA, 891 bp, Homo sapiens
ctccaaggagtagctttattcagggatcataaacatcacagcctctcctcaaagtcaagcctaactgctaggtccccagatgtacccaagttgtctaggactggcaggggtagcttgtttgctgtagtgtttgagggcaagagactgaccatccatgcagaaagctggcctgggctgctcgctgcctgccgtggctttcccacctcattaggagcccgcttctctcggtggggagatgctgcccccagagcatcacctggccaggtctgagggcagagcatggagtgggtccagactttgtttctctgctgccagccgtagaaaggtctgggctgtcagatctcccccaagccagacagcctcgctcagctccttggctggggccccttagggaacaggcctgcaagtgtgatgagccaggtgtgctcatccaggcagctacaggcgcagcctcttgatatcttcactgcggaagtctatccgcagggccagcacctggcgcacttcagcaggggtgaggcgccacgtcaatgggccggaattgggtccccagtaatcgaggatctcggtcacccgctccagattgaggatggtggccatctgggagagccgggcaaacttgtctcggatggtcccaggtggtcaccgtggtaaggtaggcaatgagtgacctcagctccttgtcaaactgcagaccacccagccggttaaaggtggatttcagcaccactttctccaactcgacggcaacaaggctagtcatgaggccggttaggctgtcgtagatgaccggggacaggctggccttgaactctgccatttgctgctccaggttaaggatgaactgttgtacccaagggtcgttggcctcatagtcattgaattcttcca

SEQ ID NO: 51243 - DNA, 1550 bp, Homo sapiens
ttttttttttttataaagaacaatatttatttccatttacagcatcaaataccataaataaagctaaacattgtttgttttgctgtgtgcaaaatacagggttccgtgtggcactgtaaatgattaccaaaggtcacagacatgcgttgtgatgagatggggaggctagctaaagaggaggctgagaggggaggagggcactctttggttgacattctataaagggagggagactctgtaagagaagataagacaagagcaacgactttgtactggccaggatctgcacaaatacagtgagcgtgcagcatgcagggccaggcaggcaggcccgggggtcagggtggtctgggccacatgcaggacagacgcccaccgcagcctgagaccgcgagtgttgcctaggacagctccactgtgcttggtgtgttgtttctcgttaagagtgtgttggtgattatcctgctgccccaggtacaagagtcagcagaaatgtgtgctttaagcagagtcacaggggcctggggctgaactgagtcatttctcaaagatatccctgcctgggatgatgatggctctaattgaagctctggcatcatctggggctttatgagccaagggagataagaagagccacagcaaaacccttgggtctacagtgccaggctgcaaccaaggcagcatttgcctagaatatttgtgattatgtgttcaacctacagagcatgtgtcaagcttgggatgaggcctgagagtaattaagttttttaaatccctccaaataatcacctatggttttgataaatgacattaacaatctttacattagagccaatttaagaaggcgctggtatgtatgagctttttgaggctgctcaaaaagtgttcttttcaaaggtgacagaggccccctcatggtattgtttcatgatcaaggtcgaccctcccaagaaagtaggctacttcgcagacgcaactggagaagcatgcacgcaggcagacccaagggagagaggagaggcggggcatgcacttggggtagaccaggctgcccagctccatgggaaatgaaccaccaggccatgggtctcaagctgaacacccccccgccatgctgttagccaaccatgccaccaaatgagtccatcagtatgcaagacactcacagttagtgcaaccagtactgctggcggagaggacggggtgcggaaagcgggttgggggttagtaccactctttgaaaattggcaagaaaaccagtcaccttagagcagaagtgtgtcagccaagaagtgggtgtagcactggaaggctgaaatgaactgatggccatggcgtaagattggaaagagagagaaagatagaaaagagagcttagtgtggggaaaaaaggaaatgattaacatcacgagaaggcaccggagttgaaaataaggccacgattgaaagagggaaacttcctctgaaagagtcgctgtttgcttaggagagatgaacctttctggttgtgaccagctacttgtttacgagagtggatgcacacagtttgc

SEQ ID NO: 51244 - DNA, 411 bp, Homo sapiens
gagacattccggaacgccaaggtggccaacctctacaaggccagcgtgctgaagaaggtggccgatatccacagagcctccaaggatgggcagccctatgacatgggaggcagtgccaagagctgcagtgcccaagctgagcccccggagcccaatgagtatgacattccaccagcctcccatgtgtactcgctcaaacccaagcgggtgggagctggtttccccaaaggctcctgcccgttccagacggccacggaactgatggagacgactcggatcagggagcaagccccccagcccgagcggggaggcgagcacgagcccccgagccggccctgtggcctcctggatgaggatgggagtgagcccctccctgggcccagaggggaggtccctggaggcagcgctcct

SEQ ID NO: 51245 - DNA, 360 bp, Homo sapiens
tgccctcacgtcagttgtacatggcatggaactttaaaaattttaatataaactttcatccagttagcttcataacttttacgttccagaattttgtttattttcctgtcaatgaaagcaatttttaaagataccagtgggacaggtttggttttttaaaaatctcatgtgttcaaattaacataaatattacacgtcaatacactgtacatggtggtaatagactctaagcaattgccaagatgtattctatttttatgaagtgtatatatattaccttagtgtgcattttctatataatatcttgatggactcttttataaaattattttataaaaaacaatgttacactaaaatcag

SEQ ID NO: 51246 - DNA, 701 bp, Homo sapiens
  misc_feature (1)...(701): n = a,t,c or g
ccgctgtgcccggcctggccgcggcctagtcccggcagacgggactgacgaggtcaccaagcccaggccgagacggcgcgggtgtcagggacttgggaatccccctcccccagtcccgatcccgctttcctttggggtttcacctcagaggacccgacagcactcttgcagtttcctcatcctcaagatggactgcaccttctggcatctcaagtggttcttgtgaagattaaatgaatccatcnnnnnnnnnnnnnnnnnnnnnnnnnnnnnnnnnnnnnnnnnnnnnnnnnnnnnnnnnnnnnnnnnnnnnnnnnnnnnnnnnnnnnnnnnnnnnnnnnnnnngacctccccacagagttgacgctctggaaagaaaagccaggcttttctctgaggttttgcatctccttggccaatgtgctcatgccagagaagagcagtgcatggccagtttgaggagcacggccatgtgaccttggacagcccctgcctctctctaggactcactcccggtccctaacctcagctctctgatctgtaccacaaggagctgccaactaacacctgtgtcagaactactgtaaggaccctttcctcctgcgagaggagaacagtgctaaacctgtctgaacgtgatagacatgctacaaactgccaaccctttaggctataaactgctcacacatgggccaagtgtc

SEQ ID NO: 51247 - DNA, 352 bp, Homo sapiens
  misc_feature (1)...(352): n = a,t,c or g
tttttttttcaaacacggcaagccattttattataacaaatacatacaatactttagtaagtatccaaaatgagtacaggataaagaataactgataaaataaatattcaacacaaaatgttgaatttgggggttcagttgaatataaatcatcccgagcccattaatactgatagagatacaactccacataaccacgccatatattaaaatctctttcattaaacctaagncaagacaccatcaactacaggagttttagggaaccattaaggnaaaaaaaatgttgtcataggattttattgactgcaagacatattcttaatttctaacaagtcaggattacaaaagg

SEQ ID NO: 51248 - DNA, 255 bp, Homo sapiens
  misc_feature (1)...(255): n = a,t,c or g
gtattctgtgaacatttggaattctgtattcaaaatctattttgaccattcccaagtgattttgaaggtctttggcatgtcataatttgttattttgtcaaggccagtgtttgggtgtgagagtggcgctcagggcatgagtgtggaactccgtnntganganancctggcnangccctcctgantcactggnnctttactatcctggggtnngcnntatcttttgnncanntgntnnnanctntgncnttgtga

SEQ ID NO: 51249 - DNA, 740 bp, Homo sapiens
ccatgtggtcggtttctttattgagaccacagacggtagcgcaggtccctgctgtccacatgccccttgtagggacaggaggcccttcccgagtccaagtccgaatgccgggtccgggccgagcccacggccccgagtacaagtccgggttccgggtccgggccaagcccatggccccgagtccaagtccggatgccaggtccgggccgagcccacggccctactggctactactgggaggggctgcttttgctttttggtgaccagatcttggacaagcggaacttggacttcttcctctggaggcccagcttctcaatcatgtcccgcagcatctgatcctcctcttgttcccggagccggtcctcgtccagcgagtccacgatgtcactgcggtcgttcacggtgctcacgtactgctccagcagctcctgctcccgccgccgctcctgcagtgacttcagagcctcgggcttggccatgagccggcgcagctcggccctcgatgtccagctgctgctcctccagacgctgggccttggacttgtacatcagctctgactcctgtctcagcagaagctgcttctcgtgaatgagccagaaccagtccaccatgaggctatcctcagcgtcatctccctcggccgcccgcagtcgcttctccagctccacgccgcggagctccagggcgtccagccgcctctcgatgtcctgcagctgcctctgtatctcctccgggg

SEQ ID NO: 51250 - DNA, 706 bp, Homo sapiens
cacattccagaataagaacatgtttattcagatgtgccagaagtccagggtcacgcggcttcgcatttaggagatgctttacaagctctcccattttcttttcagaacatacactgggggaattcacaaactaaaacaatttctggtgacttccaatctatatattatactttacagcttcaattgaatttttttaaaagttaacttccaagctggcttgcctaacactgtgagtcaaaagtaaccctaaaaaggaaaaacacacagcactgaagggtctctgggtggtaatgccagcgtgggctggggaggtgagactaagcacatggctagcagacctcaggatgggccctggggctcatcatacagaaatatgacaagatgatgaagtcacaacttcagatgtcattggagctatctgtatatgacacacacattataaacaaataacctggaacatttcacagtgtacgacacctgttctacctgggaatgcaaaccctgagctgcaaataagaacacagacgtgggagacaccacggcctgaagctgctctcctcttccccgctctcctctcctccggtcccgtgatgggttacgctgagccagcaatgtgcacgcactaactccacaggtgttaaaggtaaggtcacttctaaacacacaacaaaattaccttaacattaggacattaaaagttaaaacg

SEQ ID NO: 51251 - DNA, 1121 bp, Homo sapiens
gtgaaattgacttttacagagaagatgaagatgaagaagaagaagaaggcggagaaggagaaaaagaaggagaaggagaagttggaggagaagcagtagaagttgaagaggtagaaaatgttcaaacagagtttccaggagaagatgacaacccagaaaaagcttcagagctctctcaggtggagctgcaggctgcccctgggcacttccagtttcctctccagagccacctccagccctgccacctgctgcggatgcccctgtgacacagattggatttgaggctcctcccctccagggacaggctgcagctccagcgagtggcagtggagctgattctgagccagctcgccatatcttctccttttcctggttgaactccctaaatgaatgatattcattccaactgctgcccctctgtctgcctggctgagatgcatgtgggcagcaggaagcccaagtgaaattaatattatgcagatgatgaaagggacctctgaacaggatttctgcaaaaatagccccaaactgcaattccatatgacttatctaacatcttggggggaaagaatattttgagaaaatagttgcagaaagcactggaaataataaacttgatcttatacaaatcttctattgtgtggaaaatgttgtgaagggtgtgtaggtgtggtacatgtgtatgtcactaacaagtggcaaatggtgaaaaaagtggtcactatgcttttgtctctcataggcactgactttttgttattatattatggtagctttcatttcctttactctttaacagtgcaggtggtcagtgaaaatcagtgtcaactcagaagtgactgatttatcaatacatggacaaaaagtaaatcattgaccaaagctatgacatgtttcacaaagttttcctcttttgcataacacatgtcactggatgtacattcagccttgttctttgaatttggtgacactttcatggtcagaccgctgaggctggcatctcttgtgacattttctcttttagtttagatttcacgattgggccttagttgatcttcagcacagctgtctacttctctttattcctgggccccttgggtaattgtgacattcctgttttc

SEQ ID NO: 51252 - DNA, 4403 bp, Homo sapiens
ttttttttttttttttagatctcattagttttatttctataacctttcgatctgatgtcacgttagattttgtcacaactggatttagtggaagcaggggaatcaagttcactattttctgaaacacacaaaaaagggatgggaacaatgacttagaactaagattgctcataaaagaccatcagaaagatccctaaacaaaagctaaatagttacagttaatggtaactggcaagggatttaatgcatttgctggtattaagtttcttatggaatgaatgaatgaacccagcagcattttatgacacagctgccagaacatcccatagaaaaacaattttgtaggaacgtgatggcaacaatcagcagccaatattctcaagagttcctaattaccaaaagcatatacaattttagtctagaaaaataagtcaattttataaaattaagtttttagatcgaaaagcaccccctttaacaggtacagagatactgaaaaatagtccctaaaaatctcactaaatagtttacggagagaaaggcatgccatgttgagttacgggattgcagcgcgtgccctcagctgctggcgagggactggtggatgggcggctggaagcaagcgcacatgcatccactggcgtgccctcccccgtcgcctgacttcaggtacttatccaggatggtgatgatctcatcattgagaatctggaacttgcgaattctctccaccatcttcttcaaaggcacatttttaataatctcatctttgcccatcatgtttctggactttaagtagattggtagcagaaatcccagcacagcaaaacgccgctgctgcccaagaagtacgatgatcatacagccagcccagtgtagcccatcaccaaagcactgctcgactgtgaactcgtgtgtccccacgggaatgcagtagacaaactgcatggcactccacagtctgtgaaactccacacactcgtccacatgcatgaccccattgctgggcagaggcccgcgccagatggggtcatccagaaagctccggatccgtgtcaggatgacctcaaacatggacaggccgcagcagaggcgctcctttgtcagcaggtccccctctcttgcgatggcaatttgctgaggggtccccagtctttcaatcagtgggacaagatgcagcggggcgtactttgattctagtcttttcattttggcatcaagtctctccccctctttcacatggactcgcggcaagatgttctggaaaggagccgcgtgcagcaggtcacacacttcttctaaaaacaggctctgctcgatgagcaggcagaagaggatggcgttccccacctcccgcaggttctggaagcacaccgtcttcagctctgccgtactccacgatgtccttcagctggtggtggaagaactccaggataccaggagagccgtactcgtgccggggcaggcggcagatcttgggcatcacctccatcagcgtcttcacgtactgcaggattgtgccttgcagcaggctcttgacgaccttcagcagctcctccatgaccacggcgataccctggtagccgagaagccggcagatgacttgaaagtgtggaggtcccacgaagttccggtagctgccgtaaatgctggagtaggccaagttcaaagccttggatccatgcagatactgaggctgtgcattaggctgcttatctctttgaaattcctgagaaaatggtaacactgtccgaacaaaccggttggtagagccgttgtagcagtagttgggcaggaagtcatagttgagctcccagaagacgtgcagggtgatcctcccgtagggcgctgacacgttgtggttggcctcccggaacatggcgtcgaagccgtccagcgtcaggtaccggctcagcagcttgtgggtcatgcggttgatttccaacaggccatccagctcaactatggaggtcaaatcttcactttcaaatcgtccaatcgccagttctagggacttatacatggctgctgagacgcgctgggtgatcagacgattgaggtctattgatctgccgaggagctgcacatgcctctgcttcagcagcgtctcgtagcggttagacggcgggaggtggatcgtggctccctgattcttgcattctgatcgtaaccgtttatcaagaagcaaacttcctgccataaccttataataggcaaatatctggtctgctagcttgtaaacaaattggtcaaaacatagattcacctcggcctcaatttcgtcgtacaggaactgcttgttgaacctggtgagcgcgtagtgggcgctgtcattgtacaggtccagggagtagagcacgtactccatcatcgatgcctccttggtctccaggatgtggtccgtcaggatccagggcatcgacatctcaatggggaactggatcctcctgcccatggtcagctccaggaagaactctcggaaccacagctgcgaaaggtcacagcactgctgcagcgtttcactgaaatttatcaagtgagtgtagaagaatgactctcgatgaaatttttctatgtccaatatggtgggcccctcaaggctacttctcaaggttttcttggaaccacttttgtctgcaatgagggactctagcatggttctcaccatgtaaagctgagtgctggagggtcccacggcgcggcgtggtacttttatgtcgaagccgctcttggggtccttctcgccccgcaaggctgggtcattgaagggctcatgccccgtctcccagtcacacacggtcttcctgatggcctgcaggacactctggatgacgttcttcttcttcttgatggcctgccgcagcggctccctaagggtcacctgggagaagtcctgcagtgcggcatagacggtgtgccggatggcgtggttgaacacgctctccatcctgcccatcagcacctgcaggcctttgatcatggcgatcacctccactagggcaaacttctcctcgctggtgtagttgtagcgcgtggcacgctcgtactcttcagcgctgtcggggcagtccttgttggagtacttgtcggtggggtgcacaagcttccaggaatacacttccatcacgtgcgcgctccactgcgacaacagctgcaggccctgcagcgccaggtcgaagagcttgcggtactccgcgtccgtcttctgggcctcctggcggcccgagcccgtgaccacctcgctgttgctgtagcgcgccagctccgaaatgaagcgcatgtggtcctcgcggatctggatcatctgctcgcagatgttgtactgagggctgctgccggaggatgtgcacgtccatcgagatttattttcctcgtagtgggcgctggtcttgatatatcttgccagttctatttgcatgtccccaaatagcggaaccacctggagttgcttgaagtacttgtcgattttggataagtttattcttttcttggcatccaacttatagatgttactgacactcccatccatcaggtacagaccaaatcccatgactttgagaagcatgtgtttctcactgggcgtcaaatacatcctgttctcgtagtaatccacacacagattcacaatatctgccaggagctcttcgtagccagaaatcacttcaagttgctggtggagatactgggtgatcctgttgtggttggccaggaacatggaaaggttctgcgactcctggatggactggggatctgccatcttccgcaggaactgtgctgccctcttgtaggcagagtggtcgttcttcacactgcacttcatgttcttcagctcgtccagcacagcgaacatgttgatgaatttgcccagtgtgatcaggtaggcttctgacacgaagtccttcctcctctcggcatggcacaggcgcctcacttccccgcagaaacgctcaatggcatttctctggaagtacatgaaattcatcagttttgtgacctcaggctccagaacctccacggttttctcgtagatttccactctgttaggctgctcgttacatttcacctgtgggatggcccgggagcagctcctccaggtgtacagcatgacagcatattcttggccctcctccagcatctcgttcatgctagagtggacggtggcttgttcaatgtatcttgcgatgccagtaacaaatgcatttctgtcttcaaagttagtgttgaaatttggctggtagagcagcgaggatggcgggggctcgatgcagggctgctggtcgggcaggggcagctcctccaggaggtccacgttggacagcgcgtcctccagagtcacctgggccgccatcctgggctgcgtccgcggcggcttgggggtcctgggcgggccctgggagtttcct

SEQ ID NO: 51253 - DNA, 84 bp, Homo sapiens
gtgaactgctaatagtgtaagtacgtgcacaaaaccactgccagataaccagaggggcctgggaagggagaaggaattagtgta

SEQ ID NO: 51254 - DNA, 374 bp, Homo sapiens
cgctgattggcaagcatatatctgtagctagaatttttttaaccgtaattccagaatttaaaaaggtaagagatctgctttttgatagaggccttttaaaaagactatataacatttctatttggctgtttatgtgaatgctcagggaatttggacatgtgttttatacagaagtggctttttatatttcttcaagtgataaattagcattaggacatatcagatagaacaggccagtttcctgatgagattggtagagatgttacggtaggttcatccttcctttttccatgttatatgtggagaagtgttaaacttgctcaagcaaatgggagtaggagataggctgaaaatagagattgctacaccattct

SEQ ID NO: 51255 - DNA, 163 bp, Homo sapiens
ttttctggaagctaacacatagtcagtgccaaagtagtgacagaagaaatcttgagaggaagcatttttgtcttgtacttgaaacagctgctgggcccaccatggctcctgtgaagatcagccatgtggtatcattttcttctcaggatcccaagtatccttg

SEQ ID NO: 51256 - DNA, 434 bp, Homo sapiens
  misc_feature (1)...(434): n = a,t,c or g
ggaatccgtaccctagggatctgtctgtcatttctctgttgctcttgtgattggcaagtacagtatcctttgggaaggccatccccctcaggactgtcctggctccgacctttgtgtacactgcagacgctggttctgaggaactgttgtttcggcctcagtgaggttgcctggatgggatctgtattagacttgagtgcaggtctctcagcactgacccaaggagttctgttatggtactgtacctgtccagtcactgggttctctcctcatgtcctctcgccccatgaggttgtgttgtgtcttctaacgtggtactagtgcttgcacctggcaccagacctccaaatatgggctgccaccaccaggggacntttccagtttacttccttataatgtgtgtttctatggggaggggggaggggaaaaggtgg

SEQ ID NO: 51257 - DNA, 1670 bp, Homo sapiens
ttagcacataggccctcaataaaatattaggatctattctgaaaatgtaatgttcactaagtaatacgctgtaaaaggtaaaagtcaggaaaagaaattcaactcttaaaaaaaaaagcacataaaatccaccctatcttaatgcagcagttggaaaagttttcttttttctttcctttttctaagttgcagtaggttttatacctaataaggtatgctgtagacataggaaatatcacattattaaattgtaaaatgcaattttgattaacagataactggtatcgtgagtttaaaaatcagatgaaaatggttcttaaaaaaaggagaaaatgactaagtggatctgtacaaatcaatatatgggaccttagcaaggaaagtataaaatttttttttagtaagcagtttttcattagttagaaggaaacggaattctgaatttcaccttatatgtttggtcctcttatctttcctggacaaaacagtcctaaccgttttaacaaatctcaattaaagtaatctaataatgtagaattcaggacaacctaccatctgtgcatctacaatatcctgaaagtcttgctcagttaatgaaaaaaaaagccaaatctgaccatgtttacagttttccacaataaaataaaatatctagaaaggcaaataaaaatggcttacttacatgaggttatttttacttgttgattgtacatttaaaaaactgagtatgtgccttttcctgctcattcagtacttttcataaagtcccaagttgagtgcatgctgttttgtaaaccacagtgtctaaactgtagcaaaaatcagatgcatagacaggttatttttaccttgcagaaaagcactgtatacagagttacaggaacaaatttgatatcatataatttaagaagctctcataatcaggtatggacactggcttatacaacatacactgtgaatcaggcacagcaacctgcaaaccacatcatcccaacagttttccattcttcctattgacaaacacttaaacacagcattttcatcatatgaaagtaaacaaaaacaacaacagaataagctttccccacactaatttctaatccaaagagctttactgcaattaatgtaaattgctatcaatcactgaattgactgggcaaagatggacttggcactgtccccccaaaataacctagaaagaatgctttaaacagatataatccatagagaaagagatttacatcataaatgctgagggtaaaaagtacgtagaatgacagatacacgatttggggtgagagatggcattgctccacagaacacaaaagaattctgttgaagtggtcactgcttctgttgtttcgtggctgggttcttgggaggaaaggagtttgtatgtattgaagtagcccaccacctgctggggaatctctgccaagacacacttgagcaagtgcttcttttggagcattctggaactgtctgaaaggcacaaactggacaatatctctgatggccacttcggcccaatggggagcggagacttccaccatcaccatccagaaactccatggcgctgaagtcagcacctccaactccaacaattatgatggacataggcagctggaggcattaactatagcttgtctggtttcatcaaggtctgtgat

SEQ ID NO: 51258 - DNA, 497 bp, Homo sapiens
catattaaatcttcagaccctggtaggtatttactcaccgcacacctcaactctggattagccacatatcaagtgctcacagccacacatactcatggctcatggttacagtgctgggcagtgcagctcgaaagcatgacaggcttttgctaaccacaagcctttcagccacacagtcctttttcccttcccacctccttttcgttatccccctcttcatccagattcctcaaggtccaactcaagtagaacctcttgagaaaggcctatcccagcaactccagctcttaatgatcctgacccactacaataaaactgaatgcaaactgtgggcaatgagtatggggagggcctatttacagaaaaaaagttcaagacagaaacactcaaggaattgaccttttcggattacaaatatgtataaatgtaatgctatcatttgtaataaagagccaaaataactaaatgtcggctgggctcagtggctcatgcctgtc

SEQ ID NO: 51259 - DNA, 773 bp, Homo sapiens
  misc_feature (1)...(773): n = a,t,c or g
ttcctaaacttcagtctccaatagtcttttaaggattggaaccacatcactgtcagccccgctgctacaatgcctttgtacaatttttttacataaggcaaataaggcttttgtacaaagcctgaataccttctgttccaatggtgtccaaatggttattatattgtgaaaaacctggccttggtcacaatgcaaacaaaagtacagatgaaagtgctttttggacagtttgcaaattgtgttaaagctacggattttttttaaagtgttcagcatcttaacgtgtattaaagctatggatttttttttaaagtcttcagcatcctaattcaccctttctaacttaagaaaaacatgacttaagacactgcttctaagtttggttgttctttatagtgtggatacccagttatctgtgagcgtatgggggtgggctgagggtcaggtgagnnnnnnnnnnnnnnnnnnnnnnnnnnnnnnnnnnnnnnttngcatgtgtatgatgtgtgtgcgtcggaccgcttctaggctactaagtgtcaatggaaaagaaaatgtattcaaaatacttaaatcaaaactagaagatggggaaaaaaagatttattctatacaaagccttgtctggaccactttagagagacttctatttttttaacccttctataaatatttgatggcacttgaaatattcctgcaataaaatgtgatttgtgtaaagaaaaaaagattttgtaatgtgaaacaaagaaagaaagtaatgtaattttcta

SEQ ID NO: 51260 - DNA, 389 bp, Homo sapiens
aaaaagaagcaagagtactgggctttaccatgagttcatatctcatttctgccaattcctatgtctaaaaaaagcttcgtgaatctctttgagcctcacattctctatctagagaatcacttgaccagaatgttcaacgcagagaaaaatactagaaggtattttaattcattccaagattccttaaaattctgtaattctatgtcctcttgattctgtctatagaaaaacttggaatacatgggcagcagagtttgaaaaaataatagaacaaaagaaacaccaagaaaaacagagaagaaagttttaaaaaatgaagacaagattatataaaagtcatggaaaaagcaacaagactaaaaaatgtattatggaagtaagcagaaata

SEQ ID NO: 51261 - DNA, 590 bp, Homo sapiens
aacaaaagaattttagtttttatgtatttggacagctaccactgaaatgttcattttgacatataagatgcagcaggatatggaagacaccaaaacaaagcacaaaaagtcaaaatgttcaaagtcattttcttccttactttcttcattacttatcacatttttcgataactaatgggcagtagcttaataagctcctatattaacaattcaggtttatgtcacaaatacttttattaaataaatttcaaagtaacaaagctttgcctacattaaaaaaatcagtagcaattataaaacaagtcaacaggtagtcgtgcatctaaatctgatgtagtattcaaaaatagagaaatccacctgtgctttacttgtatctgggggaacgtcaagaggactccatgacatacagttctccccatcttacacttcttcagtcccttggcacagacccggggtattccagtggcaaagtagtacatccattacaggctacttacttaaaggaagacaggctacttggctcttttccccaggtaagatgggcagacatagggtcactggactccttcactctccccctgaccttt

SEQ ID NO: 51262 - DNA, 1969 bp, Homo sapiens
ttttttttttttttttagaaatataagttatttattaatcaatccacttacaaagcaggtggcttaatgcaagcttattgacatcttcacatatgatccatgggaacatgtcctccacatacagacagtgatattactgactggatgcatttgcaatctggggcatattaagcatatttaaacaaataaaattaggctatcctgtatatgaaagtatcttgataataatatgcatcctgaagtagattaaaacttcctccaaaggagaaatgttagtatgttaacttaactttatattctatattatgcagtaaatcttaactatagaaattaaaaattttaaatcagtgatcgactcttggtaatgtatgaagtgggagtatataaccatagcaacagtaggttgacagtataatttgtgcctcacagtatctgcagatttactgttttcaagtttagagagaaataaaacaagagacatgtagattcagctgactttatttaccctttaaaactaataaaaatccccttaaaagtgaccccgggacctttaataagttcctatgaatgccacagatacctgcccagtgacttaaattcccaaatcttgacttaatgtgtctacaaaatcaatgtaagcagatatcttaacttttcgtgcttagcagaagacaacaaattctacatgtctttttcaatttccctaaaattttgttaaatctgcaagtatgtacaatctagctaattgaaattaatatttagtgttcatcaagactgtttcacagcagcaaaaactgaatcagggaaataaaattctaaatgatgtaggaaaaagataaatgcaatcagaacagcagtctaaatgtatgatatcaatattcaactcttatctgcactgtgttgaaaggaaaaggatacaccaagaaaatttatactgatcactctggtgatgtgactaccacctgcatctgatttatatgggttgtattctgttcccagtattaaggatggtatttaactcagaactccatatagtaaatatacagcagccattttgtcctaattaaggaatgtcttaatacacaatattatcattttctagaggatctttatacattaaactaaagtacatgattgattaaattaaaggttagtaatggataaaaaattcataattatcaaggcttggtactatgtaaaaaacaaaaagaccacaaaattctacttactaaagcagctaaccttgcctgcaagtttagggtcacaagcccataatatgtgcaaagaaatgcaatacaaggaaccatgcaaaaatacagtaaaatgatacagaaaaatgtcaaatctagaaaaaaaagcttttataaatacatcaaaatcaactgtatacataaactgtaggtctagcattagttgtaccatatagcagagccagcactctaagttcaatgcttccaaatctgcgcaggtaagtcatgccatctttggttgactgcagtaccaggaaggatgggaatgagagggagggcaagagttctgaaacatggtgtcaactttcacttggcagctgggcctcaatgtccactctgcatatggggcacttcttaattggtaatcaaccattggtcaacacacacttggtggaaaaggtgcatacatggaagacgtctcacatcttcaccttcctctaaaatagacaaacagatagtacatttttcctctgtgtcttcctcagtcccttcttccccatcttgtttgcagtgcagtttcctctttttgtatttatgtggatatgtacatctttcaattgtcccctgggatgctccacgattgacattgcctaatctttcttccaaatgaatcagttcctcaaaattgcccctgaaaggacctctgaatgatgttccatccaatcctgatgaaatgtaacggatgtgaggatagcctgccatatcaggaaccattaaag

SEQ ID NO: 51263 - DNA, 1157 bp, Homo sapiens
tttttttttccttcattttgtttttattatagcatgtttgcttaatttacagcaagcagaaaataagctgggtcttgttttgatccaaacattgatgttttaaaggttgtacacaatatttgttaaaaagaacatataaaaatacctttttagaagcctctataagaaagaaaatacaaagtttaaccccacaactttcctctttgctagaactgtaaactactgctacagttttaaatagactttttgttgtttaaactatacatccaggaaaatctaaaaaaattaaagaaacgtgcatataaacgattgcatagcagaacatgaacattaactgcaaacagtaaagaaatgaaagttagaaatactatcaaatatacaaaggttctagaatcaatcctttaaacacattccacaaacagtatttaaaatccatcgttgtattctttacaggcaaagcctaggattactaaaaccgaaattgaaaaaagtaatcctctaaaaggaatcgtttgtcccataattcttacttgtatctgtaagcaagcaatctgagatttttaaagatgctagctttttattctgaaatgaaattggacatgtcaagtcacttttgtccccaaaacgatctttcagagaaatactagaaattataaatggtttaagggtattacttcatttttagtcaggtactacactgataatcgaaagctcaaaagatgtgactcttgcttaaaactgactaatccttttccccaaattaccttaaatttcatggcaccacagaatcacctagaatgagtgttgtcttacaacttgcctcgtattaaataaactgaggtgtgaaaagcaggcctccctcataaagaggcaggcaaattttgatacaaatgcacgagccaagtgctgtaagcatcaaaatttcagttcttttacactaggcacacacacacaaaacctactttgaaacaatttacttacttaacagcagtaagaaaactaagcaatattatggtcaacaacgctccttaaactttagaataactacataagaatattcctttttccttaaaattatttttgccatcaacgacctgctcaaattttaaggtgagtttttgtgttttctatgttccaaatcttcacccacgcgtccg

SEQ ID NO: 51264 - DNA, 375 bp, Homo sapiens
ctcagactcaggaggggagcgaggaggtggctcctcagtggccaactttgcagttggggccctggagcatatggtgggtggggagggaggacagacccccatggtgccctggaacggccggtaggtgtccacctctggctgcaggaaggagccgctggaatcctgtagcagatgcccatataccatggtgtcctcgatgactgcatacacatgggagtcattgtcctttcgccctttctgaaacttttttggctgcctcggcatctcagtattgatgttgccattgtagatacccacagcggggcccttgtttgtcttctttttcttctttttcacacagcaaatgatgagcccgagggcagacagcagtaagac

SEQ ID NO: 51265 - DNA, 1294 bp, Homo sapiens
ttttttctggttaaaagcactttattgattacagtatcaattcacaacatttcataaagccactgtacaaatagaggaatgaatcactgtgtaagaaagatctaagaacagttaaatcatgatacaagtccatagtttatatggtttagagctttaagagccttaatctaacatgtttacccttcccataattagactactactgacattcatgttcagttgaccacgagtgtgtacaaatcattctaggtaaagacaaacactttcagaatgctttaacagaaaaataattttaatcaactttaaaaacacacttagatgtggatgcctttggataggaaaatagaaatgcaagtgttcagatgcttctttgaaaagaaaacaataggatagagcaccattgtgtaaaagacaaaaggcttgagatatctaccaagtatatcactgaagttctattaattaagaaataaatactgtatgatgtaagattttgttgaatacatttaacaccagttggaatatagctttttcccccccgtaatgctgctttatcacaactgtattttacaaaatcagcaactggatttaagaaagaagacataggagattttatcaacatgcaaacatttgctaaatacaaggtgtaccatcaatgtgtgattaataagttactttttaaaataaagtgctagcttagatattctactataaaccatttcattgagtacctattatgtaaccaatattttaaaatatacactgaatctgaggcaacccaaaatgaacaatggaaagaaaactagtaaatctgaaatgtacttcacattctacttaatctaatttaaaatataaattcattgtgcaacccataagaaagatggtccaacctgtgggtatttttaaaaattctaacaggagaaatcatttaaaattttgctttttcacaatggcaaaaaggaaagaatttgaacataatatttaatttttaaaaaaattcagcctgactccgaccctgaagatttcagaaagaacatcgtcactattaaaatggatggacagggcccaaatgggggattgtttaaccagttttcctaagttaaaccaagaataagccacaagtattcaattgtgttacaacttagatctgagacatttacatcaaagcatacttccctgaacatgttcacatttaaaatgcttaaggtcttattattaaatccaaaataccaaaagtattagaggagctagttatacaatattggcacagcatttttaagcaataataaaagtttca

SEQ ID NO: 51266 - DNA, 801 bp, Homo sapiens
gcgggccgcgagaggagggaaaaggcgagcaaaaaggaagagtgggaggaggaggggaagcggcgaaggaggaagaggaggaggaggaagaggggagcacaaaggatccaggtctcccgacggaggttaataccaagaaccatgtgtgccgagcggctgggccagttcatgaccctggctttggtgttggccacctttgacccggcgcgggggaccgacgccaccaacccacccgagggtccccaagacaggagctcccagcagaaaggccgcctgtccctgcagaatacagcggagatccagcactgtttggtcaacgctggcgatgtggggtgtggcgtgtttgaatgtttcgagaacaactcttgtgagattcggggcttacatgggatttgcatgacttttctgcacaacgctggaaaatttgatgcccagggcaagtcattcatcaaagacgccttgaaatgtaaggcccacgctctgcggcacaggttcggctgcataagccggaagtgcccgggccatcagggaaatggtgtcccagttgcagcgggaatgctacctcaagcacgacctgtgcgcggctgcccaggagaacacccgggtgatagtggagatgatccatttcaaggacttgctgctgcacgaaccctacgtggacctcgtgaacttgctgctgacctgtggggaggaggtgaaggaggccatcacccacagcgtgcaggttcagtgtgagcagaactggggaagcctgtgctccatctttagcttctgcacctcggccatccagaagcctccccc

SEQ ID NO: 51267 - DNA, 306 bp, Homo sapiens
cgggcacctccctcaggcgtcgcccatctccgtctacctattcccaggtgaacggagtgagtgccccacccccttcaccacctgtcgggggccctgctggcagcttagggtcatgctcagaggagaaggaagatgaaagggaagaggagggcgatggagacaccctggacagtgatgagttctgcatccttgatgctcccggcctgggcatcccgccccgagatggggagcctgtggtgacacagctgcatcccggccccatcgttgtgagggacggttaattctcacggccgatcggcagcacgg

SEQ ID NO: 51268 - DNA, 767 bp, Homo sapiens
  misc_feature (1)...(767): n = a,t,c or g
aggaagttaagaacagtcctaaaatctctttggcttctttgtcctgatatgcaccggcattttcacagtaggaactagggtttctgtccagtttttttggttctttaaggaattaatgttattctgggtacaactgcttacatacatagcacatatagatgacatttttacaggccgtcttgttagactgacatacatggaggatagtgccacccgcctcacaagaacatcaggtaagctcaggcacagagtccnagggnatctgtaagggcttcgcccacgcacaagtcagggctgccagtcaccngggttgtcttcactttatttgggctgcgtctaatgacaccttnccaactttttgaccccaccctggggcttgttgtgtaaaccattgttatttctccatctgtaatggaaaaagctaacacatctctaactccagagacattttcccagaacatgctgttcctcaggcactagtgaggcgggtacccattattccctcatttgttatcccaaatgttggcccatgtgacccacacccaaaagctcatccctgggcccactgagactggtaattgaatcagaatatagtgaaatattcattctcatatatacccagccatcttacatctttggcttttttcagcagatccttgtggcactcagaacatccattttgcactgtgtatttttttcccttctgtgtatcctgctttgtaaagagtcacgagtggttttacaaataaagcctgttcttactcaga

SEQ ID NO: 51269 - DNA, 244 bp, Homo sapiens
caagtagaaagaggctagatttgggccttgtctagcagttggctttggcctgaaccggaaccagtctcagatgaccacgggtttaaccttaatatcccggagacacccaattctagagctttatggagccgtacttccccctgaatcctagctctaggacatagatcatgactctcagcccttttacccaggatggagctggggcctgtatagccatattattgttctaagtaagttctagccc

SEQ ID NO: 51270 - DNA, 96 bp, Homo sapiens
cacgttagttattctccagggtaaaccatatgttaggtcacaaattaagtctcaatagattttaaaagatagatattatacaaagtatcttctcca

SEQ ID NO: 51271 - DNA, 208 bp, Homo sapiens
aaatgaattctgttaataattattcttcctggtatgcctgttttgcttcacaaaggctactatcatgctggatagataagaacaggagatggcagtggaaagggattgcttgttaccacagagaattctcttcaaattaagatatgtcattagaatgcttggaccagtcaatcttttgtacttatttgaaaatataggaacaatttag

SEQ ID NO: 51272 - DNA, 458 bp, Homo sapiens
ttttttcttgatccagaccatcttttattcctcatgcttctacattggtagaactttaatgttcttcgaaaatttactgacaatcaaacacttcaagaagtaagagttgagcatgttaaagcattcaaacctttaggaacactttcctaaatgacagtgttttctgggcttcaactacagaattctgtgaagaatcaaagactccaactgtaattgcatttaatcagagaatgctcttctgtaaggcattctttgagaaatccatataaaaattagatgtttaagaatctgtatattcatttagccatacaaaagacatttaaatgaaaattttattaactggaattttgttatgccacagagctaacttaggagcaagattccaaggcagaagtgaaactgatgggcagcactgctttcatatttagcatataatactatagtgggcattaataatt

SEQ ID NO: 51273 - DNA, 502 bp, Homo sapiens
gagagctgggcccactctggcaggccagggtatcatctgcgtgctgctgccgggccaggaagggtgggtgggtggccaagcaggctggcagctccagaccccagagggccagaagaactcaccccagtgccctctggatgcaggtgttggggaacactgaggacaatcccccatctcccctcacccttgagcaggccctccctgcactctctgccacatgtccctcctggtctgatcacggctgtgctcactgatgtggctgctttctgtctctgcccctgtgcccttggaggcaggcagtgaggtgctcctttcccaggcccccaccccttctcccccttcagccacttcccagcgagttggaaatgtgccttgcacccccagccgagtgaagcccagaacgcatctatatgcatcgatgtaacaagctcggatcagggacctaattggtttcccagtaagtgggtaatttctcgttgcaaatattaatccgttgttttct

SEQ ID NO: 51274 - DNA, 1355 bp, Homo sapiens
  misc_feature (1)...(1355): n = a,t,c or g
ttttttttttttttttttagagaatacagtaaatctttaatttgtataaatatttaaataaacttcatatttttcatgacatacttgagcatcttctatgaatatgaagtttatataaggttttatgctggaaacagctatacacaatttctgatcaagactttttactcatgatctcttcaaattcttgactattaatgagaaatgattgttgttcacacaggtggtggtaagtggaaaaggagaatttacctatgtttctacccattaccaggatttccatttcattcctgaaatcatttaaatcccattaaacaatttaatagttttaaaagaacaattctttcctccagttattggcagatattactctactccttttgctacaaaacgaatgtttgtcccgcttcccccaaattcacaggctgaaatcaaatcccccatacgatggtatctgcaggtagggcctctgggagatgaataggtcatgaaggtggagccccatggatgggattagtgcccttannnnnnnnnnnnnnnnnnnnnnnnnnnnnnnnnnnnnnnnnnnnnnnnnnnnnnnnnnnnnnnnnnnnnnnnnnnnnnnnnnnnnnnnnnnnnnnnnnnnnnnnnnnnnnnnnnnnnnnnnnnnnnnnnnnnnnnaggctgggactgtgagaaatacatttttgttctttataagtcacccagtctatgatggtttgttacagcagacttttaacaacttttatgattcaaactataacagcaacaacacctggaaaccattttcacctaacttttcctttctttttttttttttgtttctgattaagtacttgctcacttttccaaagtttaatttttgctttgaacaccaaatctttgtcagttcacattagttaattttgacatggtccttccaaatttctattaactatattcagggatccaaagagtcagctaatctttccatagatctgccaggtgagaatcattcaaggaaaaaatcttcaccttttaaattttttttgctacaaacttttgaaactattcttcctttggatcagctcccacacttaagtatgaaatagcagaaagggatgttttgatcccttgtctttacacaaagctgaaaacaggtgagaggttagtgccttgtatgtaattaagattctgagtatgatactgatagtatcatttccggtggaaatcagaaaggcaaactcttaaaaatgagggcttctctgtgtaaaatagtaaatgaaataatgtactacttgaatctcagggttttcagaacaaattccaggatgcaaagcctttatatattcctatcactgtggcttcactcacta

SEQ ID NO: 51275 - DNA, 277 bp, Homo sapiens
  misc_feature (1)...(277): n = a,t,c or g
gaaatggagagaatattcaaggcttttatagcataccaaactatactgtcttgtgcttggtaatatgactgtttgtgtcacaggcttttcaacactgtgtatactcaacatattcctctgttgtatgatctccgaaatgtgacttaagggaatgagtgtcccctgggntttccatttttgatgccacacacagggtttccccttatttgtgagttgtccatgtgactccctggaggccattcactggagggcttncctacagctactggcatttacc

SEQ ID NO: 51276 - DNA, 914 bp, Homo sapiens
atttcttataggagtccaggcatgataaagaaaagatagaaaagaaagagaaacgggacagttcaggaggaaaggaagagaagaaacatcataagtcctcggacaagcacagataatgaagactttccatcaaggtgagatcggactggaactgttcggctgcgaccagaaatttattttcctgagtaaattgccgagaattaagaatgaagagggccatttgcatctccttaaattattcagttacctgctttattgctccatgtggaaaacttaaaattgttaagttgtgcattactgtattttaacttgttgcttagtttctacatgtttattttcagtaatggctgaaagtgttaactgttccatacttttagcacaatgtgctgcataaggttacctgtgtacagagttttactttagattaactaaatattgcctgggttcagtttttatttccattctgaaatgctttttttttttttttttgaaactgaaaataaacaattgttgaacccttttgattttacctcattttaaaactgttttaatttattatttggcttgttcttaatattagtcactaaaagcagtgggagcattgtcttatgaaatgcttaggaatcattttatatagtacatgtacaacattaaacgtgtttaaaaaagaaaaaggtaccagcgatcacttgtcccttgccattttttcttgtaattatgttagacaaatcttggcggcggggggatcaaaacataattgttttaattctacagctgtaggagctttgtattgctgaactttcatctggaaaagtttcacagtgacatttttaaaagagaatttttttatctgccgaattctaccagtgtaaccttttttctaaataaacaatagttttctcaaatggttgtaa

SEQ ID NO: 51277 - DNA, 527 bp, Homo sapiens
agatgcttctgtttttatatttaattacagtgtatctgtatctcaaattcattgtccagaatatgtataaaaccctgacatctcctgaaatcaagaggaggggaatatagtttggaggaaacttatcagagcttccaaaatgaagggctcttttcatcttctctaaaattcatttaattttactttaaggcataagtctggcagatttctagaataactgagaggatgaaacagttattaaaaacaggggcttttcaaaagggtggcccagttggaggaagaggttaatgaagaccctcccagctctgccaacagattgtccgtgatgtcccctcaccaggactgcagacctgactcagctcctcatgcaggggatacatgggacaccaggcagagatactgctgtagactcactgcaggggttcgcctgacccaggagtttccattaaaccttttccttgcctgactcagctaggcatgacctgttatatcctaccaagaatttaaacactgtgcccacgcgtccg

SEQ ID NO: 51278 - DNA, 388 bp, Homo sapiens
cccatctcctgattctcttggaactcctacagataagcatcctgggcagaggcccaggctcccaaaccgacaaagtgaaaagagaccagagaggccaagcatattgactggtgctgttcagggcctgctcttttccactcaccacttgttttgctgcttgtcacgaggagagttgttcctggtatgtggctgctctcagatctttccaagcaagccagtcatttgaagaggttttcttttcatgctggagggcaggctaagatcaatgagtggaagagagaaaggctgttttagctcaagttaaaggaacaccttctagccatcaaagccgccaacagaggcaagggccaccacacatgagagagcgctctgtccttaaagggaattc

SEQ ID NO: 51279 - DNA, 427 bp, Homo sapiens
gtggacagttctgcattcctgagcacatttcccccaaagccaggtgcctcattcgcagcctcttgagacgggagccctccgagagactcactgcccccgagatcctactgcacccctggtttgagtccgtcttggaacccgggtacatcgacttcagaaataggaacttcagaccagattgttccagagtaccaggaggacagtgacattagttccttcttctgctaatccccaaaacctcagaaacctcataattcttaacacctggcattaccatttctaaagatggacaggccctttggcatggtaccaaccagataatgactgcatcaggatgaaagctgctgacctcggcatggtgcctcctcttctctgttggatgagtactttattgatttgagcagcatatctgtgattgctgccctca

SEQ ID NO: 51280 - DNA, 398 bp, Homo sapiens
  misc_feature (1)...(398): n = a,t,c or g
aaatcctactgtgcccagtttccttcactacatgccctgcattttttatttaaatatttagctgtagcgccatcagatatggatgccttctaacaattgctgtttgtaaaataaatcaggatggtagaaagtgattatatggaaaattggaacctggatgagaccttttcgttgaattctgaagagtaatgatgtgaaaattgatacagggcaagagatgattcttttgtttttcttctacttcatgccagaagagtaagagggaaaatggacatatgtttcatatccaagggtattcaaactgtagttagtggtacctctgaaaaatgagaatggtgagcgcccgggttggttgtctacatgaatccattctggaactgtatgccattncctttttt

SEQ ID NO: 51281 - DNA, 1214 bp, Homo sapiens
tgacaaagcctggaggctgctgctgcacgctggaaccatgtgtgggtcggcaccgagactgggatcttgaaaggggtaaatcttcagcgaaaacaggcggcgaacttcacggccggaggacagccgcggcgcgaggaggcagtgagcgccctgtgttggggcaccggcggcgagacccagatgctggtgggctgcgcggacaggacggtgaagcacttcagcaccgaggatggcatattccagggtcagagacactgcccgggcggggagggcatgttccgtggcctcgcccaggccgacggcaccctcatcacatgtgtggattctgggattctcagagtctggcatgacaaggacaaggacacatcctctgacccactcctggaactgagagtgggccctgggggtgtgtaggatgcgccaagacccagcacacccccatgtggttgccacaggtgggaaagagaatgctttgaagatatgggacctgcagggctctgaggaacctgtgttcagggccaagaacgtgcggaatgactggctggacttgcgggttcccatctgggaccaggacatacagtttctcccaggatcacagaagcttgtcacctgcacagggtaccaccaggtccgtgtttatgaatccagcatccccccagcgccggccagtcctagagaccacctatggagagtacccactaacagccatgaccctcactccgggaggcaactcagtgattgtgggaaacactcatgggcagctggcagaaattgaccttcggcaagggcgtctactgggctgtctgaaggggctggcaggcagtgtgcgtgggttgcagtgccacccttcaaagcctctactagcctcctgtggcttggacagagtcttgaggatacacaggatccagaatccacggggtctggagcataaggtttatctcaagtctcaattgaactgcctcctcttgtcaggcagggacaactgggaggatgagccccaagagcctcaagaacccaacaaggtgcccctagaagacacagagacagatgaactttgggcatccttggaggcagctgccaagcggaagctctcgggtttggagcagccccaaggagctctccaaacgagacggagaaagaagaagcggcctgggtccaccagcccctgacgcccctgtgcccactttgtaaataaactgctgaactacccaaaa

SEQ ID NO: 51282 - DNA, 1325 bp, Homo sapiens
cttttgctgggctttgcatcagctaacaaatgcacttgtggaaagaaaacagtgacaacataagatccaatgtgctgccatctttgagaacttatctgaaagagatgtcatttctgacagcccctgcgaggaattggcatccttaagcaagccatagacaagatgcagatgaatacaaaccagctgacctcaatacatgctgatctctgccagctttgtttgctagcaaaatgctttaagcctgcccttccatatcttgacgtggatatgatggatatctgtaaagagaatggagcctatgatgcaaaacactttttatgttactattattatggagggatgatctatactgggctgaagaactttgaaagagctctctacttttatgaacaggctataactactcctgccatggcggtcagtcatatcatgttggaatcatataaaaagtatattttagtgtctttgatattacttggcaaagtacaacagctaccaaaatatacatctcaaattgtgggtagattcattaagcctcttagcaatgcataccacggagttagcacaagtgtattcaaccaacaacccctcagaactccgaaacctggtgaataagcacagtgaaaccttcactcgcgataacaacatggggctggtgaagcaatgcttgtcatctctttataagaagaatattcagaggctaacaaagacctttttaactctatcattacaagatatggcaagtcgtgtgcagttgtctgggacctcaggaggcagagaaatacgttctgcacatgatagaagatggtgagatttttgcaagtattaaccagaaggacggtatggtcagtttccatgataaccctgaaaaatataataacccagccatgcttcataacattgatcaggagatgctgaagtgcattgagctggatgagcggctgaaagcccatggaccaggagatcacagtgaacccctcagtttgtacaaaagagtatgggctcacaagaagatgattcaggaaacaaaccatccagttattcttgaaactaacatccatcctgagctaaacaagagaaactaccatcttggccagtgacaagtgttcggagggcagcagagaggaccaagcctgtgtcacctggagactaagaaattaagttttgttttgacatcttcagtcctgtgtgctttcagaaaaccattttctctgcaaagaaaggaaacagatttgcaaactttaaagtctgtcgtggatttatttatcctcagattattgttactgcattaaatctacctttttgttttaagttgcttgaacatt

SEQ ID NO: 51283 - DNA, 2141 bp, Homo sapiens
gggctaattcttgcagagtttccaaaaccagaagacatcgtacttacccaaagcccgttggcacctgccaggtattggcatcggtccctaaacccacggaagttgattgaagtgaagttctcccacctgagcagaaatatgaccatgcagcgcaccatgaagctctaccgactgccagaaccaggggaggcctgaggcttcagttttactctgctgcaaaatgaaggcgggcctgcaagccgactacacgtacggaggctgttgaggacaatttcattccattaaattaaaaaatactgactggctggcaggcaggtgccatgtctgggaacagggacgggggagcttcacctttttgtcttggcttttctttgggctgtgggggggcatccatttccagggtcggggaggaaataccaaatgcattgttgttctgctcaatacatctcacttgtttctaataaagaaagcagcagaacaacaatgcatttggtatttcctccccgaccctggaaatggatgcccccccacagcccaaagaaaagccaagacaaaaaggtgaagctcccccgtccctgttcccagacatggcacctgcctgccagccagtcagtattttttaatttaatggaatgaaattgtcctcaacagcctccgtaggtgtagtcggcttgcaggcccgccttcattttgcagcagagtaaaactgaagcctcaggcctcccctggttctggggaaggtgggccaggccatcagaaggctgcctcacaggtgggtaggcactgacgggagggacactcctgctccctcccctgatctaacatctggttcccctccttctcctagagtgcagctccatgcagttgtccaaggcctttgggccgttaggttggttaaatgctggtcgtctttggggaaagaattcaggaccacagggactcccctaggcttctgagagccagcaagtaggggggcgacagcagttagacaggagttgtggggaaggcctgacattttccataaacctggtgttaaagtagctgggtgtgggctggccttcaaataagacagaagcctcttcagaaataggcatgtgtggggaaacgagccctatacaggcctcgatccggagtggaggcctcctactcagctctctccctacacacagactggagtccgtggtcaaatgcagagtcaatccaaaggcaggaggtaaaggtcgtctttgaaacatggcagctgggaggactgggtggcagagggtgggggccaggcccagggaggccttccaacagcagttgctcgaggatggttagcgtgaaggcctcagggtccttcctttgcttggtttgagacagccatggcgctaccacactgcagggctcctgtggggaggccctgacccccgggatggtgctctctgagctgaagtcccaagaaaggggttgaatgaagaacgcagggactactgggacaaaaatcagatgagcagcaagcagcccacaagccaaaccctgcacacctgggcagagttctcaccgcaacataaagcagagtccgaggagccggccacctggtttcagtgagggagatgctggggcctttgccaggagatctgtttcttccagaacagccactggggcctcaccgtttccattccatgacctgggtcaaccgaaacagagctcactccagagatccgcacagcccaaatctcagaggcagctcaagctgggacctggcccagaacagatcaagactaggacagggagcctttccaagttcccaggttcccccaaggtaggaaagacttgggcactttgtcctttgatatcctcaaaggtctggacagggtgagccactctggggcttgaggcactgtgcaaactgttgtctgtggggctgcaaagcaagcccctgcctctccgactcctcccacctgtggaatgcagtgcgcatcttgctaagaacagcagcttctttggtctcagtttcttggagtcaaggagcaaacgtcagtcacgattgctggggcctgcaatttgcagcgcaggaacaatgggaaaagggagggccctgcaggcccctgatgaaaatccaccttagtggagttgctggctctagcagcagtctgcagaag

SEQ ID NO: 51284 - DNA, 1591 bp, Homo sapiens
caccaaaccaaaagaaggtaggagtgccatttttagaaaagacacaactttaattcctgtcaagagacctaggtctactgatggcagtcactgcattgtacattattccagttcttcagtaattctgtttaaactgtgattttctttattgtgttggtgcaatattttattatcatttaacctcaggatattcagaccaacaggattgtgttgctgctgaaagtctgagcagtgttttaccgtccccagcccccctcccacatggtcacatgttcacttgcttttccttccatctgttggttttgtgagctgagagcatctctggacacatggaagggagccagggattcctgtgatacagattttgaaccagcagagtactttggttttcttcatgtcctaagggtttgatccagaaaccctggtgcttcccctgcagaatactgtacttcatttaacagaatgattgatttttctttcaatcagcatgtttcaccaaaaataggaaaggttcttctaagggttaaattttgtatttaaaagttagttgggccatttgattcaggggatttttctacacacctttgggcaatgtatggctttttcatcccctgggcttacctctctcctctgcaatcctggaagcattgtgcatagttctttcattgtaagccgctatttaaattcccacaatgcaaaactgttagaccagtaattgtgctactgaaattgtcacaaaacgttattccttgatttggtttttaaattttgcttttgtgtgtgtgtctttaaacaggtaatgtgtatttaagtgttgtctaaacagttgatttttactttagaaaagatcatcttcaactgtttattgacttctgagttatatagttcatgccctgccaaggcattgttcgactccatgatactaaaacataatgaaagaaacaaactccagtatggagaagagaaagtttaattatttggttccatctagaaaagcaacaacttaaaggaatccttcactaggattgtcttatcacctttattagataaatcatgaagtgtccctgtgaaattgaagtgaaactatctctgtaggacttaagagaatagctaaaaggtgtgacttgccttattgaaatgatactggcatatctgactgtaagcagtaggttgaagatatcattttatgaatgtggagaattctacattgaaacagaaaatacctgggaatgaagattaaaaatgtagctgctgttatttgcttggttattcccctcttgctcttctttagtttgaaaaaacaaaaacgtggccttggaattttcattttgatgcagaaattttgaaattgaaaatgtgcatgttttggtgcacaaaatccttctgtgggcaaaactttgtttttgttttgcacagtaagaaacaataggcaagcgttatgtttttggtaagttaactatgaaagctttcttatttttattattaaaaatgtaacaatttaacccacaggaaaaaaaattactttgtatgcttgtttgaaccctatgggttcgttttattaataaaattattacactaatgctaaaaaaaa

SEQ ID NO: 51285 - DNA, 208 bp, Homo sapiens
acttaactctaatacatcagcatgcgttaattcaagctggttgggaaatgacaccaggaagcccagtgcagagggtcccttactgactgtttcgtggccctattaatggtcagactgttccagcatgaggttcttagaatgacaggtgtttggatgggtgggggccttgtgatggggggtaggctggcccatgtgtgatcttgtgggg

SEQ ID NO: 51286 - DNA, 761 bp, Homo sapiens
gacacgtacacagatcaatgcttgggtttttaattttatcctggagaagctgatcaagttcacaacgaagctcctttaccagttcagccacctgatgggaagcagctacaaaacggatccaaccatcatccagggagacaacgaactctcctctttgaagctgcacattcacttggcctcctccaaacaagaccagcgggtacacagacaccatgctgcagtctcggatgaatactcgactagtttttatcttctcgtggtacaacaggtaggggctgtcaaagtgtctcacctgatagttcactgatgaagggtgaatgtgtacatatccatcgttcttgggtgacaaacttcaactcagctgattttggttgcattctgacagctccagtactggtcttctgaaattttccttctggggcttttcacctgcactacatttggatacaaaggcaggcacacagcatttctggatatcagcttgggggttctcaggcatttgaggtttgcctcttctcctgtggcatcttagggcaccatctcctccttgggcccttttctcaatttcccttgctctgagcccttcccttgcaaaccctatatccgataacagttccgtgaattgtcgtataagggatggcagctaagtacaaaagaaggcgtgcgtgcaagttataattactgcagacaaaacttcttgtctggaagagttctgcaggaaatggccagcctcaaacgacaattcctgcagaactcttcca

SEQ ID NO: 51287 - DNA, 683 bp, Homo sapiens
gcggcagcggttggaggcttcgcccggctttgcagcggggacttcggcggcggcgcctcaggcacctcggcccggacacgatgaggcgagtggtacgacagagcaagtttcggcatgtatttgggcaagcggtgaaaaatgaccagtgctatgatgacatccgggtttctcgtgtgacctgggatagttccttttgtgctgtcaatcccagatttgttgccataatcatagaggcaagtgggggaggagcgttccttgtcctccctctgcacaagactggtcgaattgacaaatcttaccctacagtatgtggccacacaggaccagtgctggacatagactggtgcccacataacgatcaggtcattgccagcggttcagaggactgcacggtcatggtatggcagatcccagaaaatggactcaccctttccctgactgaacctgtggtgattttggaaggccactcaaagagagtcggcatcgtggcttggcatccaacggcccgcaatgtgcttcttagtgcaggctgtgataatgccattatcatctggaatgtgggaacaggggaagcccttataaacttggacgatatgcattcagacatgatttacaatgtgagctggaaccggaatggcagtctgatctgcacagcttccaaagacaagaaagtgagagtcatt

SEQ ID NO: 51288 - DNA, 263 bp, Homo sapiens
taacctcttactatctcttggaccttgtcttaggccactttccctccccactcaatttctaacactctgacctcactgcttctcaaacagctctttgttgcctcttgtcctttttgtggaaaaggccttcctactgcttaaccattaggcattcttcgattccttctcattcttcattcttgagaaaggccttccttgaccctttatatcaattaggattcttttgggcgagatctgatccaaactggcttagagaaaaggag

SEQ ID NO: 51289 - DNA, 5136 bp, Homo sapiens
  misc_feature (1)...(5136): n = a,t,c or g
ttttttttttttggacagaatttcacatttattggataaatacatgcaggcactgtgcttggcactggggctccaagttagcagacgtggttcccaccttgagctcagtctttctgtgggggccactgcacaggcgtgatgggtcctgggagagggtgtggagctagggcagggcagagcctgagaagacagcctccaagggtggggatgtcacgggcccgtgcccgnnnnnnnnnnnnnnnnnnnnnnnnnnnnnnnnnnnnnnnnnnnnnnnnnnnnnnnnnnnnnnnnnnnnnnnnnnnnnnnnnnnnnnnnnnnnnnnnnnnnnnnnnnnnnnnnnnnnnnnnnnnnnnnnnnnnnnnnnnnnnnnnnnnnnnnnnnnnnnnnnnnnnnnnnnnnnnnnnnnnnnnnnnnnnnnnnnnnnnnnnnnnnnnnnnnnnnnnnnnnnnnnnnnnnnnnnnnnnnnnnnnnnnnnnnnnnnnnnnnnnnnnnnnnnnnnnnnnnnnnnnnnnnnnnnnnnnngccctctttttctgtatcttcccactggctctgtcattaattcagtgaaattatgtcaagcacctactagatgtcccacgccctgacatatcatgcggcgtcatcccaaggtgaacaagacaagtatagcctttaccctcacagttcactgagagatagctgctaagtacgtcaatcattaaacagggaaaaaacatccaggctgccggatgaagaaacatgacgtgtgctttgagggagtagtgcagggtggtggaagtgtgaaagatgtgaggacccaaccaagtgtgtgacgtgagctgggatctgctggtcaaggaaggaggggtgggcgagatggaaggttcaggcagagggagctgtctgggtgaatgcaggaagacaggaaggagcctggccctgggagaaaggctggtgtcaccagagcttcaacagggaggcatcacggctctagaagaggctggggaaggccacgagggtctcattttgcagggtgctggaaggcatgccaaggaatttggtctttggccaagaacaaggcgtgtgccancagtcacgtagtgacacaggtcacatttgctttctgccagcagaagagactggactccagtgcaggggagtgtgcaaggacaggttctggggggtggaggcatctgtggacatcccagggcaggggtgagggccagaacatccctaggtcctgagactacagtttctccacatttagatcagacattctcttccaaggaaggaaccaagagaggctggtgaaccgtctggtaatgacaagccctcacttttgcagccctcttggctggtccctcagcaggtcttccctatgagcctgcaaaggagacattcaggaatgagttccatgttcgagatagggaaactgagggccagggagaggcagtgactcgcccgagggcacacggcagaatgcaggcagaggcagagtggccctgggcatcctgagtccagttctgggcactctgcacctcacaggcctggactcagtccttgccaccaccactctcagagtccttctcatggaggggcttcaggcagccgggatccccagcctcttgcccagatgccagctgctcagagtcttctgcagggattccattcgggacacctctgccagcctccatcttctccttcaggttccgtttgaagaaaccaaccttgtacagcactatgaaaatgagcagcagcagcagcagccccccgatgccgctcagcacgtagaggtagagcatctgcttctcatacaccacgtcaaccttcatgacaacctgggccagggaggcgttgctgccatagaggtggaaatgcttgctgctgttgaaggagatggagagggagctgcagaggctgaacatggaagaggcctcgatctctcccaccagctccagagtcccgatcacttggacgaggatctcctgcctgaagacaacagggcagcggaacagggctccggggagacaaggctcagctgcatccgggagcctctccagatcctcatagtggcagggcacgggaggctccatctgcacgctccactggtgtgtgatgggcccctcgctgggaggctgtggcaccccaaccacagcctccagggtgggtatgttgtggtcgtggatggaaggctggatcctcacctggtacatgtgcttgacttggtggatcttggggcctttgggggtgaaactgacatagagtgtggagtcttcttggtcctggatgaggatgttgatggggtacaggatggggatgatggtagtggctgagttgtcctccaggaggtctgagtcctcattgttacaggtcacattggcgtgcaattcaaccgagtccccccaggagctgtttaccagtgtattaaacatcatctgcagagcaaccgagtggcctgctttgaagatgggagagctcacattgcaagataatgccctggacagaagcctggactcttcaggaagctcctcgcagctcacaggtatctggctatggggcttcagcatctccaccttgcggaaggagagtcccggggggaagtgcaggtccagctggacccagtaagcatcttcttccaagttactcaggctcagctccacagagaggctggcaaaagcagttagacgcagggctctggatcttgcaggagagaaggacactctcaagtttgcctcacacttcttgtcctccccacagttcttctcaaaagggatctcccaggtttccgagtgcagggagggtctcaggatgggcggtatgtccttgccctgcgccctttggtccctcggtgtcccttcctcctcccaaagagagaaattcagggaaacattgatgggggagatgaggtcttgaacacataccgggaaatgaaatgagaagtcagtgcatgacatgctggtggtgacagctatattccttctgagttcatgtctccctcctgggaacaacccccgtcttctggtccggtggccatccagctgcagagtgtaagtgagattggcaaccaggcggccttggaactgggggtagagagacttgatctggaaacagattgtgatattaactccttctttcatcttgttactggttgaataggagcactccacttcatgcactgggatctcagctggagagaaggacatcagggtgaccatatccaccacgggccgggagctcagcacgatcatctggctctcagcccccacagccacatctgccaagccatccccttcaaggtccttcaccccatggatggagcgtccaaaccactgaattcctgagagcacttgggtcccttctatccgctgacttggctggggactaagccccccgtgcctcccattgaagatgtacacagccccctgctcctccagaggggcccccacagccacgtctaccagcccatcgccgttgatgtctgtcagagcagtgatggcttctccaaaccgcccgagtgggtagccggggtccccctgcagctctgagacttcttcaaaccccaactgtcttctctggtagataaacacccggcctcctctctgctccccatagaacagtggggcaccaatcagcagcagctctgtctccccatcttggtccacgtcgacgccacacagctccccaccgaaataagagccaatctgggtcccatggattgtctggacctggctccagtgtcctccgccctgtggctcttggaacagcagcactcggcccatgtgctggtatcgaggggctcccgaggccagcaacgaagtcttttgccgggagggcagccaggtcacggtgtaacccaaatagcctgctctcacttctggtgtcaatggttcattcccaataaatgtgtcatcctgcaggtctgccttcaggtcaagaaagcccccagcccagtccttggctcctactgcccccacgactgcatggcccctgctgaggtcagcactgatgccgctggaggacagctccatgttgaaggaagtcaggtcctgtttgcttgtgccctcaatgacatagatcttcttctgcagctcagtgaatagatctttcagcttctcaaatgtgtccagaattttcacaaactcgctcgcgggttttgatgcaaatttgtggagggtctcctgactctccttggtctgaaaatgctttccaatcccgatgatgtagcggatgatgtctttggccgcatcgatgttgccactgtcagtggcctccccatccgtgatgatgataagcactttggtggcatctggccgggcccccagctcctcccggaacacctctgtcgcgacataattgatggcaccaaaggtattggtcaacagcaacatgtgctttacatgcttcagcagagcatcagggtccttccatttaacataatctgagaaatcaaattctgttttgtagcttgtggaaaactgaacagcagcaaactggtacgaagtgttgctgagtttcttcatcacatccttcatgaagtccagaattttctgaaattcatctggctgcaagctcatcgaaccatcaaacagaaataccaggtctacgttgcccttgatacattcctgaaaaccagggcgcccctgcagcatgggaccctgcagattctggcggaagaggtaacacaggccactcagataggtgttctggtcacacgttcgagacagcccagggtcacaggccaaaatgcttccatctgtggggtctgttgccaaggtcattcccaagtacttggaggtatagttggaacctctcagggtgactggcaggcagtgtcctgtgcccgactggcactgatagaggcttcctgtgctgttcccctcccctggagctcccacgatgaccccgtttccgacctgcaggacgcggtatccaaagtgcctcccggcgcgcggtggggagaagctccgcgcgccccgcacgtccaggttgtagctcgaggccggcgcgaagaaaaagaacccagacagcagcgccatggccatcacagtgatgcaggaatccttcatccttccagcactcgagggacctgtggccccaggggcagcgtcaggaggcccgtgggatttgctggcaacctagacagggtgaaagagg

SEQ ID NO: 51290 - DNA, 289 bp, Homo sapiens
cggacgcgtgggggaaacacaggccaaaccagggtatcagccatctggagaatctgacaaagaaaacaaagtacaggaacgtcccccaagtgcatcttccagtagtgacatgtctctctcagaacctccacagcctcttgcaagaaaagacttgatggaatctacatggatgcagcctgaaagattgagcccacaagttcaccattctcaaccacagccttttgctggaacagctggaagtttactcctcccatctcttgagtttagagcatgtaggaattttgcatag

SEQ ID NO: 51291 - DNA, 188 bp, Homo sapiens
gatcaacagtaactggatgtttttgaggtgctcaattggaataaaaatattccaatctatttggagaccaaaggcaaaatcagttttcttacctttggaattattcgtaccttttatggtaaatttcagctttgacatgtattatgaggaacgtaccaaaaaccggtttgtaacaaatctgtagagaa

SEQ ID NO: 51292 - DNA, 912 bp, Homo sapiens
atcagattgtttttgacaacaggtcctatgattcattacacagaccaaaatccacacccgttatcacagcccagtgccaatggagtccagacggaaggacttgactatgacaggctgaagcaggacattttagatgaaatgagaaaagaattaacaaagctaaaagaagagctcattgatgcaatcaggcaggaactgagcaagtcaaatactgcatagaggaacagactaaggagagataggactttaatctggaggaaaaatatcctacaaacaacaactgttcacaacagcaaacccctacatttatgagctgtaagaagaaaatggagacaaacagaaggagggaaaaaccaacctactctgaaagccttcagacattatgactctggtgataagctctttccctctccgtttgctgcttttttctggcctttacaacagaatggaagagaatcatttaagagttcctgtaacagttatgcagaaaatactaaaacccatcaggcaagatcaccacgcattgaaatattttcatatcaagataaagtcgcacattttccacaatacattgctaaaataaagaggagaaaggcttaggaagtttttttgcagagagtgctggtaaagaattgagcaagtttgctattgtattgtaatgtttctctcaggtttgttcttcctatcatgtttgatattccatgaataattgagatcagccctatgtaagttaagatcataatatgtggaacaaatggaattgtaagtgctttcaaagggtaatatttataagaaagtgtccgaaaaatgtttcttcagcttgagaaattttagaatgataggaagtttctcgagttagccttcatgcaattttgtagattaaaacataaaatttgtccaaaaaaaaaaaaa

SEQ ID NO: 51293 - DNA, 337 bp, Homo sapiens
gacaggcctgggcacatggaactgtgctctcggactctgggagaggagcttcaaggaaacaagtccatcccagaggctccctggatgacagggacaagactccttccactaggtggggatgatgtgtttgggaacctaagagccactccaaagctacatgacggtggagggatggactgagaaactgcttgtgtgacccaaacagaagcccttctccactgagaacaggggcgtcccttcaacaaggacagcaggagctcaccatgtccacgacatttgccatcaccaggatgaagatggcgagcatggcccaggtgttcctggcccagcgggtccg

SEQ ID NO: 51294 - DNA, 471 bp, Homo sapiens
gaagaattccttgcattcctggaaaaatcaatgtggatcgacgtggaaatattgtctatattcacataagagataagacatgggatgttcatgagtatttgaatagtcttttcgaagaattaaaatcttggagagatgtatactggcgattgtggggaacaatcaattggctgacttgttcaagatgttatcaggcctttctctgtattgaattttcacattgtcaataccactcagaaacagtggtttatcctactgcagcaagttcattgaatactgttggcactggaatttatccctgctgtaaccaaaaggttcttcggtttgatcctactcagcttacaaagggctgtaaagtgagggaccacatggttacacttcgtgatcaaggtgaaggcggagatttgccgtcctgtcccactgctagaatgttggacgatttgcacaagtacagagatgtcattgttgtgc

SEQ ID NO: 51295 - DNA, 351 bp, Homo sapiens
aatgatttcttgcggaacacagtgcacaggcatgagccaccagtcacagcagagcccattcgcctgctagctgagaacgaagatgtggtggttgtagacaagccttcctccattcccgttcacccctgtggccgcttccgacacaacacagttatcttcatcctaggcaaggagcaccaactcaaggagctacaccccttgcatcggcttgaccgccttacctcaggggtgcttatgtttgccaagacagctgcagtctctgagagaattcacgagcaggttcgggaccggcagctggagaaggagtacgtgtgccgggtggaaggggagttccccactgaggaagtgacc

SEQ ID NO: 51296 - DNA, 473 bp, Homo sapiens
gacggtaccaagaagggacgtgttaatggggcccagacctatggattgaaagcgtgtgctttacccatctgctgtcttgctccatctgagaccagagccaagatctgcccaggactggaatgctttcccgagtggcttgagttggagcctgggactaggagcagccttattgaggtacaattcatgtgcttgtgggtttggatggcacaatctgtgtctgggctaaggaaagcagacttggcaccaacattaaccctgacagatccaggcatctattccaggaactggaagccaagcgcaacaggtgcttggaggtcatcatgatcagcccagaccccaggccctcccctggcttggcccggtgggctgagagctatgaggccaagtgtgagcgcaggcaagagatccgtgaaagccgccgctgccgtcccaatgtgaccacttgccgccaggtggggaagacgctgaggatc

SEQ ID NO: 51297 - DNA, 1121 bp, Homo sapiens
ttttttttttttttggctatagagcatttattgcaaacaaaattgaggtaaaagaagctgacccagaacccacgcccgtccaggctggggaagtctctactcgccccacaccaggccccgagcaccgcgggcccgaagcagcccccagaggacagacgggccctgcgcactgaggtagctgcatcttaagcccccatgagtacaactgcccagggctgcccaattcccagaggggaggaggagagagaggcaggcagggggagccccggcttcaggtgggggcacaccccacaccctcaacaaacctcccagcctctcgggctggcacttcctgcctggccacccagccagccatggggcagcggggtggccaccagaggcgggcgtgctggggtgcgaggtcactgctgctccaggcagtcctcggtcaccccctgggcagccagctcagccagcacgttctgcaggtagttggggtcgggatagccgtggcccgtaatgttgcggtccatctctgtcttgtggtggatctcgttccataccacggtgtccgtctcacccgtggtgctggacgtgcccactgtgaagatgagccgcctcttccaggccaccttcaggagctcttaaggactttgcggccctgggcgttgtctggaaggtagcactggcggggaaaccctctggcagtgaacggctttccgggattggggtgctcaggcccctggatgccatggggaatgctgtaaactatgaggatggtcccgcagtcctcgtggccggggagcgacatctggaaccgtaatacctccatctttccctggggctgggtccccgtcttctctccatagatggttttgcaggagggacactgcagacttccatccttattgccgttgcagtacatggccaggaggcacagcaggtggaaggcatggctgcacttggtgaggtggcccacagccagggacccgattgccttgctgtcagtcacatcgctgtatccagatgctgcggacagcttctccattgaagatgatgcagtcctggaggagaccaaacatgggtcatgcttgccaacagtgggctgggctgacgtgggccagtcttggaaaaagaggctt

SEQ ID NO: 51298 - DNA, 3799 bp, Homo sapiens
ggcacgaggagaaaacggccgggcggcggtggctgtaggttgtgcggctgcagcggctcttccctgggcggacgatggacagccagggcaggaaggtggtggtgtgcgacaacggcaccgggtttgtgaagtgtggatatgcaggctctaactttccagaacacatcttcccagctttggttggaagacctattatcagatcaaccaccaaagtggggaaacattgaaatcaaggatcttatggttggtgatgaggcaagtgaattacgatcaatgttagaagttaactaccctatggaaaatggcatagtacgaaattgggatgacatgaaacacctgtgggactacacatttggaccagagaaacttaatatagataccagaaattgtaaaatcttactcacagaacctcctatgaacccaaccaaaaacagagagaagattgtagaggtaatgtttgaaacttaccagttttccggtgtatatgtagccatccaggcagttctgactttgtacgctcaaggtttattgactggtgtagtggtagactctggagatggtgtgactcacatttgcccagtatatgaaggcttttctctccctcatcttaccaggagactggatattgctgggagggatataactagatatcttatcaagctacttctgttgcgaggatacgccttcaaccactctgctgattttgaaacggttcgcatgattaaagaaaaactgtgttacgtgggatataatattgagcaagagcagaaactggccttagaaaccacagtattagttgaatcttatacactcccagatggacgtatcatcaaagttgggggagagagatttgaagcaccagaagctttatttcagcctcacttgatcaatgttgaaggagttggtgttgctgaattgctttttaacacaattcaggcagctgacattgataccagatctgaattctacaaacacattgtgctttctggagggtctactatgtatcctggcctgccatcacggttggaacgagaacttaaacagctttacttagaacgagttttgaagggtgatgtggaaaaactttctaaatttaagatccgcattgaagacccaccccgcagaaagcacatggtattcctgggtggtgcagttctagcggatatcatgaaagacaaagacaacttttggatgacccgacaagagtaccaagaaaagggtgtccgtgtgctagagaaacttggtgtgactgttcgataaactccaaagcttgttcccatcatacccgtaatgctttcttttttcctttattgccaatctttgaactcattcaactccaggacatggaagaggcctctctctgccctttgactggaaaggtcaagttttattctggtgtcttggggaagctttgttaaatttttgttaatgtgggtaaatctgagtttaattcaactgcttccctatatagactagagggctaaggattctgtctgctgctttgtttcttctaagtaggcatttagatcattcctgtaggcttcctattttcactttactgctctaatgctgctagtcgtagtctttagcacactaggtggtatgcctttattagcataaaacaaaaaaaactttaacaggagcttttacatattactgggatggggggtggttcgggatgggtgggcagctgctgaaccctttagggcatttcctctgtaatgtggcgctttcaactgtactgctgcagctttaagtaccttaaagcttctcctgtgaacttcttagggaaatgttaggttcagaactaaagtgttttgggtgggttttgttgcgggggggagggtaacaatgggtggtcttctgatttttatttttgaggttttgtcaactggagtacgtagaggaactttatttacagtactttgatttggcaggttttcttctacttgtgctctgcctggagctgtttccatatgatataaaaagcaagtgtagtattccattactatgtggcttagggatttatttgttttttaaaatcaaccatgttagctgggattagactccctacagtccttcaatgggaaaagtaacatttaaaaatcctttgggtaattcaaattacagatttaaaagagcttaagatctggtgttttgttaatgcttctgtttattccagaagcattaaggtaacccattgccaagtatcattcttgcaaattattcttttatataactgaccagtgcttaataaaacaagcaggtacttacaaataattactggcagtaggttataattggtggtttaaaaataacattggaatacaggacttgttgccaattgggtaattttcattagttgttttgtttgttttgatttgaaacctggaaatacagtaaaatttgactgtttaaaatgttggccaaaaaaatcaagatttaatttttttatttgtactgaaaaactaatcataactgttaattctcagccatctttgaagcttgaaagaagagtctttggtattttgtaaacgttagcagactttcctgccagtgtcagaaaatcctatttatgaatccctgtcggtattccttggtatctgaaaaaaataccaaatagtaccatacatgagttatttctaagtttgaaaaataaaaagaaattgcatcacactaattacaaaatacaagttctgggaaaaaatatttttcttcattttaaaacttttttttaactaataatggctttgaaagaagaggcttaatttgggggtggtaactaaaatcaaaagaaatgattgacttgagggtctctgtttggtaagaatacatcattagcttaaataagcagcagaaggttagttttaattatgtagcttctgttaatattaagtgttttttgtctgttttacctcaatttgaacagataagtttgcctgcatgctggacatgcctcagaaccatgaatagcccgtactagatcttgggaacatggatcttagagtcactttggaataagttcttatataaatacccccagccttttgagaacggggcttgttaaaggacgcgtatgtagggccccgtaccctactggcagttgggttcagggaaatgggattgacttggccttcaggctcctttggtcataattttaaaatatgggagtagaaaacaacaaagaatggaatggactccttaaaacaatgaaagagcatttatccgtttgtcccttgaatgtagaatttgtttttgatttcataattctgctggtaaatgtgacagttaaaatggtgcattatgtatatatattataatttagaaataccattttataattttactattccagggtgacataatgcatttaaatttgggatttgggtggagtattatgtttaactggagttgtcaagtatgagtccctcaggaaaaaaaaaaaattctgttttaaaaagcaatctgattcttagctcttgaaactattgctacttaaatttccaataattaaaaatttaaaatttttaaattagaattgccaatacttctacatttgagaagggtttttttagaaatacatttagtaaagtccccaagacattagtcttacatttaaacttttttctttaaaacatggttttggtggttaacttttacacagttctgagtactgttaatatctggaaagtatcttgagatatcagtggaaagctaaacagtctaaattaacatgaaatacttcattttgattgagaaaataaaatcagattttttcaaagtcaaaaaaaaaaaaaaa

SEQ ID NO: 51299 - DNA, 409 bp, Homo sapiens
  misc_feature (1)...(409): n = a,t,c or g
gtgcaacacgaactcctcagtcaatcccaagagggctctcactccacacttcatcatctgccctgtgacctcagattaaaactcaggcttaacatttcctgaggccctgctcggtgccaggttctgggtctgtgctttccagttgttttatgtatccttgataacctctgtatggttggtggtaaaatggagagatgtattttcctgcggggaaactgagtcctgaggaaacgagctagcccacagagagctggtggctggtaggagcccggatccaaaattggggagcgtctttgccccaagttccagtgctgttttccttttataacccaatggccacaggaggccaaagtgggtacctgggccgagatcttgggccnggattttaggaagagggccaggggaaagt

SEQ ID NO: 51300 - DNA, 538 bp, Homo sapiens
tcttttctcaaagttcctgccttgctagactgttagctctttgaggacagggactatgtcttatcaatcactattattttcctgttacctagcatgggacaagtacacaacacatatttgttcaatgaatgaatgaatgtcttctaaaagactcctctgattgggagaccatatctataattgggatgtgaatcatttcttcagtggaataagagcacaacggcacaaccttcaaggacatattatctactatgaacattttactgtgagactctttattttgccttctacttgcgctgaaatgaaaccaaaacaggccgttgggttccacaagtcaatatatgttggatgaggattctgttgccttattgggaactgtgagacttatctggtatgagaagccagtaataaacctttgacctgttttaaccaatgaagattatgaatatgttaatatgatgtaaattgctatttaagtgtaaagcagttctaagttttagtatttgggggattggtttatgataatttttcccctttg

SEQ ID NO: 51301 - DNA, 551 bp, Homo sapiens
tttagtttgtaaaagtcttttattgtatccgtgccacacatagtgaaaaataacactcctaaaaaaagaatgctaccttttccacaacattttattttaaataaaacttcaagtactcttacgtaggtacaaaaaaaatctgatctatttgcctccaacaggccaccacaacacacagtagataaaacacagtggttacaaacgtcttttaaatttatttctgaggcaaggcaaatgggagggaaatgtttctatgaaaaaatactgtgtgcgtaggaaattgtcacaattttattccacatggatacaaatgattatactttaatttaggccctggtggcttaaaattatataacaaaatagaaaaatggaaaactaatatcccctacaccctgtttcaaaggcaggcactaccaagattaaggagacgccacagtgttggtagaggataattactgtacagactgtatagctatcattaccttcagacgaaaataaaatgctacaatcctctaaggcatgaacaataatgtctgcaaacaatatataca

SEQ ID NO: 51302 - DNA, 5223 bp, Homo sapiens
aacagaacaaaagaagaggcagaaaatatttgcatataacaaatcctagcttataaatgtagttttttagcggtgatgtctctaatcatcattcagggattttttttgttttgtttttttaatttgcttcactgtgtctcgagcactgatattggagaaaagcacatccggcataaagtgtaaaccagtgtctcaaaccactggaagaaccgggagagcaaacatgatttttcttatttcctctaagtaatctttctttagtaaaacaacaagtgatctttggcatagattcatactttaaaggcattaatattgcatttatatcaggcaagcaactatacaaatatgctgagggccttgaaaataatcatcctcattataaaggaaatagtgaaagcctgagtgtaaaggaccaacttaagttgtacacattcgatgttgggaactaacacacagcgatgggtgggaaggaaggatgttcaggcaaggttcttactccctttactcatctggttctggctttgggaaaaaaataaggtttcatgtgctgggaaatacttagcagtaataagtaccaaaaaggaaacactgccctctcattttgcctagtaggaacttactgtggtgataagaaatatgaaacccattactctcttgaaccccatacttgggagtagatgcagagagcttggttgtagttggttgcagggaggtaggaattacaggagtagtatttcccattgattcatcttcagcagcactagaattctagtctgcaaataccactctcccttaggcaggaagtgtccttcagacagggctgccttgccattaaacactcttaggggacaagcactcctctttcttaggactgaatttaaaaaggatcttttagagttacagatgaaacaaacaccctacatgtcctttaaaatcttgtttagaaaggatgtggaggaaggcctacaaaaacccaggatataggagacatgttttggttaaaattaaaatgcagcatttcagctcaaaatgaacaattaagagctaagaatgaatgataaggcctcagcacagacctctgcaggcagtgactaagcatggagtgccgggcagtggccctgctgggaagatggcagggccacaccctggctactctgcccttccagtggcagagagcaccaggacacagtgtgttcatgggatggctaccttggcgggctgaggcaggatatgggacgggaagtttccctagcacagacattgctcaggggcatggtaaaagcagaatcatatgattctgtgatttcttcctgacagtgaagtacagttttatattgtgggaaactagaaggattaaactgaggaagggcaggaaatgaatccaggcccccatatgctggggctccacagaggccaccttcccctgtagcagcaaagctcacttctgaaaaggacccaggtagcacagcccagggaaggaaggtatggttggcagcaacatggaaagctcaaaacaattttgggaggcacagcaattttcttcttagtaactgatttgcctgggccctgggtcttgggattctggaagagtgaatgggagccaaggaaagagaaacagagggaagtgtcccctagggaacaagggcagagcagagtgtctggctagtgttcacttggattctgagcttatgtgaagtccatgggctagaaacccagtctgcctattgggatagagggtgcacaagtgtaactgtgtttgagaatacaggctttatacagaaacacatttcaaagtgtccatgaaaaaagagtataaatgtcttctaatttgaagaggcccccattcctttctgatgtgccaggccaggatgtgatttttcagctcccagcaactctgggcagctcctgggactcagatcattttccttctttttagtagaggtttctgtgccagccaggctcagccaggtgcctactggtaccagggagtctttctaacccagcgcagtgtaaatccagcatctgttcgaattttgattgaagcagcttcagcttcccgcacagtctccttcacagactgcatgaggttctgggcattgtgaaccagcatctctgtggcctgctcagactcctcatcactgatgttggtccggcccagcatggtggccttcactgtggacaggattttgagctgggtgcttatggttgggattcgctcacatacctgtaagaggttggttctaatccgtttatctgtgcactgcttggcaacctccttggccaaccgagtcacctcatctgaggccttggcgatgtccttggcacactgaatgagtgcccgcttggtaccactgccccctcttaccagccgagacatctcagccatcagcagagccatgcgcttggctgctgcaatgatgtcattgcccttgctggaccatttgcgagcttcatcatggagctgtctggcagccatcatcattggctggttaatcacctccccggccttctgctcagggaactcttcatccttttcctctggtggtggaggcctaggtggagggacctcaccttcaggcagaggtggtttgggaggagcaagctcatctgttagtcggagttgttcaaggtctggtggaggcggcgggaagtcaggctcctgaggttggaaggcttctctgaccttggccacagctcccaggatccgatatcctgagtccaggaagctcttttgcagtccagggtcggaaatgtttccagccacagcttttgcatccatcaccattggggagatggttttgctcaattcatcagaggcagctttcacagcctcacggaacttgggatcctcggaattctccacctccctcttagccaccagcaggatccggttggcccgacgagcaatactggttgccccagcaaccagcatctgaggctgaatgttggccatagctaccttgcacttgtccaggtcttttttaattgcttcttctgaagcatccaacagagatttggtatcaatggcttcgtccaccagccctgtcattttttcaacattatcgatccactggttcttcatggtctcaaaatgttcataagcagcttgatttccagggttcctaagtaagatacgagcagccgagaccacctggggtgtgagttctcgggccgtcttcactgaggcctgaatgccttccactgttgatttattagcagtaccaaccgcagccgccttctcggccgtagcaccaagctttcctgaatggttttcaaagttagctgccctctcatcaaatacctcttccctgttaggcgcatcaggaggcgccgtggctgccactgccaacagcttgatgggagttgtggtatcgctgaaaacatctgacacttcctgagtcatggcctcctgcatccgagcttttagatcctttaaggagtcttggagctgagatgcaagtgctcgtgcctgaggactctccccttcccctctggcagccaggtcagccagctgggctgtcagctggtccactcggtcacacttggcgagaagatcttgccgataaggccccatcataacattagccagacgatgcccttcggccacaagcccccggatggcagcctgaccgactccacggtcatccactgtgggattatcaatccaccgctgtgcttgctcaatcttgccctcaaggtgtacagctgctttggccggtctgctgttggccacagcccggttggttttggtctgcaggttctgcagggccgtggccacctgtttggccaaggctcgagcctctggagaatctcctttcccctgtcttcgtagatctgctaatttagaagtcagagcagatatttccccaagggaacgtagaatgtcatctctttctttaggatcatcacataattctgctattttccgagcttcagccaaagcacctcgaatctgctcttctccttccggtccaccatttggatctgcaagccagttctgagcagcatcgatcttctttgcaatgctctgctttgagttggtcatggcttccagcttgcgagctgcattttccacttttgctgtgagcacatccagaccctgagatacctgctgagctttctgcatggccaccggtgaggatccttgtcctctggcacggaggtcagccacttgatcagtcatctgccctagcattttgcaagttcccagaatctccctgcgttctttgcctgcacagagttcaccaacttttccagcttcatctaagatctgtctgatggcctgctcaccagcatcccctggggaggcactagggtcacggagccaacctttggcctggttcagtttggagtctatggaggccaatgctctcttcatggcttcagtgtccttgctggcccaggcatcttcatcccaagaggtgagttgtaacacacgaattatctcattaatttcagcactcattttttctacagtaaaattgcgattttttaaagcttcctctatgccttggttttttgagtttttagttgttacaaaaatcttcatagctgaaatgagaactggcagcaactctttcacggtgttcatcgagttcaccaacatcactcggtgctcctggtgagtgagctcctgctgtctctcgtcaatcatcttggccatcttagtcattcctggcccaagattctttgtgtaagtgaccaaatcttccatagtctccaccacctctgccactgtaagatattccaaaattcctttgcaaactctaataattttacggacctcagcctcatcgaaggtaaggagcaggtctgatgttccagagaggatgccccttgacccatcaattagataatctcgagcaggcactgagtaagggtctgactgaagcatctgagctgcctggacaagcttggtgcaagcattctcaaccttaataaatgctggtggcatatctctcttcaaaatctgatcctcagtggtttgaacagtctcttttccaacccggacgaggttgctgacggccgcctgcacggcggccacgggcgcggtgaggtcaggaatggctttgccgtccacctcgccctcctcgtgcattatcaccaggtgggagatctgctgtgccaccggctccaggatgctctcgatcgtgcgcgtatgaaacactggcatcgcggcggcgagcggggcggcgaaccgcgggcgacagagaagtggaattc

SEQ ID NO: 51303 - DNA, 102 bp, Homo sapiens
ataagatacttcagaaagatagtaagttataaaatgaatatacaaaaaattcccatacatgagcactaactcgtgattcccctctctttaaagtaccgtata

SEQ ID NO: 51304 - DNA, 1033 bp, Homo sapiens
ttatttttttttttttttggcttgtttgatgcttttaatatcattatttgtgttacacgatacacaaccaaggatgatggtcaatactgcaatgaaaatgttaaaaaaaatattatacacggctcatgtcttccacacaccttcctggaaataaattagtgagcacggagaaacctggctgggtggcagccacagctgagagaggagggagtgttaaggcagtatctacaaggggaagggtggcaggagggcaagctaaggcctagattcttccctccaacctcccagacagggaaggagggagccacacccctccctagacacagaagctgccactgccagcttcctgcctctctctgccacacatgcactgcctcagttggaagcccttgcctgccagggaactagtatgtcctgtggggggggagattttccctggtgtctcagggccacagagattgaacaatgggcccgagtcacactgcaagtcagcagcaaaggcagcagtctaaatgagcccccaaaaagaggaggtacccatgttctagaaaggtgagccaaggagccccggggtggtggtggtggtagtgggagggctggctctggggtccagatgatgggggcacaggggttggggggatgttgatctgggtgggagaggtgggttcagatgggggccagtatgggccttgtgggtcctgcaaggtaccttctctgtccttgcctccctttgtttggcattttctcatcatctaacttgggtccctgcactagaggaggtaggaatgggttggcggagtgggggggtggtgagctgtaccccaatattttggagctggaagttcctgggtatgatgcagggagaggtaccacccttcctaagccaacagtctcactccctcctctcattgctccccattccagctcccacctcccaggattggtgtccagagagtgggctgtgggtgagtctactgcatgcctgcagcatgtgagtggatccatggaagtggatccaccagcacatgtgggc

SEQ ID NO: 51305 - DNA, 412 bp, Homo sapiens
cactgtggtcctgaactgaagagctgtgtttttcaggaagacttggccaggccgtgttccgtgtctctggattcaagtcccaggagtcctgaccagagagcaggcatcagtgtttttctgaccgaagttctcatttcctgacaatggaaatggaacaagaaaaaatgaccatgaataaggaattgagtccagacgcggctgcttactgctgctcggcctgccacggcgatgagacctggagttacaaccaccccatccggggccgggccaagtctcgcagcctgtctgcctcgcccgccctgtggagcaccaaggagttcaggaggacacgctctcttcatgggccatgcccggtgaccacttttggaccaaaggcctgtgtgctgcagaacccccagaccatcatgcacat

SEQ ID NO: 51306 - DNA, 2056 bp, Homo sapiens
ttttttttttttattttctacaagtcttgtttattgaaaggatctgaaaagcgtaataaggctttcaatgacatttaatacattttcaagaaattaatatgaaacattaaaatttacttcaaaaatccaaagttttctagatcattcccatctcacgctgctttagaggtcagttcacaccttctgtgttcagatgagcggctggaattctgaacactgccgtcttccagccctaacgctgggcgctggtccctctctcctaaggcccacggctgggcttcccctgtgcccagggtcatggcggacttcaagccaggccggctgcccagaatcacactcagggtttttggacgctcaagtccacagatgctgaggtgcccagacgagggtgagcagggagacacatgcctcggagaacgtgcccaggctgggccaggcggctgcgggaaagctcctcacgggcagaggagaacgtcttgtgccttccttatcgatctccagcagatgagggcaacttcgtgtgcaaaactcagagagcagttactcaaaaaaaagacacccgggcagcagtaaccaggacaccagggtccgacccacggacctccacacacctgtgcccgtggaagacgcgggcgccggggtaggcagcatcccacgtgctcccacagctgctggtgctgggcaggctggagactcacgggagaggcaggaggagaatcagcgtgttgagtccctcgctgtgttagtgtgaaaaattctcattactgttgcaaataaaagggatcacgatcactagccccggaaaccctcatctcccggaccatcaggatcgcactgaacagaatggtcccctaatggtccctgaggacagcgtcttgcagaacataaatgtaaacattgaatggcagacgactcccttccccttgaaatcttcacaaaagtgtgtacgagaaagtatgtacatcagcacttcagaaagtttaaaagagtctctaaaaagtatatacaggatttaaactaccttcctgggagcagaagctacgtgaggaatgtgtgggtccgtggcgatgcccagcccccttcccgctgagtgtcccagactcagtgctggcctcaagcggggagggctggatggcaggggacgcatccaaccctctccagaaactgagcagaacaaaaccgccttgcccagccactggcaagaccatgcttttcaaatggcgcctccgccaggggcttccctgcagaagttttaggggaagaggtgcaggtcaaggggaaaagcatggcagctcaaggaaggtttttggctgagacatttattatcaacattgaaggacaggtcgagtcattctgactcctctgaatttcaaccgactgatttgcggaaaaatatcctggcatggaaattgcggcagctggaggccgcgctccagggacccaccgcggggtgtcagcaggacagaagcactcccagcccatttctcacgcttctttagaaatgcaaaaaaagtcagacattttaaaaaaacagctgatctggacaaaaggcagacccaggctctaacccagctacagaaaggaagtggccgtgccactgagacaggcggtcacagacacacgcagattggtctgtccccagagggcgcttggagggcagcggaaggattcgggcctggataggggcttgacctagccctcctcctcctcctcctcctcctcctcctcgaagtgggcttgcttcttccggacgttccaatgcaggcactgggcgaggctctcaaaccagtcgctcacggggtcccgcacacagatggaggggagcgggtagcatgaggtagtgatgctgatgctgtctccatggcggatctcttgtctcttccgtccatcaaaggacacccatgctgtgttccttgcttcaggtgacagcatgatcttcagctctgacctgcggggaccacgatgggccggaaggacagcgagtgggggcagatgggcgtgatcatgatggccggcacgttggggtggatcatgtgaggccccggccgcggccgca

SEQ ID NO: 51307 - DNA, 1618 bp, Homo sapiens
ttttttttttttttttttctttgtcagaaaatatatttattattgatagtgagtgaagtaaagatgtgagtattcactatagaggttttatcagccaaggttgccttcatattgataaaaataccttatctcacttgtaatcataaacattattccagtagaagaggtacattttctctcctttttgtcttcttgcctgtataatcaccataataagttataatgaaatagctcttacataatcaaaggagaaaagaaagacaaaaccaacatgccacagcctagacaattccatccagcactgctgcctccagatctgttttctggctctctccacccagcactgctgccctcggatctatgttttctggctctctcctcgccccactccaattaatttagcccccaaccccatcctactttgttagggtggaggttcaccaaatgatggggcttgttcagaagagaaacattttatggtcagtgcaagttgaatagaaagtaccaaaaggtggagagggctgcccttctcttttaatcatcataagagggtttactaatactcaagagtgtcctttaatgactgatccctgatcaaggctttggccccttcaaactgctgctgttcaaaacgtgaaatgattctgctgaatccattcttgatgtctctctttagtggtcttctcattagtggtcttctcttcaaatgggttgttttctcactaggaaaaaaaatgttccatctctggaattaacgttgatggtgttttgctcattctgaaagtttttatcctcccttctcaagcatgctctgtttggcatgattgacacagtgcatatactgggtggccagagcggagcatttgagggtctggtgggtgttctcacggtaacactgaagaattttggcctgcagatcagcacagactggatgagactcatatcgcttgaactttgcttccacctcttcagcagctttctgatattgttcagtggtgactctgtagaactctgagctcctctcctccagtctagccagctgttctttgtagaatgcatcctgcttctttagcactcggtctttctcttccagctgcctagccaggtgctttgccttagcgcgttcctcctcgctacatatcctctcccgaaggatggctctggttaactgctcattggcagcagccctctctcggtccagctctttggcttgctttagtcgtttctgatcttcggattctttcttggcttgctccaatgccagctcctcagctactcttcttttcaattcttcatcagaaactgaggcaccataagcaccagaataccgctgagacttcgaaccagatggagaggattccttcattcgatcaatcacattttccgaaagccggatgcccttcaccacggtgatgttctcattctcgtccgcctcgaaggtgacccggcgggtgctggtggtcccacccatgattccggttcctgccccagcggagacctagcggggaaccacgagcacttcggggcccccgcacccacacgcgcgtggaagggcctggattcttttcccgcacagcgggagcaaggccacgacccccagaagcaaggagaaggcgcc

SEQ ID NO: 51308 - DNA, 274 bp, Homo sapiens
aactccattactttctgcagccaagcttgattccttgaattatagttttctaagaaaaaatagtttttaataatctaaggtaaatttgttgcaattattagcagcagcataataaggctttttgcgcaaatgaatgttattagctagagttattcaaaaaagaatgaagcacaatttttgctaggacttcttgagaactattcataaaaatgcttttagataataaacaagtataaatgtcaaaatatttttttaaaaagtataattggccagg

SEQ ID NO: 51309 - DNA, 251 bp, Homo sapiens
gcttaatattttaatgtatctcaacaataaaaccaagaagaaacaaagccttttgacttgttagaatgtattaagtagtattttaaagaaactttatagttgtgacattgaaagactgttggggtggggggaggaaaatttttactttccatcttaatgtaaccttatgctattctgtatttttactgtatattgctttttacaataaatataaaatgaaatgtttatgttgacatttcagtgtgaactgt

SEQ ID NO: 51310 - DNA, 50 bp, Homo sapiens
ttaccatatttttgaaagtactttatgtgtctctctcctcatcttccagc

SEQ ID NO: 51311 - DNA, 1088 bp, Homo sapiens
  misc_feature (1)...(1088): n = a,t,c or g
ctggtccnttgtcttcatgattcanctgatgctcttctggaggctgccaaaatggcaanttatgccaagtttcagaaaatgtgtgatctcctgtttgttatgtttgccgtggtttttatcaccacacgactgggtatatttcctctctgggtgttaaataccacattatttgaaagctgggagatcgttggaccttacccttcctggtgggtttttaacctactgctattgctagtacaagggttgaactgcttctggtcttacttgattgtgaaaatagcttgcaaagctgtttcaagaggcaaggctgggaagtggaaccctttacatgtgtccaaggatgatcgaagtgatattgagtctagctcagatgaggaggactcagaacctccgggaaagaatccccacactgcgacaaccaccaatgggaccagtggtaccaacgggtatctcctgactggctcctgctccatggatgattaattacttcaaaacttacaagtcccaaggcaaagtgaactatttgttcctggaagtatttaataagttgcaaatgcagttcctttcataatatctcagcaccagaaacaaaaattaagattatcaaacgcattttgaatacgtgcactgccatgtgtcctgtctgtgaatgaagaagaattaccattctctctttgtaggcatgctgtatgtaatttgacacaagggaacagtatttgcatttgtactgtcttagaatattatttatttttttgtatttgtaaatctgtggacaaaagagggtttcctcactccttttactcactgggctcatgacagtgaaggagatgctccatctggcttctccccctttctcttgctgtagtccaatgtgctatgagcatcagcttactttgtcacttagagcaagcaaaacccagtgcaagagtctcgttcagctctaaataggtttgctttcttttagttacagtgcccattttgaaattgcctatacagtcttagtgaccatttaaaccggacgaactaggtgtttaattttcactcttcatgttcaattagcagttcaaattaaagaagatggttattgg

SEQ ID NO: 51312 - DNA, 511 bp, Homo sapiens
gacgatcggcactataacatccccgtcagagtgtgtgaggagaccagtctatgagagacgcatgctcctgacagcctggcgacgtggcgaagatgcacaggcttccagccaccctaagccacgagactgggcagtgtcaccaaggatcccccactgacgaacgccaccatccaacctggtcagtggctgctcaggttctcctgcacccaggaggatgcacccgggaggaggctcccggcgcggctgtctcacctgcttccggtagacatagcacgcagcgatggcgaccatggtggattctcccacaaagcccgccaggagggagcccacgcccagggtcgcaccgtgcaccctgcagatgagaacacaaaggcaatttgtctgttaaggccaagtcaaggcacaaccgtcgatgccaaaacccaggaaagtaagtgtagcctcgagacggctgagaccagcggcgttctccatctgctggcttcgtaagggccgcagctaataacctaat

SEQ ID NO: 51313 - DNA, 1187 bp, Homo sapiens
  misc_feature (1)...(1187): n = a,t,c or g
gcaaatacaactggatcaagcaatggaaacttggactgaaatttgatgggaagaatgaggacctggttgataaaattaaagagtcccttactctgctgaggaagaagtgggcaggcttggctgaaatgagaactgctgaagcaagacagatagcttgtgatgaactattcacaaatgaggcggaggaatatagcctctatgaagctgtaaaatttctaatgctaaacagagccattgaactatataatgataaagagaaaggaaaggaagtaccatttttctctgtgcttctgtttgctcgggacacatcaaatgacccaggacagcttctgaggaaccacctcaaccaggtgggacacactggtggtcttggaacaggttgaaatgttccttcttgcctatgctgtgcgccacaccatccaggtgtaaccggctctccaagtacagcacggaagaattcatcacagtctaccccaccgacccacccaaggactggccagtggtaacgctcattgctgaggacgatcggcactataacatccccgtcagagtgtgtgaggagaccagtctatgagagacgcatgctcctgacagcctggcgacgtggcgaagatgcacaggtggctcctgggcttgggctgcaggtttgggggtctctaagaacaatctctgagaagaacccttgggcccctgggagccaagttggacaggatgtcctgaagactagcttttgataagagaaattaaccaagtctttcccctcatctatgatgcaatatatttcagtgggggccttcagagcacacctgttggacggtgcaaaccatatcttctccagaaggcaaatacttttgtatcagaggaaactcagttttggagaggaatatgttctttatatctcaaatcaaaactctctctaatggtaaactggcttctaatttttttaagtacagtatttttttttcccctttagtagtaacgggtttctatagatcttcctatacagtctgctttaactcaggaccttgaggattatgagactgacgtgctgcccactggcactgagggggcttctaacagtctgctttaagtggtataattctgggatagatctgttactggcatagtcatgacaacctctggtaatcttaccttctcctttttatgaagggtttnanaatggtttg

SEQ ID NO: 51314 - DNA, 1624 bp, Homo sapiens
aggagggaagagtgtgcagacggaacttcagccgctgcctctgttctcagcgtcagtgccgccactgcccccgccagagcccaccggccagcatgtcctctgctcacttcaaccgaggccctgcctacgggctgtcagccgaggttaagaacaagctggcccagaagtatgaccaccagcgggagcaggagctgagagagtggatcgagggggtgacaggccgtcgcatcggcaacaacttcatggacggcctcaaagatggcatcattctttgcgaattcatcaataagctgcagccagggttccgtgaagaagatcaatgagtcaacccaaaattgggcaccagctggagaacatcggcaacttcatcaaggccatcaccaagtatggggtgaagccccacgacatttttgaggccaacgacctgtttgagaacaccaaccatacacaggtgcagttccaccctcctggctttggccagcatggcgaagacgaaaggaaacaaggtgaacgtgggagtgaagtacgcagagaagcaggagcggaaattcgagccggggaagctaagagaagggcggaacatcattgggctgcagatgggcaccaacaagtttgccagccagcagggcatgacggcctatggcacccggcgccacctctacgaccccaagctgggcacagaccagcctctgggaccaggcgaccatcagcctgcagatgggcaccaacaaaggagccagccaggctggcatgactgcgccagggaccaagcggcagatcttcgagccggggctgggcatggagcactgcgacacgctcaatgtcagcctgcagatgggcagcaacaagggcgcctcgcagcggggcatgacggtgtatgggctgccacgccaggtctacgaccccaagtactgtctgactcccgagtacccagagctgggtgagcccgcccacaaccaccacgcacacaactactacaattccgcctagggccacaaggccttccctgttttccccccaagggaggctgctgctgctcttggctggacccagccagggcccagccgaccccctctccctgcatggcatcctccagcccctgtagaactcaacctctacagggttagagtttggagagagcagactggcggggggcccattggggggaaggggaccctccgctctgtagtgctacagggtccaacatagagccgggtgtccccaacagcgcccaaaggacgcactgagcaacgctattccagctgtccccccactccctcacaagtgggtacccccaggaccagaagctcccccagcaaagcccccagagcccaggctcggcctgcccccaccccattcccgcagtgggagcaaactgcatgcccagagacccagcggacacacgcggtttggtttgcagcgactggcatactatgtggatgtgacagtggcgtttgtaatgagagcactttcttttttttctatttcactggagcacaataaatggctgtaaaatctcaaaaaaaaagaaagtgctctcattacaaacgccgctgtcacatccacatagtatgccagtggcgtttgtaatgagagcactttcttttttttttttttgtcgacc

SEQ ID NO: 51315 - DNA, 1536 bp, Homo sapiens
  misc_feature (1)...(1536): n = a,t,c or g
gctgttccggcttcttcacggctgacattcggctaacgagggattactttggccaaaacctttcaaaggatatgcagaaagatggtagggagcatttgggtttgaatctgaatgctatactggatactctgctccggaaagatgagctttttattctactacttggaaggaaaaggaattcctggtccacctgaattcctctatgaaagcctaactcttgaaggtctcctaacataccttgtcatagaggaaaagcacagattatacctggatgattcaggagcacattctgattccaggtttggtagagctggctcttctactccgtaaagccgagtctgggactggcagcccatccaagtgtatatgaatgaataaagcatccaagtatatatgaatgaataaagtatgtaagtatcaccagaaaaaggaaagaaaaaatgtactccttggggcaagcccagaagctgccctggcctctccagaccgtgtttacagtgtttgcatgtagaatgtagcccttcctgaaaagaacacttgtttctaaatacctcggggctgctggagccgctgtgggttagggatggactgaggcctcgaggagtgagggtgcacccggggcccagcctcaggctgccctagggatctctcagtaggaagaggaagttgcgtgtttacccaatcctgtttctccaatgcaacgtccacccactttaccaccaaaaactccagggcctgacggcaagcccggtcccccagcactcaccagcagcccagtgttctccaccaagccacagtgtgcatgcctggtatcctccggattcccttccttctgcccgctgagtcactgggcagagaatgatgacatgtgtaggtngtgtggttgggggtggaaaggggaaggggttgatcctcaggactctgagggagcatcgttgaattttcctgttcagtgtgaccaagacccacctggaaatggaatttggaactggcttcaggagacatcattcctgaacacactgtagggtgaattggtgcatcttccccannnnnnnnnnnnnnnnnnnnnnnnnnnnnnnnnnnnnnnnnaaaccttttcatggggaatgtgtggcaaccttgccaaacagcaccactcagagtgtgactctgactgtgaccttggccttaatgaggaacttcttaggagagtttgaggacaaggccaacatcgtcatctgggctcgctgcgtcccagcacatcaaactctgtccagagacaaggccaactgcaaatgaaagccagggaacattgctaagggtctgtggctctgtggtggtgttcatcgccttcctgagataggatttcccttgccagtcccaacctgtatatattctgtacagaagacatccctgaatatactgtaggtgagtcgtccagccaaatttatatctccaaaacatttttagctttttctacatgctatgaattgagatgacatgctcaacttgtaaataagtctttttgtacattaaaaaagtaattttttcataaat

SEQ ID NO: 51316 - DNA, 1231 bp, Homo sapiens
cagccctagagcactgctgcgcccagggtcgccgcgcctcctgctgaggggtccccgtgccactggctctcaccattgccctcgcctgccgatggctctgctgcccagcctggggcagctctaccgcctgagccccctgccccactccaggactcaccgtaccccgatggggtcgtgtccccagccttctctgcagtcccttctgccctgccgggcccgtcgggaggcgccatggctcggatgaaccgcccggccccggtggaggtgagctacaaacacatgcgcttcctcatcacccacaaccccaccaacgccacgctcagcaccttcattgaggacctgaagaagtacggggctaccactgtggtgcgtgtgtgtgaagtgacctatgacaaaacgccgctggagaaggatggcatcaccgttgtggactggccgtttgacgatgggggcgcccccgcccggcaaggtagtggaagactggctgagcctggtgaaggccaagttctgtgaggcccccggcagctgcgtggctgtgcactgcgtggcgggcctgggcggggctccagtccttgtggcgctggcgcttattgagagcgggatgaagtacgaggacgccatccagttcatccgccagaagcgccgcggagccatcaacagcaagcagctcacctacctggagaaataccggcccaaacagaggctgcggttcaaagacccacacacgcacaagacccggtgctgcgttatgtagttcaggaccttggctgggcctggtcgtcatgtaggtcaggaccttggctggacctggaggccctgcccagccctgctctgcccagcccagcaggggctccaggccttggctggccccacatcgccttttcctccccgacacctccgtgcacttgtgtccgaggagcgaggagcccctcgggccctgggtggcctctgggccctttctcctgtctccgccactccctctggcggcgctggccgtggctctgtctctctgaggtgggtcgggcgccctctgcccgccccctcccacaccagccaggctggtctcctctagcctgtttgttgtggggtgggggtatattttgtaaccactgggcccccagcccctcttttgcgaccccttgtcctgacctgttctcggcaccttaaattattagaccccggggcagtcaggtgctccggacacccgaaggcaataaaacaggagccgtga

SEQ ID NO: 51317 - DNA, 663 bp, Homo sapiens
gtgtaggaaatgtatatttaatcattctcttgaacgatcagaactctaaaatcagttttctataacaacatgtaatacagtcaccgtggctccaaggtccaggaaggcagtggttaacacatgaagagtgtgggaagggggctggaaacaaagtattcttttccttcaaagcttcattcctcaaggcctcaattcaagcagtcattgtccttgctttcaaaagtctgtgtgtgcttcatggaaggtatatgtttgttgccttaatttgaattgtggccaggaagggtctggagatctaaattcagagtaagaaaacctgagctagaactcaggcatttctcttacagaacttggcttgcagggtagaatgaagggaaagaaacttagaagctcaacaagctgaagataatcccatcaggcatttcccataggccttgtcaactctgttcactgagagatgttatcctggtgcccgatagagttctggctctctgtgctgaggcagcagccaaagagacagaatgcttatttgccaatgactaatgtgaggaagcagacagatttgttggctcccctctttccaggcccttttctactcaaaaccagggtttcttagtcctgacacagttgacacttcggattgggtagttgtaatggggagac

SEQ ID NO: 51318 - DNA, 346 bp, Homo sapiens
caccaatgcaaccgaagtaaatgctgaaagggtgagaagaaggaatagattactatgcatttttgagaggatgaagaaggcttcttggagaaggtttctgaaaagagatacggaattaagagaaatagaaaagagcactgacgaagcactcaggatggctattcaaggaattggggatccacagcagctgtgcacaaccatccctaatgccagaaaaatggggtaagggtgaagggaactgggtctagagctttgcatgtttttttctggttaacccttagagtcaccctgaaggtgtggatcccatcttataataaggtgaggacactgagtcaggaaactaact

SEQ ID NO: 51319 - DNA, 827 bp, Homo sapiens
  misc_feature (1)...(827): n = a,t,c or g
cagggattgttcttgacatacctgacttttctcacatttgaacttccactatcattgtatccatataacttctagcattttcatgccatggtaatccatgagctacacatacgtagcccggcaccgtgatgcaagttcatggtatcgtgcatgttcgtggtatcatggtatcattcatgcgtgtttgaatagttctacatctagtgcttcttgccaaaaagaatacattgtttaaattcacaaaattagcataattgcagtgctaatgaatatcggaatatgtgcacagtaacatttggactattcattggagagtttacccatacatttagcaaattgaatggccaaaacatttgactccagtgagggctcaagttagatccctatagaaagaggacacttcatcttacttaagtcatagttaaganctgtgatacggaaccatagatattgcctgacaaagcagaaatcaccaagtttcccccttttgaattaccaccaagaagtgttgaaacaccaaatagatatcatgttattttgggcatttgcagttttcttccctgctgcatgtaatgtctcagaatcaacattcttttaaaatctagactatattttgaggcaatgaattacttatattcaacttaggcttgttttgacattcagtagaactttaagttcaatctaaaggcttcagtccacatttttttatacgttgtattttaaaaacgtttgaaaggagtcttacacctgtatcatgaaaactgaatccttttgaaataccactatatgaagagagagatgaaatttagtgaacagaattgaaaagg

SEQ ID NO: 51320 - DNA, 770 bp, Homo sapiens
agcggttgcgcagttgaaggctagacccggtttactggaattgctctggcgatcgaggggtcctagtacaccgcaatcatgtctattatgtcctataacggaggggccgtcatggccatgaaggggaagaactgtgtggccatcgctgcagacaggcgcttcgggatccaggcccagatggtgaccacggacttccagaagatctttcccatgggtgaccggctgtacatcggtctggccgggctcgccactgacgtccagacagttgcccagcgcctcaagttccggctgaacctgtatgagttgaaggaaggtcggcagatcaaaccttataccctcatgagcatggtggccaacctcttgtatgagaaacggtttggcccttactacactgagccagtcattgcccgggttggacccgaagacctttaagcccttcatttgctctctagacctcatcggctgccccatggtgactgatgactttgtggtcagtggcacctgcgccgaacaaatgtacggaatgtgtgagtccctctgggagcccaacatggatccggatcacctgtttgaaaccatctcccaagccatgctgaatgctgtggaccgggatgcagtgtcaggcatgggagtcattgtccacatcatcgagaaggacaaaatcaccaccaggacactgaaggcccgaatggactaaccctgttcccagagcccacttttttttctttttttgaaataaaatagcctgtctttcaaaaaaaaaaaaaaaa

SEQ ID NO: 51321 - DNA, 1134 bp, Homo sapiens
  misc_feature (1)...(1134): n = a,t,c or g
cagatgcaccctcctggatgaataagcctgtggttgatggaaattcacaaagtgagggcattatcactggaaatgagaaaggatcccgagcngggctggcctctgnttcacagtggcggcccagtgcttccatatgtgagagaatcagtaagaagaaatccagcctcagcagccactccgagcacagccgtgggtttgttccctgctccaacagagtgttttgctcgggtgtcctgcagtggtgttgaagctctggggcagcgagactggctgggaggagggcccagggcaacttgacggccacagaggacagttgccccaaaggagagcctcgggttttcacgactgccacgccatcaaaaactgccggaagctgggaagttttcaggatgacccaccaagtgcttttcccaagggtctgggctctgagttggaacccgcttgcctgcactccatcctgtctgcaacgctgcacatgtatcccgaagtgctcctgagtgaggagacaaaacgcattttccttgatcgtttaaagcccatgttttcaaagcaaacaatagaattcaagaaaatgcttaaaagcacctcagatggtctgcagataacactggggttactggctctgcaaccttttgaattagcaaatacattatgccatagttaaggtacaagcagaacaataccaatagattaattttaagagttgtcttagaatgatttctttcgcattaagtctggatgcaaactgtgcagcccttaggttcctgctgtagttttgtacgacctggcagacttaaagtaaattgagtttaaattcaaagccagttgatgcggaaggaacttttttggcatgtgttaaattgtgctttaaaagacatataaagaattgggaaacatttcaggagacgatcatagcctgtataaataccagattagaacatacggatttaccatgaagttctgtcttcaacatccattctaaagggctactgtcccaaatcctgtgtgtccttttgacttgtctgatcacccaatggaagtggatacttgtaaagtctacaccactgtactttggcgtaaatcttgctgaatttcgtgtaagctgttacctgtctacattttgtagatgatttt

SEQ ID NO: 51322 - DNA, 302 bp, Homo sapiens
gaaaaatgtgtatgtctgggtaagtgtatagattttacaactattttgaaggcgacctttttaactttaaacagaccactctggaggagacgcctgacccagagcgctttacctaaagttcggtgcctaaaatgcacccttcctctggctggtgtctcccttctgccaagctatgcctcctgcagaggtaggctccgtggtgtctcccactgcacccggctgacagttctttacaccgttctccagttggggcggagtgggagacaccacggagcctacctctgcaggaggcatggcttggc

SEQ ID NO: 51323 - DNA, 442 bp, Homo sapiens
actctcccccggcatattttatgctttaaattaaacaacatttcaacaacaggactgggcaattaagtgaactttaaaaagttcttatcctaaaaattcctgagaaatggaaaatatcatcaaagtctaggaaatcctgatggtacgcaaagacacactggtatactgcatcccaatatatgctcaaaaattagaaaatttgtccccatgtgaggtgatatagattgaaatcagaaaaaggtacttcctcccacagaccatcctctggtgcttctactaggaaaaggtccttggtatggatggaccacatgcccaactgaatattgctgtccttttgatgttttctgccctacttatcattacctaccattaagtgatatggtacacttaaggaatacatggaggggcaagagtaaccttacagagctttacccaggtgtgc

SEQ ID NO: 51324 - DNA, 1086 bp, Homo sapiens
taaatccccatcacttcctgatgagtaagtcctatttttggttcctatatacatccataagttagtatatattccttatttacagaaacatgcctcaaatcacattcagaaagaacaaaaagtcatgggaaattttttattttacaacaaagccctgctttctttctggacgtattttacatcattagagagactatctgcacatacatctaccataatctttttccttctttgccaactgttcagtgcacatgtgctgcatcagaaatggcacctggatgacagaagctcaaagagtcacatatgtctctaaaatagagttcttttcctcttgggctgtctgaactggtgtaaatagaagctcagttgatcttggttttaattaacttattactctattaatataaccttggaattctattctaattatgttgttctggctgcttgtagtatcagttcgcccctcttgttagggagatatgtaacaatctgtcatttaattgagcagtctttttcacataacagtaatagcaaaaatcctacctactcagaatcatcttcttaggttgtctcctaaatctgaacaatacagttgttttataaaattacattttgtctcttgagatttaatcaattagaactctttagggagaaaataaataatagaagaaaatatatgcctcatatttcatatgtaattatctgttgatataatttttcaatgtattttgtatttgtgggagcataatgacctgtacattcaatatttttactggtaattcaatttttaaatatgtttttacaatgcttgaacacataaaccttagaaaactggaaaatacgtgtccacagaaagagttattagctactaccttatgtaaagatgcatagaaaatgaaattgttggaaacatgtgcacaaagtgttttatattatatacattgtatttatgaagaataaataaaatattaagattgttttcctgctagccaagagaagaaatccttgggaaatatctaaggagtatatggggctttataagcactgtttctaaaagatattctctggtacttttgcaaaaagtcg

SEQ ID NO: 51325 - DNA, 818 bp, Homo sapiens
gctcgactttttctcttttttttttttttttgtgattgatattgtgatttttaagttttattgattaaattcaaacttttttatcatttacacaaagaaactgtgacagactctgagaggactaaaaggcatcaacttaaattttaacatgcatttattaaatttatatgcagatgactacactactgcaattacagaaatgagtaagaacatactctcaagatcttacagtcattggttggggtgaaagtatttcttctgtcttcatgaaaaattaaaaagatagaaaatcttgaagtattttgctaccttaaaacaactaccccacccctacatttgtactaaaatagggcttttgccttgttttaaaagcaattctagatgaggttatatttttacaatactgtatctcatctcaaataaatttatacattctttaccctgtctaaacttgcatgcaaaataagaaccagcaagccttcaaacttcaatcacagtattccataggctatattttaagtctattgcattagttgaaatttattttgcagagtatgttaacaaacatattctaacacttaaaaaatcattacaattttttctgtttttgtcttctaaattactctgagcagtgaattactggagggaagatacccatgtctaaaatttgtgtctggtgccagtctcagatttctgccaaacaccagtaggtattcaaaagtgtggtccctttaaaacagcaggccggatatcacctttctgtcttcaaagattcaaaccagactcccaatctgggatttctctacagagggttggct

SEQ ID NO: 51326 - DNA, 865 bp, Homo sapiens
  misc_feature (1)...(865): n = a,t,c or g
ggcacgaggatttccagctcagcgatgcccccaggtccctgggagagctgcttctgggtggggggcctcattttgtggctcagcgttggaatttcaggggatgcacctcctaccccacagccaaagtgcgctgacttccagagcgccaacctttttgaaggcaccgatctcaaagtccagtttctcctctttgtcccttcgaatcctagctgtgggcagctagtagaaggaagcagtgacctccaaaactctgggttcaatgccactctgggaaccaaactaaattatccatggattcagggttttagggaacaaagccttcctgggatttgacacatttattagaacccttctgcgtgcaacgaatgctaatgtgattgccgtggactggatttatgggtctacaggagtctacttctcagctgtgaaaaatgtgattaagttgagcctcgagatctcccttttcctcaataaactcctggtgctgggtgtgtcggaatcctcaatccacatcattggtgttagcctgggggcccacgttgggggcatggtgggacagctcttcggaggccagctgggacagatcacaggcctggaccctgctggacctgagtacacgagggccagtgtggaagancgcttggatgctggagatgccctcttcgtggaagccatccacacagacaccgacaatttgggtattcggattcccgttggacatgtggactacttcgtcaacggaggccaagaccaacctggctgcccaccttcttttaccaggntataagtatctgatctgngatcacatgaaggctgngccctctacatcannccctgganaattctgtcactgatgggctttcct

SEQ ID NO: 51327 - DNA, 590 bp, Homo sapiens
ctttctggcccttttgtctggctgattctgtcctcaaataaagcccttcactcagccagacctctccacagctcaaagcattgccctaagaatcagaagtaaagataatccaagagcaaaacccactgtacttggggcctgcaatggctgtgtgtacactacatctaatgcccaaatgccagccagtgtggatgttgtgaccacagagcaggattgtgcattggctttagagctactcctcagctgatggcccacttttgtttatataaataagagcttctgccccacctgcagacatgtttactaatgatcatagccaggattagaaccactttcaaacattggggccttcttaacaaaagtctttgataacttaagaaccaaagtaacagagtaaacagaggcatgatggatccctgggccccactcccctcctgacaggttccccaacagcccatttgcccacttcccactgctcagcccacaccagacctccaggagacatccccccttgaggcagagagatcctgttccctattcccagacaagaattatttaatcttccctgttctctgtggtccttttctttc

SEQ ID NO: 51328 - DNA, 241 bp, Homo sapiens
cactttggatagttaaacatttatttcaataatgctaccattgctcaaaacattctttacatcttttctttgggattgcctttggagtcattgtataaatcattaaaaaaagcagactcattgctttagtttagtgttgctctatcatcctcaagtatctagcttagtcacttgaattattcactagctttgggtctcagtgacttctgattattttaaagtgtcaaattcaccctcaaag

SEQ ID NO: 51329 - DNA, 204 bp, Homo sapiens
ttcttgattcagttctagatttttacttgataaaataaaaaggaggcaaccctaggttagactccgcaattttataaggaacattactgatcaagttaagtccagagtctgggaatcactgcatcaaccatgctagggactgagtagctcctcaatagatcacatcaaatttaattaccagaaattagcagtgatttaagcaag

SEQ ID NO: 51330 - DNA, 437 bp, Homo sapiens
agatgaacaaaaatctgggacagtgcttcctgctgttgaacagtgtttaaacaggagtctctacagacctgatgctgttgcacagcctgtgacagagaatgagttttctttggaatctgagattatttcaaaactatacatcccaaagagaaagattatttctccacgatctataaaagatgtgcttcctcctgttgaagaggctgttgacaggtgtctctacctactggaccgttttgcacagcctgtgacaaaggataagtttgctttggaatctgagaatatttcagaaccatactttacgaacagaaggactatttctcaacaatctgcagaaaatttagatgctgcatgtggcattgcaaacaggaaatggaacatgttttagccaaatgttgataggaggaagcctccagcactgcaaagcaaattttcct

SEQ ID NO: 51331 - DNA, 512 bp, Homo sapiens
tttttttttgacaaagcttaaagggtttattttccacaggactttgtagagccttcagaatactttgtgcccagcaaatctttaggaggggcctaggatgtgctggctttcccaaatgtatttgaccaaagaatactttttttggcagaaatattaacatcttaagattgcacagaacgttttagagaccattaagttaactgccactacaggaaagaacaaaaaatgcacactccacttgcaaatcctccctgcaatacagagcattcaggtgctctgccttaccaaggcgcctctgcttcaaggtggaaggcaactgcttactgagtgcttcagtgggccttgccctgctctgggaaatgactccatttcaaccatcccaggcaacaatagccacagtgtcaacacctagaaccagtgaggcctattagaaggtggttgtttctaacaactttttacaagacagcaaagtcaggaacaagagaaggcagaaggatactccaaatggaatc

SEQ ID NO: 51332 - DNA, 62 bp, Homo sapiens
  misc_feature (1)...(62): n = a,t,c or g
ctaaanattaaaannattgaactcatggagatagagtagaatgatggttaccagagaccagg

SEQ ID NO: 51333 - DNA, 402 bp, Homo sapiens
agggtggaggggctgtgtttattggaacaaagggtggtaccaaaatgcatccccatgccccccagcccccccacacccgtccttgggtagggtacggtggggtggggtgttgggtggcctgctgctcctgttgctttcacgtagagtctcggcctgggcagtcacgtggtggtcactcctggatgtgctgtcctatccagcctctcacagctgccacccgggtatagacacctgggaagtggggccggccacagccatagccccagctagtgaccccagttagcacccaccgtccagagggctccctgcaggccaggggtcccccagcgtcaccctgttggggagagaagaaagggggttcagaggccggtacctcccctacagcagcccttgggtcattgg

SEQ ID NO: 51334 - DNA, 662 bp, Homo sapiens
gtgaagctcaaagtggtggcggagtgggaagaggtggagccggatgccacgagggctgtgaagcagaagaccggggacttctccgcctcgctgaagctgcaggaaacccttcgaggcatccaagtgttggggcccaccctaattcagaccttccaaaagatgaccgtgaccttgaacttcctggggagccctcctctgactgtgtgctggcgtctcaagcctgagtgcctcccgctggaggaaggggagtgccaccctgtgtccgtggccagcacagcgtacaacctgacccacaccttcagggaccctggggactactgcttcagcatccgggccgagaatatcatcagcaagacacatcagtaccacaagatccaggtgtggccctccagaatccagccggctgtctttgctttcccatgtgctacacttatcactgtgatgttggccttcatcatgtacatgaccctgcggaatgccactcagcaaaaggacatggtggagaacccggagccaccctctgggtcaggtgctgctgccagatgtgctgtgggcctttcttgctggagactccatctgagtacctggaaattgttcgtgagaaccacgggctgctcccgcccctctataagtctgtcaaaacttacaccgtgtgagcactc

SEQ ID NO: 51335 - DNA, 873 bp, Homo sapiens
tttttttttcaatttcctgctttataagtgtaagttgagtttttctttcactaatctgaacatttagttctcctttctgaaaactcagttcttccagaagagattttacttccctaatgtgattgcacttctcagttacttcagtctctcccagtctcagagcttcctggaggtcagcttttgcctggaccatgcttccttggagtagatgcagctcctcctttttatgccctaactgcctgtccaagacagccatctcctgctgctgacttgtcacctggcttttcagcttttccagctcggctcttttggcctgaagaagcacctcagattctttaaggacctgcaggtggtgatcctcattgcgttctgccatctctatgtctttctgtagtttctgaagcctacaaagcaccagcaacactagagcagatcctaagggactcggaaccccagagctgtcttccagcacaaaccccttgtagccctacagaggccttacttactcttctgtcagtttttccttcttcttgcttaaacattggaagtctgagtcttttgctgctacaattttgtttatttctttcaagatttcttcttgcttgattttgtgctgctccaaatcctttgcatcagcctggagcgatcttagctgctgatcagctttgacgaggttaacagcagtttcctgagctctcctttctaattcctcagcatctgactcagtttgcaataaacttctcttggcatcagtgaacttttcaacagcattttttgtcttttctttagtgcatgaaagttcactctcagcctctgccaggagtcggtcagcttccctgagctctgagcgacgtttcagaagagtcttctcaa

SEQ ID NO: 51336 - DNA, 871 bp, Homo sapiens
gaaacagctatgacatgattacgaatttaatacgactcactatagggaatttggccctcgaggccaagaattcggcacgagctcatcctctctctctctctgtctctctctcacacacacacgttttggcataagggccttgctcagtggggcccatttggcccctataatggaaatcggcatcacctgctccaccatcaggtctataatcaatttcctcctgccgtcttctatcccgtggccgaagtgcctggggaggttcgctctcaggaccgcctatatgtctcagcacatgaactgattttccagcaccatagcagaaactcaggatggctaatgccataattatcagcactggaagatgaagcagcgctggaatttccttcatgagtgctttaataaattccccagttccttttccaatatgcttcaatggctccgttacaaatgtggtgaatgtaactgcaagtgcctttgttggtgggaccaaccaaatagggttgactagtaagagctcatagtatttttggcatgggtcatccttataggtccatgaacttctaaaccattcccagatacttccagtccagtccatctttttggcacacacattgtttaatggctccatcttggcgacttcagcctgatgctgtgcaaaagctagcttatataaatacatccaattccatcccaaactgaacagaaagctgatgattaaaacacgtctcaactgagtgtaccaacgtacatatgtccacagctcggtagcccactaaaaaccacgatcgcagagcggacaaagaagtaccattaacacattatatggattccactccaaggaatcttcgaatcgccacttccatgtttcaaa

SEQ ID NO: 51337 - DNA, 397 bp, Homo sapiens
  misc_feature (1)...(397): n = a,t,c or g
gttgatttctgaacccccagataaatcagttggacccacattttccattttagggtgttagggtccaaattagcataatgtcttgcattattattagggttcagtgtggaaactttacagtgctgcatttgaagtttagtaactggttattattaatcatttgggaaaaatgaaaatgtgttgggactttctatgactaggcatttgttgattatttttcatgattgctttttgttttctcattgtgtaggatttgtgaacttgnatattacaggaaacaagatctttgtaaaattactggggaaaatcatttggagtgcatgaatttgccagataagaaacagaatatgttgnttataaaatacccctgccaaaactttcttctagaanggaatga

SEQ ID NO: 51338 - DNA, 288 bp, Homo sapiens
ccaaaaaattctttggtttacccagcccatttctggaggtgaccattgttaacttgctggttgtcttaccagacgcttcttctgccagtacaaacgcatactctttgttcacatatatgtgtgttaaaaaacaaacaaacagaaaaaccctgatccttgaaggtaaaaatttctgcacttgctcagggaggccaggaacctgaaggtattcagaacagctcaggtgtttgtctgtctgcagcccaggtgatctgacatgcttgtgggctttgcaggcagagctacctg

SEQ ID NO: 51339 - DNA, 381 bp, Homo sapiens
  misc_feature (1)...(381): n = a,t,c or g
aggtcgacactagtggatccaaagtccacactccactcagctcataggagagtcttgcataatgaagacacagacctgggcacttcagtccttgtgctcctcctctcttttccccacagcaggacctggatacagaagtactcagccaaggtgacagaataaaatccttttcttgttgttttctgtttgtctgttgnnnnnnnnnnnnnnnnnnnnnnnnnnnnnnnnnnnnnnnnnnnnnnnnnnnnnnnnnnnnnnnnnnnnnnnnnnnnnnnnnnnnnnnnnnnnnnnnnnnnnnnnnnnnnnnnnnnnnnnnnnnnnnnnnnnnnnnnnnnnnnnnnnnnnnnnnnnnnnnnagagcacgggttttccttcttgcag

SEQ ID NO: 51340 - DNA, 182 bp, Homo sapiens
  misc_feature (1)...(182): n = a,t,c or g
ggcaggagcttgggaggttaaagggttttgcatactaaactgagacatttgaactacaggttcttaaaatctacaatgacaattttaaagcattgctactagttactttaaaaagcaacagtctatgatagaccctccttgggggccccctgaatcctggtccccccctncctggttccagt

SEQ ID NO: 51341 - DNA, 1754 bp, Homo sapiens
cagagatgcattaaatttctagatccctgtatatagttgttgacatatgcactagaagctataatcacatagaattctatgtatatcctcccacaccctgggtagctactgactgaaggggtcaagcaagggctatttgctgtcccccaaaaagtacacctggccagaagggcacaaacacggcttcttaaatcactcactttctcctgttcccctcctgtttctgaaatacaagtttatgacgttctttcacaaaagagtataatcattcttagactgttgacatggctgtggaaagccttaggagaagtagaaacaatttagggagggtggggaatgtactcatcccctcttctttccatcctagtgcccccaccaaagaggcttcttgttgcagccctcagtatctggatatgggccagggaggaaggaagggaaagagcaatgctgctgtgcttcaatcctggccttcccctcacagaattcttttaggaagagcaagcttttgtaagtagagtggcaagtgtttttatctttttttttttcctgctcctcaaaatgttgtcttgttccggcaatcacttttgccttccctctttcctgagcctgtagtgacaaagcccggcgatttgggatgaaatctgttgtaacaccagagctttgattacacatcctctggttttgagttattctacagaatcagaaaggctggaaggtgggcttcacactcaggattgtgctttgagaaccagctaatagaccagccgagggaaggttgaattggctgtctttacttttcccgataagccctacttaaatgcagcctgtaattgtataaaggagatgagaaacatcaagagaaatgacatacatgtagctctggggtagcaagaactagacttcctcaatttggattccatttccttctgccatttgcttttaggcaattgagtgtgggtagtgatgagatatcaaatcccttagtgtttccattttgggaaatgaggcactatttttttttttaaaagacaacttacccacctgagtcctgaaacagtttgtctctccagttttctggcctatactctagttagctctgatccaagtttacaggacaacagccttgctttaagccatgtcctgttgtgggcacgataatagcaactgagctgtcacagcctaccagcaggctggtaacacctccaggggtctcttgggctagagcagatttcttaggcagctgactagggacttccagtcattgggaagcctatgaggccctttaccatttttggtgtgagatggggaagaaacataaaatgccactttacaacttcaataatagcctgtaatttatatttactgtgtgaatttttagtcctatattttaataatttgtaaattgatctcttattccaagaatcctttgaacttgtagaacatctgggagtccacttccctgtcctcttcctgatccctgctttctggactgtttaaatcctctttgggatggatcagagagtctagagaggccactcataggtccagctgctggcctcctgactctccaaagccttcactggaattgggacatttgctccagccctagctgtgaacatgaccagagacattatttataattcagccatttaagatatacctgtactcaaaaagtcctgtatatttttaaaaagttttatttttcaggtgaacaaaaatacatcctaagaactctgcctaaaaaaaaaaaaaaa

SEQ ID NO: 51342 - DNA, 787 bp, Homo sapiens
ggttgcaggaaccttccctctacaccatcaaggctgttttcatcctagataatgacgggcgccggctgctggccaagtattatgatgacacattcccctccatgaaggagcagatggttttcgagaaaaatgtcttcaacaagaccagccggactgagagtgagattgcattttttgggggtatgaccatcgtctacaagaacagcattgacctcttcctatacgtggtgggctcatcctacgagaatgagctgatgctcatgtctgttctcacctgcctgtttgagtctctgaaccacatgttaaggaagaacgtggagaagcgctggttgctggagaacatggacggagccttcttggtgctggacgagattgtggatggcggtgtgattctggagagtgacccccagcaagtgatccagaaggtgaattttagggcagatgatggcggcttgactgaacagagtgtggcccaggttcttcagtctgccaaggaacaaattaaatggtcgttattgaaatgaaggctgtggattcaaggctccctgccccccagatcatttccccaatcctggcaaaagcccaaagatcccagggtcaggagagacccctctgtatccccaggtccctcccagaactgactcctaaggtctccagccagggcttctgagatgcaaaggtttggcctcaggagagtcaccttttctcacggccctggccttaactcatatcttaggcattctctggcccagggccctaataaacctgcttttgtcttctgcaaaaa

SEQ ID NO: 51343 - DNA, 581 bp, Homo sapiens
gaagaagtggacgtcttcaccgccccacactggcggatgaagcagctggtggggctctactgcgacaagctttctaaaaccaatttttccaacaacaacgatttccgtgctcttctgcagtctttgtatgctactttcaaggagttcaaaatgcatgagcagattgaaaatgaatacattattggtttgcttcaacaacgcagccagaccatttataatgtacattctgacaataaactctccgagatgcttagcctctttgaaaagggactgaagaatgttaagaatgaatatgaacagttaaattatgcaaaacaactgaaagagagattggaggcttttacaagagattttcttcctcacatgaaagaggaagaggaggtttttcagcccatgttaatggaatattttacctatgaagagcttaaggatattaaaaagaaagtgattgcacaacactgctctcagaaggatactgcagaactccttagaggtcttagcctatggaatcatgctgaagagcgacagaagttttttaaatattccgtggatgaaaagtcagataaagaagcagaagtgtc

SEQ ID NO: 51344 - DNA, 412 bp, Homo sapiens
cttatgccctcaccaaatttgtggaattggaaataacaaattttaagaagaatttttgtgtctgtgattctgtatattggaggtacattttatggaagattgatttatgcatatgaaacttatcagactgagttgttagtattaaatgcttcaatttaccataataagccattttaagtgtgtatttggctaatactgaatgtgcatcttgcttttaaaatttgactttaacaagcacatgcgtagcaattttgtaataatcttactttagtaaagtgacttgagcactcacatactatttttttactctaaaacaaaatgttgctagtactagattggcatgtcttttattacagataatttagaaactattacaatgttcttgttatctgcagattaaaatttgtggttt

SEQ ID NO: 51345 - DNA, 1677 bp, Homo sapiens
  misc_feature (1)...(1677): n = a,t,c or g
cttatgaaaataatcgactctgaatatttgttacaagtctgttttatgtgttttgattactagtgagcagaaaataacataccctgtattcaaaattactgaaatggcaatcaaagatgatcatttttatgtgattttagaaatgttaaggcaatactactaattattgtaggtttttttaacgtatcacccaaagcatgtatgtgatctttccccattagtatctttttctcaaatgccataattaactgaaatactattattaaattttcatgagaattctaaaatgaatcctgggaaatgcacgtttggtgatggttgcactttctgtattttacaggaattagtcaatacatgttgaaatgtttaacattttaagatttggaggcttaattactgggagtctgtctaatgaagtcctgggactattggtaatggaatatgatttgagttcactgtgcccnttttgtttgtttgntttggtcatatatacattcagaacttttaattttaaaacaaccacaataacattaataatagaaaattccatctgtaaatattcacagtctagtcactgaaaaatgggaaaacctctaccatgccttattattaccctttgctgtttgaggagccagaaatagaggtgcagttagaggacggtcactttttccaacaaaacccactccatagccatgtggatttttatccaaaggctcaacaaccagagggaatggtgagacctgataactaaaatactgttattggcaagggtttgaaatgtgtaagaaccctaggagggaaaggaagattgagcaacataggaaaaggggaagagaggctgagttgtcaccaaggtccaaactccatttataaaaatactgcaaaaccaggagttgatggtagaagtgcatatgatccatggcaggagtaaatctctccacctcctctaactctctgaaaactctagagttggagcaagtcttccatttgcttcttatccccttaaaagaatgccttccacttcccaacagcccccatcaagggaccccaagaggccaccatgctcttatctcgcactttctttcctattccccttgcctgaatctggagtggggttgagccctctgccttcaaccttaagatttaggaagttctttccccaactgtctaacttggaaaggtagatgagtctgaattttgaagtaacgaatgcaaattccactcagcagaggcaatgttatttatgtacatagggatagtggaatgagttttaatagattctgtccaaaaggggtttgttcctcttatttcctctatgtaggaagttgtgtcttaggcaactttatcagtatcaatggaaaaatgataggcactacaatgaaatggcaggatgccaatatgagatatttcaggaataataagaaatacagtttgtttgtataaaataaactatctcaagaaagttttcaacgacagtgatagtgttcatttgtaagagagagttctagaacttcgannnnnnnnnnnnnnnnnnnnnnnnnnnnnnnnnnnnnnnnnnnnnnnnnnnnnnnnnnnnnnnnnnnnnnnnnnnnnnnnaggacaataaaaggttaaatatctcctaattttttgtattgattacatgttgaaatgttaacattggaaatattgggttaa

SEQ ID NO: 51346 - DNA, 1333 bp, Homo sapiens
  misc_feature (1)...(1333): n = a,t,c or g
tatatgttaaagcctgctaaatcattcacttagaatgaagtaacctcaaggtaccaaataccccacataaggaaagtactacactaaattcactcaactattgtatgcctaccatatgccagattttatcctagaccctgaggatatagctttttaaaaccccctcctgtttcagagcttatattctagtggaggaagttagacaagcattttaagtaataaatgtatagagagtgtcaagtgatgagtaccatgaagaagaataaatgagggtaaggggctagtgtgatagggagangggtgggatgccatcatatttaggggtgggttgggaactgtctactgctttagcattttgtgtcttcaaatttctctcctttggttatataccttgcgtattccgcacattgataaagtttctttcttacagaagttctgatattgaattaaggaatgggtcactacttaagactttatcatttcagctacacataaaaggtttctctcccctatggattttgctaatggttgagtgatacctaaaggccttgttgcatttggttacacttggggtttctcttcggtttgaattctctcatggttaccaaaactctgttaaaggacttttcacagtcgttaaatgtgtatggctctttcccaatatgaatttttttgatgttaactaggcttttagacttagttaaagacctgtgtgctctgctgcatttatagggttttgggctgctgagaataattgatgctgattaaggtgcaaatcatgactaaagacttttctttcttcttttgcatatagtagagtgaggtgagggtcgtggctaaaaccccacaataactttacattcctagctttacagtcttgctgtgaattctctggtgttcattaaagtgtgagctgtgttaaaaggcattcttagattcattttaaccacatttttaaaaactcacagttggttaacatgatggtttcagattgcttgcctcttttctctttctaccttacagggctccttttctagcttaaataagggtactccatctgccacagaatccaggattctatagttttttagtttcacttccctatgttctttttttttttttaatttttaacaatgagatgataccatgttacagcggtattacattaagatacatttaatatagccacaattaaagtatgtattatgtatttatgctggtgttctttcatgttatttcttctagtgaaaatttccaagtaaactgttattgagcatatacatttttaaaaaaataaaaccatacacccctaaaaaaaaaaaaaaaaaaaaaa

SEQ ID NO: 51347 - DNA, 991 bp, Homo sapiens
actaagacttgagcttttaaatgtctaacaatatcctgtaatcctttatgaacttcaggccttaagggatattgcgtttgatagggaaaagtggtggggtcttttagcctgatttggattgggcgggcatttttgccattctgcattgtccttccaatgcccagacttcagtgttgattccctccaccagtagggggacaacaaatccggtaacttgttccccatacctgatgtagataatagctccagccttggctaatatgtccctgcctaataaggatatgggactttcaggcataacaagaaaggcatgtgaaaagagcaaagtctcccaattacaattaaggaggtgggagaaatacctggttacatgctgtcccaggattcctcagatggtaatggactttgaggacagccgaccagggcaggagattaacactgagagggccgcaccagtatccaagaggaagtcaatttcctgtccctcaatagttaaatgtacctggggctcagtgagggtgatgacataagccggtgcttgttccaggcaccctctgtcctgttgttggatcatctggttgggggcttctgacctagggaaccttcgtccgctggggcagtgcaccttccagtgattgcctcggcatagtggacatggacgagggggcagcttgtttctcattggacaatcttttttaaagtgtcctagtaaaccgcatgataaccaaggcctaccgggtgattggcctctactatctgtcctctctgaaccactaaggtttgttagtctgagggccataactgaaggctgcggcctttctccaatctcacttttccttttgggcctgttcctcttggtccctattatagaacactgaggttgccaggttttgataatacctccaaattttgttcagggcccagggcttgcttttggagctttctcctgatatctgcggctgattggataataaacttatcttttagaatc

SEQ ID NO: 51348 - DNA, 762 bp, Homo sapiens
ttttttttttttttgccattagaaatgcttttatttataaaagaactacttaaatataaacatctctacatagaaacactcttcacaaaaggactcttgcattactgccttctgaccacgaccagcagacactgtggatgtaaggactccacggtgtctcccgactcccaggattttaaggctaaatgtgcacttggagggaacaggggctgtaaggctatttcttccctttcttttaaaagacaaatttcatggtttcccattccaagataggcttcatagctggggaagatcttaagattcttggtctaaggggtaagcaaatatcttcctgagactgggaggtatgatcaggcacttgggaatctggctttgaatgtcatctctgaagcatggaagttagtggtgaaaaaaatcttatttccaagtctaggataagctacttctggaatggcttatcccaattcaagtaagtcacaggtgttatgttgtctgcatctatggatgtaactaaacagtcattagggtgcttggatgaagaagaaagacatccagtcttccattaggctcaactggtttcagctcaaagcagaactaatacttttaatggaatggctggagctctcatactgttactctaggaaaatctatcaattattgagtccagggcaggggggccaccagacatcacagactgtgtaaagaccatcagaaaggtgtcattgaggttgcggtatggtggcttacacctgtaatctcagc

SEQ ID NO: 51349 - DNA, 592 bp, Homo sapiens
  misc_feature (1)...(592): n = a,t,c or g
tagggttatgagcaatctcacatatagctaatacagtgtaacttccagaggacaatttcacacaatgtatttattgaagcttccaaaatgttcacacacttttacacagatgctagcagtgtatactaaatgccagacaccaaactaggcccttcaaccacaaagggttgcttaattaaatttacagtttgttgaatctcatgttttgtattacagactaagtatctattaaaaatacagcagaaacacaatttattgactcgcaaaagatgctgtgtaagttccaaaagcaaagaaaaaatataagcgaaaacgattcaacttttttgtaagcatatactataagcaaaaatacacagaaaaaaacctgggatgaacctgaataagattatgaatgatttttgtcttatatttatttacttgtctgtattttcaagtttttaaaataaatattaattacaaaataaaaaggttttttacacaaaaacattttaaaatcttaaaggcgggccggcaatttcttccccggggtggggntgtggtacccctccaatttnaattattnaaacctntattttaaggggcccctggg

SEQ ID NO: 51350 - DNA, 266 bp, Homo sapiens
caaatgttagggcttgtgctcaaaatgtaagtcttgttcacagcagtgaattattctctatggacaatgaaattagtactcactggtatgaaacgcagaacaaagacaagtacagtaatttttcagggataaggttcttggagttgaatgtttaagtcatcataaatctaatcagtgctgattggaaaatattaaataacatgacgattcattaacttcacaataatatagattttatttgtccaaacggggtaaaaaattccagg

SEQ ID NO: 51351 - DNA, 630 bp, Homo sapiens
gcggcgcccaggtggagcgcgtcgggcccctggatccggggaaacggccaaggttgcgggagtctcttcactctcgtctcaaagccattttgtgccgctgccgctgcctctacggccataaatgcccagagattagcggagaagctccgagcccagaaacgggaacaagacacaaagaaggagccggtgtccacaaacgctgttcagcggacgagtgcaagaaatagtgcggttcacacggcagctgcaagcgacgtccaccccaaccgtgcttgctaaggcactgacccgaggaattctccaccaggacaagaaccttgtggtcatcaataaagccctacggtctccctgtgcatggttggccttggggtccagctctgcatcactgatgtactacctatcctggcaaagatgcttcatggccacaaggcagagcctttgcatctgtgccaccggctggacaaggaaaccacaggtgtaatggtgttggcttgggacaaggacatggcacatcaagtccaagagttgtttagaacccgtcaggtggtgaagaagtactggtatgaggcctgctgatggcagtagaggtggtataagtggaggcatttctttcacctatttattcattaa

SEQ ID NO: 51352 - DNA, 90 bp, Homo sapiens
cggacgcgtgggctcactgggtactgagacagttccagaaaggactctagagccagccgagtccctccactctgcttccatccaagttct

SEQ ID NO: 51353 - DNA, 68 bp, Homo sapiens
tgcatgcagcactttcttggggctgggactgttgtgggtctgaggccgggccccacagatgaaagtgc

SEQ ID NO: 51354 - DNA, 662 bp, Homo sapiens
gggaataatgaataaagagcccgctgtaattggaagaccagattttgaacatgccgtggaagcttctaaactttctagtcaaattaaatacaaagaaaaattttataatgaaatgaaggataagaaacatcattacaatcctcttgaaagtgcttcttttaggcagaatcagcttgctgctacactggcgagcaatgtgaagtacaagatagacattcaaaatatgcatgatccagtttcagatctcccaaatttgttgtttttagaccatgttttgaagccagcaaaatgctcagcggccgagatataaatagctctttggggaaacagggtatgtatcattttgatgcagatgctgtggaacatctgcaccataaaggcaatgccgtcctccaaagtcaggtgaaatataaagaagaatatgagaaaaataagggaaagccaatgcttgaatttgttgagacaccatcatatcaagcttcaaaggaggctcaaaagatgcaaagtgaaaaagtttacaaagaggattttgagaaggagattaaaggaaggtcatcactggatttagacaagactccagaatttttacatgtaaagtacatcaccaaccttctgagggagaaagaatataaaaaagatttggaaaatgagataaaagggcg

SEQ ID NO: 51355 - DNA, 1138 bp, Homo sapiens
ttttttttttttcattcatgtatttattccacagtcaaaataaatcaaaatttaaagctataacatttttaaaagataaaggagaatttgtggcacagctgcattaacaaaacagacaccagtctaaagtgcaacactaaacaggtattctctgttcccacggtggaataaatacacacaattacacataagatttcactaaagataggagatgaggcaaataaccctttgaaattacctgcccaacaaatagaggcaggctacattaatttaacattttactgcaaaatggaaaaaaatccccgaggtgactaactcaaactcctcatttcatgcacatgaccttggcttctgtgttctttccatagccacatccaaatccagaaaggctcctgcaccccatgctcaaaaatgcaacctcaagtccctgaggtcctcagcacagactgacattaacaagcctgtgttcagccttcatccagaacctccagggaaatcaggagcacaaacacagagcaaagcaccgtttctttaaacaatggctttaactgtcgaatgagctctgacaagccatatgcatttcataaacaaaccaaaacatcatcttcatatcttcctatttttcttgcaaaaatgttaagccatccaagtaaaaaaaaaaattttaatttaacaatgaaaaaggaacttcaaagggtttatgccaaaaaacaaaccagtcctctgcagcctaactcatttgtttttgggctgcgaagcccatgtagagggcgatcaggcagtagatggtccctcccacagtcagcgccatggtggtccggtaaagcatttggtcaggcaggcctcgtttcaggtagacgggcacaccatcagctttctggaaaaacttttgtagctctggaactttgtttttcccagcataatcatacactgtggaatcggaggtcagtttagttggtgtggcaaatatgataggtggtgcttctgtggaaaccacaggctttaatccctgcgggctataggcctccgaagcccatgctcctgccaacttctgcgtgaagccactaaacttgtagtacatgacgcccagagtccggcttcccgcatccgctgccaacgcgaccgccccagagaagga

SEQ ID NO: 51356 - DNA, 1238 bp, Homo sapiens
aattgttttatttgggaaaagtgcttcttacaaaagggcagctgcaaaatacagagacctctgcaacaattatttgttttttcttaaagtgaaagaatgggtgggatccaaggaatcaaagcagtagatggacaaaccaggagcatccccgagttattttcaggaaacagagcaacaaaacacaaaggtacaatttccaatcaaggaattcttccaacaacttaactttagctaatctcagggattcccaagccctccctttcggtggaaaagtatgacttatcactgcaaacccattactccactacaataaacaccttagaacagagttttgaatcacgtctgtctacctgaaagctcaggggtggaatgaggcaaatacccacaaaaacaaacacaaaaacccgacaacaaaatgcctcaagtgaggacaaaggtttctcagaaagtgcctgtactggaaaggctagatcgtaaaacattaaatacaactgtgtatccaagacccagtttgtgttattatatgggataaccaggtagttttaacctctatggctaaccccatttctctatttatatagacagagctagcactgctatattgacaactaccaatatactgctttgccctttaagatctatctgccacacaaggcttaaaccactaaaccaggtttttctactaaggctaagaatactgcatctatgcagggatgagaagcttatcacacacccacacactcacaccatgtcagcccttgggagccaacttccaactctgcattgatgttatgcctctctatcttttatacgtattctttctcaattttcctatcatgcaaaaacagtaaaaaatctcaacacattcacacctgattctggttacccagtagtattacttgtgtgcaattaaacaagagaccaaaaccacagaacaagtgcacgtggtagggattacagggtagggaacagatataaaaacacagatgtgcagatttcaccagaaacctcaaggatccacatccccatgtctggggcagagggctattggccagcttaggtcccttcacccatcactcctattcttggaccccaaagcagggccactgcttttacttttgaacctggggtcctcaaaatgagtgtgtgaaaagtccataaatgcaatctggttgaaaacagatgacgcaacacacctacactaactgtctgacagttaaattcgtgttacaaaaaac

SEQ ID NO: 51357 - DNA, 996 bp, Homo sapiens
  misc_feature (1)...(996): n = a,t,c or g
atatatatataggatatatatatattaggccccaaggaaagaagctgccagaagtattacaaaatcctatctgcagcttggacactgacacaaaaaaacaaaggtctggaaaagtgtctacttagaaatattttgttggtggtattgattttgaatagcaatataaaagggaaacacctcttttctccatgtgggtttcagtgtgtgtgtatttttttttctttttctttacttttttttttatgcaaaaggagctgggagagagcatgaggatgtttgaggttccagagctggaaggctctgaaaagtaggattttgtacctaagaccctggttaaagtgcagtgatggtctggagagagacaggatgccccctctcccctccttagcacctggtcttgcccttccagtctctgctctcatgggcacagagtatagcctcagagcatagtccttcatgttccgggaggttacaggtgccacagttgactggggaaggggatgggggcaccctaaggctctgataccccagaagggactagtccttatgaagtgtcaccaaatacacagcagacacagaagaggtgggaggcggtaggtctaacaggaagggctcaataaccagaatagttcaggaaaagcccagatattaatctcagctctgctgacattctaaaaaggagctagcaccccagggtgccgttgaggattcttcctttctctagagactactctgctctgagctaacctccccatttntngcccttggcagcatctatttattgctacattgtcaaggaggaacaattgccccacaatgcttctccctgccaatctggttctcttggggaaacctcagagtgggggagaaaaaggaggacaaagaggagaaagttttttagggtctcccttcccataagaaggcaaggtagactcctctcagagcccttaaggccctaatcccagggtctgttccttagcccaccctttaccatcc

SEQ ID NO: 51358 - DNA, 387 bp, Homo sapiens
  misc_feature (1)...(387): n = a,t,c or g
taacctaaagagagcaggatacagacaaaaatcggggagtttggccacagtcattggcaacttgggctcccagtggagaggggctggtatggccccagcgacgacgggagggacaccgcaacgcccattgctcagagctggttctagatgatttacacgtaatcactcaaaatagagccaatcacaggccaggtgtggtggctcactcctgagtgagctgaaattcgcgnnnnnnnnnnnnnnnnnnnnnnnnnnnnnnnnnnnnnnnnnnnnnnnnnnnnnnnnnnnnnnnnnnnnnnnnnnnnnnnnnnnnnnncannnnnnnnnnnnnnnnnnnnnnnnnnnnnnnnnnnnnnnnnnnnnnnnnnnnnnnnnnnnnnnntgcca

SEQ ID NO: 51359 - DNA, 381 bp, Homo sapiens
cgcggaccccacccgtttacctcttaacggtttcacgccctcttgaactctctcttcaaagttcttttcaactttcccttacggtacttgttgactatcggtctcgtgccggtatttagccttagatggagtttaccacccgctttgggctgcattcccaagcaacccgactccgggaagacccgggcgccggcgcgccggtgtccgctaccggcctcacaccgtccacgggctgggcctcgatcagaaggacttgggccccccacgagcggcgccggggagcgggtcttccgtacgccacatgttccccgcgaccgccgcggggcggggattcggcgctgggctcttccctgttcactcgccgttactgagggaatcctg

SEQ ID NO: 51360 - DNA, 747 bp, Homo sapiens
gtcagagcatactagagactacaggagaggaattattcccacagaatttggtgatgtccttattgtaatatatccaatgaaaaatcacatgttcagtattcagataatgaaaaaaccagaggttcccttctttggtcccctttttgatggtgctattgtgaatggaaaggttctacccattatggttagagcaacagctataaatgcaagccgtgctctgaaatctctgattccattgtatcaaaacttctatgaggagagagcacgatacctgcaaacaattgtccagcaccacttagaaccaacaacatttgaagattttgcagcacaggttttttctccagctccctaccaccatttaccatctgatgccgatcattaaatatcagttctgtttatctgatgccggctcctacccagagattctacccagtgaaactcccacagcaacgcaggtagatggggctgacctggcctctccaatgtctcctcgaactagcaaaagccgcatgtccatgaagctgcgtcgttcctctgggctcagccaataaatcctaaggagacaagcagcccagcagtgatcagcagtagccaccttaggcacggaacataggggtttaacccttttcagggcctttcatgtcttgcccttaacatggcatgtttcttcctgtacatttatttgagaaaacactggatttaaataattttaaataatttgtagcttaataataaagatttaaaaaa

SEQ ID NO: 51361 - DNA, 899 bp, Homo sapiens
ttttttttttaggaagtgataagaatatttttattgtattattaaataccatgtcatctttcccccccactgttacaaattatagatactacatgaatgatgatacataatttatattttacggtttgccagtatgatgtatttacacatgcagttagtaccaatgtcatgctacatttcctcaggagatgcccattcaaaacaaaatgtgagcagcttatctactgtaagaaaatacttctagagggtggaatgtataccaacctggacctgcaagttcagtattaacaatattagatttaacttagactcctgggttatgttcctttttcttttttaaataatactcataatttgaacaacatatttatatcagaaaattttccttcttttcttccccatcttctttttggtgcttaaaaaagaacatagaaacaccaggatctagcagccaataataaaaggccacaatctgaaaacaaatggcatttaacagtgataccacttgaaatgcaaaacattagaaaaatacttggaagctaaacataaaagttcagcacagtgatttttctagttattggatataacatggcatcacctgcacagcccaagaaatgagacattgctttgggaagaagagttaatactaaaatgatttcagttggaatttgagatgctaaagaccatttattttgagtgttttattgtcataacaaataatctgtacacattctgtgtattaacaggtacatcttttgctgtaactttacaaatgcttaaatgtaaaattttacatttgtaaaaaattatatatttattgaaccataaagttgcaatggggcacaataaataatgagactaattgtccaattgtattttggctcacagttaaccatgaa

SEQ ID NO: 51362 - DNA, 573 bp, Homo sapiens
atcaaacaattgatttttattgcagtaagagtaacaaggaatcccacccctcacatgccctttgctttatgtaaaaacctgtccagcagaataagcaacagtcaccctcaggaggcgatttagccccaagtgcccatagaacagcctcaggccacgacttctgtgctccctcgctgttcccagagccatctgccaagaccaggaattcacctttggagtctaacttgttttctctttttttcacctctcaaaaaataaaaagccttcagtaatacagcccaaggattaccgtgtgtctaaaagaaggatagattcccataaacaatgttgtcagcttgagtgaggtaaacacagaaaggcacacaataaattaaagcagaccttgactcttcagaggccctgcggtgacgtctggggggccagatctgccagtgggtggcatttccagcactgacatagtgttgaggactgctctgggggaggagggacccctcctttaataagttatgttagtatacaggtcacaaggtcgactggaggagaaaatcctccccttcctatctggtggggcgc

SEQ ID NO: 51363 - DNA, 1273 bp, Homo sapiens
aatgtttgggtaaaaatatattttcccccgctttatgtcttggcactagtgatatatgcatagattatctgttcaccactctcctaccttaacagatgccaaattaccaagcatgttgctaagtgatcactttcatatttgaaaaaatgatatgcttcacatcaatacaattactttagtttaaaaaagacaaatgtctaacatgcagcttacatatatgacaattctgcattaacaatgaaagtagattacacgacagttttagaaaacacattggttattttcaaacagcaaaatgacaaggatctacaactacagtttaaggcatatcagcatattttaaaattaagaaatagacaaagttctaatgctgttcacagcttttcaatttatttaaaaaattcccttcatacctacatacaaactagactttgtaggtcttaattcccactaaagaatgtgtcctgtcagtggaaccaggacttttcgaagctgagacctgacaattcccagactcttgcaaatggcaaagcaaaggggtgggaatggacagtttttgtaggacccacacagagacagcaggacgtgggtcggtaacagctgaaaaacctcacccaatagtttgtatgtgaaaccagtcatggaaatgtccaagaaagcaaggaaacccaagtctgttcatttgaggtgcacaagatgtggattgtgtgtgttactgctggtgagtcacaaagcagagaaggaagataagtaatctgtgcccactgttacattaaataattcccattgttgaaatgccctttttggagaaaaccttaaccaattaataaagagcctaagttgggaaaacacaatctgaactgccaataaattctcatcaatgcttttccatcacattctacagtacatgtgttatggagatctaaagttcagaagaagcaaaaagatggtattatgtttgaacaaaagatatggggtaaggccagctagttatgtaggcccctcaatccccaaaaaagaggtggccactgtcagcagttagcaccagggagagaccattaaactaagattaaaaaattaagtggtcataaaggcatcctagcataaaaatttttctcttggttttctctagtagaagatggtaatttctcattctggctttatttgccttgccagaatcaagggccctctgagctatccaatgatgcccatgaggctatgtagagcacaggcagggattaataatttctttttttttttttggagagtctca

SEQ ID NO: 51364 - DNA, 3617 bp, Homo sapiens
aaaactccaagtatgatgaactcaaagatagccacattgagacatattataatcaaactgtcaaaaagaacaaacacaggcctttgtctctcactgcagccagagctcccagtcttgtgtttacttctctgtttcttctgctcctagaggcccagcctctgtggccctgtgacctgcaggtattgggagatccacagctaagactccaggaccccctggaagcctagaaatgggactgttgacatttagggatgtggccatagaattctctctggaggagtggcattgcctggacactgcacagcggaatttatataggaatgtgatgttagagaactacagtaacctggtcttccttggtattactgtttctaagccagacctgatcacctgtctggagcaaggaagaaaacctttgaccatgaagagaaatgagatgatagccaaacccccagtaatgtcttttcattttgcccaagacctttgggccagagcagaacataaaagattctttccagaaagtgacactgagaagatacggaaaatgtgaatatgagaatttacagttaaggaaaggctgtaaacatgtggatgagtgtacggggcacaaaggaggtcataatacagttaaccaatgtttgacagctaccccaagcaaaatattccagtgtaataaatatgtaaaagtcgctcataaattttcaaattcaaacagacatgagataagacatactaaaaagaaacctttcaaatgtacaaaatgtggcaaatcatttggcatgatttcatgcctaactgaacatagcagaattcatactagagtaaatttctacaaatgtgaagaatgtggaaaagcctttaactggtcctcaacccttactaaacataagagaattcatacgggagagaaaccttacaaatgtgaagaatgtggtaaagcctttaaccagtcctcaaaccttattaaacataagaaaattcatactggagagaaaccctacaaatgtgaagaatgtggcaaagcttttaaccgattctcaactcttactacccataagataattcatactggagagaaaccctacaaatgtaaagaatgtggtaaagcttttaaccgatcttcaacccttactacccatagaaaaattcatactggagagaaaccttacaaatgtgaagaatgtggcaaagcctttaagcagtcctcaaaccttactacacataagataattcatactggagagaaaccctacaaatgtaaaaaatgtggaaaagcctttaaccagtctgcacaccttaccacacatgaggtaattcatactggagagaaaccctacaaatgtgaagaatgtggaaaagccttcagaacttgctcaagcctttctaaccataagagaactcatactggagaaaaaccctacacgtgtgaagaatgtggcaacatctttaagcagttatcagacctcactaagcataagaaaacccatactggagagaagccctacaaatgtgacgaatgtggaaaaaactttacccagtcctccaaccttattgtacataagagaattcatactggagagaaaccctacaagtgtgaagaatgtggcagagtcttcatgtggttctcagacattaccaaacataaggaaaacccatactggagagaaaccctacaaatgtgacgaatgtgggaaaaaactttacccagtcctcaaaccttattgtacataagagaattcatactggagagaaaccctacaagtgtgaagaatgtggcaaagccttcacccagttctcacacctgactgtacatgaaagcattcatactggagagaaacctttcaaatgtcaagaatgtggcaaatcctttcaaatgctctcaaacctaactgaacataagagaattcatactggagaaaaattccaaaaatgtggagaatgtggcaaaacctttatccagtgctcacactttactgaacctgagaacattgacactggagagaaaccttacaagtgtcaagaatgtaacaacgtcattaaaacttgctcagtccttactaaaaatagaatttatgccggaggggaacattacagatgtgaagaatttggcaaagtatttaaccagtgctcccaccttactgaacatgagcatggtactgaggaaaaaccctgcaaatatgaagagtgcagcagtgtctttatctcttgctcaagcctttctaatcaacagatgattcttgctggagagaagctctccaaatgtgaaacatggtacaaaggttttaaccacagcccaaatccttccaaacaccagagaaatgagattggagggaaacctttcaaatgtgaggaatgtgacagcatcttcaagtggttctcagaccttactaaacataagagaattcacactggtgagaaaccatacaaatgtgacgaatgtgggaaagcctatacacagtcctcacacctcagtgaacacaggaggattcacaccggagagaaaccctaccaatgtgaagaatgtgggaaggtcttcagaacttgctcaagcctttctaaccataagagaactcattctgaagaaaaaccctacacgtgtgaagaatgtggcaacatctttaagcagttatcagacctcactaagcataagaaaacccatactggagagaagccctacaaatgtgacgaatgtggaaaaaactttacccagtcctccaaccttattgtacataagagaattcatactggagagaaaccctacaagtgtgaagaatgtggcagagccttcatgtggttctcagacattaccaaacataagcaaacccatactggagagaaaccctacaaatgtgacgaatgtggcaaaaactttacccagtcctcaaaccttattgtacataagagaattcatactggagagaaaccctacaagtgtgaaaagtgtggcaaagccttcacccagttctcacacctgactgtacatgaaagcattcatacttgagaaaaaaataaacaaatataaaaataggcaaagccgttagtatctgctcgcatcccactttacatcagagttcagacttaataaagttatcataaatgtaattactattgaaagacctttcatgaaatataagtctccagagcacacaagagtatttcttctgaaaaaaatgttacaattatactagatggaagacttgcatcagttgcttaaactttcagaaaatttgtagagaaacccaacaaatctcataaatgtggaataacatttgttcaaaaatgatagcttagaaaacactagagttcatactaaaagatattttgcaaatacactaaatggaaaaataagcaaaatccaatttaagtaaacaatggaggatttgaaggagaaaggaatagagcacggacacgttcagaaatgacactgaatccctgtgttgagtctacagagacatctagacttaaaatagatcatttatatttaagtttaaaaggaggatgagactgagtttttgtagagttataattacattcaaaatatacttttttgcattgaaaaaatgttaaatttttgaaaagcgaatattgatgtcattctattctcaaaaaaaaaaaaa

SEQ ID NO: 51365 - DNA, 457 bp, Homo sapiens
agccactgtgcctggccaaacgctggtaggtttgggagtgagaccacattacatttaaatatatttacaatgttttctgctctattctttagtagacttttcctcacgtggtcctacgcatttctttctaagtttattttcatatagcctatccctgtctacaatttaaattgggatcttctatattctagttattatttgtaaataagaaaactactgacttttttctagtatattttctcagaataggattttctatttttctataaaatgaccaatgttatgaagcttcgtaagttttgtcaaagtgatacacacatacagcaaaaaatcaaatagtacagaagtataaaagcaacaacctctgccttgccccttctccaccttcaggtccccttcccagatacaataatttttagctttttatttttaattattctggttgttacctacataa

SEQ ID NO: 51366 - DNA, 465 bp, Homo sapiens
tgctgttcccgctccaggtggccgctgtaacctcttcggtccgcgacgatcctctagagcactgtgtgtctccccggacgcgagcccgctccccttaaatctgcaaaatggctgataatttggatgaatttattgaagggcaaaaagccagattggccgaagacaaagcagaattggaaagttatccaccttacatgggaattaagggaaagttgtcagccaagttttctggaaaacaggtaagatactgatctctatggctaaggaaaacataccaccaaatagtcaacagaccaggggttccttaggaattgattatggattaagtttaccacttggagaagactatgaacggaagaaacatagattaaaagaagaattgcggcaagattacagacgttatcttactcagaaaaattttctatctacgagtgaaacagatccatctactttgggagtttctct

SEQ ID NO: 51367 - DNA, 329 bp, Homo sapiens; identical to SEQ ID NO: 12703

SEQ ID NO: 51368 - DNA, 291 bp, Homo sapiens
  misc_feature (1)...(291): n = a,t,c or g
cgctagtccttatcagatatatgatttgcagatattttctctcattctcactttccttaaattttnnnnnnnnnnnnnnnnnnnnnnnnnnnnnnnnnnnnnnnnnnnnnnnnnnnnnnnnnnnnnnnnnnnnnnnnnnnnnnnnnnnnnnnnnnnnnnnnnnnnnnnnnnnnnnnnnnnnnnnnnnnnnnnnnnnnnnnnnnnnnnnnnnnnnnnnnnnnnnnnnnnnnnnnnnnnnnnnnnnnnnnnnnnnnnnnnnnnnnnnnnnnnnnnnnnnnttatcaagcactg

SEQ ID NO: 51369 - DNA, 682 bp, Homo sapiens
atggcagtaaatccacagagagattgcctggtgagcctagaggtgaagagcagattgtccctccaggaaggcagcgagccaggtcttcctcagtgcctcgggaggtgctccgactgtccctgagttcagaatctgagctgccctccctaccactgttctctgagaagagcaagaccaccaaggacagtccacaggcagctcgggatggaaagagaggggtgggcagtgctggatggccagacagggtcaccttccggggccaatacacaggccacgaataccatgttctgtcccctaaggcggtcccaaaaggcaatggcacagtctcctgtccccactgccggcccattaggacccaggatgcgggtggtgctgtcacaggggacccactgggaccgcctcccgctgatacccttcagtgtcccctgtgtggtcaagttgggtctcccccagaggcagatggtccaggctcagccacctctggggcagagaaggccaccacgaggagaaaagcaccttcaactcccagccccaagcagaggagcaagcaggcggggtcgtcgccacgcccaccccccggactgtggtatctggcaacagcgcccccagcaccagcccctccagcctttgcctacatctcctcggttcccatcatgccttatccacctgaaaaaataataag

SEQ ID NO: 51370 - DNA, 535 bp, Homo sapiens
gtccctgagtggtcctcctgccctaagtctcctccctgaccggtcctcctgccctaagtctcctccctgaccggtcctcctgccctaagtctcctccctgactggtcctcctgccctaactcctccctgactggcctccatccaagcagagcttgagtattgctggttccctgctcaaacccaccactggttgctggttccctgctcaaacccaccactggcactggcttcccatcacatacagaataaaggctaaatgtctacgcttggcacagaaagtcatcaacaggccccagagcacgtttctggtgttatcttctgctaatgccctgccctgactcctatgctgcagctgaatggaacgagccattatcccctcaggaacgctggcttctcagtaaacgattatagcccagaagccctgtcatcacagaacctagctattggctaatgggtcagctttggcttcatttctctgaataatttatttcaaaacataatcccaaggaacaaggttaggaaaaggggagggtga

SEQ ID NO: 51371 - DNA, 3413 bp, Homo sapiens
ggattttaaaaaattttatagttccacattttaattataggcaaggtgtcttttcctttgaatacatgaatttacagaggcagcataccttgttaaagtagaaacaagctataattgtgtgctcataaaccgtcctgtggggctgccctccaggaaggaaaacatggcatggtgtgattgcatggggtaaccctttatttttatttaacagtacatttggaagaagataaggcaacaaggcaaaatttctataatgttgctagcattttcccaaggtaaagccaggaaacaaacttgtgtcctttctataagaacttctaagtgatgtcccctctaactccatggacagacactagtggtggtgaagttcataaagttttgaggtggcaaacagcttattttgtcctttatcataattggtttacaaattggatgcctggttttggcatactgggttcagttgatcaagcgcaggatccctttggtctttgtaagaccagatgtataaggcccgaatagggtcaagaacttgattgtaaggagaacggatttactattaccaatcaatattctacaaaacctgtctcttgtttaacccaagcgacagaggtgagtcttctctcctggactctccagatgccttgacaagattacttcatgatataccatgtttcccagttggctcatgggaaatggtaatcttggactgttgtttggtagaatcaacagctgcattttaaacttgaagttgctttaaatattccctgccaagggcctcgtgtcctttgagagtgactcaatgtttttgcctcagctgttaaatacctccctgcatttttttttccctgatttaatattgctatgaacaggaaagtgtgtaaaagtaaaaagtgtatacctatttacagatttaaagctttctttgaccttgtcaagggttaagcgactcatttgcatttagtataatgatatgcaaatcttttactttgatgtgtgaaaacttcctgcctatctcaaattgacagtatcattattttccagcctatggatcatcccgtttaagtaaatggttccccataattttgaggtcccagatacaaagtgtatttcctatggaagcttagtccttggctgattttcccatcatgagaagtcttcaggcagattagttataacttcaaagtactgagaaacagagccaagagataaggtcgagctctattcttccagtattctcgggatccagctgcttaaatatcttgaatagcgtttccagccgaaccaaacaccgaacaaaattatcaaaatcgatgatgagctggtcatctgcaaaccgagcaacgatgacttggtggagttgacagggcatcttgaaacctgcttcttctaatgccttccgcatttcataggaattcatggtaccagacctgtcaacgtcgatttctcggtaaattttttggtatttttgaatcttcgtccagagaatgtagaactccttcagccccagcttgccactcccgtccgaatctagcatgtcaaccataattttgcatgtctcgatgctgaagccatctgactggatatcttggcgctttgctagaacccttctcaggatggtctgcagctcaaaggcagagatctccgcatcctctcctgccaactgggcaaacagtctcctgaatccatcatcaatgtcatcctcgctgatgtcgaactcttcaagattggcctcgatttcatcatcgacagcttggtagtcagctttcttttcagaaaagacccggatgcagaaatccccatccttgttgggttcgaaggtggaaggcacgagaatgtactctcctggcggcagcttgaagcggttgagcacctcccggaggttgatgaaggtgtctgagcgctccctggcgcgattcgtcaggaagaagtttttgctgaggtggatgttggtctgcccacttaactcctctggaacctcatagatgccaaagccgatggtgtgcatgtcctcgcccatcttcctctgccgccgtcggtgcttctgaatgagccccaccaggaaggtgcagccgctctccccatcctcctcgtcctcatcctcctcctccagcttgatcaggtactgagggttcatccagaatgtgttcgggtagttcctgcaacctcccgcggtggagccccggcctccaggttcccatccattttggtgagtttccacttcttgtaggtatcgctggtgagagtgtctggggtcaggttacagatctccaggcgggaatagtgcctcaggaagtcactgaaagacatccagaattctccatcttcatgccgtctggtcagcctttccctctcctctgggtctatagtgttccagcttgggcagttgtcattccaccgccctgtccactccacttctccccagggatttcggatgcggatcagtttctgtaggcttccggttactttcaacctcctcggctccggtgaccgagtacgcgtgccccttcaccagcttctgaaacgtgatggcctccgagtccgcggcgctggtgatgtcgatggagcagccaaggagagagcctttttgcagagctttctggatgatcttgaacaggttgggagggggcttcttcaactcataccactcagcaatgcctccggtgaagtcttcgaagccctcagtggtggcaccccctgatagagcttcatagcatccgttgatcttggcgtatgccttctccagcagggcgctccagaactcgctcccttcggctgaatgcacaaagagcagctccccgtccttggtgggcagcctgtcatccaccaccacctccacccactcgccgtattgccagaactggaagtgaaagatccctgcatagttttcctggaagctctggtttagggggacgactcgagccaggatttcttcattcaaggtgagggaggcaatggctgccagcagccagcagtcacctagggctccttggcagatgtctgtgcgggtggctcctccaatgataaactgggggtcagcgcagatctccgtggggcgcttccatctcatgccccgggttttgctggagtagggccccaactccttgaagcccagggccgaggggatggccgggaaggacgggtcctggaagagcgtcccggcctccaggcactcgttccgcagcgcctcgtagtcctggttgaggtacttgatggccctctcgtgggagcccagcccctcggccgcctcccggtccttcgccagcttggccgcgatgcccgccatgctgcggtcccggcggccgtactgcgcagagaaaggtcggggcgactccgcgctgcgctcggctggggcgcggccagggcccggcgcgctgctgcggccactgcgggcgccgccgctgcgagcgatgatt

SEQ ID NO: 51372 - DNA, 403 bp, Homo sapiens
ggtcaaaatctaagtgacttctttcaagccatttagtaaagagttttgcaaaagtgtaaaacaaaatgttttgcttcttaccatatttttgcatatatatttaagattttttaacagtttttcctttctaatgtggtaactatttataatccatgtgtataaagaagtcctgaaaccaagatgtttgaaaatcactgatatgtaggatctatgggattataaaaaaaggctcatggattttttaggaatctatattaggaaatcctcatgttatttacagtgagttgttattctggagttttctttaaaattgcttatagtcagtggaagtagtgtgaaggagaataaaatagtctgaaatgaaaaactgggaaattgaggccggtcgcaacagctcatgcct

SEQ ID NO: 51373 - DNA, 222 bp, Homo sapiens
ttttttttttttttatcttgtaacactgccttccttataaaattcatataaatatcttgggattaatgttcataaatacatgaaaatatgtttctaaaatattaaaaatctgccctaggattcatctgctattaatgaacaatcaaaagaacgaacaagtagtctgcctgccaatttagaactttaaaaaggtttgggattatcctaattttttttttaaaa

SEQ ID NO: 51374 - DNA, 382 bp, Homo sapiens
tttttttcatttagatttctaatttattattaaattacataccaaagcttcttctatacagtcagaaaatgcacatttagatgagaacaaaaattaagtacaaatacaataaaattggttccaagaagctattttaaaagcaaaaacttacaaagtgcatttggaaaacaataggttttaaaaatctgtattggcattttttcaagaggaaacatcttccatcacaggaaagtatggttggaattgatttccctcctcccttaagagctaacagggtgggaatggatgcaaataccttgatattaaagtgagctctcaggtatcttttaattttttttgcagagacagtgtctttgctaccattgccccgggggtgggtctc

SEQ ID NO: 51375 - DNA, 723 bp, Homo sapiens
ttaaggttgactgttttgagtagaacttcgggaaggactgtgctctgggttcagggagcccgctgaatctaaaggaaaaggctaaagaagctaaagagacggaggaagacctgtgaacaagagatgctcagtcattattagcgaggaaatactggagagcccctgtgtgcagtggtgactactcatgcaaaaggtcacacagccaatatttaacacagccagtatttcacagagccaatatttattagtgacatagaatataccagttattactctaggtcatgagaatggagtgataaataaaaatgaatcccagtcgcccatcactatatgcccatgtaaccattttgcaatgactgtgtatccaggcctatgaaatttcagtattcaatttcaataatgatcctgttggtatctgtggttatttaaaacatatacatctctggaatctaaaatttgagaggttataagtaacacccagtattacaaatttagtgctggaaatcagattgcagtttaaatctgagcatatagaaagtccgtttcttctatgtcagcagatgctttttgtgtgaggtttaggtatactgcattatttgacataaaccagtgtttctgccctatgtcttcagaatgacaattctttatgaaactaatagaagaacagaagacaattgcaaaatcatgatgaagatactaattgctttagaattaaggaataca

SEQ ID NO: 51376 - DNA, 4661 bp, Homo sapiens
atgaggagggacgagcgagacgccaaagccatgcggtccctgcagccgccggatggggccggctcgccccccgagagtctgaggaacggctacgtgaagagctgcgtgagccccttgcggcaggaccctccgcgcggcttcttcttccacctctgccgcttctgcaacgtggagctgcggccgccgccggcctctccccagcagccgcggcgctgctcccccttctgccgggcgcgcctctcgctgggcgacctggctgcctttgtcctcgccctgctgctgggagcggaacccgagagctgggctgccggggccgcctggctgcggacgctgctgagcgtgtgttcgcacagcttgagccccctcttcagcatcgcctgtgccttcttcttcctcacctgcttcctcacccggaccaagcggggacccggcccgggccggagctgcggctcctggtggctgctggcgctgcccgcctgctgttacctgggggacttcttggtgtggcagtggtggtcttggccttggggggatggcgacgcagggtccgcggccccgcacacgcccccggaggcggcagcgggcaggttgctgctggtgctgagctgcgtagggctgctgctgacgctcgcgcacccgctgcggctccggcactgcgttctggtgctgctcctggccagcttcgtctggtgggtctccttcaccagcctcgggtcgctgccctccgccctcaggccgctgctctccggcctggtggggggcgctggctgcctgctggccctggggttggatcacttctttcaaatcagggaagcgcctcttcatcctcgactgtccagtgccgccgaagaaaaagtgcctgtgatccgaccccggaggaggtccagctgcgtgtcgttaggagaaactgcagccagttactatggcagttgcaaaatattcaggagaccgtcgttgccttgtatttccagagaacagatgattctttgggattgggacttaaaacaatggtataagcctcattatcaaaattctggaggtggaaatggagttgatctttcagtgctaaatgaggctcgcaatatggtgtcagatcttctgactgatccaagccttccaccacaagtcatttcctctctacggagtattagtagcttaatgggtgctttctcaggttcctgtaggccaaagattaatcctctcacaccatttcctggattttacccctgttctgaaatagaggacccagctgagaaaggggatagaaaacttaacaagggactaaataggaatagtttgccaactccacagctgaggagaagctcaggaacttcaggattgctacctgttgaacagtcttcaaggtgggatcgtaataatggcaaaaggcctcaccaagaatttggcatttcaagtcaaggatgctatctaaatgggccttttaattcaaatctactgactatcccgaagcaaaggtcatcttctgtatcactgactcaccatgtaggtctcagaagagctggtgttttgtccagtctgagtcctgtgaattcttccaaccatggaccagtgtctactggctctctaactaatcgatcacccatagaatttcctgatactgctgattttcttaataagccaagcgttatcttgcagagatctctgggcaatgcacctaatactccagatttttatcagcaacttagaaattctgatagcaatctgtgtaacagctgtggacatcaaatgctgaaatatgtttcaacatctgaatcagatggtacagattgctgcagtggaaaatcaggtgaagaagaaaacattttctcgaaagaatcattcaaacttatggaaactcaacaagaagaggaaacagagaagaaagacagcagaaaattatttcaggaaggtgataagtggctaacagaagaggcacagagtgaacagcaaacaaatattgaacaggaagtatcactggacctgattttagtagaagagtatgactcattaatagaaaagatgagcaactggaattttccaatttttgaacttgtagaaaagatgggagagaaatcaggaaggattctcagtcaggttatgtataccttatttcaagacactggtttattggaaatatttaaaattcccactcaacaatttatgaactattttcgtgcattagaaaatggctatcgagacattccttatcacaatcgtatacatgccacagatgtgctacatgcagtttggtatctgacaacacggccagttcctggcttacagcagatccacaatggttgtggaacaggaaatgaaacagattctgatggtagaattaaccatgggcgaattgcttatatttcttcgaagagctgctctaatcctgatgagagttatggctgcctgtcttcaaacattcctgcattagaattgatggctctatacgtggcagctgccatgcatgattatgatcacccagggaggacaaatgcatttctagtggctacaaatgcccctcaggcagttttatacaatgacagatctgttctggaaaatcatcatgctgcgtcagcttggaatctatatctttctcgcccagaatacaacttccttcttcatcttgatcatgtggaattcaagcgctttcgttttttagtcattgaagcaatccttgctacggatcttaaaaagcattttgattttctcgcagaattcaatgccaaggcaaatgatgtaaatagtaatggcatagaatggagtaatgaaaatgatcgcctcttggtatgccaggtgtgcatcaaactggcagatataaatggcccagcaaaagttcgagacttgcatttgaaatggacagaaggcattgtcaatgaattttatgagcagggagatgaagaagcaaatcttggtctgcccatcagtccattcatggatcgttcttctcctcaactagcaaaactccaagaatcttttatcacccacatagtgggtcccctgtgtaactcctatgatgctgctggtttgctaccaggtcagtggttagaagcagaagaggataatgatactgaaagtggtgatgatgaagacggtgaagaattagatacagaagatgaagaaatggaaaacaatctaaatccaaaaccaccaagaaggaaaagcagacggcgaatattttgtcagctaatgcaccacctcactgaaaaccacaagatatggaaggaaatcgtagaggaagaagaaaaatgtaaagctgatgggaataaactgcaggtggagaattcctccttacctcaagcagatgagattcaggtaattgaagaggcagatgaagaggaatagcgacagtttgagtaaaagaaaagtcatattgaagaagcccagagggttgtgcccaggggcagaaatcattgcctagtgttcaccggctgactctcaactgaccattcccatgtggacaggccttaatactgtgagaggatccttgctctgctggcagtttcccactcctatgcactttcacaggaactagaaaactattcttaaaccaaaaataccatccgtgttgacccatgttgcagagcccttacttaaatccttcactggtgtatgaatactttgtcataatgctgctttgctgggtagtgagctcttatttttcactgggggtcagctataactaaaaactcaagtgacatatttcagttaccaaagtggccaggaactttttgcttttatgaaaatagattcatattgtatttcccagtgtgtcttttatgtctttgaatgttttggagaaaagtctatgcctgtctaaaaatgaatccagtgttgcctttctgagggatttctgctcaatgcaatacactgttcagtgctattctcccagctaggtttatccatgaaggactgagtgacctttgttgtatttaacaaaatccaggtgcatcaatttctgatgctttttactattgtgtattatctactatgtgtgttttatttctgctgagagtattcaggtttgccatggacatcagaagtttgaattccagtcttatcttatgttccatggctgaattttaaagctgtttaggtttaacaatgaagggatttattctttagtcaaaattgttgtttttactctagctcaggattcgtatttttaaagatttagttaatataaacacagcacagatttgtcagaagaaaaaaaatttgctgtaataccaaaactaacctcatcaaagatacagaaaaaaagaaatatagtgagccctaaaggacacatacattgaataaataattggaacatgtggttatctttagatccacatcttagctgtcatttgttcactctaaaactgatgttcatctttctgttaatttccctctgcctaaagactacatgacagaaatgacctatcactacttattatttctgaagcctaactgcaagactgatttctgagaacaagtaaagaactggaatacttatttttcatataaaaatctaaatgtgttaataaatcatttcatacaaaagtacattattaaataaccacattattaaaataattgcaagaaaatggaccatatttacaatgttttgtaaacttgctagtgtgtggatatgtaccctacttgtgaaatacatttgaagatat

SEQ ID NO: 51377 - DNA, 1641 bp, Homo sapiens
cgccaagccccgcccctcaggccggggcgcgaccgcggatccgcagttcccgggccagcctggggcggccggccaggaaccacccgttaaggtgtcttctctttagggatggtgaggttggaaaaaggctcctgtaaccctcctccaggatgaaccacctgccagaagacatggagaacgctctcaccgggagccagagctcccatgcttctctgcgcaatatccattccatcaaccccacacaactcatggccaggattgagtcctatgaaggaagggaaaagaaaggcatatctgatgtcaggaggactttctgtttgtttgtcacctttgacctcttatttcgtaacattactgtggattaatagagttaaatgtgaatgggagggcattgaggaacacattaggagaagggaggtgatgcagtatggacttactatttcttccatatttttgatattatttcttctgggcagtttttcgatttaaagtgttaatacttgcatatgctgtgtgcagactgcgccattggtgggcaatagccgttgacaacggcagtgaccagtgcctttttactagcaaaagtgatcctttcgaagcttttctctcaaggggcttttggctatgtgctgcccatcatttcattcatccttgcctggattgagacgtggttcctggatttcaaagtgttacctcaagaagcagaagaagaaaacagactcctgatagttcaggatgcttcagagagggcagcacttatacctggtggtctttctgatggtcagttttattcccctcctgaatccgaagcaggatctgaagaagctgaagaaaaacaggacagtgagaaaccacttttagaactatgagtactacttttgttaaatgtgaaaaaccctcacagaaagtcatcgaggcaaaaagaggcaggcagtggagtctccctgtcgacagtaaagttgaaatggtgacgtccactgctggctttattgaacagctaataaagatttatttattgtaatacctcacagacgttgtaccatatccatgcacatttagttgcctgcctgtggctggtaaggtaatgtcatgattcatcctctcttcagtgagactgagcctgatgtgttaacaaataggtgaagaaagtcttgtgctgtattcctaatcaaaagacttaatatattggaagtaacacttttttagtaagcaagatacctttttatttcaattcacagaatggaatttttttgtttcatgtctcagatttattttgtatttcttttttaacactctacatttcccttgttttttaactcatgcacatgtgctctttgtacagttttaaaaagtgtaataaaatctgacatgtcaatgtggctagttttatttttcttgttttgcattatgtgtatggcctgaagtgttggacttgcaaaaggggaagaaaggaattgcgaatacatgtaaaatgtcaccagacatttgtattatttttatcatgaaatcatgtttttctctgattgttctgaaatgttctaaatactcttattttgaatgcacaaaatgacttaaaccattcatatcatgtttcctttgcgttcagccaatttcaattaaaatgaactaaattataaaaaa

SEQ ID NO: 51378 - DNA, 753 bp, Homo sapiens
  misc_feature (1)...(753): n = a,t,c or g
tcttcttttaaagtaccctaaaacatgaatctgttctttgagatcctggtttccttagcagagttgtaggttgcgggtttcattcacgtggaaattctaagtagaacttttgctgccccattttactgttggtgaagggccgttgttaatggaagtttacgttttaaaactcagatgactcagaaaccagactgtgatcattttttgcagcagcaaaatgacttattctgacagcatctcggtttggggcttctgaagaaaaaggatgaagctgatctgttgaaacaactactttcccaactcggaggcaaaaggggctgatagaagataacattcacctaccatttcatcttgtgacccccagagatcacgtttgcgtgttctggctgagttttttattattgtttgttttaaatgattaaataatacacaattaaatgtcaggatagcatctcttgcaaagtgaccagtgcagcagaattgtctttctatccatatttgagcttagagaaacatttcccatgtcctaagttcttagaagcaattactttagcgttggggagcattgttctaccagacccatttatgcaggggagatgaagcttaaaagacgggatgtggggtgggagtgtgtttcttaagccgaagctgttgcaggctgggggatttttgcattttctttttgttttggttttgactgcagattctgtcatctgctgtgggaggagagttgctactcangacaggatttaa

SEQ ID NO: 51379 - DNA, 2764 bp, Homo sapiens
aaaaaaataatggcattatttgggccacttggaaaacccggtggtattccatgaagaaaaccactatgaagataatcccattcaccagactcacaattggagaaggacagcaacaccacctggggggagccaaacaggctggagacagaaactcccggtgtggcagctgagatggcccaggaaagaactatattaccttcaaaaagagaggtacatgcgatgtttgaggtggcatgaagctcagtggtgttatattggaatgagtgagtgaccatcctggagccttcctgaaagaggattggaacatcagttaacatctgaccactgccagcgcaccccctcccacccacgtcgattgcatctctgggctccagggataaagcaggtcttggggtgcaccatgatttcaccattcttagtactggccattggcacctgccttactaactccttagtgccagagaaagagaaagaccccaagtactggcgagaccaagcgcaagagacactgaaatatgccctggagcttcagaagctcaacaccaacgtggctaagaatgtcatcatgttcctgggagatgggatgggtgtctccacagtgacggctgcccgcatcctcaagggtcagctccaccacaaccctgggggaggagaccaggctggagatggacaagttccccttcgtggccctctccaagacgtacaacaccaaagcccaggtccctgacagcgccggcaccgccaccgcctacctgtgtggggtgaaggccaatgagggcaccgtgggggtaagcgcagccactgagcgttcccggtgcaacaccacccaggggaacgaggtcacctccatcctgcgctgggccaaggacgctgggaaatctgtgggcattgtgaccaccacgagagtgaaccatgccacccccagcgccgcctacgcccactcggctgaccgggactggtactcagacaacgagatgccccctgaggccttgagccagggctgtaaggacatcgcctaccagctcatgcataacatcagggacattgacgtgatcatggggggtggccggaaatacatgtaccccaagaataaaactgatgtggagtatgagagtgacgagaaagccaggggcacgaggctggacggcctggacctcgttgacacctggaagagcttcaaaccgagatacaagcactcccacttcatctggaaccgcacggaactcctgacccttgacccccacaatgtggactacctattgggtctcttcgagccaggggacatgcagtacgagctgaacaggaacaacgtgacggacccgtcactcttccgagatggtggtggtggccatccagatcctgcggaagaaccccaaaggcttcttcttgctggtggaaggaggcagaattgaccacgggcaccatgaaggaaaagccaagcaggccctgcatgaggcggtggagatggaccgggccatcgggcaggcaggcagcttgacctcctcggaagacactctgaccgtggtcactgcggaccattcccacgtcttcacatttggtggatacaccccccgtggcaactctatctttggtctggcccccatgctgagtgacacagacaagaagcccttcactgccatcctgtatggcaatgggcctggctacaaggtggtgggcggtgaacgagagaatgtctccatggtggactatgctcacaacaactaccaggcgcagtctgctgtgcccctgcgccacgagacccacggcggggaggacgtggccgtcttctccaagggccccatggcgcacctgctgcacggcgtccacgagcagaactacgtcccccacgtgatggcgtatgcagcctgcatcggggccaacctcggccactgtgctcctgccagctcggcaggcagccttgctgcaggccccctgctgctcgcgctggccctctaccccctgagcgtcctgttctgagggcccagggcccgggcacccacaagcccgtgacagatgccaacttcccacacggcagcccccccctcaaggggcagggaggtgggggcctcctcagcctctgcaactgcaagaaaggggacccaggaaaccaaagtctgccgcccacctcgctcccctctggaatcttccccaagggccaaacccacttctggcctccagcctttgctccctccccgctgccctttggccaacagggtagatttctcttgggcaggcagagagtacagactgcagacattctcaaagcctcttatttttctagcgaacgtatttctccagacccagaggccctgaagcctccgtggaacattctggatctgaccctcccagtctcatctcctgaccctcccactcccatctccttacctctggaaccccccaggccctacaatgctcatgtccctgtccccaggcccagccctccttcaggggagttgaggtctttctcctcaggacaaggccttgctcactcactcactccaagaccaccagggtcccaggaagccggtgcctgggtggccatcctacccagcgtggcccaggccgggaagagccacctggcagggctcacactcctgggctctgaacacacacgccagctcctctctgaagcgactctcctgtttggaacggcaaaaaaaaatttttttttctctttttggtggtggttaaaagggaacacaaaacatttaaataaaactttccaaatatttccgaggaaaaaaaaaaaaaaaaaaaaagatct

SEQ ID NO: 51380 - DNA, 135 bp, Homo sapiens
cccccagcacagcacaactgctgtacaaaagcatggccagactgcttctttaagcaggtcccggattcattcctcctcactgtttgggacttcccaactggggcctcagccacccccactggtgttctcctgctg

SEQ ID NO: 51381 - DNA, 518 bp, Homo sapiens
accccatttcccgggtcgccccgcgtccgagctttttaaatttgaaagctgggttgcataatctgggggaatagtcataatttcatgtggttatacaggttttaaaaaagcctgcaaaagttgactttgcctggtttacctttctgcctcagattgactattttaaccaatattgtcacgactagatcatagctcctagtgaataacatgaggtgttttaaagttaggtctattacagaattaacataagcacaattttaattttatgatatctgatatgcctatctaatacatcttaatgcattaaatgctgcagataagaatcttgctatttttcaagtagacaacattagaaagttgaatcatgaactcattcaattcatcaagtcaaaagcactgagtgttttgctagtctagtgacatgggttattgtatttccgagaagtgcctctcatttctggggagttgtttacatataccctgcatttaaaccaattaaaacaatccaagtttcttta

SEQ ID NO: 51382 - DNA, 176 bp, Homo sapiens
atcacccctgccatccctgcagtcgctggcatcctgttcttcttttgtgatggggaccctgctccgcaccagcttcagcgaccccggagtcctcccacgagccacgcctgatgaagccgccgatctggaaaggcaaatagatatcgcaaacggcaccagttcaggggggtaccgcc

SEQ ID NO: 51383 - DNA, 348 bp, Homo sapiens
atttgaagttgtggggtaaataatgatcaggaattatcatgccaagttaattttacacctcaaaaatacaagtgtgccatacttaaaggttatcttattgttgatgctggaatgagttgctcctcagtaaaaaataccagtcaactaacaagaatggcatgaaataggatatgtaacaattttaccattcatatactgactttcagtatcctgggtatattttgatttttaataaagatgcatttcaaaggcctccatgggaggcaaaatatagagaatttatgggcccactcttatgtaatcactggactaatcttcctgggaacttttgcaccatttggacagaaa

SEQ ID NO: 51384 - DNA, 2100 bp, Homo sapiens
ctgagtcagagccatgtcgcgatccaaccggcagaaggagtacaaatgcggggacctggtgttcgccaagatgaagggctacccacactggccggcccggattgacgagatgcctgaggctgccgtgaaatcaacagccaacaaataccaagtcttttttttcgggacccacgagacggcattcctgggccccaaagacctcttcccttacgaggaatccaaggagaagtttggcaagcccaacaagaggaaagggttcagcgaggggctgtgggagatcgagaacaaccctactgtcaaggcttccggctatcagtcctcccagaaaaagagctgtgtggaagagcctgaaccagagcccgaagctgcagagggtgacggtgataagaaggggaatgcagagggcagcagcgacgaggaagggaagctggtcattgatgagccagccaaggagaagaacgagaaaggagcgttgaagaggagagcaggggacttgctggaggactctcctaaacgtcccaaggaggcagaaaaccctgaaggagaggagaaggaggcagccaccttggaggttgagaggccccttcctatggaggtggaaaagaatagcaccccctctgagcccggctctggccgggggcctccccaagaggaagaagaagaggaggatgaagaggaagaggctaccaaggaagatgctgaggccccaggcatcagagatcatgagagcctgtagccaccaatgtttcaagaggagcccccaccctgttcctgctgctgtctgggtgctactggggaaactggccatggcctgcaaactgggaacccctttcccaccccaacctgctctcctcttctactcacttttcccactccaagcccagcccatggagattgacctggatggggcaggccacctggctctcacctctaggtccccatactcctatgatctgagtcagagccatgtcttctccctggaatgagttgaggccactgtgttccttccgcttggagctattttccaggcttctgctggggcctgggacaactgctcccacctcctgacacccttctcccactctcctaggcattctggacctctgggttgggatcaggggtaggaatggaaaggatggagcatcaacagcagggtgggcttgtggggcctgggaggggcaatcctcaaatgcggggtgggggcagcacaggagggcggcctcccttctgagctcctgtcccctgctacacctattatcccagctgcctagattcagggaaagtgggacagcttgtaggggaggggctcctttccataaatccttgatgattgacaacacccatttttccttttgccgaccccaagagttttgggagttgtagttaatcatcaagagaatttggggcttccaagttgttcgggccaaggacctgagacctgaagggttgactttacccatttgggtgggagtgttgagcatctgtccccctttagatctctgaagccacaaataggatgcttgggaagactcctagctgtcctttttcctctccacacagtgctcaaggccagcttatagtcatatatatcacccagacataaaggaaaagacacattttttagggaaatgtttttaataaaagaaaattacaaaaaaaaaattttaaagacccctaaccctttgtgtgctctccattctgctccttccccatcgttgcccccatttctgaggtgcactggggaggctccccttctatttgggggcttgatgactttctttttggtagctgggggctttgatgttccttccagtgtcatttctcatccacataccctgacctggccccctcagtgttgtcaccagatctgatttgtaacccactgagaggacagagagaaataagtgccctctcccaccctcttcctactggtctctctatgcctctctacagtctcgtctcttttaccctggcccctctcccttgggctctgatgaaaaattgctgactgtagctttggaagtttagctctgagaaccgtagatgatttcagttctaggaaaataaaacccgttgattactaaaaaaaaaaaaaaaaaa

SEQ ID NO: 51385 - DNA, 384 bp, Homo sapiens
ggaaggacctgtccaaggtggccatgccggtggagctgaacgagcccctgaacacgctgcagaggctctgcgaggagctggagtacagcgagctcctggacaaggccgcgcagattcccagccccctggaaaggatggtatatgtggcagcctttgccatatcagcgtatgcatctagctactaccgagctggaagcaagccatttaatccggttcttggagaaacatatgaatgtattcgggaggacaagggcttccagtttttttcagaacaggtcagccaccatccgcctatctctgcgtgtcatgctgagtctagaaattttgttttctggcaagatgtgagatggaaaaacaaattctggggcaaatccatggaaattg

SEQ ID NO: 51386 - DNA, 713 bp, Homo sapiens
tcaaatcagtggatgaaatacaagctcagaaacaggaacattttcctaaatcataacctaatagcaaacaaaaattgaaaaaacaattattctgaagctcattattcttagatctgtagatatatatgtgttgactcccacaggatggcaccaagtaaagatcttaagagcatagtaggggttctgagaccgactgtcacccgtggatcctgatggggaagaacagaggcttcactgtagctatagttttccaccaagtcaatcaaattaaaacatgactcattgtcccctccaaagattcataaaattcttgagctaaagtgatcttctgaagaaaagccacctaacaatgttaggaggctcataaagctcatttctcttttccctggtatgcacaaatatcaagcctataaaaaagtaattatttccccaaacctgtaaccactgcattcgttttctttggaggaacattgtagcatttcgggagggtcgagagatctaaagagtttggtctgaatgtgtgtctgtacaattccctttggcattaaactctgaaacctacaatcaatggccttcaaattggtgttaaattgggagaacaccctactgctttctgagtctacgagcaacagaaagactggtcttagtgcaattaggcaggagggatttggactcagaaacagccacagaagtatttctcagcactcccagtt

SEQ ID NO: 51387 - DNA, 410 bp, Homo sapiens
  misc_feature (1)...(410): n = a,t,c or g
ccggataaaccttaagggcagctaaccactttggtntttggaaaaggagaacttctactatttcatcatttgctgttgaaagtcgctagcagtaagggagagaagtccaggtcagtgcaaacaacaggaacagagttagtttccatagtctaaaacctcacacatcagagttaccttcagcatgtccagagatagctgatgagcaggaggatagaaactctctagggataacagcagacaagccaaaggtttggagtcgctgaggacgtggtactgcaggaactgatgcngcatatnaaagaggttgtgctggacaagggttttgataacaagntcatgtaggtaatgctgaggacaaaagttaaaagtgaaagaacacttccaaatcattcagctacaacagactagag

SEQ ID NO: 51388 - DNA, 1567 bp, Homo sapiens
attgtcttcataacagatcaaggaatcgaattttaccaggtattaccagagaaacggagtctgaaactcttgaagagccacaatctcaatgtgaattggtacatgtactgccccgagagcgccgtgatcttgctgtctaccacggtcctggagaatgtcctgcagccttttcactttagggctggcactatgtcgaagctgcccaaatttgagattgaattaccagctgcgcctaagtcaactaaacccagcctttccgaaagagacatcgcaatggctaccatatacgggcagctgtatgttctcttcttgaggcatcattctcggacctccaacagcacaggagcggaggtggtcctctatcatctaccacgagaaggtgcctgtaaaaagatgcacatattgaagttaaataggacgggaaagtttgccctgaacgtggtggacaacctggtagtcgtgcatcatcaggatacagagacatcggtaatattcgatatcaagttacggggagagtttgacggctccgttaccttccaccaccccgtgcttcccgctcgatcgatccagccctatcagatccccatcacaggtcctgctgccgtgaccagccagtctcctgttccatgtaaactctattcttcatcttggattgtctttcaacctgacatcattatcagcgcaacgcaaggttacctctggaacctccaagtgaaacttgagcccatagtaaatctcttaccagacaaaggaagactcatggactttctcctccagagaaaggaatgcaagatggtcatcctgtctgtctgttcacagatgttaagtgagtcagacagagcatcgctgcccgtgatagccactgtttttgataaactcaaccatgagtataaaaagtacctggatgccgagcagagttatgcgatggcggtggaagcagggcagagccgaaggcagcccgctcctcaagaggccggtgcggacccaggcggtgctggaccagtcagatgtgtacacccatgtcctgtcagcctttgtggaaaagaaggagatgcctcataaatttgtgatagccgtgctgatggaatacattcgttctcttaaccagtttcagattgcagtacagcattacctacatgaacttgttatcaaaacccttgtccagcacaacctcttttatatgctgcatcagttcctgcagtaccacgtcctcagcgactccaaacctttggcttgtctgctgttatccctagagagtttctatcctcctgctcatcagctatctctggacatgctgaagatgctgcaaagcagactgaagacaacatgcttttctatacaatattccgcttttttgaacagcgaaaccagcgtttgcgagggagccccaatttcacaccaggggaacactgtgaagaacatgttgcttttttcaaacagatttttggagaccaagctctaatgaggcctacaacattctgaaatcacttgctgtttttttatataaaaatgtgtacaaagttaatttattgcattaataaagctctttaaactataaaatgttaaa

SEQ ID NO: 51389 - DNA, 2403 bp, Homo sapiens
ttttttttttaggaaaacaatgtattttattaaagaaaaataagttaaaacccagtagacacacctacgagatgctttctttgtccctcatttcatgccacatctaactggcaattaaatctcttcctttctaggggaacactgtgaagaacatgttgcttttttcaaacagatttttggagaccaagctctaatgaggcctacaacattctgaaatcacttgctgtttttttatataaaaatgtgtacaaagttaatttattgcattaataaagctctttaaactataaaatgttataaagtgtatctacaacctcaactgtcactaaaaatatggtatagaacttgtgggatggcttactcctaaaaggagagacagacagtgcattgattggcctttacagagtgtcagtgagcggatcacattcacagccatctagtgtcacctcctgcttgccaaagaatgaggtttctttcctgaagaggctgggagaagtttagtgtcctgtggttgcctccagatctagtaatactgcttcccaagtcaactgtgcattcctgagttcacaggcgctacgttcaaagctgctgccaaacaaccgatggttggcaccatccggtgttcaacttggccttgccgatgcagcacccgtccagtggtaaaccgaccgacccttagacacagttcagtcaggatgccctgcgagagggctagaaatttagaagccgttcgcgctctgttcctttgtatcgctcttcagtggcacaacttttggctttatttactgatggccctatgtaactgagtaagacagggagaaatattaatccgtgagtggctcccagtaagaccatggccaaatacatcctgaagtagaatatctggaaaatttgagatttggcaaaagccaacaccacaatccctccaaattttgtaagtgtgattccactgaacacggagctgcccatgtgggcaagtgcctcttccgcgcgctccacgcggctgcctttcatgctcaccgtgaacgctctggttatgtggctgcagaactccacggagatgccacagctcatcaccaggttgaccaaggatacagcgttcagactgatgccccagagccacataactccaaacatgttgaccaagaccatggcgatggtggcacacatgatgactgcagaccagagctcacagccccaggaggaccatggtcaccagaaatatcgcgcccagggacacaccgaggttgaagatagtgtcgtcaatgatggtcaggtactgttcgtagaagacataaaacacactgtaaggaaatactcggtaggcactgccgttaatgcccatggtttcggtgacattactggctataagtcgggctttcttcagagcgtcaataaagtcagcagaggtctgcagcacggtgtggtaggtcatgaagtacgtggctccgacccctggtgccatggccaaggaggatgttaactgcagaactataggcagcatgtccccctttgccacacttggggttagggttatccgaaaggaacatgggcaggaatctcatgaagtctcccccctgaggcctctgtttgccttccggagtcagaggcctgcagcgaacgcaggcagggtcaacccactgaagcattgcagaactggtcagtgatattgtccactcgacagcaagacgactgtggcttcacccagtcgaaataatcgtcgatccaggacgaggggcgaagcctattcgggtatagttgtccagctgcgccgcgttaaatatctgctgcaccagggaatcattgttgcagcccatgccgccgcacaccatgttctgccccttggaagaagtgtagtcgtgcccttcctccaggacaaagtacacaggcggacccgcatgcaggtactgactgatggatttgaaataatccaccatgtaggagtcatctggcatcgaaagagactgatccaatccaatatctactttgttcaggactgcgatgctgaatgacagaacacccacaaatattgctatcacaattggtctcatccagtcctttagcagaagtggagaataggagtttttgaagaagcgaaacaaacagctctctgaggcctggacgcttgttccatcttcagcacctctgacacagcaaaagatgtctagccgatttttctgaggggacagagggaaacaaaggttatacccgctagctgcttcctctagattctagactcaaattaaatagactataatcctggcaccaacttacctcttgacgtttaatgtctaaccccaagagactcacgaaacaggtaatctgcagaagaaagtcaatgaagactgccaatcccgcaaagagagagaaggtgtgcacggctggcatcacggacaatgctcc

SEQ ID NO: 51390 - DNA, 229 bp, Homo sapiens
gaagatgtagtctttatttttagtcaaccctcagacttcttttatcaaggaaaatgtagaaaatgaatattgggttacacaattgtctctgtcatggggcttgagtcaataaatcacgtaaatttattcattcaaagagatattagtttccagttttattatcatgaggctaacagaaagaagttatctataaggccgcaagagagaggatatattgagtgaagttatt

SEQ ID NO: 51391 - DNA, 339 bp, Homo sapiens
gtgtttttgaatcacctatcctcagtgctgaaattgttttgtataactgagggtactgttggttcaaactatgttagtttacagtttgttgcaaacattgtaaaatacagcgacatgtatattaacttttttctatttatctttattatagaaaataccttagaatgttcttgatagagtagcatggtaacgatggtgtcacacccttggtggaaatggtagcttagtgagcaacctagctcaaggatttgcaaagttaggaagaaggacgagagagcctctctccccaccccaatctaaatatggaatttggtaaattagaatactttgtaatttgta

SEQ ID NO: 51392 - DNA, 414 bp, Homo sapiens
ggctgcacgaacggaggcggaggaggcggctccgagggagcagctgatcctgaaacagcagtggatccctgggagagcagcacagataaagatccaggcaataatgatgcttcctcctcttggacagccttttacagttctggccatggaacttcagagaagaagtccttgatggtttccgtggaatcgattcccagtgggggaaatgatgagtcaaggttacatacagtttacggcctctgctagtaacacgcactgagtagggggacggcatggatgcagccttctgtctttacgaaaaccatgagtctgaagacatgggtcccatgtcaccattaactagctgggtgactttggatcaactcttcaaattattcgaatgacccatatgagaaacagagaaaagccaagtat

SEQ ID NO: 51393 - DNA, 454 bp, Homo sapiens
tttttttttttccaaagggaaaagcgttcatttttttaggggaataactggccagtgagacaacaacaacaaaattgtgattaacatgaactgtaaatggagtcaggtcccaatctggcatcctaacaagttgctttgagtattgtggtttgtctttaagaaccccactgtatatgttcagcccacctgatgacagcttcatttaacagatcatttttccttgatggaggtggcaagcgtaacagtgttctgggcctgcttcagtaatggcatgtcgatcatactcccttggaaagtaaaggccccctttcctaattgttgatgttctttaaaggcagcaatcagttcttcagcccacttaattttttcaggggaaggagaaaactgctcctggaccacggcaatttggttagggtgaatcacctgcttaccagtgaagcccatggcggtcctt

SEQ ID NO: 51394 - DNA, 479 bp, Homo sapiens
ggcttcggcaacaggatgagaggctgtggcagcagtagactctgcaggagctggagaggctgcgggagctggagaggctgcgggagctggagaggatgctggagctggggtgggaagccctgtacgagcagcgggccgagccacgcagcggcttcgaggagctgaacaacgagaacaagagcacactgcagttggagcagcaagtaaaggagctgaagaagtcaggtggagctgaagagccaagaggctccgagtctgcagcagcagccagaccagtagctggagccccagtcccacaaggagcttggatgtgcggacaagcagggtggactccccaggagcacccaggcttgagtggagaagctgttggtacaggagaggcggcaggaggagcaggagaggctgcatgccattcttttcgggctgcggagaacagggagctaaacatcaccatcatctaagagcgggtcaaggaattg

SEQ ID NO: 51395 - DNA, 307 bp, Homo sapiens
  misc_feature (1)...(307): n = a,t,c or g
gttttttttgttgctctgtaatcattcatatggtaagacttaacttttagtcatgtaaatttgtttagggacaatttaaactattttgtcaaattagtcgttttattccaagttgtacgtcttatgcatttatttagtatagtgaaagccttatatacacatttaatataattagtctctggatatttggattattttttagtagtacttttttaggagtgtggggttttttccnttcctttnctgtttttgagacagtgtcngggtccgtcacccgggctgggagttcngtggccccgtcntggct

SEQ ID NO: 51396 - DNA, 507 bp, Homo sapiens
tttttttttgagatttctcctactcacctcaaaccctctaagactgccaaaagctacgccacaatcaaattctgcaggttctttcaaatatcatttcacttagctcttctacaataaagcctcactactcaaagtatggtccttagaatagcgtcatcataattgtttggaatgttattagaaaaataaaatgtttttcttctgataattgaaaatgttcctcttcaaagcattttaccaaagaagacagtcaaataaccaataaacatatagaaaagtgttcaagttaattacttgtcagggaaatgcaaattataaccacaaagagtgtctctgccatccaccagaatggctaaaatgaaaacacaaaacagacatgtcaagcatcgataatgatatgcagcaatgggagttcatgcgctaggaatgggcaaactggtaaaactagaaaactaattggcaatagctactaaggctggacaaatgtgtatctatacgacccagcaa

SEQ ID NO: 51397 - DNA, 496 bp, Homo sapiens
  misc_feature (1)...(496): n = a,t,c or g
ccttaattaacttatttgtacatgagtcttccagagaacactgttttatattaactttcagttgaaatctttcagatattttgaatctctgaacaaccattgtcagttgtgaatgatggtaaattttttggcatcaagtctcataaccccaactgatagaactgttgcttatctgtcttccttaagtattttttagggttnnnnnnnnnnnnnnnnnnnnnnnnnnnnnnnccttcacttttcccccagggtctgttgagctgtatgagattcattcatacttcatttattcattcaactaatatttgttgaacacttacatgtaccagacattattaagtgctgggtatatggtaatgaacagaatagacaagggnccctgcccttttaggggagacagatgagaagtaaattacgggttatgagaaatgttatgaaggaaaggacaacaacagacatgtcttagtctagggtacatggctttataggaaagtaa

SEQ ID NO: 51398 - DNA, 1933 bp, Homo sapiens
tttttttttttaaatttataaggcaaactctttatataataaataggttacagggattcagtggggggggggtgtttttgaaacgtatacaggtacattcagacaggtttactgaaatggtacaaatttccttaataaattgccttttgtttttaaatatatcagtgctttcagtcatttggctatacacaaagaaccttttttctgaacactacaaaaaagcaatcaataatttttgtttttaaaacgacctacttattttctaaagtaattgtcccaaaacacaaaaactgaaggtgaatacgatacagggcttttagagacatctccagctaagtgtgtcccggcctctccctgtgccccaagtgcacctctcccaacctcagacaggtttccaggctgggagccagctcccttctgcacagggtggcctgtggttactgggcaatgctgtccatagctctcggcctctgggctgggcacaggggagcatgacttcaactcaggagggggcagacaccctgcctagctcttccagatgctgcacccggcatgcaatggtcactacagtcagcactctccgcctctcagaggagggaggggctgtcaggtgttttgggagcccaaaaccatgcctaatgagggtaatggcttttctaaggagatgttttcgccatggaatgggaaggggttttctcacatctaagttttgctggcgatcgggtgacagccaagagagtgcaagccccctccatggtcattttattgccctgggaaggggagggtggggaatagagatgtcacagctattcggcttgctggcttggagtgggactcctgggctccactgctttgggtggcttctggctgatctgggcaggggtcatctgttcagctctcccctctcatctcagtcaccatccccctccctccgaatgcttttgtttgtaaagaaaaagtgtctagaaatatttgtctctggaacaattactttaaaccatagttacaatacagacttcagttcaaacacagaagagatttacttagcaaaattcctttcacccaccaaaaattacacaaatataagccctcaacacccacagttaagaggacccagtagagagaacctcatgtttggaacacaaaaggagaaataaaaaccaaaccaaacccaaacagaaaaaccccagaaagacaagtaaagggcaaagaaggaaggggaaggggagcaaacacagcacacgttacagtgtccagatacacgggagcccagcatgggcaagggctcggcacacattgagtaacagtcctggtgatatttggtcatatattcattgactactgactctggagcggctgttattgattgaagcagtgacaaatcaaacggaaaggaggccgtggtagcaagggaaggagcaggcttcaagttctgcaagccttttgcactccactgtccagctccccagaaacactgaaccgggtgggccccgctccatccgggcagggctagaggtcaccgggtgaggctaactcgggcgtcgatttcatgtcagtcagaaaacacgcacgtggacgcacgcagacacccacctgttcacggccaaacatcagcggcaacggcctcctcgcctcctctgcccctatcccaggctgggtgggaaagagcatcatgacccactgctaacactgaacacacgccggagctggccccggatgtgggcccagaggctgccccagccctggtcctccgaagggctcacgggtagcccggccactgaaaggcctatggctgtttttcttttggattcaggcctcagaagaagcaatgacagcagggagggaagcttttggccctggtgattataatgctctctgctttggaagaacaagtttctggatttttttggtgtttctaattattaaaaaaaga

SEQ ID NO: 51399 - DNA, 1146 bp, Homo sapiens
tttttttttttgataaactgaacatagtatttattaaggtcaggatgcatgaatagactcttctcaacagaaagataattcaacagcaatcaatttacagaatttagaacagcactacatttcagcaaaatgcaactagagaacatcagataaattatagtaatttgtttttaaaaatccattaaactatctcttacctctgcaataatgtatcatacatgcagttacagaagttagtagggaaaagcatgatcttccttccctattctctgcccatccatcttccaggaaaccacaggctgctgctgcccagagttggcatgaggcttcgaggctgctgcttttccccctacatcataaccgatttcaaatggtgctagacaaaaacagactctgaacaccaggagaaatcggtcagcctgtgtaagagatgggccagtggtgctcccagggtctgcacctcgacagtccaggtgtactgccctctcccctgccccatgacaatcgacacccaatacattgttatccaacagaatatgacaatcgccacactcaaaggccctacgaacacattcatgctggtgatggctgctaggagtcaacagaaatagcatcacaacctctgcccctgctcaagccactgtgtttattttaaacacaacccccttctctactgtcacctctcccaaaacccaacaaactcaagagtgtattttgctcttcaagttcttccctggacttctcgaacagactcaagtggcaagaggagaggagccagttccatgagcagcagttcctctgcagtccacccttggctgtgcctgcaattccttactccctaaaacactgatttccaaatggtgcctagatacaaagatggaaaaatcctaagcccacccatgtgaaaccagcttcccagaagaagaggatctcaatgaagaaagaagggagattcaatcggaagacccagcctctgccctgaggagaaatatcttcttgtagttctacttgtgatatgacacagtgctccatgggaaaggcacagaggaggttacacagggctgcacaaggcaacatgaaaggcacagctgatgcttcaaatagatgagagcaatacaaaactcattaattctaggttaattctat

SEQ ID NO: 51400 - DNA, 332 bp, Homo sapiens
ggttgaaatccgttttcctataatgtttgctcattgatcctagcagactgaatgaatccctttcatggcagtccttgggttatttatatgtaaatgaggggaatgctgcagtatagaacattccttctggatttcataagaaattgcaaataatctgttaccataactgtgttaacgagagctggctggcagatggatccctgcaagtaccatgggcactgtctttggttgaccctgttcagtcttcccatcagtgacttaatcagaggtgtgatatgtatttgcatagtagtgaggatttagaaaagcgagaagagttcaactggctagga

SEQ ID NO: 51401 - DNA, 1971 bp, Homo sapiens
ttgaacagcactgaaatgattaactatggttgtcacagcataaggtattcaacatacatacctatcagcagtgtgtttagaccaggggctgcaaactttctgtgaatggacatttactaaagtatttaggctttgtggcctacatgatctttgttgcaagtactcaactctgccattatagagttaaagcagccatacacaatatataaacaaaatgggcatagttgtatttcagtaaaactttatttacaaagacaggcggtaggccagatttggcttgcatgctgtagagctgtggtctaaattttattcatagactttcctttgccaaatacagtgtgagtattgttccatttacagtattattaatttttagatacctggtttttagattcttgcctggtaactttttactgaaaatacaagaatttcgtactgcatttgcatctccgagattagggagcacctgtcaggatatgttgttctatcagggttacttctgttgactacctcttagattttgatacagttatattgttgagtttcattttcatatattcttgtagtgtctgcttgcctgtgacttctggtaaaataaaataagcctttgaaaatattttagcatggtatttaacattttctaaatattatggcattttgacatattttagtcagcgaagacatctgcccctttggtgtttctacttgcttatgattgagattttacaagcccttcaaactccgttttaaaggaatttattgtaaaacattaactttaataaattagtgttttcacagatcagatcattatacttggaacttctaaatcatgcaatttctgaataaggacataaggctagattcatttttcttaatagagaaaaaggaaatttctgatttatcacttttctagttgataagtaggattcaaaacgtttgatatgtaagtatttatataagactaatgtaatttaaagttctgtattattgtgattaatcatacagaaattcaggaactgatcagaagtgagattcttttccacatctggttaatgtagtgagttgacaccctgtgggtggtaaagcattataaacatttcatcttgaaccatgatttatacacatctgtgttataagggaggcttgagtacatataccaatgaagagatattcagcatttgtctatttgataaggaattaaatgtcctagtgattataaagtaaaaccacagaccaatttgcaaatgatcttcaatgttaagcacttgctctaagattaaaattccttttctttttaaggttaagggtgtgtacgtatggcagtgatgtctatgttgagattaacttatgtattgaggaaaatttgaagtttattttttcgatgaataaggctgtcaaatgatttagtatagattaatgacatcttttttagaaatattaaagtgagtattcctcattatgtcatcatttctgataattagagtgctaatttgaatgttagataatgtttccacatctatacctatttctttctagggcacttctgaccctggggcttggggatggcctttaggccacagtagtgtctgtgttaagttcactaaatgtgtatttaatgagaaacattcctatgtaaaaatgtgtgtatgtgaacgtatgcatacatttttattgtgcacctgtacattgtgaagaagtagtttggaaatttgtaaagcacaaaccataaaagagtgtggagttattaaatgatgtagcacaaatgtaatgtttagcttataaaaggtcctttctattttctatggcaaagactttgacacttgaaaaataaaaccaatatttgatttatttttgtaagtatttaggatattattttaaataaatgattgtccattatcaatataatagttgtgaaatgatttaagtaaataaactttatgcttctgtgaaaaaaaaaaaaaaaaaaaaaaa

SEQ ID NO: 51402 - DNA, 104 bp, Homo sapiens
ggtggactcttacgtcacaaccaccacacagatacctatttgttcaactaactattgttggtggctgtaccccatgaccagtgggcctagtttctcctatgttt

SEQ ID NO: 51403 - DNA, 305 bp, Homo sapiens
  misc_feature (1)...(305): n = a,t,c or g
ctcgggccgagggtgaggctgaggaagagagtgacttcgacgtgttccccagttctccccgctgcccgcagctgccaggcggcggcgcccagatgtatagccatggaattgaattggcttgccaaaagcagaaagagtttgtgaagagctctgtggcgtgcaaatggaatcttgctgaagctcaacagaaacttggtagcttagcactgcataattctgagtccttggntcaggagcatgccaaagcacaaaccagcagtatcagaactgaggcaacgggaagaagagtggcgacagaaaggaag

SEQ ID NO: 51404 - DNA, 1110 bp, Homo sapiens
taaataaaagtaaactgtttattaaaagatacagcaaaggtacagatacagagatacatacaaagatacagatatatatatatatttacatatatatacagtcttgctgttttcatgtgcactatatttagcagcacattatttaatcaggcggcattttaatggggttgttttgacacttggcattattaagatacaactatagccccgtgggaaatttcaacgtttgaattccacttctccgacttttaatagtagcaaagaggggaaggagaagggaatggagtaccaagggctgagcattaggttaaacacaagaatttaaaagggccaaggtagcaaagggaaggaaaaataattaaaattaaaggctatctgacaaacaacccagagaaacagtaagaaaccatcattaagggcaatgggctatgtacccaagatgctcacatcaacctacaatgaccttttccaatccagttcttgtgttgaacctgaggatctgccctctccgatcaatccctccacccgataaatttgctaccaccaaaatctagagctatagagccttggaagcaaattcgggaagctaaatagttgtaccttggactaccttcccacaagtgcagggagggcccaatgttgggtagggatgtgataacactgttctctgcaattcgatgcttttcactttgtggcttggttccacaaagtgaattgcatcgagttactgtcaaatgagaagctgcgggttgtttcatctgtcgtctaacccggccctgccgtttaacccggccctaagaagagtgaaacagaatccaaatcagacataacataacaatgaaatggcagattcaggtataaaaaaggaaaaatacataatattcctcctacttacctctgagggcaaattgctgctgaaaacattatcatcatctttgttttcttcaccatttttctccacaggaacccattctccataaacactatccgcttcttttttccgatgttgagatccagatgatacagggaattcttttgttaatgttacctggctttttggtggagttggttttgctgcagcaatctaaaaaataaagtgtttcttaatta

SEQ ID NO: 51405 - DNA, 350 bp, Homo sapiens
  misc_feature (1)...(350): n = a,t,c or g
ggatattcccgtttccaaagaagtcttcacagagttccacctannnnnnnnnnnnnnnnnnnnnnnnnnnnnnnnnnnnnnnnnnnnnnnnnnnnnnnnnnnnnnnnnnnnnnnnnnnnnnnnnnnnnnnnnnnnnnnnnnnnnnnnggcttctgtctagattttatgtgaagatatagccgtttcgaacgaaggccacaaagtgctccaatatccacttgcaggtcctccaaaaagtgtgtttcaaacgtgaactaccaaaggaaggctcaactgtggaatttgaatgccancatcanaaagaagtntctgngaaagcttctgtntaggtaggcnangcntnnccgttc

SEQ ID NO: 51406 - DNA, 2680 bp, Homo sapiens
ggggacttcttgaacttgcagggagaataacttgcgcaccccactttgcgccggtgcctttgccccagcggagcctgcttcgccatctccgagccccaccgcccctccactcctcggccttgcccgacactgagacgctgttcccagcgtgaaaagagagactgcgcggccggcacccgggagaaggaggaggcaaagaaaaggaacggacattcggtccttgcgccaggtcctttgaccagagtttttccatgtggacgctctttcaatggacgtgtccccgcgtgcttcttagacggactgcggtctcctaaaggtcgaccatggtggccgggacccgctgtcttctagcgttgctgcttccccaggtcctcctgggccggcgcggctggcctcgttccggagctgggccgcaggaagttcgcggcggcgtcgtcgggccgcccctcatcccagccctctgacgaggtcctgagcgagttcgagttgcggctgctcagcatgttcggcctgaaacagagacccacccccagcagggacgccgtggtgcccccctacatgctagacctgtatcgcaggcactcaggtcagccgggctcacccgccccagaccaccggttggagagggcagccagccgagccaacactgtgcgcagcttccaccatgaagaatctttggaagaactaccagaaacgagtgggaaaacaacccggagattcttctttaatttaagttctatccccacggaggagtttatcacctcagcagagcttcaggttttccgagaacagatgcaagatgctttaggaaacaatagcagtttccatcaccgaattaatatttatgaaatcataaaacctgcaacagccaactcgaaattccccgtgaccagacttttggacaccaggttggtgaatcagaatgcaagcaggtgggaaagttttgatgtcacccccgctgtgatgcggtggactgcacagggacacgccaaccatggattcgtggtggaagtggcccacttggaggagaaacaaggtgtctccaagagacatgttaggataagcaggtctttgcaccaagatgaacacagctggtcacagataaggccattgctagtaacttttggccatgatggaaaagggcatcctctccacaaaagagaaaaacgtcaagccaaacacaaacagcggaaacgccttaagtccagctgtaagagacaccctttgtacgtggacttcagtgacgtggggtggaatgactggattgtggctcccccggggtatcacgccttttactgccacggagaatgcccttttcctctggctgatcatctgaactccactaatcatgccattgttcagacgttggtcaactctgttaactctaagattcctaaggcatgctgtgtcccgacagaactcagtgctatctcgatgctgtaccttgacgagaatgaaaaggttgtattaaagaactatcaggacatggttgtggagggttgtgggtgtcgctagtacagcaaaattaaatacataaatatatatatatatatatattttagaaaaaagaaaaaaacaaacaaacaaaaaaaccccaccccagttgacactttaatatttcccaatgaagactttatttatggaatggaatggaaaaaaaaacagctattttgaaaatatatttatatctacgaaaagaagttgggaaaacaaatattttaatcagagaattattccttaaagatttaaaatgtatttagttgtacattttatatgggttcaaccccagcacatgaagtataatggtcagatttattttgtatttatttactattataaccactttttaggaaaaaaatagctaatttgtatttatatgtaatcaaaagaagtatcgggtttgtacataattttccaaaaattgtagttgttttcagttgtgtgtatttaagatgaaaagtctacatggaaggttactctggcaaagtgcttagcacgtttgcttttttgcagtgctactgttgagttcacaagttcaagtccagaaaaaaaaagtggataatccactctgctgactttcaagattattatattattcaattctcaggaatgttgcagagtggttgtccaatccatgagaatttacatccttattaggtggaatatttggataagaaccagacattgctgatctattatagaaactctcctcctgccccttaatttacagaaagaataaagcaggatccatagaaataattaggaaaacgatgaacctgcaggaaagtgaatgatggtttgttgttcttctttcctaaattagtgatcccttcaaaggggctgatctggccaaagtattcaataaaacgtaagatttcttcattattgatattgtggtcatatatatttaaaattgatatctcgtggccctcatcaagggttggaaatttatttgtgttttacctttacctcatctgagagctctttattctccaaagaacccagttttctaactttttgcccaacacgcagcaaaattatgcacatcgtgttttctgcccaccctctgttctctgacctatcaggcttgcttttctttccaaggttgtgtgtttgaacacatttctccaaatgttaaacctatttcagataataaatatcaaatctctgcccctcattc

SEQ ID NO: 51407 - DNA, 458 bp, Homo sapiens
tgatagggcattatgaattcctatgggtgtctgtaaattatgtatgtcagttggacattgtagaaggtatgtaaatcagcatagttgtgtataacttaaccttgatttataaggtcttaagattatgactattcattgacatctcatgagaagctttagaagactttctatttttaaacaccatttatatgtggacttctgttgtcactgactttgggctttatattttcatagagtctttatggaaaaaatagaatttattttccactcttgtagctatagctgctgcacactttcaccctgatttatttttttgtttcttagctttgatgttttcaaaccaagggattgtgattttagggttaggaattacatattagaagcattaagactatgtctttgggatccaggaatgctttaggtggataaaccctacttttgaaggaccatactcctta

SEQ ID NO: 51408 - DNA, 432 bp, Homo sapiens
aaaggagtctgctctcagagtatctgctgtgggagagccccggaccccaagcatcttcaaaggtctattattaatggggctgtccagctgaagctgacatccgcacgcagccctcccagagctctgcacctcagccagcccacggcctccaccgtctggccctgtcggctgagtggtgcccagcaaggtgagaaggccaagtcctgcccgctgggccaggcagaggtcacccgccgcgcctgagctaccggtgtgtgatgagaggactgcccacgtcttccctcatttcccagctgctcagtttcccttcctgagagaggcagggttctgggaggtgaggagctgcagggacccaagaagggcatagaagccgctggggacactggcccctctgtcaggatcaatcgcctaacctgtctgaggcgctccggg

SEQ ID NO: 51409 - DNA, 423 bp, Homo sapiens
gttcctggggaacctctgaacaaagtgaaggacagaagaaccctgagtatgtaaaggaggaattgggtaggatggcttctggcatgagtggagaggcaacgtagaaaagtcagcttccattctggaaacagatatacaccttcatgtcattgcactaggaggatatcaagggcatttatgagtcgcctttattctccatacttaactctcttatgcccacccatttccattccttctcacagctgggcatgctaatgtaagcccccatcaactgtcccctgggacttatcactgggggccttgagcttcatctccctgtgtccccttttggctccttctggacccatttttctttcacattcacagggaacaatcttcttcaaaaaccaacaatgggggccttaccttttttttcctgtttgg

SEQ ID NO: 51410 - DNA, 553 bp, Homo sapiens
ttttttttttttcagattttgcagcacttttaatacacaaagcaaaaggtaataggctggatgggtgaccaaccttcattcacatacagagcccaagtatagatacagactaattgggaaataagttagagtttgcagggccttagggctgagagccagaaacactgtccttttggcagccatggaagcgaggatttccttttctggtttcagtgcatgtacgccttcggctgctccatagcctggtgtgcctgcagcacggccactgcctcgtctatcttggcatggagggattctggagactccagcatgagcaacagctctgagttgtcaatctccagcagcatgcccgtgatcttgccagccagctgggtgtggacatcatggataagggggtagagacgctcccctcaaagtcacaggacagcagcagtggaagaaagctcaggaccatccagtctgaccagcgttttaagacaagataacaggtgccaatcatctgcttttgctcatgcaggggcgccgcagccagcatggacgcggtcaggggctc

SEQ ID NO: 51411 - DNA, 967 bp, Homo sapiens
tcgaggtgcgctcgttgcagtacctgtgtcgttttgttatacgtcagtataccagaatagacttaattcagaaactgcctttgccaaacaaaatgaaggattatttacaggagaagcactactgaaagattgagaaccctgcatcttgcactttgggaataagaacaagagattgaaatacagtttacaaactttcattgccatcaaaatcttttgctgccataactatttcagttttatgtgtaaaagagtcatcagtttgtttaggggtggggaagtgtcagcaaggtgtcttgggtttattttggttctttaaaaaagggaagtcttgaggttttagaggtgtgaattatgtttcatcaatgtgcagaataatcacaatgtgaattatcaaattctcctcaatgccccccccgcccagtcctttgctgctatccactgtgatttttatgcattaaaagcacatttcatgtgtattcaacccctaagtaaagttgaatgaaacttaacagaatggaaattgctatgtctttttaaatggtccattttcaaaagacagtgttgaataaacatacctgtgtgataaaacacagaatttacatatacactgaagatgagtttttaatctcttactttaaaaagatttatttagaatcgtgaattgacataatcttgggtaatggaacggagatctgcaacatatcttttaacaacacttttttctaaattatttctaaggttgtgctaattcttttggttgtgaaaagttgaatttttctgttgccttcgttttcatcttctagtttgtctattttaataaatggccttacattaaaaaattgtaaagaaatgtataccaccaatttagaaattgttgccttttctgtaattaaactcgggtacaaattggcataacatgaaaacctatggaactagaattattattaaagaaatattagatgatcat

SEQ ID NO: 51412 - DNA, 597 bp, Homo sapiens
tttttttttttattatgtatcatgacttttaatacaaacttaaaaaaatctggaacaatagaaactgtacagatttgatcaatctttttgttttgtttttaaactaaaatctctaaacacaccaatgtcccattccaaaatattgcacaacattctgaatacaaaacccttgattgtattcctccttcactaaagaaaaaagttcatgaccctgctccccgggctcctctccaggcttgcctcaatgcccccttcccatccctagggagaaaactagagaatctataactcactgcattgagaaaaagacatcattctggactaacagtttccattcttcagaagataatccaccttttgatttgttcctgggaaagagggatagatagaggatggggaaaggggagaaaaggttttatttctcctcttttttttttaaagtttgtttttcctgaaaaaatatgtttctctcatctttttaagaaaaaatcttgaaaagaaaaaaattatgttttttacgttagaaatatacatatattatatacctcttacattttacaaatgtagcaaattattcaatacaaacggacaccaaaa

SEQ ID NO: 51413 - DNA, 129 bp, Homo sapiens
aggcccagaagcctagtgggtaagaatggttttgggggccaagcctgggccctgctgctctctgtagcctttggacactgctacctgcatctggctgatccagctccacccatggctcaaagtgcccca

SEQ ID NO: 51414 - DNA, 652 bp, Homo sapiens
ttttttgaatcatccaatcagaaacacacagctttatattattacaaaaaagaaaaacacctcaccttgtctttgtttcgcagcacagacagaaatcattttaagacagaggatcacataggcagttgtacacccagctgacaaacactttgggtctggatttcctcccccaaccacattacatcagctttgacacatctgtaaaacatcttctctgcagaaagtcagaccctaaagatcaaacccagggaggcaccctctccccaggccagctactctaactcataaccctctgaagacacttggtaaaggcaacacagctgacgagagcagtgctgcctcagcagtagtgggctctggcccgccaaggcagggaggactagggccgagcttctgagaagccatccagataggcaagggagaaggggagggggtgcagtggggataaaagaacctgatgaaatggaagaaagcattaccttgggagttaccattttgaattattatataatcagactctagcctggcatcacggagactccaagagccacggacaatgggaaagaagtgtacttcttgaatgcaattcaaagttatctgaacttttttcactgtttctagattccactttgcttgggaaactacaagaacc

SEQ ID NO: 51415 - DNA, 430 bp, Homo sapiens
atttttttattacttgaataattatgcatttttttttcttagtgaaagaaaggatgtcttaagagaagctgaaattttacacaaagctagatttagttacattcttccaattttgggaatttgcaatgagcctgaatttttgggaatagttactgaatacatgccaaatggatcattaaatgaactcctacataggaaaactgaatatcctgatgttgcttggccattgagatttcgcatcctgcatgaaattgcccttggtgtaaattacctgcacaatatgactcctcctttacttcatcatgacttgaagactcagaatatcttattggacaatgaatttcatgttaagattgcagattttggtttatcaaagtggcgcatgatgtccctctcacagtcacgaagtagcaaaatctgcaccagaagg

SEQ ID NO: 51416 - DNA, 1118 bp, Homo sapiens
tgtcagaacaccatatgatcttgataatatttatttagaagaggtggacaagtgtaagtggctgctgagtatgagctggaatacctgttactggaaggtcattgctacgacatcaccacaggccagcctccacggggactacagtttaccttaggaacttcagccaacccggtcattgtggacaccattgttatggccaatctgggctactttcagctgaaagccaacccaggagcttggatcctcagacttaggaagggacgctctgaagatatttatagaatttacagccacgatggcactgattctccccctgatgctgatgaggtggttatcgtcctcaacaacttcaaaagcaaaattattaaagtgaaggttcagaagaaggcagatatggtgaacgaagacttgctgagtgatggaacgagtgagaatgaatctggattttgggattccttcaaatggggctttacaggacagaagactgaggaagtgaagcaagataaagatgacataattaatattttctccgttgcatctggtcatctctacgaaagatttcttcgcataatgatgctatccgtgctgaagaataccaagactcctgtgaaattctggttcttgaagaattacttgtcccccacatttaaggagtttataccttacatggcaaatgaatacaatttcccagtatgagcttgttccagtacaaatggccccggtggcttcatcaacaaactgaaaaacagcgtatcatctggggttacaagatcctcttcctggatgtacttttcccactagttgttgacaagttcctgtttgtggatgctgatcagattgtacgaacagatctgaaagagttaagagatttcaatttggatggtgctccttatggttacactcctttctgtgacagccgaagagaaatggacggctacaggttctggaagtcagggtactgggccagtcatttagccgggcgaaagtatcatatcaggtactgaaaagaagcactcctaacactgttacggggttttccttaaaattgattttgtgtggttaaaattgtgaataggtaatacattggtatggttgaaaaataaaaatgataaaaaata

SEQ ID NO: 51417 - DNA, 320 bp, Homo sapiens
ttttaaatcacagagaaaactgggttttactcttagagaaacattttcatccagttttttagtttgcttcatttgacttcctaaatcatttttgagttcacaaggatttggtacttttctgtttagctttctctctctaagctttatctaccttaaaaacaaagtcctttttttaatggccagtccaaccaattgatttctcaaactgaagtgcccaggtgtggactcatcaatttccgttagaatagggacatcctacttaagagttggtgcagctccaaggagctgacttgtccttgcttggggtttttttttttttt

SEQ ID NO: 51418 - DNA, 518 bp, Homo sapiens
  misc_feature (1)...(518): n = a,t,c or g
caagtttctttctgagaggaattacttaataggtttatgctatctgattagtattaatttttaatactaactcaatttttttgtccccaccagctagaaattttttaatttgtattttcaatgcagatgcagagtttgcggggtggtacagaagcgatagcacgattggatcagttagaagctgattattatgacctgcaacttcagttgtatgaagtacagtttgaaatcttgaagtgtgaagagttactattgacagcgcaactagaaagcatcaaaagacttatatcagaaaaaagagatgaagtggtatactatgacacttacgaaagcatggaggccattctggagaaggaagagatggcaacatcctcgtacttacagagaggagagctncagaaacttcagcangaagcaccccanctggaagcaagacgtggacgggtttctnccaagaaatcctacctcagaaataaaaaggaaatatgtattgccccacactttgagggcngnnnaaa

SEQ ID NO: 51419 - DNA, 182 bp, Homo sapiens
acacagagtgggactctgtgaaggaaaaaaaaaaagtattttttgattgcctttgagaggaacggttgtatattactcagattttttaaaaaattgttcttttatggctgtattctttaagggattaaggaatgggcaatataagtgtatatgtttcaataaaaacgattagtgatcttcta

SEQ ID NO: 51420 - DNA, 356 bp, Homo sapiens
gccctgctggtgctgggaatagggcgcaagatgtcggcggatgcagctccgaggaggtaggcagtgggagccggcgttcagtccggcccgtgccaacagtggttcctctctcccccgtagttcgaggagaccacgcgctgcccctctggcacgatcgtggatgaaccccctggcaactgaaatgggaaaggcagcgcccccgactctggggactggaccgaagtccacggtagtgacaggctgccagaccctgaggagaggacgagaagacccgaggcctctgctacgagcactggcatccgatggaaaattcagacggatttgggacagtatgcagagttctccaagcgacagat

SEQ ID NO: 51421 - DNA, 298 bp, Homo sapiens
ttttggctgaaaggaatttgttccagcaaaaggtggaggagctggaacaggagaggaatcactggcagtctgaattcaagaaagtccaacatgaattggtgatctacagtacccaggaggcggaaggcttgtactggagcaagaaacacatgggttatcgccaagctgaattccagattctgaaagctgagctgggaaagaaccaaagaggaaaagcaagagttaaaagagaaactgaaggaaacagagacacacctgggaaatgctgcagaaggctcagggctttgcaaagcttacc

SEQ ID NO: 51422 - DNA, 835 bp, Homo sapiens
tttttttttttttacaagtgtaaaaatgtgtttattcacaaccatttgtaaattaccatttgttaccattccttcaaaaaattctttatgaacaaaaagccaagaaaaattacaatcgtagcttatgccaaaccaaaaatatacatctgatgtatacaaactttaaaaagcattaacacaggcaatgtgaatatagattaccttaaaaatatttccaagacacagctacaacttaaattatgttaagacagatataaataatagcattacctaatgtattatatttacatatttaaagtatcatattaatttctatgacataaaaaaggagataaaactacagatgtcattgcttagcagttcaaatattgaaagggccacatgatttttttttttaagcacagcaagaactttaggttactatttatatctggaccttcctatatttataagaacatgcaccgtcattgttgcaagaggaaaaaaaattaaaaacattaaggaaaaaccaaaaaacagtttgcttactaaaatcataccaaatcctcagcaaaatcaaggaaagcaattatggagtgttttctatccctggccttgtaaattgacatatacattttagagaaaagaacagtaattgtctagcacaaaatgcagttatagatattgatatgcttagttctatcccattaaagcaccttgtactacaaggtaaaggaaggcttaataaaatcaatggagcctttcataccagaaaggattttatttgaaatacccgtattacctttttagattttcttttctgaaatcatgcagagaatatgttctgtgtaaaatc

SEQ ID NO: 51423 - DNA, 708 bp, Homo sapiens
ttatgcatgtatacacactttattaaatttgcattctaagatatacacaaggccagcatttcacaaaacttcctattattccaaaagcagtaatcatgaaacagtgattatataagtcaatcaagcaaaaaacattatctatagggttgtatcatatcatctcttatacctgttttcaaatagaagcctgaaatatatgatatatattagaataggaagagagaattttactttataacaatcgcttttcaaatattagactttatataaaaataaaggggtcttaacaaagttcatctgtgagttagcatatctctttatttcaaaacaatccctgcaaaaacttaactttccagtccatttaaacaacaaaaactaaaaatgaagcttggtttaaataataaagtgaatcatcttgtctcctagttctcacaccattggaacaacttccatttcctgacctaattctatcccaccattgaatttcaaaaattaatgtaaataccatcatatttcagttatttcttaacagtgttaagttcgagcctaaaaatgatggccaagtgtccctttaaggcaaagaagacagtaggtggataaatatcctgaaagacaaaaccatctattatcattatagaggcagaacattttgacatgatcttttacaaacagaatagatacactgcataccatcgaagaattttttct

SEQ ID NO: 51424 - DNA, 1186 bp, Homo sapiens
aaatgaagcagtgttttatcatgtgtatttcagcaggtcttcttgaaatttaactaaaaatatgactgctctctcttcagagaactgctcttttcagtaccagttacgtcaaacaaaccagcccctagatgttaactatctgctattcttgatcatacttgggaaaatattattaaatatccttacactaggaatgagaagaaaaaacacctgtcaaaattttatggaatatttttgcatttcactagcattcgttgatcttttacttttggtaaacatttccattatattgtatttcagggattttgtacttttaagcattaggttcactaaataccacatctgcctatttactcaaattatttcctttacttatggctttttgcattatccagttttcctgacagcttgtatagattattgcctgaatttctctaaaacaaccaagctttcatttaagtgtcaaaaattattttatttctttacagtaattttaatttggatttcagtccttgcttatgttttgggagacccagccatctaccaaagcctgaaggcacagaatgcttattctcgtcactgtcctttctatgtcagcattcagagttactggctgtcatttttcatggtgatgattttatttgtagctttcataacctgttgggaagaagttactactttggtacaggctatcaggataacttcctatatgaatgaaactatcttatattttcctttttcatcccactccagttatactgtgagatctaaaaaaatattcttatccaagctcattgtctgttttctcagtacctggttaccatttgtactacttcaggtaatcattgttttacttaaagttcagattccagcatatattgagatgaatattccctggttatactttgtcaatagttttctcattgctacagtgtattggtttaattgtcacaagcttaatttaaaagacattggattacctttggatccatttgtcaactggaagtgctgcttcattccacttacaattcctaatcttgagcaaattgaaaagcctatatcaataatgatttgttaatattattaattaaaagttacagctgtcataagatcataattttatgaacagaaagaactaaggacatattaaaaaataaactgaactaaaaaaaaaaaaaaaaaaaaa

SEQ ID NO: 51425 - DNA, 475 bp, Homo sapiens
catatatgtccaaatatgtgaacaaaacatccttcacagggcttttgtgagggggaagtgtgtttaaagtaataatacaataattatcaatattttatttaataaaataactctatttttattgactgaaataattatgatcattttttgaagattcactctgtggtaagtacttagcccaaaggctggcatttactcaagataatcagtttccttgcctcttgcacatgaaagctcttgcccctcacaaaagccctgtgaaggatgttttgttcacatatatgtccaaatatgttttggacacatatttattaaatggaataaatagtacttgaaccctggcacctctgacaacaaagtccatgttctttttactatgccctaatacctttcatcagttatccacattgatgctacatctgtattttataggtaccctatgttaggtgttctgggggatagaaaagaaataagc

SEQ ID NO: 51426 - DNA, 377 bp, Homo sapiens
ctaaaatatgacccacttgttctgggtctacgcagaaaagagacgcaaagtgtccaaaaggaacaaaagaacaaaaacgaataagcaaagaagaaaacaaacaaaaacaaaacaaaacaaacacacggaccgataaacaaagaagcgaagataagaaagaaggcctcatatccaattacctcactcattcacatgtgagcgacacgcagacatccgcgagggccagcgtcaccagaccagctgcgggacaaaccactcagactgcttgtaggacaaatacttctgacattttcgtttaagcaaatacaggtgcatttaaaacacgactttgggggtgatttgtgtgtagcgcctggggaggggggataaaagaggag

SEQ ID NO: 51427 - DNA, 488 bp, Homo sapiens
ttttttttttttataggacaaatcaagttttatttgacaataatattaaattccactcattagttcctggacatctgttgatcacataataagacaacctgcccatacagcaaaaacatattgaagatacatggcccgccactcttctggagcttagagcaagagcagacattaagacaggggagagacggccaggcaaggtagaagctggctctgtccacgtctctcaagtcatgagtactctgggctggaatttcacgtaaggccttttgggcataatgaattaggaggcggggaagagggactttgtgcaggatacagttcatgcttccgtgggctactttctccacatcagtccagatcctcgtcttgacttctgccctatctctctaagcccatgtttgcttccagcttcttcaaaccatttcaagtgggtgccttgaatttcagactctcgtgtcctatcctaggctgaccatttcccatgg

SEQ ID NO: 51428 - DNA, 253 bp, Homo sapiens
ttttttttttttttgagatagcaaaatagacatggctttatttgctgattgagaagtggtccagccgtgggctagcagtcatttacatatcagtgaccaaatgcaaacatacccgtactaacagtgctttggtccatgacatacccttttgacagcccaaagctgaaacgtcaactctatctggggttacttgcttatacaaagatgttactctagcaattgttgcttgagggcaagaccagatgattgtcac

SEQ ID NO: 51429 - DNA, 482 bp, Homo sapiens
cggcattcgggatgtacaccttgaactgaaagatttaacactttttggccgaagagggaacttgcactttatcaggtttccaacccaggacctgcctacttttatccaaatgggaagagataaaaacttcgtcaacattgcagacggtgctatgtgctacaggaggtggtgcttacaagtttgaaaaagattttcgcacaattggaaacctccacctgcacaaactggatgaacttgactgccttgtaaagggcttgctgtatatagactctgtcagtttcaatggacaagccgagtgctattattttgctaatgcctcagaacctgagcgatgccaaaagatgccttttaacctggatgatccctatccactgcttgtagtgaacattggctcaggagtcagtattttagcagtccattccaaagacaactataaacgagtgactgggacaagccttggaggggggacctttctggggtta

SEQ ID NO: 51430 - DNA, 331 bp, Homo sapiens
cctgatttaaggataattctgtctgggccttggagctctcttccctaggaattagtgtgtggagtctctatatgcttgtgaatccttggagctctcttccctaggaattagtgtgtggagtctctatatgcttgtgattcacaactaaatatgaaatttctcaattcaggagcaggaagcaaagtgctggggtacagttttgcagattggttgaaacacttagccaaacttaagtggcctgggtaggaccatcactcccaaagttgtcagcagagaagggccctctgtgtgagtctattcaaacctggcattgctctgaaattgagtcctc

SEQ ID NO: 51431 - DNA, 1211 bp, Homo sapiens
acgcccgggctgtgggaataagatggcggggaagaagaatgttctgtcgtctctcgcagtttacgcggaagattcagagcccgagtctgatggcgaggctggaatcgaggcggtgggcagcgcggctgaggagaaaggcggattggtatctgatgcctatggggaggatgacttttctcgtctagggggtgatgaagatggttatgaagaagaagaagatgagaacagtagacagtcggaagatgacgattcagagactgaaaaacctgaggctgatgacccaaaggataatacagaagcagaaaagcgagacccccaggaactcgtggcctccttttctgaaagagttcggaacatgtcgcctgatgaaatcaagatcccgccagaaccccctgggcagatgttcaaatcacttgcaagacaagatccagaagctttatgaacgaaagataaaggagggaatggatatgaactacattatccaaaggaagaaaagaatttcggaaccctagcatctacgagaagctgatccagttctgtgccattgacgagcttggcaccaactacccaaaggatatgtttgatccccatggctggtctgaggactcctactatgaggcattagccaaggcccagaaaattgagatggacaaattggaaaaaggccaaaaaggagcgaacaaaaattgagtttgtgacgggcaccaaaaaaggcaccacgaccaacgccacgtccaccaccactaccactgccagcacagctgttgcagatgctcagaagagaaagagcaagtgggattcggctatcccagtgacaacgatagcccagcccaccatcctcaccaccacagccaccctgccagctgttgtcacggtcaccaccagcgccagcggctccaagaccaccgtcatctctgctgtgggcaccattgtgaagaaggccaagcagtgacctgaggggccaccctaggacttgaaaggaccgtgcagcccagtgaccactgcccagtgggaggcgccactttgtatatttcaggactgggacctactccccagatgccacctgagaggagcttctgtttggcattccagatggaaggacaggcagcacgggagccaggcgctgtggacagggtctgtccacgcaccacctggggtctgccgcctattaaaagtgccgtattcttacctcttggcatctcagaaaaaaa

SEQ ID NO: 51432 - DNA, 233 bp, Homo sapiens
  misc_feature (1)...(233): n = a,t,c or g
ggtagtttcggtagagcataaaaatgtattattaggggatcaaaataacgttttatgtcatttagatacaaagacttggcatgcttctgaaataatttataaatggacatatctgcgtgtcctcttgtggtgttgtgatacatactggttttcatccaccanggnnnctgnntcntancncccataaccccattaccgngtnttnnnntannntanggntnnnnnnnnnttat

SEQ ID NO: 51433 - DNA, 968 bp, Homo sapiens
  misc_feature (1)...(968): n = a,t,c or g
ttttttttttttttcaggtatttcttaaatttattgaagaactcttagctgggagaagaaagatcacaggcttaaacaattgtaagataaaagaacaattaattgcaaataattacaaaagtaatttctgaaattttttgagccactgctgaaacaaaactttagtgcatctcaaagttcgtattttgttaagtgaacatattaaattactgaaaagcaaaaaagagttactgttacacagtacaagatcttaatatagtaactgagcacagccaaataaacagctataattattccaagctgcttttgctatgtatctggtatattaaacaagaaagtggattacttttaacactgcacaagtaaccaaaggtagcaaatccagcaatattaaaaccggatattaaatagtattcaaacattacaacaaaaacaaaataagaacttctagaactagaactctaccctatgaaaggaatgtacacagatggttaanaaaaaccaataaataaataaaagtgaccaagagtgactaattctgtatcccacatcttcagagcaggaataccagtaaatgagtaaatgcttacgaggagtcttgctgaaaatgagaaaaaatgcatctcactttagtataatttttctaaattctcactgaagctctaattctcttgtgctggtgacaggtggacagggtttttaaatgcaaagtattctccctacaccctgagtatggatgcatcagttgtttaaaattctgtggaaagtttccttagaaaaacataaaatttaaagtgatatactgatgggaaattgaatatattaattgtggaagaatatcagctaactaattaactaagtagacatttaaatctggactctgttgaagaatcaaggttaaactctgcattatgtgcactaatgtcagccatctaatatcaaagtcagataagtaaactatctttccc

SEQ ID NO: 51434 - DNA, 600 bp, Homo sapiens
gttaccaatctgaagtgggagcacaggaaaaggacaagggtgtctgtcagggatggcactgtgttaaaaagtgggcgtgcaagggccgcattcccgggcagccgctgcaacctcagcccctgggcccttacctccgcagcctctcccagcatccagctacccagactccaaggccccaggcgagagccagctctcggtacctggagctccacaggtcccagaatcggggtggatcagagttcaaattctggttctgctactgtctaattgcgtgctgcagggactcaatctcttcatctgggaaatgggagtaataacccttggcaggaatgttgcgatcctctgggatgtcagaggtgttgatgaatgttagttcccgggacttcggaaagaggtcccgttggaagagatgtgaattggaattcacaccctatattaaaatctcctccaatcttcacctctgagacatggctgtctcaagactgttttgtttcccttcctggtggaattttgcacttttatgtcctgtgtagcagcaggtagtgtggctttgagaaaataaaatggccaccttcgtccgctgttctttctttgtaaaaa

SEQ ID NO: 51435 - DNA, 823 bp, Homo sapiens
tttagccatattttttttaatgcctattcagagtttaaaagtttcccagtaacaaaagactgcacagctttgagacattaatttaaactgtacaaatacatataaccattaccactaggataaattactctttagattttaacatttttcaacatcttacatctgaacagttgactcttctatacaaaaatatcattattattttataatatgcctttgtataatgcccacaagatgacacttattacaatagcagttgttacaaagtcacaaaatacataaaaatctcagcagttggtaacattattattctttaaaaagaatttacagtactaaggtccagtccagaaagtggcaaatttaaacagagtagcccaaagttcgaagtgtctatttaaaataccagtttggaaataaactaaggaaataatatatgtactatgtgatatcactgccccagcagctgaacgcacttgcttcagagcaagtgtgaaggtcagagctgagtcagtggtcagcagcatgagctggcttgggggaaccagctggcacacttcatctttgtgtctggtagggacacagaaacaaaacaatttgaaaagtccaatgaaccagcatcaaacaaacacagtttccagaactttcttaatgatgtccagccaagagaaccttgacttggttactattgaagtcatcaagccattgggcttgattgtcaccttgaattcatgggaactgtactggtcaagatcaaaacacaagccgtccactaaaatcaagtggcataactttgatatcctatgttaaagataaatttatttct

SEQ ID NO: 51436 - DNA, 896 bp, Homo sapiens
ctgcccctggcctggctgtgctggagggaatgccggccctggagagtctgtgcctgcagggtcccctcgtcaccccagaaatgccctcccccactgaaatcctctcctcctgcctcactatgcccaagctcagagtccttgagctgcaggggctggggtgggagggtcaggaggcggagaagatcctgtgtaaggggctgccccactgtatggtcatcgtcagggcttgccccaaagagtctatggactggtggatgtaactactccacctgcccttgggacccatcccagttttcatcattgagccccagaccctctgagcagcaccttgaagagggcagataatcagacttgaggaaactgaaagccccaggttgagagaacagaggcctagggacctccagaccattggaatcactgtttgccagctgtgtggccttggtcatatcatcagcctctgggaagcctagttcccacatctggaaataaggatgatcatagctacctcacggttacattgcaaagccttactctaaaagctcccagcctccagaggctctcaatgaagagtcaccttcatggtcgtcttcaggaacaggacggatgaagaaggggtggggttaagactcaggggcacctgagggtctgagcccccttatgagtacccaagaaggactgtctatgcatgcacacccacaagcctatacaccatttatatacctacacgcacgcaagagacgcggagagataggcgatgcagactcgcgattcaatgatcgatatgctcataaaagtgctcaattatattttctgtattttgtatgctgtattttccaagacgtatattattttactattaaagaaaaaaatcatttttttttcccgaaaaaaaaaaa

SEQ ID NO: 51437 - DNA, 543 bp, Homo sapiens
aataaaaaaataaagatttttattaggtacgggggtgttctactctctcacattaccccatgtcttcatcctaccttctgtcctgatgagacgctgcttcctggctcacaaggcggggctccatagacaaggggaaccaaggtggggcagggacagggtaaggctaacacaaacaatagaaagatggttctgggcccaaagtcttcccgcgccccctccaattacaatctaatcaaatctggccagtcaaatatccaggtcgtcatctgggtcttcttggtccaggtcatcataagcatctggctcatagaagatgtggctggtagcctgccctggcctaggccgcaggagagcctgctgtttttcagaactgaactggaagggcaggatcaggctatctctggcttctctctctttcttggacaggtgaaggttaaaggtcaaatgagttgtgggatccaccgggggtatatgaggatcggagtagggctgggactctacagagggcccctcttggagatccaggctgaagttcggaaggat

SEQ ID NO: 51438 - DNA, 1428 bp, Homo sapiens
ttttttttttcatgaaggtggagactttaatcatctacaaagccctcagacctgttttactttatatgtttaatcatacagatgccatctacagtattttgtagttagtaagcagcaataaagtttattctgtactactttagcatattaactattacttttaagttgaaatagaaaaattatatcactgtcttttcatcttgaagcaataacaatgaactcataactcaaatctgtttaccagcttaagagaagcatttaaaatcatataggctttttctatgctttattagaaagatttatggagggggaaaaaatggtagaattattccaaggcatgttcaggaacaacaacaacaaaaagaatttgtaactgcaattccagcgtttcataaatgtcctctatttccatttaaaaactctctaaaattaacataattaaagcagctaataaaacacaatccctgcaacttttatatataaggaaagtcctcatacagtatcagtagaccatggcttataaataaaatatactgtatttgttatcaaatatagaaacaacagttccagatttatgttttttgaaaaaattaatttattttaagttaaggatctctacgtaaatttattttggtatcaaacaactgcaattagtgatggggggataaaagcatccctaattgtggaaggatggtaatttatttacaaaaactatacaaaattagattaattataacaacaacttatcaaaggttcctgaaattaattttgcttttgaaaaagtatcaaaagtcttcagatccagaatgatagcattttattatttctgattcatggaattatagcacatcagatctttaagcaactacatcagataaaatcctagataataaaatattcttcatttcctgacagcttggaatgtaaatgaaaacttgttccatttttattaaagaaaaaacctagaataatgcatccaatggtatcaaatacctgttagaatggcgtgtctgctataattaaacatgggcaattagttctacatagttaaaaattgccttaaattaattccttcctttaataaaaaagtttttctcagtcatttcagatctctgttattcggttttaactaggaaatttgcatttacataaggaatcttcaaaatagtatatatttaaaaagtgcatataagcaaaactaaatttctcaaattaaataatttaatattgtattgtaaaatacaagtagccttaagagaaacatgcttcgtcaatcttttgcttttaggtttggtgcccaaacatttaaaaataaagaaaaaaataccacgactctttgctaatggcttttaagatttgcagacacagctaaatactcatctaacaaagtatccaggctatccaactatattgccatgaattcataag

SEQ ID NO: 51439 - DNA, 756 bp, Homo sapiens
tttccaggaagtgtctccctgacagactgggaagtcatctttgttgaagacatttgaccagagcgagaggcatccaggcccctgagaaacagggtagggagagcaagagggaggacagagcagaggccagagcccagagcccaggcaggatacagcaccatgccaccgccacaggcataagggaaggggttccaaaagggtggcttgtccagagaggccagcgttccaatgacagggattgttgccatctcccattcccggcttcctcttccagactgtaacatggtgtggcttcatttctcagagaagagccgtgaaaagatacaagcatcttctctggcgtggatccgctgctctcctgtgggacaaagagttcctctggggctcttgttctcggctgcagtgtactcatcttgatccccaacaccgtccgtgcaggcctgaggtgggatcccgtgctgcttcccccgtctccgcctggggtttcctcatcgtggtcggccctttgcgactcctggcatccggagacgttcccgtcgaccccgtggagaggtgaggccggatcctcagagccccgacacccaagcactgccacagagggctcctgctctgcaaagcctcggggactggtttctaagacaaccgtgggaaccactgtgaccggagaaaccgctggggcctcgcgcatgcatttggctgagccgactcacgctccactcctgacagataggctgcgtcccctttaaatatcgccac

SEQ ID NO: 51440 - DNA, 426 bp, Homo sapiens
acttttcggttatttttataaatttattttaaaaaataacaattgcaatgacattaatgatcgatcacctgtacgcccccatactgctgggggaaaaaccttcgatatagttgaatcccaaagaaaaatcaagacattattatcaggcaccctatagccacaaaatgctctgttggtccagtggcatcgacactgacatgttcaatgtaccagtgcagttaaaatatatacacttaaaattatcctgcaaaaaaaaaaaaaaagcactcaagttgcataactaggcattaaaccaattattcattcatccattcactctttctccatctgtaaagttatcactacagtcacaaataaaaatgaataaaagaactagtatcaaagaaaaaatcccaaatggtccaataccctggcccccactttgtg

SEQ ID NO: 51441 - DNA, 717 bp, Homo sapiens
cttggaaaagcaggaggggcagaggcttctttgagtgacttcggtgaagcaacgtgaggctgccttgctggaaacattatataatggggcttccctgcccctttcacagcacccttctcaaacctcagcctgtgctggaatcgcctggagggcatgggagcgcagattgcgggcctcaaccccagagcttctgctccagagggtctagtgtgggcctgggaatttgtatctgcaacaagtcttcaagtgaggctgccacagcttgtctgagaaccacactttgagacccaccgctctggtgttaatgtcagagtcacaggctaccacaggttagaccgctgctttcttctgcaaacctcattccagaaagatgtttatgggctcagtcgccagtgttcaaactgaattcccgagagtcgttttccttccattactcttggaattgctttctcactgagctttatgtgcgtaggaaacttcgccttcattctaactctctctccaccctgcaataataagcaggaaaacatttattgtaggccacaccatcacccacttacagaagaattggggcactcatcactgtatcactttgtttcatcatggactttactgttggataaatctacagtttatgctttatttgagacgatgtgactactgattcctcgagggggtttatatttctttttgcattaaaggccactgctaaaaatg

SEQ ID NO: 51442 - DNA, 391 bp, Homo sapiens
gaactccttggaatggcataaccatttgacctttcaaaggttctccagcagtatttaactgatgcaaaaggaacacacttgcaattttctacttttgacatgacagaccctcctcttagttcacacaatgttcaaaaggcacaagtccctcgcttcggaacgcaagagagcattactttcccaaagagctacacggttcatactgaaggatgatatgagaaattttcactttttgtcaaaacttgtactctcagcgggccctctaagaccaactccagcagtcaaacattcaaaaacgactcactttgagattgaatatttgatgctcaaacaaggaacagatattattctggataaggtgacacaatcatctactattcatgatgttagc

SEQ ID NO: 51443 - DNA, 509 bp, Homo sapiens
ggtccagaggcaccatccctgctatgaagagggaatgccagtacaacagccacaaggggtcttcctgtggccctcaaacaaaaaatcactgcattacatcagcagactgcattggagagaaaggcgccgggacagaaaagcctgagataaaccacctgtcattcttggagaaaaggatgctgcggctttcccgatttggttgatgagatggaaaatcaacccttacaggaaggacatcaccaattccggaaaggatgctgcgccagtcatgtttccgcactctgtgagacgttgaaatctccagaagttgcccaaggttttcaagctgaacacaggagaaatgactctggatctctgaggactgttttcctcaataaggagctgcaatcttggctccaccaccctccctccaaaacatctcgtgtgtctggtatctggttatattgtggcctgacagagaagtttctttcggggccagtgaattaaaaaaaaaaaaaaaaaagtcgacc

SEQ ID NO: 51444 - DNA, 1000 bp, Homo sapiens
  misc_feature (1)...(1000): n = a,t,c or g
ctttgccaacaggaagataccattcagagggaggggcacatgcgatggggggaaggctttgtgcttggtctacgacattacttgaccgaggaagtttttgaaggaagtgctgccacttaagaacatcctagatgagatcaaaaagcccaagaatgtgactctcatcttggttggaaacaaagctgacttggaccactccaggcaggttagcacagaagaaggagagaagctggccacagaattggcttgtgctttttacaagtgctctgcctgcactggagaagggaacatcacagagatattctatgaattgtgtcgagaggtgccgtcgccggaggatggtgcagggcaagacgaggcgacgcagctccaccacgcatgtcaagcaagccattaacaagatgctcaccaaaatcagtagttaggcagcccagctgaggtggaccaactaattggaaacactcttccccttctgttcccctttcaaaaataaaacaaaatattgcattctttgtttggattctgagaaatgtctgggcttcccattgtttctggcctctaataggttgggaagttttagcgtgttttatgcaatttcagtgctaacaatttcttcctttcctgcttgaataagatacactctaatggcatttgaacatgtaatcaccagagattctgaaatgactggtttatgttaagctatttttaggcatcttcaccttgctttaagtaggttgaagtttttgcaaaggcatttaaaaattcaatttcttgtcagatactacaaataattttcttaaaagtctaagatagcagaaaatacagtaaaaacacaggagaagaagctgagctattggaacaggaaatagaaggaactctagtttctgtttgaagtgaggattttctgaattatctaatatcatctaggttttctttaaaattttattttgttcttcagttcaagcatcttctcacnaatggttttcaccatnacagggaa

SEQ ID NO: 51445 - DNA, 345 bp, Homo sapiens
aggtttctgaggtttgtgagcctgtcctgctttgcattcttcaaaaccattcctgatagagtagccgagggagagtcttggggccaagaagggcccagggtgggtcaggcgtgtgcactgtggaacagagctgagaccccggccccccttggactggcacagggtcctacagagtcagaggaggcctgagatttcgaatgggcagtgaatggcctcttctgccagccacaggcaggatgctccttgatcacggcatcccccggcggtagtacagggtgagcttgcaggagggtctgcaagtgcagacagcagctggggccaaagaaggtgttaggttcaaaggct

SEQ ID NO: 51446 - DNA, 1462 bp, Homo sapiens
gctaagagtcaaaggaatgaaacacagaaaaactccaagtcacacaaggatgttaaaagatggtcaagaaaggcccacaatccttaaaagcacagccttctaacatcgcttccagtaagggagaaactgaagaggaaagactgtcttgccagaaatggccagcttgtgcaagactcccgagtcccttcagtgacaaaggcctttgctgtttgtcctcttgacctgtgtctgacttgctcctggatgggcacccacactcagaggctacatatggccctagagcaccaccttcctctagggacactggggctacctacagacaacttcatctaagtcctaactattacaatgatggactcagcacctccaaagcagttaatttttcactagaaccagtgagatctggaggaatgtgagaagcatatgctaaatgtacattttaattttagactacttgaaaaggcccctaataaggctagaggtctaagtcccccacccctttccccactcccctctagtggtgaactttagaggaaaaggaagtaattgcacaaggagtttgattcttaccttttctcagttacagaggacattaactggatcattgcttccccagggcaggagagcgcagagctagggaaagtgaaaggtaatgaagatggagcagaatgagcagatgcagatcaccagcaaagtgcactgatgtgtgagctcttaagaccactcagcatgacgactgagtagacttgtttacatctgatcaaagcactgggcttgtccaggctcataataaatgctccattgaatctactattcttgttttccactgctgtggaaacctccttgctactatagcgtcttatgtatggtttaaaggaaatttatcaggtgagagagatgagcaacgttgtcttttctctcaaagctgtaatgtgggttttgttttactgtttatttgtttgttgttgtatccttttctccttgttatttgcccttcagaatgcacttgggaaaggctggttccttagcctcctggtttgtgtcttttttttttttttttaaacacagaatcactctggcaattgtctgcagctgccactggtgcaaggccttaccagccctagcctctagcacttctctaagtgccaaaaacagtgtcattgtgtgtgttcctttcttgatacttagtcatgggaggatattacaaaaaagaaatttaaattgtgttcatagtctttcagagtagctcactttagtcctgtaactttattgggtgatattttgtgttcagtgtaattgtcttctctttgctgattatgttaccatggtactcctaaagcatatgcctcacctggttaaaaaagaacaaacatgtttttgtgaaagctactgaagtgccttgggaaatgagaaagttttaataagtaaaatgattttttaaatatcacaaaaaaaaaaaaaa

SEQ ID NO: 51447 - DNA, 423 bp, Homo sapiens
tgaagacagaccccaaaggtgtcttcgtgctgccgcctcgtggggtgcaggacctgcatgttggcgtgaggccccttagggccggcagccgctttgtccatctcaacctggtggacgtggattgccaccagctggtggcctcctggctcgtgtgcctctgctgccgccagccgctcatctccaaggcctttgagatcatgttggctgcgggcgaagggaagggtgtcaacaagaggatcacctacaccaacccctacccctcccggaggacattccacctgcacagcgaccacccggagctgctgcggttcaaagaggactccttccaggtcgggggtggagagacctacaccatcggcttgcagtttgccctagtcagagagtgggtgaggaggagatctgatctacatcaatgaccatgag

SEQ ID NO: 51448 - DNA, 2622 bp, Homo sapiens
  misc_feature (1)...(2622): n = a,t,c or g
ttttttaaaggtatcaaaggcctttattgatttaattttcctttcaacttatcaatgctatcacaaattctaaggaaacaggacttgggcaaaattttttattatgaagatacagatctaagaacagaaggataattatgtgctagcttatatatagttccttgtaaaaataatgatacatgaaaaattagtagaaaatgaaaatctgcagttatctgatatctgaaaatgttaagcaatttcccctgcatcttagttctaatcacttttgcagaataatcaagcatatttgggtgaagagagtatttaatgattccatttttattaatagtgtagtgtgcccttcagagcttggcgtagtctttaagaatcatctgaagtttctggctcagcatgatgttccctctggccttcagcctgccactaaagaatgccttctgagggtcaagcttgcccaggaccacctccatgaaatcttcatctgaaagtatgattgttgtatcagcagcaccttttgcagggccttggtacacttttccagaaccacttttcaggtcaatagtccacttagccccaatatttccgcctttggttatatgccactcaaatacagcatttactttcttcaccacctcaggcccaatatcctttaggcggcgtcctatttcctcaaatacaaaggtactctgaagcttcccgcccctcagagggtgtccttaagctgaagtaccagatgttggtgcaagatccacatatgcatttgaaatgacaatgtctccagtttcttggaccttggtttgaaaatgaattctgtttccttccttccacatctcagtttgtagagtttgtcctggatatactggttttgcaaaacgagccttaattgccttgaatcttgacacatcattatctgcaaactgctgtaacacacgccctggcagaaaatcccaaatgtacataatccatgtaatatgggcttgtcaaaacctgctagactagcaaagttaggatcaatgtgtaagggattccagtctccactgaggcggtacaaagcagcctgattaagagaggtggtatctgtaagtacagcatcaggaggtctattaggtatggctacagctaccttgactttgtctgatgtccgttttccaccaaagcctccagagccaacaagaaagagagagaactgattgtggcatataagttccttctcagaataagaatagacatccataataatcactacaccggatcctttatctaggacatcagcaacaactgcttcacattttaattttcctgctctgggaagtggtttatataactctaagtactgctctccatgaagaacctttgcaaagttgattgaaagtccaggaatttctgctaatcctccacccatcatagatttctgacctatgataactccgaaggtgggcaaacaggagaaatcagaacttccttcataaataaatttcaaatcttttggatccttgattgacgctcccactccaagggcatacataatagcttccagttccgtataagcataagaaaatggagggagtttctggccaatagctccagcaaatcctgatgttgctgtagacgttgcacgactagtatgatttgctgaaactcctccttctgaatctattttactcagaacttcaattatactgccagttgattcttggatactctgaggcttgctggcattctcaaagtcacagatcttcttccagttagccttgactgcctcaggagtcattgggtgattcttttgtcttacaatagctccaagagtcccgctcccagcgtaattttccaatccatcctgctccaacctcaaacaagccaccattctcctcacaactctcgtgacaaagccaaaggacaagaggtgccacatactctggcttcagggcttccacaagatcttcaggcataactgtctgagtcatccgtgatcccgcattaggagcaatggtgttacaatgaatgttgcttttcctgccttcaattgcaagagaatttgcaaggcccagaagacccaactttgcagcactataattggcctggccaaagttgccatatattcctgaagctgatgaagtcataataatccttccatacttctgtttcttcatgtgttcccatgctgcccgtgtcacttggaatgaaccccgcaaatgaactctgtggattatatcccagtcttcatcacttatcctagcaaaggaattgattccctcagaattccagcattgttgaccacaacatctattcttccaaaagcatccagggctgtcttcacaaccttctctccttcttccactgaatcatagttggccactgcttttccacctctccttcttatttcttcaacaaccttatcagcagctaaggagcctttaccaactcctttgaagtcccctcccaaatcattcacaacaactaacgctcctctttctgcaaaagccagggcataggctcggcccaatcctgcccccgcgccggtgaccagtaccacccgcccgtcgaacctcagcggtgagcccatgaataaggcctgcaacganacacacacgaacaagcagagccgctggacgccgactgcgg

SEQ ID NO: 51449 - DNA, 513 bp, Homo sapiens
  misc_feature (1)...(513): n = a,t,c or g
atgaaatttaccttcttattcatgtttaagtgtacaattcagtaggttccctttgtttttgccttttattgcttaaaatggtaattgaaatagctaaattattatttgaaaataggccaatttatatagataatagaattttataagggtgatttatattccaaataatggcccccttttttttttcaaggccttttcaaatagtgtcaacaggtgatctttaatttaactgcattagatgacatatggattacttttgtttttaggaaataacccccaccttaatctatattgnnnnnnnnnnnnnnnnnnnnnnnnnnnnnnnnnnnnnnnnnnnnnnnnnnnnnnnnnnnnnnnnnnnnnnnnnnnnnnnnnnnnnnnnnnnnnnnnnnnnnnnnnnntctctactatagtatagtagaatatatactactacnnnnnnnnnnnnnnnnnnnnnnnnnnnnnnnnnnnnnnnnnnnnnnnnnnnnnnnnnnnnnnnnnnnnnnccgggag

SEQ ID NO: 51450 - DNA, 526 bp, Homo sapiens
  misc_feature (1)...(526): n = a,t,c or g
gnnnnnagtnnntttntgntnntttgatccngantaccctttatgacatgnctacnaatttaatacgactcactatagggaatttggccctcnaggccnagaattcggcacgagaactggaagaagtctctattgagacaattgaggctggcttcatgaccaaggacttggctgcttgcattaaaggtttacccaatgtgcaacgttctgactacttgaatacatttgagttcatggataaacttggagaaaacttgaagatcaaactagctcaggccaaactttaagttcatacctgagctaagaaggataattgtcttttggtaactaggtctacaggtttacatttttctgtgttacactcaaggataaaggcaaaatcaattttgtaatttgtttagaagccagagtttatcttttctataagtttacagcctttttcttatatatacagttattgccacctttgtgaacatggcaagggacttttttacaatttttattttattttctagtaccagctaag

SEQ ID NO: 51451 - DNA, 530 bp, Homo sapiens
  misc_feature (1)...(530): n = a,t,c or g
gnntttggnnaccgctatgacatgattacgaattcaataccgactcantatngaggaatttgcccctanaggccaagaattcggcacgaggcagaggctgcccacgggactgtaacccgtcactaccgcatgtaccagaaaggacaggagacgtccaccaatcccattgcttccatttttgcctggaccagagggttagcccacagagcaaagcttgataacaataaagagcttgccttctttgcaaatgctttggaagaagtctctattgagacaattgaggctggcttcatgaccaaggacttggctgcttgcattaaaggtttacccaatgtgcaacgttctgactacttgaatacatttgagttcatggataaacttggagaaaacttgaagatcaaactagctcaggccaaactttaagttcatacctgagctaagaaggataattgtcttttggtaactaggtctacaggtttacatttttctgngntacactcaaggataaaggcaaaaatcaattttgtaat

SEQ ID NO: 51452 - DNA, 2359 bp, Homo sapiens
tcccgggtttctgcagagtctacttcagaagcggaggcactgggagtccggtttgggattgccaggctgtggttgtgagtctgagcttgtgagcggctgtggcgccccaactcttcgccagcatatcatcccggcaggcgataaactacattcagttgagtctgcaagactggggaggaactggggtgataagaaatctattcactgtcaaggtttattgaagtcaaaatgtccaaaaaaatcagtggcggttctgtggtagagatgcaaggagatgaaatgacacggaatcatttggggaattgattaaagagaaacttcatttttccctacgtgggaattggatctacatagctatggatttaggcattagagaatcgtggatgccaccaacgaccaagtcaccaaggatgctgcagaagctattaaagaagcataatgttggcgtcaaatgtgccactatcactcctgatgagaagagggttgaggagttcaagttgaaacaaatgtggaaatcaccaaatggcaccatacgaaatattctgggtggcacggtcttcagagaagccattatctgcaaaaatatcccccggcttgtgagtggatgggtaaaacctatcatcataggtcgtcatgcttatggggatcaatacagagcaactgattttgttgttcctgggcctggaaaagtagagataacctacacaccaagtgacggaacccaaaaggtgacatacctggtacataactttgaagaaggtggtggtgttgccatggggatgtataatcaagataagtcaattgaagattttgcacacagttccttccaaatggctctgtctaagggttggcctttgtatctgagcaccaaaaacacgtattctgaagaaatatgatgggcgttttaaagacatctttcaggagatatatgacaagcagtacaagtcccagtttgaagctcaaaagatctggtatgagcataggctccatcgacgacatggtggcccaagctatgaaatcagagggaggcttcatctgggcctgtaaaaactatgatggtgacgtgcagtcggactctgtggcccaagggtatggctctctcggcatgatgaccagcgtgctgtgtttgtccagatggcaagacagtagaagcagaggctgcccacgggactgtaacccgtcactaccgcatgtaccagaaaggacaggagacgtccaccaatcccattgcttccatttttgcctggaccagagggttagcccacagagcaaagcttgataacaataaagagcttgccttctttgcaaatgctttggaagaagtctctattgagacaattgaggctggcttcatgaccaaggacttggctgcttgcattaaaggtttacccaatgtgcaacgttctgactacttgaatacatttgagttcatggataaacttggagaaaacttgaagatcaaactagctcaggccaaactttaagttcatacctgagctaaggaaggataattgtcttttggtaactaggtctacaggtttacatttttctgtggttacactcaagggataaagggcaaaatcaattttgtaatttgtttagaagccagagtttatcttttctataagtttacagcctttttcttatatatacagttattgccacctttggtgaacatggcaagggactttttttacaattttttatgtttagttgtctagtaacccagcctaggaattcggttagtactcatttgtattcactgtcactttttctcatgttctaattataaatgaccaaaatcaagattgctcaaaagggtaaatgatagccaccagtattgctccctaaaatatgcataaagtagaaattcactgccttcccctcctgtccatgaccttgggcacagggaagttctggtgtcatagatatcccgttttgtgaggtagagctgtgcattaaacttgcacatgactggaacgaagtatgagtgcaactcaaatgtgttgaagatactgcagtcatttttgtaaagaccttgctgaatgtttccaatagactaaatactgtttaggccgcaggagagtttgggaatccggaataaatactacctggaggtttgtcctctccatttttctctttctcctcctggcctggcctgaatattatactactctaaatagcatatttcatccaagtgcaataatgtaagctgaatcttttttggacttctgctggcctgttttatttcttttatataaatgtgatttctcagaaattgatattaaacactatcttatcttctcctgaactgttgattttaattaaaattaagtgctaattaccattaaaaaaaaaa

SEQ ID NO: 51453 - DNA, 648 bp, Homo sapiens
ttttccattttgaacaacttttattatacgtttagtgttctctatacaaaagaaatcagtttttttacagtgattcaaaaaaaattcagaataatttggccttttcattgctcatgcagtcagtttataagtccatgtattagacggccctccatggcccagaagtcttccctgctgaaggtcgtgtgtgacaccctcagatacgcatctgtcactgacaaagttggttaatgcaaaataactcgcaaaaaaggaaagaacatgatgtgagaggggttaaaacaaggtctggcatggagttaaatgtttaaccaatggaaaaaagatcagaccaatttgtgtgtgtgtggatatgtaggaagggatggagacgctgggaaaaaaaattccccacgggaaagaacaaattggaatggtgggggatatgggtgtgtggtgggggcggggcaggaggtcctccggggtccagcatgggtcgggagtgggagcaggacagaaggtggccacgtcacaggcgactgatgctcagctcaaggggagtgtgaagaggttggcaaagagctggggagccgggcagagggacaacactgactgaggacattgcagttgggaatcagaaaaaaaggggcagctcagcccacgcgtccg

SEQ ID NO: 51454 - DNA, 1426 bp, Homo sapiens
  misc_feature (1)...(1426): n = a,t,c or g
tctcaaactaatagaggaaaaactaggtatgactcccatacgtaagtgtaatgacgcattgcgtaattcaccaaaggttgagacgacagattgtccagttcctcctaaaagaatgagacgagaagctacaagacaaaataggattataaccaaaacagatgtatgagaggtgacagagagaagaggccattggtctcagtaagaatgccctgctttctgcatctctgtttcagaagaccaagagggtgacttaccagactgagtatttctggggacaatacaagtacctgggcatgaatttccatttcgattcagatgggactggaaacaaccattcaattttatgaatcttactggacattatggatttactggaattattccagacattatgccctttggttgtcactaccttgcaaatgtgtaagaggaaaatgtgctaatgtggcagtgactgtaaaactggcacatggcatttattaatcctgaagaaaagtacatgtactatttttcagtataaatataatgaacatgtcagaactatttcttgaaaacctttttattacttttgcgtgaatttatttaacaaagatgttttgtcttttgtgtaagggaggttctagaggctagatgtttaattgtaaatatgtgaggaaactcaatgcagaattcaggataaaaattttaaaagcacaggtatttgggaattgaaatgttaagatacccagaacaacattaaatcaatgagtgaacttgtgacagtggtagcatttcaaatttcaaaagacttatcctgtgtgtgtgtgtgtgtgnnnnnnnnnnnnnnnnnnnnnnnnnnnnnnnnnnaaatattcagcagcaccaagttttataactattgtttgtttgactctattaatactagaatatgtagtctcaagccttaattttacatttacattattttgtaattttttattactatttttaaggggttaaagagaacatacattctcacattagtgtactttctggtagaaagttgctgcaaaaacatttgaaatgtatattaacctaatgtatgtcatatatatgtctttgtgtaagttcaagactattgatctgtgaagttattttgtaaggacatacatttggtaagtaagtttgtgtcccaggaaatgtatgtgtttttaaaccctttctaaatatgcaggccattaataaataagattgtttcttccctactgaatagataagtgtttttcttttttaaaattggaagcttcataaaagttatcttgttaaaaaacgatgatgatgttaacctatctttataattggaaattatttaaactgtttgttgttacagaagaaacaaaatggtaattacagaattagctgtggggaagattggctcccatggtactacaggttgagtatcccctta

SEQ ID NO: 51455 - DNA, 586 bp, Homo sapiens
gaggaccgctgccaaagaaacgcagtagatccgctccctcttgggggcggggagaaagaacgggttgtgtccgccatgttggtgaagtcaagcgaaggcgactagagctccaggagggccagttctgtgggctctagtcggccatattaataaagagaaagggaaggctgaccgtccttcgcctccgcccccacatacacaccccttcttcccactccgctctcacgactaagctctcacgattaaggcacgcctgcctcgattgtccagcctctgccagaagaaagcttagcagccagcgcctcagtagagacctaagggcgctgaatgagtgggaaagggaaatgccgaccaattgcgctgcggcgggctgtgcacgtacctacaacaagcacattaacatcagcttccacaggtaacctgggcagtggagtgggggtgacggaaactggagttcctattgtggctatctcttgtgtggaaggaacaggaggattctgctaattctaataactttcccagctggtagcagggaagcatcgtatgtcctttgtgtttctcaaatctgcccaattgttctctgctt

SEQ ID NO: 51456 - DNA, 413 bp, Homo sapiens
ccatttttaaagcattttaatagttctggatgcagaaatcatctaaaatgacagtgaattaggttttaaaaagattttagatttttttgaaagtttaatttttatttgtaaagactcctcaaggatttgtatatgcaacacagtaaggagatcttccattttactacctttcaagtgaaaaatagcctatcatacaatatgcttgatttcagattttcatactaaaacttaactacatacttaaaagtaggttcttatcaagggtctctgaacattgctttttaaaacaaggatgtggaacttaacttttcttgaaacattttttttaaatgcttcatcttttagtttttatataaaggaatcccacatgttacattcttgtttttaggatggggggtgactacccttattat

SEQ ID NO: 51457 - DNA, 547 bp, Homo sapiens
tttaaaggtccagttggcttttattatcgatttgtgaatcaggcagcatcttatctataaaatagaaaaggtgctttgaagaaccaagcagatggatgggcagaaaagcctggggatagcaagatcaagaaacatgaagtggcttggtcatttcaaagttactttccttaaagggtttatacacaggggaccttcccctctcatgccttgtgcaaggtggaatggggacccttttgatacaggagctagaaagaaattaggcagttagtgagggtaagaaagtcctcagcaaggttacccttttaataaaaagcagcccccgaatcatttcttttctaacaaagagtggcctgaaaagttgagctgcaaacatagataagcaaactggaagcttgcatggatgaatgccagcagctgtgccaataggaaaaggctacctggggaccaggcatgttcagcatgggactccatcttccctttcctttgtcaactgtgtgaactgtaaggaacagatgtaatggcacaggccaggtagagaactcatttg

SEQ ID NO: 51458 - DNA, 440 bp, Homo sapiens
gcgggagccgccttcgggccttctgggcatgtctgccatatggctccaggtttgtttttctccccggcactctgacggggagggctcccggcatctcctggcgtccgggtagaggacgcggaggatgctgagctgctggcgcactgcagcacaactagagatgtacggatgcccccatcttgatcttacagaatcagaggtacagccgcgagaaagagtcaagaacagacagagtcgcttgaggactcaggagggtgtttgctgcgttgacaacagactacaccctcacagtttgctctgctcttccaacaccagtggaagatgatcacatcccagggatcagtgtcgtttagggatgtgactgtgggcttcactcaagaggagtggcagcatctggaccctgtcagaggaccctgtacagggatgtgatgctggaaaat

SEQ ID NO: 51459 - DNA, 2300 bp, Homo sapiens
  misc_feature (1)...(2300): n = a,t,c or g
caggttcgtagttctccaggcacggaatgggctagtgtgagaaacaccaacagcaggcccatctcagatcttcactatggcaacttatgcaagaaactgttgaattagacccgtttcctatagatgagaaaccatacaagctgtggtatttatgagcctccatttcttatactactgcagtgaaccaacattggatgtgaaaattgccttttgtcagggattcgataaacaagtggatgtgtcatatattgccaaacattacaacatgagcaaaagcaaagttgacaaccagttctacagtgtggaagtgggagactcaaccttcacagttctcaagcgctaccagaatctaaagcctattggctctggggctcagggcatagtttgtgccgcgtatgatgctgtccttgacagaaatgtggccattaagaagctcagcagaccctttcagaaccaaacacatgccaagagagcgtaccgggagctggtcctcatgaagtgtgtgaaccataaaaacattattagtttattaaatgtcttcacaccccagaaaacgctggaggagttccaagatgtttacttagtaatggaactgatggatgccaacttatgtcaagtgattcagatggaattagaccatgagcgaatgtcttacctgctgtacccaaatgttgtgtggcattaagcacctccattctgctggaattattcacagggatttaaaaccaagtaacattgtagtcaagtctgattgcacattgaaaatcctggactttggactggccaggacagcaggcacaagcttcatgatgactccatatgtggtgacacgttattacagagcccctgaggtcatcctggggatgggctacaaggagaacgtggatatatggtctgtgggatgcattatgggagaaatggttcgccacaaaatcctctttccaggaagggactatattgaccagtggaataaggtaattgaacaactaggaacaccatgtccagaattcatgaagaaattgcaacccacagtaagaaactatgtggagaatcggcccaagtatgcgggactcaccttccccaaactcttcccagattccctcttcccagcggactccgagcacaataaactcaaagccagccaagccagggacttgttgtcaaagatgctagtgattgacccagcaaaaagaatatcagtggacgacgccttacagcatccctacatcaacgtctggtatgacccagccgaagtggaggcgcctccacctcagatatatgacaagcagttggatgaaagagaacacacaattgaagaatggaaagaacttatctacaaggaagtaatgaattcagaagaaaagactaaaaatggtgtagtaaaaggacagccttctccttcagcacaggtgcagcagtgaacagcagtgagagtctccctccatcctcgtctgtcaatgacatctcctccatgtccaccgaccagaccctggcatctgacactgacagcagcctggaagcctcggcaggacccctgggttgttgcaggtgactagccgcctgcctgcgaaacccagcgttcttcaggagatgatgtgatggnnnnnnnnnnnnnnnnnnnnnnnnnnnnnnnnnnnnnnnnnnnnnnnnncatcaagaaaacagcaagggagagaatccaagcctaaaattaaataaatctttcagcctgcttcttccccagggttctgtattgcagctaagctcaaatgtatatttaacttctagttgctcttgctttggtcttcttccaatgatgcttactacagaaagcaaatcagacacaattagagaagccttttccataaagtgtaattttaatggctgcaaaaccggcaacctgtaactgcccttttaaatggcatgacaaggtgtgcagtggccccatccagcatgtgtgtgtctctatcttgcatctacctgctccttggcctagtcagatggatgtagatacagatccgcatgtgtctgtattcatacagcactacttacttagagatgctactgtcagtgtcctcagggctctaccaagacataatgcactggggtaccacatggtccatttcatgtgatctattactctgacataaacccatctgtaatatattgccagtatataagctgtttagtttgttaattgattaaactgtatgtcttataagaaaacatgtaaagggggaatatatggggggagtgagctctctcagacccttgaagatgtagcttccaaatttgaatggattaaatggcacctgtatacc

SEQ ID NO: 51460 - DNA, 300 bp, Homo sapiens
actggagaactgccttaaaaaacaaaacaaacaaacaaaaacagtgaaatacttaatggtttaaccagtcttcgtttttcctcatcttaaatattaaattcaacttagccatagttctagaaaaatggctagatatctcattcaccaatgaactctcaaatacagtgatgacacatcccatttctctcatttctagttctctacagtaaagtgaaggggccacttgtagaaagacaagcatgcttgagcactcacaaactgatgttcagaatctctgccaagtgagacactcaacagatg

SEQ ID NO: 51461 - DNA, 5217 bp, Homo sapiens
  misc_feature (1)...(5217): n = a,t,c or g
ggtaccaggcaagggtgccggtcagaactttgggggaggagtgtcggcaggatcgggggagcggttggcaaaggtgatgcaggcccagatgcagggagtgggcgaaaggagagagcgagcaggcgagggatggctccggacgccgtagggtagaggaggcggcggctggaacaaagcgtggcctgggcacgggctcggctgagctgggagatgctcggcagcagccacgccccggaggagcagcggtccccgggccgacgccccgcctctgggtcccgcggggctcctccagcctcctgcagccacgccccggaggagcagcggtccccgggccgacgccccgcctctgggtcccgcggggctcctccagcctcctgcgcagccccacccccaagccgtccccagccacgcccacgcccctggccagccttccctagcccctcagtcagtcgcagccacctccccctgcgctggacttggaggaagggggtggagaatgagaggacgctctccgttctccgccccgcctccccgccccacgtgacatcggtacgtgggagcaacaccgctggatgccccctccctactaaatggttaaaacaatcatcataactcttaaggcccttttatggctgtttcttagcgaaacctcacaacatgcctatggggtgggaattgatgttccattccacagctgactccactgaagcccatgaggaagaaattggcccaaatcacagtcccctctgattacagaacagaaaaagtcagctaaaatctcaggatcacttttttcaggtgatgggaggatttcgaagttctgtggacacctgaaattgggcacaaatcaggtgttcatgccagtgggcattttccaggtagagggatcatatttctctcgagagtctaaaagtgtgttgaacaagcccactctttacagatggggagactgagcctggggacagggagtggcctgctcagaaaagactcagaaattaaatccagtccagtgggttgatatttacccaaatttccagcctggggagattgatgcacccaagagaagaacccagaaatgaaactttgttcttttatgctaaaaaataaaattccccagagtgcttacaatctctcctcccactccctttttcctgccctaaataaataatggcgaatgagcacccagccagggatgtgtctgatcaaacaatcatggatcaatagctatgtttggagaaggaatttgtggctgctccagctactgggcattttgtctggtccagttcatgtaatctcccaacaccccatgaagcaaggctttgttaatcctattttattgaaaatgaactaagactcagagagataaagctgttgcccaatgagccttctttctgccctccagatccacggtgctaattccccttccgatgacctaatgattctgagcttggcaaaggtcttatctcccagctcgcccaggcccagtgttccaggaatgtgacctttgctgcagcagccgctggagggggcagaggggatgggctggaggttgagcaaacagagcagcagaaaaggcagttcctcttctccagtgccctccttccctgtctctgcctctccctcccttcctcaggcatcagagcggagacttcagggagaccagagcccagcttgccaggcactgagctagaagccctgccatggcacccctgagaccccttctcatactggccctgctggcatgggttgctctggctgaccaaggtacaggggatgttggtggccatctgggtcaatgtagggagggcgagggtggtctgggcttggtggcaccgactgacactccttcctcatagagtcatgcaagggccgctgcactgagggcttcaacgtggacaagaagtgccagtgtgacgagctctgctcttactaccagagctgctgcacagactatacggctgaagtgcaagccccaaggtgtgttcagagcccaggtgggtgggctggggtgccccctgctgctggagactcactaccatccactctctgcagtgactcgcggggatgtgttcactatgccggaggatgagtacacggtctatgacgatggcgaggagaaaaacaatgccactgtccatgaacaggtggggggcccctccctgacctctgacctccaggcccagtccaaagggaatcctgagcagacacctgttctgaaacctgaggaagaggcccctgcgcctgaggtgggcgcctctaagcctgaggggatagactcaaggcctgagacccttcatccagggagacctcagcccccagcagaggaggagctgtgcagtgggaagcccttcgacgccttcaccgacctcaagaacggttccctctttgccttccgaggtgaatccagggcagtactggggatgcgggtctgccccaggagcgtccctgctctcacaccatctcctccactctggggcagtactgctatgaactggacgaaaaggcagtgaggcctgggtaccccaagctcatccgagatgtctggggcatcgagggccccatcgatgccgccttcacccgcatcaactgtcaggggaagacctacctcttcaaggtgccaggggctgtgggccagggtagaaagcatctagggagggtttgagagctattgctcccagggacagggtggacagggaagctggacccagggccctgcagtacntggtgggagctctgtgagcacagggcagccccaacagcccaggtcctgggcagtgaacctggacctggaacggctgctagggcaagggactctgcctctgtgcccagccagcggctccataccccttttcactttccccacctcttagggtantcagtactggcgctttgaggatggtgtcctggaccctgattacccccgaaatatctctgacggcttcgatggcatcccggacaacgtggatgcagccttggccctccctgcccatagctacagtggccgggagcgggtctacttcttcaagggtactcagggggtggtgggagactgagcaggcagtggagcagtcttggattcctttcacatttcactggggacaggcctcagcatgtgcccacccctgacccccacctcatgctgggagatcctaacttcaacagcctctgggatctccagtcttgccctggcccagccctcctaatgcccaccaccccgctcctcagggaaacagtactgggagtaccagttccagcaccagcccagtcaggaggagtgtgaaggcagctccctgtcggctgtgtttgaacactttgccatgatgcagcgggacagctgggaggacatcttcgagcttctcttctggggcagaacctctggtatgggagagagggcaagtcttgcttctccctcaaaagggctgaaaccccttgggtattgggtagagccaggccggctggaggggctgtggttgtggagctatcgatcaaagtctgtttgctcaggccagactttgcttctgttgaccttttggggaaagctcagctctacctggaccccacaccttggactttgcctagcacagctgagagcacagccagcagagggaggggctgtggctgaggagtttagggggcctgggggggtcgggtcgagacaccatcatatggtggagggaaagcacagggggaagggaattggactgagagtcaaaggcctggctctgccattcgctgctgtgtgtctttgggcaagctgcagcagatgaactctaatggccccgctggaaggggcaagattcggacccccaagacctctcattcaccccttccctgccagagctggtaccagacagccccagttcattagccgggactggcacggtgtgccagggcaagtggacgcagccatggctggccgcatctacatctcaggcatggcaccccgcccctccttggccaagaaacaaaggtttaggcatcgcaaccgcaaaggctaccgttcacaacgaggccacagccgtggccgcaaccagaactcccgccggccatcccgcgccatgtggctgtccttgttctccagtgaggagagcaacttgggagccaacaactatgatgactacaggatggactggcttgtgcctgccacctgtgaacccatccagagtgtcttcttcttctctggaggtaggagccgctgccacccctgaagctggtctagcttgggttttccttgctgtccctggtgcacaagggctgaacgcagcctggaagtagtgaccacagaaagccaggccagaagtccttagctgcatcatggatgttcactttcccttctgggagagaccctagacttctcaagggaagagtgggcagggccaggctgggcctcacgcatcctctgctttcctctcttccagacaagtactaccgagtcaatcttcgcacacggcgagtggacactgtggaccctccctacccacgctccatcgctcagtactggctgggctgcccagctcctggccatctgtaggagtcagagcccacatggccgggccctctgtagctccctcctcccatctccttcccccagcccaataaaggtcccttagccccgagtttaaaattattgttctgactggggtagacacatccctgtctgggtaaaggagaggaagctggactgtcagaatgggttggtgagggggacagagaagggacagagaagggcctcgccgtgtccaacccatgttgggctcaggacctctctgtgctcaggacctctctgtgaaccggtttggggctggggaaggcctcctgagagctacccttcctcttgagctaagcagcccccagcaacccaccagcagctaagcagacacttgaactcctctgatgatgacaaagttaccaggccagcctccgtgggtgaggcttgctttgccccttggagttgactagggtcttggaggagagaggggcagagctggtgggtctgctagcttttgtccatcctgatctgaaatcctagtagctctgactcctgagcacttggggaaccagtcactgtgcttccccaaacccacccctagggtgagcctttcttgaggtctctgtctagggtctaggatggggagcagcaagaccaggagagatagtgaagggcagaaactgaaaggaaattcaaaagcacacacttcttgtggaaaagtggcccag

SEQ ID NO: 51462 - DNA, 496 bp, Homo sapiens
ggaggaggaggagaggtcggagccgtctccaggagcccttagagaccgagtcccggcggcgacggcggggcagcgcaccggcaggcggattcattccacttaaaacctgaaaacattggaccacacaaagtcttactgatttcaggtaaaaacaataattgaagatgtccagcaaaacagcaagcaccaacaatatagcccaggcaaggagaactgtgcagcagttaagattagaagcctccattgaaagaataaaggtttcgaaggcatcagcggacctcatgtcctactgtgaggaacatgccaggagtgaccctttgctgataggaataccaacttcagaaaaccctttcaaggataaaaaaacttgcatcatcttatagtggaatagagaaacagctcctccgcctcttcccaacaacgcaaatttatgagcagctcctttgaagaagatttaccttcagcttatttggtaaccacttgcttaataacttaa

SEQ ID NO: 51463 - DNA, 231 bp, Homo sapiens
  misc_feature (1)...(231): n = a,t,c or g
ctggaatgggaggctttcattagtgtggcttcatcccaactcctgcttgtaggtgctgtctgggtgtatctgtgtgattacagtattntggtgatatgaattattgtagtgtatgtataaaaatgagcagagactttttttttcttaagaaatgaagcataagaaatgtctgatggagaaaaaaagattatttttgaagtactgatagagaaaatagtgttggaaaccaga

SEQ ID NO: 51464 - DNA, 1024 bp, Homo sapiens
cgatggcatggcgccgagggtggtggaaagcgcggcgaggcgggctgggaaggaggctaccccgagatcgtcaaggagaacaagctgttcgagcactactaccaggagctcaagatcgtgcccgagggcgagtggggccagttcatggacgctctcagggagccgctcccggccactttaagaattactggttacaaaagccacgcaaaagagattctccattgcttaaagaacaaatattttaaggaattggaggacctggaggtggacggtcagaaagttgaagttccacagccactgagttggtatcctgaagaacttgcctggcacacaaatttaagtcgaaaaatcttgagaaaatcgccacacttggaaaagtttcatcagtttctagttagtgaaacagaatctggaaatattagtcgtcaagaagctgttagcatgatcccaccactgctcctcaacgtgcggcctcatcataagatcttagatatgggtgcagggcctggctcaaagaccacacagttaattgaaatgctacatgccgacatgaatgtcccctttccagagggatttgttattgcgaatgatgtggacaacaagcgctgctacctgctcgtccatcaagccaagaggctgagcagcccctgcatcatggtggtcaaccatgatgcctccagcatacccaggctccagatagatgtggacggcaggaaagagatcctcttctatgatcgaattttatgtgatgtcccttgcagtggagacggcactatgagaaaaaacattgatgtttggaaaaagtggaccaccttaaatagcttgcagctacatggcttacagctgcggattgcaacacgcggggctgaacagctgggctgaaggtggaaggatggtgtatttcacgtgatcactaaaccctattgatgatgatgcaatcatagcatctatactgtgaaataagctgaagtgtgataaaggatgctcgttgatgattacctaatgaatcttccagggctgaaag

SEQ ID NO: 51465 - DNA, 370 bp, Homo sapiens
  misc_feature (1)...(370): n = a,t,c or g
ataacttatatattcaccaagttgcacaactatcaccacagtccattttaagacaatttcatcaccacaaagaagaatcttttaaccatcacctccccaggcccctcaccttcccattcccagcctccggagccaataatatcctctctgtctctacagagttccctcttctggacatttcacagagacgattggcttcttttgcttattttcatttggtttttaaaagagggctaaaacttaaagtataataataataanataaaaaacgaacaaaaaaaaagagggctccggctctgccatgggtccctctgggggtctcctgggtggaggtggagaaggtcccccctgagttgcacatccccttcca

SEQ ID NO: 51466 - DNA, 255 bp, Homo sapiens
  misc_feature (1)...(255): n = a,t,c or g
gctatcctttaaagaatgaatctgaaaagctacacttacacattataacagaaaatacatgtctagattggaaaaaaagtaactttaaatgaaactagagattcttccccattattagctcctaactgaatttgaatgttttaaatataagtagtaagatcaactctgtaagtcaaagatgggctgggtgtggtggctcacgcctgtnnnnnnnnnnnnnnnnnnnnnnnnnnnnnnnncnatactttggagccc

SEQ ID NO: 51467 - DNA, 120 bp, Homo sapiens
tgggacctggcatttagggctaggtggcttgcctgagcctgcaaatttttgctgttgtccccttacatgccaccagttcaggcttgctggtgagaggtgaagccagcttgactttctggc

SEQ ID NO: 51468 - DNA, 539 bp, Homo sapiens
tttttttttttgaaattttctgaagatttagagtcatataagatatcagtggtaatgcaggaatcagctgagaaactttcagaaaagttacataagtgtaaagaatttgtggacagttgcaggcttactttccctactagtggtgatgaatacagcaggggcttccttcaaaaccttaaccttattcaagatcagaatgcgcaaacaaggtggaagcagggcagatatgatgaggatggcaaacccttcaatcaaagatctttgcttttggggcatgagcgaattctcacaagagcaaagtcttatgaatgcagtgaatgtggaaaagtcattaggcgtaaggcatggtttgatcaacatcaaagaattcactttttagagaatccttttgagtgtaaggtctgtgggcaagccttcagacagcggtcagctcttacggtccataaacagtgtcactcggcggaactgtgctcccggaatccttctgcgcactctctctgcagaagtccctccgtgctgggtccaggcgctcccactcc

SEQ ID NO: 51469 - DNA, 785 bp, Homo sapiens
gaaaggccagttcacgacggattttgacttcagcgttccaggatccatgaagcttcataatcttatttctaagttgaaaaagtggatcaaaatcttggaggccaagaccaagcaactccccaaattcttcctcatagaggaaaagtgccggttcttgagcaatttctcggcacagacagctgaagtggaaattcctggggagtttctgatgccaaagccaacgcattattacatcaagattgcacggttcatgccccgggtagagattgtgcagaagcacaacaccgcagcccggcggctgtacatccggggacacaatggcaagatctacccatacctcgtcatgaacgacgcctgccttcacagagttcacggcgagaggagcgtgtgttgcagctgctgcgtctgctgaacccctgtttggagaagagaaaggagaccaccaagaggcacttgtttttcacagtgccccgggttgtggcagtttccccacagatgcgcctcgtggaggacaacccctcttcactttcccttgtggagatctacaagcagcgctgcgccaagaagggcatcgagcatgacaaccccatctcccgttactatgaccggctggctacggtgcaggcgcggggaacccaagccagccaccaggtcctccgcgacatcctcaaggaggttcagagtaacatggtgccgcgcagcatgctcaaggagtgggcgctgcacaccttccccaatgccacggactactggacgttccggaagatgttcaccatccagctggc

SEQ ID NO: 51470 - DNA, 433 bp, Homo sapiens
aaaaatacaaaaagttataatctcatttggtaacacattatttactatgaacagaaatttcttattagccctcaacactgtcatctggtaatggctccagacagtactttcacgtaatatgggcatattaactaatttttccaatcacttgttcaaaacttggtcttaagaaagcaaatcatgcctggaggagaaaaaagaagctaaaaggtaaatagggaatgaattaaaaactagactatgtatgctgaatgagaaatatagtaagtatatttaatcataacctgataattactttaatggggccacgaaaataatgatttactacatttctttgaagaaaatattttcattcttagtatctacttgttcacaaatataccataatttggttaattgttccaaattaaacacagttagactttttgaaacc

SEQ ID NO: 51471 - DNA, 389 bp, Homo sapiens
gttcagcagtgacgcctgtcactatattggtattctgtggaccagctagattggcaagtaatgctcttcaggaaccttcatcctttagagtggatggcattcccaatgacagtagtgatagtgaaatggaggacaaaactacagctaatttggcagccttgaaacttgatgagtggctccatttcacactggagccagaggcagctagtttattgctgcagctcagacagaagtggcatagcttatttttacgccgaatgagagctccatctaaaccttggtctcaagttgatgaagctaccataagagcaattatagctgttttaagcactgaagaacagtctgcaggtttacaacaaccatcggggattggccaaaggccaaggcct

SEQ ID NO: 51472 - DNA, 654 bp, Homo sapiens
ctcaagtgatcttcccactttggtctcccaatgtgctagaattacagccctgagccacggccccatgccccgtttttaccagtgtatattttctactggaaaatgagacttttagggatgaatgtggacttgtctgttgaaacttgtaaatttgcttaaaaaaaaaaagatctccaagtcttcacaaaattttatattccccaaggctgccccatcacaatgcctgtgaagcttgactggcagacactgaggcctgaagctgggggctgcagggggtcactggctcacccggtccccccgtaatctgtaaaacatactgggtgagggaggctgctggaggacctgaatctctcccttctccaggcagtagtgaggcatatgcctgttggccttgggcccattaaagatcattccagccccagtgctgttctctgaattcttggggaacacagggatgggggctcctaatgaggaccccagaaactctgagctctcacaactttcaaagacacttgcctccctcctctgcccacacctccaccattacagcatttgatcccacaagtaaggagggggcggtcctattccaccacctctctggtatccccccaaccttctgagttgtctgagacccaggaaagggttaagatcagg

SEQ ID NO: 51473 - DNA, 325 bp, Homo sapiens
gaatctcctccaggttcatgaccataatcagcccatcccgtggaaagtgcagtttaacttgggcaatagcagtcgtccgagcaatcagtgccgcaactccattcaagggaagcacctcatcacggatgaactcggctacgtttgcgagaggaaggatttgctggtaaatggctgctgtaatgtcaacgtccctagcacgaagcagtactgctgtgatggctgctggcccaacggctgctgcagcgcctatgagtactgtgtctcctgctgcctgcagcccaacaagcaacttctcctggagcgcttcctcaaccgggcagccgtg

SEQ ID NO: 51474 - DNA, 1566 bp, Homo sapiens
ttactgtagattttatcagcgttttttcactgctggggttgtgatagaagccatgtcagcaccacacactgcagctctccaaagagtgtgtccaccactccactgtgctcagggaaggcagacctctcctctctctttccaatccctaaagggaattaggagtagtctgaagccttgggaagatgtcattcccgccctgtatggctggtttagccatggacatgaccagcttttggctgtgaagacctgagcagggttttgccaacagcttgttctagagaaggtttccctttttctgggacattgttggtctcatgttatgcctgtgaaggatttgtccagccttcatgttactctacacaacaacttatctcctgtgtattgccctggttcatgtgatgataatggccttatgataaagccgcctttagtcttccatgttctgatcactgtgtggggatgttcaagagcagagttaagatctaccaaactgaaggggtctccagattatcttggaggggacaggaggatggcagagaaacaactgtcaatccagatttgacctcatttgcattgccaccaaggcctcctaggaaaaattgtaggaatttatgggtataatattgtggtctgaatggcgtgaatttttatcccgaggagggggcagttgtgacaacctccagtgcatgtgggaacagcatgaattgggtcccttattcccagggggtgccccatattccccaatactgtaaagcagatgctgtttagcacctgccaaggagccatatgccctgaagttcagcattaggcaggtatctcttaactgtaagacataccaggcccagctgggaccataatttgtacagaaacactggatgtgattaatagggagtaggcgagattatagcaaaccagcagaaatgggactctgctaaatgtgcatccgtgaatgctcccttgaatgtggctgtgcaggattcagggtttgcagaaattctcaggacctcagacctctgtcctatgactaatgttactggcagagcaaataatctaaaggttttggttttgtggattaccatctccgtgctgtgcatctgaaggccagtgctgtgctggcaggaaaatagggactgagaaaaagcagatcctatactatagggactgtagtatctatgacgtagccagccattctttgctcccaaggcaagaagaaagagatgacagagtcaatatagggttgccaaatcggattttctaaaatgagtaggaagttggatttttatgtgcaacagtttcttttaatgctttgttgatatgtgattgtcatgcaataattattcatatttggtaagttttgtacatatattatgtacactcagggaaccaataccataatcatgataatgaacgtatccatcacctgcaaagctacctcatgcccctttacattccctccttgccttccctaggaaaccgttgatttacattttttactttagatttgtttgccttttctagaattaacacaattggaatcataaagtatttatactctcaaaaaaaaaa

SEQ ID NO: 51475 - DNA, 449 bp, Homo sapiens
  misc_feature (1)...(449): n = a,t,c or g
gcggcgccccggactccgcacttcgacgtgatagtcattggtggaggacatgccgggactgaggcagccaccgccgccgctcggtgcggtcctcnggactctgctcctcactcaccgcgtggacacgatcggtcagatgtcaatgtaatccttcctttggtggcatcggaaagggacatttaatgagggaagtagatgccttggatggcctgtgttctcgcatctgtgaccagtctggtgtacattataaagtattaaaccggcgtaagggaccagctgtgtggggtctgagagctcagattgataggaaactctataaacagaacatgcagaaagaaatcttgaatacaccactgcttactgttcaggagggagctgtagaagatcttattcttacagaaccagagcctgaacacactgggaaatgccgtgtcagtggggttgttttg

SEQ ID NO: 51476 - DNA, 1192 bp, Homo sapiens
  misc_feature (1)...(1192): n = a,t,c or g
ttttttttttttttgactaagcaaaatttgtacttgtttaataagaaaatcacttctttaaaaaaatagttctttacatgctgaggttcatctatgcaatgcaagagctgaaaacagattcgagaaaggctgttcctacaagggaaggtcctgaggttacaacgccggcatggccgggaaaacatggctgcagcgatcccagcttcttgctgcccacaggggtggcacatctgggcacacactgtgagctgctcagaggcactctggtgggcagctcccatcgcctcagtcagtgtctccgtccccttcactgccttccaggggactggggcaccttgggcgcccgtgccacctgccgtgagagcggtggcactgaagttgtggatgggcaaggtgctcagccactgggccatggagcgttcgtcccgctcggtgccgatgatggtggggtagatgtgctccncaatgnnaggctgcnacctttccttcctcctgcgcccagtccagcggctcatgcagcccatcgttgccaaagcgctggttgtacttctcgaagtgcaccctctccaggaccaggccgagtccgggcgccttgggcacgtccaccttctctgtgccccacgtgcgctccagcacgctctcaggggcataacccttcacaatggccaccaccaggccgaccatcttccggatctgatgcatcatgaaactctggcccttcaccctgatcaccgcaaactccaggccctcccgcacaaagggttcctcgcagtacatctccaggatgtagcggcaggccactgggatctgcggccccttctgcgaggtgaaattgtggaagttgtgcgtgcccttgtagcaggccaggagcctgttgacctgctgcagcgtctcggcgctcaggcggtaggtctcatcctgaacgtcccggtccttgtgcgcaaaggcaaacgtgggcagcaggtagcaataggtcctggcatcacatctgttcttggagttaaacccgcccgtgacccgcttcagtcccagaatccgaatgtgagagggaaggtggctgttgatcttttctagaatgtcgtcaatcagccacaccttcagggataccacctggccggctgcggacacacccttgtctgtccgggcgcagcgctggaaggacattttcctcatgtcctcaccatgattttca

SEQ ID NO: 51477 - DNA, 961 bp, Homo sapiens
gcaaaaagacacccagagatttcatgctgttgattcacagaaagcctgttcctcttcactccgtagagtcctcagagtctggatcatcccttacagaagatccttgataatatttctgatatacctccaaggttccgtttgtcaaatgtgtgcgacccttctgataagtcaccagaggtgatgagggagagagagaaagaaagcaaattacaactgtaaagagtctctgaacagtgaaagatcaaaacagacagtctctggctttactggatgagtcaccattgcagcccgaccgcaaaaacaagcgtggcttctgtacttagcagcagtcttcctgtctggaaaggaaacattgctcagattggagatactggcattttatagacttcaaagcaacttaagccactgaactgtcaggcgggaaaacaggatgtcttccatttggaagcccctctgcttctaagaagttccagagaccagcccaggcccacagagttataaggattcatctgggcactgaagacatttgggacctcagtgaagtttctccgaggccagatggtcacattgattttctggaatcattttgaataaaaatgagcgaggtggtgaacacaatgcaaggctctccacgtactgtctggtattgttcaaccagctccacgactccctgagggcagagatgagcagatgttaatggataaagccaggtgggatgatgttataacatttctcctacagccccaaatctcccaactcctgcctgtgtgacctgagtaagactcggtgcaagaagacatcggtgttcccatctgtgaaatgaaggaattgacccccgaggatcttccatttctgacagtgctttggatttcattggttttgtcacaggtaccccccaaaagcctccatctttggataagtgattaaaactgctgaagtaattttcaattaataaaagttc

SEQ ID NO: 51478 - DNA, 396 bp, Homo sapiens
tttttttttacagtgataagtttttatttttgtgcttagagtttcagctgatctagggtggctctgctgatctcaggtggatttgttcgtgagtctaagggttggatgggggttggctgacctaggctgggcccacatttgaggtcatgaaaagtgtgtctttgatctcatgtggcttggccacaacatttttaaggcacccttctctgacttgcacaaatttttattcccatattataaatgagtaaacaagttctgaaaaatgaagtggcttgcctacattaagcttctagcaaattgaaaagctacttcttggatgaagatctcaacttcaaatcctcccaaaatgcttctcctaatgctaatgccattgagatacatagaggaatggtattt

SEQ ID NO: 51479 - DNA, 234 bp, Homo sapiens
agtctgaaggcaggaaaaggcccctttcccggctcaagcagtgaaggagtttccttttactcagcctttctgttccattgcgcctccaacggactggatgaggcccacccacgagagggaggaaaatctgcatcattgggtgtgccaagttcaatgttaatctcatccagaaacacagtcagtcacacccagaatcatgttggaccagatatctgggcaccccatggccagtca

SEQ ID NO: 51480 - DNA, 1563 bp, Homo sapiens
ttttttttggcttactattcaaagtttactgacctccccagccaggcaggccaacccttccgagcaggggaaatgtccatctagctgccctctgctgggttgcagcctatgccatgagagggtactggaagcaggagggagccctggctagggcaggccttaaacgcaaggaaagctgagcagagatctgcacactcaaccccatttgatattcttctcctcctcagtcatggccagcgtgttggtgactagaccggtgccaatagtccggttgccatctcgcagggtgaaacgctggcctttctctaagatcattggctgccgcaaagattaggttgaacttcaggtcctccccgggcatggcaaagctccttctctgggggcaggataatccgacaggccatgtcccaagtcagggagaacatgacaggcatgaagtgggacacaaagggcttgtggcggccaccttcctccttgctgaggatgtaaacctgggcctccaccttctggtggggcttgatggaacctggcttgaccatgaccaggccccgccgcaagtcctcccgcttcaagcctcggaccagggccccgaggttatctccggcctcggccctctccaggctcttgtggaacatctcaatgcctgtcaccacagtgcggatgttcttgctatgtcctaggagctcacactcgtctcccttctttaaaatgccacgctctagtgtacctgtcaccacggtgccacggccagggacggagtacaccgcctccacaggcagcaggaaaggcttctccaggtcccgggcgggcactgggatgtaagtgtccacagcatccagtagcttctgcacagacttcaggcctaactcagggtcccgaccctcaagggcacagagagcagagcctacgatgactggggtctcctcccctttatagccaaactcggtgagcagctcccggatctccagttccaccagttccaccatctcagagtcctggacagcgtcagccttgttcacatacaccaccacatgctccaccccaatctgtctggccagtaataagtgctctcgggtctggggcatggggccgtcattggctgctaccaccaggatgcagccgtcgaggggtgcagtgcctgtgatcatattcttaacataatctgcatgacccgggcagtctgtgtgggcgtagtggcgggcggcagtgctatactccacatgagccgcattgatggtgataccccgagctcgctcctccggggcattgtcaatctcctcgtacttcttgaacttagccccacctccctcagctagaatcttcgtgatggctgcagtcagcgtggtcttcccgtggtccacatggccgatggtacccacattcacatgtggcttgtcgcgcacgtaagtcttcttggcctccacggccaggccgcggcacaagagaggcaatgccggggctttcagcagccgcaacagaccctgcagcaggaaggtccggccggcggcgagaccgctgaagtggggcgtcgcgcgcagcagggtggcggccgccattgtggtc

SEQ ID NO: 51481 - DNA, 462 bp, Homo sapiens
atgaagcctaggaatgtgttgttgttttcagagcttccctggtgattgtgataagcctggtttggaaaccattgctggagaactttgtaaagatacagagtcccagaccttttgtatttacatttaaatacaaatacaaatcctgggtttctatatgttctgttagcttttcaggtgattctgctacacagacgttgaaaaccactgccctaagaaagagatcagaggccacatatcagagagaaaagggaccaaaccttcggtggtttgttgtgtgtcgttttaatgccaattattttaacttgcacagtcttctgaaaccttgtattaatagttctcttttgtattaccattttcaggtagggttttgatcactatgattctgaagataatagtgaaatagtgaatttcattgatatgaagagataattgattttcattcattggtttgaacacctgcaa

SEQ ID NO: 51482 - DNA, 398 bp, Homo sapiens
  misc_feature (1)...(398): n = a,t,c or g
gtggagttaagaaaagcaggcgttttagtggagaaatggggaacagcatcaagaaaggcttttttcnnnnnnnnnnnnnnnnnnnnnnnnnnnnnnnnnnnnnnnnnnnnnnnnnnnnnnnnnnnnnnnnnnnnnnnnnnnnnnnnnnnnnnnnnnnnnnnnnnnnnnnnnnnnnnnnnnnnnnnnnnnnnnnnnnnnnnnnnnnnnnnnnnnnnnnnnnnnnnnnnnnnnnnnnnnnnnnnnnnnnnnnnnnnnnnnnnnnnnnnnnnnnnnnnnnnnnnnnnnnnnnnnnnnnnnnnnnnnnnnnnnnnnnnnnnnnnnnnnnnnnnnnnnnnnnnnnnnnnnnnnnnnnnngngaccttttttnctttttaaaagggaacactgtgtgttttcag

SEQ ID NO: 51483 - DNA, 466 bp, Homo sapiens
ctcctgccttcccctcccccgtcccggtggtcacttcctctcccttcctcccaacaggtctcctacaccttctcagactacccccggggtgtccgctacatcctcttccagcatgggggcagggacacccagtactgggcaggctggtatgggccccgagtcaccaacagcagcattgtcgtcagccccaagatgaccaggaaccaggcctcctccgaggctcagcctgggcagaagcatggacaggaggaggctgcccaatcgccctaccgagctgttgtccagattttctgacagctgtccatcctgtgtctgggtcagccaggaggttcctccaggcaggagctgagcatggggtgggcagtgaggtccctgtaccagcgactcctgccccggttcaaccctaccagcttgtggtaacttactgtcacatagctctgacgttttgttgtaataaatgttttca

SEQ ID NO: 51484 - DNA, 579 bp, Homo sapiens
  misc_feature (1)...(579): n = a,t,c or g
tttttttttcttttacctttatattgatatttaaaagaaaaagaacatgatggatacgggaatgggggaagggacaacggttctacgattaacaacaggaactgataggaaccagaagctccaaggatttannnnnnnnnnnnnnnnnnnnnnnnnnnnnnnnnnnnnnnnnnnnntntnacgttatgtatgtgagtcccagacaagcaggaagcagcagcaagaagcaactagcacacagaaacacccgtgcgtgtgcactacacattcaagcaaagccattcctctagctaggacgcagcaatccccaccctcccacctacgggcaaaagagaacagctgaaaacaaacttccctctttaagggccactcagtaatttttgtcctcatggccaggaaaaagaaagaaaaacaaaacaaaacagaaaaggtcgatcttgccttgaaagcgggcagtggctattttcttctctctgccaaagcaggacacgttattcttaacacagagggccacatcgctgtccctcacaaatacttcagacagttgtcttcaacatcctgtggttcttcgtccgattc

SEQ ID NO: 51485 - DNA, 424 bp, Homo sapiens
  misc_feature (1)...(424): n = a,t,c or g
catgtatctaaatataaagtactgctatagtagaggtaggtggaattctaatattccctgctctttagatttatattttatttaatataaagtttattatttataccctttttaatgcaaagctaattatttagttatatgtatgatttttaataaaaattactttactttttcctatgaatttaaaacatttgatgttggcattttatacagggcaggttgccaaatttaattatgttacactaagttaaacacagcacttaattacctcaaatccagatttctcttaatctgtgtgtacataaaaggaataagtccaaattaatttatagtttagtggtgcactataggtaatattcttttgntatttctagtttttatgggaatccttttcttcaagantctaaaataataaatcgntcct

SEQ ID NO: 51486 - DNA, 87 bp, Homo sapiens
agactatccggtcatgcaggcggttggtttgaccttgccagaactccatcacctgagggtacaggacatagccaccccaggattttg

SEQ ID NO: 51487 - DNA, 981 bp, Homo sapiens
gaacaaaactactttcattaattacccattatttattttagttacttaattttgagttcataaatggccaccctaatggaaagtttgggtatgatcttaggttttatggagatgttttcaatagagattatttttccctcaccctatttgtgaatatataaattaaagtaagacaatggagtaagtaagagggtagatccaaacacagtatgtctaaattctagcactctactggctgcttagaatacaccaaacctggaagacctttccaagagtaaaatcccagtctgccactatcaaaattgccacagtcacttttactacttgtgttcatagtagactcagcacttctttttcactggacctagtataactgagaaataaataactgtgtgcaaaatattggtatcattaaggacccagagctgcccattttctctttgttctaatagggaagcaattactgatagaaatgtgagattaaaaatagggtcctccctgctgctccaaacaaatgcctaaacacagtatgtatctcagtcctctgttcccagagattccaccctagcccaggaaagaactggcctgtgtaaagcaaaacccaagtcatccccctccagaaatttctctggcagcccaagccctgaaccctaagggtttccactttgctttaaaagctaggagtggccctctagagccaggaacacattaatacaacagttcaacctcagcaccaagtcaggtacgaagcgcttgatacgtggaatttttctctatatcaagtttaaatttctggaaatagactttggttgctaatgacaattacagttataccatagtctgtaatttgagaaaaggtgaaatgtatttaatatatatttagttttaataaaaagataaaattattacagaaataattgagagagagaaaatctattataatttatttgaaaaataaaacattttatccagtaaaaaaaa

SEQ ID NO: 51488 - DNA, 3107 bp, Homo sapiens
cgaggagagagagagagtaaggagccagccatgaatcctttccagaaaaatgagtccaaggaaactcttttttcacctgtctccattgaagaggtaccacctcgaccacctagccctccaaagaagccatctccgacaatctgtggctccaactatccactgagcattgccttcattgtggtgaatgaattctgcgagcgcttttcctattatggaatgaaagctgtgctgatcctgtatttcctgtatttcctgcactggaatgaagatacctccacatctatataccatgccttcagcagcctctgttattttactcccatcctgggagcagccattgctgactcgtggttgggaaaattcaagacaatcatctatctctccttggtgtatgtgcttggccatgtgatcaagtccttgggtgccttaccaatactgggaggacaagtggtacacacagtcctatcattgatcggcctgagtctaatagctttggggacaggaggcatcaaaccctgtgtggcagcttttggtggagaccagtttgaagaaaaacatgcagaggaacggactagatacttctcagtcttctacctgtccatcaatgcagggagcttgatttctacatttatcacacccatgctgagaggagatgtgcaatgttttggagaagactgctatgcattggcttttggagttccaggactgctcatggtaattgcacttgttgtgtttgcaatgggaagcaaaatatacaataaaccaccccctgaaggaaacatagtggctcaagttttcaaatgtatctggtttgctatttccaatcgtttcaagaaccgttctggagacattccaaagcgacacgactggctagactgggcggctgagaaatatccaaagcagctcattatggatgtaaaggcactgaccagggtactattcctttatatcccattgcccatgttctgggctcttttggatcagcagggttcacgatggactttgcaagccatcaggatgaataggaatttggggttttttgtgcttcagccggaccagatgcaggttctaaatccccttctggttcttatcttcatcccgttgtttgactttgtcatttatcgtctggtctccaagtgtggaattaacttctcatcacttaggaaaatggctgttggtatgatcctagcatgcctggcatttgcagttgcggcacgtgtagagataaaaataaatgaaatggccccagcccagccaggtccccaggaggttttcctacaagtcttgaatctggcagatgatgaggtgaaggtgacagtggtgggaaatgaaaacaattctctgttgatagagtccatcaaatcctttcagaaaacaccacactattccaaactgcacctgaaaacaaaaagccaggattttcacttccacctgaaatatcacaatttgtctctctacactgagcattctgtgcaggagaagaactggtacagtcttgtcattcgtgaagatgggaacagtatctccagcatgatggtaaaggatacagaaagcagaacaaccaatgggatgacaaccgtgaggtttgttaacactttgcataaagatgtcaacatctccctgagtacagatacctctctcaatgttggtgaagactatggtgtgtctgcttatagaactgtgcaaagaggagaataccctgcagtgcactgtagaacagaagataagaacttttctctgaatttgggtcttctagactttggtgcagcatatctgtttgttattactaataacaccaatcagggtcttcaggcctggaagattgaagacattccagccaacaaaatgtccattcggtggcagctaccacaatatgccctggttacagctggggaggtcatgttctctgtcacaggtcttgagttttcttattctcaggctccctctagcatgaaatctgtgctccaggcagcttggctattgacaattgcagttgggaatatcatcgtgcttgttgtggcacagttcagtggcctggtacagtgggccgaattcattttgttttcctgcctcctgctggtgatctgcctgatcttctccatcatgggctactactatgttcctgtaaagacagaggatatgcggggtccagcagataagcacattcctcacatccaggggaacatgatcaaactagagaccaagaagacaaaactctgatgactccctagattctgtcctgacccccattcctggccctgtcttgaagcattttttttcttctactggattagacaagagagatagcagcatatcagagctgatctcctccacctttctccaatgacagaagttccaggactggttttccagtacatctttaaacaaggccccagagactctatgtctgcccgtccatcagtgaactcattaaaacttgtgcagtgttgctggagctggcctggtgtctccaaatgaccatgaaaatacacacgtataatggagatcattctctgtgggtatgcaaagttatgggaattcctttataggtaactgccatttaggactgatggccctaatttttgaggtgctgatttagaggcaaaattgcagaataacaaagaaatggtatttcaagtttttttttttataagcaatgtaattatgctattcacaggggcctcaagaattggtatgtatgatgtgatctggtccagccagggcctggcttgtcagctctctaggtttgatatgactttagtaaatttgtcaatatagatggtaggaagcagaatgccattttattaaaacacaggagaagttatatctctctgattatgatagtattttatttacttatccaaaccctcctttctcagtatggatagatcatggaaaccagattagagatagtaagcattagtaaacattgttctggagaacaggaacaggtgtaagttgtagaaatcctgaagagccagtcattcttttacagagtacattcttcttagcctctatggcgctggtctatgcccttcagtgaacagttgtataaacaataattataatttgcaaccttgtcttgtcaaaaaaaaaaaaaaaaaaaa

SEQ ID NO: 51489 - DNA, 399 bp, Homo sapiens
aagctcaggaggtaaagtcagtggtaatggctgtccagctttggccatgtcagtaaggtgcattgcaagaataaactcttctgcttttagctgtccatcaccatcaacgtcagccagagtccaaatagtagccagctgagtttgagaaagatttgactgaagaagggcatttctagcttgaaaacctgagagatatccactcatacttttgtcaagagtattaaatttttgccgatattttaatcttgtaggctgaggaactgcccactctgaggtcccagtcttgggtgagttccctgagagtgaagcagtcgaggaagttgagctactagatcctaaatcaatcagagactgcgctttctgtatacttagcacctccaaatcctcccatcatcagac

SEQ ID NO: 51490 - DNA, 310 bp, Homo sapiens
gtgagcactgtgtactgtgctcggtagtcatacagtcttaacatgtaactacatacagcattgacatctgatctaaattttctcttccgagtacttaagccattaaaacatacagcagccattactctcacctgttgccatttctgctggaggtatgtatctttgactgagtacagatacttgttcatttggtcaagaactccctgataatagaccatcgcagagtcatagtttcccagcaatgcatattcacgagccaattttacattctcactaatcataagaagactcatgttcaactgtaagctaa

SEQ ID NO: 51491 - DNA, 1294 bp, Homo sapiens
  misc_feature (1)...(1294): n = a,t,c or g
aagccacattcctctggctcaaatatacttccagcatgtagtaaacagtccagaagacggtgaaacagcctaccagcaccagggtctggggccgaggcaagcacctacgtgaggcactgtttcccgaagcctacagcctttctcagcccaggacaatgagctcagaaagtctttttccttctagggactgcctttttcacccaaactgttccctctgccccctcccccgacaaggcctgtcctgttaagagttaggctagcagggtagggagcaatgctatgaaaccactgctggggacccaggtcttccccagtccttcaccccgcaggtcaaccctgagaaacacacttaagaacttccatcccccagacaggacagtcccatctacccgcagcttgagtcttggncctagtaccttgagggtgttgggggtgatggtgtaaccatcttcctcaggaattttcagccccggtgggcagggcagggcgaagtcatcgtgcaggtattttccactcatggcactctctaacagcctgtggagaagaaaagaggtgaggatgccccactgactatggttcctataccatctgccctcacccattttcctgccttacaggtgaagacagggaagccccacagcaaaaaggagaggcccagactgtgagttcccagcccggggctccatctaccggcttgacgctggaactgggaagcacagctggggttcagagggcgatgggctccctaggcggcccttcccctgtgactggccttccctctgacacatgcggctttacccacctttgtctgtccctgatgtctactgcactccacacagagccatatagggtcagctgccattgccggaggatgccgacctggaatgactcatcccctagggcagcaaggggcagctcgtgagccacgcccctctgtcagccatgccagacagcagaggccctgcccgccctgccacccaaaggggctcaggccacatggtctgctccaggagctgcctcactgtgtcccactgaccccaggttctgcagaagggcctcactgggtgcccttagggatggaaagggttgaaaggctgtactccaaagcagagtcttgcttttctctcccgtattttgggggttcagctgggattagaaaaaaatgtctttccaccaaattaaagaaagctttgaaaaccactggcctagagaatacctaactgactggaggatgggagggtggagctcaatttccagtctataggctgatactaaagatattcacaattcatgg

SEQ ID NO: 51492 - DNA, 3317 bp, Homo sapiens
agaatccagtccactgctctgatgccgaaggggaggcagaaagtgccacacttggatgcccccctgggcctgcccacctgcctctggctggaattagccgggctcttcttactggttccctgggtcatgggcctggcagggacaggtgggcctgatggccagggcacagggggggcgagctgggctgtgcacctggaaagcctggaaggtgacggggaggaagagactcttgagcagcaggcggatgccttggcccaggcagcagggctggtgaatgctggacgcatcggagagcttcaggggcactacctctttgtccagcctgctgggcacaggccggccctggaggtggagcccatccgccagcaggtggaggctgtgttggctgggcatgaagctgtgcgctggcactcagagcagaggctgctaaggcgggccaagcgcagcgtccacttcaacgaccccaagtacccgcagcaatggcacctgaataaccgacggagcccgggcagggacatcaacgtgacgggtgtgtgggaacgcaatgtgactgggcgaggggtgacggtggtggtagtggatgacggagtggaacacaccatccaggacattgcacccaactatagccctgagggtagctatgacctcaactctaatgaccctgaccccatgccccacccggatgtggagaatggcaaccaccatggcacgcgatgtgcaggagagatcgcggctgtgcccaacaacagcttctgtgccgtgggcgtggcctacgggagccgcatcgcaggtatccgggtactggatggacctctcacagacagcatggaggcagtggcgttcaacaagcactatcagatcaatgacatctacagctgcagctggggaccagatgacgatgggaagacagtggatggcccccatcagcttggaaaggctgccttacaacatggggtgattgctggtcgccagggctttgggagcatctttgtggtagccagtggcaacggaggccaacacaacgacaactgcaactacgatggctacgccaactccatctacaccgtcaccataggagctgtggatgaggagggacgcatgcctttctatgcagaagaatgtgcctccatgctggcagtcaccttcagtggtggggacaagatgcttcggagcattgtgaccactgactgggaccttcagaagggcactggctgcactgagggccacacagggacctcagctgcagcgcctctggcagctggcatgatagccttaatgctgcaggtgcggccctgcctcacgtggcgtgacgtccagcacatcattgtcttcacagccacccggtatgaggatcgccgtgcagagtgggtcaccaacgaggcaggcttcagccatagccaccagcacggtttcggcctcctcaacgcctggaggctcgtgaatgcagccaagatctggacatctgtcccttacttagcatcctacgtcagtcccgtgttaaaagaaaacaaggcgattccgcagtccccccgttccctggaggtcctgtggaatgtcagcaggatggacctggagatgtcagggctgaagaccctggagcatgtggcagtgacagtctccatcactcacccacggcgcggcagcttggagctgaagctgttctgccccagtggcatgatgtccctcatcggcgccccccgcagcatggactcggatcccaacggcttcaatgactggaccttctccactgtgcgatgctggggggagagagcccgagggacctacaggcttgtcatcagggatgtcggggatgagtcattccaggtcggcatcctccggcaatggcagctgaccctatatggctctgtgtggagtgcagtagacatcagggacagacaaaggctgttagagagtgccatgagtggaaaatacctgcacgatgacttcgccctgccctgcccaccggggctgaaaattcctgaggaagatggttacaccatcacccccaacaccctcaagaccctggtgctggtaggctgtttcaccgtcttctggactgtttactacatgctggaagtatatttgagccagaggaatgtggcttccaatcaagtttgtaggagtggaccctgccactggccccatcggagccggaaagccaaggaggaagggacagagctagaatcagtgccactttgcagcagcaaggatccagacgaagtggaaacagagagcaggggccctcccaccacctctgacctccttgccccagacctgctggagcaaggggactggagcctgtcccagaacaagagcgccctggactgccctcatcagcacctagacgtaccgcacgggaaggaggagcagatctgctgacctcagggcctgacagtgtgggacaggctcttctttcccaaaattagggagctcttgacagaaagcagttctgatgcttacatctggaatctgaggcatcctctgactccactcaaagagggtgagggccttcttaagatacaaatggtggaggattgctgccagagaagtctggtcagagccacagggtctgcctccagccaaacgggagcttttggtgagaaggtgttggacaggggattggcgcccccctttggtttggcctccatcctcatctctcttgggccaagccagctgcctaggtcccccaagcatgggggaccccttcccacatataagttgagaaggtgcctgccatagccaggagcgcatctcaatggaaacatcactggggtcacttgggaagaggacttcggggtagaggctgggaggagcccctggacatgcctgtcctgaaagcggctgcctccattatccattcccaagatgcctgatcagaaaccaaccatgaatgaacccctggctccttcaccacccccacgattggtatgatgctgccggcacagctgggatacacacggctcccccaggcctgagctgcttcactagggaatcctgcggcaggactgcagagcagatggcagatgcacatgttggaggagagagccttgggagccactgccactccagtcctgccaccaccctgtcttcctctgcaagtgctcagggaaatggccttcccgccggaggccagctatctgcctgacaggctgtgactcttctctcaaccttggccttctcccctcttctgagctagttggttgaattttttttaatgcttaagatttgtttttctcttttcacagcaacattttcttgaatttttttctgcacagcttttccaaaataaaaaccttccaaacaattctgccactcgc

SEQ ID NO: 51493 - DNA, 5554 bp, Homo sapiens
tttttttttgcagttattacttgtgacattttattggcgtatgacaatttacaagggtccctgttgcatcattatacatcacactgagtaagaatcgtttagccatctacattcaatgttactgggtaatatttttctcaaattataattcccaacactgattttacctgtgacaaaaggaacaatagtaattccttgaagaagactaactggaaaaaacattttgcttttagtataaaaattcctaggatgctgaaaggtacacatacacacctaaagagtcatggccttcttaaacagctttcttaatcctttctggaaatatcctttggttcatttttattgcccctctctaggcaaaacaaagtatgttaacgcaggtatcagtgagttatttcctagcacttgtaagcaaatatccttaccaagaggaaccattcaacttttataatatcgtaaagcgtggagttaagatgtgtttttaaaaaatatacaggctttttatatgcttggatctgaaaaaggtaacatccacaatgacattctattacagagttcttacaatcaccctagcctactacactctggtataatactctttcttcaattctgtttaacagaataaaagtaaccaaaggttaaagcaatgcatttgaacttaaaatataacctgcccacaggaattaagtagttttattcccactccctattacataatttctcagatccccttttacctattgtcttaagtggataagcacatagtcatgcacacagatttgatgtctaaccaagtaactgttatggtatttatttgtatacaataaaagggtcatgaaaattctgtgttgggaatcacatccatgttgctttcacacgtaaataagtattattctgaacaggagaatattagttatgccctgattaatgcaatacatacttcctttggcaggtatttcctctgctttaatagacaattttagaaagacatgttaacgggggaaaatcacacaatactaaggatctgagggccataaacatcacatatgttgagtttgcttttagttttgtttccaacagttcttaaccaatgttcctggctgtaatctaggtgctagacgcactgcaaatcctcgaaagtgtttaagatgaaagagcaatacacttaagatcttcaaaagtttacattaacagaataagcattagctccttttaacacacacacacaactaaattaacaaatgaaatgtgtctacttttatatatgcccataaagcagacacttaacattgaaatttactattttagattttcactcctttaagagctatcaatatagacacaaaagataattcacatttgaaaaattatctacctgaagaatagaactcttaagaggaaaaagaaaaagccattctacaaaaactgcaactgaaatgggggggaaaaaggttagatcaatgccgcaacaagcttcctgccaaaacttttattggtgacatttgaaaaacaatttttttaaaatactattaatgaacagtatgctgtgtttctctatttttactaatagttacactacaaactaatgttcagctcaaataaatatgtaagatatgaaatcaggtactaatgtatcaacttattctgcaggatagacctcctacataccaaccccaggattacagtttttcttctgtttaaaactaggatgttcagtagaaatggggtttctatttgcagtattgttacaaaccagtttcctctcacaaatagctaatatctaagaccatgactcaaactatcaaataggaatagaaagagaacacacagttttgaacgcaaatagaaaaggctcctaagaatgttctttataggccactgcttgctttcagtaaaaataacattttctcaaaacttttcaatctgatttttaatagcttgtactttttagctattggcaaagctttttttttttaattccttcttaagcatttgctcaagtgttaaactagcttagtttaccatagtaacaactttttgtctgtggtatacttcaaaaatcagtcaccctacgatgtagtgtgttcaaattaaacagatgtatacagttaaaataattagtgtagtctctataaacaatttctgttccaggatttatatgtagagctaacgtttacttcagaataaaacattgacaaacagggaaggaagagaatcagaactttcacagagctgtacttgaccatatcttatagacaaagcagaattacaatgcatgtaacaaaaacgttaaaagttttaaaagttgatagttacaaatatggtacgtaacaattttctactttatttcagtacaattttcaacatacagtctactatttctcaagatatttgaagacttaaaacaaaatttctatagactacttgcaaacagtaaaatttaagtaaaatgcttacattcttatttgaaaacaaaaatcaggtaaaaaaaatggtgggtgcaagttctgctctgttgtaatcttacttcatatttattattccttttcttccttgcgtctgtccttcttttcttcattattttccatggtctcttcttcatcttcaacaatcccatccccttggtatttgtcatgagtccatttaggactgctacctgattttttgaagttaaagcgccctctgccacgttgaaaagtaccacgacctcttcctcttttggcccaataatccacaccatcatctctgtcgtcatgcaagaagtacttcttgctctttggggtatattctggatcccattcctcttccttcggtctcttttgaaaagtagtatttgagttgtttggaccagtatttgtcccagcaaaaactcctctggctcttcctctgcctctaattcgaaaaaaggttcctcgtggtcggctaactcctgcaaagcctgagtattctttcatttcatggtgagttttaaattcttcttctctttccttcttactctccttttcttctcgagaactgggagaagaaggtgatgctgaagaggatgaagatcgagaatgatcttgctctcttttatgtttactgtcatctttgtaagatttgtattccttgtaatcttttggagttttttcctgctttcttgatccactggattccctggagcccttggaatctccccgttctttacttctttcttttctacggcgatcaatgtcatgccgaaggtcagcagagtcacaccttaattttttatctcccttttgattttcttctttaaaaactctctcttcccctgctaaacgggtatgcttcctcagggtacttggtgagatgtcaattctcctgtgtatttcagggctcttttgccgagtactatgttcttcagtggctttctgatacgaagtgaaccgctcgtttagggtcattgcagctgacttgaagtattgctctttaacatgatgaaccaaggacacaatgtgttgaataaatgactctgaagtgcttttgctggcctgtggcaacttaatgtggtcaaagatggatcggaattcttgctccttcttgacagaatggacaagtgtactagcaagcagcctgtctttagtcaaggaagcaggtctgttagaatcatcaagaggaacaggtgccattttgagtttgacttcaggacggtgagaatcactcgctatcattttgatcctaagtgggctttcctctctgaaggtagacttttctcgtgcatccagattcttgtgtagagggggactgtaatcaaagaggtctttgagcttttcagactttacctgctcaggtgactgagtttctttctttactgttattctttcagaatttttgtcttcttctttgtgcttatcttttgtagtgctaggcctttccactacatatccagtctctttaagtttataatttttttcttctctaaatccatcactttctctattgcctttcagtgaaactttggacttgtacttgagtccttcctcctcagtattccggtgagatgcagtagcaaaacttttaccctgatctgcgaggactgacttcctgaactgtctataatcctctgtctcctctgtgtcatccccttctgaatcattaaacttttgttttccagactctttatcactgaagtaatctagagcttcctgatcttcccattctccctctgccctccctttctctgatcctttctcttttgaagcctctttatccctggtattacccctatcaagcaggaatactctagactcttcatctgtgaacctttttaagaacttcccagtctttgcagtttcctgatctccaccatcaggataaaacgaggaacggcccctagactcatctcttggagcattctgtggtgcgattgtctttgcaggacttcttcgtgaagggatgtgatgaattggactattctgagaaggactgtatcgactagatccatttccaacagaaccagacccagacctttcaggactatgctgaatggaatgtgaatgctgagaaggagtattttttgcagagtgaactgtactgagcatgggagcatcagagcaagatgaactctgactaggtggtgtagcaataggtgaaggactatggggtgatctaggactattatcataagctgaaaggccaggccaaatatcaccggatgtggctgatgacttattaaattcatcgatagactcagatgggtcatgttcaaatgtatctttcggttcctcctgtgatttacttttcaacggactctcttcttggggttccccttcagcttttttggtttgtttttcctgagaccctcgtcttttagaaacaggagatttgctatatggggatgaagaacgagaagaggatgatcttggagacctagaagatctatatgaccggcgagatctgcttctggatctttgagaagaaacggatcttctttttggactcctggaacgtgaacgacctcgtctaggactcctagagtgccttctattccagacaggtctataaccacctcgatgatatctacctcctcctccttgataataccctctaccccttcctctgtacccataaggtcgtctcattcctctattatttctgtaatcgcgacgataatctctagaatacatacgatctctactacgagaccttgaatatgttctggaacgagacctaagaactgtatcgcttctttctagaatgagatcttgatcttgatcgagaactagactgtgatctagactttgaccttgaagaatgtgatctagaattggagcgacccatttcttttctccttggttttatgcaggatcaagaagtcaagtgaagtctttgagatactgtaaaaattcttcctggagagaatgctctgagaaattaaactctaaattcgaattcctgacacgccgaatcgcggttccgggaatttatctccgttgcaaccacacagcggccatttcccgactcaagaacgcgaggaaaaccatagagctaccttcgacgcgctagcacgtctccgtcacttccgatctggggc

SEQ ID NO: 51494 - DNA, 1702 bp, Homo sapiens
  misc_feature (1)...(1702): n = a,t,c or g
gccgacgcctactactactactactactactaaattcgcggccggtcgacttttttttttttttttgccacactggtttttgttaagacctcatcagtcctgggtgcttgccctcaattcctccatagctatgttagcatatttaatgtcttttgctattaatccttaactagttaatccttaaagggctagttaatccttaactagtcccttcattttgtgcattatcttccagtattctccttctctttttttacttcttccctgctacccatgtgctcttggcgggtagttaccaacatatacagaatctgcttccctttgcagcatttcatttgcataaagactggatggcactggtttgctccatctctgattattgtggctgttttgaactttgtgaaaatactcccttggcacacataaacaggaagacacacaaagatatacacaatttttagtagaggtggggttttcacccatgttggccaggctggtcttgaactactgacctccggtgatcccacccatgcctgggcaagccctgctcctgagccagtctttgttattcatgttaagctgaggttgcagtgtggccctcttgaagtgaagactggttggttgggaggaactgaattgtgaacaaagaagctagttcaaatttgcataaatcatccctgctatagcttagattctcctaggtagtagtttctttcagaaggaaaatgagctgtgcaggtcatatgagggtcttcttatcctattatgatatctctagtaactctggcagtaacagaagcaaagtaaatctggacatgacagacatttagacgaatctggcagtacactgagttttaactggacaccaagcaggcaaggctggaaggttttgctctctttgtgctaaaggttttgaaaaccttgaaggagaatcattttgacaagaagtactgtgtagtctgctgcagtcttctcttgggtccaactggcactggcctgttagtctattgggaggcccagcaggtcacaactgacgtcccacagccgccttgctatagtctcattacgagcttgggcagagacccatgccacatgacagtcactgaaatgattcccacttagaatctcaagaccttctgttaaggcacagtgcaggctggtctgggctccctgctgaggagtcttgatgaaaaaggagaaaagccaccacatccatctcatgaaagatgagtgccgaaccagttcagattggacctgtgccagggtgtacagaatacgtcgtaacgccagagccttttagtctccgggccagttcctgggtgaagaggatgttggctagcttgctgtgacagtaggccaggcctgcattgtagaatttctcgccctgcaggttatggaagtggatccttcccaggtgatgtgcgagggaagacacatttactatccttgatggggctgattcctttagtttctctagcagcagatgggttaggaggaagtgacccaagtggttgactcctatgtgcatctcaaagccatctgctgtcttcgagtacggacacatcatcactcctgcattgttgatcaaaangtggaggtgcttttcctcagctaagaagcccttagcaaaagctcgaatagacttagtatcagacaggtccagtttccgcaccaacacctgctggttccctgtcgtggtctg

SEQ ID NO: 51495 - DNA, 565 bp, Homo sapiens
ttactttatacttttttataaaaataaatattcttacaaaaggacaggcgctgtgtctgtctggctcaccattgtacccaatacccaacagggtgccaagtacccaatacccaacagggtgccaaggaacacaaaaggcactcaaaatatgtttgttgattggagtttacaaggaagaaaggtattttcttatccctctcttcccttcccacccaaacatagcttcttctaagaaaagaaactgaggctgggcaaggttaaaagctagctcctggtacttttgcatccacactcagtttacctgtgccttaaaccagacttcatcaaacttcagtcttcacaagtcacttcaccatttttgctctacctacttactgcctgtgatagaaatcaactcagtttgtttagcggtataaacttaaaaggaactttagatcaatcacttgtcttagaaggtaaccacaaaaatacaaagcaataaaaataaaaacatgttaacatgaatttcagttgcctgaaagctgtaagtctgcttttttaaaagagaaattggagttaagcagac

SEQ ID NO: 51496 - DNA, 396 bp, Homo sapiens
caaaaaacatgaattccccccaggaatcattcaaaatgggggaaggtttgggggtttgggttttttttttaccttttggaaaagaaaccgtcacattgctttggaaaaggttgagaggagacccctgttaagtcaagaagaaagtacagaggatgtcagaatctgatgagaacagcacattagtgtttattggagactccgatcttaactctcatttaattaatctgagctctgaaaacctatcttgcagcatttatctttaaaagagcctggttaaagtaaacctatactaacaattttgctttttctaacagtttgaggaagacctttttaaccaccacaaaacattctatggcaattcttgaaaatctcttaaattggagtctattatggccc

SEQ ID NO: 51497 - DNA, 592 bp, Homo sapiens
  misc_feature (1)...(592): n = a,t,c or g
gtcaatggagctaaaaccctttactatttctgacaatagttcctcccttaattaggatactcctgctttcaagcgttgtagcctaaaactgcaatcaaggcccaaacacaaaaacgtactgagtttgtcctctgtgcctggcactaggaagagcaatagtggaaccccctaagtggttggtttgcatttttttacgttcctagactacatagcatccctttagcatggttggcgtgcatttttaaagatcctagtctacatagcattcctttgggtgtatcttttcagtgtcaaagcaatttcagcaaatacagaattacagaatattgaacaataataaatgctttgtaggctgcttatggaacacttattttgtgctaggtaccttttattagttaacttatttctgtgagggaagcataatttcagctactttactaaaatggaaactgagactcagctagatgaaaatatttgcccaaagtcatatagccagtaaaaggtagagctagtatctgacagacttgatttttataaagctcatgtactttctgnctattgctaatgtggtttcatttaaagtttttttccc

SEQ ID NO: 51498 - DNA, 312 bp, Homo sapiens
attaattggccttttagttaaaaatattttttttaaggggcaagcattaagttcttttagtactcagtaaaatacaggtaggtgtatatcagtatgaagacacttgaactacaaacttctctacccaaagcttcattttgttccagttgtcaaagtggtgatcaaaatctgttagcttgggttacctctggctgttgggtacctgcttttctgtttgaggaagactggaacatgtactaggtgatgagtaaaggtgcgtgttttcagtactgataagtggccaggtttttaacctgtaagtgactgaagatc

SEQ ID NO: 51499 - DNA, 788 bp, Homo sapiens
tttttttttttttttttttgagctttggacaaatttattgaaacatacaggcggctgttagcagagaaatcattccatgattgatgtgttacatttggccactaccttgaatgtataatttaaaaattatatttttcacaactaagcctttggccaaaaaagtcatttagcacatctttaaagatcaataagaaatggattttggacattaaaaagatcaagtcactgaattaaacagtagcaacccccattaatctagaatcccatagtgctgaaggtagaggtgtctgtgcaaagctagtcatttgttaacagcaatcagaagagatgggggcaggcacacctgttcagaggtggcagcagagctggcaggacaggacggctgggctggtctggtcaggtgagcatgtcccagagacagcagcaacagagagccgtccagcaggctgtgaggcaggtggatggtcctagctcatctcttcctttggtcttctaccacatacactgtggttttaggaggctcctgaggtccaccctgccagccgtactgtgggtatccttggtaggggtacccttgaggaggtgggtagggtccccccataggtcctggacccattggttgtggtggataaggtgggtatggggccgttggaccagggcctggatatggtggagggttctcttggttcatcggggacctgtaaagtgcacctctcctctccacgaaccgactggataacggtcgggtctgaacctgaggagcccggaccagcccgcagtagactttg

SEQ ID NO: 51500 - DNA, 439 bp, Homo sapiens; identical to SEQ ID NO: 28540
  misc_feature (1)...(439): n = a,t,c or g

SEQ ID NO: 51501 - DNA, 1352 bp, Homo sapiens
gacgccttgacagcggctttcaacccccacctcagcccagcaattcggcagtttggagcatgtgaacaccttgagccttgatgagttccagtatgtggtatattatgcagagcattcagagcaaatactctctctccgagcgcttaatccgaacaattgctgccatccgttccttcccacatgataatgtagaggacctcatcagagggggagcagatgtgaactgcactcatggcacactgaagcccttgcactgtgcctgtatggtgtcagatgctgactgtgtggagttacttctggaaaaaggagccgaggtgaatgccctggatggggtataacccgaacagccctccactatgcagcagagaaagatgaggcttgtgtggaggtcctattggagtatggtgcaaaccccaatgctttggatggcaacagagataccccacttcactgggcagcctttaaggaacaatgctgagtgtgtgcgggctctcctaagagagcggggcctctgtcaatgcctggattacaacaatgatacaccgctcagctgggctgccatgaagggaaatcttgagagtgtcagcatccttctggattatggcgcagaggtcagagtcatcaacctaataggccagacacccatctcccgcctggtggctctgctagtcaggggacttggaacagagaaagaggactcttgctttgagctcctccacagagctgttggacactttgaattgaggaaaaatggcaccatgccacgagaggtggccagagacccgcagctatgtgaaaaactgactgttctgtgctcagctccaggaactctaaaaacactcgctcgctatgccgtgcgccgtagcctgggactccagtatctccccgatgcagtgaagggccttccactgccagcttctttgaaggaatacctgttacttttagaatagccggagaagatgtttgcaccatcgtgcaggcagctctgggtgaggttgtccctgcagtactccttgtcacagaaaacagaaaaacagttgttcctgttgtgtggtttatagatttcgaagcaacatgtcacaacaataacctccatagcacctccccttcccaaaccaaacaacccaacaaaaaaaatccctcacttttgttttctgtttattgcttacctggctttttatattgcattttgcaaaagaagaggtctccctcaatcctcccctttagggaaggagtcaacagtgtaactaaatttctctaggaagatggaaagtacttaaataatgtgtgtgtggttttcctttggggacgtggttaacggtccagaagaatcccttctagaaagcatttta

SEQ ID NO: 51502 - DNA, 402 bp, Homo sapiens
cctggatggcatgggattgagctttcgtctgtgcagaattttacagacagactcatgttctgccaggcagacattcagcccttgatcttctcacagtcgccattgtgaaggagagcaagccctttctccacactctctgtggactactttctaacttttctattgtcatgggagaaaaatttaaaaaactgattaaaagggggcaagtgcatggcttctatgaaaactctaccgctctaaactgtgggactgcttgaaactgtttgttttggctggcctcggtggcaagactgacatatttatgtagcaagctcacatgtaatatttaacttgggaattttacacataggaatggatggaactaaacagaatattaagggtttgttgttgttgttggtttcc

SEQ ID NO: 51503 - DNA, 247 bp, Homo sapiens
aagggatggggagagttggaatttggagctggagacctacaggggcctttgttcggtctcaagctgttccgtaatctcacaccaagatgctttgtgacaacaaactgtgctctgcagttttcatcccgtggaatccgacccggcctgaccactgtcctagctcggaacctagacaagaacaccgtggtacccagcaggtggcactgcagctccccgctcctgcaggtccagcgtcctcacaggaaca

SEQ ID NO: 51504 - DNA, 770 bp, Homo sapiens
ttttttttttttccaagtgatataatagttttatttgagacataaaaacacatgtgtttctattacatagtgtggggtttagggtcctggtttctaagacaagactttatttcaccctgtatcacagcttcctgggaaatgaattagggagcaagagacggcctggcaagaaaatcattattgttgctgggaagttgcaaagaaaggggagagtttattcaaattagtgtaacagagcccccaggatgaagagagtggtgcagggaaaaggtctaaattcctggtgttggtggggacactggcacatcccacagcaaggactcagccctcaacggcggcggctgggtcttgggaggggagtggtgggagggtaagggctcctcagctccctccctggactcccagttcagtcaccctttcccccggaagaattcaaagaggaagggcagggtctatgtcatggacactgctacttgttcgatgaagctggccaggtttatgtcccgttctgaaaggccggcacactcatgggtgctcagcgtgatgtggaccttgttgtacacgttaaaccattcaggatggtggtccagtttctcagcctgcagggcaactcttgtcatgaacccaaaggccctgttgaagtctttgaaatgaaactgcttgaagatggcatcacggccttccagctcattccaccccacagccctcaggtttggcagcagctggtccctctcctcagcgctcagcctgtgtgctttgccagccatggc

SEQ ID NO: 51505 - DNA, 1057 bp, Homo sapiens
  misc_feature (1)...(1057): n = a,t,c or g
agcatttgtgctgtctacctctcactgggtcctggtgggggtcgggctcccttctcctggggtgattgatggcctgagcctggggtcctggtagtagagacccagctggcctggggtctgctttccgacattttgcctctctcactggtcatgtatttattccatatttatatggtctacttcctgtggctgggagcagcagctcctgaaggttccgtgggggtgcggggggttggacaggacactccttcttggaaggcaccaattttcccagccccactcccannnnnnnnnnnnnnnnnnnnnnnnnnnnnnnnnnnnnnnnnnnnnnngattcaggccttgagagtcaagcccaagagctcccttggccctgttccccactccctccactggcctctgctgttcctgtctttgctcacaccctcacagctgctctctggcagaggtgtgcatagccctaggagcagctgcaattgcacctgagggacaggccctagagtttggtggcccaagtcctgaacccctcttagaccaggtgaggtgcagaggtggttgctgcttccagtttcccttcagacttagctgtgtgaaccccactcctatcctttggccttagttttcccatctgtaaaactcagaaacgcagttgggaaagtccttattcatttagtaagcgaatatattataatatgtatagagcgccttttgtgtaagtcactggtcagaatcctcactgagctcccagtccagagagaagccagacaattaaaacagtaatgacaatgatgtgtgtggcctttgtctactcaaggtccctttctgctcccctcttctagtctcacttcccaaggctgtgagctctaagccctccctatgtggagagaagtcaccctccccttgctccatgttcagctcaggaacttgcgtggggttgagctggtacctacatatgctgccaagtggctcaccaggggaaatgggttgtgtatgcgggcaggagggtcaggtccttgtcccactagggggctaggtttgggatctccagggtgcagcc

SEQ ID NO: 51506 - DNA, 473 bp, Homo sapiens
agactagcctcactggagataataggtgacattattatgcaaagtggtttcagttcccttgtcttgtttttggaatagtataagaggcctacaatacgaataaataaggcccatcacaagcctcaccaaaggacaaaactaatccacttctgaagaaggctctttgttgggccagatcaaatccttggacagaactgtactcttaatctctgtagtgaaagtggggggtagtttaagaatttattaaccttctaccttgagcaatccctcagaagtaagaggtgtcaggcctctgagccgaagctcagccagttgtaacccctgtgacctgcacatatatgtccagatggcctgcaggagccaagaagtctggggcagctgaaaaaccacacaagaagtaaaacagccagttcctgccttaactgattaaccaacattacaacattccaccattgtgacctgtccctgtccta

SEQ ID NO: 51507 - DNA, 395 bp, Homo sapiens
ttttttttaccaatattcccattttaatgatgagaaaactaaggttcagagaagtaatttgcccaaggtgacagctgaacatggcagaggtgcaatttgaacccatgtcttcacatcccagtgctgtgctctctaagctccactatgtgggatgttttattaccactggatcgaggagacctccatctaagctgtattgattcttccaattgggctctgttcagatgccagagtaaagttgtcctttatcactgtgttgaggctgatagcaagggcctgcgaagtgtcttagatgagttgactttgaacaagactaacctagagttgaaaatggaaagccagacggagaagctgaattacctcagaaacaatcatgaagaggcgggaactacaca

SEQ ID NO: 51508 - DNA, 336 bp, Homo sapiens
cctagtagaaattagaggcagagaagtagatcagtgaaaagattggttataaatcaaaattacaaatgcacctaaaactttggttcacaattccacttctagaaattatcctacccatatagttacacatttgaagtaatttagatgcaaggttacttatagcagtgtgatttataatagcaagggaccattgtttataacagcaaaaccatgtaaatatgcatcaatatcaacaaggcactagttataccacatccacccaattaaatgctaactagttatagcacagaatgagaaaggtttttgtgtacagaaatggaataatggccaaactca

SEQ ID NO: 51509 - DNA, 1516 bp, Homo sapiens
ccggccgatcccacctctcctcgaccctggacgtctaccttccggaggcccacatcttgcccactccgcgcgcggggctagcgcgggtttcagcgacgggagccctcaagggacatggcaactacagcggcgccggcgggcggcgcccgaaatggagctggcccggaatggggagggttcgaagaaaacatccaggggcggaggctcagctgtgattgacatggagaacatggatgatacctcaggctctagcttcgaggatatgggtgacgctgcatcagcgcctgcgcgaggaagaagtagacgctgatgcagctgatgcagctgctgctgaagaggaggatggagagttcctgggcatgaagggctttaagggacagctgagccggcaggtggcagatcagatgtggcaggctgggaaaagacaagcctccagggccttcagcttgtacgccaacatcgacatcctcagaccctactttgatgtggagcctgctcaggtgcgaagcaggctcctggagtccatgatccctatcaagatggtcaacttcccccagaaaattgcaggtgaactctatggacctctcatgctggtcttcactctggttgctatcctactccatgggatgaagacgtctgacactattatccgggagggcaccctgatgggcacagccattggcacctgcttcggctactggctgggagtctcatccttcatttacttccttgcctacctgtgcaacgcccagatcaccatgctgcagatgttgggcactgctgggctatggcctctttgggcattgcattgtcctgttcatcacctataatatccacctccacgccctcttctacctcttctggctgttggtgggtggactgtccacactgcgcatggtagcagtgttggtgtctcggaccgtgggccccacacagcggctgctcctctgtggcaccctggctgccctacacatgctcttcctgctctatctgcattttgccctaccacaaagtggtagaggggatcctggacacactggagggccccaacatcccgcccatccagagggtccccagagacatccctgccatgctccctgctgctcggctttcccaccaccgtcctcaacgccacagccaaagctgttgcggtgaccctgcagtcacactgaccccacctgaaattcttggccagtcctctttcccgcagctgcagagaggaggaagactattaaaggacagtcctgatgacatgtttcgtagatggggtttgcagctgccactgagctgtagctgcgtaagtacctccttgatggcctgtcggcacttctgaaaggcacaaggccaagaactcctggccaggactgcaaggctctgcagccaatgcagaaaatgggtcagctcctttgagaacccctccccacctaccccttccttcctctttatctctcccacattgtcttgctaaatatagacttggtaattaaaatgttgattgaagtctggaactgcaaaa

SEQ ID NO: 51510 - DNA, 454 bp, Homo sapiens
gcaaaacatttccctgctgggggcggcgaccaccgtgagcgtcccggaaggcggcaaagacgctccgtcgcgcacgaggtggcctcgttggctttaccttggttcgcggtcgtccttggttatcgtgagcgtccgcgagtctctgggaggccaagcctaggggcgccacagcgcctgcgcgcgtacggcggccggaaggggctagaggcggctccctgggtgacaaccgcgcgccccacctttccccacgttggccgcgaagaccggctcaggaagcatctatcggctgcacgccaacatcaacacaggcgaagatggtctccaagcgcattgcccaggagacctttgatgcagctgtgcgcgagaacatcgaggagtttgcgatggggccagaggaggcagtgaaagaggccgtggagcagtttgaatcgcaagatgctcagtgacctccagg

SEQ ID NO: 51511 - DNA, 801 bp, Homo sapiens
tttttcacagcacacacgtggccctcaatgaagggggttttattggagacacatcagaagaagttagggaaggtgtggcacggcggcacgtctcaagcagccggctgccacagggccctcagcccacccttcccagtggtcacccctccttcctgtgctgggctgcaggcctgtccacccatgagtcagtgttcctgtttcccagttccacagaccatgggtccccaccacctcagcggaacagcagggtggcaagggcgtgggcaccagaggagccactgggctgcaggaggacagccctgtgggaacactgaaccaagctctactgcgcccatgctcggagcccacagccacagggccatgtactctccaaggttctgtggattaactcctgatgactttttcacgagttccttgtgggtgggtgtcacgtggtcacacacggaatgccgtgtcttacagtgaaggctgggagcagaacggcctctatgagttcttccgagcaaaaatgcgggcccggcggaggaaaggccaggagaagaggaacaggtaaaagcgcagatgtctgcagtggccggggggccagggtccacagcttgtgatgggtgggagcagaccccagatacactcatcacgtccaccctcacacagcctgtgcctatggggcggtgttttccacaaggcctgaattcacacagcagcaggctcgcccacactatttaggaacttggtaccgttgctgtggctatggcgccacatccacagccagagcccctgcatctggggtggtctaggaacctg

SEQ ID NO: 51512 - DNA, 339 bp, Homo sapiens
  misc_feature (1)...(339): n = a,t,c or g
ctaaaaccctgccacctcaaagcaataataagaggtgccttatgccatctggaactgaaacactttgccgaggccgtgaactggtgtgatgagggactgcaaatagatgccaaagagaagaagcttctggaaatgagggctaaagcagacaagctgaagcgaattgaacagagggatgtgaggaaagccaacttgaaagaaaagaaggagaggaatcagaatgaggctttactccaggccatcaaggctaggaatatcaggctctcagaagctgcctgtgaggatgaagattcagcctcagaaggtctaggtgagcttttcctgggtngnctcagcact

SEQ ID NO: 51513 - DNA, 569 bp, Homo sapiens
ctcaaaccctcatggagctgcatcaagaaaaactgaaagaggaaaagaagaagaagaaaaagaaaaagaagaagcatcgaaagagcagttcagatagtgatgatgaagaaaagaagcatgaaaaattgaaaaaggcactgaacgcagaggaggcccgccttcttcatgtcaaggagaccatgcagattgatgagaggaagcggccttacaatagcatgtatgaaactcgagaacctactgaagaggaaatggaggcatatagaatgaaacgtcagaggccagatgaccccatggcctctttccttggacagtagcaactagtcagaagaccatccaagatagatgcagctgatacattcttttcagcttcttattgatgattgtagatagaaaaatccttgtttattcttcttgctgcctggctttaataaatatttcagatgcctcacagtaagttcactcctttccatactgaggaaacaagaaaagaagaagaggcacatgaagtgtgcttttgggaatagaatttaaaattggattaagattttatttccagttttttttattta

SEQ ID NO: 51514 - DNA, 766 bp, Homo sapiens
  misc_feature (1)...(766): n = a,t,c or g
gcaaaggaaagtggaagttggattctgaaagatcgaggtgcccacaggaattttatggtcgtcggattttgaagacttgaactagactgggggttctccttgcatttcttgcctgttgcctatctttgtcctctctcttccggcttcgagatgaatgtgcagccctgttctaggtgtgggtatggggtttatcctgccgagaagatcagctgtatagatcagatatggcataaagcctgttttcactgtgaagtttgcaagatgatgctgtctgttaataactttgtgagtcaccagaaaaagccgtactgtcacgcccataaccctaagaacaacactttcaccagtgtctatcacactccattaaatctaaatgtgaggacatttccagaggccatcagtgggatccatgaccaanaagatggtgaacagtgtaaatcagtttttcattgggacatgaaatccaaggataaggaaggtgcacctaacaggcagccacgtgncaaatgagagagcctattggacntggatatggggaagggaatgcttggtgcccaggagctctgccagaccccgaaattgtaaggatggttgaggctcgaaagtctcttggtgaggaatatacagaagactatgagcaacccaggggcaaggggagctttccagccatgatcacacctgcttatcaaagggccaagaaagccaaccagctggccagccaagtggagtataagagagggcatgattgaacgcatctccaggttct

SEQ ID NO: 51515 - DNA, 1440 bp, Homo sapiens
  misc_feature (1)...(1440): n = a,t,c or g
tgctttcagagttattattttaataaaggaagatcngggatgggctggtgggccattccagcttgccgaaatcaaagccatctgaagcctgtctctggtgaacaaacttcctctctggcctctcaggaatcagggtggacatcttttgccccaatgagcttccctctggatctctcataatcctccttgtacttcacctcgctagccaggtccctcttggctttggctgccaggaaggtcaaggaatcaagacgcagctcaaacccttttgctttctggttttcccagctgctcttatacagtttctcgctgagatttgcagcattggctcgggcctgcaggaagagaggctcgtctttgctgatggtatactgatggacagactgctcatttcctggccttgtaggccaccccggctctgtagctcctggctcttcttggcgtgctccatctgggagctgtcggtcacgctggtgaacttcagctcatcgaccctctgccggtagtttttctcgctgaccagctgtccagccttcttggcttgttccaagttgagactcccctctgtcagccacccaactcccttcatccatgccaggtcagccttgtactgcagctcgctctgaagcccatagaccttcttggcccactgagtcttcatatcttcaggcagcacagtgtattcatgcagtttcttcctgtagtccaggtcactggcgagagtttgggccttcttagcatgcctgatgtttaccatatccatgggcaggtgaaaccgggtcttactctcttcaaagcctttcttatattcaacctcactgctcatcttagcaatctgcagggagtgcagaagcctagagtcgggctgttcccatggctttgccttttgtcttttcatattcttctttatatttaatattgctagcaagctccccagaggctttggcggccagcagagacatggcatccagcttcatctcaaatcctttcccctttgtcttctcccagccttctttatacttaacctcactgaagagtttggcattggttttggccttcaccagctgaggaacatcctggggcaatgtgtaattcaacttatttttctcatagtcagcacggtaattcacatgactcagctgctgggcattgattttggcttgaacaatctgtggggtgtcagtcaccaagctgtacttcaacttgtcgatgctctgcctataattggcatctttcaagggcaccagtttcatagctgtttgataggaaggcgtgagagtggctgggtagttgtagtcgacaatatcatgtttataatcagcctttgtaggcaacgttgcttgccaggctgcccaactttcatagcatgcagagtgcgtctgtccataccaactccttcaagcgggcccctcagtggttctgttgtttccttanattata

SEQ ID NO: 51516 - DNA, 1761 bp, Homo sapiens
gaaggcaggagaactcattagcgagaagaagtaccgtcagcatccagatgctttgaagtttaccagtattaaagacactccggagatggtccaggccagaattagttatacccaagcagtggatagattatacagggaacaaggagaaaacataaagcatcattacacaccgactgctgacctccctgaagtcctgctggccaagctgaatgccatgaatatcagtgagacgcgttataaggaatcctggagcaaacttcgagatggtggctataaactgaggttggatgcccttccattccaagcagcaaaggcttctggtgaaatcataagtgattacaaatacaaagaggcatttgagaaaatgaaaggacagatgcttggttcccggagcttggaagatgatatcagccttgcacattcagtgtatgcgacctcactgcagagtgatgtgaattacaagaaaggctttgaacactcaaaggtgcagttccatctgcccatggacatggtgcacctggtccatgccaagaatgcccaggctctggccagcgaccacgactacaggacacagtatcacaagttcacagcactggcccgaggacctgaagatggcctgggccaagaaagcccatgccctgcagagtgagttgcgctacaagtcagacctgatcggcatgaagggcataggatggctggcgctgagatccccacagatggagagtgcaaagaaggctggagaactcatcagcgagaccaagtaccgtaaaaaaccagacagtatcaagttcaccacagtggttgactccccagacctggttcatgccaagaacagctatatgcactgcaatgagcgcatgtatagatctggagatgcagaatccctgcacagatacaccctgatccccgaccatcccgatttcacccgagctcgcctcaatgcgctgcatctgagtgacaaagtctacagaaactcctgggagcagacccgggctggcagttatgacttcaggctggatgccatccccttccagactgcccgggcatctagggagatcgccagtgatttccggtacaaagaggctttcctgcgggaccgaggcctgcagatcgggtaccgcagtgtcgacgatgacccaaggatgaagcatttcctcaacgttggcaggctccagagtgacaatgagtacaagaaggactttgccaagagtcggtcccagtttcacagcagcacagaccagcccggcctccttcaggccaagaggagccagcagctggccagtgatgtgcactacaggcagcccctgccccagcccacctgcgacccggagcagctgggcctcaggcatgctcagaaggcccaccagctgcagagtgatgtcaagtataaatcagacttgaacctgaccagaggtgttggctggacccctcctggctcctacaaagtggaaatggctcggcgggctgcggaactggccaacgcaaggggcctgggtctccagggagcttaccggggggcagaagcagtggaggctggagatcatcagagtggggaggtgaacccagatgccactgagattctgcacgtcaaaaagaagaaggccctgctgttgtgagccatgtccaccctgattcctgagaggccagagaggaagtttgttcaccagagacaggcttcagatggctttgatttcggcaagctggaatggcccaccagcccatcccagatcttcctttattaaaataataactctgaaagca

SEQ ID NO: 51517 - DNA, 594 bp, Homo sapiens
ccgttctggaatcagcttctctcattttctttccctgcaccaactagcagtagtgagttgaaactcttggaggaagcaaccatttcagtctgcaggtcattagttgaaaacaatcctcgaacaggaaatcttggtgcactaattaaggtcttcctttctagaaccaaagaactaaaactttcagcagaatgtcagaaccacatcttcatttggcagacacacaatgctttgtttattatttgctgtttgctgaaagtgttcatctgtcagatgtcagaggaggaattacaacttcattttacttatgaagaaaaatctcctggcaattacagttctgactcagaagatcttttggaagaattgctgtgctgtttgatgcagttgatcactgatattccactcttagatattacatatgaaatatcagtagaagctatatcaacaatggttgttttcctttcctgccaactcttccacaaaggaagtttttgcgacagagtcatcagccacaagtatttgatgcgaggtccatgttcttccattacaccagtcaaacttgtggaaggaccttattatattaacttttttcagaca

SEQ ID NO: 51518 - DNA, 951 bp, Homo sapiens
  misc_feature (1)...(951): n = a,t,c or g
ttttttttttttttttttgccacaaataaaatgagtttattttatattaaagttatcaaaaaacacacctgtaaaattacccacatactaggcttagagatagccttttacaaacagattattaaaaatctgcaaacttattttctcttaactattaaagtacatagatttaaaaggtgttagaaggcaaaatgttaagtcatggtcaatgtcttaaaaaagagttaatataattaaatctgtagcatactacaaaaagattaaatcttaaaaatattttgggaaaaaagctataattttctttctgaaaaatttaatcttaagtgatatttactaagaaatatatactgcaaaccacaataacaatgatcttctcaaaatttgcctaattgcttcacaaatgagtcaacttacaaagaagaaaacacagaaaattgcttttaaatatataactccttaattttcctgataatcaaatgaaaatttagtccatcccaattaatacaaattagactcatgcttaatgtaagatatcattatatatttcttaacaacataaaagttcaagcatttttggaaagcacagactgtgttattctaaaaaaggaaaaaaaagaaaaaaatatttaaccacagaaatttggaatatttatatactttataacactgtagaaatctttggtggtgacatatggaataagatccctgaaaatactttaatcattttgtcccatcaatcagtgtagtcaagtatttataatcagtaattttggcagtataattttttagcnnnnnnnnnnnnnnnnnnnnnnnnnnnnnnnnnnnnnnnnnnnnnnnnnnnatattgtgaagtatgtgagggggatcttatgcaggacctaggtgggcttacataattaattatttagcaataaggcttatttctggctcctttttataccaggaaaaaag

SEQ ID NO: 51519 - DNA, 388 bp, Homo sapiens
tttttttttttttttgttgtcattgctttattactcatagtttccaagcaatattacatatataaaagtcattttaaaaacaaccaggtttgctagaaaagtgttttttcttggaatcatggatttctacaccattcatacctggagtcctttatattaaatatattatttacgcaggcactaggcaaaattgaagaagttttgagttatctcctccataacccccaccttcccacattcccacaaaaaaatcccaccctttccctattatatgggttattaacattaaaaacaataggaaaatacacaggcatttcaatttgaatcacttttccctatttttacatgtctggagatgttggcttggttatgaattcaaaagttctcc

SEQ ID NO: 51520 - DNA, 1804 bp, Homo sapiens
aaacaagatggaggattcggcctcggcctcgctgtcttctgcagccgctactggaacctccacctcgactccagcggccccgacagcacggaagcagctggataaagaacaggttagaaaggcagtggacgctctcttgacgcattgcaagtccaggaaaaacaattatgggttgcttttgaatgagaatgaaagtttatttttaatggtggtattatggaaaattccaagtaaagaactgaggggtcagattgaccttgcctcatagtattcgatcagattcagaagatatctgtttatttaccgaaggatgaacccaattcaactcctgaaaagacagaacagttttatagaaagcttttaaaccagcatggaattaaaaccgtttctcagattatctccctccaaactctaaagaaggaatataaatcctatgaagccaagctccgccttctgagcagttttgatttcttccttactgatgccagaattaggcggctcttaccctcactcattgggagacatttctatcaaagaaagaaagttccagtatctgtaaaccttctgtccaagaatttatcaagagagatcaatgactgtataggtggaacggtcttaaacatttctaaaagtggttcttgcagtgctatacgtattggtcacgttggaatgcaaattgagcacatcattgaaaacattgttgctgtcaccaaaggactttcagaaaaattgccagagaagtgggagagcgtgaaactcctgtttgtgaaaactgagaaatcggctgcacttcccatcttttcctcgtttgtcagcaattgggatgaagccaccaaaagatctttgcttaataagaagaaaaaagaggcaaggagaaaacgaagagaaagaaattttgaaaaacaaaaggagaggaagaagaagaggcagcaggctaggaagactgcatcagttcttagtaaagatgatgtggcacctgaaagtggtgatactacagtgaagaaacctgaatcaaagaaggaacagaccccagagcatgggaagaaaaaacgtggcagaggaaaagcccaagttaaagcaacaaatgaatccgaagacgaaatcccacagctggtaccaataggaaagaagactccagctaatgaaaaagtagagattcaaaaacatgccacaggaaagaagtctccagcaaagagtcctaatcccagcacacctcgtgggaagaaaagaaaggctttgccagcatctgagaccccaaaagctgcagagtctgagaccccagggaaaagcccagagaagaagccaaaaatcaaagaagaggcagtgaaggaaaaaagtccttcgctggggaaaaaagatgcgagacagactccaaaaaagccagaggccaagtttttcaccactcctagtaaatctgtgagaaaagcttcccacacccccaaaaaaatggcccaaaaaacccaaagtaccccagtcgacctaaagtcagtgattcaactggaaggaaacctcaatgctgcctccagagctttttggaaatactcagatcctggccgcctttgtaaccttctctaaacgtcaggcctggacttaaaagattttttaaaacctccataagtagtccaggggcggtggctcacgcctgtaatcccagcactttgggaggccgaggcaggcggatcacaaggtcaacgagatcgagaccatcctggccaacatggtgaaaccctgtctgtaccaaaaatacaaaaattaattgggcatggtggtggacacctgtaatcccagctactagggaggctgg

SEQ ID NO: 51521 - DNA, 584 bp, Homo sapiens
gctttgggtgagcattgcgtcgtcaacataggctcatcagttgtaaccaatatgccactctggtgggagatgttggtaacaggggaggctgtacatacgtgggggcagggatatttgggaaatctctgtacctttgtctcaaattttctataaaaccaaaactactccaaaaaaagtctagtaaaaataaaaaattttggtttataaaggctatcatgttttcccctccaatttcccctctgtcacacttccttccccttgggtagtatgtgaaaagtaccagcagctctcagaatctggccaaagggaagtccaattggggctatactcagttggggtatagtgggatatattacgtgattcccagtcccttccatgtgtagttgttatctgtaaccattgtgatgaaggaatggcttggaggcacacctcagctgcccactgactcatccagagatgtgagaccagggattgtgttgcaatatgaacgtaccctgcagcacctggcactggaagtatggaagtagtggaggggagatgaagttctaaatatgcaatgccgaaaagctagtcagtctgtggta

SEQ ID NO: 51522 - DNA, 1128 bp, Homo sapiens
ttttttttttttttcagtgcatttgccatttttatttcgctatgcagaaacatacattcaccatgggctgtgatgcaggtgatcgtgtaatggagaatctctctttttgaaggctatttataactaacactaaatagttttaattacagtggaaattctgtacagtttaaggcttggctctgaactagaatgtaaatatggaccagatttgaaaataaaacactttcttttcaagtaaaagaagaaaaatcaattaaaaaatacacggcacggaaaaagtaactaagaaaacaaagccacaggaagcccagcagtttctcctgaagtgaaatttcataatattgtaaactaacaaaaatacaggttttcttcccaaaataatgacaatttaagctctctggattgaacacagaccaaagcaaacaacaagggaagaaatcgcattaatatgctaaaatcagtactaccttataacaaattaaatgagataccacaaagcaagattggaagcattacatatttccagagggtcagagagtcattactgtttatgggtgagagtaataaaaccagatgaaacaagtacaagttgtttactgaataaacttggttattggcacatctaatctgaggaaaatctgacacaccggacggacctagacagcttctagcatttgagggtaatcttcatttattgtaaatataaggttacctaagaaattgcaattttgtttagactttaataataataaactatgaaaggcatgaattgtttatgtgttacatgagaccacggtttatattgttggttatgaacgtgcaggtatagctgaaaactgagacattttgtgaaaattaaaaatgctgctcttttgtaattttatcgttgcttcatgcattatcggtttagtgatgctgaatcagattgctttattatgggaagatctctctgccagtgtctttattaatggtcaaggtcaattcttctggactgaaattttccacggacagatacaagtcagttgggttagaagagggaactccatataggctctggttttcctaacggtttgcatgactgcattcatgtgcaagctaagttattcctggtcatggtcaatgtctgca

SEQ ID NO: 51523 - DNA, 460 bp, Homo sapiens
ttaaaattacctcctgtgtaaccaccaccaaatcctatcttctaccacaattaccccttcccccaatgccaagaccaaagcacaataatgaatatttttattgaagttcgatattcataaataagttgcaaaataagagttggatatatttttaattcacaatagaaaaagttgacaacatagaaaatgctgctttgcactgaaatacttaaaattatgaaagttttcaagtaaagaaattaaagccttttataaaatccaaccaacattcttgatttttcatttttatgaacttgatcagaaaaattcatcttttttaaccctgccctaatttttcttgaggaattaaatagagcaaactattttcaggttatgcttacaataaaatatacttaagaaaatgactgaagatgtatgtttttgaatgttttgattaaataaatgtacacatttagaacac

SEQ ID NO: 51524 - DNA, 751 bp, Homo sapiens
  misc_feature (1)...(751): n = a,t,c or g
caggggagagactgcttgattggtggcagttactacaagtcaagaagtagtgatccccaaagaagagctcggttatttatcagattactggtccatagagagctgaatgaaactgaaccaagcgattgctgggatgactgaagtcttttttttacattgtaaacaccacatttatttgtctgaggcttgcaaacctctggtaagaagcacagaacgcagggctctccttcatgctgccctgggccccagctcgcccaggcatgcaggacagagctggcagatgagtcagaaatctttgggagcagcgcccagggaagcagcaggccctgctccttcccatgcccaatcccgccagcacgggcctggactgcagccaggaaggtgggccagccaggatccccaggtaacttcgccacagggacctcttcttggagctgccttcccttccctccccatccctctccaatccccgcagagcttagagcctggggccacatgcttggtccctcacacaaggaccaaaccagctgctgtcaggctgtttctgtgggtcctgttttttccagtcaggaagccagcagggcagggcaggcctggctctcctcctggaatcacaccgtgcacccagctcagcgctgggcactcagctggggaccgggatggacaaagccttgtccanagaaccactgtaggggagacgtgcatggcagccggactcagcctcctgcagcctccattcatgggctcttgc

SEQ ID NO: 51525 - DNA, 259 bp, Homo sapiens
gatcatagtgaaatacttgatggaattagtaacataaaactgaattcagaggaagtaacacagagccaattagattcctgtacaagtcatgatggtcatcaacagctaagtgaagttagtagcaaaagagagtgccctgcttccggccaaagtgaaccacgtaatggaggaaccaatgaggaaagcaactcatcggggaatacaaacacagacccaccagctgaggattcacagaaagtcttcaggagcgaacacaagc

SEQ ID NO: 51526 - DNA, 843 bp, Homo sapiens
tttttttgcaggtcaaaattcttcctttaatgtgattcatgttattttaatgacttttaggtcaaactcagattcccagttacaggtgcccttggctagttttatctgtgtaacatttgaggctgcatatgtgatcatggtcttgggtttcatctgagatgttagaagccatgtctcttgaggtacttggctcgtgcaaggacatcattgcagaagtcacagctcaggtcctggctgcttcggacatagccagcacccccactgtaggcacagagtccacctctcaggtactggtcaggggtccaggttggaaacctcctctggatttctttgattctagtagtcagaacttcagttgtctgggaaacctgagactcactaatccaggatgtgggagcttgagagccagggtcctgcaccatgctagtcctatcgcccatgttgaccagaattttgtcaccgggagacttcctggacaagacaccagcgatcacggcaggatccatgcagtacttttggccaatggtttgcatcatgggttgatatttcaggaggtatggcatgtctatttcagccagcctttcagaagcacgaactccacagtagttcaggccgtgacgtcttccaatcccacaagatgctccaggggtgtccaggctttggatgtttccatagcatccccagtacgctgctttcagacaagtccatcagggcaaggaggcccagcagcagccacaatgcagacatgatgacgatctggctctacggctcctgaaacacctctctccactgagtactttggaattcccaaagcactgtgtaagtttgtaaggcataatggac

SEQ ID NO: 51527 - DNA, 373 bp, Homo sapiens
atttattctctttaattgtttttcaaagtttgtatgcagattctcccccaattttgtatggtggttggaattttgtttttatcttcaacagatatgctatccaaaatttttcagtgagaaacccctgggtgtgtttgtgtcatgccatatgaataaaaattgcacttctaagaaaagcttttcaggacaccgtggtttctcatgccaatactggtggaaaaatttccatttgttcgaaaatcagagagaacactggaatgttacgttcataacttactaaggattagtgtatattttccaaccttgaggcatgaaattctggagcttattattgaaaaactactcaagttggatgtgaatgcatcccggcagg

SEQ ID NO: 51528 - DNA, 453 bp, Homo sapiens
ccacaaagaaaatgaattatccaaaaaacatatggtgcaatttttatcaggaaagtggaccattcctcctgatcccagaaatgaatgttatttggctcttagcaagttcacatcccacctaaaaaatttacaatcagatctgaaaaggtgctttgacttttttattgattatatggttcttctgaaaatgaggtatacccaaaaagaaattgcagaaatcatgttaagcaagaaagtcagtcgttgtttcaggaaatacacagaacttttctgtcatttggatccatgtctattacaaagtaaaggagagtcaattactccaggaggagaattgcaggaaaaagctagaagctctgagagcagataggtttgctggactcttggaatatcttaatccaaactacaaagatgctaccaccatggaaagtatagtgaatgaatatgccttcctac

SEQ ID NO: 51529 - DNA, 452 bp, Homo sapiens
aattctcaggccaagtggctcaactggagcaggccctggaacaagttcagtgcccttctgaaaacctgggctcagcagttaaccctcctggaaggcaagaacacggatgaggagatagtggaatgctggcacaaaggacaaagagatactggatgctttgcaaaaagcagagcctagaacagaggatctcaagtctcagctgaatgaactttgtcgattttccagagacctgagtacctacagtggaaaagtttctggcttgattaaagagtataattgtctttgtttgcaagcatccaagggctgccagaataaagaacagattttacagcaaagatttcgaaaggccttcagggatttccagcagtggttggttaatgcaaaaatcactaccgccaagtgttttgatatacctcaaaatataagtgaagtttcaactagtcttcagaaaa

SEQ ID NO: 51530 - DNA, 395 bp, Homo sapiens
gaagttcctaaatggattggaggcaaattaccgtaaattttgaaacagcctatatgtcagaaatgataatgttgccacctaaatgttttctgtcccccccaccctccccaggggaaatggtaggaaaatggtaagtttcttagggcaaagactgtgtcttctgtttcttttcatgcttaggatatggttctgtgcatagtaggtactcagtaaatgttcctagaatcataaaatcctcaacagatatgttactgagcatctgctttttcattgaataagcactctaatcagatccttgggatgcaaaggtaaataagacaaatcccttttacccaaagagctcaccatcaagttgggggagggaaagtgggaattcaaaacatgttaataaatca

SEQ ID NO: 51531 - DNA, 455 bp, Homo sapiens
aatttataaagtaaacacgtttaattgactcacagtcccacaggctggggaggcctcaggaaacttacaatcatggtggaaggggaagcaaacacatccttcttcacatggtggcagcaggaaggagaagtgctgagcaaaagggggaaaagccccttataaaaccatcagatcttgtgagaactcactcactatcatgagaacaggatggtggaaactgcccctgtgattaaattacctcctcccaggtccctccatgacacatggagattatgggacctacattcaaatgagatttgggtagagacacaccctcatcagtggcttacgctcctggcttggcctcctggcaggctttttatagagggagtgggatccttgctggttatgaaggacttgtgttccttagagttacagtcttggaatgtcagccctcagcttcttgtttttctttt

SEQ ID NO: 51532 - DNA, 876 bp, Homo sapiens
cggacgcgtggggggaaagtgcactcgcctgggctccacttgccctacgcagacagctataagccaggccatcatcaggctcctggtggaggatgggactgccgaagccgtggtgacctgtaggaatcaccatgtggcagcagcactagggctgtgtcctagagagtgggcctccctcctagatttcgtccaagtgccaggcagagtggtcttgcagtttgcagggcctggagcccaacttgagtcttcagccagggttgacgagcccatgaccatgttcctctggacactttgtactagcccctctgtcctccgtcctattgtgctttcttttgagctggaaaggaaaccgtcgaagatcgtcccattagaacctcctcggctacagcgattccagtgtggagagctccctttcctgactcacgtgaaccccaggctccgattgtcctgcctttctatccgagagtcagagtactccagctctctggggatccttgcttcctcctgttaactgaactgcaaggatggcctgagagtccttccttgctgaaaacctgaaggcctaggtcctggctcctctccctacttgttctgtgattgaaccaaggactccagattcacaaactgctactccactataatttcccttctttggtgttctggtgccagcctgccttggcaaaattgtggcaacaggaaatcatggccctattaatatgtcctctgattgggacaaggcacctgcattcacaggcggccctgagcacctgggttctgactttgtcgcaggagctgagggaacaaaagacttgctcgctgtggggtgatggtgacaggcctattgacctgcaatgaagccctctggtgtcatttctc

SEQ ID NO: 51533 - DNA, 420 bp, Homo sapiens
ggggggttctgttgaaatgttgctgggagctcaactggaatgtaaaagttcttcgggaaggtgaaggtcaggcacgccgagggggagaagcgagcggacatccagctgaacagcttcggtttctacaccaatggctctctggaggtggagttgagcgtcctgcggctgggcctccgggaggcagaagagaagtccctgctggtggggttcagtctcagccgggttcggtctggcagagttcgctcctattcaacccgggattttcaggactgccctctccagaaaaacagtagcagtttcctggtcctgttcctcatcaacaccaaggatctgcaggtccaggtgcggaagtattggagagcagaagacgttgtttattcttttcccgggcttccttcccggaagcaccctccaaaccag

SEQ ID NO: 51534 - DNA, 970 bp, Homo sapiens
ttttttttttttttttttgaagcaaaggcaagcagcttttattgtgaagcaaaagtacacaccagagagaagtgtgggagtgcccctgagagcaagtcatgcaaaacccagtctgggtttctaattgtatgggtgttcctttaataggggtaatcattaggtattctgggaaaagaggggatttcagggacccctgattaccacccctcctcccttatttgggtttgcctggaagagttacagacatgtcaccctgactggggttctggcagttttctcttttgttttgggttttctgttatcccacggtttctttgcctagttcccgttttagctgttgtttgggtttttctttttttttttcagctgcaccaaaaccagggtgttgagattttccatcctcctgtgaccacccagtgctattcctgtctcatttggatctgtaaaactagaaaactagttatctgctcccaaacaaaaggttgggaaagacctaggataatagttatatgtatatgcattgtttcaaaaggggaggaaatggaaggggggaaaacaaaaaaaatggaaccaccaatcccaagaaaatctgaaatctagtttcggcaaatgcccactgggagtcaagacatgggaatatcacatggttcaggactctgcccactggactctcctctgctctgagtcatccttcctttctcatgaaaggtaggcaagggcttgcacctgtttccgcagccagtcccatgtatagaatattacaacctttaacttcacactttacatgcctacaccctttaacttcatactttcaaggtccctttagacccaaggtgagcatttccactggtataaaattttcaagaattttgtgagtctcctgtacatcactgaaattcacaacattagaaaagaggtttatgcagattattcctcctagggaatcccctatctatatttttgcttttgc

SEQ ID NO: 51535 - DNA, 396 bp, Homo sapiens
cccaccaccgccagaccatgctcttctcggccaccatgacagacgaggtgaaagatctggcttctgtctccttgaagaatcctgtccggatatttgtgaacagcaacacagatgtggctccctttctgcggcaggagttcatccggatccggcctaatcgtgaaggagaccgggaagccatcgtggcagctttgttgacgaggaccttcactgaccatgtgatgctgttcacgcaaaccaagaagcaggcccaccgcatgcacatcctcctggggctcatggggctgcaggtgggtgagctccatggcaacttgtcacagacgcagcggctggaggccctccggcgttttaaggatgaacagattgacatcctcgtggccactgatgtggcagcct

SEQ ID NO: 51536 - DNA, 929 bp, Homo sapiens
tttctcttttcccaaaaatacttccatttaatatagtcatatgaaagctaatcagcaagaagggagattgacagacatgcttaggaaaatagctacgtaccataccaccacaccaaagtgttgttttttgtttttgttttttttttaaacaaatggagaaaagacagaccagccaggatgacttcccacagggaaggggatttaagggctgcccccatgaatttcttcaggccacgacagctacttcctcctcttgtatctggatttagatttaaagtttcctcctcgtctctggtggggcaagcccaactgtttcctttcttcaaaggaagggccagctcgatactgtttcagggccttcttgcttgtgttggtgagttcttcatcaaatacagatttcttcccctgcttttgcttcttggcaggacctctcactggctcctcctcgggcattgctcgggcccgcttggctctgcgattcctcttcgctagccgttcagcaaacatctgcgccttgaggatttcaaactgagacctttcctctgctgtcatctcccccttttttttggcatccttcataaacttcttccttttcttctttcctcttaaggccaagtcaaattcctgcagagctttggcaattttctccttcttcctctcttctttggtctggaaccagctcctctcgggctcttggaccactgcctccttccccttctccaggagccgctttgctgtattgatctgggcttctgactgctgcatctctttttcctccgcctctagctgcagaactgcatacacatctttctccattttctcaatcttgtcccggaatttgaggatgacatcttggggaagtatcctggccttcacaggggccttggcagcttttacaatctccttcagcatcttccgctcatcttctc

SEQ ID NO: 51537 - DNA, 405 bp, Homo sapiens
  misc_feature (1)...(405): n = a,t,c or g
ctcattccgtatatgagcacaagtaaggtttcagagcaacacacatgagaaagagagtaacccggaattgtacttgtcaagcaaaatctatactcctattggagtggatgctgatgaacatcgaacatatctacttcattagagcagaggctatttttctgcattcttgtccctataacagggatgcttaattttttttttaacttaaagttttaaattgccaaacatgggaacagccttgaataggataaattttncagagggctgcctaaaatattttatttctagcatcctgattctggacttttcattataattctgagcaggnaatttataagaaattgaaagagcagaaggaattacagccctgttcacatnttgcccagcattccgncccatgccctt

SEQ ID NO: 51538 - DNA, 693 bp, Homo sapiens
acataacctcgattttcttccgccatccggctaaatagtcccatgtgcactttgttccatggataaataaacactaggaacgcatttccaccctagatttcagcagaaatgctgaatgtaaaggaatatttgagtaaagtgagttgccgttcttgaagcccgtctcctaaggattctcccggtgtccgcgtagggatctcatgctatataggagggccctgccagcaccgtctcctgtctccggtccgtgcctccaagatgacaaagaaaagaaggaacaatggtcgtgccaaaaagggccgcggccacgtgcagcctattcgctgcacttaactgtgcccgatgcgtgcccaaggacaaggccattaagaaattcgtcattcgaaacatagtggaggccgcagcagtcagggacatttctgaagcgagcgtcttcgatgcctatgtgcttcccaagctgtatgtgaagctacattactgtgtgagttgtgcaattcacagcaaagtagtcaggaatcgatctcgtgaagcccgcaaggaccgaacacccccaccccgatttagacctgcgggtgctgccccacgtcccccaccaaagcccatgtaaggagctgagttcttaaagactgaagacaggctattctctggagaaaaataaaatggaaattgtacttaaaaaaaaaaaaaaaaaac

SEQ ID NO: 51539 - DNA, 2203 bp, Homo sapiens
  misc_feature (1)...(2203): n = a,t,c or g
ggcaccagctcaggactgcatctgcctgccatttcccttccactcctcctttctggagtctgacattagaaagccagcgagaaggaagattcaaacaaccaaccctgatttcctgcttctccttttcatgagtgttcctgtggtctctgcacctcctttctgtcccccggcagagggcagtagagatggccggcccaaggcctcggtggcgcgaccagctgctgttcatgagcatcatagtcctcgtgattgtggtcatctgcctgatgttatacgctcttctctgggaggctggcaacctcactgacctgcccaacctgagaatcggcttctataacttctgcctgtggaatgaggacaccagcaccctacagtgtcaccagttccctgagctggaagccctggggggtgcctcgggttggcctgggcctggccaggcttggcgtgtacgggtccctggtcctcaccctctttgccccccagcctctcctcctagcccagtgcaacagtgatgagagagcgtggcggctggcagtgggcttcctggctgtgtcctctgtgctgctggcaggcggcctgggcctcttcctctcctatgtgtggaagtgggtcaggctctccctcccggggcctgggtttctagctctgggcagcgcccaggccttactcatcctcttgcttatagccatggctgtgttccctctgagggctgagagggctgagagcaagcttgagagctgctaaaggcttacgtgattgcaagggttcagttccaaccatggtcagaggtggcacatctgctcagccatctcattttacagctaacgctgatctccagctccagcgagtggaaacccactacagaggaggtggggcccctgtgtcaaagaggccgaggggcagcaagggcagccagggcacctgtgacttcttagtacaagattgtctgtccttcaggacttccaaggctcccaaagactccctaaaccatgcagctcattgtcacaccaattcctgctttaattaatggatctgagcaaatcttcctctagcttcaggagggtggggagggagtgattgctgtcatggggccagacttccaggctgatttgccaaatgccaaaatgaaacctagcaaagaacttacggcaacaaacgaggacattaaaagagcgagcacctcagtgtctctggggacatggttaaggagcttccactcagcccaccatagtgagtgggccgccataagccatcactggaactccaaccccagaggtccaggagtgatctctgagtgactcaacaaagacaggacacatggggtacaaagacaaagcttgactgcttcaaagcttccctggacctgaagccagacagggcagaggcgtccgctgacaaatcactcccatgatgagaccctggaggactccaaatcctcgctgtgaacaggactggacggttgcgcacaaacaaacgctgccaccctccacttcccaacccagaacttggaaagacattagcacaacttacgcattggggaattgtgtgtattttctagcacttgtgtattggaaaacctgtatggcagtgatttattcatatattcctgtccaaagccacactgaaaacagaggcagagacatgtactctggtgtgatctcttgtcctcagtgtctcttctgggctcctgtccctcttgctttatagctagctgcccggggaccaaggtacaggtgaaagcaaggtagcagcttgcgggaggaggcctgtctggcttaccagtctatacactgtgggcagctcgtttgctttctaggctggctggagaggtgggagctcattgatagactcatgatggaaactatttttgaaacaggcttcctccttcaggagagatcatgcggactaaactgtagcaattccagtgcacctggcagtgatccttttctttgcaaagtactgtctctttggttccagtaagttggaccaccacatgacatcattttccctggaacctggtcactgactaacacagacaattgggactccagagcctcaagagccaggagagggcacagtacatacagagggagtcaaatgggatctcattttgagtcctgccttccgcacactcagaacggnnnnnnnnnnnnnnnnnnnnnnnnnnnnnnnnnnnnnntgacagatgtcgcagccagatcgc

SEQ ID NO: 51540 - DNA, 497 bp, Homo sapiens
ggtcgacttttttttttttttttttccagtgacagatttttttttttatatttaaaaacaaaaccaacctccccccaaataacccccaaacaaacaaaaaaacagattaaataaaatttacagtgaatatacccagcaaacatctgtatgtgcaattaaatactgtgtctgttactgcggcacgaacctcaaacaaacaatatacaagtgttctgggggggccaggggaatcccaagttttaactctgtggggtctaggaagacaagatggggaagtgagagaatggggcaatcaattttgtttatcttaattctgtccatataaatatattcataaagaccaaaaaaggaaaggaagcttgggatgttaaggtaataggaggacagtgtgggactttcccaattctacctgaccaaaaaatgagaaattaattttatgataggagaagagatttaaaaaaatgatagaagaggatggaagccaggcacagtggctc

SEQ ID NO: 51541 - DNA, 722 bp, Homo sapiens
  misc_feature (1)...(722): n = a,t,c or g
atcggcggaatttttcagatttcaagccatgagattaaaatggaataaatagacagaggtagttttttttttgttttttgttttttcggtaattttctttaccaaaaaaagggtaggaaggttaaggaatagaaaaaaacattagttttctgagattctcatactgaataaattgtcatacataaaccagagtcattaacttaagcataaaaatcagtttatcactgtggtaccacaatctctacatacttatgttaaaaatttccattatttgtttgtcctataagttagaagagagaaattacagcaagtgtttgttaaccacagtaacaaagggcagtgataatttattgagtgatgagatgtgtcggatgctgtgttaagtgctttatctacatgaacttaatccttacaatagtcctgtgaggtgttagcaccaatttgccaaaannnnnnnnnnnnnnnnnnnnnnnnnnnnnnnnnnnnnnnnnnnnnnnnnnnnnnnnnnnnttgggctggatttcaaactcaagtgtctcactctaaaactcatgttcttgaccattctcctgctttgtctttttattccttccaaataagttcacctctaatcaataaaacctactgaatatctaaggcattatgtgtgggggatagagggggagggaggtaacaacgaagagcaaggacattcatgggattttctatctactgtgatctcc

SEQ ID NO: 51542 - DNA, 434 bp, Homo sapiens
gccctcccggtcggctaagattgctgaggaggcggcgggtagctggcaggcgccgacttccgaaggccgccgtccgggcgaggtgtcctcatgacttctcttgtggaccatgtccgtgatcttttttgcctgtgtggtacgggtaagggatggactgcccctctcagcctctactgatttttaccacacccaagattttttggaatggaggagacggctcaagagtttagccttgcgactggcccagtatccaggtcgaggttctgcagaaggctgtgactttagtatacaacagcatcattcagaaagtgaagtggcattttaactatgtaagttcctctcagatggagtgcagcttggaaaaaattcaggaggagctcaagttgcagcctccagcggtctcactctggaggacacagatgtggcaaatgggg

SEQ ID NO: 51543 - DNA, 486 bp, Homo sapiens
cgagcttagatcacgaaggctccttctcacctccggacgtgagaattacaggcttggatctcaaaccgccgcggtgtcctcatgacttctcttgtggaccatgtccgtgatcttttttgcctgcgtggtacgggtaagggatggactgcccctctcagcctctactgatttttaccacacccaagattttttggaatggaggagacggctcaagagtttagccttgcgactggcccagtatccaggtcgaggttctgcagaaggttgtgactttagtatacatttttcttctttcggggacagtggcctgcatggctatctgctcctgccagtgtccagcagccatggccttctgcttcctggagaccctgtggtgggaattcacagcttcctatgacactacctgcattggcctagcctccaggccatacgcttttcttgagtttgacagcatcattcagaaagtgaagtggcattttaactatg

SEQ ID NO: 51544 - DNA, 424 bp, Homo sapiens
gtcaacagctgccgcgcgcaggcttagctcattcctctgacctgccaggaagcagagagacccacagagcaggagggaggcagaaagtggagacggacctgagcccgaggaagaggcaggcagaggctgaggctgattccaccccagcctgcctggacaaccctccttagccgcagccccttccagttccctaggggttctgcccctccccctctctgggggcaccagccccccagggtcctggcatcccaccatgttcgatgggctgtgggaaacctttgggtttctttcatgggcaactgtggggctgctgatgctggggggtgattttgccaaacagctaattgggcgagtgttccattgttgcacggggaacttcattcaccaccaacaccatcttcgagaaacttttggttttaaggtt

SEQ ID NO: 51545 - DNA, 737 bp, Homo sapiens
agagcctgatccaggcttcggcggccggtggcagctctcgatcagctctcgcagtcggagaggcggctaaggaaaggtgccacagcagagacgcgaaggagaggccctagaaccttttcaaagaagaatggaagaaaccatgaagcttgctacgatggaagacacagtggagtactgcctgttcctgataccagatgagtcaagggactcagataaacataaagagattcttcagaagtacattgagagaataatcactcggtttgcacctatgctggtcccctacatctggcagaatcagcctttcaatcttaaatataaacctgggaaaggaggtgttcctgctcatatgtttggcgtgacaaagtttggggataacattgaggatgaatggtttattgtttatgtaataaagcagatcacaaaggaatttccagagttagtagcaaggattgaagacaatgatggtgaattcttgttaatagaagctgctgactttctccctaaatggctggatcctgaaaatagcaccaatagggtatttttctgccatggggaattgtgtattatccctgcaccaagaaaatctggagcagaatcttggttacccaccacacccccaacaattccacaagcattgaatataatcacagcacattcagaaaaaatacttgcttcagaatctatacgagctgctgtgaataggcgcatcagagggtacccagaaaaaattcagg

SEQ ID NO: 51546 - DNA, 5480 bp, Homo sapiens
aagatggccgcggcgcgcacggctcctgcggcggggtagaggcggaggcggagtcgagtcactcccgcacttcggggctccggtgccccgcgccaggctgcagcttactgcccgccgcggccatgcggggctccgtgcacggatgagagaagccgctgccgcgctggtccctcctcccgcctttgccgtcacgcctgccgccgccatggaggagccgccgccaccgccgccgccgccaccaccgccaccggaacccgagaccgagtcagaacccgagtgctgcttggcggcgaggcaagagggcacattgggagattcagcttgcaagagtcctgaatctgatctagaagacttctccgatgaaacaaatacagagaatctttatggtacctctccccccagcacacctcgacagatgaaacgcatgtcaaccaaacatcagaggaataatgtggggaggccagccagtcggtctaatttgaaagaaaaaatgaatgcaccaaatcagcctccacataaagacactggaaaaacagtggagaatgtggaagaatacagctataagcaggagaaaaagatccgagcagctcttagaacaacagagcgtgatcataaaaaaaatgtacagtgctcattcatgttagactcagtgggtggatctttgccaaaaaaatcaattccagatgtggatctcaataagccttacctcagccttggctgtagcaatgctaagcttccagtatctgtgcccatgcctatagccagacctgcacgccagacttctaggactgactgtccagcagatcgtttaaagttttttgaaactttacgacttttgctaaagcttacctcagtctcaaagaaaaaagacagggagcaaagaggacaagaaaatacgtctggtttctggcttaaccgatctaacgaactgatctggttagagctacaagcctggcatgcaggacggacaattaacgaccaggacttctttttatatacagcccgtcaagccatcccagatattattaatgaaatccttactttcaaagtcgactatgggagcttcgcctttgttagagatagagctggttttaatggtacttcagtagaagggcagtgcaaagccactcctggaacaaagattgtaggttactcaacacatcatgagcatctccaacgccagagggtctcatttgagcaggtaaaacggataatggagctgctagagtacatagaagcactttatccatcattgcaggctcttcagaaggactatgaaaaatatgctgcaaaagacttccaggacagggtgcaggcactctgtttgtggttaaacatcacaaaagacttaaatcagaaattaaggattatgggcactgttttgggcatcaagaatttatcagacattggctggccagtgtttgaaatcccttcccctcgaccatccaaaggtaatgagccggagtatgagggtgatgacacagaaggagaattaaaggagttggaaagtagtacggatgagagtgaagaagaacaaatctctgatcctagggtaccggaaatcagacagcccatagataacagcttcgacatccagtcgcgggactgcatatccaagaagcttgagaggctcgaatctgaggatgattctcttggctggggagcaccagactggagcacagaagcaggctttagtagacattgtctgacttctatttatagaccatttgtagacaaagcactgaagcagatggggttaagaaagttaattttaagacttcacaagctaatggatggttccttgcaaagggcacgtatagcattggtaaagaacgatcgtccagtggagttttctgaatttccagatcccatgtggggttcagattatgtgcagttgtcaaggacaccaccttcatctgaggagaaatgcagtgctgtgtcgtgggaggagctgaaggccatggatttaccttcattcgaacctgccttcctagttctctgccgagtccttctgaatgtcatacatgagtgtctgaagttaagattggagcagagacctgctggagaaccatctctcttgagtattaagcagctggtgagagagtgtaaggaggtcctgaagggcggcctgctgatgaagcagtactaccagttcatgctgcaggaggttctggaggacttggagaagcccgactgcaacattgacgcttttgaagaggatctacataaaatgcttatggtgtattttgattacatgagaagctggatccaaatgctacagcaattacctcaagcatcgcatagtttaaaaaatctgttagaagaagaatggaatttcaccaaagaaataactcattacatacggggaggagaagcacaggccgggaagcttttctgtgacattgcaggaatgctgctgaaatctacaggaagttttttagaatttggcttacaggagagctgtgctgaattttggactagtgcggatgacagcagtgcttccgacgaaatcatcaggtctgttatagagatcagtcgagccctgaaggagctcttccatgaagccagagaaagggcttccaaagcacttggatttgctaaaatgttgagaaaggacctggaaatagcagcagaattcaggctttcagccccagttagagacctcctggatgttctgaaatcaaaacagtatgtcaaggtgcaaattcctgggttagaaaacttgcaaatgtttgttccagacactcttgctgaggagaagagtattattttgcagttactcaatgcagctgcaggaaaggactgttcaaaagattcagatgacgtactcatcgatgcctatctgcttctgaccaagcacggtgatcgagcccgtgattcagaggacagctggggcacctgggaggcacagcctgtcaaagtcgtgcctcaggtggagactgttgacaccctgagaagcatgcaggtggataatcttttactagttgtcatgcagtctgcgcatctcacaattcagagaaaagctttccagcagtccattgagggacttatgactctgtgccaggagcagacatccagtcagccggtcatcgccaaagctttgcagcagctgaagaatgatgcattggagctatgcaacaggataagcaatgccattgaccgcgtggaccacatgttcacatcagaatttgatgctgaggttgatgaatctgaatctgtcaccttgcaacagtactaccgagaagcaatgattcaggggtacaattttggatttgagtatcataaagaagttgttcgtttgatgtctggggagtttagacagaagataggagacaaatatataagctttgcccggaagtggatgaattatgtcctgactaaatgtgagagtggtagaggtacaagacccaggtgggcgactcaaggatttgattttctacaagcaattgaacctgcctttatttcagctttaccagaagatgacttcttgagtttacaagccttgatgaatgaatgcattggccatgtcataggaaaaccacacagtcctgttacaggtttgtaccttgccattcatcggaacagcccccgtcctatgaaggtacctcgatgccatagtgaccctcctaacccacacctcattatccccactccagagggattcagcactcggagcatgccttccgacgcgcggagccatggcagccctgctgctgctgctgctgctgctgctgctgttgctgccagtcggcccagcccctctggtggtgactctgtgctgcccaaatccatcagcagtgcccatgataccaggggttccagcgttcctgaaaatgatcgattggcttccatagctgctgaattgcagtttaggtccctgagtcgtcactcaagccccacggaggagcgagatgaaccagcatatccaagaggagattcaagtgggtccacaagaagaagttgggaacttcggacactaatcagccagagtaaagatactgcttctaaactaggacccatagaagctatccagaagtcagtccgattgtttgaagaaaagaggtaccgagaaatgaggagaaagaatatcattggtcaagtttgtgatacgcctaagtcctatgataatgttatgcacgttggcttgaggaaggtgaccttcaaatggcaaagaggaaacaaaattggagaaggccagtatgggaaggtgtacacctgcatcagcgtcgacaccggggagctgatggccatgaaagagattcgatttcaacctaatgaccataagactatcaaggaaactgcagacgaattgaaaatattcgaaggcatcaaacaccccaatctggttcggtattttggtgtggagctccatagagaagaaatgtacatcttcatggagtactgcgatgaggggactttagaagaggtgtcaaggctgggacttcaggaacatgtgattaggctgtattcaaagcagatcaccattgcgatcaacgtcctccatgagcatggcatagtccaccgtgacattaaaggtgccaatatcttccttacctcatctggattaatcaaactgggagattttggatgttcagtaaagctcaaaaacaatgcccagaccatgcctggtgaagtgaacagcaccctggggacagcagcatacatggcacctgaagtcatcactcgtgccaaaggagagggccatgggcgtgcggccgacatctggagtctggggtgtgttgtcatagagatggtgactggcaagaggccttggcatgagtatgagcacaactttcaaattatgtataaagtggggatgggacataagccaccaatccctgaaagattaagccctgaaggaaaggacttcctttctcactgccttgagagtgacccaaagatgagatggaccgccagccagctcctcgaccattcgtttgtcaaggtttgcacagatgaagaatgaagcctagtagaatatggacttggaaaattctcttaatcactactgtatgtaatatttacataaagactgtgctgagaagcagtataagcctttttaaccttccaagactgaagactgcacaggtgacaagcgtcacttctcctgctgctcctgtttgtctgatgtggcaaaaggccctctggagggctggtggccacgaggttaaagaagctgcatgttaagtgccattactactgtacacggaccatcgcctctgtctcctccgtgtctcgcgcgactgagaaccgtgacatcagcgtagtgttttgacctttctaggttcaaaagaagttgtagtgttatcaggcgtcccataccttgtttttaatctcctgtttgttgagtgcactgactgtgaaacctttaccttttttgttgttgttggcaagctgcaggtttgtaatgcaaaaggctgattactgaaatttaagaaaaaggttcttttttcaataaatggtttattttaggaaagctc

SEQ ID NO: 51547 - DNA, 460 bp, Homo sapiens
gacggacctgccccgaccttctcctgtccgatgggaaagccagcatctccatgccccgtgagggcggttccacctgcactgcccgatgtcctgaccctggggaacacagcagcacttggggggagtttgaaggctttcgggaatcttcagccaagtctggacaattctcacagtcccttgaactcctcgagggacccacagaaccccagccaccgagaaccacttctgccccaaaagagtgcagttcttcaccaaccatgccaggggtgggaccttgggtgacaggaacttctggccgtcccaccttcttgagcccattcttcagctatgaggaacattttaaagtgttgcttttcaaggagataacagtccagcaggcagctgaagacgtttccaccatagaccatttcctagaaataagcagtgaagaaaaacctggcgttgaacgtgtacataaatt

SEQ ID NO: 51548 - DNA, 674 bp, Homo sapiens
ttttttttgtatttaaagaaaaataggagatccattatagttttgtttttacatctctataaagtttttttgcatctttattaattgatccaacaatacaggatttaaaaaatcctgtaaagtcttgaagtgtatagagttactttgtttcttaaaacaaatatagcacaggattattgtggaaatattaaagaccatttcataaaagttgcagtttaacctttatagactgatggggtcaagggggaaaatccaggtctactaataatatttaactgaattaagatacaccccaattatagtgttctggaaacacaaaggtaattacttttctttttaaaattatccaaatgtgaacttactggaaagagaaaaaacaagtttaaagaagaaatttttcataggcttcttgtttagtagcacaggccaaaggcctttgtcgtcgtcttgcagggtccttataaatgtgtaagacagacagcatttactattgagtcctacagggaaacacacagaagcaattcattgcttgggagtgaaactatcaactaatcttacgactactggttctccaagtcccctaatgaagaaaattttaacctcatgatcatttccagggaattttctttttcaactgtcacatataaactgggtaacaccagctcgtggccgaa

SEQ ID NO: 51549 - DNA, 456 bp, Homo sapiens
gaggaggagaacatccgcgtggttcgttgtggcggcacgagttgaactttaggagagctgtgttctctgcagattctaagtatatcttctgtgtctctggagactttgttaaagtttacagcacagttacagaagagtgtgtacacatactgcatggacacagaaatctggtgactggaatccagcttaaccccaacaaccatctacagctgtattcttgttcccttgatggcacaattaaactgtgggactatatagatggcatcttaataaagactttcatagttggatgtaaacttcatgccctctttactcttgcccaagctgaggattctgtctttgttatagtgaataaagaaaaaccagatatatttcagctggtttcagtgaaactgccaaaatcctcaagccaggaagtagaagccaaggagctgtcctttgttttggattacataa

SEQ ID NO: 51550 - DNA, 1480 bp, Homo sapiens
tctgatccaaattgaactaacaaaggctgcatttggctgctttggtaactggcttgcaacagtggaacagcggcaagaaaaggaaactgagcttgaattgcaaatgaaactgtggatgtataataagaaaacacaagggtttattcttaacactaaaattaacatgccacacgaagactgcattacagctctctgtttctgtaatgcagaaaaatctgaacagcccaccttggttacagctagcaaagatggttacttcaaagtatggatattaacagatgactctgacatatacaaaaaagctgttggctggacctgtgactttgttggtagttatcacaagtatcaagcaactaactgttgtttctccgaagatggttctttactagcagttagttttgaggaaatagtcacaatatgggattctgtaacatgggaacttaaatgtacattttgccaacgagctgggaaaataaggcacctttgctttgggagattgacgtgttcaaagtatctacttggtgctactgaaaatggcattctttgctgttggaatctgctgagctgtgcattggagtggaatgcaaaattaaatgttagagttatggaacccgatcctaattcagagaatattgctgcaatctctcagtcttcagtgggttcagacttgtttgtatttaaacctagtgagccaaggccattgtatattcaaaagggtatctccagagagaaagtccagtggggagtgtttgttccacgagatgtccctgaatccttcacctcagaagcttaccagtggctaaatagatcccagttttacttcctaacaaaatcacagagtttattgacattcagtacaaagtctccagaagaaaaactcacaccaacaagcaaacagctgctagcagaagaaagtcttcccacaaccccattttatttcatattgggaaaacacaggcaacagcaggatgaaaaactaaacgaaactttagagaatgagctggtacaactacccttaacagaaaacatacccgcaattagtgagcttcttcacactccagcccatgtcctgccatctgctgctttcctgtgctccatgtttgtaaattcattgctgctgtctaaagagactaagagtgctaaggaaattcctgaagatgtagatatggaagaagaaaaagaaagtgaagattcagatgaagaaaatgattttaccgaaaaagtccaggatacaagtaacacaggtttaggagaagacattatacatcagttgtcaaaatctgaagaaaaagaactgagaaaatttaggaaaatagactacagctggatagctgccctttaagccttggagatggggaggatccttggactttgtgtttttgattgtatgttgatattctaaaaacatctattttaatgttatttctgttctaaaaataagataataaatattaacaaactttgcttttttaaaaaactg

SEQ ID NO: 51551 - DNA, 2139 bp, Homo sapiens
agacgaccagggccggcgagcgcagtgcagcgccgcgcggtgcgggcggccgagtgggggcgtcatggaggatgagcggagcttttcggatatctgcggcggccgcctggcgctgcagcgccgctactactccccgtcctgccgggaattctgcctcagctgccctcggctctcgctgcgttcgctcaccgctgtcacctgcacggtgtggctggcggcctacggactcttcaccctctgcgagaacagcatgatcctctctgctgccatcttcatcaccctcttaggtctgcttggttatctccattttgtgaagattgatcaggagactctgttaatcattgattcccttgggcattcagatgacttcatcttatgcttcaggcaaagaaagcactaccttcatagaaatgggcaaggtcaaggatattgtcatcaatgaggccatttacatgcagaaggtgatttactacctctgcatcttattgaaagatccagtggaaccacatgggatatcccatgtagtacccgtcttccagagtgccaagccccggctggactgcttgattgaagtatacaggagctgccaggagatcctggcacaccagaaagccacatcaacaagcccatgagccccagcgttcagaaggccagcattgtcttccatgggagatgactcttaagccataggggctggttttccgtactccaaaccatcaggtgggacacagtcctaggaaccattatggatgtagtgcatcttagagccatagagcaggtgactggaaatctaactcagtatatttccgtgtattatagtgttttccttgtaaggttttgcctactttaccaaaggaggggagaccttaagaattttgacacagtatgtcaaaagtaatgtcagcaaagaacactttcggaaattgctaagcatgttcaggtttactttgttgatgtttgtgaagcaaaacaatgggaaactgacatcagatgtcttgagaaagctatattttccaatagtaccccttgtgtaaagttacgaaaaaaacaagcccttcagtactggttagcaggaagaaatgtcctacaaaagacgagtctgtcaacctagtgcctgtgttctgtacagggcttatttatttactgttaataaacagatcttccaaaacacacagttacctggttcacagatagctgctttttattgacaaacaagatcatagtatttcagtcatggtgtcaagcacattaatacttttctgttactcagcatttttttttatatcagttcaaaagctacttttgccaagaaggatgagacaaaaggccagacagaaattggactttggttttcagacatgggactctcatgttaacaaagaataaataagcaaatattgaatcctttgtttctaagttagtttcttctgtataagattaataaactaaagggttcctgaagggttggggaggagagagggtgggggaaatagattgaccccaaattcagtgtgaacacagctccattcttgtttactcttcctttggactcctacttttcttctaaactctctgggtagataatgttatccttattggccttagagatacccaagatattataaaaccagagctgttatgtctgtcaccagccctgcaggaattattcaggaacctgtggtacatgtgacttgttcgaggtagaaatgtctcagctagatccccaagttgtggggtgaaaagtgtgaacagaaatggctgtaaaactacttgccttgcaaagtcaagtaacatttaaaggaggcagaaactggaatctgctctcttttttcaacatggcttgtcagttaacgggggtgagaggaggaggacgcttacacgcgcccgaaggggttcagaataaaacagattctggcctgccacatttttgtctgtgcaaaagataacccacatgtgtgggggttcaaggcctgggtttttgggtgcctcacgctaaaaatacaggtttcacactcttatctcgactatagtaagggctgcctgaagccaggaataaaaaactccagttcctagatgttgggaacaccggagtaagaacacatccgcgttatttttgttgagggaggagggtttttcaac

SEQ ID NO: 51552 - DNA, 1617 bp, Homo sapiens
gcttaattaaaggatctttttttttttttttttttttaattttattaaaaacaactttaatatgaataaaaagttacaaataagattcttcataaagagcagcaacagccaaagatcatcctcattccctttgtccctgaaaacaggcccttttaccagaccgattttgtctcaccctaacctgaggcagggattcatctttgcagagcaaataagatctgatctcaggggctgggggaggaagagggtgaccttgcagcacggagataactttggccttgaacaacaactgaggctcccaaggaatgccaaaagtagggctgaaaaggggcagattgaaaggactgtcacacagtggagttcccttcctctctactgtaacaatattcctagccccacctaggaagacattggctaaaatgctaaaccctagtatgtcctgcccactttaaactctcacacttccaaggagaagtgtttgtggtccaatggcttcagctaaagtggcttcaataatggcatcacaggctgtagcaggagggaatccctccccttcttcttgtttccccagaggaaagggaggcgggcccagtccttaaagttctcctggctggctgaaagagctcagatggctggagggccagcccagatatccacattcttgcgcagggtggagtagcgttcctccagctctggcccctcgggttggcagaagcaggtttgctaactccctgcttaggtcctgaatcatgtcgttccgtccttgcttctcaggctggcctgtgtttgggaccataccacgatcctggagctccccattgggcccaaggaggtactggtacttcttctgccaccggcggcacaccatggcttcaccaaccggctgctggctggtgtgcagcagagccaaaatgtgtcggcatggcaggtggtaccattgttgaaaggaacagctgcagctacagcccatctttgctaacctggtgagagtcctctagcagctgaaacgtccactgaaagagccagccatgtccaccaggtgggtggaagttctgtaccacctcccactcattgtggcacagcttgtaggcctagttcagagccactctggtgcaaggtgtccagcatgccaacctgcgagggcggcacttgtgaactgctgctgtacctgtacctgctgtgcgtctggcttgggtctcttctgcagggaggctggtaaggctctctccacagattccaaaagccttcttggacttcagtggcaatgcttgccggccgagctctctttaatttgggaggaggtgtgggcaagttcttcaagcctttggtattaaagaagtctatgtaatccacaaagcagaggatgcagtccagcagcgactgctgttctcgaaagaggcttgacaccttgctggtgacaatgtctaggctgtccatgtaggtgttacacgcaagcaggcccttcctaacatgcatgtaccacagcagttcacaggtgaaccagtgggcctgcaggaagttgaagagatcctcatccagtacggcctgggacatctggcagagatttttcaggctggcttcagaagtgacaaacacggctctccgcagggcttcctt

SEQ ID NO: 51553 - DNA, 368 bp, Homo sapiens
tgtttccgaaatggacttctctgcaagcctgactcctgagactgtgcattgtaccctgaaaccagctttatccatagcttctgcgataaatggctgtaagtcttggactccttgctccaaacgcagcgactcagcaatagaacctcccagctcccagcccttcctagtgcccatgggctttacatagggcaagagaacatttctccttctataattgccatctctttgctctctcaacatggtgaacaccatccggactccgtgtatgtctcaaattacaattctttctttgcaaatgaaatatgaaatttaggagggctcttctaaacactttaaatttgatttgacattttcaaagcagatgtaag

SEQ ID NO: 51554 - DNA, 461 bp, Homo sapiens
agaacacaatggtcacatctttaaagccacccaatatagcatccctacatactgtgaatactgttcttctttgatatggataatggaccgagcctctgtttgcaaattatgcaagtatgcttgccataagaagtgctgtctgaaaaccacagccaagtgctctaaaaagtatgatccagagctgtcatctcgacaatttggggttgaactgtcccgtttgaccagtgaagaccgaactgttcctttagtagtggaaaagctcataaactacattgaaatgcatggactgtatacagaaggtatttatcgaaagtctggttcgactaataaaatcaaggagcttcggcagggtctagatacagatgctgagagtgaaatctagatgactataacatacacgtcattgcaagtgtattcaaacaatggcttcgagatttgccaatcctctcatgacctttgaa

SEQ ID NO: 51555 - DNA, 416 bp, Homo sapiens
  misc_feature (1)...(416): n = a,t,c or g
cggacgcgtggggtctggaaactgtgagtgtgtgggcttttctccgacgtcgagcgtggtcctagcgtaaacagatgcattcgcctctccggtttcaatctttttttacgtttgcgctttcctcaaggccggtgggtcaggagtggagccttagtcattctaacgctggaggtgtcagtaggaccaacagagtctggtgccgacacggcttactgttgcgcgctcttctaggcctcaacttcctctcaactgtgtggtcagttcagggccgggaatccaatcttttccgagctccatattttatccacttggtggcgtccagtcccaagtccggcagttgaattctgcctaaagangggctttatttctatctttttttaggtaacaggacattcagttagtaatgatggntgcag

SEQ ID NO: 51556 - DNA, 372 bp, Homo sapiens
tttttaactgataggtttgtcttcttattgaattggatttatgtattctggatgcaagttctctgtcaaatatatgcatacgaacagttttgccttgtcttctttttggcttgtcttctcaatttttaatggtgcctttcgaatagcattttttaattttaatagactacaatttatcgactacttctgttaatagttcatgctttttgtgtcctaaaagacctttgcctactccaaggtcaagatgatttgctcctatgttttcttctagaagtctttccattttacccttcatatgtaggtctttcatccatttggagttcacttttgtgtacagtttaaggaaagggattatccccctcccctatatgg

SEQ ID NO: 51557 - DNA, 2890 bp, Homo sapiens
  misc_feature (1)...(2890): n = a,t,c or g
ttgagaagccttcctgcggctaagatggcgacggagcatcccgagcctcccaaagcagaattgcagctgccgccgccgccacctccaggccactatggcgcctgggctgcccaggagcttcaggccaagttggcagagatcggagctccgatccagggtaatcgcgaggagctggtggagcggctgcagagctacacccgccagactggcatcgtgctgaatcggccggttttgagaggggaagatggggacaaagccgctccacctcccatgtcggcacagctccctggaattcccatgccaccaccacctttgggactcccccctctgcagcctcctccgccacccccaccacctccaccaggccttggcttggctttcctatggcccacccaccaaatttggggcccccgcctcctctccgtgtgggtgagccagtggcactgtcagaggaggagcggctgaagttgnctcagcagcaggcggcattgctgatgcagcaggaggagcgtgccaagcagcagggagatcattcgctgaaggaacatgagctcttggagcagcagaagcggcgcagctgtgttactggagcaggaacgacagcaggagattgccaagatgggcaccccagtccctcggcccccacaagacatgggccagattggtgtgcgcactcctctgggtcctcgagtagctgctccagtgggcccagtgggccccactcctacagttttgcccatgggagcccctgttccccggcctcgtggtcccccaccgccccctggagatgagaacagagagatggatgacccctctgtgggccccaagatcccccaggctttggagaagatcctgcagctgaaggagagccgccaggaagagatgaattctcagcaggaggaagaggaaatggaaacagatgctcgctcgtccctgggccagtcagcgtcagagacttaggaggaccacagtgtccgtatctaaaaagggagaaaacccggaagcgtaggacccgcaagaggaggaaaaagccccagcgggtgcgaggggtgtcctctgagagctctggggaccgggagaaagactcaacccggtcccgtggctctgattccccagcagctgatgttgagattgagtatgtgactgaagaacctgaaatttacgagcccaactttatcttctttaagaggatctttgaggcttttaagctcactgatgatgtgaagaaggagaaagagaaagagccagagaaacttgacaaactggagaactctgcagcccccaagaagaagggatttgaagaggagcacaaggacagtgatgatgacagcagtgatgacgagcaggaaaagaagccagaagcccccaagctgtccaagaagaagttgcgccgaatgaaccgcttcactgtggctgaactcaagcagctggtggctcggcccgatgtcgtggagatgcacgatgtgacagcgcaggaccctaagctcttggttcacctcaaggccactcggaactctgtgcctgtgccacgccactggtgttttaagcgcaaatacctgcagggcaaacggggcattgagaagccccccttcgagctgccagacttcatcaaacgcacaggcatccaggagatgcgagaggccctgcaggagaaggaagaacagaagaccatgaagtcaaaaatgcgagagaaagttcggcctaagatgggcaaaattgacatcgactaccagaaactgcatgatgccttcttcaagtggcagaccaagccaaagctgaccatccatggggacctgtactatgaggggaaggagttcgagacacgactgaaggagaagaagccaggagatctgtctgatgagctaaggatttccttggggatgccagtaggaccaaatgcccacaaggtccctcccccatggctgattgccatgcagcgatatggaccacccccatcgtatcccaacctgaaaatccctggggctgaactcgcccatccctgagagctgttcctttgggtaccatgctggtggctggggcaaacctccagtggatgagactgggaaacccgctctatggggacgtgtttggaaccaatgctgctgaatttcagaccaagactgaggaagaagagattgatcggaccccttggggggaactggaaccatctgatgaagaatcctcagaagaagaggaagaggaagaaagtgatgaagacaaaccagatgagacaggctttattacccctgcagacagtggccttatcactcctggaggcttttcatcagtgcctgctggaatggagacccctgaactcattgagctgaggaagaagaagattgaggaggcgatggacggaagtgagacacctcagctcttcactgtgttgccagagaagagaacagccactgttggaggggccatgatgggatcaacccacatttatgacatgtccacggttatgagccggaagggcccggctcctgagctgcaaggtgtggaagctggcgctggcgcctgaagagttggagctggatcctatggccatgacccagaagtatgaggagcatgtgcgggagcagcaggctcaagtagagaaggaggacttcagtgacatggtggctgagcacgctgccaaacagaagcaaaaaaaacggaaagctcagccccaggacagccgtgggggcagcaagaaatataaggagttcaagttttaggtcccctcacactagccctttttttggccctacgtctggatgcctgggcttcacacaagaaccacctctcccgcagttcccaaggacttgtcatttcatgttcttattttagacctgttttgtaaataaagctgtttcccaaggaaagagatgaatatttaacaaaaaaaaaa

SEQ ID NO: 51558 - DNA, 285 bp, Homo sapiens
agaaaacaaggctacaggctgggagtcactgccgaagtgataagctgtgggtggtgaatgcagagaaggccacaatgtacagcacctaccctgggagtgttcacttggggttcatgttggaacccattttgcttcctccaccattgcacattgaaggagaatgtatttttgcacgcgcttctcattgcccttcatgtacatctgctctagggcaggagtcagcaaactacagcccagagggcatgtctggcccacggcttgtttttgtaaataaagttttattgg

SEQ ID NO: 51559 - DNA, 428 bp, Homo sapiens
ctgttcctgggtagccttccttagcctccattcagcctcaggtcttttgccttcttccgtgtttatttagagagcagaatctaataacgggttccactgtagccactatccatggacttctgggtcctcttcaggtttgagtgcttgaaaatgttcattctctgggcttgtggcctgtctcctccactctcctcctcaccctctcgctccttcctgtgtgagggccgctctgcagtaatgttctcaggcaagccttcctaggcacctcagaaactactttgccagagccagtaagaatatataatattggagcagttgccagggatagaaattaaatatagattccagtttaggatagagtttttaccgagagctctttagacagtatacctgtgtcttctctggggcaattgcttttcattttaggt

SEQ ID NO: 51560 - DNA, 1210 bp, Homo sapiens
  misc_feature (1)...(1210): n = a,t,c or g
tttttttttttttttttttcagtgtgctaaaaattgttttgttttgagtaaaggaaaaagatatataaggttaaaaatcccaagtcaccacagccagaaaacagacgtaggaggtgcctcatagctgccatgcccctaccacatgtgtcagcaggaagtcaggcttttctttcaaggccaagacactagaacagtgctgagcagggtaggtcaggaggcatttactctcatgggcattgcgttgcaggctcactcacccagacagcaggagaaacaggccatggaagacaacacgtggtctacagactcataagtagttctctgcctctccagttttaagatgggccataagcatggccaccctcacccacaagaaggtcagaggtaggtagagaggagggagctgacacacaggcacccaggacaccctgcttcagggctcagcatggaggtggcacaaggcctgaggagttgcacatagcacgcattgagcaatactcctctctggcctcctgtctgatttaggggcagaaggagaatgtaggagaggcaatgttggtggggagggggcggggcctgacattcatttttgggactgaatcaggcaatcaggactctgctgatttcttcagctgccaaatcaggagatctgaggttggcttttgggctttgctctgtacaaacacagggagtggtcggctgcatttttctcaagctctgtacccaggaaggggcggcaagagcaccacacagcttagtctgtctgtcaacagccggcccttccacccgtgctccccacctgactcgccatggacatgcgggggcttgctctccccatccctatttcccccatctccctactcttttgcctactttcccagaacccaagaaatactggtatttcccactggaaccaacccagatttccctgggacacagtgaaggcacatggcactgctgtccctctgctgcttaactcaggagcctagtctacaacatcaaaggcaaagtctgatgacccacccttcctcccttgatggacatctttggattattaggtaacttctgtgtgtatcaaatgactctagtagtttaaaaaacttttaagtaaggcagtatgaaataccttacaactcaggacaggctctgagatgagagaaatataagatcaaaagatttaggcaagcnaaagcatagttttaataaaaac

SEQ ID NO: 51561 - DNA, 427 bp, Homo sapiens
gtagagaagggcccattccagtggaacaatgagaaaaataacttttctttctgtaggctgttgcaacctcaccagaacagctgaagaatgaatttcagcctggactctaccttattagttgggcacccttggggagggtgcaacctgcccaacattttctgctggccctgtcttacctcatgactaagagagccttcctaggtctggaaggtagcagtcagtctgttctggagggtggagagagacaccagtgttttcccatggtttctgggtagtagataaaattggtctattctaaggttaatttgatattttaaaattttgattctgactagcttattggatttttttgaataatgtttgattaatgtaaaggttaaaaataaaacccaatatttcagctaaggcaaatgggtatttctttaat

SEQ ID NO: 51562 - DNA, 1544 bp, Homo sapiens
taaaatgtgattttctataactgaagaaaatatcttgctaattttacctaatgtttcatccttaatctcagggacaacttactggcagggccaaaaaaggggactgtcccaggctaggaactgtgaggggtattacatagggccttactttattatgttttcacttgccatccttgacataagagaactataaattttgtttaagcaatttataaatctaaaacctgaagatgtttttaaaacaatattaacagctgttaggttaaaaaaatagctggacatttgttttcagtcattatacattgctttggtccaatcagtaattttttcttaagtgttttgtgattacactactagaaaaaaagtaaaaggctaattgctgtgtgggtttagtcgatttggctaaactactaactaatgtggaggtttaatagtatctgagggatttggtggcttcatgtaatgttctcattaatgaatacttcctaatatcgttggctctactaatattttccaatttgctgggatgtcacctagcaatagcttggattatatagaaagtaaactgtggtcaatacttgcatttaattagacgaaacggggagtaattatgacacgaagtacttatgtttatttcttagtgagctggattatcttgaacctgtgctattaaatggaaatttccatacatcttccccatactattttttataaaagagcctattcaatagctcagaggttgaactctggttaaacaagataatatgttattaataaaaatagaagaagaaagaataaagcttagtcctgtgtctttaaaaattaaaaattttacttgattcccatctatgggctttagacctattactgggtggagtcttaaagttataattgttcaatatgttttttgaacagtgtgctaaatcaatagcaaacccactgccatattagttattctgaatatactaaaaaaatccagctagattgcagtttaataattaaactgtacatactgtgcatataatgaatttttatcttatgtaaattatttttagaacacaagttgggaaatgtggcttctgttcatttcgtttaattaaagctacctcctaaactatagtggctgccagtagcagactgttaaattgtggtttatatactttttgcattgtaaatagtctttgttgtacattgtcagtgtaataaaaacagaatctttgtatatcaaaatcatgtagtttgtataaaatgtgggaaggatttatttacagtgtgttgtaattttgtaaggccaactatttacaagttttaaaaattgctatcatgtatatttacacatctgataaatattaaatcataacttggtaagaaactcctaattaaaaggttttttccaaaattcaggttattgaaaacttttcattttattcatttaaaaactagaataacagatatataaaagtgttaatctttgtgctatatggtatgaaatacaatattgtactcagtgttttgaattattaaagtttctagaaagcaaaaaa

SEQ ID NO: 51563 - DNA, 577 bp, Homo sapiens
  misc_feature (1)...(577): n = a,t,c or g
ttcacaccatacaggccaaattatagaatcccccaaccccaagacactgcaccctatgggctataccctcaggcagggccctgcttttctaggaattgactccaatgcagaatagtgagaaatcaacaaaaagcaaaataagacaattccagacactcctgaatttacttggatttaaagaggttaataaaaacaaactataaactctctagactgggctgacagtaaaagcacagaatacaaaacccaggggatggggctgggaggggctgtnaggggctggcacctcagctcagaaaaggtagcagcaatcccaaagcagcagaaggcaggggttaaatcaggataaaaacagacatcagtggaatcgaaaaccaatagttagttaatataaagccagaaggttttgttttttttcaagcgagacttcgtctcaaaaaaagaaatggcaactttaagcaaaatgatatatantgaaactaattttactataggctaatggatgtaaacaagannnnnnnnnnnnnnnnnnnnnnnnnnnnnnnnnnnnnnnnnnnnnnnnntanaactttaacct

SEQ ID NO: 51564 - DNA, 72 bp, Homo sapiens
gacataccgtgtggcatactatgagagagctccatccagggtgaggcatccaaaatcatgaaccttttaaag

SEQ ID NO: 51565 - DNA, 531 bp, Homo sapiens
tttaggctcagtgctgtccgggctggtttgcgctaccctgactaacggctttcttgccccttctctcgccacccctgcccaaggtcgcccctctgccttcgcccctgtcccgggagtgcggaagctttgaccccgccctgcccactcgcgtctccgcagccgtagccgcgcctgtcccaatatgaatagggtcaacgacccacttatttttataagagatattaagcccggactgaaaaacttaaatgtcgtctttattgtcctggagataggacgcgtgaccaaaaccaaagacggccatgaagtgagatcgtgcaaagtagcagataaaacgggcagcatcactatttccgtgtgggatgagatcggaggtcttatacagccaggggatattattcggttgaccagagggtatgcatccatgttggaaaggatgtctgacactttattactggagggttggtgaacttccaaaaaattggggatctaggtgcggtgccaggcagccgcaatgcggagattccatacaat

SEQ ID NO: 51566 - DNA, 403 bp, Homo sapiens
ttatgtcggcttagtcttgctttggttatgtgggcagttttttggttccatatgaattttaggattggtttttctagttctgtgaagaatgatggtggtattttgatgggaattgcattgaatttgtagattgcttttggcagtatggtcattttcacaatattgattctttcaatccctgagcatgggatgtatttccatttgttttatttatttcagcagtgttttgcagttctccttgtagagatctttcacctacttggttaggtatattcttaagtatttttattttgttattttttacaactgttgtaaaaggagttgagttcttgatttgattctcagcttggtcactgttggtgtatagcagtgctactaatttgtgtacattgattttgtatcc

SEQ ID NO: 51567 - DNA, 411 bp, Homo sapiens
cggacgcgtgggtttaacttaaagaaattttaacgtgagaaaataagatactcatgatttacaaagattattttcttcttagcaaagaaaagttgggttgaattttgaatgtctccacaaggtgaaaatgcagttaaaaaaaaaatctgtaccatagagaacgtttttgttgacttactgaaatttaaggtctgtatgtgagtgattgaaataacagtttcaaatataagttgttccctttacattttcttcttgatttcctttcataagcaatgcttattcaaggtcataagattaaaaaagaaaatggtgcaccaatactttgttagcattctgagtttcctgtataatgagtcaattatgggggatgttatttatttgaatttagaatccgcttattttggactaatg

SEQ ID NO: 51568 - DNA, 414 bp, Homo sapiens
actgagtttattcagaaggttacgttctcagcctttattccagggcccaattttcaagacaagccttcgcgggacaggaggagtcctctgaagatagcagtgcatgagcagagaaacacacatggcttggtctcgccgcccagcagctgattccgaggaggggctgagaggggccaatttcacccttccctagcaagactcggaggaggttcttcctacacaagaagcccatctgaccaccagggcttcctgggcagagagtggtgctagatgtcagccaggaactccccagaccaggtattcttccagggctcaggcataaagaaccaggaggcttttattttctattaatcaacctagttgggaagcagagcccattgtaaaggcagagaggtattgattacaggattaaag

SEQ ID NO: 51569 - DNA, 456 bp, Homo sapiens
  misc_feature (1)...(456): n = a,t,c or g
aaatttaaatacagataaaatatttctgatgaaaatttagcatgtgaattgagatgtgctattatgtaaaaatatacactgaattttgaagataaaacaaatatctcaatttaaaaaatactgattacatgctgaaataatattttnnatatatttggntaaataanangttattaaaattagtttcaactgtttcttttttaaagttttatttttaaaaatgtgcgtacagggccagatgcagtggctcacgcctggtaatcccaggctacttggggagggctgagggcagggaggaatcgcttaaattcaggggggcagagggttgaggtgagctggggatcgtaccnctggcactccngcttgggggcgacagnggaaaggactccnttcttcggaaaagggnaattanaaaaacngtggcnctgggggntttttnatttacnctttccgttt

SEQ ID NO: 51570 - DNA, 422 bp, Homo sapiens
ggcgcgggttgcttcacccacaccgtcatgtactacggccactacagtaacgccacgctgaaccagccgtgtggcagccccctggatggcagccagtgcacacccagggtgggtgggcctgccctacaacatgcccctggcctacctctccactgtgggcgtgagtttctttatcacctgcatcaccctggtgtacagcatggctcactctttcggggagagctaccgggtgggcagcacctctggcatccacgccatcaccgtcttctgctcctgggactacaaggtgacgcagaagcgggcctcccgcctccagcaggacaatattcgcacccggctgaaggagctgctggccgagtggcatctgcggcacagccccaagagcgtgtgcgggaggctgcggcagcggctgtgctggggct

SEQ ID NO: 51571 - DNA, 3561 bp, Homo sapiens
gaattccgggccatcgccgggcgacgacgaggaggaggcggccgccgcagccggggcccccgccgccgccggagcgacaggtgatttggcttctgcacagttaggaggagcaccaaaccgatgggaggttttgtcagccacacctacaactataaaagatgaagctggtaatctagtccagattccaagtgctgctacttcaagtgggcagtatgttcttccccttcagaatttgcagaatcaacaaatattttccgttgcaccaggatcagattcatcaaatggtacagtgtccagtgttcaatatcaagtgataccacagatccagtcagcagatggtcagcaggttcaaattgggtttcacaggctcttcagataatgggggtataaatcaagaaagcagtcaaattcagatcattcctggctctaatcaaaccttacttgcctctggaacaccttctgctaacatccagaatctcataccacagactggtcaagtccaggttcagggagttgcaattggtggttcatcttttcctggtcaaacccaagtagttgctaatgtgcctcttggtctgccaggaaatattacgtttgtaccaatcaatagtgtcgatctagattctttgggactctcgggcagttctcagacaatgactgcaggcattaatgccgacggacatttgataaacacaggacaagctatggatagttcagacaattcagaaaggactggtgagcgggtttctcctgatattaatgaaactaatactgatacagatttatttgtgccaacatcctcttcatcacagttgcctgttacgatagatagtacaggtatattacaacaaaacacaaatagcttgactacatctagtgggcaggttcattcttcagatcttcagggaaattatatccagtcgcctgtttctgaagagacacaggcacagaatattcaggtttctacagcacagcctgttgtacagcatctacaacttcaagagtctcagcagccaaccagtcaagcccaaattgtgcaaggtattacaccacagacaatccatggtgtgcaagccagtggtcaaaatatatcacaacaggctttgcaaaatcttcagttgcagctgaatcctggaacctttttaattcaggcacagacagtgaccccttctggacaggtaacttggcaaacgtttcaagtacaaggggtccagaacttgcagaatttgcaaatacagaatactgctgcccaacaaataactttgacgcctgttcaaaccctcacacttggtcaagttgcggcaggtggagccttcacttcaactccagttagtctaagcactggtcagttgccaaatctacaaacagttacagtgaactctatagattctgctggtatacagctacatccaggagagaatgctgacagtcctgcagatattaggatcaaggaagaagaacctgatcctgaagagtggcagctcagtggtgattctaccttgaataccaatgacctaacacacttaagagtacaggtggtagatgaagaaggggaccaacaacatcaagaaggaaaaagacttcggagggtagcttgcacctgtcccaactgtaaagaaggtggtggaagaggtaccaatcttgggaaaaagaagcaacacatttgtcatataccaggatgtggtaaagtctatgggaagacctcacatctgagagctcatctgcgttggccattctggagaaccgcccttttgtttgtaactggatgtactgtggtaaaagatttactcgaagtgatgaattacagaggcacagaagaacacatacaggtgagaagaaatttgtttgtccagaatgttcaaaacgctttatgagaagtgaccaccttgccaaacatattaaaacacaccagaataaaaaaggtattcactctagcagtacagtgctggcatctgtggaagctgcgcgagatgatactttgattactgcaggaggaacaacgcttatccttgcaaatattcaacaaggttctgtttcagggataggaactgttaatacttccgccaccagcaatcaagatatccttaccaacactgaaatacctttacagcttgtcacagtttctggaaatgagacaatggagtaaatattacacaaatacttattcattgtggttatttttatacagtagtgagaagaatattgttcctaagttcttagatatctttttattgatgtgcaaaaatttttggattgacagtaacttggttatacatgacactgaaatgccttactttgtatgatattccatagtatattaaaaatggtaaaattgcatgggttttgtaggtacttttggaatctagaagaaatgaaattttaccaagttatataaagagaaaattgaatttaacaatgcgaatggtagtctaaccaaatgcatcaatcctgtgtggtttagtgtaaaaatgagaacatgttggtatttatctattgtaagataaaaaagctggtgggtgaaagaaatcatgttatgataaaaaattttgtaattttcttgatgactggaatttttattatgcataactgacaaatcaagtttccaagcaaatgttacatagtgtaggctttacttagcttatcaatttgtcattttgaagctaattattttaattaggttaactatgtacaatattttaagcattactcttgtaagattttgaaaactacattttaacatggaactctagggatagtcaccttttaaatcctgttgaaaagccatgtttaagatttaatttgccaaaataatgtcttgttaatattctttcaataacgaagttgggcaatataaccaatgtttaaaaaagtttaaaatgtataagttgaggcatttgggtggtaagagaatgttatagtgaattatcccttttcttgactattggaggaccaaaaaaataaggtgtattgcgtcttagcagtgatttttatccaatcttgtttccaaaaaccatggtctcccagggccttaaaagccatcatgtaaattaccagtaaagtgtaacatatgcaaacataacaaaatcacttccatagtgacgatactccaaccatatggatattagtcatagaagaactagaggttttatgatatttttttaagtcttttttttttttgtctaggtagtcagtctgcacttaaatatcaatcattttccttttttgcttcttcccttaaaatttatatgtatccagtacatttaattgagaagcgtatgttttttattatgctgtattttctttttattttttaattattgtttatattttcaattcaaaaatgtacaaaataaagttacattgctggtcttgtaagagctatacagttttcctaaatgtatacctgtaactgcagcagttcacctatttcaaaaatttggaattctgttcatttgttattcttaagaccacctcaaatttaaaggctaccttattgtacgtttaaagtgtattataacagtgtggtagttaataaaacactatttttttttcttttgaaaa

SEQ ID NO: 51572 - DNA, 1757 bp, Homo sapiens
  misc_feature (1)...(1757): n = a,t,c or g
ggctgcgtcattttcgaaaagggaaggaaatgaaattacttgcctatgatgatgattttgacttcaatttccaggagcttcagtatctaanggaagaacaaacaatcttaccaggagataacctaattactgagcgtcgctacaacacgaaagatagagctgagatgacttggggaggactaagcaccaggagtgaaatgtgtctctcataccttctttattacccaagaattaatcttactcgatgtgcaagtattccagacattatggaacaacttcagttcattggggttaaggagatctacagaccagtcacgacctggcctttcattatcaaaagtcccaagcaatataaaaacctttctttcatggatgctatgaataagtttaaatggactaaaaaggaaggtctctccttcaacaagctggtcctcagcctgccagtgaatgtgagatgttccaagacagacaatgctgagtggtcgattcaaggaatgacagcattacctccagatatagaaagaccctataaagcagaacctttggtgtgtggcacgtcttcttcctcttccctgcacagagatttctccatcaacttgcttgtttgccttctgctactcagctgcacgctgagcaccaagagcttgtgatcaaaattctgttggacttgacaatgttttctatgatctgaacctgtcatttgaagtacaggttaaagactgtgtccactttgggcatgaagagtgtggagacttttcttccccattttccctccctcctttttcctttccatgttacatgagagacatcaatcaggttctcttctctttcttagaaatatctgatgttatatatacatggtcaataaaataaaactggcctgacttaagataaccattttaaaaaattgggctgtcatgtgggaataaaagaattctttctttcctactacattctgttttatttaaatactcattggtgctatttcactttttgacttgacttttatatttctttaaaaaattccttccttttaaaaaatataaaagggactactgttcattccagttttcttcttctttgttgttcttctagtgtgacttttcaagtgtaacagccattcttcctgactttaatattgtccagttctggtcttttctgtgaattaccactgggccccttacctcaatgctttttgttgatgcccactctggttcccttgtttatctgagtctgttggtaccccaaatgaccccacacccatcttaaagtactttttttcaccttccctgtttagtactggccagatgagttttttctagagctctgtcactatctgaaaagaaagaggctatggggaaacatagaaatggtatgtattaataactgatcataggctgaggagaaaaaatgtagctggctgcaaacccagtgctgtgaggtgacttatatgaggttccagatcaaagacaggccgtgtgagccagtccaggagggtgtaagttctgaatggttccttgctgactttgggtgacacatgtaccacatactggctcagtttaagtcatggttctattgtagatttatttttatattagttaataaatgactttaaattgtcaccaattgaaaatcttgtcactcttttggttttctttatatagctcagccaaatcttgttttatgtcctgtcctcatatcttaagctaaatctgtttggatcatcttaataaactaactgaaattacaaaaaacaa

SEQ ID NO: 51573 - DNA, 806 bp, Homo sapiens
cctctttaaccataagatgtaccgaaattatttcattttcctctactttcctctgtgtcattttagtttactttatggtatttatatgtagagagagaggtatgttaaaatattgtcataaaaaactcaattgaggctatatatgacctattactctatagtatagcattgttaatctttgactcagtatattaattcctttggtgaataaatgtcaccggtcatttctttataaaagcattttggtaagagaaccagcaatatggagacagatttctccctaacccccagaagaagatcaagtcaaacagtagtgtagagcagttacgcaaaatatgaaaatacataatttacagctgcaattttcatattaaaagcagtttaaaactatgagtaattcaaagactttctgtcttggttaaacaggccaactaataaaactgacagagatcattgtgagaatttatctagtcaagatagaacaaaaacggttataattttttaaaagtggtaattgttaactagcagtatataaacagtgtccacaatttggtggctggccacggttttaattttttttttcaagttatttctatagcagacatatttttgaagtctacccacccctgagttcagcaattatactttgagtgtaaaattatatgcccttaattaacaacatgtacaaagctacaaaatgtcatctatacagattaaaaacaattttaaaatattatttaccaattattgattgaatggttttactggggtacgtatttcaaacctttcaccaactggtttcagtt

SEQ ID NO: 51574 - DNA, 630 bp, Homo sapiens
ggggatggttccatcatggcgtcaatgcagaaacgactacagaaagaactgttggctttgcaaaatgacccacctcctggaatgaccttaaatgagaagagtgttcaaaattcaattacacagtggattgtagacatggaaggtgcaccaggtaccttatatgaaggggaaaaatttcaacttctatttaaatttagtagtcgatatccttttgactctcctcaggtcatgtttactggtgaaaatattcctgttcatcctcatgtttatagcaatggtcatatctgtttatccattctaacagaagactggtccccagcgctctcagtccaatcagtttgtcttagcattattagcatgctttccagctgcaaggaaaagagacgaccaccggataattctttttatgtgcgaacatgtaacaagaatccaaagaaaacaaaatggtggtatcatgatgatacttgttgatgccactgttatcatcctcctagcagaagatagtcctacttgagaaaatgagcactttgatcattcagtctttgaactttaacctttgactgggaagtgacctataggcaatggagactacttccctttactgcattttaactcgtgtgcattttgggg

SEQ ID NO: 51575 - DNA, 499 bp, Homo sapiens
ttcaggaggctgcagttcagctttattctcatgcccctcatgtccagttaaggctcaagatcagcccaggccacagtcccccagcactgggactcagcttcccacctggacagggcagggggttctcttgccaactcctgccagcctccttcagctgggggatcccccagagaccgctgcctcagcgggagccacctggaagaaccagaactccagcctggagctgctcgtgggggccagccatcccccctgtccacacactcgtcccagctccatctccgggccccggcgctgaccgtggaggatctcagggcccaggcttccttgtccaaggactccccttggggtccctggctccctgagctcttgggctgcctggggcctccgctgacactccagtgccgagaaggctgcactcccaagcctgctgttcccacggtgtcactggctgagggatggggtgaggggacgtttctccggttcctgtacctcagggccc

SEQ ID NO: 51576 - DNA, 1551 bp, Homo sapiens
aaaataagtaggaatgggcagtgggtattcacattcactacaccttttccatttgctaataaggccctgccaggctgggagggaattgtccctgcctgcttctggagaaagaagatattgacaccatctacgggcaccatggaactgcttcaagtgaccattctttttcttctgcccagtatttgcagcagtaacagcacaggtgttttagaggcagctaataattcacttgttgttactacaacaaaaccatctataacaacaccaaacacagaatcattacagaaaaatgttgtcacaccaacaactggaacaactcctaaaggaacaatcaccaatgaattacttaaaatgtctctgatgtcaacagctacttttttaacaagtaaagatgaaggattgaaagccacaaccactggatgtcaggaagaatgactccatcatttcaaacgtaacagtaacaagtgttacacttccaaatgctgtttcaacattacaaagttccaaacccaagactggaactccagagttcaattaaaacaacagaaataccaggtagtgttctacaaccagatgcatcaccttctaaaactgggtacattaacctcaataccagtttacaattccagaaaacacctaacagtctcaagtaataggcactgagggtggaaaaaatgcaagcacttcagcaaccagccggtcttattccagtattattttgccggtggttattgctttgattgtaataacactttcagtatttgttctggtgggtttgtaccgaatgtgctggaaggcagatccgggcacaccagaaaatggaaatgatcaacctcagtctgataaagagagcgtgaagcttcttaccgttaagacaatttctcatgagtctggtgagcactctgcacaaggaaaaaccaagaactgacagcttgaggaattctctccacacctaggcaataattacgcttaatcttcagcttctatgcaccaagcgtggaaaaggagaaagtcctgcagaatcaatcccgacttccatacctgctgctggactgtaccagacgtctgtcccagtaaagtgatgtccagctgacatgcaataatttgatggaatcaaaaagaaccccggggctctcctgttctctcacatttaaaaattccattactccatttacaggagcgttcctaggaaaaggaattttaggaggagaatttgtgagcagtgaatctgacagcccaggaggtgggctcgctgataggcatgactttccttaatgtttaaagttttccgggccaagaatttttatccatgaagactttcctacttttctcggtgttcttatattacctactgttagtatttattgtttaccactatgttaatgcagggaaaagttgcacgtgtattattaaatattaggtagaaatcataccatgctactttgtacatataagtattttattcctgctttcgtgttacttttaataaataactactgtactcaatactctaaaaatactataacatgactgtgaaaatggcaaaaatat

SEQ ID NO: 51577 - DNA, 1393 bp, Homo sapiens
tttttttttcatagtaatgtaaaaccatttgtttaattctaaatcaaatcactttcacaacagtgaaaattagtgactggttaaggtgtgccactgtacatatcatcattttctgactggggtcaggacctggtcctagtccacaagggtggcaggaggagggtggaggctaagaacacagaaaacacacaaaagaaaggaaagctgccttggcagaaggatgaggtggtgagcttgccgagggatggtgggaagggggctccctgttggggccgagccaggagtcccaagtcagctctcctgccttacttagctcctggcagagggtgagtggggacctacgaggttcaaaatcaaatggcatttggccagcctggctttactaacaggttcccagagtgcctctgttggctgagctctcctgggctcactccatttcattgaagagtccaaatgattcattttcctacccacaacttttcattattcttctggaaacccatttctgttgagtccatctgactttaagtcctctctccctcccactagttgggggccactgccactgagggggggtccccacccaattctctctagagaagagacactccagagggcccctgcaactttgcggatttccagaaggtgataaaaagagcactcttgagtgggtgcccaggaatgtttaaaatctatcaggcacactataaagctggtggtttcttcctaccaagtggattcggcatatgaaccacctactcaatactttatattttgtctgtttaaacactgaactctggtgttgacaggtacaaaggagaagagatggggactgtgaagaggggagggcttccctcatcttcctcaagatctttgtttccataaactatgcagtcataattgagaaaaagcaatagatggggcttcctaccatttgttggttattgctggggttagccaggagcagtgtggatggcaaagtagggagagaggcccagaggaaagcccatctccctccagctttggggtctccagaaagaggctggatttctgggatgaagcctagaaggcagagcaagaactgttccaccaggtgaacagtcctacctgcttggtaccatagtccctcaataagattcagaggaagaagcttatgaaactgaaaatcaaatcaaggtattgggaagaataatttcccctcgattccacaggagggaagaccacacaatatcattgtgctggggctccccaaggccctgcaacctggctttacaaatcatcaggggttgcctgcttggcagtcacatgcttccctggttttagcacacatacaaggagttttcagggaactctatcaagccataccaaaatcagggtcacatgtgggtttccc

SEQ ID NO: 51578 - DNA, 1117 bp, Homo sapiens
  misc_feature (1)...(1117): n = a,t,c or g
gttttgtttggttggttttattttgacattgttaaatttagcttagaggctgacacataaatgttgattaaatgatagaaatacaaaacatatataccaatacagttaaatgtaacagtcacagcacatataccaaacaacgaattcatcacagatatgtacacagatgtgcacaacacacagatgtgccacccctatctgccaagggctcacaaataaatgggagaaacagattccaaaacagatcatggtaatggaatggggtgagtacaaagagaggtccagggtatttttggaagtcctgtggaggatgcccagtgtggatgtatgtgttgaggggatgagtagcccaggaagagaaaacctaagcaaaagatggaaggagcaagatagcagtgtttcagaagagctgggcgggaccttgggaggcaacccgaagaataaatgtgtttgcctggcaggatatgaggctgtgcagagaggcaggggccttgttaagaagctatgctctgnccaaggtctccagggagtcactgagggtttaaacaggaccatgacctgaacagaaatgtctaagattcctcggatgctatgaggtgggtagcctggaaaaggagatgaggcagggagactagaaacccaacacatgtacacagtatacccaggaagtacncttaggcccctgaggcccacagatgcccccacaacacccttactagacacagccaggctggaggaccacagtgattcaacctggggagtgacagctgtgagcatggggccaattacccactgtgggcttggccttttcccaggctttccttcccaggcttccctggcctggagaacagtgtggattaacagttgagattcctccatccgtggagcctgctccccatcccacaagaggacacaaccatcagctctccctagcaggctcctttcctcagggctgccctatcaccccctcaaacccccacaacctgcccccaggtctggttccagaaccgcagagccaagtggcggaagcgcgagcgttatgggaagatccatggaggggcggaaccccttcacggctgcctatgacatctctgtgctgccccgtactgacagccac

SEQ ID NO: 51579 - DNA, 570 bp, Homo sapiens
gcccatctcaaaaaaaaaattggaacctgagaagggggtcgtggggtccccggggcccaccgtctgcacttggcatctgaagtcggggtggtcttgtgggactgaccccttaccctgtgggttctgcactagctccgggcaattggtgacagaatcgagttaaattgtaggacatcgcgttggtgtctgagagggagttggagagctggttggtgtggagggaaaggcttacacacatgtgatttcagaagcgttctgtgggtagaggaatcgttttctctttgagactgttatgagtatgtacaaatgttatttcctgtaaaatattttcattttttaaaatgttattttctagatagaaaagtagaagtgtctctttggggagcgtttttgggggcgtatagtaaagctctgtcatcatgaattaagcgaggtgggctttgagtttcttgggatgacagggaaatgtgagccgcctactggccgtgagcccctggggtgcggttgcaggattcgcccatcctggtctgggtgtggcttgtgaccacctcctgcagttctctgcccagg

SEQ ID NO: 51580 - DNA, 1156 bp, Homo sapiens
ttttttttttttttcttgtttaaaaaaattgttttcattttaatgatctgagttagtaacaaacaaatgtacaaaattgtctttcacatttccatacattgtgttatggaccaaatgaaaacgctggactacaaatgcaggtttctttatatccttaacttcaattattgtcacttataaataaaggtgatttgctaacacatgcatttgtgaacacagatgccaaaaattatacatgtaagttaatgcacaaccaagagtatacactgttcatttgtgcagttatgcgtcaaatgcgactgacacagaagcagttatcctgggatatttcactctatatgaaaagcatcttggagaaatagattgaaatacagtttaaaacaaaaattgtattctacaaatacaataaaatttgcaacttgcacatctggaagcaacatttgagaaagctgcttccaataaccctgctggttatattgggttttatagggtatatctcccaaagtccatgggttgggatatagctgctttaaagaaaataaatatgtatattaaaaggaaaatcacactttaaaaatgtgaggaaagctttgaaaacagtcttaatgcatgagtccatctacatattttcaagttttggaaacagaaagaagtttagaattttcaaagtaatctgaaaactttctaagccattttaaaataagatttttttccccatctttccaatgtttcctatttgatagtgtaatacagaaatgggcagtttctagtgtcaacttaactgtgctaattcataagtcattatacatttatgacttaagagttcaaataagtggaaattgggttataatgaaaatgacaagggggccccttcagcagccactcatctgaactagtaataaacaccaacacaaaatgattttttatattaaattttttttaggatctctaaaggtaggaaaatccaatctttcttaaaaatactttcctggggttgtgggcaacatgtgctttacctctttaactctacctaaaacctaaagttatttctatagtataaatttcaaactccctggcaaggaatgtaaatgctaaccagctaggtatttatagtcatgcgccgcattacaacttttcaaagacagaccgcgtattt

SEQ ID NO: 51581 - DNA, 424 bp, Homo sapiens
ttttttgtcatttcctagaccttaaaaaatgtgtattgagaaagaactctgttagctatacagaagatgaactgggcaatatagagtagcagcatggagaccagtctgactgaactaaggcagtggaagtgtggatgaggaagagaggtgaaaattgagaagcgctatcctttctctttgggcattattaggaggctcacagacaagtccagggagtctggttataccctcctgtgccattcaaccaggtggctttcccatgactgtgatgaataaaattgagaagcccctgcccttttcagagcagagggtgaggagaaagctaccattttgtcctcatccttacccccgttgacttggcgagagatttgacctttcaggttttgatcctgtcattttctaggatgtggtgcacgcactttgc

SEQ ID NO: 51582 - DNA, 320 bp, Homo sapiens
gcctgatgaagcatttgatgcccagtccttctcatacaacctcccaaacagagttactgttaagacaggtccggatgttggcttcagactaaacaagcgtccgtcagttgacacctgaaattctccaggtgcaagctgattttcactcagcaacacctcaggaaagacatactgggttccgaaagtgccactgaggggagaacatttcaaacctggtagaagctgtttcagctgagtcaccgcaagtgtttaaattagtcgttttacatttcaacagggtacaaatctgtagataatagcgcccttccacagtgtgcagt

SEQ ID NO: 51583 - DNA, 1196 bp, Homo sapiens
gcgcagagttagacatgcatggcgtagtcgtttgagacgagtttgtttgttcggcttttcagggcctcttggtgatgtaacagtgaaacgctgccccagaaaccagggatatgtggtcctataaatgtaaacacactggcactatgaggaacagatagctctgtttctagctccctcactgggacttctgaccattgcaacctgagatacctgggctgcagacagcaggaaccagacatccacaagttattgtttttgtccccatgttttcataatcccagaactaagctcaaattttctgagtcctgactaaactattcctaggctagagccaaaaatcatgagaatgagattttttaacactattgccactgcaggtgtcccgcttgctgtcttagaagtatatacagtgaaaagacaatggtaacatctgcctccttttcatttgtgaagccagaacaccacattcctcagcttttacacatctgagacacttttttgctaaagggatagcttggcgcttcagtgagctgctgaatatgctcagtcattcaactcttcactgtccaggagtcatccctgcctgggaaggttccaagtttcccagcaagcaccagttcccttgggagtgtgtcctatagtgaataaatgtcaaattctccccatgggccaaatggtgagggggaaggaaataactagagagtgaaagagaaaggtctttgctttcaagtagaatcatctagtcctctgtttggctgctcagaattggacttgcagagccgattcatgatgccctggagcatgggctggacaatgcccaagagaggcctcttcaaggggtcgccatcccaacaggcttccatcaactgccagcactcctcatcaaacacaggaagacgttctgggcgagcccccctccgcacattgttccagagatggtctttgctagcacacctctcaaatgcctcagggagcttgacagagcctgagcagatataccagaaaagaattccaaaagcgtagacatccacggaattatcgtacttccctgtgaaaagttcaggggccatatggattggtgtccccacaatgctgcctgacatcatggcctctggcttgcagaatcctaagtcagtgatcttggcacggttctgcttatccagcagcacatttttcagtttgatatcacgatggac

SEQ ID NO: 51584 - DNA, 591 bp, Homo sapiens
aaaaatggccatttgaacccacactgtatttatattttatatagagtgatcacttcatagtcttttgagtctccaagaggattgacttaattaatggtttaatgtctttcctttcctgccttagagaaaaaggaagtgacagagaaaaataggacaaattattaaacttacttctgtgattattcatttaaaatatactgaatacatatgcatacattcatccaacaaatatttattggataccaagtatgtgcttggcactgtaccaggccttagggacacagaagaagaagtatacagcagtgtaaactgacatttcttaaccactatataaataaaccccactttactactaatgtgacatttcaacatgttatacctgataagacatatgtaaagagggcacgattttgaggtatatagcttctttttctctacaattaccatgtgatataaattcctaaaccccttcaaatagctttataaatgaagagcttccactaatgaaaacctcccaaaattacagttcagttttagggagacaaaggaaatggaacttcgggtataaaaaacaaaaatgaaactgggggt

SEQ ID NO: 51585 - DNA, 598 bp, Homo sapiens
cccacgcgttcgaagaccccataaatgtggtgaatgtgggaaagcctttcgattaagcacataccttatacaacaccaaaaaattcacactggcgagaagccttttctttgtattgagtgtggaaaaagtttcagtcggagctcattccttattgaacatcagaggatccatactggtgaaagaccttatcagtgcaaagagtgtgggaaaagtttcagtcagctttgcaaccttactcgtcatcagagaactcacacaggagacaagccccataaatgtgaggaatgtggaaaagcctttagtagaagctcaggtcttattcagcatcagagaattcacaccagggagaagacttatccatacaatgaaactaaggaaagttttgatccaaattgcagtcttgttatacagcaggaagtctaccctaaggagaaatcttataaatgtgatgaatgtgggaaaacttttagtgttagtgctcatcttgtacaacatcaaagaatccacactggtgaaaagccctatctatgtactgtctgtgggaaaagcttcagccggagctcatttcttattgaacatcagagaatccacactggg

SEQ ID NO: 51586 - DNA, 567 bp, Homo sapiens
gcgtccgccatgtatcctgaacacaaaatggcgacacgtggttagcattcgtcgccaacgagaaattggggtcggcccgaaagctctagaatgcacccctcttcctccccggggccttccacctccgcgagttttatgacttaaaaaagcccacaggctggtctgaaggtcggaggcctaattttaacgcgttttcctccctttaatttgaaacgggaacgcgaatgactgtaaaatgtgggcacaatatttaatctctcgcctttttaaagcttaatagtggataataggggggcagtatcaagggataatttgggtccccacagtaccaaagcatttagaaacctctgtttaatttaaggaatgagataagttactgcttttctagacttcctagcatgggctgttgtgctggagagaacgagagctacgaagagactacagtgcctctgactttttcataggacagttggccgaggaagacaaacataaagatgaagtgcttaattcaaggtcacacaatgtcggggatggacctccagatttccctactgacctgcataactt

SEQ ID NO: 51587 - DNA, 400 bp, Homo sapiens
agaggctgtggtacttctggttccttctgatgatgggcgtgcttttctgctgcggagcacggcttcttcatccggaggcgcatgtaccccccgccgctgatcgaggagccagccttcaatgtgtcctacaccaggcagcccccaaatcccggcccaggagcccagcagccggggccgccctattacaccgacccaggaggaccggggatgaaccctgtcgggaattccatgggcaatggctttccaggtcccacccaactcaccccaggggagtgtggcctgcccgccccctccagcctactgcaacacgcctccgcccccgtacgaacaggtagtgaaggccaagtagtggggtgcccacgtgcaagaggagagacaggagagggcctttcctggcctt

SEQ ID NO: 51588 - DNA, 569 bp, Homo sapiens
ggggacaaaaatatttattgggactgtctttgaatttagtagaatcactgtatcattaacagtttggggaagtactgctttgcagtcctttatttgaaaacttaggtctagctgtgttttgcatcaaaatttttgagctattcaaaaactaataggatctgtgtaaaatatttcactcaaaactactaaaaaaaagtctgggatggcagctcattatcaaatatactcctatttttgtggtgatttatgaacatccccactaagtataactaaagatcataaagagcctcagatcaagtttggtcaggttttgtcaccaagctttgtaaataaactggttttcatagctttttggagatgagaattgaggataagaaattgtgtctctgtcctttttttttttttttgttaagtcttacatgtattttactgtaacatcttttgaattggatatttaactaattcaacatatttttcctctttgcagaatgggcagttcatgttaaaatcacttttcatggaaagagctctatgtaacagcataataaaactgcctacctagcagcaaa

SEQ ID NO: 51589 - DNA, 221 bp, Homo sapiens
cggacgcgtgggttttttttgagaacaagagcttttaaaaattaataaacacaagtataatttatttataaaatgtgtttgtggaaacaatactgaagtgctattaaaacacgtatcatttatagatgctgattttgtcatgcccaaatctcattgctggacagaatttcaactattccattgctgtcaggcattgtttttgtttttctaagcaggaatct

SEQ ID NO: 51590 - DNA, 302 bp, Homo sapiens
ctaatccctgctcacgtggataggcatgaggcttcagagacagcacagagagtgcctggcagagcaggtaggcagctaacagctgccatttgtaccttcactgggttatttatatctaaggtcattctccctgtgagatgaagagcgctttgagggcaggggtggggtctttttggtatcccaggacttagcataggttgaaacaatgaatggatgaatgaagtgtctggggatggtcagggtacactcttgagaagtctgcccctcaccataagattctggaaaacatccttcacccctca

SEQ ID NO: 51591 - DNA, 824 bp, Homo sapiens
atcatcacttctgtcttggtttcatcctcaatctgttttactctgaaattactttattgccttcctcctcactgatgtaggacagtgttcaacatcttaaaactcacacatcctgatttaacattttcatgtttaatatttcaaaataatgtaacaaactaaaacctaattttagactgtctttaaggcacaccaccttcatattcctttgtatttaaatcccctgttctcttaacaggttctggataaaagcagtctccaagtcccaaatgagtggtgccaccagttttaaaagtaacttgcttggctcagtgcagaacagatcatttgatttaacacagaagggaaataaaaaggcgtattaaatttcaggcagattcgcttcatcaggtccagtggtcactacacccctgttgtactataggtctatgcttccctggtttccttcccattgatgtatccagaggttggcagggagcttgaggaagcaaaggatgggggcagggaggagggtcacctgcccactgcaactcttacccatgtgaggagtaggtttcactagtctattattagttttgttgaaggacttctgcaggggttgtgaggcaagagcttgtgaaagggccattgttgtgggaacagacaccacggggtacttgtggcagaacttagattgtcctgggagtaaattctgtcatgacctttactcctcttggacactcttttcgagcatcttaaatcacagagctctgaaaaacatccttgggcttgatccccagcagtcctgaatcctgaaagtccacagctggacagtttttttggtc

SEQ ID NO: 51592 - DNA, 692 bp, Homo sapiens
  misc_feature (1)...(692): n = a,t,c or g
ttttttaagggagaacagttttattagcatcacagggtccatttttccctttccatccaagcatccagagtctggtgtcctttaatcagttggcaggttcaacctggaggccactggagctgccggcccccaagtacatgaatgtgcagatgatacacagattgtgcacccagcttcccatcgttgatcacaagtcggtatccatctcccaggccctcagcctttgctgtctgcttggccacaaggagtaggtgtcctagaagctatagagagagcggagggacataggtggctgctggtcttcttcttcagcctggctaatccgaggaatgggcttcttaggaatgaccaggaagtgcacaggagcctgaggggccacatcacgggaacacaagacactgctggtcctcatagagaatgtcagctgggaggctcttgtccaggatccgggagaagatggttggggctgctcccccaggagttgcctgctgggccttggccacttcattcccatcagtcacacctgcagctcctcggacctgccccccgcgcacccccgtggccgccacggcttctcgccgcgcgcaacccagcagccagcacgcagcgtgccgccatcttccctgagccgcggaacctctcacccgggtcagcacntcgntccgcggccggccgtgggtggggnctnccgg

SEQ ID NO: 51593 - DNA, 789 bp, Homo sapiens
cccgctccaccctccacatgccctttctaactcctcagttgacctagggtccccaagccttgccagtcacccccggggcctgctgcagaaccgtggcctcaacaatgacagtcctgagcggaggcgcaggcctggccatggcagcctgaccaacatcagccggcacgactccctcaagaagatcgacagccctcccattagaaggtccacgtcatcagggcaatacacgggcttcaatgaccacaagccactggacccagagacaattgctcaggatattgaagaaacgatgaacacagctttgaatgaactccgagaactggagagacagagcacagcaaagcatgcccctgatgtggtgctggataccctggagcaagtgaaaaactctcccacccctgccacttccacggaatctctcagccctttgcacaacgttgccctcaggagctccgagcctcagattcgacgtagcacgagctcctccagtgacacaatgagtactttcaagcctatggtggcacccagaatgggcgtgcagctgaagcctccagcccttaggccaaaacctgctgttcttccaaaaacaaatcctaccataggacctgccccacctccccagggtccaacagacaagtcatgcacaatgtaaaaaccagccaagcaaggccataaagggaggtgacttaaaaaagaaaatggattagtgacaaaagtcactgatccataactttccttagttttgtgcttataactggagatcttttggcttttctatgttgtcgaatg

SEQ ID NO: 51594 - DNA, 839 bp, Homo sapiens
tgcctaattgctcttgctagaccttctagtataatgttgaatagcagtggggaaatcaggaattttcatgatattaggggaaaaattttcaatgttttgctattatgttgttagctgtgggtttttatggatgtctttatcaggttaagaaagttcccttttcttcctagtttgcagagtgtttttaccatgaaagggtgttggatttttgtcaaatgctttttcttatcaattgaggtgatcatgctgttttttccccttcattctattaatatggtatattattacatcgattgacatttgtatgtagaaccatccctgcatttctttgataaatctcacttggtcatgctgtgtgatcattttaataagctgctggatttggcctgctagtattttgaagtttttttgcatctatattcataagggatattggtctgtagcttccctgtgaggtctttgtctggctttggtgttaaggtaatgtccgccttatagaatgtcacagggtgctcctttctcttccattttttgggagagttcaagaaggattagtgttaattcttctttatatgtttggcatagtttgccagtaaactcatttaatcctggactttctttgttgggagatttttgattactggttcaatctctttacttgttacaggtctgtttggattttttatttccttttgagccagttttgtcaattggtgtgttttttcatcgaggtcatctaaattgttggcaacaatgcttctatgaataaatttgtttatagttaagttgcctaaaataccatgcaattcatctaatatgtataaaacttgaaatatatt

SEQ ID NO: 51595 - DNA, 706 bp, Homo sapiens
  misc_feature (1)...(706): n = a,t,c or g
ttctaggtgatttattttctgcagactttcttgcatatggttaagcccaatcatttcatttaagttttataaacgtctgtattagaggatggcattttaaaattctttcccccagaaccccggaatgtacctttctgggctatgcaagcctcatgcactgactacacagggcccacatgggtaaatatatatgtattgatgtgtatttacatatcaaaaattaaatagactatatgcttaaattagaaacacaaagaacaaaggctaagttcactgctttactattcaataaaatagctttaaaaactgtgaaacagccaagtggccacattctaaacagcgacggagacctccaaaatattctgtccaccaaaaaaacacgaagtttctgaatatgtaaaaattagtagaaaatcaattaggtgacaaagtcattatagtagtggctttcaaaccctttataaaaaataggcaggaatcattttaaatgtgggaattattttatctactgaggatctggaaggcaggcactcagtatacacaagtgtgggctggcattgactgcagtgaggaagggcagggcgccttccatgggcttcactgccccttgggagggcgcacttgcacttaacttcctggaaggcaactccttgttcccccaacactgcatggggtcacagttccaaaaactggatttccacntttg

SEQ ID NO: 51596 - DNA, 930 bp, Homo sapiens
  misc_feature (1)...(930): n = a,t,c or g
ggagaacagcagtaactttttaaaaaaaaacagagtgttctctattctctcctagttgttggcttatatgcccgagaggggcaccacaaatctggctgacagctctgagcaggtagatgtggggcttactggctggaagggacataggggaaccccactccccaaggagacccttttcttagggtatgtgagcaagcagcttgagtatgagtggatgctgcaaacagatccatagggcaatgtggctaggccattttgggggcactcttcctccaagcatgtttcgttccatcgtctgaatcctgggaagaaggtaacttcagcctcctgccagcatccttgggaaagagattaacatctcagcatccaatgggactgtttacctaataaccctgactttctcagtacggtttctcacccttaacatagccttctgccaggatgggagaagaaatccagaagtaagtcatggcagtgcatactgttggctcagaattctgtgcagacagagcccacagcagcagccctgcccagcatctgcttctgaaacagcctctccagcctggctggtgccctgctcattcacttgcatggccagaagtaccaggtacctccaactcctgagtttttagaatcttcttagccggggnnnnnnnnnnnnnnnnnnnnnnnnnnnnnnnnnnnnnnnnnnnnnnnnnnnnnnnnnnnnnnnnnnnnnnnnnnnnnnnnnnnnnnnnnnnnnnnnnnnnnnnnnnnnnnnnnnnnnnnnnnnnnnnnnnnnnnnnnnnnnnnnnnnnnnnnnnnnnnnnnnnnnnnnnnnnnnnnnnnnnnnnnnnnnnnnnnnnnnnnnnnnnnnnnnnnnnnnnnnnnnnnnnnnnnnnnnnnnnnnnnnnnnnnnnnnnnnnnnntgggggtgagaccacagtctga

SEQ ID NO: 51597 - DNA, 450 bp, Homo sapiens
  misc_feature (1)...(450): n = a,t,c or g
tataaatgcacactgatgttcttataagtgaaaagatatattgttttggttttgctttaagattccagcaaatataaaacagaaaaagagggaatatattaaaaaggctggcaaaatatgtatcattgttgaagcttagtgatgggtgcattgtattcaatatagtattctcttttgtgtatatttgaagtttttcatgatagaaggtttaaaaatttagaacaaaaatgaatgtggaggttcaggatcctaccagatgtttcctaaatgaactttaagtgacaatggggaaaaatgtcccatatccancccctggagtttaaggcagggaattccttggtagggggctattgaaaaatagccaaactgttagtcaaaaatgtacatatgatctcatggccacagatagtaatgtagaagacagatcacgaaagtactaatccttgggtg

SEQ ID NO: 51598 - DNA, 1013 bp, Homo sapiens
ttttttttttttttttattttctgaattatttattaacatttctcagatgttctaaagccctcccttgcctcctctctgccaaaccagggccctctgtcctacttcaaaagcccaagagctcacttaataaagcaagccccagtccccacctgggaagggcctggtcacatgggagggcaggtgagggtccctgagggacagcttgttgccctcactgttcctgagatgccccagcccaagaacgaaacaaaacttctcatcatttctcctcaggcctcagccgagctggcccctcttgtgctttctcaccctgttaggactgcggatcaggctgaagggctccccagggtgagcctttcctggtccgactcactggcatcaccatgaggaggcctggcggcagctctgccctgtgcacaccgtggtaacctggcaacaggaacatttgccaccctgcaagtctgaggagcagatgagccactggagggggcgaagtcccagagccacctctggcttcacccagactcattaaatgaaagacactgtctctgctagggccaagtccctgtcatgtctggctcctgttcccctccctggtccctctgccctgtggcaaggagcccaggtgcaggctcataggttgttccgctgaagtgcctcacacaggttctggttggtgtcgggctcctccgtcagcacctccacagcctcccactccccggatcggctcgacctcttgatggcatccaaccacgctctgcatgtacagcccatcctcgaaggaggcggccatggagacaggggtgcggtccccaggtgcgcggtcgccctgcccctggaaggaactgcgcaaggcctgcaccatgtagaccatgcccttcaggtacagcagcgggacatcctggggcccctgctcaggcagtcctgcgcccactgccagcgagtccctcaagagcagctcctcttgcgtggcagagttcttctgcccatagaggtcggctccccgggcgaa

SEQ ID NO: 51599 - DNA, 352 bp, Homo sapiens
aagctggatcttctgtattatattccacattagcatctatcactttacatttgggagatcctgtccaaaaaaagattatgcctcctaaccaaacattcagcagggctgcaggaacaggccccctgaacaaacatcctgccaaagtactttaaagcaccgtaagctcccacagctgtgcattttcagacgactcagcagattagcgtggagtctcttagcctctgcttggtctgttcctttcagtgatctctcacatggcccagtccattcggtttgaaaatcctcatgaaatgagcagattaagatctggcttcagtagagggccatggggtgggcatggaggggagagggt

SEQ ID NO: 51600 - DNA, 398 bp, Homo sapiens
cgaggtctccgagcggtgtctggagctcagtgacgacacctgctacctggacgccaagagcgagcagtgggtcaaagagacgccgctgcccgcccggcggagccaccactgtgtcgcggtgctggggggcttcatcttcatcgccggcggcagcttctcacgggacaacggaggggatgcggcctccaatcttctttataggtatgacccccgctgtaaacagtggatcaaggtgagattaaagccagattatttcttttctcttgaggactctctcggtttccttaacctagccttgactttccttacctctctggggccttgacaactatcctgcttctgaatgaggtgtgatgataaagtgacgagcagaataccccggggcctacatcctggac

SEQ ID NO: 51601 - DNA, 3929 bp, Homo sapiens
ggacaggaggatcaccctcttcgtcgcttcggccagtgtgtcgggctgggccctgacaagccacctgaggagaggctcggagccgggcccggaccccggcgattgccgcccgcttctctctagtctcacgaggggtttcccgcctcgcacccccacctctggacttgcctttccttctcttctccgcgtgtggagggagccagcgcttaggccggagcgagcctgggggccgcccgccgtgaagacatcgcggggaccgattcaccatggagggcgccggcggcgcgaacgacaagaaaaagataagttctgaacgtcgaaaagaaaagtctcgagatgcagccagatctcggcgaagtaaagaatctgaagttttttatgagcttgctcatcagttgccacttccacataatgtgagttcgcatcttgataaggcctctgtgatgaggcttaccatcagctatttgcgtgtgaggaaacttctggatgctggtgatttggatattgaagatgacatgaaagcacagatgaattgcttttatttgaaagccttggatggttttgttatggttctcacagatgatggtgacatgatttacatttctgataatgtgaacaaatacatgggattaactcagtttgaactaactggacacagtgtgtttgattttactcatccatgtgaccatgaggaaatgagagaaatgcttacacacagaaatggccttgtgaaaaagggtaaagaacaaaacacacagcgaagcttttttctcagaatgaagtgtaccctaactagccgaggaagaactatgaacataaagtctgcaacatggaaggtattgcactgcacaggccacattcacgtatatgataccaacagtaaccaacctcagtgtgggtataagaaaccacctatgacctgcttggtgctgatttgtgaacccattcctcacccatcaaatattgaaattcctttagatagcaagactttcctcagtcgacacagcctggatatgaaattttcttattgtgatgaaagaattaccgaattgatgggatatgagccagaagaacttttaggccgctcaatttatgaatattatcatgctttggactctgatcatctgaccaaaactcatcatgatatgtttactaaaggacaagtcaccacaggacagtacaggatgcttgccaaaagaggtggatatgtctgggttgaaactcaagcaactgtcatatataacaccaagaattctcaaccacagtgcattgtatgtgtgaattacgttgtgagtggtattattcagcacgacttgattttctcccttcaacaaacagaatgtgtccttaaaccggttgaatcttcagatatgaaaatgactcagctattcaccaaagttgaatcagaagatacaagtagcctctttgacaaacttaagaaggaacctgatgctttaactttgctggccccagccgctggagacacaatcatatctttagattttggcagcaacgacacagaaactgatgaccagcaacttgaggaagtaccattatataatgatgtaatgctcccctcacccaacgaaaaattacagaatataaatttggcaatgtctccattacccaccgctgaaacgccaaagccacttcgaagtagtgctgaccctgcactcaatcaagaagttgcattaaaattagaaccaaatccagagtcactggaactttcttttaccatgccccagattcaggatcagacacctagtccttccgatggaagcactagacaaagttcacctgagcctaatagtcccagtgaatattgtttttatgtggatagtgatatggtcaatgaattcaagttggaattggtagaaaaactttttgctgaagacacagaagcaaagaacccattttctactcaggacacagatttagacttggagatgttagctccctatatcccaatggatgatgacttccagttacgttccttcgatcagttgtcaccattagaaagcagttccgcaagccctgaaagcgcaagtcctcaaagcacagttacagtattccagcagactcaaatacaagaacctactgctaatgccaccactaccactgccaccactgatgaattaaaaacagtgacaaaagaccgtatggaagacattaaaatattgattgcatctccatctcctacccacatacataaagaaactactagtgccacatcatcaccatatagagatactcaaagtcggacagcctcaccaaacagagcaggaaaaggagtcatagaacagacagaaaaatctcatccaagaagccctaacgtgttatctgtcgctttgagtcaaagaactacagttcctgaggaagaactaaatccaaagatactagctttgcagaatgctcagagaaagcgaaaaatggaacatgatggttcactttttcaagcagtaggaattggaacattattacagcagccagacgatcatgcagctactacatcactttcttggaaacgtgtaaaaggatgcaaatctagtgaacagaatggaattggagcaaaagacaattattttaataccctctgatttagcatgtagactgctggggcaatcaatggatgaaagtggattaccacagctgaccagttatgattgtgaagttaatgctcctatacaaggcagcagaaacctactgcagggtgaagaattactcagagctttggatcaagttaactgagctttttcttaatttcattcctttttttggacactggtggctcactacctaaagcagtctatttatattttctacatctaattttagaagcctggctacaatactgcacaaacttggttagttcaatttttgatcccctttctacttaatttacattaatgctcttttttagtatgttctttaatgctggatcacagacagctcattttctcagttttttggtatttaaaccattggcattgcagtagcatcattttaaaaaatgcacctttttatttatttatttttggctagggagtttatccctttttcgaattatttttaagaagatgccaatataatttttgtaagaaggcagtaacctttcatcatgatcataggcagttgaaaaatttttacaccttttttttcacattttacataaataataatgctttgccagcagtacgtggtagccacaattgcacaatatattttcttaaaaaataccagcagttactcatggaatatattctgcgtttataaaactagtttttaagaagaaattttttttggcctatgaaattgttaaacctggaacatgacattgttaatcatataataatgattcttaaatgctgtatggtttattatttaaatgggtaaagccatttacataatatagaaagatatgcatatatctagaaggtatgtggcatttatttggataaaattctcaattcagagaaatcatctgatgtttctatagtcactttgccagctcaaaagaaaacaataccctatgtagttgtggaagtttatgctaatattgtgtaactgatattaaacctaaatgttctgcctaccctgttggtataaagatattttgagcagactgtaaacaagaaaaaaaaaatcatgcattcttagcaaaattgcctagtatgttaatttgctcaaaatacaatgtttgattttatgcactttgtcgctattaacatcctttttttcatgtagatttcaataattgagtaattttagaagcattattttaggaatatatagttgtcacagtaaatatcttgttttttctatgtacattgtacaaatttttcattccttttgctctttgtggttggatctaacactaactgtattgttttgttacatcaaataaacatcttctgtggaccaggaaaaaa

SEQ ID NO: 51602 - DNA, 752 bp, Homo sapiens
cctgtaaactttcaatccataactgtacatcctaaagcattctggcacaaatgaaatggaactgcctcttgtgggtctatttcagaagtctgttgtcagagttcagttcacaggcatcaaccagaagcctagtgaggccgtttgaaattctggcccagattaattttttaaagctgcatttggagctttttaaagtcgagctgtttccaaaggcttaactgaagagtaactgatttcactggaaataaaagtccacatgtgatcccagctggagtgtggtcatatttttcttgcaaacctagaatgtcttggggaacaaacggctgtcacgtgtccccttccaaaaatgtcttaaacaccggaaaggagggcaggctaaggtgtagcccttcccaccctgggtgccagggttgggggtgctgtaagtgaaatatcaaagctgaggtcactaatattctgaatttcagcctcagaggaaggagcgtgtgcaggagtccaggaggaggggaggaaccagagacggggaatggcctggatggatgagtcgagacatggggaaagctgcttcctgaattatgtgttctgtgtactcctcttcatcagagcagtgggaaggggtcttttgtgagaggccgggcctctccaccaaaaggcactcagttaacaagcacatccatgggccccactgacccacacggaagcctgggaggatcagcagaggccagtcccatactatggaggaggggctgtcc

SEQ ID NO: 51603 - DNA, 1654 bp, Homo sapiens
gcatgtcctgtgggagcttagaaccctgaagttctagtgtctgaaagatcagactccacgtcctgctgtcagccttgtcatcttgtctgatgtctttcagctgggagccccaaaccaggacagttctcggaccaaagatgcccccacactcaaaagtctgtcccatcttgtgtttggagaaggaaacaatgttggcaggcagcactctgtggtggtcagccctcagagctgtttctaggcatctctcagatcagacagcaaagaatctacccagatctgggctgggtggaggtgtggctgggctgggggccattctgagcctgcagtgagagtttggcccagcctcagtccttgctcttctctggctacctctgcagggagctgcaggggcaagcactctctccagcactcaggaagcccggccgagggtacctcctcgtggaaagaatgcactttaaagctctgctgaggagttcggagcccaggctttcaggcgacctctgccctccctgcctctcctcaccctccctctcttcctgcagggcctgggaagggctttgagggagcctgggagccatgtgaagaggggcacgcctgggctgtcccacagtttagatccagttggaggttctccctggctcctgcaggcctgcggggaatctctccccactttcaggcctccggccagctgcctgccctcttgtctgtgcttcagccctgcacaaaagcagcttggtgacaccactcagccacccagagtacgtgtttacaggctttccagatcaccttcctgtggggtgaacgtaatgaggcggggctggtccttggaatttcccctggaaaatggtaacagactccatccttgacccggggatgagcatgaaggcattgtcccaaaggcagaggccaccgtggtaggaattccaccaaggccagaagggaaaaaggaagaacccaccgtgtctggctgtgcgggccctggggagggtcgtgagtgcagcccctctctacttccgtgcctttgtaaaacgtgtagataaccgcagtggttggctgagccaagaactctcctaaatcagtggctttctccccaccccttgctggggagtcatttttaaaaaaatctgtgggatataaaattggcctcctgctgcttcagcctacctctccctctgctgacttaatgtcgtgattctgtttcttcagatatttaaggctgttaggttgtgtgagccttgaagtgtgtgtgtgtgtcccagcgactgtccactgtccaggagatgcatgtctttgtattggagatatttctgttactcattctcttggtgctcacgattgccatggccatagggccacagtgccgtatctgctgcagacatgattgtttcttgttctagaggttttcttgttttcgaatcttgcctgatgaatccagccagaccaaggggcctagatttgacctctgtcctgggctcctgggccaggtgcaggaacatctgaggccactctgctggccacctccagtgggtgctgaccacaggatgggctttgtttacactcattttcaccctgattcttgcccccactttcataaaagaaacttcaaaatgctgacgctttggagagtaagaaaatcaatcttggctgggcacgg

SEQ ID NO: 51604 - DNA, 1378 bp, Homo sapiens
gcggagggataatcggggcggccggggctgaagggagaggcgcaggagccctggggagagtggtccctgcccttccgcgcctcgagccatcgctaccgcccttcggaaccagtgcagcggccgatcagtaaacacagagactggggatcgatcatggggctttgtaagtgccccaagagaaaggtgaccaacctgttctgcttcgaacatcgggtcaacgtctgcgagcactgcctggtagccaatcacgccaagtgcatcgtccagtcctacctgcaatggctccaagatagcgactacaaccccaattgccgcctgtgcaacatacccctggccagccgagagacgacccgccttgtctgctatggccctaagatctctttcactgggcctgcctcaatgaacgtgctgcccagctaccccgaaacacggcacctgccggctatcagtgccccagctgcaatggccccatcttccccccaaccaacctgggctggccccgtggcctccgcactgagagagaagctggccacagtcaactggggcccgggcaggactgggcctccctctgatcgatgaggtggtgagcccagagcccgagcccctcaacacgtctgacttctctgacttggtcttagttttaatgccagcagtacccctggaccagaggaggtagacagcgcctctgctgccccagccttctacagccgagccccccggcccccagcttccccaggccggcccgagcagcacacagtgatccacatgggcaatcctgagcccttgactcacgcccctaggaaggtgtatgatacgcgggatgatgaccggacaccaggcctccatggagactgtgacgatgacaagtaccgacgtcggccggccttgggttggctggcccggctgctaaggagccgggctgggtctcggaagcggccgctgaccctgctccagcgggcggggctgctgctactcttgggactgctgggcttcctggccctccttgccctcatgtctcgcctaggccgggccgcagctgacagcgatcccaacctggacccactcatgaaccctcacatccgcgtgggcccctcctgagcccccttgcttgtggctaggccagcctaggatgtgggttctgtggaggagaggcggggtaatggggaggctgagggcacctcttcactgcccctctccctcaagcctaagacactaagaccccagacccaaagccaagtccaccagagtggctgcaggccaggcctggagtccccgtgggtcaagcatttgtcttgacttgctttcctcccgggtctccagcctccgacccctcgccccatgaaggagctggcaggtggaaataaacaacaactttatt

SEQ ID NO: 51605 - DNA, 555 bp, Homo sapiens
aagtgaatggatagaaacagacccagaggaagcaatggaaactgggaagaaaatgaaatgacagctgtaatactggctaaaagaacattttaatttataactactataataagagatgtgccatactttttttggcttaacaacaatgtaacaatagcatcaatagcatttattgaatgcttattctgtgagagcactgagtagagaactttttgtgtgttacctaatttaaccttcataacaatcctatgagggtagggccctgctactatcatgtccaccttatagatacagaaacctaactggggagtgaagagctctctctaaagccagagagctgatgaactagcaaaagtctgggttctaacccacaagagtctgactctggagttcatacatgatcttacccagtaggctgttacagaaggtcactgttttgataatgctatttttgccaacttgatttgaaaaagcaaatggcagaaatgtgaccaacctgaaaactgccttcttgaggtttttggtatagtactaacaagaccagcaaaaggtatt

SEQ ID NO: 51606 - DNA, 704 bp, Homo sapiens
ctgggccagtggtatgagcacggtgccaggtggctcccgccactccctggggatccaagtgcggggtggctggggtgtaactgggggagaggaggagagcctcactgtccctgtcgctgacacctggcaggcggggagctttaaggtggccacccaggagaggaacccccagagagcccagatgaggctgcggaggcagaagaagggtgtggtccccttcctgggggattttctgactgagttacagaggctggattcggccatcccggacgacctggatggcaacaccaacaagaggagcaaggaggtccgagttctgcaggaaatgcagctgctccaagtggctgccatgaattacaggcttcggcctcttgagaaatttgtcacctatttcacaagaatggagcagctcagtgacaaagagagctacaagctgtcctgccagctggagcccgaaaacccgtaggctggcaacatcctgcagtggctgggaacccaccgggatgctggccagaacaccggctctgcaccatccctcacccagaccgtagacaccagggaaccacatctaggaggctggcagctcagctgcatcttgccctggatcctcatcaccaactgctcctgctggccaggatcaggccatgggacttttgtgagtcaggcgggagaccattttatgtttattttctttagtgtataag

SEQ ID NO: 51607 - DNA, 394 bp, Homo sapiens
caattacatatagtgtgacacattctacagtgggggaatccagggttctcaggcagattgtaggagagccacttcatctagatcacttattttcagtgcttcaactgtgttttcaatgaagatgtcactttgaaaataatacttctaatttatgccccaagtgttattgcttttaacttaccatagttttactacataaaataaatgaactgccctcatcaatagaccatgtaactacattggatagagcttgtaataggttttgtgtccttttctgtggaatatctgctttgaagtatcaactgagatatttcctgcttcttaacaagatttcttagtcctcagtatttacatttaaaaatccaaacagctttgacaacaattgtaaaaaaaa

SEQ ID NO: 51608 - DNA, 472 bp, Homo sapiens
  misc_feature (1)...(472): n = a,t,c or g
gactgtcagcactgatccanctctgattccaccaccgggtattccaataactgtaccacctccaggttttcctcctccaccaggcgctccacttccatctcttataccaacaatagaaagtggacattcctctggttatgatagtcgttctgcacgtgcatttccatatggcaatgttgcctttccccatcttcctggttctgctccttcgtggcctagtcttgtggacaccagcaagcagtgggactattatgccagaagagagaaagaccgagatagagagagagacagagacagagagcgagaccgtgatcgggacagagaaagagaacgcaccagagagagagagagggagcgtgatcacagtcctacaccaagtgttttcaacagcgatgaagaacgatacagatacagggaatatgcagaaagaggttatgagcgtcacagagcaagtcgagaaaaagaagaacga

SEQ ID NO: 51609 - DNA, 501 bp, Homo sapiens
gaagatacctggaaagcttactgtgaaaaacaaaagaggatacgaatgggacttgaagttataccagtaacctctactacaaataaaattacggtacagcagggaagaactggaaactcagagaaagaaactgcccttccatctacaaaagctgagtttacttctcctccttctttgttcaagactgggcttccaccgagcagaaacagcacttcttctcagtctcagacaagtactgcctccagaaaagccaattcaagcgttgggaagtggcaggatcgatatgggagggccgaatcacctgatctaaggagattacctggggcaattgatgttatcggtcagactataactatcagccgagtagaaggcaggcgacgggcaaatgagaacagcaacatacaggtcctttctgaaagatctgctactgaagtagacaacaattttagcaaaccacctccgtttttccctccaggagctcctcccactcaccttccacct

SEQ ID NO: 51610 - DNA, 778 bp, Homo sapiens
aaaagaggtttatttggctcactgttctgcatagaactgtataggaagcatggcgctggcatctgcttctggtgagggcctcacgaagcttataatcatggcagaaggtgaaggggagcccagtgtgtcacatggtgagagagagcaagcgagagaggaggaagttccaggctcttttaaacaaccagctcttgcataaacaaccagagtgagaactcactcattactatggggatggcacaaagtcatacataagggatccgcccccatgacccaaatacctcctactaggcccacctctaacactgaatgtcacactttgaacatgagatttggaggggacaaaacatccaaaccatatcaccacctgagaatggtacactacaggtcacagaaacttacagagtactggagttgaaagagaactgagatcacctagttcagagactaacgggaaacgttaggtcatttatggctctcagacacgttaagcctgcataacattttttaaaatcttgaaattagttcccaacacttaattgagagctttcacagaaaaatctagatatgtggcttatttttaaaaaacagaagatttgctgacttaaacactgcaaaattaaacatttatatctgaatccagcatctctttttgctttgtaaatgaggtcaaggatgaaatccagatgttcttcctttgtatttgtattgtcactgtatggaatctaggtatatccaaggaaaaataaacttaagataagcttattttccttatttc

SEQ ID NO: 51611 - DNA, 701 bp, Homo sapiens
aacatcagacaagctactcaagcactctttattataaaatgagaatactaataataccttgcgctaggttgtttaaggatcagagaaaatatatgcacaaagcacctggaacacaggaggcactctttaaatggtaatacttcttattacaacttaaaatgtcacacgacaaatagggtacttgtcacagacaaacattcaaatgttaatgttatacagtaatagtaatattgaataagtaattttatttccatgatctatttacactgtacaaagactgttgaaaagcaccctacaagttcacagtacattacaatatatttactttaaaaatatattcctttataaaaggtttataagaacattggcatgtcaacatgtgacaaaactctcaaagcatgtcaccaattctgtgagagcaagaatgcatccaagtgttatcaatttcacaatcacaagtcaccagttgagttttaaatacatacatgttttaaataaaaaaagaattctatagtggaaagttcttgaggcaatacttattagttcattaacgtatgcattttcatggagatgtggcataataacccacaatatcaacttaatctgtccaaagaaacatttcaacaagtttagcagtacagaaattctggtcatttgtttctactttttcttctttgctggttctcctggctctactttgc

SEQ ID NO: 51612 - DNA, 417 bp, Homo sapiens
ggcccactcacgtaaacaggaagcttattaaaagaacttttcttggtttcctggcaaaatccagcttttattttggtggcagcatctattaaggaggagactcattttgtgggcaggatgaaaaattaaacattgcaaatccatcaggtacttgctggattagagttagttgactgacttgttggctacagggaacaaggtagttctgaaaccaaggaacaagctgccaaggaacagtccagccctgcccaaaagatgatgggtcttctccatccgggcaggcacaaatcaactcgagggttccaaggggggccagtagacgccagcctaccttactgtaaagtgttctcacatgcatatctaactgttctctcctttcctttacatttaaatcctgttgtattggcttctctgttt

SEQ ID NO: 51613 - DNA, 587 bp, Homo sapiens
actacactaataagtacaatacatttatttttaaaaatctatttatttatcaaaacagtattggcacagtaattctcatattatcatcaaataataaaattgctactttctgtactcaattctttagaatcctagaaattgcaaatgcattcaatttaacaatattgtaaataacaatacaaaagaaagaactctgcatatttatggaaacattgttgatggtacagttctactgaaactcatacacatttcactatttaatttacatatggtcttgttgaaaaaaaccagtatgttttactttttcaatttccttatgctaaaatacatgtaattctaaaggatatctcttaggtgttataaaaaccagggagggtccaccaccaagtcaaagttagagtcaaagatacttcaaagattccatgaaatgatctgaaaacaaatttaaccaaaaaatgtgtactgtattggggcacatccatggccacccaaactgtattctatctctgactgtggcatcaaagaaaggtatatggaattataattgaccttcatgatattgctccaaagtggattgactaacactt

SEQ ID NO: 51614 - DNA, 1032 bp, Homo sapiens
gaaaaggtacatcagacatgactgcctgcatgaagtcaaacagggtaacaccagtgaagctcaagtcaagagctgtggatattttgtctaaccaacaagaagtctcaagaaatcaggcagtgcagctgcctgcttctcagctatcgtatccagccaaaagatgcatgatgatggagtggtgggggaaggccagttcagtatcctatttaaaagtaaacttcctgaataatggatatatgtggagatacagacatagatatatagatacagctgtaattatttagcctcaagtgactttctccattgcttcacgctatgccactattttgcttctttaatttttttaaccttgcttagtattctatagtttgcccaaccagttttacgtccaaggaaaattagccaatgcataaaatatacaaactatgaaaggcaaggatcaggaaaccagagactttgccaccaaatctcagattattagaaactaggtgtcagggtttatcaagaaggccaggaaggccttttgggttaagccttacattcatgaagaacctcgagggtagatttttgagagcattccaaatgaatggtctctggtcaaatgaatgaatggtcaaatgaataaatctgccctcacagagatacaaaaggaaaaggaatataattcataccatttggtttaagccttacattcatgaagaacctcaagggtagatttttgagatcattccaaatgaagtcgaatctgccctcacagagacacaagaaaggaatataattcatacactattgcatttttaataaatcttttgaaatttgcagaattagattgtattgtgtattttcggttaaatgataattgaatgtaaatatttagatgcagcaccatattttataacccagctttagcatttcttcatattttaaggaaaccccccacctccttcttttaagggcgcttcttgctctctgaaatgccctgctaaatgcttctcttaattatttgaataaggtagtttggaataaaaaaaa

SEQ ID NO: 51615 - DNA, 419 bp, Homo sapiens
gacgaaaataatccctgtctagatgcagaggacttggttcctattccagtgctcctccggtagcagggaggcgacagaaggtgtccaactatccattaccaagaagaaatctattcgtttgagcctgagacactctttgaggtaaaaaattagaatgaaagaacctttggatggtgaatgtggcaaagcagtggtaccacagcaggagcttctggacaaaattaaagaagaaccagacaatgctcaagagtatggatgtgtccaacagccaaaaactcaagaaagtaaattgaaaattggtggtgtgtcttcagttaatgagagaccctattgcccagcaagtttgaaacccaggctttcagctttcttttgcatcatctggcccaagtgtgttgcttccttcagttccagctgttgct

SEQ ID NO: 51616 - DNA, 762 bp, Homo sapiens
ggaaatagtttcatgaacttgacacaggaaaatatttcttagactagatactgtagcactcaccacaataagaaatcaagcgaattgcacttcatttttaaaaagcttctccttattatgttgttgtttaacaacttaaacgctatctctagaccaggaataattatttgctatataatacagcaaaaaatatgtatgtataaatggactcattcaaaatatataaagaactcctattacaaagaaattgacaaacagcccagtatatcaatgaatataaaaatttgagaagatattttccataagaagatatctaaatgaacattaggcatgagaaaaccaaattttaggatatcactacacacctggtgtagtttaaaagactgaaaatattaagtgtgtgggaatgtagagcaactgaaaatggcctacatctttcatagaaatgtaaaacaatacaaatactttgccaaaactctgtccaacattttctacccattcaccaagcaactccatccctagctatagatacccaggaaaataagtatgtatcttcacagaaataattgtatgagaatattcatagttacttatgcacagtagttatcaagtaaacctgtctcccatcagaaaaatggatatcaaattgtgtgataatcatacaatcaataggatattacttggccaaaacaaaatgaaacaagggaaaaacacaatcaaacaaattagtggcatatatacccacctgagtaaagagaagtc

SEQ ID NO: 51617 - DNA, 595 bp, Homo sapiens
ttttttttttttgatcaagaaaacaaggggaaaactgaaatttattgaaggcttacatactgttaagagctttacaaacattctaccttcacagtctttaatggagcaggcaattggggttacatagcttgcccaaggtcatgcagctagaggtggcagagctgagaggccacctagattttttggactcttcgtgcctgccttaccaccccattgcataggcacacgtcaccctgtacttaaacacctgggccatgcctttgccctgaccatagtgcccttgcaaatcagaaagagccactctcattctgagggggacaagaatttgttttcctcctccagtgctataagaaggggcatctcccccacagtctaaatacccatgcagcacaggacagaagctctcccagtccagagcagcagaggcaagcagcaagagaccccagaggtaattgggaaagggacactttggggggtatacagcaggtttctttttgtgccagccagtgcaagaggatgctgggggctgctggtcccaaccagctggtgcctgtggctggatgtgttcagtgtgacaagaagcctaggtcagagc

SEQ ID NO: 51618 - DNA, 589 bp, Homo sapiens
ttttttttttatcctttaatctctttaattcacgcatctgtcttttgtataaaaaggtgttttggtgaacccacgttgctacaccaatgacattccacagtattaacactagaatgactgaagtcacattcatgaaatatacaggaaatatcaatggttcatgaactgattactcttctggcaagttagggttgggtctcatattatcaaactaattacgatttttaatacctactaaaactcatacttaataggaagacaatctataattaaaactgtcccttgttaggtggagagcaaagacttattcacactgaatctcccatgccttgtatagcactaggcacagaatggcattcagtgttttgagaatgaatgaatggtctgcctcttgtctttgataacagtgaatatcatgctaggaaaacaggggcatgtaacttttacttatcaaactctacgagttgcactgagaatactcaatcatgagcattaatttgagaacagttaggaatgaaagtggagtctctggggcacttgcctctgttcatggcctcctgtgcaattttagccaaataacagcctttcc

SEQ ID NO: 51619 - DNA, 399 bp, Homo sapiens
tgaggtccctccggcgctcatgttccgagtctgcagctccacactttaaatcatactcgaatgcaggacaagtcctaaatatttgccccttcccttgcagtaatttattttctgtatggactgtccctcccccagaggcttccccaccctccattgcctggcccaggtgagcagcttggcaggtctccaagtggaacccggtccagacagggctgcctcgacttcacctttccccctaacttcctccaagggatgctgccccttctcagccccctgcgtgtgtatattggtgggaggcatagaggatggatgttctagaaatgagtaagacacagtggcccacccccaagttaggatgaaaaaagtttccagaggtttttaaagaaattggattttaaa

SEQ ID NO: 51620 - DNA, 2223 bp, Homo sapiens
  misc_feature (1)...(2223): n = a,t,c or g
ttttttttaaaacaaaacattttatttaatgcagaaattctaaggtacaaaaacattttgtaaatgtcagctgtgatctactttcacctagttacagagttatgtacaaatcaagtcattaacattttcaatgtcaaaaatacagcacgctgttaagagttctgtcagtgctcattatcccactagatcccacaaagggcaaactcaaagatgaaacaaaggcaacgccatcaataaccaccatattccacaggctttctcccctaggacgtactaacagggagtttccacagggaaaaattctcttttaaaaaattaacagtaaaaataggagttacttactatctagatgaacacaattggttttcacaaaagcttttgctgctgtctggactcaccatgcttttttcttgagagaaacataccaaactttttgttgttgttgttgagacggagtttcgttcttgtngccaatattttttaanatcagaattcatcatataaanntccagattgtcagcttttcttgaaaaatgggaagatcaggaagtacttcatggccacagtcgactggaaaattacccactgtgggtggaacaggggcgcttcaggttgccacagtccccaccattccctattgttganacagacaaagtttattaattaccatttatcatcacactgctgtcttccttatccctccccttttattcttgtgccctctaaatatataatctcctctatataagcactattagtcttcaccaatagaaaataaaaaagactagtaaccttcacattggcattgcccatttctcttcaataaagacagaaataatattttctctcttctncagggagccaaattagtgttgaagttggggggccagagagttttctttcttttgggagaagggtgtgtcatttttcctcaaggaataaaattggncctcttgccccttatttcttttaaaagaaaagatgctcaactctgaaaaaaaggctctgaaaatcatgtaaccccactttttgtgaaggacagtcttcctgcttatttgcactcaagatactattatttgctcaagatactattatcttgctgggtcaccatctgaatacctgggcctggactggaatgacttctgactctttctggagatcaattgcctcaaaggcccaagacagccctctggaggagctttggcaccttgtatggctgggctgagtctgntgaggtggtctctgntgaggtggtctctgntgcttggagncantctctgagaaggcacacctttaccngagctttacccnccgtgancactctccnggcaaagctgatgacatcagatgctaagtcctctctgtagctcattgggtaagttaagatgaacaactagcactctaccttcagctacccgcaggcttcttggttttcctggaaacctggacttatccctggtctcttttctagaggacattgtctaacctatctacacaagccttttactctcaggatcaaggcctctcatggagatcatcctgttttccatttcttgtttccataatatctaaaaccctttaccttgccaaacctttttcctaatttcctcctttttcccccctcctggaccatttcctaatccaaaaattccacctttccttaaaccaatttttttcccttatcctccaggccacgattcccatttctagcatactggggagagtagaaaaagtgaaactaattaaacaaaactaggaagttggacttctcaatttattctgaggcaatcacactatggtttcattactcggtatattaagagtttgattttattgatcagaaacattagtatttcaacataagtatcaaaaccctaaatccaaactaaaacatcccgattttttaactagcactctctttttctcttccattttcttaaggagtgagttcacatagcaagctctctgcccacacacccttggagctcagttaatgcttctcctcccagtcctccattctctccctggggccactttctcagagatgccttatttcatgaacaaagctgaataccctaaaagcgactcctaatggttcctctgggacagggaaacatctcttggcctcaataagaaatctctcatcatgttccaagtgaattttcgtatgttagcaagtttggactaaccaatctccttcacagaatgcctaggatgaaatgg

SEQ ID NO: 51621 - DNA, 1325 bp, Homo sapiens
aagaaaccccagaaatgggacattgaaatattgtgagagaatcaacatccctagaaagatccctagaaagagcaaagaaggaaacacatctgtcattgtcttgtggacgtggaaaggaagctactgtcctcacactcctggatcactgagcagaatgaacattttctccagcctctgagactatcgctcttaaccatggaaaagctcaaaatattcttgccattactcagtgttcctataaagaaaatattatgatatcttggaaaggttctattcctgatctccagctgtggtgagcaagtttcctgaagtgtttattttctctcatatccaccaaacgtgaatcctgttcctgatggccgttattggacactggtgatgctattatcctgtattatttattaatatcctacctagatgcttgtatgagtacaaagcataaagaaacagatttctataggtcaagtcatacttttgcaaacagatgatgagtaattttttagcaacacctgaaaatatactaaactttcctagataaactttaaggtttctatactgaggcttttataatgaacgcacctcgttaagtatttatacttgtaactaaccccaggcagggacctcagctttgttaggaataaggcacaagaagtattttctgtagctattgtttcctcagtccttcaaactaaaaaagtacaaataaataacctatggccaaacttgcactgttacgtgttaaccaagacatccctttaggtgacaagactctataacagtggttacctgtctccatgttgacacttcatcctagatttaaggagaggcatcaattttttttttttttttttgcctcaagagaaatttcaaatatccaaattaaaacacagtagcatttgaaccttgaccttaccatctctttaagtaaacgtggagttgatttctctactaaataacagaaacctcagtttttcactcccattgtaagtaacttttatttaagtaagtaaaatcaggtaggaaatcacctttgacttagcttccagtagtcattaccaccttttactgcacaattcacaagcatgttttcctggtgaattggactgaaaattacattttgacaactttttttccttttatccccaacttttgccagaaagcagaaaaatgctctatttttataaagaaagattaaattctccaatggtattttaaaaaatatcaacctacatgcacttttagaatgtaaaatagcaatgactattttaaactcgaagacccactattttagagtattttttatagactttaaatactgggttttt

SEQ ID NO: 51622 - DNA, 173 bp, Homo sapiens
ttcattatgtgtgctttccatgtgttgctttctacccattgtgtttcctttttttccagatttctcctctttgccctgcccttcagcttttctcagctaggccccactgctctaaggggcatttactacagcacctattaaacttacttgtaactgctctttttttttttttt

SEQ ID NO: 51623 - DNA, 825 bp, Homo sapiens
  misc_feature (1)...(825): n = a,t,c or g
tttggatttaagcgaacagtttgttataatgaaccagaaatacaagattccactgaaactgaacagttgacagaatatggttgaacttaaaccttcaagggaaacaagggcaaaacaaagctaatgagtggaaaagtccaagattagtttgggataaacatgaggatataattgcattttagcatggctatcttctgacctcttccagcagttcgtctgccatcattctcccttctgacacacctaccaaatcaaatggcttctgatcctctatattgcagtataaaccaaccctatagtacccctctggtcatgatacaaacccagaaggaaagtctgtaaatctcatacaaaggtagaaagtgcaattcaacccaacacgctggttatggtatatgtgctgtcaatgtacatggtagcaacttgaatcaaaccagagctgctaccacatgtaagcaacctcttatgctgccctgtagtgatgtcaatgttctcagtttactaaattatcaatgtggaagaacgcatttttgagctccagaccttctaaacattttaaacaggctatcgaagaggatgtaacagaaccctatttcagaaacctaaggatcagggaggaaggaacactgaccggtttttctgggatgtttctgtgggggcaacagggatgaacaaaagaaatgttagcatgtcagagcatatgacaagtgaggggagacagaggtaggaagagggtgttctagccacaaggctaatgcatttgtgttcaaagagaagtctgggcaaaggaggggaaaccccccctcccccctnaaaaaaacaaaa

SEQ ID NO: 51624 - DNA, 485 bp, Homo sapiens
  misc_feature (1)...(485): n = a,t,c or g
gtgatcatagatgagttaataaagaaactggacatgaatctgaatgaggacatcagttccctgtccactgaagagcttcgtcagcgtgtagatgcagcagnggctcagatcgtcaacccagcccgagtcaaagaacagttggttgagcaactgaaaactcagatccgagaccttgagatgtttatcaacttcatccaagatgaagtgggaagccccttgcagacaggtggtggacactgtgagtgcaaggccggtgggaagacaggaaatggctgcagcagaacaggcagcagcagaacgcctccaggaaacagcaaaacaaaggcagaggatgtgaagaaagtccgggagacggggctgcacctgatgcggcgagcgctggccgtgctccagatctttgctgttagccagtttggttgtgccacaggccagatccctccaaccctgtggcagagggtccaggctgacagagactactctccctt

SEQ ID NO: 51625 - DNA, 8941 bp, Homo sapiens
ccatggactcaatgtcaatgcttctcatgtgatacacaagaatactcaattaaaaaatgctaagggataagttttttttcagatagagttgagctttaaagggccacaaaccattgaaataggtaagatttgttcctgctcccaagaattaacttattgttcctttgagagcaatatcatacccaatgagactacacaattgagaaaaaatcagttggattaaaaaaatttgtacattaaaattcaaatttccaaagaacctgcaaaggttccaatactagttgattcttatctaactaaatgaaacaatttttgtcctaaatgttcatgatgggaggtaaatgtgataacatatatggggtgtacaattgttttacatgccatgccagacaccagagatatttgtttctaattttcattttcattgaaaacaaaagttgttacttttgcatcctaaagaatggagacaagaagaaaacaaacgtgtatctaaatgtgattaaaatgttaaaaggaaaaaatatcttaatggaaaaaaaataatgatgaaatagaatttacctacattaattccagtcacgatggaaattaaaggagggaagagcagaagcaaaattgtggaagagatgtagactaaaggagcaaatgagcatggctggaagatagtaatcattcctggtcagggtgtgttttcagctttgctgaatccagccttcacagagagtcatggacacacaccaaccacaagagtttatacataaaaaaggcaaaaatttgagagtacaatatactctctgcataataggtaagtgatgatgtaccaagttctcccttagtgtataaataaactcaagagatcaatatttttcttatcacatctcttacaagaaacaagggaattgataatgtcaaaggacactttctgcaacctagtaaagttcgataataaaaatagtgattaaaaggaaccaaatacctaaattgttgaatgtgtttatttttagtcagacattgttcttagcacttacaaaattgatgctccctttagcaataatgaatactcttatttttcatattaactgaacacctaccatgtgtctacccccattaattcactggagatatcagtgaccaaagaagactgataggttctactgttattcctatttacaaaataaaaaatagaagtataaggaactatcaaattatgaagccattgtttgaacccaaaatctgactgagccctcagttcttacatgctcccaggaatatttctggtcataagaactagagcgatttctagattgatcaatattttcccagtagagtcctgcctaggtaatgacagagtctttctcttcagctgtttactagtcttcttcactgaaattccccatttgatcatgccaacatgaatgccaatgcggcagcggggctggcccctgagcacatccccaccccgggggctgccctgtcgtggcaggcggccatcgacgcagcccggcaggctaagctgatgggcagcgctggcaatgcgaccatctccacagtcagctccacgcagcggaagcggcggcaatatgggaaacccaagaagcagggcagcaccacggccacacgcccgccccgagccctgctctgcctgaccctgaagaaccccatccggagggcctgcatcagcattgtcgaatggaaaccatttgaaataattattttactgactatttttgccaattgtgtggccttagcgatctatattccctttccagaagatgattccaacgccaccaattccaacctggaacgagtggaatatctctttctcataatttttacggtggaagcgtttttaaaagtaatcgcctatggactcctctttcaccccaatgcctacctccgcaacggctggaacctactagattttataattgtggttgtggggctttttagtgcaattttagaacaagcaaccaaagcagatggggcaaacgctctcggagggaaaggggccggatttgatgtgaaggcgctgagggccttccgcgtgctgcgccccctgcggctggtgtccggagtcccaagtctccaggtggtcctgaattccatcatcaaggccatggtccccctgctgcacatcgccctgcttgtgctgtttgtcatcatcatctacgccatcatcggcttggagctcttcatggggaagatgcacaagacctgctacaaccaggagggcatagcagatgttccagcagaagatgacccttccccttgtgcgctggaaacgggccacgggcggcagtgccagaacggcacggtgtgcaagcccggctgggatggtcccaagcacggcatcaccaactttgacaactttgccttcgccatgctcacggtgttccagtgcatcaccatggagggctggacggacgtgctgtactggatgcaggacgctatgggctatgagttaccctgggtgtattttgtcagtctggtcatctttggatcctttttcgttctaaatctggttctcggtgtgttgagcggagagttttccaaagagagggagaaggccaaggcccggggagatttccagaagctgcgggagaagcagcagctagaagaggatctcaaaggctacctggattggatcactcaggccgaagacatcgatcctgagaatgaggacgaaggcatggatgaggagaagccccgaaacatgagcatgcccaccagtgagaccgagtccgtcaacaccgaaaacgtggctggaggtgacatcgagggagaaaactgcggcgccaggctggcccaccggatctccaagtcaaagttcagccgctactggcgccggtggaatcggttctgcagaaggaagtgccgcgccgcagtcaagtctaatgtcttctactggctggtgattttcctggtgttcctcaacacgctcaccattgcctctgagcactacaaccagcccaactggctcacagaagtccaagacacggcaaacaaggccctgctggccctgttcacggcagagatgctcctgaagatgtacagcctgggcctgcaggcctacttcgtgtccctcttcaaccgctttgactgcttcgtcgtgtgtggcggcatcctggagaccatcctggtggagaccaagatcatgtccccactgggcatctccgtgctcagatgcgtccggctgctgaggattttcaagatcacgaggtactggaactccttgagcaacctggtggcatccttgctgaactctgtgcgctccatcgcctccctgctccttctcctcttcctcttcatcatcatcttctccctcctggggatgcagctctttggaggaaagttcaactttgatgagatgcagacccggaggagcacattcgataacttcccccagtccctcctcactgtgtttcagatcctgaccggggaggactggaattcggtgatgtatgatgggatcatggcttatggcggcccctcttttccagggatgttagtctgtatttacttcatcatcctcttcatctgtggaaactatatcctactgaatgtgttcttggccattgctgtggacaacctggctgatgctgagagcctcacatctgcccaaaaggaggaggaagaggagaaggagagaaagaagctggccaggactgccagcccagagaagaaacaagagttggtggagaagccggcagtgggggaatccaaggaggagaagattgagctgaaatccatcacggctgacggagagtctccacccgccaccaagatcaacatggatgacctccagcccaatgaaaatgaggataagagcccctaccccaacccagaaactacaggagaagaggatgaggaggagccagagatgcctgtcggccctcgcccacgaccactctctgagcttcaccttaaggaaaaggcagtgcccatgccagaagccagcgcgtttttcatcttcagctctaacaacaggtttcgcctccagtgccaccgcattgtcaatgacacgatcttcaccaacctgatcctcttcttcattctgctcagcagcatttccctggctgctgaggacccggtccagcacacctccttcaggaaccatattctgttttattttgatattgtttttaccaccattttcaccattgaaattgctctgaagatgactgcttatggggctttcttgcacaagggttctttctgccggaactacttcaacatcctggacctgctggtggtcagcgtgtccctcatctcctttggcatccagtccagtgcaatcaatgtcgtgaagatcttgcgagtcctgcgagtactcaggcccctgagggccatcaacagggccaaggggctaaagcatgtggttcagtgtgtgtttgtcgccatccggaccatcgggaacatcgtgattgtcaccaccctgctgcagttcatgtttgcctgcatcggggtccagctcttcaagggaaagctgtacacctgttcagacagttccaagcagacagaggcggaatgcaagggcaactacatcacgtacaaagacggggaggttgaccaccccatcatccaaccccgcagctgggagaacagcaagtttgactttgacaatgttctggcagccatgatggccctcttcaccgtctccaccttcgaagggtggccagagctgctgtaccgctccatcgactcccacacggaagacaagggccccatctacaactaccgtgtggagatctccatcttcttcatcatctacatcatcatcatcgccttcttcatgatgaacatcttcgtgggcttcgtcatcgtcacctttcaggagcagggggagcaggagtacaagaactgtgagctggacaagaaccagcgacagtgcgtggaatacgccctcaaggcccggcccctgcggaggtacatccccaagaaccagcaccagtacaaagtgtggtacgtggtcaactccacctacttcgagtacctgatgttcgtcctcatcctgctcaacaccatctgcctggccatgcagcactacggccagagctgcctgttcaaaatcgccatgaacatcctcaacatgctcttcactggcctctttaccgtggagatgatcctgaagctcattgccttcaaacccaagggttactttagtgatccctggaatgtttttgacttcctcatcgtaattggcagcataattgacgtcattctcagtgagactaatccagctgaacatacccaatgctctccctctatgaacgcagaggaaaactcccgcatctccatcaccttcttccgcctgttccgggtcatgcgtctggtgaagctgctgagccgtggggagggcatccggacgctgctgtggaccttcatcaagtccttccaggccctgccctatgtggccctcctgatcgtgatgctgttcttcatctacgcggtgatcgggatgcaggtgtttgggaaaattgccctgaatgataccacagagatcaaccggaacaacaactttcagaccttcccccaggccgtgctgctcctcttcaggtgtgccaccggggaggcctggcaggacatcatgctggcctgcatgccaggcaagaagtgtgccccagagtccgagcccagcaacagcacggagggtgaaacaccctgtggtagcagctttgctgtcttctacttcatcagcttctacatgctctgtgccttcctgatcatcaacctctttgtagctgtcatcatggacaactttgactacctgacaagggactggtccatccttggtccccaccacctggatgagtttaaaagaatctgggcagagtatgaccctgaagccaagggtcgtatcaaacacctggatgtggtgaccctcctccggcggattcagccgccactaggttttgggaagctgtgccctcaccgcgtggcttgcaaacgcctggtctccatgaacatgcctctgaacagcgacgggacagtcatgttcaatgccaccctgtttgccctggtcaggacggccctgaggatcaaaacagaagggaacctagaacaagccaatgaggagctgcgggcgatcatcaagaagatctggaagcggaccagcatgaagctgctggaccaggtggtgccccctgcaggtgatgatgaggtcaccgttggcaagttctacgccacgttcctgatccaggagtacttccggaagttcaagaagcgcaaagagcagggccttgtgggcaagccctcccagaggaacgcgctgtctctgcaggctggcttgcgcacactgcatgacatcgggcctgagatccgacgggccatctctggagatctcaccgctgaggaggagctggacaaggccatgaaggaggctgtgtccgctgcttctgaagatgacatcttcaggagggccggtggcctgttcggcaaccacgtcagctactaccaaagcgacggccggagcgccttcccccagaccttcaccactcagcgcccgctgcacatcaacaaggcgggcagcagccagggcgacactgagtcgccatcccacgagaagctggtggactccaccttcaccccgagcagctactcgtccaccggctccaacgccaacatcaacaacgccaacaacaccgccctgggtcgcctccctcgccccgccggctaccccagcacagtcagcactgtggagggccacgggccccccttgtcccctgccatccgggtgcaggaggtggcgtggaagctcagctccaacaggatgcactgctgtgacatgctggatggtgggaccttccctcccgccctgggcccccgcagggctcctccctgtctgcatcagcagctccagggttccctggcggggctgagagaggacacaccctgcatcgtgcctggccacgcttcactgtgctgctcttccagagtaggagagtggctcccagcaggctgcacagccccccagcatgccaggtgccactcccgggagagccaggcagccatggcgggtcaggaggagacgtctcaggatgagacctatgaagtgaagatgaaccatgacacggaggcctgcagtgagcccagcctgctctccacagagatgctctcctaccaggatgacgaaaatcggcaactgacgctcccagaggaggacaagagggacatccggcaatctccgaagaggggtttcctccgctctgcctcactaggtcgaagggcctccttccacctggaatgtctgaagcgacagaaggaccgagggggagacatctctcagaagacagtcctgcccttgcatctggttcatcatcaggcattggcagtggcaggcctgagccccctcctccagagaagccattcccctgcctcattccctaggccttttgccaccccaccagccacacctggcagccgaggctggcccccacagcccgtccccaccctgcggcttgagggggtcgagtccagtgagaaactcaacagcagcttcccatccatccactgcggctcctgggctgagaccacccccggtggcgggggcagcagcgccgcccggagagtccggcccgtctccctcatggtgcccagccaggctggggccccagggaggcagttccacggcagtgccagcagcctggtggaagcggtcttgatttcagaaggactggggcagtttgctcaagatcccaagttcatcgaggtcaccacccaggagctggccgacgcctgcgacatgaccatagaggagatggagagcgcggccgacaacatcctcagcgggggcgccccacagagccccaatggcgccctcttaccctttgtgaactgcagggacgcggggcaggaccgagccgggggcgaagaggacgcgggctgtgtgcgcgcgcggggctcgaccgagtgaggaggagctccaggacagcagggtctacgtcagcagcctgtagtgggcgctgccagatgcgggcttttttttatttgtttcaatgttcctaatgggttcgtttcagaagtgcctcactgttctcgtgacctggagttaaccggaacagcgtcttcattcatttctgttgggaccagacgcggagcctgggtgcgcgagccgccctccgggaggaaggcgcccggctgcgtctgcagaggcggggagaggaggcggcgagggtcccggggcgcgaggaaggcgctgccctctcccagctcgcaggccccgggccggccgcgcctctgcgggagagcaccccggcttcccgcgcgccctcaccaaaaggaccctacagcaaacggggtctttcgactctgcttgtagaaaccatttgcacatattctgtacgagcctgctgtctccctagagccagggccctgcggatttggagaagggagcggggcaggacttccaggaggaccccaacccggcccggagagggaggaggaggcctccaggggcgcggagctctggggatgggcgtcgggccggcagtggtgcggctcactccgtccctgcccacctgcgacgggatcccccgaccggcacggccacgccgagctcccggccagccgccggcccgcaggcagcgcgagggaggagctgcgccgccgggccggggccgccggctccgcccaaccaggtggtgctgagcttccgctgagcgctcttttgttttgtggtttgacacttttgttgacagcatgttgcagtttcttttcggttttggttttttttaaatgttttattttgctttcccagcgggaggggaggaagaagagtgtttacaaagtcctgtagccccctcacctttcctgttttcacttttgccaatgtacatcgggtttggttttcttgtattatttaaacggttgtggtttcctttttccacggaggttcaataaaagccgctgcaggagagttttaccaaaaaaaaaaaaaaaaaaa

SEQ ID NO: 51626 - DNA, 658 bp, Homo sapiens
ccagtagtgaaagcatttctcaacaatggatcccgctacaatctgatgaactctgccataatagagatgtttgaatttattagagtggaagatataaaatcattaactgctcatgtaattgaaaattactggaaagcactggaagatgtagattatgtacagacatttaaaggattaaaactgagatttgaacaacaaagagaaaggcaagataatcccaaacttgacagtatgcgttccattttgaggaatcacagatatcgaagagatgccagaacactagaagatgaagaagagatgtggtttaacacagatgaagatgacatggaagatggagaagctgtagtgtctccatctgacaaaactaaaaatgatgatgatattatggatccaataagtaaattcatggaaaggaagaaattaaaagaaagtgaggaaaaggaagtgcttctgaaaacaaacctttctggacggcagagcccaagtttcaagctttccctgtccagtggaacgaagactaacctcaccagccagtcatctacaacaaatctgcctggttctccgggatcacctggatccccaggatctccaggctctcctggatccgtacctaaaaatacatctcagacggcaagctattactaccaagggaggcctg

SEQ ID NO: 51627 - DNA, 888 bp, Homo sapiens
gcgtcgacttttgttttttttgttttgtattcaggttcaattttatttgttgtaaaaacaaacatgggttatgttccagacaaacagatataagtgagtagacttatgccctggtgcctccttggctcttcacaggatgcaaaaacaaatcctgccagcaggaggtggcaggttgcagaggtggctggttgctctttcagccagcttggccttgtctggcatgcacaggtcccagcacagcaaaacattcagggagttagagtgttgcacaaaggattttaccaacctctcacattaagcagcattcaaggatttgctgaccaccacttatgcaaattttgtgttatgctatagcaatgaacttacttgttctatttctaaacaaaacattgggttcacacacaggcctggacaaagcttcccacttctgaactatttactgatcttcttattctcaaagaatgcaagatgaatgatgtgcaataccatggctatggcatgtgacttttcttgacctggatggttagtgtcccaatatttaactgatttttgtgggggtgaaaatatgccataagttcttccttctatcatccccatcactaccatacatgtaatgacataatcatgtcacagtgtgccctcagaatcactattcctagctgagtatactaaggctttctatctaggtcagttcattgtgtctgtgtctcctctaaaccctccttcatcatgcctaccttgaggaattcagcaagtgatcattcacgcaagctaaaggattttagctttctctgccataaagattattgctaaaatacataccatacaacaaaccaacccatttcccacaaatcttactgtctgacttctcacagaatacataatgac

SEQ ID NO: 51628 - DNA, 379 bp, Homo sapiens
ctcttagaggtgctgtgtcctcgatgtgatattggccttttgggattgaaaaggaagcagagaaagttaaaggagcccttgccaaatggaaagaaaaaaagcaccaaattagagagtctgagtgacctggagagagctttaactgaaagcaaggagactgcttcagctatggcaactcttggggaagctcgcctaagggaaatggaagccttgcagtctctcagactcgccaatgaagggaaattgctgtcgcctctccaagatgtggatataaaaatctgcctatgccagaaggccccagctgcccctatgattcaatgtgaactctgcagggatgctttccacaccagttgtgtggcgggtacccagtattttcagg

SEQ ID NO: 51629 - DNA, 624 bp, Homo sapiens
  misc_feature (1)...(624): n = a,t,c or g
gcgtgattcatcacatgagttcaggcatggaaattttcatttggagcatcatgtcagcactcaaaaagttctggatcttggagcagttcagattttcagattagggatgctcaatctatatagatataaaattatcctcacagtaacatagaatctcttggtgctgtcagctgttgggaattgaagattgactttgtgcttccaccctccatccagaaaggcacccttcattccaccagaactttacccaggaagaacacgatcatttcctttttcaccgatgccctctctcagctttctgagtacgtctcttggggtcgctggaggtgatcctaggatctgtctctgagaccaatgtgctgtttcagccccctgcagctaagaattgtattgactgtcctcacagcggcttttcatagctttcagcttcagcttttacgaggcttctcctctctccctggcaccctgctggctgcctcactgcttacagacaggtcccaccaaacccaaacacctgcctagggtaaatggggtctctcttctatccccagaaactttcagaggaagcagctcatagaaacatacaaaaagcacacaagtantttggggaaaaaatcctaaagg

SEQ ID NO: 51630 - DNA, 228 bp, Homo sapiens
  misc_feature (1)...(228): n = a,t,c or g
ggggcgagctccaccgagggtccttgtacagaaatggagggcaaagagggggaggggctggtcccccacccccttaccccactcccagctggtccctccactctnnagggccagacccgaagctactgctgagnaccagtgggaggggccgtgccttccttcccttcaccctcactggatcttggcccanccaaatcccttgttttnnattttcttggacccccgccc

SEQ ID NO: 51631 - DNA, 1110 bp, Homo sapiens
ttttgcaaagttaacatttttattgaactgaaattggtgtagaacaggggcaaccacagctgctgagctctgtaacaactgaaaagcccctgtgacattttacctttgagagtcctaacacggtttgagtggaacagctgagaaacagcatatatatattttaacacctcaaaatagtttgaaatgagcctcacagccttgttcaatcttcagattacaaataacattgatagcatctcctgtggccttcagttagtagtgccagttaatattgtttctgaaaactttcctctcaaagtgctggctataattttttttccatccagtacacataagaaaaggatttagtaacacttgggcaagtaataaactgtagaactttaaaagtagtaaaggcatataccaagcatacgtgactccacacattgtcagaaaggcagtggactggctaacgagtttctgccaagtttcagaagcaaagaatgcactaatgaaaagggtaaggcatccaagcagagtgtctgaattgatggaccatttttgtctaaaactaatttcaacatccttcccaatatgcaagcaggcatttgttttacataaggtgaaacactttataagagaaaagaaaactcctataaagcttataagatcagaaaaaattaatactgaatttttataatcaatgcatggagcaatgatataaactgaccataacaattttgtgagaacaagtataaaactatccattactaccttaaagagttgaaagttaagccctctaaagtattcaaagtggaataaataacaaggtaggaaatgcaatacctatatattttaaaaagcccacatctagttaatgttctcttagtttgttttaaatcagttgttcatccaacctggagttgatttaaggatgttggtaaaaatcttcaaaagtccttcaaatcattttagatgaaatgtgatagaaaaaactatacaactcattctctaatcttgctatttttcacaccatccttccaaaaaagaaaaaaaaaaaaactagataaattcttccaccggagtaactgacattaagtggccactattcctgtagtaatcatttgtaag

SEQ ID NO: 51632 - DNA, 444 bp, Homo sapiens
  misc_feature (1)...(444): n = a,t,c or g
gnnnngnnnnntnnnntnnnttgnttgaanacntcttgacatgattacgaatttaatacgactcactatagggaatttggccctcgaggccaagaattcggcacgagaaggatgtaaggttggagttgtattggctggaatttgaacctccagcagctgtctggacatttgtggaacactctgggataattggggacttctgctcaacatggcagtggcatgttaggcatgttagggcttgaggtggggcattcacattcatctgactgtaaatcccaagggcctccgctcatgctaaattgagaatcttaggggtaaagcaccccctccaggaccgggtttctcagccttggcactagtgctgttctgaccattctctgtgttggggctgtcctgtgtgtggtgggctccacccactagatgccagtggcaccccctcccaga

SEQ ID NO: 51633 - DNA, 573 bp, Homo sapiens
gcctgcccccgcccctgcctcctctcgctgaccaattgagctgtgagcctggagcagatccgtgggctgcagacccccgccccagtgcctctccccctgcagccctgcccctcgaactgtgacatggagagagtgaccctggcccttctcctactggcaggcctgactgccttggaagccaatgacccatttgccaataaagacgatcccttctactatgactggaaaaacctgcagctgagcggactgatctgcggagggctcctggccattgctgggatcgcggcagttctgagtggcaaatgcaaatgcaagagcagccagaagcagcacagtcctgtacctgagaaggccatcccactcatcactccaggctctgccactacttgctgagcacaggactggcctccagggatggcctgaagcctaacactggcccccagcacctcctcccctgggaggccttatcctcaaggaaggacttctctccaagggcaggctgttaggcccctttctgatcaggaggcttctttatgaattaaactcgccccaccacccccaaaaaaaaaaaaa

SEQ ID NO: 51634 - DNA, 255 bp, Homo sapiens
  misc_feature (1)...(255): n = a,t,c or g
agcattcccttgacctcagcaggcttacaacaagtccctgaaagtcatctaagaaagaaaaaactggaccatggtaacttactggcaaaaagaaaaagcatcacaactcagtaacagagaagtcacagtcttattggcacttgatggatggatgctatggactcccgatggcggacttggcagcattttccggttgtgtgcntttccaantcagaatgtgaaagtgatgggaatcncaggaaggcaattccccac

SEQ ID NO: 51635 - DNA, 522 bp, Homo sapiens
  misc_feature (1)...(522): n = a,t,c or g
gttttccaccctgaaagaatgttgtggctgctcttttttctggtgactgccattcatgctgaactctgtcaaccaggtgcagaaaatgcctttaaagtaagacttagcatcagagcagctcttggagataaagcatatgtctgggacacggatcaagaatacctcttcagagcaatggtggcattctccatgagaaaagttcccaacagagaagcaacagaaatttcccatgtcctgctttgcaacataacccagaggtgtccgttctggtttgtggtcacggacccttccaacaattatactcttcctgcagctgaagtacagtcggccataagaaagaataggaaccggatcaacagtggcattttttctggatgaccatactctggaatttttaaaaattccctctactcttgctcccccgatggaggccatctggtgcccgtctggaataatggaatccggtgtgaaaatttgcattggtacaggttgcaatggcctaccgggtcnatctgggatccg

SEQ ID NO: 51636 - DNA, 1022 bp, Homo sapiens
tttttttttttccatttgttcaccagatatataatttattatgttgcttatgcattgtacactgtaactccattattccagcaactcaaaaccccatccaatcacttggttcatctcactgttacaatctctagggtgtgttgtcctttgcatcagattcgaatactgttcctatagcacaggaaaactataaacacaatatataattgtatccattcacatccagtatacaggaggccagggacacagtggaatgacatggtcaaattgctgaagaaataactaccaacccagatttctatccacaacaatagtatttttcaggaagagcacaatataagattatatctggtcaaaaattggaaatttagtagaaaagtaaccctaaaagttatccttaaggccaaaggaaagtgattacaggtgaaagttctgcagtggtagaaggaatgagaatccaagagatggatgcatctgcagatcaatacaattacttattatctctatacaacatgaacaatatcttctaattgagcagaataatagatatgctatactccaataccaacactcaatgacatcctttgatgtgttcaagagaagggtaaaggtattaacaattctataataggttagagaagtgttacaattcttatcttagactaatgaataaaatgagtatatacatttcaaactaaaagaaaattaagattattaaaacctatatatttttaaaagaaagcacaaaaaacagcctagaagaaaaccacaaaataagatgcatttaaaaccaaatatattagctatcacatgaattgaatacagaatgcgtgaatagtaatttctaatggattaaaataatccagtagtagttcataaattacacatctaagatataatgtcatagaaatatatgaaatagaagaaatatgtatacttataattactaaacacaaacacacaaaaatgtgtatttgcatctgacaagtaggaataaggaagaaaacaccagtaaaatatac

SEQ ID NO: 51637 - DNA, 1067 bp, Homo sapiens
tttttttttcgaaaggcaaatatttatttttcaggaagagaaacaggagacctcgaggcttctggacttaggaggtccgggcagctggtccatggttgtccaggtagtgccgcagggctgtgggataatccgttatgacgccagtggctcccacgctgaaggctgcttcaaaatccgactcttcattaaggcaccaaaagaccacctgcacccctcgctcctccaagtgtcggatcagactcttcctcatgatcagccatttcgaaaccacagccaataactggttcaggcaagagcaggaaaatgggaaataggtcctgttgatgatgttgggcaggaagcagaagaagaacttctcagggattgggatgaagggcagcagccccaggtagtaggaaagcagcacccagaatcctcggcttattgtgaaggacaggggcatctcggggttggcagccttgcatttcttcatgaccgagctcttctccgaggcccagatggtgatttcattacggtcatagcgtctcaccaagcctgctatctcacggatgagctcttcgttcttccctttgatctctacgctcatgggtgtccttggaaacctctggaacaggtcctccagacgaaccatgcgccggtctgacccgtgagcaaagtggcctggagagaagtaaacctccagcttctccttgtagaggggcaggtcctcgaagtccaggctgcccacatccctgtttaggcccgactggcggcacaggttctcatcatgtgacaccaccaccactctgtcccgtgtcagctgacagtcgagctccaggaggtccgagcgctgggccatggagttctccatggcctccatggtgttctccagcagctctccagatcctcctcggtgggcccccaggcggatgcggaaggtgggagccctgggcgtgtgcagcagatgaggccggcgcaggaagaagatggagagcatggcatagctgcccagggcagggagggcatagtacagcaaaaggctcatgaccgtactcccacagaagctcctgcagccacacgctcagccg

SEQ ID NO: 51638 - DNA, 592 bp, Homo sapiens
tgttgtggatggatattgtgctactttagaagaaaatatcaacagtgcattagacataaaagttttgactcagccttcccagtcagctgtgagagggggacctggacgatctaccatgccaaccccaggaaatactgcagctttgcgtgcctcactctggaccaatatggagaaacttatggatcatatttctgctgtttgtggacaggtacaacatctacaaaaagtattggccaagaagagagatcctgtttctcacatttgtttcattgaagaaatagttaaggatggacaaccggaaattttctacacattttggaattcagttactcaggcactttcttctcaatttcatatggcaacaaactcttcgatgtttttgaagcaggcatttgaaggagaataccctaaattattacgtctttataatgacttatggaagcgtcttcaacaatacagtcagcatatccaagggaattttaatgcaagtggaactacagacctctatgttgacctacaacacatggaagatgatgcacaagatatattcataccaaaaaagccagattatgatccagaaaaggctttgaat

SEQ ID NO: 51639 - DNA, 341 bp, Homo sapiens
accacacctggctgaacatcagatattttaaagtgtagcccagagtctagttggtaaatgttacttatattgggactagtattttctaatgtttctgggatatgctccctataaaatgaaatgttttcctggaacaatgctaattaggattgcattcctggccaaagacatgacatcaaataagtaatagacatcaccagcaatgaattttgaaaagcaaaaaatactattaacctatataaccatttaaaatttaaaaaattcatgttccaagtacctctattttctgagctagaagaaaccttagaggccatctgatgatagattcccagagctggatg

SEQ ID NO: 51640 - DNA, 617 bp, Homo sapiens
tgcctgatcaaaggtcaatcagacccggtcgtcaaagtggcgatttcctaggcaacaagggagggaggaacttggaggtgggggcgggggcggtggagaagacacagttgccccaggctgtgcgcaggcggcctggtgctcccttcctctgtgaggcctccgttttcagagtaacagtgaccgctaggtgatgcccgacgcctgccagtgagcgtgtcagcccggaatgaattgggatcccctggggagggggtggggggaaggatggaggctcccacagcacagtgggtcaccgcgccctccaaggcgatccccacaactaatcgaccagggctcctgggggggacgcagcctaagtcccccacccatcggatcatctggaacttccgtccagagacgagagaccgactgggaatcctctcagtcaaggtccaaaccgaaaagaatcactggcacggacaccagggctaaggccatttctaaaagactgctttctgtgttttgggtgaatccgtgtatttctgtatcacaaaatgactgactttgaacgttacgatttttcctcctccttaacgtgtaaggtcctgtgatagacagaaccaggggactcctcggct

SEQ ID NO: 51641 - DNA, 589 bp, Homo sapiens
cgcaattctgttcaaagtgctcactatgttgaagcatgccagaaaaactcctccagactttggaattctcaggcgcaaattgatcaaaaattagctaatcagattaatgatctccgccaaagtgtaacctggctgggagatagagttatgaacttgcaacaccgtatgcaattacagtgtgattggaatacttctgattattgcataacgccttatgcttataatcaagatcaacatagctgggaaaatgtctcaagacatttaaaagcctgggatgataacttaaccttggatatttcacaacttaaagagcaaatctttgaggcttcacaagccccatttatccacagttccttggctcacacatttttgaaggcataactaaacaattaccctgattttaatcccttcaaatggctcaaacccgtcagaggatcattgttgttactggcattattaatattggtatgcttatgttgtctccttttagtctgcagatcccgcaaggaatccgaagacaagtccaaagtcaacgacaagcaatgatggcaatggtgatcctagttaataaaaagcggggagatggggt

SEQ ID NO: 51642 - DNA, 1468 bp, Homo sapiens
aaaaaaaaaagaaaagttctgtgttgatgtacagtttctcctaagaagaagcgaggtggttgaattttggaagcacttcttgaatcggattaacccatgctcttattgaattttttcatctgctctgtttagtttgatattaaagcaaaattaagaggtcttagtttttcctatagaacttttaatatgtcaaaagctatattgtctaaatttcagtacttaagcaaatactgagtagtgttttaaattcagaaatagagcttctattatgaacacatgagaatgatttttttctcttaatcattattaaggaaatattttaatttcatggtcatataatggtgataagtaatacctgattgtttccttttctgttctagtaactcagaggagatacgtgttttatttgtgatagcaaattcctaaatgaacattaggcaagtggtatcattatcaggccagctgcagccttttgccttgacctgcattcctagaatttctttgttgctgtaattcttgattaagtgaccttgactttcattttgtaattttgctaatcatcagcaaattcacttgcatgacgttactgccaaatatgaaggcagttgaattattatgagtgattgtggcagaggtttgtgccatggtgaaaactttgatgtttgtctgtgttcattggatccatctttttaaatgacattaccatgagtctgttgtcaaacctaaatatctttgtttgaatttaaaatgggactctatattgttgtagttcaggtcttcattgactaagagattgagagaaatctgacataagaaaatattgttttcactgcaggaataaagaggaagtaacagtgaatccaatatagttcatattgttattgtccaatcatcaagttaactaagcattatcagattacgtttatttctcatacatatggatattaacttaaggtaaaaaagctggatgtgaaggatctgaaaaggcattaatttatgtactaattctataaacatgtattaataattgcagtattattaaatacagatggactcaatgtacctttgaaaagaccactaatttagaaaacaaagctaagtgcagtcattacaagaagcaaagaaatacttaagttagaaaaaaattaaaatgaagggatggtctaagttttcttcatgctgggaacaaatgttaaagaagcagtgattgcttacaatgtatgtgataaaataatacctttcacaatcaaaattttaatagtaaatataagataaaatttatattaaataatgaaaacgtatttgtactgaatttagtcactagagaacatcgtaacaaaatacatgaaacaaaagtagccagaaatgttagaacaggtggaaatgtatacattatttgatggtttgtttttttatggaaataaacaacatacatagaattaaatggtgatcaaaaacatggaaaaaa

SEQ ID NO: 51643 - DNA, 524 bp, Homo sapiens
ggctcctctagattctagtacatcatgatagatcatgcagtcagtaaaagtcctgctgattttccccagtaaagtgctttagtccacacaaagcctgatctttaatccatgcctagaattggcaaatgatgccaggaaagaaaacagttggtagtctcagctatgtagaaaagacaaagacttttagtacatctagtcttaagcgcttccacagctctttcgtatctgtaatgtattttgcatttgatccattttttcctagttactgcacctgggagcgactgccagtactaccacatcatttcggtagtggaggtccccatcgaagggtttttttcatagcacatagcatgatcacgtctaggaagatcgttctggctgtagatagtataattatctactaatacaaagggggaaaggacgtgagatgatgtgaaaggaagttttgcatcatttacttgaaagatactgttcttctgaatttaatcacattggggattggaaaaagtagatgaataaaaatt

SEQ ID NO: 51644 - DNA, 624 bp, Homo sapiens
tagaccgagggccatggccgcctctcccggacccgccggcgttggcggcgccggaggcagtctacggctccggctcttcgggcttcgcctcgactcgggactggagatcaaaactcgctcggtggagcagacgctactcccgctggtttctcagatcaccacgcttattaatcataaagataataccaaaaagtctgataaaactctgcaagcaattcagcgtgtaggacaagctgtcaacttggcagttggaagatttgttaaagtaggagaagctatagccaatgaaaactgggatttgaaagaagaaataaatattgcttgtattgaagctaaacaagcaggagaaacaattgcagcacttacagacataaccaacttgaaccatctggaatctgatgggcagatcacaatttttacagacaaaacaggagtgataaaggctgcaagattacttctttcttcagtgacaaaagtgttgttgctggcagaccgagtagtcattaaacagataataacatcaagaaataaggttctcgcaactatggaaagactagagaaagtgaatagctttcaagagtttgtccaaatattcagtcaatttggaaatgaaatggtggagtt

SEQ ID NO: 51645 - DNA, 430 bp, Homo sapiens
ctggggtccacccggggcagggagctggaaaccccaggagaccacacagactccactcccagcactgcttcccacagccgtaaaaatggacataccctgaatgcccagcagtgggagacggttatgaaaactctggaatattctaattaactgtttagaattagattagtaatatgtccacacagtgggatattattcagccaagaaaaggcacgaggctcggacacaggccacagcacggatgcaccttgaggacgtcgcgctcagtgagagacgccggacacagaaagccatgcggcgtgtgatcctgtttctgtgaaatgtccaggacgggcccatccacagagacagggaggggaggtgtgggcaccggggctcggaaggggatgcagagtgactgctgatggggacagcatttcatttgggggtg

SEQ ID NO: 51646 - DNA, 591 bp, Homo sapiens
aaaatattagactatagtgataaacaagcaactttgattcctgatgaggtgtttgatgcagtaaaaagcaacatcgtcacttctattaacttcagtaagaatcaactatgtgaaattccaaaaaggatggtagaactgaaggaaatggtttctgatgtcgatctcagttttaataaactttcctttatatccttggagttatgtgtgcttcagaaattgacttttttagatctcaggaacaattttttaaattctttgccagaagaaatggaatcactggtaagactgcaaacgatcaatctttcctttaataggtttaaaatgctacctgaagttctatatcgtatcttcacacttgaaacaattctgattagtaataatcaggttggatctgtggaccctcagaaaatgaagatgatggaaaatctgaccacgttggaccttcaaaataatgacctcttacaaattccaccagagctcggtaattgtgtaaacttaagaacattactactggatggaaatccattccgagttcctcgagcagccatattaatgaaaggaacagctgctatacttgaatatttgagagac

SEQ ID NO: 51647 - DNA, 615 bp, Homo sapiens
tgcagttctccgaggacacggtgaggctgtacatctgcgagatggcactggctctggactacctgcgcggccagcacatcatccacagagatgtcaagcctgacaacattctcctggatgagagaggacatgcacacctgaccgacttcaacattgccaccatcatcaaggacggggagcgggcgacggcattagcaggcaccaagccgtacatggctccggagatcttccactcttttgtcaacggcgggaccggctactccttcgaggtggactggtggtcggtgggggtgatggcctatgagctgctgcgaggatggaggccctatgacatccactccagcaacgccgtgggagtccctgggtgcagctgtttcagcaccgtgagcgttccagtatgttccccacgtggttccaagggagatggtggccttgctgcggaagctcctcactgtgaaccccgaggcaccggctctccagcctccaggacgtgcaggcagccccggcgctggccggcgtgctgtgggaccacctgagcgagaagagggtggagccgggcttcgtgcccaacaaaggccgtctgcactgcgaccccacctttgagctggaggagat

SEQ ID NO: 51648 - DNA, 451 bp, Homo sapiens
gtgtgtttaataatttgaaaccacaggagaggtctgctcatttattacagggccatgttttagctcttcctggatcgtctcagatctgccattcctctggatatgaacctgtggccgtggcagaaacccagaaatcagtaggggcttgttgtgttcttgtttgatcttcacgttaagatgctattgagcttttttatccatggatggtcttccaacaactgcatccctcacagtggcctgagtggaattaccgatatgagaagaagcctgctccaacacatatgcggcaccaaaatcaatagctccgcccagctcacgatattgaccagaatacctgatgtagccccaggtgaggagtgctattaacagtagtccaaccatacagttgaacaactgggctacaacctcaagacctatgaagccagtgaggcctgaggctatgtacaaagct

SEQ ID NO: 51649 - DNA, 660 bp, Homo sapiens
gcgggaacgaaccgggccctggaagcgggaaacggcggagcctgggctctagaaaaaactagccagaaggtggggcacgcggagccgcgacggagcgagcgcagcgcggtctgcgtggcccaacggacagcccgaggtccgccgtcttcccgcttccagggcccggttcgttcccgcccgcacccgtccctctcctctgcacccctgctgcttctgctttgaaggcggaggctccatgttgtcccctcagcgagtggcagcagctgcctcaagaggagcagatgatgccatggagagcagcaagcctggtccagtgcaggttgttttggttcagaaagatcaacattcctttgagctagatgagaaagccttggccagcatcctcttgcaggaccacatccgagatcttgatgtggtggtggtttcagtggctggtgccttccgaaagggcaagtccttcattctggattttatgctacgatacttatattctcagaaggaaagtggccattcaaattggttgggtgacccagaagaaccgttaacaggattttcctggagagggggatctgatccagaaaccactgggattcaaatctggagtgaagttttcactgtggagaagccaggtgggaagaagggtgcagttgttctgatgga

SEQ ID NO: 51650 - DNA, 513 bp, Homo sapiens
ggcactggtgtgaaggaacatggccctgtatcagaggtggcggtgtctccggctccaaggtttacaggcttgcaggctacacacggcagttgtgtcgacccctccacgctggttggcagagcggcttggcctttttgaggagctgtgggctgctcaggtaaagagattagcaagcatggcacagaaggaaccccggactattaagatatcacttcctggaggccagaaaattgatgctgtggcatggaacacaaccccctaccaactagcccggcagatcagttcaacactggcagatactgcagtggctgctcaagtgaatggagaaccttatgatctggagcggcccttggagacagattctgacctcagatttctgacattccgattccccagaggaaaaggcagtgttctgggcactccagcacccatgtcctgggggcagcagctgaacaattcctagggtgctgttctctgcagaaggtccaagtacagaatatggcttttaccatg

SEQ ID NO: 51651 - DNA, 2259 bp, Homo sapiens
aggccaggccggcgttcgcgggttgctgtgagagcgggcttcccaacaccatgccgtccgccttctctgtcagctctttccccgtcagcatcccagccgtgctcacggtacagcagggtcccggggagtccaggaggcggcggagtgcggcactgtctggagagttcagtgtattgcagagaggttggagaaaatcaagtcttgcacgtggcgatggctcaagattccctgaggtcttcagtgctgactaaggagtctgaaatgatgattcatgttttacctttggggctgagctaagtgcatctctttgagcaatcgtcttaatttccttgtcgtcaccaattatcataaccaattatcatcgtaaaggatggtaattcctttaattatacccaccttaaaaacatgattctgttccacaaacgaaaggagcacatcagagatgccttcagttctgtgtgcttgaactttgaattccatgaattatagttgcactgaggggagaatcctgtttccatcctcctggttccttctccctttcctgtccccatgtttctctgaggcctggcaatgctctctggatacttggtgagtagcccaggaggactcaggagtgagaggcccctgcctcctgcgctgggagaaggctgtgggtggccgtgaacccggccttgagtggcaggacagtgagtgtctgctggtgtgttcctacagcagacggactggactgagccctggctcatggggctggccaccttccacgcgctctgcgtgctcctcacctgcttgtcctcccgaagctacagactacagatcgggcactttctgtgtctagtcatcttagtctactgtgctgaatacatcaatgaggcggctgcgatgaactggagattattttcgaaataccagtatttcgactccagggggatgttcatttctatagtattttcagccccactgctggtgaatgccatgatcattgtggttatgtgggtatggaagactttgaatgtgatgactgacctgaagaatgcacaagagagaagaaaggaaaagaaaaggagaaggaaagaagactgaggggcagcagctgcttggagtttgcgtccttcccgtccacccagtgcagctcccagtgctgcagtgtgcgtggcgtgggcatccttccagctgactcatggtttgaaaaaccgttgttttatttaaatatccacagtggtagggcacacactgaagttggcttttcagccagcactgaatgtatccatcaggacatgcgtcttcaggtgcctgatctttgtagtcaggctgtgggaacggtctctgcagagcttcataactgggaatttgatttgaagaagtccatgtcatatgtgtaactagtactaattataaatataaaatacacaatataaaatatgaaactcaataataaacagtgccacctgtacatggggcaccatggccctcctcctcgtgctgtgttttctagtgcatggccacagttcgcagtagaggggtgttttcaccttccaagacatggggcaaagtttggagacacctggttgtcactggagggggtggtgctcctggcttctcctgtggagcccggggtgatgcataaaatcctgtgtgcctggatcagccgcatcacagacaatgacttgacatgaaatgtcaagctgtgcttggggcagagagaccttggaaggaagctcttggaaaatacgttgtatctcagtttgatgaaccaattcacaagaggctaggccctctctagcaaagttatgggctgctttactgaaaacagaatggaagccctgaagtcaacactccatggagaagcgtgtctttcctaatgtcctggtgttctgttgatttaggtgcttgggaacacaatgctcccagttctgttaggacaggcatactgttactttgcaatatccactttataaaatagctcctgcccagtggctcttggttcctgtcaaatgtggacctgtagtttaagaatgacaggtggttagagacccagatatttaaaaataggtgttcaataagggaatactgattgtgcattgtatctggatagcatgcctaattgtgcatttctgaaagttaccaattcaaaatgtaattggaacagttatctttgattagacaagccctgggaagagaatgttgaggtgcagagctcacccagccaagttcatgcccctctcgggcctttgtggctgagaagtgggacagaaagatgat

SEQ ID NO: 51652 - DNA, 777 bp, Homo sapiens
aaaaacatcacttctttatttcaaaggaaaaataaaagaccctcccaaccctgtccaaaaaaacccaataataataataacaataataaaaaatcctattagaaaccataaggaagcactgagagtttgagtattacattcttcaagtatgctgttcggattttttatttttaggttggtaactatacacatataaaaaaaccttaaaagtgcggccaagggattttgcttaaaattaagtatttagagggctacttaaaaatactgtagtaggactgtgcagtgatcctttgggggatgatgctttcacttttgtatcctcgtcaaggttaaggggcaggttcaaaagtgatcatacttccaggattagcgtaagtggccaacttgggtgagaaagccagagagatccatgtgttcttccacggacaacgaaaatccaccccgaatccaaaaattcagacatggaatgtggtaggatttcacagtaaagttagtctgggatagggagaggtgatgagcccagacaaggcagggtgttaggtttaactggtttgccctcatcaggttttcgcatctttttagtgggttttagtgcagtccttcaagccacaatttagattgcccttcggtgtgctccagattgttggttcatattaaaggactgttttaagatttgcatcccaaggaaaatcatgctacataaaaatgatccaagattttcgcccaaaaaacttcttggataaaatctacaaaatactattgcaattgcgtctcttg

SEQ ID NO: 51653 - DNA, 1297 bp, Homo sapiens
cttaccaaaaatccagtatccttgccatccttgccaaatcccactaaaccaaacaacgttccttctgtgcccagtcctagtattcaaaggaaccctactgccagtgctgcaccattgggaacaacacttgctgtgcaggctgttccaacagcacactctattgtacaagccacaaggacttctttacccacagtgggcccatcaggactctatagtccatcaactaatcgaggtcctatacagatgaaaattccaatttctgcatttagtacttcgtctgctgcagaacagaacagcaataccaccccaagaattgaaaaccagacaaacaaaacaatagatgcttctgtcagtaagaaagcagctgatagcacatcacagtgtggaaaagccactggcagtgattcaagtggtgtcattgatctcacaatggatgatgaagagagtggagcttcacaagaccccaaaaaactaaatcacactcctgtatcaaccatgagttcttctcagcctgtgtcacgaccattgcaacccatacaaccagcaccgcctcttcaaccatctggggtgccaacaagtggaccatctcagaccaccatacacttactacctacagctccaactaccgtgaatgtaacacatcgtccagtaactcaggtgaccacaagactccctgtaccaagagctcctgcaaaccaccaggtggtttatacaactcttcctgcaccaccagctcaggctcccttgcgaggaactgttatgcaggctcctgctgttcggcaggtcaatccccaaaatagagagttaaacagagaaaattgttgatgtatactagttgatttgtgctctgagtgttgtctttaatttaactttatttatggcctgtattagtatagtacacaatttgatattggtatattctctactctattaagaaacaccttacctagttagagtgggaatggtcaattgtgatttaccccagatgatggaaatcatggtaaaggatagccttcaatgagagtcttaaagatatggaaagtggctgagaaaagaagggaaaatgttaaagaaagcttgtagtttcttgtatatatcatatattagttacatacatatgttacatatatgttacatgcatgttacatatgtagatgacattttaaaattatatattaaccacatgtatataagcagtagtagaatatatcacataaacacaagcttatataaaaggtatatttaaactttaaagtaaagaaaaataataaaatgaactacgtatgaactcttaaaa

SEQ ID NO: 51654 - DNA, 163 bp, Homo sapiens
ggatgtgaattatcttaaaaattttcaggtaattctaatgggccaaggttgagaacccctgctctgggcccatccgagcaccaggctgtcacaaacgcatgcatgcactcacgcccgtgggcttggggggcttcggaaatgtgcttctgcttttttgagatgg

SEQ ID NO: 51655 - DNA, 289 bp, Homo sapiens
ttcggcacaggcatttcacgctgagcgcatctgaggatgcgatcaggaagcagccccggcactctctctttatggatgcccacttccagtttaaccgtggcatccctggggcaagggcgccctccaagctgtgcttcactaattccctcagggtttggaactatttgcccagttcccacgatgggcctttaagctctcgtccttcctaacctaaggcaacttcaaccatctgataaatctaataataagttacaatcgaggccgggcacagtggtctgtaatcccagca

SEQ ID NO: 51656 - DNA, 1890 bp, Homo sapiens
gatattttagaaagtgcttgttgtgaccactctgaatcatactgcttggtttcatggttaagaggaaagacaactgaggaaactgctagtatttctgggagtcctgcagagtctagttgccaagtggaacattcttctgccttggctgtcgaagagcttggctttgagcgatttcatgcattaattcaaaaaagatcgttcagaagtttaccagaattaaaagatgctgtcttggaccagtattcaatgtggggaaataaatttggagtattgctttttctgtattctgtattactgacaaagggcattgaaaacataaaaaacgaaattgaagatgcaagtgaacccttgatagatcctgtatatggacatggcagccaaagtttaattaatctcctgctgacgggacatgctgtttctaatgtatgggatggtgatagagagtgctcaggaatgaaacttcttggtatacatgaacaagcagcagtaggatttttaacactaatggaagctttaagatactgtaaggttggttcttacttgaaatctccaaaattccctatttggattgttggcagtgagactcacctcaccgtattttttgccaaggatatggctttagttgcccctgaagctccttcagaacaagccagaagagtttttcaaacctacgacccagaagataatggattcatacccgattcacttctggaagatgtgatgaaagcattggaccttgtttcagatcctgaatatataaatctcatgaagaataaattagatccagaaggattaggaatcatattattgggcccatttcttcaagaattttttcctgatcagggctccagtggtccagaatcttttactgtctaccactacaatggattgaagcagtcaaattataatgaaaaggtcatgtacgtagaagggactgcagttgtgatgggttttgaagatcccatgctacagacagatgacactcctattaaacgctgtctgcaaaccaaatggccatacattgagttactctggaccacagatcgctctccttcactaaattaatttgtctaagtatttataaggaagatcttaataacagatgttgaaagaaggagtcaagactggcaattggctggattaagctaaacactggtatcactgattaactgtaaataacaattaaaaacacattttcagtgtttatgatatgtttaaattatttgtcctaaagctttatgttaaagattatcctattttacccccttccgtgtgaaatttactagcaaaattaagctttcatcaaagttcatcacttttgcattcagatacttggtcatttacttaccaaattacaaacgcaatactacagcatttgtatattaagtatcacagttactattgataaactacttttgggttttatttcattgaggcactttttttattgtttgaatgattccggcttgtaatatatcagcctctacaatgaaatgcagaagagttcatttttctaagatctgtttttcattagaaatattgacaaataacacattgtcaacctggatcctttgacaatttacttaactctggcatgttcacaaaaagtagaaactctaagagaccattaccatttattcacagatgtataggggatgtattctaaaaactgacagaaaagagaatctgatagtcaacactgttaacttttactgtgtaattgccaaatacacttttccaaatttgtcccaacagccctgtaagccagctttcttctatatttataaacacgataaatgcatgagaagatctgttattacattagtatattacgttatttattatgatcctagttgatggcctaaataaacacctttttctttaaaaaaa

SEQ ID NO: 51657 - DNA, 446 bp, Homo sapiens
cgcactgtgtgtccactctgctctttctttcttccttcttgttttattctcttctttttcctttattttgctgtaatagaggactgagctgcaatgttttattaactgctcttcccttcccccgggctatagagactgttggagagaaggaactggactcctcaagctatgctctacctgaaaggggcacagggtcgccgcttcatctccgaccagagccggagaaaggacctctccgaccggccactgccggaaagacgaagcccaaatccccaactactaactattccggaggcagcaaccatcttactggcgtcccttcagaaatcaccagaagatgaagaaaaaaactttgatcaaaccagattcctggaagacagtctgcttaactggtgaaaatatactggattatgtttaattatgggtctattctctttgaaaacatg

SEQ ID NO: 51658 - DNA, 144 bp, Homo sapiens
ccaaggtgaacatcggccaccctttccattagcaagggcctgcaccgggtatttggccagagttcctctgaattcacttggtctctggcagttgaccttgggttgaaaaatgcagtttttttgagtgggggtttagagatcaat

SEQ ID NO: 51659 - DNA, 982 bp, Homo sapiens
ttttttttttttagttttaacttacaaaaaacgtatttattaatccagttttcctcttcttgccataatacataagcatgacacagatggcctgatacatcagcatggaactgtcagaaagccccaccagtcactgcttctagagttacatgactggcttttgtttggcaacaggacaataattacagcgtggtttcaagtaccatacacaaagcagaccaaccccaggatctccagcatctgcgaaggctcactggggtaggcctgggaggaagaatccaaagcactgtacagatgatcaaaacacttccggtagaacactgctgcagctgcacctctccttacagagccagagcctgctccatcagaggcctgcttcccttggctgatggtcagaaggctgcacaactggatcgccctagggatacagtcccacatgacatcccaaggctggaccaccatcatgatctttccagctggtccgtctagccaagtggtgctactgctgcttgtgtggaaggggcttccaggtgggtgggagcttcctgtggattagggtgagtccgcagagaataaggaacactcctccccaccacaagacctcctggcactctccatacagcacatagcccaggaaggccgagctgaggatatttgaaaaagtcactgtgacagatgcaatggctgaagacatggagaaactgaggccccggctaaagaaggtccacatcagagaattggtgctcgccatctcaataatgcctaagacgcataaacccatgctcaccttaagagtcacgtggagagaaatgctcaggctcaagggacttaaaatgagaggtagagggtggatgtaggaggtgtagttcttccccgagagcgaaccgcctggaggtgcggagggaattccgcgggggtgtcagggtacgcggtcgcggactcggcgccgcccggaggccccggcctctcgtgccatgttgcc

SEQ ID NO: 51660 - DNA, 418 bp, Homo sapiens
  misc_feature (1)...(418): n = a,t,c or g
tgacttgctcactatcatgaactcactcaaaagaaactagcaattttttagacttcttttgggatccttgtaccgcatcctatactgcttttatgttcatgtgtgcatttgtgtacatgtatacacatattactccataacgaagcacagtcttcttttatacctttcctggttggggtagtagaggaattttacagcctacaatcagacacatccagaagaagagtgggaatatgtatgataccttaaaaatcaggcacatttaacaaagtataacttacttcatgggttacaacttaaggtttaatgttttttccctttatttttccaaaagggctcattttttctcccttttctnctactattcaaagtccagggaactggccccangggcntctgttcaggggggggntcccgg

SEQ ID NO: 51661 - DNA, 315 bp, Homo sapiens
accaggtgaaagagcaaagttcaagtgcctacttatgtgtcattcgctcatgtaagagtttttaagagagggctgattatcacagccctcttttctcctgaatttttaatgcagaagtttgaatgaagcaagggaaggcatgtagggacaggaaaggaaacaatggaaggaaagtgattctgtgaaaatgaacttgtgattttacacctgaggcagctgtgtgaagccaagcagaagacacacgtgcacatcggggaaggcccttctactatttcaaatagtacaatcccagaaaatgcaacaagcagtggaagg

SEQ ID NO: 51662 - DNA, 1856 bp, Homo sapiens
  misc_feature (1)...(1856): n = a,t,c or g
gggcacattgttctgatcatctgaagatcagctattagaagagaaagatcagttaagtcctttggacctgatcagcttgatacaagaactactgatttcaacttctttggcttaattctctcggaaacgatgaaatatacaagttatatcttggcttttcagctctgcatcgttttgggttctcttggcnnnnnnnnnnnnnnnnnnnnnnnnnnnnnnnnnnnnnnnnnnnnnnnnnnnnnnnnnnnnnnnnnnnnnnnnnnnnnnnnnnnnnnnnnnnnnnnnnnnnnnnnnnnnnnnnnnnnnnnnnnnnnnnnnnnnnnnnnnnnnnnnnnnnnnnnnnnnnctccttttacttcaaactttttaaaaactttaaagatgaccagagcatccaaaagagtgtggagaccatcaaggaagacatgaatgtcaagtttttcaatagcaacaaaaagaaacgagatgacttcgaaaagctgactaattattcggtaactgacttgaatgtccaacgcaaagcaatacatgaactcatccaagtgatggctgaactgtcgccagcagctaaaacagggaagcgaaaaaggagtcagatgctgtttcgaggtcgaagagcatcccagtaatggttgtcctgcctgcaatatttgaattttaaatctaaatctatttattaatatttaacattatttatatggggaatatatttttagactcatcaatcaaataagtatttataatagcaacttttgtgtaatgaaaatgaatatctattaatatatgtattatttataattcctatatcctgtgactgtctcacttaatcctttgttttctgactaattaggcaaggctatgtgattacaaggctttatctcaggggccaactaggcagccaacctaagcaagatcccatgggttgtgtgtttatttcacttgatgatacaatgaacacttataagtgaagtgatactatccagttactgccggtttgaaaatatgcctgcaatctgagccagtgctttaatggcatgtcagacagaacttgaatgtgtcaggtgaccctgatgaaaacatagcatctcaggagatttcatgcctggtgcttccaaatattgttgacaactgtgactgtacccaaatggaaagtaactcatttgttaaaattatcaatatctaatatatatgaataaagtgtaagttcacaactacttatgctgtgttggactttttctaagtgagacctggagtgaaagaactacctattaatgaattagtagggaggggagtcttcttagctgtgaaaattttagagttgcatttggttccattaaatgtggtatttctttccactagcattttgttggctttcgcttttccagttagcagctctttgaattatctttctaagatacagatttaattatgtcactattcaattcagaggttctgctatggaatgtagtttaaactgcttagcttggcacacagagatttatttctagccccttctccaccttcctatttcctccttcgtttcagaatcttcctctccctcatccaatgctggcaaacaccagtgggggtggagtagtgggtgtaagctctagggagaaggcttggattggaatccaagttattccattacaagtagtgtgacctttaatacattatgtatattgtctaagtttcagctttattgtctgaaaaagaaaaataattgtgtgttcctcataatattgtggtacgaattgattctttcactcaagaaatatttactggagtacctactacatgcctggtgctgttgtagaccttgagataccttactcaagcaaaacagccaaggatcc

SEQ ID NO: 51663 - DNA, 1226 bp, Homo sapiens
  misc_feature (1)...(1226): n = a,t,c or g
caaggcaccaggtttacagttcccgggctgattgacggggaaggagtacgagttttgtgtcaggtcagtcagcgaggctggggtaggcgagagctcagccgccaccgagcccatcagggtcaagcaggctctggctaccccgtctgccccatatggctttgccctcctgaactgcgggaagaatgaaatggtcattgggtggaaaccccccaagcgtcgtggaggtggcaagatcctgggctacttcctggaccagcatgactcggaagagctggactggcatgcggtcaatcagcagcccatccccacccgggtctgcaaggtcagtgaccttcatgaaggccacttctatgagttccgtgcccgggctgccaactgggcaggtgttggcgagctgtcngcacccagnagcctgtttgagtgcaaagagtggacaatgccccagccaggccccccgtacgatgtacgggcatccgaggtgcgggccacatccctggtgctgcagtgggaacccccactgtatatgggggctgggcctgtcacaggctatcacgtcagtttccaggaggaaggctctgagcagtggaagccggtcacctcaggccccatctctggcacccacctgagggtttccgacttgcagccaggaaagagttacgtgttccaggtacaggccatgaattcagctggtctggggcaaccgtccatgcccactgatcccgtgctcctggaggacaagccaggtgcccatgagatcgaggttggtgtggatgaagagggctttatctatttggcttttgaagcccctgaagcccccgactcctcagagtttcagtggtccaaagactacaagggcccactggacccccagagggtcaagatcgaggataaagttaacaagtccaaggtcatcctgaaagaacccggcctcgaggatttgggcacctactcagtcatagtcactgatgccgatgaagacatctccgcaagccacacgctaaccgaggaagagctggagaagctgaagaagctgagtcatgagatcagaaacccagtgatcaaactgatctccggctggaacattgacatcctggagcgaggggaggtgcggctttggctggaagtagaaaagttatctccagccgctgagctacatctaatcttcaacaacaaggagatcttcagctcgccgaaccgcaaaatcaattttgaccgagagaagggcc

SEQ ID NO: 51664 - DNA, 3775 bp, Homo sapiens
gcggagccggcttcgggactgcggagactacacaccgagcgagcgcctgggcccgaagggagcgatgctgtggttccagggcgccattccggccgccatcgcgacggccaaaaggagcggcgcggtcttcgtggtgttcgtggcaggtgatgatgaacagtctacacagatggctgcaagttgggaagatgataaagttacagaagcatcttcaaacagttttgttgctattaaaatcgataccaaaagtgaagcctgcctacagttttcacaaatctatcctgtagtgtgtgttccatccagtttctttattggagacagtggaattcccttggaagtaatagcaggaagtgtttctgcagatgagcttgttacaagaattcacaaggtccgacagatgcatttgctaaaaagtgaaacatcagtagcaaatggcagtcagtcagaaagttcagtgtctactccatctgcgtcatttgaacctaacaacacttgtgaaaactctcagtccagaaatgcagagctttgtgagataccacccacttctgatacaaagtcagatactgcaacaggaggagaaagtgcaggccatgccacttcctctcaggagcctagtggatgctcagatcagagacctgcagaggacctcaacatccgagtggaaagactaacaaaaaaacttgaagaaaggagagaagagaaaagaaaagaggaagaacagagagaaattaagaaggaaattgagaggagaaaaactggaaaagaaatgttggattataaaagaaaacaagaagaagaattaacaaaaagaatgctggaggaaagaaacagagagaaagcagaagatagggcagctcgagaacgtataaaacagcagattgcattggaccgtgcagagagagctgctcgttttgcaaagacaaaggaagaagtagaggctgccaaagctgctgcccttgctagcaaaacaggcagaaatggaagtcaagagggaatcttatgcaagagaaagaagcactgttgcaagaattcaattccgtcttcctgatggttcttcctttacaaatcagttcccttctgatgctcctctagaagaggcaaggcagtttgctgcacagactgttggcaacacttacggtaatttttcgttagcaaccatgtttcccaggagggaatttaccaaagaagattataaaaagaagttactggatttggaacttgccccaagcgcttcggtggtactgttgccagcaggaagaccaactgcatccattgtacactcttccagcggagacatttggaccttgttgggaacagtgctttatccattccttgccatctggagattaattagcaatttcttgtttagtaatccgcctcccacacagacttcagtgagagtaacatcgtcagaacccccaaaccctgcatcatctagcaaatcagaaaaaagggaaccagtgagaaaaagagtgctggaaaaacgtggagacgactttaaaaaggaggggaaaatttatagattaaggactcaagatgatggtgaagatgaaaacaacacttggaatggaaattccactcaacagatgtagtgtgacaagtataatatgtgcaataatcattgtttctcttatgatttaattcaactaaaattctactggagaagtgggactgctttatattttccaactggtctataaaatgtctctttattcctgcttagtgggtgtgggttgaaggtgtttaactcagaaaagtaaagacaggaaataactctctgctaggtccttgcttatatggcaaccactgctagaaccctaaaagaaccaaaaatctgccacagcctgcctccatcagcttcttatttagtatttcatatgcccattagccctatgcttcagatgacacgttttgtttagagctactttgctccaagactcttaagcccaaagtaactggtatgtcactgagtaacttgactcggtgtcagagcattttaactagccactcagatgagaatttatgtttaacttctctttttactcatcagctgcaagcaaaatcttgtagtttttaatcttaaacactgaataaaaaaactttcccctaaattggaatgatcttagttttgctttgagttttgttatctagcatctttttgttgcacagggctctattgaggtcctatgtctctgatttttttttttccccagtattgccctggagctgtctctggaaagtagctggcgaggttaccttaactatcactgaagaaagaaattttctgacacactgatggcatgtgacttgtctcctaagtcagtgaggcatcactttgtttgcataaagtatacggtttgttaaggcctttgttcttgtgagatgcaaaacagctgctagtctgcaacctagttttccctctcacctttaactgacgttttgtcctcaataattacacaaggacctagagtacctataggacaaaaagtatagaataaaaatatgcctttagtcatttggtttttcttaaaaagttgagattcttaatctgacttacatgttactttatccgtatgtctttgttagtggagaccgctaaactaatgatgtttgaaaacagttcctctgttttagattggaagatagcactctagagtggacatacggaaagactgtgactttattttgtaatgggaggaagaaattttctcagagcaaactttctattttttacctgtgaaataacagtgactttttaaaatggtgacagtgttggcaaggaaacagcaacacaggctgcgctgttggtaggagtgaaaacccagtataattcttctgaaaaacatttatcagaaacttaaaatatttcataccgtttgatccagtagcttcttctaaatcataaatgcagacaatgtttaggtaaagacatactcattaagtgttatttattttactcaagaactggaaaccaactaaatgccttctatagaagtaatttttgatgaggagaaatggtacaatactaattaacaacttggtttaacatgtttactgagcatctgttaagtgttgggggaaaaagcagcaggatccagagctataggtacagtgtgatctcagctttgcaaacacattttctacatagatagtactaggtattaatagatatgtaaagaaagaaatcacaccattaataatggtaagattggtttatgtgattttagtggtatttttggcacccttatatatgttttccaaactttcagcagtgatattatttccataacttaaaaagtgagtttgaaaaagaaaatctccagcaagcatctcatttaaataaaggtttgtcatctttaaaaatacagcaatatgtgactttttaaaaaagctgtcaaataggtgtgaccctactaataattattagaaatacatttaaaaacatcgagtacctcaagtcagtttgccttgaaaaatatcaaatataactcttagagaaatgtacataaaagaatgcttcgtaattttggagtaggaggttccctcctcaattttgtatttttaaaaagtacatggtaaaaaaaaaaattcacaacagtatataaggctgtaaaatgagaattctgccccctcacctcttaccccagtactattctccagaggtaatctattaacaatttcttatgtaattttcaagaaatttgtatgcgtatataagcaaatatgtaatctttattttttaaataaatgggatcatattatatattctaaaaaa

SEQ ID NO: 51665 - DNA, 451 bp, Homo sapiens
gactgagacaggagatttcattcgggaaattaaaactcaccaataacaaaggcgcaaataacaacaacacccagatgatagtcttacaatccttacacaaataccaaccccgactgcatattgttgaagttacagaggatggcgtggaggacttgaatgagccctcaaagacccagacttttaccttctcagaaacgcaattcattgcagtgactgcctaccaaaacaccgatattactcaactaaagattgatcataacccctttgcaaaaggcttcagagacaactatgattccatgtacaccgcttcagaaaatgacaggttaactccatctcccacggattctcctagatcccatcagattgtccctggaggtcggtacggcgttcaatccttcttcccggagccctttgtcaacaatttacctcaagcccggtattataatggcgg

SEQ ID NO: 51666 - DNA, 326 bp, Homo sapiens
ggcttccacgaggaggtcttcctaggcaaggacctggtggctttgatgagggaacggagccccgcggagccggaggaagctgatggtcatcttttccaaggtggatgtgaacactgaccggaagatcagtgccaaggagatgcagcgctggatcatggagaagacggccgagcacttccaggaggccatggaggagagcaagacacacttccgcgccgtggaccctgacggggacggtcacgtgtcttgggacgagtataaggtgaagtttttggcgagtaaaggccatagcgagaaggaggttgccgtacgccatcaggctcaac

SEQ ID NO: 51667 - DNA, 4720 bp, Homo sapiens
ccactctctacctaaaattttaccatgtgcaaaacgaaaaacattttagttattgatcatctcttctgagccatacactttgggcaaaattttgtgatggctataaatatgaaaacacttaaaaaatcagaatacaaagaatgcatattgcctcacatgacacattttttttttccctcagagaaagaccatctgtttaggataaatttctagtcttgtttatatagtcaagtattttttgctaaaaaagaaaatgagaagacctgtgctgtgaaaaattttaaaaatctcaaatttttaaataaaaaatcatttataaaattcaggatggatggctctaaaatataaaaagagtgaaataaaaaaaacaactgcagggaatttgtttattgagcattaatgttaacacttttaaattaagtattcacttacgaattttgtcactgtcctatcaacggacataatagaaaatattgcacagaactcaaacatgaaaataataaacaaaataactaagcaacaagtatatgctttacattttaaaaattaatccaaacaaaataatttgaagcacttctctgatttggaagtcttaaaatgttatctcatgttttatttgagattttttttcgttttttcttttttacaaattgacactgtacaaagagcttaaatggccagtaaaactactgccttaaaattgttggctttaagtaacagaggtaaaatttgaattcacatcagagctttctaaaatggcaatagtacaagcaaatgactttctctagtatccaaaacctgcgctggctctcccttggctagaaacaagacagccttctaaagctgccataatgtcctaaaatgctctgaaagaagttggtatacttcattccccagcttaccttggtaacactggactaaacagaaaatgaagaaaattcagtcaatagtaacttaaacagtactaagttagctctggacttagaaggtttggtaaagttgatgacattcagaataaggttctcagaagaaaagcagttttccaaaaataggctaaaaagccctatattaaagaaaaaatgcccaagagtgaattgaatacttaagtttatctgttccctagaagactatgaacacccacaatgggagctgaaacactatatataatttagaatgcattctcccagagcaagtttataaggtttatagaatagtaatggcctttctaaattttcacttgatatttaaaattttataagtgatttattatgtcatcaaattaagccaattccattaactatatccaagtaggaataacttcagaaatgctttgaaaaaggacaatgacagacctatagacatgaaaagcaaacagcctttgcaaagctcatctccaaatctatcaattctcaattcttcttaaaataaaagactaaccacatgttcagccattccatcttattcaagtttagcattacgacagaaatctcaaagggctgcatgttgctaaacactgtcagtatttcctatatgcaccatttagactatacctcacttttttttacttcccttataatattaaaataatgaataaatatggtcctttagttaaggtcctccaccttaagtgaaatacaaaataaggtagttttattaatttcttactagaattggcttaaaatctatttaccaaataagaaatagtaaacttttaagttttacccagaaagcagaagtattccgatccactcctaatgtctacataaaatagttcatcattttagttcagtttatgacattttttggactagtattaatgctgtacctcagaaaaaaatccaatcaaccaactgcagaaagtatgcttaattgttaccctttgaaagaggcaaaaaaattatttacgaaaacctaaaataatctgattaacaattgatgctgaaaaggtcattaaaaactgaggaataacaaatgtagttttccctgtatttcaccctattattaatggaaaacagaatggcaaaaatttcttaaatggaatatgttaaaagtacaagaaccgaaaacacttggtaacatttcctttgccttctgacagcaacattttcttaggataaaaacagtgacatgtagttttagagaatctgaaatttctacattcaagaatggaattaaaattcaatgtgaggggaaaaaagcaaaatatagctagtggtatccaaactttaaataaaacctcaaaggtaagtatggctgctgttttgttccagtcattgtttcacaaaatgttggctgtgtcataaggtatctcctgtgctttctatcaaccgagggctgctgaagtataagacattcctctgtaaaggaactgacactgaattcctttgtaaattcaatctcagctgaagtgtcgagcaaggcgggcagatctataatcagcacgaagttgtacgaaggagtgaagtatattcttgtccagattagcaagttgttctcctgagcagacttgctttaaattatctggggcaactaccagaagattgcaaagagcatgcagagtatcaaaaagatgtaataccattggaatcttgaagtctttggcacacttcctatattcggctacatcacaaatggccaacatgccacccatacaactgtaggaatattgttgaagatgctcatagataagtcgatgaaaacgtactccaagttccatcaaaactgtatccacattcttcccatccatggaatttttaatcttctccacttgttttcttacgtaagcacagacttttacacaggcattagtatattgaatcaaaacattgttttcatcttctggcttaaaatctgttttcttctgttctgcagccaaaatatgcttcatctgtccaatcatacaatttaatgtcctatcaatgccagtatccaatttcatctccatttgttcaattatttcttttttcttctgaaggcattcagataacttaggagaagagcttattagtggcataaggtgatcattaaactgtttgtcaaaaagatgaaaaatagtattggcctgttgcacaacgtccaaaaaataaagatttgcattcctagaatctgaagagggaattccagcaagtcctgtttccaaagcataatcaatatgctcaatacataaaaattccacaagaatggtaaaaattctgaaggcattccttggtaagtcagaaggatcagagagcctatgacatctttcaaaggcttgtttggtttcttgtaaaagattaaccaccacttcttgggatagaaaagtctccccatgagtatcgatacttggcccaagtggtaagttggtacgctgtctaattctttccttcaaatcttgaatacctcctgtgccaatggatctcttttgatggtttttcgaatcataatagcgctgtaggatcatagcacttctgcttttcaaatatccagtctccacctcaatatagttctccaaataggaaatgaaaatggatttgataagcttagacaagaaagtctgtttatcagtacctaaattaaactccatcagcttgctggaaagattggtggttcttgtatacagatcatagagatttttgagatattgctctgcatcggacttcctacattcttctaactgctctttcacaaaactctgtagtttgatttcaaatacattttgaataagtttagccaggactgtttctggattactgaagatatctccaacttgtttgttcactctttgacagagtattccagcgtcttcaaatatatcatttctcaaataagcaccctcctggcactgctttatataaacatcaacacaatgggaataacccttaaaatgaagtaaaactgctgctacttctctcattctggagatttcacctcttctttgagcactggtaaactcctgaatcagctggcattctaaatcatggtatttacttgcaattttggatttaacttctgaaaatctatcaaaaggtaactcttgggcaattaggtgcaacttctgaatgatgtctgctgcttcctttatcttttcagaatttgtaaaaacatcagatttcaattctccatctagaaactcattaaagtatttcatcaatttctgagcctccactgcccgttgtctgggtgtgtttaccccctctaactggtctccaaggtgacagactttagttgctacatagctaatgtgctcatctagttcttggaaatgttggaaggcaacctgattgcttttctgcagctcttgtaccttcttggcaaattccttggcttctttctgacattgttgctctagtttctctactttcctctgaatcctttcatccattatctggagttcctgaatatgatttacaaattcttctaataatcttttaggatcaaaagcttcaggtccacctctagagcctcctcctggggttctccatacaagacgttcaatatattcatctgccacaaaaggctcctcgaagagctcggccgtggtagccatcccggccggctgagaggctcgccccccactggatgccgtctccgcttcacatgctgcgcctcagaggcgcggcgcacaggtctccgctcggctcgccagctccggctccgggccgctgcgggctccccagctccccacagatcccaggaggggcgggagagcggccatgaagcgaagccgcaaacgctccggaat

SEQ ID NO: 51668 - DNA, 356 bp, Homo sapiens
gattggttcttgagaggagacatagcatgcattccctcagatataatccttcaataaatactactgaagcagctctctaccagggaaggaaaacagcactcatcctcatcctcccgtgggactcactgtttttgtcttgcctattctgtgctgtaattctcacatcttaactaaagggagctaccacaactaaacaaacagacaaaaaaaaatcagagtataccttcacaaaataagcagtctatatgaaataagggagttgcatttggtttttttgtcagtaagtctgtaatgctcgatatatcaactttcagaattacagtaagtcagagcaaagagaatgaaatctgtagctc

SEQ ID NO: 51669 - DNA, 699 bp, Homo sapiens
cggagtcggtggtccctgcgcgatggccacctcggtgttgtgctgcctgcggtgctgcagagacggggggactggccacatccctctgaaggagatgccggccgtgcagctggacacgcagcacatgggaacagatgttgttattgtaaagaatggaagaagaatatgtggaacaggaggttgtttagccagcgcacctttacatcaaaacaaaagctattttgaattcaaaatccagtccacaggaatctggggtattggtgttgcaactcagaaggttaacttgaatcagattcctcttggccgagatatgcacagtctggtgatgagaaatgatgggagccctttaccacaacaatgaagagaaaaataggctgccagcaaacagtcttccgcaggaaggagatgtgttgatgacagtgcaattttggattgccagttcagtgagttttatcatacgcctccacctggttttgaaaaaatattatttgaacagcaaatcttctgaatgtatttgtttttaaaacttgtatttctgcactgttaaaaaatgttcatcatttaataaaactttacctggcctatagatgaaaatatattcttaaaaatatgcttgttgatgctgtctaaggaaccaatgtattcagtataccaccctgaagttgtgatttaaaatactttatgttttgtgaaatgaaa

SEQ ID NO: 51670 - DNA, 506 bp, Homo sapiens
  misc_feature (1)...(506): n = a,t,c or g
acaaatacttctgaaaatattccaaaaaattaaaggggagggcattattcctaactcattctatgatgccagcattaccatgatgccaaaatcagacaaggacagaaccaaaaggaaaactgcagaccaatattcccaatgaacatagatgcaaaaattctcaacaaaatactagcaaaccaaattcagcagcacattaaaaggttagtatactataatcaagtgggatttatccctgggatgcaaaaatagttcaacatatgcaaatcaataaatgtgatacattatactaacagaatgaaggaaaaaagccatatgatcacctcaatagatttcaaagcacttgatgaaaataaacatcctnnnnnnnnnnnnnnnnnnnnnnnnnnnnnnnnnnnnnnnnnnnnnnnnnnnnnnnnnnnnnnnnnnnnnnnnnnnnnnnnnnnnnnnnnactgaatgaggaaaagccaaaaggctttcctctaaaaattgggaccaagnacaa

SEQ ID NO: 51671 - DNA, 994 bp, Homo sapiens
ttttttttaaagtgaaaaagaatttatttaatttttgccatatcaggacaacaaagcagcccttttatgtcaccactcattaaaaggacattacaaaacattaacataatgtagtagcccatgttttctttcaggcattttcaaagggcatctcagacccacaatattttctattgagtgtgcagaaaaacagagctgcaaaatcattagtaaggcaaaataataaaatgtctccctttttattgaaacatcaattttccatgttttagagatattctgaatttaacattcatagatatgcaatatttaagttttaggatattagcatactatcagcaatattgggtttaatagctactatcaagcaactgatttctaatgcacacaacataatttgatagtatatgtataagaagatggcctgaattttgccctcaaatgcacaaaaagaattttccatacacattctcaaaagtctttggccttgctgaataataatagagctgttattttactgtgaagcaaaataagccttcaagtgtcccttacttgatcttagaaggtcaaattctctgtccaatagttcctcttctgttaacttagagaaattatcctctccaaaaggattccaccctgacatatcaggtggattgctgatgttcttctgatttgtgaaatttgcaatggcctctttatcagcaactgacctattggcactataggaggagtcccattatggttccccaacctgagctggaagtgatgaaagtgtaggaaactaaggcctggtgagaactcttgaaggggaggtaagatattccaggtgatgccctgttgttgagacggctgatgttgagctagcatctgctgttgaaagaaagcctgctgatactgcggcatcattgtaggatactgtgatgcagaaggttgtggttgatataccgaatgcattaaaaattgttgttgaagcatctgttgctgctgtgttgcatgt

SEQ ID NO: 51672 - DNA, 688 bp, Homo sapiens
tttttcacaaaaagtattttattattcttaacagtactcactttaaaggaataagaggatagcatacattttttacagacaatatataaatgttgtacataattaacaataacttagttcactaatccaaaataaaacaagccaaataaaacataaaaacagaaaatactgccgattctttttcttatgcggacactagtacaaaataagttacttctggccgtggtgctccctgcaggcgactgcccgcccatattgcacttgggtcactacatcaggcacaatcctcctcctggggccaggggcccctcacaggccaccacaccccgccgtcaccgcatacagaatctaagctcgggacacgtttatatacagctgtaccttgggaaggatccagacagccacagtaaagctggacctgagaccccagcagggacacagcctctccctgggtccctggtcctgacctgcccccaactcctgccttcaccccctgccaggccagcaaatgccaaccagcccccagaaaccaagggcagcaaaggcccctccccacccccagctttcatactagggctgtgggatcccagctcttttccaaaaagaattgcaaagctccaaccttgtgtgtaggttttattcctttcatagcagggctcctgtggctacgtacaatcaactggaccca

SEQ ID NO: 51673 - DNA, 946 bp, Homo sapiens
ttagtatgcttttagcaaacaaactcactggtctttctttactattaataatgtgctaattttgtatttgagtttctgatcaaactttttattcctttgtcatcttttcctagtttaatggatcgagaagtggcgttgcttgctgaaatggacaaagtgaaagctgaagcaacactttgttagtgaacgtaaatatgatgaggatctgggacgagtagcccggttcacctgtgatgtagagaccctaaagaagagcattgattcatttggacaagtgtctcatccaaagaacagctattcgaccagatcccgatgtagctcagttacatctgtgtccttgagtagcccaagtgatgcctctgctgcttcctcttccacctgtgcctctcctcccagccttacaagtgctaacaagaaaaactttgcaccgggagagactcctgcagccatagcaaactccagtggccagccctaccagccacttcgggaggtattgccagggaacagacgaggaggacagggctatagggcacaaggccaaaagtccaatgaccccatgaaccaagggcggcatgacagtatgggtcgttacagaaacagctcgtggtattcatctggttccaggtatcagagtgctccatctcaggcaccaggaaacaccattgaaagaggccagactcactctgcagggaccaatggaactggagtcagcatggagcccagccctcccacgccttcattcaaaaaggggctcccccagcgcaaacccaggacctctcagactgaagccgtgaactcttgagagaaaatccagttggcctctctcctctatccacacaattcaacttgataactggactttaggaaacttacagttagatgtaataacaaaaagaagtttatgcgtatcactttttgtgccattctaagtatttttggtttcttg

SEQ ID NO: 51674 - DNA, 347 bp, Homo sapiens
tatcatttctctcaatgtgtataattgtttttacaaacaattgtgttttctttatgttaatttaaacttacacagcttatattgaaaatttcctttcatctgaaatttatttacaaatattcctgttcattttcctggttaagcatgctatatttagaaactcatggggagaccttagacttttgtttaatcctttatgtttcaacctttaaatgttccattcttatagtattactttaaatcaattctaaaactgaactttgttttgttacataaatgtcgcaggcaaaaataacactacttatagattttacctattatggtaaaaaataggaacatattgtcat

SEQ ID NO: 51675 - DNA, 552 bp, Homo sapiens
cgggggaggctctaggaaggttctgggttgggggtcagtgcatctcagggagaaccaaggaaggtgggcatggctggagaggaggaaaaggaaggagccccaggtgtcagggcagtaggctgggagtcagtgtggcaaagcgggggcaggacacagatacagtggcaggggcccagggctgggacatgagagaaggcagcgaggcggcagagggagaagagaggactcaggtggaggtggggtgggtcagctgtcagcatccctcagaggagaaatgtggagagctggaggccagcagtcactcacactcgctctgtcctcctgtccagtggatacagccctgggcgctctgctggcccaaggatgtccccactgcccctccatggcctctggccttcttcccattcatatttatttatttattgacttttatgaagtttccccttccatccgatccctactgcccatgttgtcctgaccatccctcccagccatccagctgtctgtctgtctgccacaaggaaattaaaatggcaagcagcaaaaaaaaaa

SEQ ID NO: 51676 - DNA, 344 bp, Homo sapiens
acatacttcaagaaaattttatacatttccaaaaacactaaattttaagctttttaagtcttcaaaaatactctaaaatgttttatttaaaagataaaagtagaaattactctttaaaaatcaacaaagtaaaattttgagatacaaaatggtatattaggggtggggggagttttctttttaaaaaataataatgactaaaggaaactcatgaagtttaatatcaatgtgaaaaattactataaaatgatttttagccccacttgttaagaaactatattatatagtattatgtgctatttcttttctagagcaccaaataatcatctgatattaggtgtttt

SEQ ID NO: 51677 - DNA, 83 bp, Homo sapiens
gtggaggtttggtgggatgaatataaagactacttctaatgctagtcgtcctgaatcgcaggcattaccatatgggggatata

SEQ ID NO: 51678 - DNA, 735 bp, Homo sapiens
gcctccccaggctgaagtgtcctcagccttcatgtggatttgcccagtaatggatggctccaccgaggccaggtctggggaagttcagcctcgaggacactaggggacgaaaaacttcaaaaagaagactctttttattaatattttggcgttctttttggagaggaacttttgggatgtagcctttacctgtttcctgaatttgacatccaaaaagccttttggaaaacaccattctaaatttatcctgttctgaatcatcatcgcttctgatagatgcagttgcttgctgacatcgtgatctttgattttgtacaacgctatttgggctaacttttgggattttactttgtgcttagaatttgaaagtagtattcattggaaagagactccaagaaaatactcgaagacatcaaaagctggattcgagggtataacgtgttttgttttgttttttaaattagaaaaataaggaattgcagtgtgattttctttccccctttaacttagaggaacgaggattatacagaaatttgaaatttcaacaagaaaaacttaagcttccttggattcccacgtcaaaggaaagtttcaagctttcagaaggagttctcactcgaagataaagaacagctcgctaaccacgaaagaggaatcgatgctcagcttttagttgcacttcctaaagttgcagaattaagacaaatctttgaaccaaagaagaaagaattctta

SEQ ID NO: 51679 - DNA, 1189 bp, Homo sapiens
  misc_feature (1)...(1189): n = a,t,c or g
tcgggccgacgggctcccggaggactgcagggcaggatgacgcaaaacacggtgattgtgaatggagttgctatggcctctaggccaacccagcccacccacgtcaacgtccacatccaccaggagtcagctttgacacaactgctgaaagctggaggttctctgaagaagtttctttttcaccctggggacactgtgccttccacagccaggattggttatgagcagctggctctaggggtgactcagatattgctgggggttgtgagttgtgttcttggagtgtgtctcagcttggggccctggactgtgctgagtgcctcaggctgtgccttctgggcggggtctgtggtgatcgcagcaggagctggggccattgtccatgagaagcacccgggcaaacttgctggctatatatccagcctgctcaccctgacaggctttgctacagctatggctgctgttgtcctctgcgtgaatagcttcatctggcaaactgaaccctttttatacatcgacactgtgtgtgatcgctcagaccctgtcttccctaccactgggtacagatggatgcggcgaagtcaagagaaccaatggcagaaggaggagtgtagagcttacatgcagatgctgaggaagttgttcacagcaatccgtgccctgttcctggctgtctgtgtcttgaaggtcattgtgtccttggtttccttgggagtaggtcttcgaaacttgtgtggccagagctcccagcccctgaatgaggaaggatcagagaagaggctactgggggagaattcagtgcccccttcgccctctagggagcagacctccactgccattgtcctgtgagccgccaaagaccccacggggtgcccgcatgtccctgtctagggcagcccagggcccccactcctggctcctcacacttgcctcccctatggccgctctccagaccctcctcctttcttctccccacatccgcacctgctgttcccactctggggttctcaagtccatgaacagatattgttgcattttccacaatgctgattaaacataataaacaatccagaaaagcagttttgcccaggaaaggttatggtttccttttgtttattacaccttgtggcggccatggaaagggcttttntttgtgttcggtatgtatggaggttaaanggggagctga

SEQ ID NO: 51680 - DNA, 4184 bp, Homo sapiens
  misc_feature (1)...(4184): n = a,t,c or g
gaggagccgagttagctcagccaggcggcgacttcggcggcgccacgagagcgggcagcggaggagattgacgtgagtgaattcagatataactcaagcttgttagagggctttttaaaaataaaaagttgattccgtgcaagagagcaagttactgctgcttaccgttcagagacttacaggtgcttgcctgcattgcaataaaggactcatttattgagcaagacttatatttatctcttcattttggagagcctaataaactgttattacagtttctctactgactttcaaaagttttgaagtttgaaagacctttgcaattaaaacagcatgagcacggccagaacagagaaccctgttataatgggtctgtccagtcaaaatggtcagctgagaggccctgtgaaacccactggtggccctggaggagggggcacacagacacagcaacagatgaaccagctgaaaaacaccaacacaatcaataatggcactcagcagcaagcacagagtatgaccaccactattaaacctggtgatgactggaaaaagactttaaaactccctccaaaggatctaagaatcaaaacttcggatgtgacctccacaaaaggaaatgagtttgaagattactgtttgaaacgggagttactgatgggaatttttgaaatgggctgggaaaagccatctcctattcaggaggagagcattcccattgctttatctggtagggatatcttagctagagcaaaaaatggaacaggcaagagcggtgcctacctcattcccttacttgaacggctagacctgaagaaggacaatatacaagcaatggtgattgttcccactagagaacttgctctacaggtcagtcaaatttgcatccaggtcagcaaacacatgggaggggccaaagtgatggcaaccacaggaggaaccaatttacgagatgacataatgaggcttgatgatacagtgcacgtggtgattgctacccctgggagaatcctggatcttattaagaaaggagtagcaaaggttgatcatgtccagatgatagtattggatgaggcagataagttgctgtcacaggattttgtgcagataatggaggatattattctcacgctacctaaaaacaggcagattttactgtattccgctactttccctcttagtgtacagaagttcatgaattcccatttggagaaaccctatgagattaacctgatggaggaactaactctgaagggagtaacccagtactacgcatatgtaactgagcgccaaaaagtacactgcctcaacacacttttctccaggcttcagataaaccagtcgatcattttctgtaactcctctcagcgagttgaattgctagccaagaagatttctcaactgggttattcttgcttctatattcatgctaaaatgaggcaggaacatcgaaatcgtgtatttcatgatttccgaaatggcttatgccgcaatcttgtttgcactgatctgtttacccgaggtattgatatacaagctgtgaatgtggtaataaactttgatttcccaaagctggcagagacctatctccatcgtattggaagatcaggtcgctttggtcatcttggcttagccatcaacttgatcacatatgatgatcgcttcaacctgaaaagtattgaggagcagctgggaacagaaattaaacctattccgagcaacattgataagagcctgtatgtggcagaataccacagcgagcctgtagaagatgagaaaccttaacaagcatgctttgacaaattacaaaaggctcgtttggatctgtgacacatcgttttggggggaatgctcttctctttgtgggtttttcatcttttattttggaactatgaagacttaaaagagctcagacattttctttttttaactggtgaagagaaaaaggctgaaaagaaggaatataccttttttgttccacttgtttgcactgtgtgctgactgaacattagttgcactaactgctggtttttaaaaaatgttttctggggaaaggggacaaggaaggaaaagaaagaagagaaggggagaaaccctaaaaagagaagaatcttaatgaacacacaagcttgtcaatgatttcaaaattctccaacagctgactctcgtgcatttcaacttctccctgattcctcatccgttttttaagcctgaagagcttattacttatttgtgcgaagtgccttatgctatgagaccattcagaatatcatcttttagacacagcccgaggaatcaacaatagtaactctttctttccgtttttttttctttttcttttaaaaaatgtctttttattttggtttcaggttgaagtctcttccctttctacccagtactcgagcccagggctagaagttgaaactcactagtaatgttaaacaccattttttttttctttttggggaggagttgatatgcaactgcagttcatccgcactgtaaatacatgtatttaaaaaaacaatcccaagtaaaaatttcttctgggctgagtagataaaaaacatcatcgctcccaaaggaaagagcagtctatcattgcaggagccatatgacaagcctttgtgctctatagcagacactaaagactgggttacatatgcctccagtagtagtatggcacttgatgtgtagacatgtcagagccttggccctctttcctctgtggcaaagcgtgtcccatagaaaattgggtgtgtatacttgtataaactttgtaaataagttttttttctgggttcnnnnnnnnnnnnnnnnnnnnnnnnnnnnnnnnnnnnnnnnnggatgaaggttgctgggattaaggggattagagtgattatgggagcagctaaagatgagaggggctcagttttacgcaacactaaattctagaaagtactttggcctcgtgctgtagagagcagatttctatggtaccctgtgttagtaaaggggcccagaaatctgggatgtactgtttgctgccacactgtctcatctagtacctttggagtaggtttaccagagagagcaaggaagcttcaaaacattgataattcaagatttattttgagaagctctgattttgcttcttccccctttctaaaagtttgaggaatatttcaagctctgcaacagggggcaaagattaatctaccttgcagtgtaggaattctattgagtggcagtgtcattgagcagtatatatataaagcacagatttgcatttcagaatattagccagtaccagctttggtaatgttagcagttctggagcttaattttctgtggatcatttcctgtagtgtgtaaatgtgttgccctctgcccgctttgatacataaacttttgcaggaatgggcaacctgagagctgttaactttcatgctacagaaagctgcttgccattctcttgcattgtgacaagaattgttacctgtcattttgcactgtaaattgctggcagatgctttacagtcaatagtgttgctttaaattgtgcccctcccaacatgcttgatgtttggcctgatctccaggcaaaaggagtgagatgaatcaaaaccagtgaacttttttttttaatgtttttaattcccttttaacccagtgtactaggtcaatcaggaggcatctggaaagggggggaaaaaagcaaaaaacaaaattaaaaaaaattgatttccatattttttcaaaaccctaaaatattacaaaataagtcccgcatatactttaatgttttaactcttttggacaaaggaatcaattacttgaagttgcttttttgactctgcctacttctgagcaaactatttgcgactcacccacaattccttggagatcaaaatcctgcagatgcctcctgatgggacatagccctaactccttaacaactgtagcaagaactgcacggtacaaacccaaaaaagaacaagctcanctatttggaacccaagcctcatattttctgtccagtcaatgttggttactaaatagaaaacctaattaaggaagtaacttttttccagggaggggtgggagagggaatttaaaaggtgtcaacttttgaccaaaaaaattgtgcccttgtaccgatgcagctctctttctcccccacctcttgcgagataagaggg

SEQ ID NO: 51681 - DNA, 585 bp, Homo sapiens
gagaaataaaaaatgaacttctccaagcacaaaacccttctgaattgtacctgagctccaaaacagaattgcagggtttaattggacagttggatgaggtaagtcttgaaaaaaacccctgcatccgggaagccaggagaagagcagtgatcgaggtgcaaactctgatcacatatattgacttgaaggaggcccttgagaaaagaaagctgtttgcttgtgaggagcacccatcccataaagccgtctggaacgtccttggaaacttgtctgagatccagggagaagttctttcatttgatggaaatcgaaccgataagaactacatccggctggaagagctgctcaccaagcagctgctagccctggatgctgttgatccgcaggaggaagagaagtgtaaggctgccaggaaacaagctgtgaggcttgcgcagaatattctcagctatctcgacctgaaatctgatgaatgggagtactgaaataccagagatctcacttttgatactgttttgcacttcatatgtgcttctatgtatagagagctttcagttcattgatttatacgtgcatatttcagtc

SEQ ID NO: 51682 - DNA, 288 bp, Homo sapiens
  misc_feature (1)...(288): n = a,t,c or g
tttgttcatttaacttgttttttggctccccacagaaagcaatatttttaaaatctagtttaaagacagtatggcagtttggttcctgttctttagggtaaaaagtaacttggccaggtgcggtggctcacaccnnnnnnnnnnnnnnnnnnnnnnnnnnnnnnnnnnnnnnnnnnnnnnnnnnnnnnntaccaattgttcacaactccattttcttattgaacaattgcaactacatctctctgtgagtatttttaaataaacttattttgggacagtatgagcttt

SEQ ID NO: 51683 - DNA, 674 bp, Homo sapiens
agtctggccagcacacgcagtcacgggggaaagcctaatgcttggagcagatttaggtagtttgggtaatgtcttctgtttttctactaggaacgggccatctaccacagcattttcagatctgaagatggggagcacagataccattttagtttctaaatccatcactttaatttgatgattattggtgtctgctacatataataattctccattctctccaatacacaagcctcctggttcattaaaagttgactctgtaaaactggaactggtaacattatttgtgtctccagttcctgctaatgttgtacagttttttgtttttggatccacaactttaatcttgtgattgtaggagtctgcaacataaagtaaattcctttttttgtcccatgttactccaagggggtgttgaagctttgcattgattcctactccatcaacatcaccaaaagcaaataaattcatggggtctctttctcctcctacgaggtgcttcactgctccatctttcagtgaaacgggttctcactgtactgctctcactatctgctaacaaacaagcagctccagggatcttcagaggccaaggaaaggctgaaggttgggcaaaacctgccttgtgaggataggcattgttcgatctcttcattcactcagcaacctagcag

SEQ ID NO: 51684 - DNA, 328 bp, Homo sapiens
  misc_feature (1)...(328): n = a,t,c or g
cattccttttatttggagagggaaatacttcagctccgggaatgagcctgcagaaaacccggtgacgccgatgctgcggcatcttatgtacaaaataaagtctactggtcccatcactgtggccgagtacatgaaggaggtgttgactaatccagccaagggttattatgtgtaccgtgacatgctatgctgaataaggagatttcattacttcacctgaaataagttaaatctttggggagctactaggtatatggttcattagtgaatggatggccactggnaaaagcacagtttnccacttggtggaacttggcccaggtagggg

SEQ ID NO: 51685 - DNA, 2184 bp, Homo sapiens
aggacattcaagcaaagaaatgctttctttacttaaaatgtctatctcatttgctgctttttcactaagcctttactttgttaataaaagtgtcccattgtgtgatgtttttgattttacagtttgctaaatcttattttcttggagttgctttttggtaacagccccattgctactccccattttattgttttacatcaatgcatgcttcgttgtgatccctcaagatgtaacacttggtatgctcggttgaggatatgaaaaaatacttccgaaaccaggaattcagtgtatgtttgttttatactgtttgataagaaaagtaggtccagccttaagcagcacagatgcgctggtagatgcatagtcaggaactttttttatttcttttaggtctagggacaggagtgaatagaaagggaggagagctctattatgttctatacacagattaggagatgaccttactggggtacacccctctaaccagtgcttacaggttaatgcatgttaatgaatatttttgcagttgtaaagcataacaattacaactacacatctatttctaaagaataaaacaggaccatatttatttacttctgtcaactatagaaagaaagaccttcagctgtatttccacagatttctcccaaggaaaaggctaatattagtcactactgttatcacatccctttgtataagttttaaaaagagatggagggagatcttcatttctttgaggagatcagtattgtaacgtatgtgaatagatgataacaattaatattactaaaagtcccacatgagagtcctgacgccctctccatgccccacagtaatgtggcttctttcatgggtttttttttcttctttttagctgatctcatcctaagcatgctttatttttccttgaaagctaggtatttatcaactgcagatgttattgaaagaaaataaaattcagtctcaagagtaaaccctgtgtcttgtgtctgtagttcaaaagtcagaaatgattctaatttaaacaaaaagatattaaatatacagaagttaaattcgaactagccacagaatcatttgtttttatgtcagaatttgcaaagagtggagtggacaaagctctgtatggaagactgaacaactgtaaatagatgatatccaaacttaatttggctaggacttcaattttaaaaatcagtgtacctaggcagtgcacagcacgaaataagtggcccttgcagcttccccgtttaacccactgtgctatagttgcgggtggaacagtcaacctttctagtagtttatgatattgccctctttgtattcccattttccacagttttttccgcagacttctttctgcaaattattcagcctccaaatgcaaatgaatgatataaaaataagtagggaacatggcagagagtggtgcttcccagcctcacaatgtgggaatttgacataggatgagagtcagagtataggtttaaaagataaaatctttagttaataattttgtatttatttattctagatgtatgtatctgaggaaagaaatctggtatttttgctttccaataaaggggatcaaagtaatggtttttctctcagttctctaagctggtctatgttatagctctagcagtatggaaatgtgctttaaaatatgcttaccttttgaatgatcatggctatatgttgttgagatatttgaaacttaccttggttttcacttgtgcactgtgaatgaactttgtattatttttttaaaaccttcacattacgtgtagatattattgcaacttatattttgcctgagcttgatcaaaggtcatttgtgtagatgagtaattaaaaaatatttaaatcacattataattctattattggagagcatcttttaaatttttttctgttttaacgagggaaagagaaacctgtatacctagggtcattatttgaccccatagtataaccagattcatggtctaacaagctctcagtgtggcttttctctgaatgcttgaatttcacatgccttgcatttcacagttgtactccatggtcaaccggtgctttttttcacatcgtggtacttgtcaaaacattttgttattttccttggtaaaatatataaaaaaggttttcctaatttcactttgctgccaaaaaaaaaaaaaa

SEQ ID NO: 51686 - DNA, 1662 bp, Homo sapiens
ctagaatgggatattcttgaagttaagcgcctccttgatcaccaggataatattctctcattgattaatgtcaatgatttgagttttgtcaccggctcccacgtcggagagctgatcatctgggatgccctggactggaccatgcaggcctatgaacgcaacttctgggacccatctccacaactggacacccaacaagaaataaaactctgtcaaaaatcaaatgacatttctattcatcatttcacatgtgatgaagagaatgtatttgctgcagttggaaggggtttatacgtgtatagccttcaaatgaagcgtgtgattgcctgccagaaaactgcacatgactccaatgtcctgcacgttgccagacttccaaacaggcagttaatctcatgctcagaagatggcagtgtacgcatttgggagttaagagaaaaacagcagcttgcagctgagcctgtaccaacaggtttttttaacatgtggggatttggaagagtcagcaaacaagccagccaacctgttaaaaagcagcaagaaaatgctacttcatgttcactggagcttattggagatttgattggacactcatcatctgtggagatgtttctatactttgaagatcatggactagtgacgtgctccgctgatcatctcattattttgtggaaaaatggagagcgagaatctggattgcgcagtttaagattatttcaaaaattagaggagaatggtgacttataccttgctgtctagtttaaggaattaaaaatacacatgcatgaaccttgaacatcaaatatcgggtactactctgaaaaccattaatatattgatcacttaaattggtaattttttttgtcagtccataaaattctacatgtttaaattttttgtggacctaccaaccaggaacatgttgcttctcaggtcctagtatatcctccaaagaatataccacaagtttttccatttgactttgagctgctgttgaagtggtgagtgctgtgcttttgagcttattttgaacctagatccttgtgaaaggtacaaatagaggtaatagttaagttatggcatttattagaagttttattatttggcttcctttagaattattgtgaagtttaaaaatagcctttctcctgcaaattttcctagtctttagtaactgttagtgttctatatagcacaaacttgaatctctcagccaaaaaagggaacatatatactgtttaagtatggcaagttttctttggtaccaatttgtttagataattttaaaaatgttttttagttctagctactaaaacctgtatgaactcaaatggataggcatcttgtgagggtgtgtttttcccagtgtgaattggcttgaagagccatgggctaaatgggtactagaacaacaactgcccctcatgtacgccaaggatgagctctagatcatttgagaggcacagtgtttccggagtcagggactgcagctgagcgcaactgccccatctgaccactgactcaaatacgaactgcttgagacagacttcttttatgtagttctttgcagtgtccattgagacactataaccagccttgtaacaatatgttttctccttttggtgctaaaaaataaaaatattagaaagtagtctacaaaaa

SEQ ID NO: 51687 - DNA, 260 bp, Homo sapiens
ctggggaaaatgagtatgaactgcctgccatctcaacaacatcgtcttccctaggaaaaccctactggattcagaggcccaagttggggacaacttaccaatctgaggagctactgacagggcttggtagtaaaatctctcggctagcagctcggtatctacgccagctaattcattctgatatcgggctgcacaagagagaaaacgagggggaaactcgatgattttaagtttcagaaaaccctcccccacatcttggg

SEQ ID NO: 51688 - DNA, 784 bp, Homo sapiens
ggcgtttctctcttcccactcgggtttgacctacagccgcccgggagaagatggctgccccagcagtgtccgggctctccccgcaaggtgcgatgcttcagtacctctgtggtcagaccatttgccaagcttgtgaggcctcctgttcaggtatacggtattgaaggtcgctatgccacagctctttattctgctgcatcaaaacagaataagctggagcaagtagaaaaggagttgttgagagtagcacaaatcctgaaggaacccaaagtggctgcttctgttttgaatccctatgtgaagcgttccattaaaagtgaaaaagcctaaatgacatcacagcaaaagagaggttctctccccctcactaccaaccctgatcaattttgcttgctgaaaaatgggtccgattaaggcaataccccaaggagtccgtttctgccttttctaccatggatgagtgtccatcgcggagaggtaccttgcacagtgacctctgcatctcctttagaagaagccacactctctgaattaaaaactgtcctcaagagcttcctaagtcaaggccaagtattgaaattggaggctaagactgatccgtcaatcttgggtggaatgattgtgcgcattggcgagaaatatgttgacatgtctgtcaagaccaagattcagaagctgggcagggctatgcgggagattgtctaaaagtgttggttttctgccatcagtgaaaattcttaaacttggagcaacaataaaaagcttccagaacagatcaaaaaaa

SEQ ID NO: 51689 - DNA, 342 bp, Homo sapiens
gttgcttggagagtgcatccggcccggtacttgtgatcggaggagagccggatcgtccttccttgaaccctctgggccagcccagggcccgaagcccacccactcgcgtctctagcagccgctcttgtcctctgggtacggctcgcgggagtgttggttaccatggtgaagctggcagccaaatgcatcctggcaggagacccagcagtgggcaagaccgccctggcacagatcttccgcagtgatggagcccatttccagaaaagctacaccctgacaacaggaatggatttggtggtgaagacagtgccagttcctgacacgggagacagtgtggaactc

SEQ ID NO: 51690 - DNA, 561 bp, Homo sapiens
gggaaaggctgaggaatttctcagagggtgacggactgccagctgccctgaggttgctcttacttgttacagtggacaagctgctttgctagcgtgcagatggagaaggcgggcccgggaggcttggagtttggcccaggagctggcaggtgcccagcagcagtttcactgcccgcttcaggcgactctccactggcttcctgggagccttccgttaggagatgctctctcaagatccccgtcaccagggctttctggttggaatgaggcaaggacctgctttacacggtgcgccccattacccaacagcgtttcctgtccttgctggccacagccatcacagtggggctgtcatcagccactttaaacaggcaaaacgtatttacctgtcagggaaaataccaagatcacaaaggtggttttcccagggcaaggttcgtccattgcactccagatgtgctgacccctgcgatttcttcatatgtggggaactgcactcacactctccccagcaatacaaataaataagtaggctgggcacagtggcccatgcctgtaaag

SEQ ID NO: 51691 - DNA, 424 bp, Homo sapiens
gcacgagctgttgagtggtagcctttcccctcaaccagcaatggaggagcagccccagatgcaagacgccgacgagcccgcggactccggaggggaaggccgggcaggcgggccaccgcaggtcagccggcgcccaggcggcgtgcagcgaggaccgcatgaccctgctcctcaggctgagagcacagacaaaacaacaactcttagaatataaatcaatggttgatgcaagtgaagaaaaaactccagaacaaattatgcaagaaaagcaaatcgaagctaaaattgaagacctggaaaatgaaattgaagaggtaaaagtttgcttttggagataaaaaagcttgcattaagacaggattgagactttcaacttgcacttaaaaaaaacctggagaaaatttagcagacagtctagttgtgc

SEQ ID NO: 51692 - DNA, 744 bp, Homo sapiens
cttgagaatactttataaactgccatgatacagcaaaatctcatttattcaaagtgcaaacatactgtgtgtctttctgttttgtgtatgcttgactgcaagataaatgacaaactagctaatatccgagatttatttacaaatggccagggaccccatcaggtgaaacacatagcccattgtcttagagcttctccatcggtcctgtacaggaggattggtgacctactaacagtgaccctgtgggctctgtgggaattttgaagtgccttttgtgaatcatgaatgaaacatttaacttgagaccctttaaaaaattcatccaggaatctgttaccccttgggtaggtttgatgggaactgagtttaaggcaggaaggaccccagctgttttctggggtaagccaggctttgctgtatctgggccagttcagggagaggaggtcggccctggtgggaggtcttcagtgccgagggctcggatgagaacgtgtagttctttgacttggacctgggcagcgtcttctatggatgcctgccttgtgagcacccacaccttccctccccactgtcgggttgagtagccccagcgtggctgtgttaggagtcctttgcccaacattgtgctgcactggagcctggccctggcactgtcctcaggaccctgcccaagggcccaccgcagagcacacctatgctatggggagccctgctggcagccccgagagccatgccatggcctgc

SEQ ID NO: 51693 - DNA, 3249 bp, Homo sapiens
cgtgggagcagtggggttcgacggcgcggccgcgaggccgccatggccgctcacgggaagctgcggcgggagcgggggctgcaggctgagtatgagacgcaagtcaaagagatgcgctggcagcgtgagcgagcagctgcgctgcctggagctgcagggcgagctgcggcgggagttgctgcaggagctggcagagttcatgcggcgccgcgctgaggtggagctggaatactcccggggcctggaaaagctggccgagcgcttctccagccgtggaggccgcctggggagcagccgggagcaccaaagcttccggaaggagccgtccctcctgtcgcccttgcactgctgggcggtgctgctgcagcacacgcggcagcagagccgggagagcgcggccctgagtgaggtgctggccgggcccctggcccagcgcctgagtcacattgcagaggacgtggggcgcctggtcaagaagagcagggatctggagcagcagctgcaggatgagctcctggaggtggtctcagagctccagacggccaagaagacgtaccaggcatatcacatggagagcgtgaatgccgaggccaagctccgggaggccgagcggcaggaggagaagcgggcaggccggagtgtccccaccaccaccgctggtgccactgaggcagggcccctccgcaagagctccctcaagaagggagggaggctggtggagaagcggcaggccaagttcatggagcacaaactcaagtgcacaaaggcgcgcaacgagtacctgcttagcctggctagtgtcaacgctgctgtcagtaactactacctgcatgacgtcttggacctcatggactgctgtgacacagggttccacctggccctggggcaggtgctccggagctacacggccgctgagagccgcacccaagcctcccaagtgcagggcctgggcagcctggaagaagctgtggaggccctggatcctccaggggacaaagccaaggttctcgaggtgcatgctaccgtcttctgtcccccgctgcgctttgactaccacccccatgatggggatgaggtggctgagatctgcgttgaaatggagctgcgggacgagattctgcccagagcccagaacatccagagccgcctggaccgacagaccattgagacagaggaggtgaacaagactctgaaggcgacactgcaggccctgctggaggtggtggcctcggatgacggggatgtgcttgattccttccagaccagcccctccaccgagtccctcaagtccaccagctcagacccaggcagccggcaggcgggccggaggcgcggccagcagcaggagaccgaaaccttctacctcacgaagctccaggagtatctgagtggacggagcatcctcgccaagctgcaggccaagcacgagaagctgcaggaggcccttcagcgaggtgacaaggaggagcaggaggtgtcttggacccagtacacacagagaaaattccagaagagccgccagccccgccccagctcccagtataaccagagactctttgggggagacatggagaagtttatccagagctcaggccagcctgtgcccctggtggtggagagctgcattcgcttcatcaacctcaatggcctgcagcatgaaggcatcttccgggtatcgggtgcccagctccgggtctcagagatccgtgatgccttcgagagaggggaggacccactggtggagggctgcactgcccatgacctggactcggtggccggggtgctgaagctctacttccggagcctggagcccccactcttccccccagacctgttcggcgagctgctggcttcttcggagctggaggacacagcggagagggtggagcacgtgagccgcctgctgtggcggctgcccgcgccggtgctggtggttctgcgctacctcttcaccttcctcaaccacctggcccagtacagcgatgagaacatgatggacccctacaacctggccgtgtgcttcgggcccacgctgctaccggtgcccgctgggcaggacccggtggcgctgcagggccgggtgaaccagctggtgcagacgctcatagtgcagcccgatcgggtcttcccgcccctgacctcgctgcctggccccgtctacgagaagtgcatggcaccgccttccgccagctgcctgggggacgcccagctggagagcctgggggcggacaatgatccggagctggaagccgagatgcccgcacaggaggatgacctggagggggtcgtggaggctgtggcctgctttgcctacacgggccgcacagcccaggagctgagcttccggcggggggacgtactgcggctgcacgagagggcctcgagcgactggtggcggggggagcacaacggcatgcggggcctcatcccccacaagtatatcacgctgcccgccgggacggagaagcaggtggtgggcgcagggctgcagactgcaggggagtctgggagcagtcccgagggcctcctggcatcggagctggtccaccggccagagccatgcacctcacctgaggccatgggaccctctggacacagacgacgctgcttggtcccagcctccccagagcaacacgtggaggtggataaggctgtggcacagaacatggactctgtgtttaaggagctcttgggaaagacctctgtccgccagggccttgggccagcatctaccacctctcccagtcctgggccccgaagcccaaaggccccgcccagcagccgcctgggcaggaacaaaggcttctcccggggccctggggccccagcctcaccctcagcttcccacccccagggcctagacacgacccccaagccacactgaggtgccgctgctggagatgcgtgcccccggcggctacccgctggaccggccactctccccagcccccttgcttctctccagccctgtccagcaagtgcagggtgcctgcacttcaccctgtgcagagaggtgggatggggccgtgcacacagggatgcccgctccacatcctgcctgcccctcagccctggcccaggccccttttggaggcagctgaggaaggatgctggggaaagccctcttctgcagctttgtggaaggctgatcagtggctgctgggtggcgggtacccttgctcagatgcctggcagggctgggtggcgattcataaagacctcgtgttgattccccaaaaaaaaaaaaaa

SEQ ID NO: 51694 - DNA, 798 bp, Homo sapiens
ttttttttttttttcaaaattatgtttattaatgttttagtatacacattatattctcttagaattgggggaaaaggaaaaccccactcaagtgaggtaacaaacttgccatcttttacaaaatttcattagaactgacaatgttatggtgagtccttaattcctgagaatttgaattattaagttttctgtgaacttaaaacaaacgctcacattaatttttaaattacagtatgtctgaaaaaataaaattaatgttaatgttatcaagaaaaatcatcatccaaatgtacatattaacctattagatgtgaatatactgaagccctgttgctctgcagtttgacaccatttaaattcgtttccaggatcttatttcaaatatatgaacttataatttatccagatagcagtgacattattttgacctaaaggaaaaataattgtctgtcattttcttctcaactgtaggtatccagggagtcagcatgtgaactctatctagtattgataaaataattaatttacatgtgtagggataatgaacacagaacatgtgattctcttctagtaacaatttctatcccttaataggagatgatttcagagaagttagagaagaaaaacagagaaaacaatactgttgctatgaaatgacgaatttgatataatcaaatgcaagatcattaatataaacacttataataatgaaaatataaattattaattatgcagcatgctttagggccatttctacagttattatgaattacaaatattaaatgcctttaatctatc

SEQ ID NO: 51695 - DNA, 536 bp, Homo sapiens
gccgaggcgcttctgccatctgtgggccgagcattcttcaggtcatctgaaccttctgagaaaacatggtcaacgtcttgaaaggagtgcttatagaatgtgatcctgccatgaagcagtttctgctgtacttggatgagtccaatgccctggggaagaagttcatcattcaagacattgatgacactcacgtctttgtaatagcagaattggttaatgtcctccaggagcgagtgggtgaattaatggaccaaaatgctttttcccttacccagaaatgaaaatactcaatatggaccatttaggaattataagcagcaactgtgaaagacttgccactcaatatcttaggtgactgattagacatagagggttgttttaggagcatgccacgggaaagactgagggatcatgatcatttgttcagaaaaaaagcccctgaactgattttgttaccatagaatttaaaaaaaaaaaaagctttaacagttggctgtaatttggcttttattatcctttattaaaatacaaatgtc

SEQ ID NO: 51696 - DNA, 690 bp, Homo sapiens
tttttttttttaatgcacaaggatttttactatgccattatttatggtaacaaaaagatgggaaacaacccaaatgtccatcaatagtgactggttaaatacacatcggtctggctgcaaaatggaatagcatgcagcccaaaaggagagcacccgtgtgcatggtaagagggcagcactcccagggcacagcagcgggcgggtcggtgtccggtgggaggaagagctgccacccagctctgccaggggaagcagttctccctgagagccccaggccccattcttgacttccccagtgccgggtggaggaagagggagggattagcccgaggcaagtggttcgagcagacagaagggaacaaaaagagcagcgagtcaggcctgatcggggccgcatctaccccaaaagaggggaccagcggatcaacagctgaagcgtaaggtgccgcggccagctcctgggtggggctccaggtggcatcccagttgtggccacccagcccttcatcctgggctaggcaggcgggagaggaaagcgcagactgcacggtcccgggcacgtcctcggcaggcagtggccttgcactggccggccctactcaatgcactccatgacatgtatctgcagggtgtccatatcaggggcctgatactggcacttgggacagcagaagtccctcgttccgaatt

SEQ ID NO: 51697 - DNA, 857 bp, Homo sapiens
aagaactgctttaggaatttttattttggctttaagtggaatcacttacatctagacatcctttgaagcaaaaccacttagaaaccagtattttgtgctaaggaagggaagaaatactacaaaatgttgcaaaacagaacaaaaagcttaaaggtttaagaaatttaaaggcacagatatttcacatcaattcagattttatagtatgcaaacatgaaataaaccaccgtattacaacaaatatgtgctagcgattggttagatttcacacttctctccaaatgtaacactgtcacattgcatttcctctctagatgtatactgatagcactgggaaagatgttcagatgcaggggacaatccccaatgtttaccaaacttctgaaagatgagtatacgctacaaacttagttccaaatatgaaatgaaaagggaaagtccagctatttagggggggtactcaaagtgtcaactggatcataaccaggcttttaaaatgtcaagaaccatttaatatggctattacctactttttattaattaataatgatgtttcttatgtatgtccaaaatatcagtgaaatctctaatctctggccttcagattatctgtcccctcaaaggactgaaagcaagcactttgattaatagtatatggcaaatgatgcatgagaaacaatgaactcccctcagaggtgccccacctgtcaatgctcttaaacatgaagctatcaggatctcttagattcaaagagatatcagaattcaaggggactttcttcagacataaatacacacacatacagtatcatttctgtctgtttctgtgcctggttcttccattacaaaactcaaaa

SEQ ID NO: 51698 - DNA, 205 bp, Homo sapiens
atccccactcctctggagcagaaagtcctaatcctctaaccctgtgtttttatctgactagccctcctcctgaagctatctagagactcccagctaccagccatcttattagcattcaaaagacactcttatccctcttaatacaatgatttaaaaagctgtatgacaggaaatgaggacaaagaccaaatatatatatatatct

SEQ ID NO: 51699 - DNA, 444 bp, Homo sapiens
ttttttttttaaaattgtataaaacattcaatttattggtctttgtggagaattagatgcatcaccagtatattacaacagagccattaatcttgtagcttcatcaacattaactggtttgctttcatgacgctgctgaggaatcagttctttctgcagaggttcaagtgaaatgctttttgcgaaatgtgcaagttccttttgtacatttacaaaagctttatttactctgttaactttttcctcattcataatgtttatcttcttaagattagtggtaactggttttgctttgtttttagccttaaagtttttttggctggctatgtgaaatacattcctggacttcggccctcttaatttgttcttggccattgtcagaagtttaacacttgcgtgcagctttttaagctccaggtaacaccatctggcacgtacggcgtc

SEQ ID NO: 51700 - DNA, 3092 bp, Homo sapiens
atggatctaaataaagacatttgaagggttagtttgaattctaaaagtaggtaatagccaaatagcattctcatcccttaacagacaaaaacttatttgtcaaaagaattagaaaaggtgaaaatattttttccagatgaaacttgtgccacttccaattgactaatgaaatacaagagacagactgaaaaagtggattatgcatcttaaaaccctttctgtaaatattatgtagctaaagattgatttccagcatctgacatgacagtaggtttcttgttaaccagtttttcttctttctggataattgcatatgaatatttatacatactgaccaaaataaaggcctcaacttggtagtttactgaaagttcttggacaaatagtccataaaagctgttgacctctaaatgcactatggctggttaaatacagtgaccatccttcttccagctgtaaaggatgaagcgtattaagcattagcccaggccagtaataaagctaaatagccatacagcagctctgacaatgttgtgctggatattgcagtttgctttcaaggtgcagatgtaaggatttaaaaaaataataatttggcaccaaataaatatgagtagcatccattgaatctgcggatttcatgacgtctctctgcgtggtccaccacttttctcctaaccggggatttttttttttcttctgccactcttatctttccccacttcattccacccagtctccctcccccgtccctgcccaaacgcgcgcccctccgcccctcccttggccccagcgcccagccctgctctccgcgctcggccagagggagccagtccggagacggccgcacctggctggagaggctgggcgggcggaggggtggagacccgcggacgccgggaagccggacctggagccggagcagccgcgagcagaatggagtctcctaacagcctctcggtgctgatgtgaaatttgaccatctgattccagtttttttcttttccttttcttttttgcatttccttccctcgccatccgtcgtgtagtgaattgttcagtcttgctccgtttcaagagaggagatcatgattgagtgaagccaccccgtccgcagccaggaaaagcacaaagaagaaactgcaacaatggccaagctgacagaatccatgactaacgtcctggagggcgactccatggatcaggacgtcgaaagcccagtggccattcaccagccaaagttgcctaagcaggccagggatgacctgccaagacacatcagccgagatcggaccaaaaggaaaatccagaggtacgtgaggaaagacggaaagtgcaatgttcatcacggcaacgtgagggagacctatcgctacctgaccgatatcttcaccacattagtggacctgaagtggagattcaacctattgatttttgtcatggtttacacagtgacctggctcttttttggaatgatctggtggttgatcgcatacatacggggagacatggaccacatagaggacccctcctggactccttgtgttaccaacctcaacgggttcgtctctgcttttttattctcaatagagacagaaaccaccattggttatggctaccgggtcatcacagataaatgcccggagggaattattcttctcttaatccaatctgtgttggggtccattgtcaatgcattcatggtgggatgcatgtttgtaaaaatctctcaacccaagaagagggcagagaccctggtcttttccacccatgcagtgatctccatgcgggatgggaaactgtgcctgatgttccgggtaggggaccttaggaattcccacattgtggaggcttccatcagagccaagttgatcaaatccaaacagacctcggagggggagttcatcccgttgaaccagacggatatcaacgtagggtattacacgggggatgaccgtctgtttctggtgtcaccgctgatcattagccatgaaattaaccaacagagtcctttctgggagatctccaaagcccagctgcccaaagaggaactggaaattgtggtcatcctagaaggaatggtggaagccacagggatgacatgccaagctcgaagctcctacatcaccagtgagatcctgtggggttaccggttcacacctgtcctgaccctggaggatgggttctacgaagttgactacaacagcttccatgagacctatgagaccagcaccccatcccttagtgccaaagagctggccgagttagccagcagggcagagctgcccctgagttggtctgtatccagcaaactcaaccaacatgcagaactggagactgaagaggaagaaaagaacctcgaagagcaaacagaaagaaatggtgatgtggcaaacctggagaatgaatccaaagtttagtgccctagctgggcaaacccttctcttctccccccaacacaatctttccttgtctctcattctctttctttttctgtctctcttgctttgttctttatttgtttatatttaatttttacatgaccagaaaacaaatcttcaaggtgtaaaatatctacctgccctctctcagttattcagattgacaaggtagacatggatttgatgaaagtgcaaagtgccctcatttgtggcccaagcctggtctcctcccaaaatactacacatccaactcctggagatttcagttacttacctgcatgtgttgtacaataccagatcactcaaaaaggtgtgtcaaagattttacctgggatatgacaagcaaggtttctggtgcctatttattcattcagtgagacacagagtggagccctcagttttatggatcccaattcatttcatctactacagggtgaggtgcttgcccccatgtgggtgtggcagttacagggcccaggtgagctgaagacaaaccactgtacatatatatgccttatgtaattattttctttttgtaattagtaataaaacccagcatgtacaaaagtaccatagaacagaactgctaaatactgtacatagatgtatcattaatgtaggtttagatatataactttagaaataagaagc

SEQ ID NO: 51701 - DNA, 618 bp, Homo sapiens
ttttttttttggtttcattttcatgtaataatttcagttcagaatatagtttatgttctaaaaaagtcttatttgcatttttagtgaggtgctttgatcatcttcaagaagactgctgggaaacatcagattcctggaaccataccacaaaggatccgagactttcacagggaggttctgcaggcaggaagtgtgctgggatgccacacaagcaaacagccctgaggagctctgtggctccattttcagctgcagggagaacaggcacagtcagttctcagatgtgctgctggtgggcagggccatcagcctgcaactttcagtgtcaccgcctcactgcgctgggcccccagaccattgttggcctcacaggagtagtttccagaatgttcttcagtcagagagaggttgaaggaggctcctcctccagagggggccgacctgctccccagggtgatatcctcgtgataaaaccagtacaggattggaggagagcctctcagggcctcacagtgaagctccagcacatcctccactgcagcctgggccctgggagccctgagcatgaggattgggcgagacaccgggattctgacagtgatgctcaccagcccactg

SEQ ID NO: 51702 - DNA, 452 bp, Homo sapiens
tttttttaatgttcttacttggcaaaataaagaactggcaatcctatgctggccaccagcattctgaaggaaactttactacccagaaaaatcagaattctggtccagattgcctttctttgacttctcctgtattcaaatatacctattttggtatgtaaaaggcttaagacacttgaatttgaatgatggaatatatagattaaaaagcagttcttgtagcattattttaattcaaaaggcaagtgacaagtaatgacaggggcacacttaaagaaaatcagtttcactaataccataggataattatgtcactatcttcacagggctgtaacaaggaccaaattctaaaacgaggaaagggctccatcatgtctgacctttatgtgtgtgagccattagtattttcaacaaagcaaagtcaatctaaacctgaaagtaagctaaggaac

SEQ ID NO: 51703 - DNA, 1061 bp, Homo sapiens
aagaaatgaagcaaatggaagaacgatacaaaaaatacttagagaaagccaaaagtgtcatccgtactttagatcctaaacagaatcaaggagcagcaccagaaatacaagctcttaaaaatcagctccaggaacgagacccactgttccactcattagagaaagaatattagaaaacaaagagtcagagagagatggaagagaaatatattgttagtgcctgggtacaatatgggaatgaccctgcataaaaaggcagctgaagatagacttgcaagcacaggctcagggcagtcatttctggcgaggcagaggcaagcgaccagcagcagaagatcatacccaggccacgtgcagccggccacagcaaggtagagaagttgtgccgctcaatcacagacacctgcacccacaacatacttctgttacacacaagaacatttcaggaaactcagccagcttattttttgtttctcttctatgtcaatacttagtgtttctcattttgaggactttttctctctcctgtatctttgttttagtttctttggtttttattttgtagtcctttcagttatttttaatgtgccaaaaatttgtacatgttcaattaaaaatgttgtataatagtgtaatacttttctttgtatgaaaatgtcctcttcttcaaaggtataggctttgtaatgaattagattttctgccaataattgatatacaatttatattctttattgtgcctgtgtgttaccatgctaagaatgtctttgtttaaagggaattaatctttttatgatgtattaatctgtgttttcaattgttttccaagtacagttcaaataacttggcatatttactatacaaaatggttgacaagtgttctttttgcaaagacttgaatacatggcagaggtgctaatcacatcttccctaaggcacctggaagaattatttgaggaaaaaatgagttttcacattgttttataggaaattaaatttgtccaaagatttggagactatttttaaaacataaatacataaaatttcattaaaaaaaaaaa

SEQ ID NO: 51704 - DNA, 2847 bp, Homo sapiens
  misc_feature (1)...(2847): n = a,t,c or g
cctcgcctccgttacaacagcctacggtgctggaggatccttctgcgcacgcgcacagcctccggccggctatttccgcgagcgcgttccatcctctaccgagcgcgcgcgaagactacggaggtcgactcgggagcgcgcacgcagctccgccccgcgtccgacccgcggatcccgcggcgtccggcccgggtggtctggatcgcggagggaatgccccggagggcggagaactgggacgaggccgaggtaggcgcggaggaggcaggcgtcgaagagtacggccctgaagaagacggcggggaggagtcgggcgccgaggagtccggcccggaagagtccggcccggaggaactgggcgccgaggaggagatggaggccgggcggccgcggcccgtgctgcgctcggtgaactcgcgcgagccctcccaggtcatcttctgcaatcgcagtccgcgcgtcgtgctgcccgtatggctcaacttcgacggcgagccgcagccctacccaacgctgccgcctggcacgggccgccgcatccacagctaccgaggtcacctttggctcttcagagatgcagggacacacgatgggcttctggttaaccaaactgaattatttgtgccatctctcaatgttgacggacagcctatttttgccaatatcacactgccagtgtatactctgaaagagcgatgcctccaggttgtccggagcctagtcaagcctgagaattacaggagactggacatcgtcaggtcgctctacgaagatctggaagaccacccaaatgtgcagaaagacctggagcggctgacacaggagcgcattgcacatcaacggatgggagattgaagatttctgttgaaacttacactgtttcatctcagcttttgatggtactgatgagtcttgatctagatacaggactggttccttccttagtttcaaagtgtctcattctcagagtaaaataggcaccattgcttaaaagaaagttaactgacttcactaggcattgtgatgtttaggggcaaacatcacaaaatgtaatttaatgcctgcccattagagaagtatttatcaggagaaggtggtggcatttttgcttcctagtaagtcaggacagcttgtatgtaaggaggtttatataagtaattcagtgggaattgcagcatatcgtttaattttaagaaggcattggcatctgcttttaatggatgtataatacatccattctacatccgtagcggttggtgacttgtctgcctcctgctttgggaagactgaggcatccgtgaggcagggacaagtctttctcctctttgagaccccagtgcctgcacatcatgagccttcagtcagggtttgtcagaggaacaaaccaggggacactttgttagaaagtgcttagaggttctgcctctatttttgttggggggtgggagaggggaccttaaaatgtgtacagtgaacaaatgtcttaaagggaatcatttttgtaggaagcattttttataattttctaagtcgtgcactttctcggtccactcttgttgaagtgctgttttattactgtttctaaactaggattgacattctacagttgtgataatagcatttttgtaacttgccatccgcacagaaaatacgagaaaatctgcatgtttgattatagtattaatggacaaataagtttttgctaaatgtgagtatttctgttcctttttgtaaatatgtgacattcctgattgatttgggtttttttgttgttgttgnnnnnnnnnnnnnnnnnnnnnnnnnnnnnnnnnnnnnnnnnnnnnnnnnnnnnnnnnnnnnnnnnnnnnnnnnnnnnnnnnnnnnnnnnnnnnnnnnnnnnnnnnnnnnnnnnnnnnnnnnnnnnnnnnnnnnnnnnnnnnnnnnnnnnnnnnnnnnnnnnnnnnnnnnnnnnnnnnnnnnnnnnnnnnnnnnnnnnnnnnnnnnnnnnnnnnnnnnnnnnnnnnnnnnnnnnnnnnnnnnnnnnnnnnnnnnnnnnnnnnnnnnnnnnnnnnntgggccaccgtgccctggctgattcagcattttttatcaggcaggaccaggtggcacttccacctccagcctctggtcctaccaatggattcatggagtagcctggactgtttcatagttttctaaatgtacaaattcttataggctagacttagattcattaactcaaattcaatgcttctatcagactcagttttttgtaactaatagatttttttttccacttttgttctactccttccctaatagctttttaaaaaaatctccccagtagagaaacatttggaaaagacagaaaactaaaaaggaagaaaaaagatccctattagatacacttcttaaatacaatcacattaacattttgagctatttccttccagcctttttagggcagattttggttggtttttacatagttgagattgtactgttcatacagttttataccctttttcatttaactttataacttaaatattgctctatgttagtataagcttttcacaaacattagtataggtctcccttttataattaatgtttgtgggtatttcttggcatgcatctttaattccttatcctagcctttgggcacaattcctgtgctcaaaaatgagagtgacggctggcatgngtnnnnnnnnnnnnnnnnnnnnnnnnnnnnnnnnnnnnnnnnnnnnnnnnnnnnnnnnnnnnnnnnnnnnnnnnnnnnnnnnnnnnnnnnnnnacccatctatacaaaaaatttttaaaaattagcatggcggcacacatctgtaatcctagctacttggc

SEQ ID NO: 51705 - DNA, 1190 bp, Homo sapiens
gcgccttctacctcgctgtttcggttttcctggctcctcggcccttttctcccctgttgcagctgggagcggacgaagcgcgaagctgggattttttactgtctcctgaagaatttaacacaaacatggatatcagaccaaatcatacaatttatatcaacaatatgaatgacaaaattaaaaaggaagaattgaagagatccctatatgccctgttttctcagtttggtcatgtggtggacattgtggctttaaagaccatgaagatgagggggcaggcctttgtcatatttaaggaactgggctcatccacaaatgccttgagacagctacaaggatttccattttatggtaaaccaatgcgaatacagtatgcaaaaacagattcggatataatatcaaaaatgcgtggaacttttgctgacaaagaaaagaaaaaagaaaagaaaaaagccaaaactgtggaacagactgcaacaaccacaaacaaaaagcctggccagggaactccaaattcagctaatacccaaggaaattcaacaccaaatcctcaggtccctgattaccctccaaactatattttattccttaataacttaccagaagagactaatgagatgatgttatccatgctgtttaatcagttccctggcttcaaggaagtacgtctggtaccagggaggcatgacattgcttttgttgaatttgaaaatgatgggcaggctggagctgccagggatgctttacagggatttaagatcacaccgtcccatgctatgaagatcacctatgccaagaaataacatttgggatagtcgtctttaaaagacttggtgttatttacagtgtttgttttgataacatttggctgggtcattttaatagttagagatgaggaggagtaaaagtgaaatttttgtgaaggacttaaattatccagtgtttctttagccttggtgaactatgaaatacgaaggccttaattttgtacaataaacttttatttgtattctgtgtatataatgctttcttgattgacccatcgccctatcatcaaatgacttctagtctagaacacacttaaggtttataaacttgtgtaataggatgcttttctagtgttactttggaggagctaattatacaacatcattgaaccattcaataaaagttaagtaaaattagatcac

SEQ ID NO: 51706 - DNA, 375 bp, Homo sapiens
tggcaatcaataccagaagctttaagcattgccttttgactttgaaattgtacctggaaatgtatgtttcagtaaccatcatgaatgtacacaaaatcctgaaactcttaaaactgatgtcacaggcgtgagcatggcgcccaaccatcttttgcaaattttattaaagacaatgctaaaaggaagtgacaactgaaactaatggtcacagtcagtcaagacttcccttttctgaggggcctagcaggaagagaatatttagactgatgcttagtgtaagaaggaatgttgtacaggttaaccagcaacacaaagacatattcaaaagacctaataggtcagaagaataacataccacaccaaaaacaaatctgt

SEQ ID NO: 51707 - DNA, 1324 bp, Homo sapiens
  misc_feature (1)...(1324): n = a,t,c or g
taaactgttttagacgcgttttagattaatgaagttgtgaagttaggtctcctgaagcctgagctgacggcagcacgaagggtaagagcaggtgttcttgggctttgtgttgaccagcttgccttacacaaccccagcactntctgggacacggaaggtgttcttcttaaggaagtaaaagatgaaggcaagaatagcattactgattcccaaatggatgatgttgaagttgtttatacaattgacattcagaaatatattccatgctatcagctttttagcttttataattcctcaagtgaagtaaatgagcaagcactgaagaaaatattctccaatgtcaaaaagaatgtgataggttggtacaaattctgtcgtcattcagatcagatcatgacgtttagagagaggctgcttcacaaaaacttgcaggagcatttttcaaaccaagaacttatttttctgctattaacaccaagtataataacagaaagctgctctactcatcgactgaaacatgccttgaaacctcaaagaggactttttcacagggtacctttagtggttgccaatctggatatttctgaacaactaggttataaaactgtatcaggttcctgtatgtccactggttttagccgagcagtacaaacacacagctctaaattttttgaagaagatggatccttaaaggaggtacataagataaatgaaatgtatgcttcattacaagaggaattaaagagtatatgcaaaaaagtggaagacagtgaacaagcagtagataaactagtaaaggatgtaaacagattaaaacgagaaattgagaaaaggagaggagcacagattcaggcagcaagagagaagaacatccaaaaagaccctcaggagaacatttttctttgtcaggcattacggaccttttttccaaattctgaatttcttcattcatgtgttatgtctttaaaaaatagacatgtttctaaaagtagctgtaactacaaccaccatctcgatgtagtagacaatctgaccttaatggtagaacacactgacattcctgaagctagtccagctagtacaccacaaatcattaagcataaagccttagacttagatgacagatggcaattcaagagatctcggttgttagatacacaagacaaacgatctaaagcagatactggtagtagtaaccaagataaagcatccaaaatgagcagcccagaaacagatgaagaaattgaaaagatgaagggttttggtgaatattcacggtctcctacattttgatccttttaaccttacaaggagatttttttat

SEQ ID NO: 51708 - DNA, 348 bp, Homo sapiens
  misc_feature (1)...(348): n = a,t,c or g
gctggatcagcgagaggggctcctggagctgtgagctctgctacttcaagtaccaggtcctggcgatcagcaccaagaacccactgcagtggcaggccatctccctgacggtcatcgagaaggtccagattgctgccatagttctgggctcgctcttcctggttgccagcatntcctggctcatntggtcctcactcagcccttcagccaagtggcaacgaccaggntctgctcttttcagatctgctacggcatgtatggcttcatggatgtcgtctgcataggcctcatcatccatgaaggctcctctgtctacccgcatcttcaagcgctggcaggcagtgaacc

SEQ ID NO: 51709 - DNA, 1464 bp, Homo sapiens
tcatccctcccagggagaaacccacgacctgtcctgtctttgatcgcctctttgacatttttgccaaaataccactagtggaaagtcaggctagctgtgctggtattggaatagcagcctcacactggcgtctggactgttctgtagattcatgcaagtggagctgtctgtctctaatttaacttattgctagataatagggttttcatgatgaaaagaaaacttaaaagaggaatggccctcattcagtaagttctgtggttccagtaaggatttttatgtacatacgctctcgtctctctccgttttgggtactttctatctcatctgtctccggctctgcatgttttccagggtgtagcctacagacatggaacagtgtaaatcccagactgacagacttagaacctgaggtctcattcatccttatggtttaggccttgccagttttccgaagtctctgattagttgacagtattaacactaaattgcagtttacagtatttctacattacagccatatgtaacatcaagccatcgattgtgtacttttcctttgctagttgtttgggctttaacatccttattcagccttatccaggttggttttgctgttgatcggtctcctaggctaaatgagaatgaaagcgacttcaggtttttggttcataggtgctcggcaggtggctgtgggattttttttttttggtccttctttcctcttaacgtaaatccaccaccaaaattattaatcctcttgagagaaacgtgaaacgccacaaaaatagagaaaattcaggtctgtatgtcatggatcgtgttggtattttcagagaacatcccgcttctgaagctgctgcagctccctcctcagggatcacactgccgtcacccactctgcactggggcgtttcctactgcgcctcgtgctggcggacgcagctgggtgcagaagctgtggggtcggagaggcgtttggagaaggtctgtggtgcagtgtgtgaaaattcaggtgctagaagcctactggtagaaaaacccaaaaggaagagctatatccttaaccattctgtccaatttcgggagccttgtcagtgtgtcagtttttcctccccgaagacactccttccccaagtaattgtaggaagataaaaaaactgttaccagataacaaacactgaactcctatttgaccagaactttttcctctcgagatagttttttctttttaatgaaaaaagcataggaattggagattggcttgtctcacgcagccagtgcacatttggaattgacggaaacaacgttgctatttccacccatttgttttcggcagccttaaggccctcattctcatttcgggtgaatctgtctatctgtgaacgtggcccgcatgtgcattcttttttttatatatataaagtcagtgacgaggaactcccgagacgtgtaatgacaccacac

SEQ ID NO: 51710 - DNA, 969 bp, Homo sapiens
gctcgaccgctcataggcagttccgagactactgtgctatctgcttaagatgggagtggcctgggtctccaaaagcattggaaaagtgcaatttagaagctgctttctttgaaggtcattttttgaaagtgctgttcgacagaatgggaagaattcttgatcagccatatgatgtaaacttacaagtaacctcagtgttatctagactttctctcttccctcatccacacatccacgagtaccttttggatccttacgtgaacctcgctcctggctgtagatctctcttctctgtaattgtcagggttgttggagaccttatgcttcgaatccagcgtattcaagactttactcccaagcttctgttagtcagaaagcggttacttggtttggaacctgaaggccctattattgaccacatcacactgctagagggtgtgattgtgttagaagagttctgtaaggagctggcggcaatcgcatttgtaaaatatcatgcttcctccacaccatagttaaggagaaagggtacgataaggaattgctcaatgtgaccccagaggattgggatttctgttgcaaaggtttggcattggatctagaagatgggaacttccttaaacttgcaaataatggcactgttctcagggcaagccatggcaccaagatgatgactccagaggtgctggcagaggcatatggcaagaaagagtggaagcacttcttgtcggacactggaatggcttgccgctcaggaaagtattacttttacgacaactactttgacctgccaggagctcttctgtgtgccagggtggtggactatttaacaaaactgaacaatggtcaaaaaacatttctgtgggcagctgtagcacttacccgctttaatccatcaagtagcaggtgattaggagatactcactctgaggtaaacactggataagataccacccttttttgtcgacc

SEQ ID NO: 51711 - DNA, 629 bp, Homo sapiens
tggagtcatttctactccaagagagaatagatgaacatcttcataccaaagactttctcacccgtattggagaagcacatcaagactttcccaggctttcagatgaccccagaataatctggaaaagactgactgagaaaagtcatatcagatactctggttttgaaagatcagagacagagcagaagatgcagcgagatggaaatagtgcttgtcatttaccattttctctgccatttctcaagcgacttactctaatcaaaccagagctggtgattgttaatgataatggtgtaatgtggatagatgtctttgttgtgtatttgagtaattaccataatttctacaggcacttgggaaactaacttaagactttactatgcttccttcacagatttgaggactaagaactttcactttttttttcctattatagaaggcactgttgtagttggaatagttataaaaacttttacaaaattccaagagaactatgttggtagtttgggccaggatgttgatggtacagaagcaaagtagtatggggatgtaagagaaacttaaaaagtaataactgtctttggcgatcaaatggctatggggaattaataaatagtagatgtttgaaa

SEQ ID NO: 51712 - DNA, 1141 bp, Homo sapiens
tttttttttttttttggttggcaaacaaactttcattattctagttcaatctttcacaaacatactgtacagagtcttatatggtataaaacaaaggaaaacatctgtctgttcaatttaacacaacaccaaaataaagcaattaagactttggggaattcaaagtacaagaaaacaaaaacgattattactaattcctcagctttttaccataaacacttgtcatttaacatagtgtttgatatagtttcttttgtactgcaaatacttttggtctttcctccccgtagaacaaatgaagaattaaaatgggaccccatagcatcctctcgaaggaggtgaaaagataaagctcctagacatagctagcttgatctttaaagaatctattgtttctgaaattttcacaacaaaaatactggaatccccaactaatgatgcttattttgggaaacaataaatactgtgaggtacaataaatcctacaggaataataacaacagaaacatattaacagtttcctttggcaaatttaacggaagtgaatgctgatgtgaacatagaaaaaataattacaaaaacatgaaaaatggaaacgacataaaagttaaaataaagggatatttctaacttttagactgatgaaagaaatgtctgaggccattaaatgcaaaaaagaaatacattctctttaaattattgtgtactgtttgacaaaatattccttgtttatctcttcttttcccctccacttaaaaaaaaaggaaaaaagaaaaaaaaaagacaacaaaacagtctgcaatgcacaccctaatggttttggctgcagactgaacttgagtaaatatcatcatttagtcagtatgttgtggtagctgaggctgccgatgtggttaaccagctcaggcaacatgtgtaaacatcggaaacaaaacaaaacaaaaaaggtttggagaatagtctctctcctctttctcactctcaattgcttggtttcaggcttgctttcatttctctctgacaaatcgtgtggggaaacacaaaacactaaacattgagagatcctgctttaaaacccccttcttctggcttttcagaaaggagtgttgctccattcaagtttagcacatgttttcaaagc

SEQ ID NO: 51713 - DNA, 2054 bp, Homo sapiens
  misc_feature (1)...(2054): n = a,t,c or g
attttttatgatgttcatcacagtgtggtaaggttgcaaattcaaaacatgtcacccaagctctgttcatgtttttttgaattctaggctggtgctgcactgaaatagagcagtaagcttgtgataaaggccaattccaggtagctcttgaaggtgatagccatctactttccagtggctgccaaccacagggagtgccagttaacactggaaggattaaggcaaggtcccttctcttgagactcccctctgagatctgaaaaatgaagtggcttaggaacatcagcagtgaagaactgccaagagttggtgaaggttgtctcttccgagggccttctgaagacagggctcttgaacagacaagtggaagggctgtaccagggataaaggaaagaagtgcctgtccagcagggagcttgaatttaagttccatgtatgaagtcattggctctatctgcatttttctgtcattctcttcatttgttttaaggtggaaaattttcttacagttgatgcaaagtatcaactactttaccctaccttctccccttttagatgggttcttcctgagttttggagtcttgtatgattatcagtattcccctgtcaaaatcaaatctattcaggtttcttcactgttgagaacacctaaatgtttttatttttgagaagtggggacagagtctcactatggtcacccaggctggagtgcaatggcatgatctcagctcactgcaaccttcgcctcctgggttcaagcgattctcctggcctccgcctcctgagtagctgggattataggcacacaccaccacgcccagctaattttttgtatttttagtagagacagagtttnaccatgttggccaggctggtcttgaactcctgaccttgtgatccacccacctcggcctccagagtgctgggaatacaggcatgagccccacgcttggctaagaacacctaaatttttatgtttcttggctcaaaaaccagttccatttctaatgttgtcctcacaagaaggctaattggtggtgagacagcaggggaggaggaagagctgtggtttgtaacttgttcaactcaggcaataagcgattttagctttatttaaagtcttctgtccagctttaagcactttgtaagacatggctgaaagtagcttttctatcagaattgcagatagtcatgttgggctaacagtcaattggatatattcctttacctcacatgaccccagcaactgtggtggtatctagaggtgaaacaggcaagtgaaatggacacctctgctgtgaatgttttagagaaggaaattcaaaaaatgttgtaactgaaagcactgttgaatatgggtatcggctttctttttcactttgactcttaacattatcagtcaacttccacattaatgaaagttgaccatagttatttccaaataaaaagaaaccaactcttaccaggtcttggactgtgatgtcatattattcagttttatgcttgttcctgagcagaactcataagagtgacatagtcagctgctgacggcacctcagccacgccactcttactcagttcagtgggtgtgcttgcgtggtaggatgtggtgcagccctctctacgctcttctatttttggtatatttcctatctaaccttcaaatagcttccaattctttttttcttggactggcttcattctgaatttgtgctaaaataatctttcataaagagacctcagtttatagcgtaacagactacacaatgcactgatgttttcataatgtttaaggggacccactgcaagaagcttgctgcctccttttaattgtattcatttagattttaattttccatgttaagaaggtgaggtccatgttggtgcccttcagagtagagaaccatgtaaacattaggaatgaacagaggccttaggaatgaatagagagtttgccttatacaatttcctgttacaaagctctccctctcatgcaaagtagggaacaccttttgagcatctttgaatttgacaaatggtgctgttgcaaacac

SEQ ID NO: 51714 - DNA, 1836 bp, Homo sapiens
tcaccacctacaaccacagagctgtcatggctgccatctctacttccatccctgtaatttcacagccccagttcacagccatgaatgaaccacagtgcttctacaacgagtccattgccttcttttataaccgaagtggaaagcatcttgccacagaatggaacacagtcagcaagctggtgatgggacttggaatcactgtttgtatcttcatcatgttggccaacctattggtcatggtggcaatctatgtcaaccgccgcttccattttcctatttattacctaatggctaatctggctgctgcagacttctttgctgggttggcctacttctatctcatgttcaacacaggacccaatactcggagactgactgttagcacatggctcctgcgtcagggcctcattgacaccagcctgacggcatctgtggccaacttactggctattgcaatcgagaggcacattacggttttccgcatgcagctccacacacggatgagcaaccggcgggtagtggtggtcattgtggtcatctggactatggccatcgttatgggtgctatacccagtgtgggctggaactgtatctgtgatattgaaaattgttccaacatggcacccctctacagtgactcttacttagtcttctgggccattttcaacttggtgacctttgtggtaatggtggttctctatgctcacatctttggctatgttcgccagaggactatgagaatgtctcggcatagttctggaccccggcggaatcgggataccatgatgagtcttctgaagactgtggtcattgtgcttggggcctttatcatctgctggactcctggattggttttgttacttctagacgtgtgctgtccacagtgcgacgtgctgggcctatgagaaattcttccttctccttgctgaattcaactctgccatgaaccccatcatttactcctaccgcgacaaagaaatgagcgccacctttaggcagatcctctgctgccagcgcagtgagaaccccaccggccccacagaaagctcagaccgctcggcttcctccctcaaccacaccatcttggctggagttcacagcaatgaccactctgtggtttagaacggaaactgagatgaggaaccagccgtcctctcttggaggataaacagcctccccctacccaattgccagggcaaggtggggtgtgagagaggagaaaagtcaactcatgtacttaaacactaaccaatgacagtatttgttcctggaccccacaagacttgatatatattgaaaattagcttatgtgacaaccctcatcttgatccccatcccttctgaaagtaggaagttggagctcttgcaatggaattcaagaacagactctggagtgtccatttagactacactaactagacttttaaaagattttgtgtggtttggtgcaagtcagaataaattctggctagttgaatccacaacttcatttatatacaggcttcccttttttatttttaaaggatacgtttcacttaataaacacgtttatgcctatcagcatgtttgtgatggatgagactatggactgcttttaaactaccataattccattttttcccttacataggaaaactgtaagttggaattatcttttgtttagaaagcatgcatgtaatgtatgtatgcagtatgccttacttaaaaagattaaaaggatactaatgttaaatcttctagggaaatagaacctagacttcaaagccagtatttgtttaggtcatgaagcaaaccaatgctctaatcacaatattaactggttaattaaaatggtgg

SEQ ID NO: 51715 - DNA, 483 bp, Homo sapiens
tttttttcggagagacaaaacaagaactagagttttaatgataataaaagcaataataataaaagcaataacaataaaaacaagatcagactctcactggggtaggcaagggactgaggaggtgaaaccaacccgtatggtgtcccagcacggcacctgctaaggagggagggtgggaaagcccaggccttcgttgcgggtacaggaggatgcaggagagggctgaggtgggggaggaacaactggtgtactgggagagagatttgggacgagggggaaccatcagcaaaaaatgaagccaggaatcacagtaagggcgcaagggctgaggccagttgtttccataaagaagactcaatcattacaaaaataatttttagtagttaaaaaacacacatagggccaggcatggtggctcacaccttttaatccccagcactttggggaggcctgggtgggcagatcaccaggtcaagagttcga

SEQ ID NO: 51716 - DNA, 453 bp, Homo sapiens
attcagcagacattttaattatgaaatcctataaatcaggaccaccacaatttcagacactccgttgcgaagtgtacatcaatagctacatctggaggatgaacaagccattgaatcttttaaaaattggtttagctaccttaaagtttgggggtggcaccttacaaaagcgccgtcaagtttcatacagccagcggcttcttctctgggagagtcacattttaaaaccggtttcagacacaaaagaagggctggcacgggaggaggaaataaattgtgagggtgaggagccgccgaggccgaggcccatggctccatggagggccagaagagagcagaaaaacgtccagggtctctcatgcattcctatagacaccagaaagggtggaataagaaagctcagctgggaggacaagaaagagactcaagagatcgtttatgactgtttctgag

SEQ ID NO: 51717 - DNA, 370 bp, Homo sapiens
ggagcattcgttctctgttgttaggaatcattctgctctgttagggaagggctgcaggaagggcagtttcctgaataaaaatctggctgcgaccagtcccatgtgtctggtaagtaagtaagtaagtaagtgccctttgaagggatcattaagacacagggagcatgaacctgagatcagaagcatttctttactaatttagattctgcgaaatagacggacctctccacccccaaacctaaaacaggccaggacttgtctctgtgctgaaagcaaatagcaagactaactcaagccccagcctctttccacactccctgatacctaaggactgctttctcagctagaccagggtgggcatcagcgacgc

SEQ ID NO: 51718 - DNA, 355 bp, Homo sapiens
tggaatcagaacgtgcaggtctcccaggatgtacactcactgcgccctttctgctgcttggtgttcttctggaggagcgtgagttctcagcggagcgcttctcggcacttctgatgtgcctcccatggagggagccgggcccttgctgctcaggaggtgcagactgccccgtgctctgggccttgcagctctgtcgctagacggttgttagaggggcagctctaggctggggcttgcgctgggccgtggtgggaggcacagtgtttacaggctctggtggcagagcagttggcacacctgtgggtgaatctgcctgatcccctggcatttggtcagagtacctcagagcacccca

SEQ ID NO: 51719 - DNA, 378 bp, Homo sapiens
gctcgacgcaaaacttttttttttttttttttttggttttcacatttttattgggagccgtgggaggggccgcctctgtcagtggaggtgctcacagtttcttcagccactccaggctggggccctgagggtcctgggggtggctgggcacgtcgggcatgttcccatcatcacggacgggcactgggtagttgtagggcgtggccttgttgatcatgacggagtacttgaagtaggggctcaatgggggcagaattacagcgaggcccccgacgacgaaggacacgaccagcactggctccttgtcccaggcattcttgaggaaggcgccgactctcgcagccatctttgtctccgcggcgggacacggcgttcgac

SEQ ID NO: 51720 - DNA, 1096 bp, Homo sapiens
ccaggtcagcattgcagctgtggtttctggcaggggctttgagggtccaagggtctcaccctctctgctccctgtgacttctgtcccagctggaatgtgaggaaggctgcctggaggaagtggccagtttgattctgggggatgagtgggatagcatcttggcaaagaatgatgtttcctgtgggattaccagcagttctgggcagctggaaggtttggatgcaggaaggtgggatgcaagccccttgccaggctcagctgcaggcattcgccctttgtgtgttaacactgtagctctaatcgtgcctggtgttctgaagcaggctcctcttccctgctgctgtgctgccatcccctgctcactccgcactcgcatgcattgcggattcagcacttaagccctagtgtgtaaatgacttggatctccctcctggcagactgtgaccctcagcacaggggctctgtcttagtcagctctgtggcctggtacacaattggtgctcattaaacacgtgttggattactggctgaggtggtgcagtggctgcctaccagcaagtctttgtttcccattctgtcaggagcagaggcctggccatgagcattccaggtcagcattgcagctgtggtttctggcaggggctttgagggtccaagggtctgatcaaagaagctgggtggggctgagtagggggtgggtggctctgcagatagagaactgacttccgagagctgtaggtgaagtgaggaccaggcagcagtccagagctgtgaggccccaggcccagaggaatggaatgaagaaagacctgttccacacaaggaggggttttctagtggaagctgagcttggaagctcctggagccaagtttaccacaggataggcaggtacagccgcccagtgtgtgcagtgtgtgcccactctggtgcttggacaagaagttcaagtccctttcaggtttacaattgtgaaaacaacaaaacaataccttcctggaaagtaggaagaaaaagcagaaatgtgaattggaaatacagccaactattttaggaaaaactaattagcaagcatctgattaaacttattcagaaact

SEQ ID NO: 51721 - DNA, 199 bp, Homo sapiens
cccattctaagatgacggaaattgaggcatagaagttacttgtccaaagacaccaccacaggttgtgagctgtactccatgttaggattcagatgcagtttgttgctgaaaacatttcctatgcatagtgactggctggggttctctagtcatgctgtatactctggtggctctaaagagttcagtagaagttgtcggg

SEQ ID NO: 51722 - DNA, 1609 bp, Homo sapiens
ttttttttttttttgtgaacatagcagaggaggtttaataggataagtcagctacatttttaatgttatcaacttatcattaatgtgtatacattagcgccctactgaaaggaagtaccagtctttgggcaaaacttaagagattccttgaggaacctacggcctgaaccttaaaaaaaaaatctctaaagaccttacagtctgctgctttaccatttcattttaattatcaacactggagttgcaattggctaagttgtcaactgtattttaggagtctaccaatgtggcactcagaatcggagtgaccatcagtgacctaaagaggtaagatttgtggaatactttagtccaaaagctttaaaaaactattagaccatatattctatatttttaaagtgaattatgcataaaagtctgtgcaaactacaacatgattgcagtaacattctcaagaaaaaaaaaaccctagtatactttagcattattatttaagttatacaaaatacatctttataaaagtacagattttctttaaaaagtttaaattatacccactgaaatagcaaggctccctctttagtactaaaataagggtttatcagtctacattattgcttattcctatggggccattggaaacctgtaacaaataaaaatcaagttctatttcttaaggaaaagtgccctaaaaattcagctgtcactatgcttttctgaagcttttcatctgaggaatcgtccataaaactgttaactgatgctacccaaggcttggtttgtcaggatccaaagttgagtcttgcaaagttcctgcttgtgccaggaagctgttagtttgttgtccccaatcatagtaatctggagcaaaacctccctgaagtcctgaggggcaatgttccaggcaaggtcatcatcactgtcatatcttcgagggttgtcaaagaaataagatctggggactgaatccatggctggggaccattccagggttggtaaggtcctttgtaggatttctaactcggaagaaataaacgactaaggtggtaggtaagagttcccaaacaaataacaccactccaaataatacgtatccagcatctcccagctgattcttcaaatctgcctggtctgatacattgtaccagtcataatcaaaggaatggacgctcttgttctgagaaaatgacaggatgaacaggttgtagcaggcccgagaggtgtaaagcagtatcacggttgacaccgatggcagtcacttgacacacggaggagcccttggactccaagtaaatgttggctaaggacatcttagagattttgtagagacagatggagagagagacggcacacagcacgaagagcgtgtcattaatggccactcgcacagagacgataaccttcctctcccaatttcccgtctttaccagcacagcacaggttaaattcaccaacaggaaaacaaggctgatgaagagggaggccaggtagaggggcaaccggtatttgagtaattctggagaatattttgacttggctttgaaaatcacctgcgtgaagtacaagttcatcagcgtgagggtgaaaaactgcaggcacacagggaagc

SEQ ID NO: 51723 - DNA, 208 bp, Homo sapiens
gttttgtttttgctgttgttgttattcatagcactgcccttttaattacacctgattatactactgaagtgacttatggttgctcccctagacagcctcagaatggggctgttctctaggaagatcaagtaactagaggatggagactttgtgccccatttctcccacctcctggaagggggaggggtgctggagattagattagaca

SEQ ID NO: 51724 - DNA, 290 bp, Homo sapiens
gctgggtggcctggcttcaggggaagacaggagccaggacacacgtcagcccagcaggtgtggggggtgctgcagccctcggcagtggggtcaggccctgggggatgtttccaatggtgggcagcctggccaggccggagaagacatgttcacgggcatctatcagatgcccccttgaggaggctgagttatttgagggctgctgcaaagtacgctaggctcaaattctcttttcccagccagagccctggccacacggactcagaggggccaccggggtggggaaagga

SEQ ID NO: 51725 - DNA, 599 bp, Homo sapiens
  misc_feature (1)...(599): n = a,t,c or g
cttgggttctttacttgctcaaggttttaatgttcgtctaagtggccaagatgttggtcgtggaactttcagtcagaggcatgcaatggtggtttgccaggagacggatgacacctacatccccctgaaccatatggacccaaatcagaaggggtttctagaggtcagcaacagccccctgtcagaagaggccgtcctgggattcgaatatgggatgagcattgagagcccaaagttactgcccctgtgggaggcacagtttggcgatttcttcaatggtgcccagatcatctttgacacattcatctctggaggagaggccaagtggctcctacaaagcggcattgtcatcctccttccacatggctacgatggggctgggcagaccactcatcctgtcgaatagagcgtttcctgcagatgtgtgacagtgcggaagaggggnttgacggagacactgtgaacatgtttgtggttcacccaacaactnctgcacagtatttccacttgcttaggagacagatggtccggaacttcagaaaaccactcattgttgcttcccctaagatgttactcaggctcccggcagccgtgtcaac

SEQ ID NO: 51726 - DNA, 785 bp, Homo sapiens
gaaggatttcaaggagacttaaaaaagacagcagtgaagaccgtttgggtagaaggtttaagtgaagatggttttacctattactataatacagaaacaggagaatccagatgggagaaacctgatgatttcattccacacactagtgatctgccttctagtaaggtcaatgaaaattcacttggcaccctagatgaatccaaatcatcagattcgcatagtgattctgatggggaacaggaagcagaagaaggaggggtctctacagagacagaaaagccaaaaataaagtttaaggaaaaaaaataaaaatagtgatggaggaagtgacccagaaacacagaaagaaaaaagtattcagaaacagaattcattaggttcaaatgaagaaaaatcgaaaactcttaagaaatcaaacccatatggagaatggcaagaaattaaacaagaggttgagtctcatgaggaggtagatttggaacttccaagcactgaaaatgagtatgtatcaacttcagaagctgatggtggcggagaacccaaagtggtatttaaagaaaaaacagtcacttctcttggagttatggcagatggagtggccccagtcttcaaaaagagaagaactgaaaatgggaaaatcttaggaaattttaagggcaacgaggtgatgatccaatagtttgcagggagagctttttgtacatgcttttaggacagaatggagacttatacacccaaagtttatctgtgtttgtttgtaagtattatgatgctaaaaatttaaa

SEQ ID NO: 51727 - DNA, 860 bp, Homo sapiens
ttttttttttttctttgatcaagtttttaataagcttttttcttacatgtacagtcatcttaaaaagacaaatattaactattataagttaaatactatacaatttatgagaaatgtaattttgtgaatttgaaaagtaaaagggaggtaactactaaacggattaaagaagaaaattctactttttaagacattttaaccagacagaaagtgagaaattactaatttaagtaaacactaaaaacttttactgaagctggagaccttatactattttagatcaagccttcatctacacagctttaaataaactttaaaaaatcttttctagtacatataagactgctaaaaagagtgcatgactgggggaaaaaaggcatatgctagaatgtgaactcctgaagaacagaaatacatttcattcatctttatccctggattcctaacacaatgcctggttcaaactaaaatgcttaaacaacgtttgctgctttgaagtgaactggggcaaatacatctttccacctctggtccagttttcactccatattaagcacatctgaagtacctgagctgctcctggctgttggcttttgactttaaattgagtaaggtaagccaatatgcatacattttttacatcagctttctcacatcagcctcagaaccaaatcatcactgggctgggaatattctcacgtactccgatacttatttgttggacaacagttaatatcaatgtgcaaaagtaatgcattttcaatgcaggataaatatgctcttatgaatatgaatggaataaaggccctgtttctccatgttttaaataacagatacatagcatcttaaattatgactta

SEQ ID NO: 51728 - DNA, 1774 bp, Homo sapiens
tcacaacatctggcctatattttctgtcaggaagccactggctccaagtgtaaacgtacatacgttcttacatactttcaactgcagctggtccctgacctcaccaggtttcagagatgttcttaaaggaagccagctgtggcaggtcacagattcatgggaaatggaaagaaccaaggaatatagctcttgcctcacctttctacccactgcagatatagttcaagccagagtaatggaagaacttaacttactagcctctcaggctgtctcctatccctacctaccagtgtacagcccctccccatctctttagtcccctttccctcacttccccttttataatgtcacacaaatcagggacagtaggatcacattataacctactttgtcatagggattcgatttttcttatatcaaatcatgtttcctgaaacccagctggggcatatgcactcaatgtctaatacatacttattaatgtaccggatattggccttgcccctgggatatcagcaatatattataaaaggttccagtagatgagacgattgagtctgaatacaattgcagtaaattgtgccaataaagatattgtactgttacggtcttagagttaaagccgcttgaatgcagcatgcacattcatgtaaacagacaatcagggtaggcctagaataaccacaaaaattctattggccttactgcagccacctatatgtagaacaatggaggagatagtttgtggtccattattgtaccctgtttcatccattagcatcagaatctctctttcaggtcatttattaaatatgattgaaatgtttaaaagttcctgaacatgattcatgatgattaaaatatcatacaactgataaaagactttaagaactttatatatttcctgttgcctcaaaatgtaacagaaattattcttagagctttgattttagctatcctaattactgcaaataaatatttgttcttatagttttaaatcaaaaagaaaagtcttgttataaaaccttaagcttgaaatcatattaataaaatatattgtacatagtggaaaattttcagtagctaatttaaaatttcagaaaatgctattaaagaattttgattcaagtatttaaactgtttagttatgcatgcttcttattaaccgaaaatgataataccatttagtttagtgatcagtatgagaaccaatacctaatcctatgttgctattgtattttttcctagttggtgtgcctgctcagaaaaacatatactgtatgtgtatacatacctgtgtatatataaaaggtcaatttatatatttttctataggaaaatggagtaacaagttccctatctcccatatttatttgtccatagtaaaatggccacattgatgataatttctagaactagtttctgagattgtcagccctttgtctaaaataatggcagtattaatgattgacttctgtcactgccatagttacctggattgtcagccttggtagcctttgtctaaagtcctaaagagttccaaaaaaaatgtgttgaaatttaattgctaaatagtggttggtgattctttacagtaggaattgtaataattttcttgcaaataagttatttactgctattgatattgaataatttgtcttttattcagatatatttcaaaaagcatgaatatatgattattcataaattgtatactttaccagtaagttttcagaggaaataaagacttttaaatccttttcaaaaaaaaaaa

SEQ ID NO: 51729 - DNA, 487 bp, Homo sapiens
ccatgtaacatcactagcgaccggtgacctctttttcccccttgcctggctcctgtggtggcaggctgggcacgaggaccatgctgggccggagcctccgagaagtttctgcggcactgaaacaaggccaaattacaccaacagagctctgtcaaaaatgtctctctcttatcaagaagaccaagtttctaaatgcctacattactgtgtcagaagaggtggccttaaaacaagctgaagaatcagaaaagagatataagaatggacagtcacttggggatttagatggaattcctattgcagtaaaagacaatttcagcacttctggcattgagacaacatgtgcatcaaatatgctgaaaggttatataccaccttataatgctacagtaagttcagaagttgttggatcagggagctctactaatgggaaaaacaaatttagatgagtttgctatgggatctgggagcacagatggtgtatttg

SEQ ID NO: 51730 - DNA, 2538 bp, Homo sapiens
ccgcgcctcctcggccgcctgtcgggcatgaaaaccaaattctgcaccgggggcgaggcggagccctcgccgctcgggctgctgctgagctgcggtagcggcagcgcggccccggcgcccggcgtggggcagcagcgcgacgccgccagcgacctcgagtccaagcagctggcgccaacagccgcgctcgcgctgccccctccgccgccgctgccgctgccgctgccgctgccccagcccccgccgccgcagccgcccgcagacgagcagccggagccccgggcgcggcgcagggcctatctgtggtgcaaggagttcctgcccggcgcctggcggggcctccgcgaggacgagttccacatcagtgtcatcagaggcggccttagcaacatgctgttccagtgctccctacctgacaccacagccacccttggtgatgagcctcggaaagtgctcctgcggctgtatggagcgattttgcagatgaggtcctgtaataaagagggatccgaacaagctcagaaagaaaatgaatttcaaggggctgaggccatggttctggagagcgttatgtttgccattctcgcagagaggtcacttgggccaaaactctatggcatctttccccaaggccgactggagcagttcatcccgagccggcgattagatactgaagaattaagtttgccagatatttctgcagaaatcgccgagaaaatggctacatttcatggtatgaaaatgccattcaataaggaaccaaaatggctttttggcacaatggaaaagtatctaaaggaagtgctgagaattaaatttactgaggaatccagaattaaaaagctccacaaattgctcagttacaatctgcccttggaactggaaaacctgagatcattgcttgaatctactccatctccagttgtattttgtcataatgactgtcaagaaggtaatatcttgttgctggaaggccgagagaattctgaaaaacagaaactgatgctcattgatttcgaatacagcagttacaattacaggggattcgacattggaaatcacttctgtgagtggatgtatgattatagctatgaaaaatacccttttttcagagcaaacatccggaagtatcccaccaagaaacaacagctccattttatttccagttacttgcctgcattccaaaatgactttgaaaacctcagtactgaagaaaaatccattataaaagaagaaatgttgcttgaagttaataggtttgcccttgcatctcatttcctctggggactgtggtccattgtacaagccaagatttcatctattgaatttgggtacatggactacgcccaagcaaggtttgatgcctatttccaccagaagaggaagcttggggtgtgactgtggggaggactccatccacctcatcactggactgcatggggaggcagcagagcggggtcccctctgtgcttcgactactgctcctgtggcaggaggctttgggtggctcactactgaacacatgtgtatgatactaaagacggtattaaaatggagcgacgtttatttcatctcttgtttacgatttcactaggactcagaaacgagatcgggaagcagaaatatagtgcaatagtgcaacatctctgaatccttttaatctagagaaggcatttcatatttgggggctaaggtttccagtcagatgaggcaaacagcaagagtaagcagtgttacttgcaggtactttggttaatgttgatttaaattttcatgaatgtgctggtgaacactgtgaccaggcttttgtagatggcgatgtgttatagacggtgctcactcccaagggacagcaagtgagcagagatgtactgcaaagtcgccagtcactgctgcaaggtggcctctgcctggggcctccagaagctgctcctttaccctcttggtcccatggctgaagctggagcagcggattgctctggagcagccaaggccgccagcgtgtggagcagagctctcccctcctgctgggcgtgtgtgacactgatgagtttcactgtactgcatgtgacttctcccctgcccttcctcctgatggagtgtgcagacagccatgcgtggccacgggggcagtgtgaggacctccctgtctccgcgctcccctcccaggggagcccagctgcttgacctagctctttgggcctctcctgccctctgctctgcctggagtgtcggatcctgtgagtaggctgggcctcccctgggcagggttctccgaagggcccggtttcccggcccttacctttcctgatgcccctgacatcatcattcttgtgggagacagcagcctgtatgtggtgtggggcgtggatcgagtgtagctgtgaaatccatatatatgaaatgctcctgcgggatacagtcttagctgacttttttttactctgaactcttatttgaattgttttttgtgcatatatttctgctaccacagagattgtactatacaaataaaaaaattaaaacccaacctcaagc

SEQ ID NO: 51731 - DNA, 610 bp, Homo sapiens
gggatacagtgatgacttggtctgcctctaggtggcagggagccattttgggttttcgaacagaaaagtgacataatgaatgctgagttcttaggaagattaatccaggagtagtctccagggatgtactggaaggagagaagctgaaagcaggggaggctgctgtgtttgcagttggctgcccagtgctacctctgcagagacaatcaatgtcctgaaggtagctggtattgtctgtgttgcactgacacgagccttcctaccaagccccaggggctccatgctggagaatgcacgtagggctagggtgagcactaacttcacttcaggagagcaaggaacagtgtggctcttccatttttcagttctgtaagcacatcacccttttttcctccccttgagctgtgttctctgacagctgtttgttggtaaagccagcagcccctaaagcacgtcccagccttgtttcctctgtgctttcccccaccactgctgctgcacgcctcatttgctgggccactttagtggtgggaaccattagaggctgagtgacttaaaggagattgagtctgtctcgaccccgagagagagtgggatggatggatgcatc

SEQ ID NO: 51732 - DNA, 492 bp, Homo sapiens
  misc_feature (1)...(492): n = a,t,c or g
atagagttagtaattcccatccaactggcttcacaggcttttgtgagcttatgaatgtgaaagtatttnctagtttataaaacactatatgaatgtggggaaatctttacttgaccttagggcatggagggtggagcacattttgtctgctgtttggacttggatgctgattagcagttatgaagtggcccagacacctagccattctttagtaagagtgaagatagcattttaagccctccttgtgtgcctagcatcttactgaacactttctggtgattctctcctttaatcctcacaaagatctcacagttgtcctccattttacggagaagaaaccgaggctccgagaggttaaacgatgtgcagaggctacctgtagtgatggtgctgagtcaagcctgtcaaccactgtgctcgttagtgaccaaggctgcttttgacagggctgccagcttgttcagtgggttttgcagccccccagacattttg

SEQ ID NO: 51733 - DNA, 763 bp, Homo sapiens
tttttttttttttatagaattctactatttgtattaaaaatagatatataaatatacatatttataaacttgtaaatgcatagaattgctatgaaaggatacacaacatatagataacagtgattaactctggagaggggactagaggctgacctccatggggaagcttaccatttattgtatacccttttgtattgtggaatgtcttaccatgtatatgtattaatttttcaaaacaaaaaaacaaacaaacaaaaaaagaaactgcctggtgctgaatatacagtggtgaacaggacagaggttccccagtcttggggaaggcaaagtgttgagcttactgggccacaattatcaaattttttaaaaccagactgtttacataagttaaggggaaagttctttctacaacaattagcttataataattcagcatatcattttacagagataaagcagttggaaaataaatactaagtaatttgtcaagtcttagactgtattaagttgtagtttctacaagggaagggatcttatctgtttaacttgatcagtagagcattcactgcagcataatgtgcagataaacgcttgttacagcaagcattttctgatgatgacaaatgatagcacaaccatttaaaaaaatcttgaaaaagaaaagaccagaagatgctggactctgagggaactgtgtgttccctgtgagggttagccaaccttttctagacagtcctcaaaaaatgatggtgttcaaatggca

SEQ ID NO: 51734 - DNA, 366 bp, Homo sapiens
tacctcaacagcctcaacaacgccatcctgcgtgccaacctgcccaagagcaagggcaacccggcggcttacggcatcaccgtcaccaaccaccccatgaataagaccagcgccagcttctccctgggattacctgctgcagggcacggatgtcgtcatcgccatcttcatcatcgtggccatgtccttcgtgccggccagcttcgttgtcttcctcgtgggccgagaagtccaccaaggccaagcatctgcagtttgtcagcggctgcaaaccccattcatctactggctgggcgaactacgtgtgggacatgctcaactacctggtccccgctacaggatgatgacacagcaggtagcggggac

SEQ ID NO: 51735 - DNA, 101 bp, Homo sapiens
cgggcacgttggctcgcgccagtaatcccaagtagctgggattactactctactgaacccatgaggcagaaatttgagaccatcctgcccaacgtggtgaa

SEQ ID NO: 51736 - DNA, 4241 bp, Homo sapiens
  misc_feature (1)...(4241): n = a,t,c or g
caaaactacttaaaaaacactgctctttccatttccgtatcatttaaccaaacaccatcctgtgggttctgtcacttgatcctcatgctgatctgagaactcggcagagctgggtcactgccttccccaaggctaacctggtttctaagctggcacaagaccccaggtgatctatcatctaaccacagagcccttgctggacagagggtgaagacattatgtgtccctggctctgttcagggaagcagaggatagacctgaagaatttaattacttgtcatagataaagcctagagaaaaggtgagggcgcaaagtatctcctccaaattgggaagactcccccagggcttcactcacttaacgccattcttcctggagccttttaaagcctggggggtgagggagccttccgggtcaaccctctctaccctagcctcagggagcttcagggccccagcattgaaggaacagggtctgacctcatttgccaccgtagggatggggagactgaggcaggaggtgaatggctcccagcttggagccctttcccctcaggacttggtttccctaccctagctccgcctgcagggacagaaagacatggtctggaaatggatgccacttctgctgcttctggtctgtgtagccaccatgtgcagtgcccaggacaggactgatctcctcaatgtctgtatggatgccaagcaccacaagacaaagccaggtcctgaggacaagctgcatgaccaagtacggctggagtgtgcctctgctaaggagggggcttgttctaacagggaggagaaagtcaggatggtgggagagggattgaggggtcagatacctccacatcctgaagttttcctgtgggagaagatgaaggtggagtaggaagagtggctgaggtgattttaggggggccctccccggaggtggataccatgttgacaatgatattgagtcgtcattcgatgggcacctgtcagttgtcatgtgttttttgtacaaaatttcatattcccaggggttcttggatgtaggtagatgatattctccacattacacaagtaagtgaaaatgaggctcacagaagcacatgggcccacacaggagctggacatgaatggcccctgtggagggtaggaataggagtgggttaggctcctcctttggtgggtgacagactagggagtcgctggcttttcccaccctcactaagtgccatttccatggagtgccaagggagaagaggaggaggcccttctggctgtaatttgaggcacaggggctggacattcacacagtctatatacatgtatgccaggggattgcagccttattagactcaatgtctcccttttatgacagatttttttttagattctcttttctatcctgcaatgaaattcaaagaacctatttgtatgcataatttttgcaaatatcaacataatgctctgtaatataaaggagaaacacacagaagtaacttgtaataaaataatatatatttcaatatgtcagttctctggtatgactacattagaaggcattaggaaatagcacatgcttgcttttgtcataaaatcattataagtggggagctacaaatgaagattgatacaggtatattctattggtgacttaaacactataagatactataatataagcaatgttgctgttgatgtcatacttttctaaaatagtgaataattctagtagaataaaccacatagtacagccttctatttcatggtatttgcagtcctggaaaacccagtctagattaaaatcttgtgaaaacatgatgtgcctatatgtaagatagagatacatttaaaaagtagggcttttgcttannnnnnnnnnnnnnnnnnnnnnnnnnnnnnnnnnnnnnnnnnnnnnnnnnnnnnnnnnnnnnnnnnnnnnnnnnnnnnnnnnnnnnnnnnnnnnnnnnnnnnnnnnnnnnnnnnnnnnnnnnnnnnnnnnnnnnnnnnnnnnnnnnnnnnnnnnnnnnnnnnnnnnnnnnnnnnnnnnnnnnnnnnnnnnnnnnnnnnnnnnnnnnnnnnnnnnnnnnnnnnnnnnnnnnnnnnnnnnnnnnnnnnnnnnnnnnnnnnnnnnnnnnnnnnnnnnnnnnnnnnnnnnnnnnnnnnggcttttgcttactttttccagcaaatattttcatgggcctactatgtgtctggcactgcctagccactgggacacagatcttactacatgccaagaagaataaatatattcaaactccattacaccatggctcgctccctctcttcctttgctcaaaatgtcaccaatgtggcatttcctaacctatttaaaatttcagcaattccacattaccatttcctgctcatatcatttaacttttcccatatcatttatcatatcctgacataccatatatatatattttttaagtttcttactgtctgtctcctctgaccagaatgaaaattccatgaatacatatttcnnnnnnnnnnnnnnnnnnnnnnnnnnnnnnnnnnnnnnnnnnnnnnnnnnnnnnnnnnnnnnnnnnnnnntttttaaatgagtaagtgaaaggactttttatgaagtgttacatacctcataaatgataactattattcccaagacagggtttcccctgggctcccacagtcccctgatcacacggttgtaattgtgtttcctccaagaaaggggttcctggaggcctaggagagagggaccatcatctgggaacctgagtgttctcaggacaacctgcctagggcagaggagtaagaaccaaatgggggagagacacgaggtggcaggaggaggagggtatggggaggcacttagttcctgtgtcttccccacccagtgcagtccctggaagaagaatgcctgctgcacagccagcaccagccaggagctgcacaaggacacctcccgcctgtacaactttaactgggaccactgcggcaagatggagcccgcctgcaagcgccacttcatccaggacacctgtctctatgagtgctcacccaacctggggccctggatccagcaggtagggtgtctcccccccacccaccccagcagactgccatccccctcagtcacttcaaggcgatggctgccagcatccctggctgagaggagccctgcctccccacctcccacccaggtgaatcagacgtggcgcaaagaacgcttcctggatgtgcccttatgcaaagaggactgtcagcgctggtgggaggattgtcacacctcccacacgtgcaagagcaactggcacagaggatgggactggacctcaggtgagggtgattgagttggggttaggaaaaaggagattgaggtagggtttggaaaatcctcaaggatttggggtggggtgaagatttctgggggtggccagaaatgagctttgggcccaggggctgaaagtctgtgtccaccatgcctctccctgcaggagttaacaagtgcccagctggggctctctgccgcacctttgagtcctacttccccactccagctgccctttgtgaaggcctctggagtcactcatacaaggtcagcaactacagccgagggagcggccgctgcatccagatgtggtttgattcagcccagggcaaccccaacgaggaagtggcgaggttctatgctgcagccatgcatgtgaatgctggtgagatgcttcatgggactgggggtctcctgctcagtctggccctgatgctgcaactctggctccttggctgagttcagtcctcccagactacctgccctcagcttggataaccaggctgggctcagctcagctcccacaaatgacagccccttaagcatgcttctattagtcacctaaccctctgtcacccagtctgttgctgctccatggtggggccaagagtcacttctaataaacagactgttttctaataattccatgtctgtggaattgttttggttgtgagtttgtgggtgggtgggagacagattctacggcttctggattccttcaaattagagcaactagacctgtgtttgaatcccagctctgctactttgtgaaaatgaaacagttgcttcactgctctaaacctttgtttccttctggataaaaagaggataatagtcctgccctcaggcttgtgaaatatacaggagctgttgcctagaaagcccgtgagcccagtgtctgcacattaatagtcttcagggatcc

SEQ ID NO: 51737 - DNA, 419 bp, Homo sapiens
cacaggaatttaaataggaatttactatttttttataaagcttttgctattttttcattgctcattttgttcttattattttgataaagtatcagactttttgcttgagttcttcagtgtaaattattttttacatgtaaaagtactgtattcaaccagttgcataatacagcaaaaatctttgaattcccctttaaaataactaaaatttgatggtttccatgacagatttatagcacatatagggatcttgcatgtatctgcagaaacttcattatttttcaaatgaaatggtgtatacttctttcaaatgaactttgagacttgaaacatattttagtcattttttgttaaatattgaatttttaaatacacatatatcaaaaatagttgagaataaaaagaaagcctaatcatca

SEQ ID NO: 51738 - DNA, 421 bp, Homo sapiens
gttttaaatatttgttttttaaacaattttattgagatataatggacttaaattgtatgggtttttatctttcaccttagaagggattcagttgtatatttttaaaatatatattttgatgtttttatacatcgtacattcccaaaaccaaatgtttcttccagcccttttcaatttatcctttgcaacatataaattactgatagaaggacatattctgccttttgtaggggctatttacaaatgtccatcaatggaagacatcattgtgaaacctgatgaaccctttcccagtcttctatcatttatctttttttatttttatttttatttttttttgagacagggctcgttctgttatccaggctggagtgtagtgggggattatcattttgggggcattctcttttttttttttccc

SEQ ID NO: 51739 - DNA, 471 bp, Homo sapiens
  misc_feature (1)...(471): n = a,t,c or g
nnaccttatgacatgattacgaatttaatacgactcactatagggaatttggccctcgaggccaagaattcggcacgagcaggaagctgaaaactccccaagccaagctctttaccgtccccagcgaggccctggccattgcagtggctactgagtgggattcccagcaggataccatcaagtactacaccatgcacctgaccacattgtgcaacacatcattggacaacccaacccagagaaacaaggatcagctgatccgggcagccgtgaagtttctggacaccgacaccatctgctacagggtggaggagcccgagacattagtggaacttcaaaggaatgagtgggatccaatcatcgaatgggctgagaaaagatacggcgtggagatcagctcctccaccagcataatgggacccagcatccctgccaaaactcgggaggtgctcgtcagccacctggcatctt

SEQ ID NO: 51740 - DNA, 3267 bp, Homo sapiens
  misc_feature (1)...(3267): n = a,t,c or g
gaattcctttccaaaaataatcatactcagcctggcaattgtctgcccctaggtctgtcgctcagccgccgtccacactcgctgcaggggggggggcacagaatttaccgcggcaagaacatccctcccagccagcagattacaatgctgcaaactaaggatctcatctggactttgtttttcctgggaactgcagtttctctgcaggtggatattgttcccagccagggggagatcagcgttggagagtccaaattcttcttatgccaagtggcaggagatgccaaagataaagacatctcctggttctcccccaatggagaaaagctcaccccaaaccagcagcggatctcagtggtgtggaatgatgattcctcctccaccctcaccatctataacgccaacatcgacgacgccggcatttacaagtgtgtggttacaggcgaggatggcagtgagtcagaggccaccgtcaacgtgaagatctttcagaagctcatgttcaagaatgcgccaaccccacaggagttccgggagggggaagatgccgtgattgtgtgtgatgtggtcagctccctcccaccaaccatcatctggaaacacaaaggccgagatgtcatcctgaaaaaagatgtccgattcatagtcctgtccaacaactacctgcagatccggggcatcaagaaaacagatgagggcacttatcgctgtgagggcagaatcctggcacggggggagatcaacttcaaggacattcaggtcattgtgaatgtgccacctaccatccaggccaggcagaatattgtgaatgccaccgccaacctcggccagtccgtcaccctggtgtgcgatgccgaaggcttcccagagcccaccatgagctggacaaaggatggggaacagatagagcaagaggaagacgatgagaagtacatcttcagcgacgatagttcccagctgaccatcaaaaaggtggataagaacgacgaggctgagtacatctgcattgctgagaacaaggctggcgagcaggatgcgaccatccacctcaaagtctttgcaaaacccaaaatcacatatgtagagaaccagactgccatggaattagaggagcaggtcactcttacctgtgaagcctccggagaccccattccctccatcacctggaggacttctacccggaacatcagcagcgaagaaaagactctggatgggcacatggtggtgcgtagccatgcccgtgtgtcgtcgctgaccctgaagagcatccagtacactgatgccggagagtacatctgcaccgccagcaacaccatcggccaggactcccagtccatgtaccttgaagtgcaatatgccccaaagctacagggccctgtggctgtgtacacttgggaggggaaccaggtgaacatcacctgcgaggtatttgcctatcccagtgccacgatctcatggtttcgggatggccagctgctgccaagctccaattacagcaatatcaagatctacaacaccccctctgccagctatctggaggtgaccccagactctgagaatgattttgggaactacaactgtactgcagtgaaccgcattgggcaggagtccttggaattcatccttgttcaagcagacaccccctcttcaccatccatcgaccaggtggagccatactccagcacagcccaggtgcagtttgatgaaccagaggccacaggtggggtgcccatcctcaaatacaaagctgagtggagagcagttggtgaagaagtatggcattccaagtggtatgatgccaaggaagccagcatggagggcatcgtcaccatcgtgggcctgaagcccgaaacaacgtacgccgtaaggctggcggcgctcaatggcaaagggctgggtgagatcagcgcggcctccgagttcaagacgcagccagtccaaggggaacccagtgcacctaagctcgaagggcagatgggagaggatggaaactctattaaagtgaacctgatcaagcaggatgacggcggctcccccatcagacactatctggtcaggtaccgagcgctctcctccgagtggaaaccagagatcaggctcccgtctggcagtgaccacgtcatgctgaagtccctggactggaatgctgagtatgaggtctacgtggtggctgagaaccagcaaggaaaatccaaggcggctcattttgtgttcaggacctcggcccagcccacagccatcccagccaacggcagccccacctcaggcctgagcaccggggccatcgtgggcatcctcatcgtcatcttcgtcctgctcctggtggttgtggacatcacctgctacttcctgaacaagtgtggcctgttcatgtgcattgcggtcaacctgtgtggaaaagccgggcccggggccaagggcaaggacatggaggagggcaaggccgccttctcgaaagatgagtccaaggagcccatcgtggaggttcgaacggaggaggagaggaccccaaaccatgatggagggaaacacacagagcccaacgagaccacgccactgacggagcccgagaagggccccgtagaagcaaagccagagtgccaggagacagaaacgaagccagcgccagccgaagtcaagacggtccccaatgacgccacacagacaaaggagaacgagagcaaagcatgatgggtgaagagaaccgagcaaagatcaaaataaaaagtgacacagcagcttcaccagagcatttccaacacnnnnnnnnnnnnnnnnnnnnnnnnnnnnnnnnnctaggctagtttctggtcttatcatttctctagtgtcttttgcctttaaaaaaaactaaacagataaaacatgggaatctcctttttgtaggtttatagaaagggtccctttgttgcacactcacttgtaagaaaatgagacaaaaaggttaaacccacagccaaactaggacactccgttccctgaaaccgttaaaaaatcaaacaaaaggaccccaaattaagaatctaggaagctcagaaacgaaatctaggttcaggaagaccacacttggtgttacccgattggcacagaccagtttcagagaaatactttcaggcactaagactaatcgaatgaacaaagtccacagtttatttttatactttcagtcaagtttgaactctgtaaaacctcataaataagttataatttctgttcactttgtatttgttcagtatgcaaagtgtgtcaccctttctagctgaattc

SEQ ID NO: 51741 - DNA, 8453 bp, Homo sapiens
tttttttttttttttgagaatggaagcaaaactttattcctcttggctggagaagagaactagtgggtggttgtgtacaggacccccatccctcacccctcccagaaccaaagaagacaagcagcgccaccaaatggctccctctgcccaagtgaaagccgagaggtcagcggcttggctggggaggcaggtgagcgcagcacggcacagggcaggggcggctgcagtgacaggcgggcggccagggcggcctgggccggggttgaggggaagagggcggggctgcttgggtagcggggcaggcttgggggctgccggctggcacgggccccagactcagggcaccacaacgcggtaggggctgcctgggatgtgctcgtccccccattttgaccaccagtgtgtactcccccttgtccttgagcaggtaggacacgctgtagagccggctgcccacgtgcttcaccaggatctcctcgcagggggtccttgggccatgaacccccaccagcagcatgttgttgcctgctttgctgcagtctactgtgaagctgctcttctggcctacgtaggccttgctcagccccaggcccttggccaccaccttgctggcgtcagcaggcccaggacccggggccccatgctggggggcacaggtggccttggtcagagagtctacaaacactgatgatgtctcgtggaggctgtggttgctgacgagacgggggcctgtgactttggccttgaaggggctgcccccaatgtggtaggggccgccgtacttgatggagatgaggtagctgccaggtgccatgggggtataggtgacgcggtaccctcaggcactcctggcaatccatcttcaccttggaggggccgtcaatggtcaccgacagggcaccagctcccgcattgctcgtgttcacgacgaactcagctggggttccctgtgacaccgccttccagacctgctccgtaagcagacaccaagcctgggtcccctccatgcccaggctccccaactcggatcttgaaggggcttccagggatgtgggtgccgttgaacttgacgtcaatcaggtaaacgccattctcccgagggatgaagcgcacagcatacttatcttggtcaatttctgtgacatagcactcctccagggctcctgaggggctgtgcaccttggcatcgatcgcccccttggccccgttcaggctgactgcaaaagaggctggctggttgacctttagccctgactcctgaaggctagaaacagtgaggcggcgggcgtcgccagacggagaagccacaggcaccacgaaggggctgtcgggaatgtgttcctcgttgaacttgactgagacttcgtagtcacctggctcctggaccacataagccacaccacaggagccgtccttgcggtcctcaaaagagatctcagccttgctggggccctcgacagcaatggccaggcctccagcaccagcttcccgggtccagatactgaattcggctggcactccagcttcagctctctccagcccagggcccccagctcggaccttgtgggctcccccttcccctaggggccccacggtgaactggaaggggctcccaggcacgtgctggcccttgtacttcacgctgactgtgtgtgtgcccatctcagcgggaacaaagcggatgcagtaggtgtggttctccccttccacgatctcggcctcatgggtcttgcccgatgggctggtcacctgggctgtcatatcctggatgctaatttcagggattttcaggctgaggtcacaatgactaccaacgttggccactgaaggagcccgacgcctgcgggtgatgctctctttcacccggccctcgcctgtcaccttcacagagaaggggctgccaggcacgtgctggtcggcaaacttgatgttgatgatgtagttgcctggctctgtggggcagtaggtgaccctgcacgtcccgtcctccaggtcctctgtgttgatgtccaccttgctggggccctcaatggacaggctgagcccaccatagcctgcatcgcgggtatcaatgataaactctgcaggctcaaaggtgtggccttcgtgaaggccctgaccagagacccgaacacgactggcatccccaatttccgactggctgatcaccaccgggatggggctgctggccacgtgctggccatttttcttcacatgcaccaggtgctcccccgtctccttgggcacgaatgaaatccccacgtggccatttacgcagccgcttcagcaaacagggctcctcccggcccgagggcgggaccacagtggccgtcagcaggctgagatccgtctctgagatgttgatggggatgtcggcagcagagccgacctttaggtgggacatacgcatggagtcgtcacctgtgacccgagcagtgaaggggctgcctgggacgtgctgttcattgtacttgactagaatgctgtagtcccccggcagcacaggcaggtaggacacgctgcatgtcccatcctggttgtcagtgcagctgatttctgctttggacgggccctcaatggccagagacaggcccccctctcctgcatccttggtgttgacggtgaaggtggcaggcttgttcactactccatgggtgaggccaggcccataggcagtgacatggccacagttgacgtaatccacatagaactgcaaggggcttcctgggatgtgcatgttgtcatagcggatgtccatctcgtgcaggccagcctcgctgggtgcataccgcacggtcacggtgccgtctttgttgtcagtgatggtgggctgcgccaccttgcctgagggcatccgaacctcccctgtgatctcgcccttcttgatggtgaaggggatgacaaggtcaaagggcctcaggctggtcacatccagcccattgacacccaccaggggcctctccggggcccaagtctgctggccgccctgggcgtaggtgtactgtggggccagctgctgagaccgtagagggggctgcaccgagggctggtccccagccagagccgtcacttggaaggggctgttgggcacgtgctcgccaccaaagcgcacacagatgacgtatttgcccggctggggggccgtgtagaagatgtcgaaagtgccgtcctcattctccaccacgtccacatccacctctgagccatcaggcgtgcacacggtgcacgtcactttgcctttgcctgccgccttagtgtccacagtgatcaccgtctcctccccaatctgaatggtggggccgatgccagcacctagcccgtgacctccgattgacactgtgacagtgcacttgctggcgtccccggtgggcacggcacgcacgcggtacggggagaaggggatctcgtcaccaccgtacttgatgaggatggtgtagcgacctgtcacgtctggcacgtaggccactgtatacgtgccgtcatggttgtcttggatgtgtgtcttcttcggcttgccttcgggatccgtgatctggacagccagcaggccctccccggcgtcctttgcatcgatggtgaactccacgggcaggctggcaggcacgccagtggtgttgagcccggggccactggccttcaccttgctggcatcatgagtaggcagcaccttgaccttgaaggggctccggggtacctcttcatctccatacagtactgagatgctgtagggcccttctcggctgggcacataattgacggtctgggtgccatcagcgttgtctaccacgtccactggctccaccaggcctttgggcccttgcactttgacctgcaatggggccacaccagccttgcttgtgtccacctggaaggactgagggaggttggcacgaaccatgcctgggctcaggccgggcccagagcacttgaccttggacgcatctgtcacatcatgcacagggaccttgaaaggactgcctggcacttgatggccaccataggtgacgttgaggctgtaggtgccagcctcataagggatgtactcgaccgagcagctgccgtccttgttatccatgcaggacatcttggcctcggaggggccctctacagccaggcccaggccgcccgtgccagctcccctggtctccacagtgaacttgttgggcttgttggtggtgccactttggatgcctggcccgtggacacgcacccgggaggggtcgcagccctcggtcacgggcacctggaaggggctgctgggcacgggactgccgtcataggtcacgtccacggagtgcagtccctcctcgtaaggcgtgtactccactttgtacatgccatcgccacggtcctgaacgtaggtctccgtcaggttgcctgaggggttggccacacgggccttgacgtgcggccctccggtctgtgtcagagcccgggcgtccacactgaactcagtggtggcctcacggaagacaccctggccctcaataccaggcccatagcactggacaccggaagtgtccaccgcaggttccacctgcagcttgctggggaagttgggcacgggctggccgccgtacttgatggtgacggtgtaggccccggggcagaggggaatgtaggtaatggtgtgcgtgccatcaccgtggtcctggatgtacacctcggccggaagccccgcctccgagcagatctcaatggtcagctccgcgctgcccgcgctcgagcagtccacttggaattggcccacctccccagcggtggcccgctccagcccggggcctgagcacttgactttggatgcgtcaaagcagggaaccacgtgggccttgaatggggagccagggatgtgggtgtcagcgaagaggatgttgatgttgtagtccccgggctcggtgggcacgtaggacacggaacatgtgccatccccattgtccaagcactcgagctgcgcctcacaggggccctccaccgtcaggcccaggccacctgtgccggcgcccttggtgtcgatggtgaagcgggcgggggagcccgcactgcctccctgcagccccggcccaaacgccttcaccttgctaggcttggtgggggccacagcttccagaggaaaggggctgccaggcacgggcacgccgtcataggtcacctccacctcatagggcccttcctcacggggcaggaagcgcaccacactgttgtcagcccccaggcctggctccaccttgcagggcaccgctgcacccgaggggcccacaatcttggatgccactttgccttgaccaccagcaccctttgatttgactgtgaactcctggtctttgccaacgtccaccttctctcccaggccagacaccttgatcttgctgaggtccaggcttggagatactgccactgagaaagggctcttagggatgggatcccctccataagtgacattgacgcctactggaccctgctggacaggcgtgtacttgactgtgtaggtgttgtcatggtggtcgatgatgtccacatctcgcactgcatcccccttggtgagtcctgagaactggacgtccagcttgcctttgccagcagctttggcatttactgtgaagtgggtgggcttgccaagctcgacaccagtgcgactgaggccagggccctcggccttcaccttactggcgtcatgagagggctccaccttgactcggatggggctggtgggcgtggcctggtcagcaaagaggaccataatggtgtagctgccagccccccggggcgtgtacttgaccgtgaaggtgtcattgtcattgcggatgatgtcgaagtcgatgtcagcttcggcggggcctaccactccaggggcacacttgatgccgatgctgacgtccccctggccagcctcggcgcagtccacagtgaagtaggtgggctcgtgggccttgagccctgtcttggctactccggggccgtatactttgaccttgttggggtggctgccagctcccacattcaccctgaaggggctgttggggatgctgacgcctccccaggacaccatggctgtgtgcttcaccggcttcctgggcacgtaggagcagctgtaagtgccattgccgttgtccttgaccaacgcctccacagggcagccttcattgtcctggacttggacccgaagtggggccttgccaccgtgcttggcatccactgtgaactctgctggcttgttgacggccacacctgtcttctccaatccaggcccacgtgccttcaccctgtctgggtggaagtcctggggcgcgtcacggatgtcagccatgaaggggctgaggcggatgtcttcgctgttgcacagcacgtgaacggcatactcgccagcctcctgcggccagtagcgcacatcacaggagccgtcgcccttgtcgtcacattcgatcttagcctgcgatggcccttccaccgagaagcccagcgtgcccacgtcgtccccgatagcctccaccacaaagtctgctgacttgccaacgacgccgccctccagcccagggccccaggcccgtaccttctgattgccacactcggtgcccaccttcacttcgaagggactgcgcccgatgttctgaccaccccacgtgatggtgacgatataggttccagggaccatggggtaatactcgaagccatacacgccatcccccaggtccttctgcttcacgcgctcctctcccttggggcccttcacggtgaccttcagctccccactgccagcgccctttgtgtacaccttgaagtcagctgtctccttcacccgcacacccttgggctggaggccccggccaaccgcccggcaggcactcgggttacaggcttggccaacagtgacagtgtaggggctgcgagggatgggcacgccggcaaacgtgacgtgcacggtgtggacgccctccatggtgggctggtagctgcagcggtatgtgctgtcgccccgggcctccagctgaggctctaccgtgcccttctgtcccatggggtcctggatcacaacctcgacctcgcccgtgccagctcctgccgtaaagatctcaaagtaggtggtcttgttggcgatgttgccactgggctccaggccgggaccttgggctgtcactttgctggcgtcaccctgtgacttatccacgtacacctcgaaggggctcttggcgatgtgctggccagcaaagagcacagtaaccttatgagtccccgtcacctcggggacgtaccagacggagaaggtgcggttcttgtcgttattggcggtcacttttgcctcctcctggtgtccggccgggtcctccacgtacaccagcacctctccctggccagcacttctggtctccacagtgaactctgcccgcttcttcaccatgttgcctgtgggctcgatgcctggcccgtaggcacgggctttcttcgggttcagtttggggcgcaagggagcccctggcttcagcttggccttggggaactgggacaggtaggtcatgacagagtgctcgtccacgttggggtccacaatctcctcgggggtgatcacctgggggatgcccagccagtcatccgcctgctgcatggcctctcgcgcattggtaacgggcttgctggcgtcccaagagtcccagtcaggacacaggcccggggcacagctgtccaccagggcgcccagggcccggccgctctgccagtcccggctgaagttggtgatgggcagctgcggcagcttgttctggatccagcccaggagcctctgcttgggggtctgcttcttggcctcctcatcctcctcctcgtcccacatgggcatggagatggagtagtgcaggatcagggtccagatgaggcccaggatcagcttcaggttcccgtccacgatggccttgctgtcgatggacaccagtttgatgctctcgcggtccaggaactcgagcgccaccgacacgttctcaagctgcatttggcggaaagtgggccgctggttgtgcttgcggtgcatcttcttctggctgagcacctccaacagcgcgataagccgcagcccgtcgctcaggtccgtctgcaggttggcgatgcgcttgctcacgcacttcaggtgctcgttgcaccagcgcgtgaaagtgttctgctggatcttcttccacggcgcgtcctccgccaggtccttctcggtggccggcatctcggcgtcccgcgtgtcgacgccgccgcccggagccgcgcctgctgcgctctggcccgcccgagagtgggagctactcattttgaggcgcgagaagccgggggggcggtgctgcagcctcggcgaggggacggccctttaattaaagtcgcaggcacctaggcgcgcgggaggcgaggcagggagcagaggttgcgctgctgttcctgagagcgaccggtgaccgatgaccgcggggtggcgcccggatcgc

SEQ ID NO: 51742 - DNA, 1278 bp, Homo sapiens
caataaacggttgcctgataaacagtattgcttgtactcagtttacagacttgagtgggaaaattgaaatagaaggaaagcagtgagaaggtgccttttttcttgtcagtttcctctcacctattgaactttgtataccaggataggttttgtaagatcatttgtaggcttgcaggagttggcctactttcagtgggtaggaatcactcatgtgtttttcctttgcagtctcgaagatatgactccaggaccactatattttctccagaaggtcgcttataccaagttgaatatgccatggaagctattggacatgcaggcacctgtttgggaattttagcaaatgatggtgttttgcttgcagcagagagacgcaacatccacaagcttcttgatgaagtctttttttctgaaaaaatttataaactcaatgaggacatggcttgcagtgtggcaggcataacttctgatgctaatgttctgactaatgaactaaggctcattgctcaaaggtatttattacagtatcaggagccaataccttgtgagcagttggttacagcgctgtgtgatatcaaacaagcttatacacaatttggaggaaaacgtccctttggtgtttcattgctgtacattggctgggataagcactatggctttcagctctatcagagtgaccctagtggaaattacgggggatggaaggccacatgcattggaaataatagcgctgcagctgtgtcaatgttgaaacaagactataaagaaggagaaatgaccttgaagtcagcacttgctttagctatcaaagtactaaataagaccatggatgttagtaaactctctgctgaaaaagtggaaattgcaacactaacaagagagaatggaaagacagtaatcagagttctcaaacaaaaagaagtggagcagttgatcaaaaaacatgaggaagaagaagccaaagctgagcgtgagaagaaagaaaaagaacagaaagaaaaggataaatagaatcagagattttattactcatttggggcaccatttcagtgtaaaagcagtcctactcttccacactaggaaggctttactttttttaactggtgcagtgggaaaataggacattacatactgaattgggtccttgtcatttctgtccaattgaatactttattgtaacgatgatggttacccttcatggacgtcttaatcttccacacacatcccctttttttggaataaaatttggaaaatggaaatgaaggaataaaaaaaaaa

SEQ ID NO: 51743 - DNA, 887 bp, Homo sapiens
gccacacgcagaacaacaacaacaagccccaccaccacccgacaaatgacaacaaccccagctgcacttccaacaacagtcgtgaccacacccgatctcacaaccggaacaccactccagatgacaaccattgccgtcttcacaacagcaaacacgtgcctttcactaaccccaaggcacccttccggaggaagccacaggtcttctgactcccgagccttctaaggaagggcccatcctcactgcagaatcagaaactgtcctccccagtgattcctggagtagtgctgagtctacttctgctgacactgtcctgctgacatccaaagagtccaaagtttgggatctcccatcaacatcccacgtgtcaatgtggaaaacgagtgattctgtgtcttctcctcagcctgggagcatctgatacagcagttcctgagcagaacaaaacaacaaaaacaggacagatggatggaatacccatgtcaatgaagaatgaaatgcccatctcccaactactgatgatcatcgccccctccttgggatttgtgctcttcgcattgtttgtggcgtttctcctgagagggaaactcatggaaacctattgttcgcagaaacacacaaggctagactacattggagatagtaaaaatgtcctcaatgacgtgcagcatggaagggaagacgaagacggcctttttaccctctaacaacgcagtagcatgttagattgaggatgggggcatgacactccagtgtcaaaataagtcttagtagatttccttgtttcataaaaaagactcacttattccatggatgtcattgatccaggcttgctttagtttcatgaatgaagggtactttagagaccacaacttctctgtcaaaaa

SEQ ID NO: 51744 - DNA, 161 bp, Homo sapiens
tggccaatggagagggctgcactcacaccgcaacataggactctctctcccttaagaaggcccccttagggtctgggctgccgcccccatcaccctaaaaccagccaaggtagctgaggccccagggcagacaatttcaccagcaggaggaggaggagtcc

SEQ ID NO: 51745 - DNA, 150 bp, Homo sapiens
ttgaagacccaaaataatgtttcctaagatgatttaatatcatggaaagatgctcacaacatattcttttgtgaagaatccagatggaaaaagtatatatgagctgtaatagcatgtttaggtagaattcacataaaaatcactatttca

SEQ ID NO: 51746 - DNA, 429 bp, Homo sapiens
attaaatcaaatccaactttattttctttcttacaaaaataccagttatacctttgtgaaatgaactggcattactatttcagttcaataacagctaatcctaaaaccaccctttctcctagccagtagttcctctagatactggtctctgaaaatgcatttgttaaaaacaaaacaaaactaacacataagaaccttccctttgtgttgtgaaacaaccacataatctccacaaccttagtggatgactgcttgctatgataattcctcgaagacccaattaggaagattttcatcatcagttaaagagagaccacgggaggaaaaaaatatcctcctgttgggcagtataatttgttttgtttgtttatctagggggatcctcaggatgctttggtgctaggggttaatccgggggttaatccgtcg

SEQ ID NO: 51747 - DNA, 233 bp, Homo sapiens
aggcccaaggatcctctgcttggcttcttaacctgctgggattacaagcatgagacaccattcctggcctagaagcctatttttaaagaaactacaatctcccatgggggactgtttccctgcctcttttgtggcagtcccatgggaacttgcctacagcaagaggcctaagattgaatctttttggggaaaagtcattctaggatgaaaatcctatgttaaggccgggcgca

SEQ ID NO: 51748 - DNA, 217 bp, Homo sapiens
cccacgcgtccgaaaatatttacgtaatgttaaaatagcagaattaaaactaattctaaaaaataagagtaaatagttctttttatcagctaaaaatgtagggcctactatcaatagggttacagatctacctgcctgatttaaaatcatgcaattcttaaacaattatttgagctatttgaattatttcagattacacacataaagtgtgacttca

SEQ ID NO: 51749 - DNA, 631 bp, Homo sapiens
gggcgcagcgttcattcagcaccagaggattcacaccggggagaagccctacagatgtgccgcgtgtgggaaggccttcagccagagtgcaaaccatcagaggactcacactggggagaaaccctacaagtgcagcgagtgtgggaaggccttcagccagagtaccaatctcataatccaccaaaagacccacaccggggagaagccatataaatgtaatgaatgtgggaaattcttcagtgagagctcagccctcattcggcatcatataatccacaccggagaaaaaccttatgagtgtaatgagtgtggtaaagcgtttaaccagagctcatcccttagtcagcatcagagaatccacacaggcgtgaaaccctacgaatgcagcgagtgtgggaaggccttccggtgcagctctgccttcgttagacatcagagactccacgccggagagtaactaggaacatggtagaagtggagagagtcccggacatgccgactcaggacaggtgggtgaggatctgagaaatgctaaaggcttgaaagcatctgaagacatctaacttagagtctgcagcccagagccacatgcaaaacaccttcaataaacagccactatttcacatgctgt

SEQ ID NO: 51750 - DNA, 757 bp, Homo sapiens
ttttttttttttttgggtggtgaaggagtggatttattggagcacaaggcagtgaagcagcaaaagtgaaagtacattccacagggtgggagtgggctagagcaagtggctcaagagccctggtagcaaaatcttctggggcttaagtaccctgtagaggtttcttgatggttacaccctatgtaaatgaaagactgactcacagccaattagagactgaggtgaattggctcacagccaatccaagactggtgtggtttgactccttatgcaaatgaatgtcctggaatgaaccaatcattggccagagtgcaggtctggcccatggccaatcagaggctgatgtggtttgataccttatgcaaatgaaggtcctggaatggaccaatcacaggccagtgttcagactcttcagtgccagggagtgtgtccaagtcatccttagatccctatctctgtaccctattctcctgcctcagtcttgtgtgagattttgcaccctttgaccatcatcatcatctccccattcccccaatctctccctcaactacttctaaccactattcattaatctcttgtattatttaggtgtaaggaagaacagaaggatccaagtgtgagaaagcccaccctgagtctctcagaggtgattatgactgtgtgagcatgggtgagacaaatcctctgttgttgttgatggctacttgaagtgcttcctccattctttccattgtagaatacttagggagggagagaa

SEQ ID NO: 51751 - DNA, 265 bp, Homo sapiens
agcttcaataccctgataaatttccttagtatgaatttttttaattataccaaataacttcaagagaggaaaaaataaaacattttgatgacctctaaaatgtagtcatcaactgctaaatgtttaaaaatagtgttttatcatcatcagaaagacttcatgttaatacaaatacatgacatacaaatatacatctaaatatacattatatttataacataaatatacatctaaatatacatcatatttataatataaatataag

SEQ ID NO: 51752 - DNA, 1249 bp, Homo sapiens
  misc_feature (1)...(1249): n = a,t,c or g
cgcttaattaaagatcttttttttttttttttttagcaaatcattttagattttataattttttttttggaatttcacacagaatgcatgtttcacctctgtaacctaaaaatgtttacgataatttaaactaaattcatgccattttatagaacacatagtattgcatacaggcaattttccactatctgtgcccctggggagaggcagagcacaggatgacttacaacagaattctaaagctcttttaatgctaatccaaatcactgggtatttgacttaagatgcattttgttttttaactccgtcactggcattttgcttaggggttatattaaattattttgtggggccccaaaggcttgacaggatgtcaggggctaagggtgcttggggattaaaagtgggaaattaaattaccagtaattgaaagttgacctttaaaatgtgcttacaaacccatcatcaggaggattctctaagaactgtatacaagaggctgctgtttccttccaatggattttgaccagccaccaagattccagccaaagtaaggaaggatgctagcagacatatggttaaagtaagatacgatgcatgaattgctgtcaatagcatggatgagaaatccggcacatatgatttcacttctgatgtactgtggagacggggggaccgatggcaaaatgaccgacttcactgccactgtgtaagtgttaccatctttgaggggttttcttcgtgatacgagtactaccaagtctttgggtttgtcatcattcagtataggacaggtgatgtgatacagctgatcatcttcactcaccccagtctatgacttcacaggacacaaaatgggggtccccacaaaggtcgctttgtaaagtcagacaagagacgataagccaaatgtgctggacttcccacgtgcttttcaacccaaacagataaaacatcatgctcttccagagtatatatttttatcttttccacagtgctggtaacctcccaaccccttttggctgccagttttttgagggcctccacattgctgtcactcagggatgcctgcttgctgatatcccagtgtatgcaaagtggaacctcttctttgtgggaaataacatattttctgcctaggcgaattcgcttgcgtgcaatagctccccgatagcgtctgaaatcatcctttgaaatgggttggattctgggaaacgtgatgagatttcccttctngtgcccgaaattc

SEQ ID NO: 51753 - DNA, 50 bp, Homo sapiens
ggggggtgggggatgcggttcaagcgattctcttgtgtcaacctcccgag

SEQ ID NO: 51754 - DNA, 391 bp, Homo sapiens
attcggcacagaggggattacaagcactatttaaatcagtgtctgtaactcagttttggataaatgcaaagacaagttacccagaactccatgaaagggcaatgaaatttttattacccttttcaactgtttatttatgtgatgctgccttttcagctttgactgagtcaaaacaaaaaaatctgttgggttctggccctgccctaagacttgcagtcacatctttaattccaaggatagaaaaattagtgaaggagaaagagtagcaatatgcacattgcttaacagtgaagtcaataatcctgtgttaagtttgtataagtatcctaaaagataatttcctaatgtggatttgtgttttcagtgattaaatgttttaataatttttaaa

SEQ ID NO: 51755 - DNA, 347 bp, Homo sapiens
cgggtggtgagaatgaagagctagagtcattcttgaccagttatgagggcttcttaggtatagctctgtattcagtcattgaaatgaacctgtgtgactccaaatactcagacaaaaatacaaaactcagcatgtttgcatctctcaaatatgcagatgcttgatgtttactatgattttaactaaaatatgtaggtgattagatgctcttaaagtttccactgaaggatatatggcccaaatcatttctttgcacataagttccttatcatgtgtttggctcatgtggctacaataaatttttctttgttgaaaagagaagaggttccagcctttttaaaacatgc

SEQ ID NO: 51756 - DNA, 879 bp, Homo sapiens
ggttctcaataccgggagaggcacagagctatttcagccacatgaaaagcatcggaattgagatcgcagctcagaggacaccgggcgccccttccaccttccaaggagctttgtattcttgcatctggctgcctgggacttcccttaggcagtaaacaaatacataaagcagggataagactgcatgaatatgtcgaaacagccagtttccaatgtttagagccatccaggcaaatatcaatattccaatgggggcctttcggccaggagcaggtcaaccccccagaagaaaagaatgtactcctgaagtggaggagggtgttcctcccacctcggatgaggagaagaagccaattccaggagcgaagaaacttccaggacctgcagtcaatctatcggaaatccagaatattaaaagtgaactaaaatatgtccccaaagctgaacagtagtaggaagaaaaaaggattgatgtgaagaaataaagaggcagaagatggattcaatagctcactaaaattttatatatttgtatgatgattgtgaacctcctgaatgcctgagactctagcagaaatggcctgtttgtacatttatatctcttccttctagttggctgtatttcttactttatcttcatttttggcacctcacagaacaattagcccataaattcaacacctggagggtgtggttttgaggagggatatgattttatggagaatgatatggcaatgtgcctaacgattttgatgaaaagtttcccaagctacttcctacagtattttggtcaatatttggaatgcgttttagttcttcaccttttaaattatgtcactaaactttgtatgagttcaaataaatatttgactaaatgta

SEQ ID NO: 51757 - DNA, 724 bp, Homo sapiens
tcttacatcttctcttatgaatattcaacattttttggaagatgaaactgttgcaacagtaatgccaatgaagatacaagtttctaacacgaaaataaatttaaaagatgatagtccccggagtagtacagtatcccttgaaccagctcctgtaactgtacatattgatcatcttgtggtagagagaagtgacgatggctcttttcatatcagagattctcacatgcttaacactggaaatgatttgaaagaaaatgtcaaaagcgattcagtgctgctgaccagtggaaagtatgatctgaagaaacaacgcagtgtcacgcaagccactcagacaagcccaggggttccttggccttctcagtcagctaactttcctgagttctcctttgacttcactagggaacagctcatggaagagaatgaatctcttaaacaggaactggctaaagctaaaatggctcttgcagaggctcacttggaaaaagatgctcttcttcatcatataaagaagatgacagttgaatagcaggagtggcagtcaaaactgaaattatagctctggagtaggaaggttatatttataatgtggatgttaccagttaggggaagacttttattttcatgaaaagacaataaaacaaaatggaatgtgatgaagtggtgactatttcaaagccagtttagaaagtattagtacgggcattacaatcttttggttgtt

SEQ ID NO: 51758 - DNA, 219 bp, Homo sapiens
ccaagagcaggccacctgcctttttctgtaccctaaagaaatccttatcattcaactaaactgaatcattcattatttaaaaaacaaaaaacaaaaactgaaaactaactctactttcgaattttataattgaggccaaaaatatataatcacttcagaacaaggtatcattaggttactactaatgggtataaaaagtagccttgatagatagcaaag

SEQ ID NO: 51759 - DNA, 5171 bp, Homo sapiens
  misc_feature (1)...(5171): n = a,t,c or g
ccaagatcatgccattgcactaaactccgccttaaaaaaaaaaaaaaaagattcccacatctttactagtttgcagaaataagatcctagcatatgcagtgtgtaggaaccaccttggtttagccacgtctctgtgactgggggccactgtggtgacccccagctccccggacagagtcaagagctcaccagcctgcaaaggttttcacggcccccagccagactcgggggcttcctcttgccctgctacttcctgggagctctgagggcaggaaatggcgccactcagctcctggcctaacagcttggggaccacaaatgcaaaggaaaccaccctcccctcccacctcctcctctgcacccttgagttctcaggctcacattcccaccacccacctctgagcccagccctccctagcatcaccacttccatcccattcctcagccaagagccaggaatcctgattccagatcccacgcttccctgcctccctcaggtgagccccagacccccaggcaccccgctggcccctgaaggagcaggtgatggtgctgtcttcgcccagcagctgtgggagcaggcgggtggggcaggatggaggggtgggtggggtgggtggagccagggcccacttcctttccccttggggccctgtccttcccagtcttgccccagcctcgggaggtggtggagtgacctggccccagtgctgcgtccttatcagccgagccggtaagagggtgagacttggtggggtaggggcctcagtgggcctgggaatgtgcctgtggcttgaaaagactctgacaggttatgatgggaagagattgggagccattgggctgcacagggtcagggaaggccaggaggggctggtcactgctggaatctaagctgctgaggctggagggagcctcaggatggggctgatgggggagctgccagcatctgttcctctgtcatttctgataacagtaaaagccagcatggaaaaaaccgttaaaccgcaggttgggcctggccgttggcagggaagtgggcagaggggaggcccggccaggtcctccggcaactcccgcgtgttctgcttctccggctgcccacctgcaggtcccagctcttgctcctgcctgtttgcctggaaatggccacgcttctccttctccttggggtgctggtggtaagcccagacgctctggggagcacaacagcagtgcagacacccacctccggagagcctttggtctctactagcgagcccctgagctcaaagatgtacaccacttcaataacaagtgaccctaaggccgacagcactggggaccagacctcagccctacctccctcaacttccatcaatgagggatcccctctttggacttccattggtgccagcactggttcccctttacctgagccaacaacctaccaggaagtttccatcaagatgtcatcagtgccccaggaaacccctcatgcaaccagtcatcctgctgttcccataacagcaaactctctaggatcccacaccgtgacaggtggaaccataacaacgaactctccagaaacctccagtaggaccagtggagcccctgttaccacggcagctagctctctggagacctccagaggcacctctggaccccctcttaccatggcaactgtctctctggagacttccaaaggcacctctggaccccctgttaccatggcaactgactctctggagacctccactgggaccactggaccccctgttaccatgacaactggctctctggagccctccagcggggccagtggaccccaggtctctagcgtaaaactatctacaatgatgtctccaacgacctccaccaacgcaagcactgtgcccttccggaacccagatgagaactcacgaggcatgctgccagtggctgtgcttgtggccctgctggcggtcatagtcctcgtggctctgctcctgctgtggcgccggcggcagaagcggcggactggggccctcgtgctgagcagaggcggcaagcgtaacggggtggtggacgcctgggctgggccagcccaggtccctgaggagggggccgtgacagtgaccgtgggagggtccgggggcgacaagggctctgggttccccgatggggaggggtctagccgtcggcccacgctcaccactttctttggcagacggaagtctcgccagggctccctggcgatggaggagctgaagtctgggtcaggccccagcctcaaaggggaggaggagccactggtggccagtgaggatggggctgtggacgccccagctcctgatgagcccgaagggggagacggggctgccccttaagtgtcggtgaatagtgaggctggaggccggaatctcagccagcctccagcaccttccctctcaccatcccactgccccctcgctcccatgtttccacccggcaccctgatcctcacccgaatctcnnnnnnnnnnnnnnnnnnnnnnnnnnnnnnnnnnnnnnnnnnnnnnnnnnnnnnnnnnnnnnnnnnnnnnnnnnnnnnnnnnnnnnnnnnnnnnnnnnnnnnnnnnnnnnnnnnnnnnnnnnnnnnnnnnnnnnnnnnnnnnnnnnnnnnnnnnnnnnnnnnnnnnnnnnnnnnnnnnnnnnnnnnnnnnnnnnnnnnnnnnnnnnnnnnnnnnnnnnnnnnnnnnnnnnnnnnnnnnnnnnnnnnnnnnnnnnnnnnnnnnnnnnnnnnnnnnnnnnnnnnnnnnnnnnnnnnnnnnntcctcacccacctcttcactctgaatcctcatgaggcttctcagccctggatttcctgctgccatcctcacccagcacccacaactagcgcctgggcagggcagggctggcacctctcaacgtctgtggactgaatgaataaaccctcctcatccacccctatttatctccatcaccatttccccctctttcttgttcctggaaacggctgctgagtctccatcggccaaacttatctgccctgtgatttctttgacaattctccttttcccccagaacccaccctgggttgaccagagtctgggaagaaggacaagagaacccggcaaactccctcctaggattaactttgtaaagcacccttgccctgtagctgcaagggctgtggaacctgggcagcccgcaaccacctttagctctgggccccccaggccagcctggagcatggctgggtggggccaccagcccatgctctcaggcgggcctgtgatctttcccagggcacatggactgtaggctggccctggcccacaccaccacactctccccagccatggacagaggcagccagaggcctcacggtttctcctccgagtttctggctgggtgtagttctcagaaaccccagtgcctgcgtgtgtccactcgtgggtgtggtttgtgtgcaagagctgaggatttggcgatgcttgggaggggtagttgtgggtacagacggtgtgggggtgggaagtggtgcagagactgaagagggtcaacctgggcatgggggacacagggactgctgagaacgtgcgtgtcatctttgctctgatggggtggacatagcagaaaatctaactctgtctgtagccccatacagaatgccagggtgannnnnnnnnnnnnnnnnnnnnnnnnnnnnnnnnnnnnnnnnnnnnnnnnnnnnnnnnnnnnnnnnnnnnnnnnnnnnnnnnnnnnnnnnnnnnnnnnnnnnnnnnnnnnnnnnnnnnnnnnnnnnnnnnnnnnnnnnnnnnnnnnnnnnnnnnnnnnnnnnnnnnnngcttcatggaaagatcgtatgtgtgacccaaatatgagttcttcagctcagccatggtaatcccttccttgaagtctccatttctgcagtacacatgcatgtgcgctctctctctctctctcnnnnnnnnnnnnnnnnnnnnnnnnnnnnnnnngcgcgcgcgcgcgcgcgcgcgcgctctcctgcgaacagaggcagggggagaggggtttgccctggtctcggggactggtctggctggcgcttccccactgcacgtttccaggtttagtttgtctgtgtctcctcttccatcccaggggctgagccccttccatcctccaagaggaaccagtgagagtgagtgaaggaggggcctggagccagggacttcccctgtggggcctgggtggagaggggagaactcaatggtgctgcctttgagaccagcccagctacagcccaggagcacacatgggccagggcagttggtatttcccgaggacaaagaggaaattttcaaagaggaagttgttgagttagagcttgcggtggctgagagcagacaggttgacctgcaaaaaaagacaggggaggcatgtgagtgtgacagccctgctctgtggcctgggcaggagatgggggaaagggtcaggtgggggatgggctcgtgcagtgggagaggagacggagggagggagcgggaaggggcttgcttagtgggtgggaagagctgagctcggatggaaccagcttctaccagccaggctgggcacccactgggctgcatctggtggccttttctgattgctatttggactcactgcagctgcagaatgacagaggccatgtccaaaatcccttagagacactgttgtcttagagttgttaaaataagagcccccatatcaggtttagaaaatactgtcaccgaacgaacgtcgctgtcctcagctccacctccctttcctttgacagatatggttgttttctaagccaggactggttttagtcaggtcctgggcgaatcctgaaaaaaagaggtagtacgggtaaggaaggcacccaacagggctttcacaatccagaaaatatcaaaatataagtgttaaaagagaggcacaggccgggtgcggtggctcnnnnnnnnnnnnnnnnnnnnnnnnnnnnnnnnnnnnnnnnnnnnnnnnnnnnnnnnnnnnnnnnnnnnnnnnnnnnnntcctcacccacctcttcactctgaatcctcatgaggcttctcagccctggatttcctgctgcatcctcacccagcacccacaactagcgcctggcagggcanggctggcacctctcaacgtctgnggactgaatgaataaaccctcctcatccacccc

SEQ ID NO: 51760 - DNA, 329 bp, Homo sapiens
gaatgtcttaagccaacactgatacagggggactggcattcattttataagcaaggaaaatgaagttcaaagagaataagagaattgcccaatgtgagatggagggtgagtgccggagctgagactctaacccaggtgccctgactgcagcttgttttctcgcctggtcttcttacagttaacagttgatttctccagactttctcatgttgaagagagtataatcctgtaaaagttgacttgtgttcaggggtttggccacaaggcatagattttttggagcaagtaaatactatatgttggaataaaatgagagagccccacttata

SEQ ID NO: 51761 - DNA, 400 bp, Homo sapiens
cgaaaatcaagttctgcctagatgttttgatatttatttttcaagacagattttcttttttctttaaaaaaaatctaacaggtagttccattagccagtgttattgtgaaagaatctctgacagaagaagatgtgttaaactgtcaaaaaacaatatacaacttagttgatatggaaagaaaaaatgatcctctacctatttccacagttggtacaagaggaaagggccctaaaagagatgaacaataccgtatcatgtggaatgaattagaaacccttgtcagagcccatatcaacaactcagagaaacatcaaagagtcttggaatgtctgatggcatgcaggagcaaacccccagaagaggaagaacgaaagaaacgaggaagaaagagggaagaca

SEQ ID NO: 51762 - DNA, 430 bp, Homo sapiens
gttaggtaagtactgaaagtggatgattggctttggcggttagtttgtcttgtgtctgagagccatttgtatagtggcaaatgttagatttctggaggctgaggaatggaagttaggaaatgcagacaattaaaattcttacacctttacattttgctattttttcctcagtgttttcttttgttagcacttctggactggtttattatttgctttttccttacaatgacattgttattctatagcattctgttgaagatgtaattacattttctcaatctgtgatgtcaggttgctttttgaagtataaaggtttaagaaatacataattacatatgatttttaagtgatcttctcggcttcagttgattttttccatatataaatttaaggtagattcattttacatttggtatcatgttaaaatgct

SEQ ID NO: 51763 - DNA, 1590 bp, Homo sapiens
  misc_feature (1)...(1590): n = a,t,c or g
tttttttttttttacagcatccagagtacttttattgccagaatccagatacagcctgctcagagccccatgtggggccactcaggaacaaggggagacagatgccaggcatgtatgcaacagagaaaatccagctgcacagaaaccctgtgggagagcagctcagtccagcctgaaggcgtctttgggaaccccacctagaggctgtacccttttctcggcctgtggccagtcacccacttagagcctactgccatgaaggcagccctgactctccatgcctgctgccacagggagatccatggagcaccctggggcagacagaaagcccctaggggggcctcaggggacccctggctctctcagggtcccattcaagtttctgggctagtcccagcactaagctgggtgctggccagggtggataggagccccatcctcagccctgtgctgacccacttggtactagtgagaccctagggcagggtggcagtgtgatggtggggttagcaagaggtgcagctcagggaagctgcgagcagccttggctgcttccttggattccctttctccataggttcccagaaggccatggctccaacccctgctctcatccttggaaccacagtcccagggtgaagggaggcagcttcagtcctggggccaatagcacatccgaggaaatcagggcccctggaacacagcctgcgggactgggggcacatctgctgcccaatccagagcttgaatgctcctggtggtaagggaggtaggagtggagtgagatgtcccagggcctgggaaccacgaagaacgcaacaaactgcccctgcctgcaggagctactaggctcgcccaggaagccagtcaggctggccaccagctaagcccacagggaagccagcagctctagctacccatgaccagtggcaggcctatctgtggctggtgtgtgggaagggtcacccgaggggccaggagccgatccctgggacctctgggtacaggaccacagcccagtaacatccctcataggaaggctgcggggccagggcccagtaggcaagtatgaaaagcccacaggaataggggggacacatggccccaggcagggactgggaccagggcccagccagtctaccctgtggagccagtcctaaggtcacagcagttccaccatcagcagcattcttgccatccagtgtcccttgagtctagactctcatttcttccttcttcactgccacagagaaaggataacaaacagcacttccccatggcagatgcttcacagtccaagactcggggccttgaatggtgagtcacaaactttgcaaaacgcgtgggccatgacagccccagaggccaacaacaggtccacggccgaaccacaggagtcctgtggcacaggagtcagggcccaaggagcacacgtttcagataggccagggtggtggcgttggccagcatctcgatgtgcacgctgcctggcagctcctgcagcaacacttggtgctcntggcgctctgccaggcctggcactgcagggcactcttcaagttcacagtaccatcgccgtcaccaaagcag

SEQ ID NO: 51764 - DNA, 305 bp, Homo sapiens
gtttaaaaagaggactatttcattgcgttttacagagtcaatttcttctatataaaattttgggtttttatgttttaagatatcagagacaataattttctttttggaaaactatgtatttaggtctgcactcaatttctaaaataactgtctaattgttaagtcccattcaaatgagcttcatggggtccttgagatgtttccagttatgaagtttgtagcatgtctaatacaggcaatcctgttctattgtgctttgctttattgtgctttgtacatattggcgtttttaccaattggagggg

SEQ ID NO: 51765 - DNA, 330 bp, Homo sapiens
gcatcccagactattgggactcctctgccctgccagacccaggctttcagaagatcacccttagttcttcctcggaagagtatcagaaggtctggaacctctttaaccgcacgctgcctttctactttgttcagaagattgagcgagtacagaacctggccctctgggaagtctaccagtggcaaaaaggacagatgcagaagcagaacggagggaaggccgtggacgagcggcagctgttccacggcaccagcgccatttttgtggacgccatctgccagcagaactttgactggcgggtctgtggtgttcatggcacttcctacggca

SEQ ID NO: 51766 - DNA, 515 bp, Homo sapiens
ctccctcccacctgcttccatgccatatgccgatcattacagtacattttcccctcgagatcgaatgaattcttctccttaccagcctcctcctccgcagccgtatggaccagttcctccagtaccttctggaatgtatgctcctgtgtacgacagcaggcgcatctggcgcccacctatgtaccaacgagatgacattattagaagcaattctttacctccaatggatgtgatgcactcatctgtctatcagacatctttgcgggaaagatataactcattagatggatattattcggtggcttgtcagccaccaagtgagccaaggacaactgtgcctttaccaagggaaccttgtggtcatttgaagaccagttgcgaggagcagataagaagaaagccagatcagtgggcacagtaccacactcagaaagcacctcttgtctcttcaactcttcctgtggcaacacagtcaccaacaccaccttctacactgaacagaggagaagggtcga

SEQ ID NO: 51767 - DNA, 377 bp, Homo sapiens
agcccgagagcggagaggcgccgctgtagttaactcctccctgcccgccgcgccgaccctccccaggaacccccagggagccagcatgaagcgagctcaccccgagtacagctcctcggacagcgagctggacgagaccatcgaggtggagaaggagagtgcggacgagaatggaaacttgagttcggctctaggttccatgtccccaactacatcttcccagattttggccagaaaaagacggagaggaataattgagaagcgccgacgagaccggatcaataacagtttgtcttgagctgagaaggctggtacccagttgcttttgagaagcagggattttgttaagctaggaaaaagccgagattcctgcagat

SEQ ID NO: 51768 - DNA, 259 bp, Homo sapiens
ccacgacacctggccctgggctctacttttcataaagtttcacattttagactttaaatccaaacccagaaactatctcaacaagagttaataaatagactcaactctgggaatttttaagattacttttttgatacgtaaagtggcatagtcacacataggaaggcaaggaatttttttttatttatactaaaaaataactaaaaaggcactatttccctaacatttttgaaactttgactttaaaaggcacttttta

SEQ ID NO: 51769 - DNA, 575 bp, Homo sapiens
agaaaatattgttgttgtcataatgagtacagcatgaaaggcttcctctacaagacactagtcaaagagttgagagctgcggtttctaatctttgtccattactcccttactccctatgagactgtggacctgtcacttggcctctctggtcttcagttttctcaccagtaaaacaaggaacttgaaccaaatgacctctagtgttccccttgggtttaaatgtctataaatgttcaatgactagaatgtattgcgtttttctttattctttttgctttgagaaaagagaatgtgatttaagagtaataatttgaataccaattatccacattaaaattgtgtcctctatgtgtaaggcatagcacatttagcacacatacataagcacactaagcaccttacaaatatcctcatttattctttacataatcttttgaaattgattatgtaatacacactgtttttcaacaattggtgacttccagctgtttaaaacaaactacagtatggtgcttgagtactgacttaggaggtcagcattggtttcactaggagcttctcaaagcacgctgcc

SEQ ID NO: 51770 - DNA, 29255 bp, Homo sapiens
  misc_feature (1)...(29255): n = a,t,c or g
atgggaggatgggagggtgagggaatgggggatgggtatgtaaatgggctctgtaattaaagaatttaaattaaaataaatgatatatttaaaaaagatacaaatggttttacctatcaggaaaccactatcatatgaactggaaacacgcaaaatacatcagagggttgccatgcaaagcttggagaacatcagttctagtgtgacatttgttatttaaacacgagttttctgctgtacaggattagaattctgtaggtttggttttttttgttttgttttcttttgttttaagtcgaatgtgttgtatgtgctgtgttctctagtaagagtcatttccatgctcctgagacacctgttttgatgtcggaagaatgtaggtttttgttcatgccatgaacagctctgctcactcagcactccttggccctgagtgagggcaggaacctttaaacatgacctgcccttcctggagttctctgctcttgtcttctctcttcctctggccacactccttgatggactttcctgaagaagatttctcttgctgttcacttgcttggccctgtgcctgaacctggaaacaccccagttggtgtcacactcaattatactatctgccactctctggtattgcttttgtctttctgactgttccctccaacttaaaattcaagggttggcattagagagcctggtgtgacatacacaggaaggctggggacctcttttcagctcacatctggaactagaatttgagggaaatttgctgatttttctttcttggccttttgtatgacttttccagttttctctcctagagtcagttaatataatgcaaggacatgagatctgaaccttgagatccagacctacaaagcacagtcagtatttgtaacatttggctcttgatggacactatacaaaaaccaagtgttgtgggctggagctacggctctgcaattgagagcactttctgctcttgcagaggacccacatttggttcccagcacccacatggcagctcacaatgatctataactccagcaccaggggatcagatcagggagcttgaagctgaggggggcacactttacctcccaggccaggacaatgaccacttccttccccaccccacccccaggctactcttagccctagaaaattctaaacaagctgctcagctggcggcggagaggcagcccaacaagctggctcttgctagggaggcctggggggtcctggggagaggaacacggggtgggtggggggcgggcagccaggacctcaggcctgaggcctttggggaagggtctgtgcacctgccaggcaccagggggcagccttgccttgttcccgctccagtcccctcaagtccgaagcccctacccactctcacgccaggcaggggtgggggccgccggggtcatttacccgggccccttctctgccttgatgacaaagtcgaggcttgctcatcagccaggcaggctcccctctgcccactgtggagacacagaggcctgtcacctgaagagctggtcccggcctccagcttccagggtagccgggaagctgtagcccccagtgggcagcggtggagagagctcaaggaaggagggagcaccgggaggagacggctgcagcctgccaggagcggggagaaagggagagaaggggaggcggagggctgagggggcccgggggacgtcttcccagggctgggaggggccggccgggaagcctgggctgcactaggagccggcgaccctggggcgaggggcggcccggagccctgcgggaggagctggcggccgccccaggtagcaaccatcctgcctcccgctggagcggcgtctcctccccgggaggagggcagggaggaggtgggcggagtgtgacgaggagggcgggagggagggatgcgggagggggagggggaggggggccggccggccgtgggggtggggcgatagtgacatcaccccggagtcggtttttaagcggcggccggccggggacggggaagagagggatagtcggagcgaggtggcgagtcgctgagcccgccgcggccccgagagcggctgcagccgccgccgccgggaaggagagggcgaggcgcgcccgagccgccgccgccgccgccaccgccgccgccgccaccaccgccaccggagtcgcgggccagccgggcagcctccgcgggccccggccggggcggggggcgcgggccacaggcccctgctccggccgccgcttgcagaccgcgggcgccgatgtcgcccgcgccccgctaggctgagcctcgggtcgggcgaggagccgccgcagccgccgccgcccgagccgcgggcaggagcctcgggagccgccgccgccgccgccgccgcccggccgggccccgccgccgcccgcgcgcccccgggcccccgacacacatgagattcttcaggctcactttcaagtgcttcgtggactgcttctgactgcgccgcccgcgccccgcaccccgccgcccgcccgccgccccgtcccccggcccggccgccccccggcccccggccggcccgcgccctcggggccctccccggtgccgccggtgccccccgcctgaccgccgccccccgtgaggcgccgcgaccccggcccggccgtgcggcccgccggggccatggcgaagaagagcgccgagaacggcatctatagcgtgtccggcgacgagaagaagggccccctcatcgcgcccgggcccgacggggccccggccaagggcgacggccccgtgggcctggggacacccggcggccgcctggccgtgccgccgcgcgagacctggacgcgccagatggacttcatcatgtcgtgcgtgggcttcgccgtgggcttgggcaacgtgtggcgcttcccctacctgtgctacaagaacggcggaggtgagttcccccgcccgccgcggcctcctcccccagcaggccgccggcccccgcccgacccccggagccgccgcggaggggtgaagtccgggcaacgggtggcccccgggcacgcgggggtcggggccgcccctcgtccgccgctgccgctcggtggccgggccgggcgcctccacccccctcgcagtcatgtgcctggcatggtggggggagggggccggcgatgcccgcgaggctgccccccagactcccgggctgggaggagcgattggccgccgaggtgggaaagcaggcctgcgccttggggtctccgcgaggtaaggagccctggctgcccccacgggtcgggcacacaagcggcacattgtgtgggccccccacgtgtgcacacacacgaacacacacacacacaatgggccactctgtccctccccctgccctcccctcccctcgcggccctcccgcccctcccctctggcccgggcctggaacactgggtgcccgagccaggcttgggaagcctgcggcctggcccgcctggcgccgccactggacacactgcatgcacgtcccatgcccgcccgcccgcccgcccgcccgggcccagcttagcaacagcgatgggcacgcgtgtgtcctgtgactacaaaacagcactggggttgctggaagccgaagtgacccggtgatgggtgggaaacagaggtccagagcaaaggcctttgcccaaggtcaggagaaggatgctgggacctggagtcaggcaagttgcagccaagctcagcctctgagtagtggagcgagcccagccagggcaagggtaggaggcccagagaggagaagggggtagtggcacccagctctccctgcccttctgccacccccaccccagcctgctggcctcaggagataggcctgtgtcacgccctgcctatctcctgcagagcctgactccctggccttgctaaggccggcctggcccctcttccgcacctgtatccctctgtccttgcacatcgccatcccaccagcaggggactgtgacccacccaccctctgccttagacctcacacttgcaggcaagcgtccaagggcaggacagtcgcgctccctgcctttggatgagccccccaggcctgatcacccagccttggcacacatgcacacatgcacgtgccctcactgtgctgcctgaaacagggaattgcagcactagggacagcccgcgtgtctgagcgtgtgtgtcctccatggccatcgccccaagtgaccgtgggggtggaagccctgggggcctagggcccctctgccacccagggaatagggctccaatggctcaggggctactgtagcccctcttcaacacactcaacccaccccctcaagactccacctggggcctgagtcagtggccacccctacactgactcacccagtcggaagttgtgatggggcctttggagtctgggctggcccgctgggcctgggcagcctggctgggggccaccctgagtccacgctgtgcctccacccccaggtgtgttccttattccctacgtcctgatcgccctggttggaggaatccccatcttcttcttagagatctcgctgggccagttcatgaaggccggcagcatcaatgtctggaacatctgtcccctgttcaaaggtgagcagcccttggccagcctcagggactgcccccttctcccagctggctcccacttgagaaatcttttcctgtcgtgagcaccaggcctggggccacgtgatggcgtcccagtctcgaggggggagcctggaggagatgttcaggacgcacagcgaacttggggaagcggggactagagggggcataggcagctccacaaggcaaggacaggccaggcatagccgggctggggacgggacctgcccagcagcacccttggctctctaggtaggtcctactgttactatccccaaggacgctggggcacagacaggtggagcgacgtactgaggttgcccactgcaggggcgactgtctccaacactacctcaggcgactagaaaccccccccccccaccaccaccatcaacaccagctgctgaggactggaggctactgggtggccaggcagaggcttggacctcctggaaccgccatggtggcagtgggacccacagaaggggccaggtgtatgaggctggagactccacagcacttggtcagatggggacaggaggagaggggctcgctctgccttgggtctagggggcggctggaggagaggagacaggctggggagtcagcgcagtgttggggctcacacaagggggagcccaggggagtcaggagcaccacaaacaaggctccaggaggacagatggtgggagcacggccagcctgggtggggacataaaggggtggcagggggaggtggccagggaagaatctacatggcaaggacttcccggccccaggcctgggctacgcctccatggtgatcgtcttctactgcaacacctactacatcatggtgctggcctggggcttctattacctggtcaagtcctttaccaccacgctgccctgggccacatgtggccacacctggaacactcccgactgcgtggagatcttccgccatgaagactgtgccaatgccagcctggccaacctcacctgtgaccagcttgctgaccgccggtcccctgtcatcgagttctgggagtgagtccggcacctctgggccaagcccatcccatcccccaggtctccctcatgttgcccggctccaggggagtggccctgagggggcaccagggtgttgcctggcagtccatcctggaccctgcctgcccttgcctgtcctcggagagtcctggggccagcctcgctcctgggttcggcagccgatcactgtcctggtcactcccccctgatgggggagctggggctgcatgtgaggtgggatgggagtggcctcccaatggccaggggatcgtgggctccaggcccagcccaattggacaagagggacccgctgaaccctgggctgtgggagagaagggagccacaactcctgggggtggaccctgtggctccatcctctgctggcacaggcctcatgggacctccctccctcccctaggaacaaagtcttgaggctgtctgggggactggaggtgccaggggccctcaactgggaggtgaccctttgtctgctggcctgctgggtgctggtctacttctgtgtctggaagggggtcaaatccacgggaaaggtaccactagaggcatgcagcggggagggtggctcagccctgggagccggatgtctgtgccaggcacacctgtggcaacgggaggtgaccagacagagtctagccctaaggaagggggaggtactgaaagccaagcaatgctccccaccctgcaaatccagggcccagcagcctttgctcctggggatagaggccctggcaggcactgtcccttccctgtgcccatcacccccactggtgccctcctgccagtctctgactcttgtgacagtctggtggacctggtctggccatctgttacctatcttgccttggggacccagagcagagtctggccacatcccttgggggctcctggtcaggctggggagtcacctgaacaaagaagacagtgtctagagctgtgggacatggccagctccctgggggacaaggtccccagagcagcatgtgggaagagggggcagacagtgtggcagctgcatctcgcctgcctctgcctggcccagttccactctccacctgctcaacccccacctctctccagaagaggagggggacccgacccggatccaatatcccgctccctgcctgggcctcccacacctgcactgcccacacactcatacagctctcactccccacgtgctccacgcctcctgtccccactgaggagagctcccagaggctcgcctgctccccaccgacacgcgtccctgcagacaaacgaggcgcccagggagcttccccactgcacttggccagggctgccggggcgcagccttgcccctagcttcctctggcgggagccatggctcggaggacaatggggacctctgaacatacctgcccgcaagggggaccggaggcgctgggagtgggggtgtgagggaggtggtgccacagcctccgctgagcagcctggccccccagatcgtgtacttcactgctacattcccctacgtggtcctggtcgtgctgctggtgcgtggagtgctgctgcctggcgccctggatggcatcatttactatctcaagcctgactggtcaaagctggggtcccctcaggtgaggtggaggtggagaggctgcagcagggcgctgcgggggagccctgcaggcccctcatgcctgcgctctccggcccttctctaggtgtggatagatgcggggacccagattttcttttcttacgccattggcctgggggccctcacagccctgggcagctacaaccgcttcaacaacaactgctacaagtaagcaccgccgccctgccacccgtgccctgtcctgccctgccccgccctgcccagcagcctaacccatccactctggcccctccacccctcagggacgccatcatcctggctctcatcaacagtgggaccagcttctttgctggcttcgtggtcttctccatcctgggcttcatggctgcagagcagggcgtgcacatctccaaggtggcagagtcaggtagggccctacccccagccccgcctccagagcagcgagtgctacccagatgcatgatgtacaggaacatgcaatagaaatgctgaaaagtgacgaggattcaaacggaacttgtcagattgtgggcctgtgggggcaggtcctgggatttgtcaatgttgacagagaaaggacctcccagcccctgccgcacgacccagggttgacagcgcctctgaggcaggcgtgggcatgggcgcgagtgttgcaggcagggctcagggtgcgcacagggcaggacatcggctacaaggtctagagcctgcacctttcccacagggccgggcctggccttcatcgcctacccgcgggctgtcacgctgatgccagtggccccactctgggctgccctgttcttcttcatgctgttgctgcttggtctcgacagccaggtttgcatggggctctgggacagggagccaggaggggggcggagggagggctgcaggcaaggaaaggggtggagggcggtgcggggctcggcctgagctgccctggccacagtttgtaggtgtggagggcttcatcaccggcctcctcgacctcctcccggcctcctactacttccgtttccaaagggagatctctgtggccctctgttgtgccctctgctttgtcatcgatctctccatggtgactgatgtgagtggggtggggggtctgcctgtgacctctggtggccgtctgccatcctccctgactgggctctgtcccccagggcgggatgtacgtcttccagctgtttgactactactcggccagcggcaccaccctgctctggcaggccttttgggagtgcgtggtggtggcctgggtgtacggtaggtcatggctgagggctgggctgggggatggtggcggggaaggcaggtctccagcttggccctcccgcctcacctcgccgcaggagctgaccgcttcatggacgacattgcctgtatgatcgggtaccgaccttgcccctggatgaaatggtgctggtccttcttcaccccgctggtctgcatggtaagggctgggggaggtggggcagggcggggggcgaggcagggcggggtaggggccccattaaccgcagcattctggtccgtagggcatcttcatcttcaacgttgtgtactacgagccgctggtctacaacaacacctacgtgtacccgtggtggggtgaggccatgggctgggccttcgccctgtcctccatgctgtgcgtgccgctgcacctcctgggctgcctcctcagggccaagggcaccatggctgaggtaaggctcccgcccggcccgccctcccctcccctgctgtgaacattcaacccagcctgcttcctagccagggagtggccccgactagggtggcaggcagtgggaaccggagagaggcagaggaagtcaccgtggggacgagcaggtgaccctgggggcttcagcatgtcctcctctcctgcagcgctggcagcacctgacccagcccatctggggcctccaccacttggagtaccgagctcaggacgcagatgtcaggggcctgaccaccctgaccccagtgtccgagagcagcaaggtcgtcgtggtggagagtgtcatgtgacaactcagctcacatcaccagctcacctctggtagccatagcagcccctgcttcagccccaccgcacccctccagggggcctgcctttccctgacacttttggggtctgcctgggggaggaggggagaaagcaccatgagtgctcactaaaacaactttttccatttttaataaaacgccaaaaatatcacaacccaccaaaaatagatgcctctccccctccagccctagccgagctggtcctaggccccgcctagtgccccacccccacccacagtgctgcactcctcctgcccctgccacgcccaccccctgcccacctctccaggctctgctctgcagcacacccgtgggtgacccctcaccccagaagcagcagtggcagcttgggaaatgtgaggaagggaaggagggagagacgggagggaggagagagaggagaagggaggcaggggaggggcagcagaaccaaggcaaatatttcagctgggctatacccctctccccatccctgttatagaagcttagagagccagccagcaatggaaccttctggttcctgcgccaatcgccaccagtatcaattgtgtgagcttgggtgcgagtgcacgcgtgcgtgagtacggagagtatatatagatctctatctcttagcaaaggtgaatgccagatgtaaatggcgcctctgggcaaaggaggcttgtattttgcacattttataaaaacttgagagaatgagatttctgcttgtatatttctaaaaagaggaaggagcccaaaccatcctctccttaccactcccatccctgtgagccctaccttacccctctgcccctagccaaggagtgtgaatttatagatctaactttcataggcaaaacaaaagcttcgagctgttgcgtgtgtgagtctgttgtgtggatgtgcgtgtgtggtccccagccccagactggattggaaaagtgcatggtgggggcctcggggctgtccccacgctgtccctttgccacaagtctgtggggcaagaggctgcaatattccgtcctgggtgtctgggctgctaacctggcctgctcaggcttcccaccctgtgcggggcacacccccaggaagggaccctggacacggctcccacgtccaggcttaaggtggatgcacttcccgcacctccagtcttctgtgtagcagctttaacccacgtttgtctgtcacgtccagtcccgagacggctgagtgaccccaagaaaggcttccccgacacccagacagaggctgcagggctggggctgggtgagggtggcgggcctgcggggacattctactgtgctaaaaagccactgcagacatagcaataaaaacatgtcattttccaaagcaggctcctgcttccgcctctgctgctctaaggaaggggtcggggtacaggaggcagggggaacctcctccagctggagctgctgccgtgagcaaggctctgctctggaggcctctgcggccggcacccttctggggactgggaagggggcagggaaggcagcagcccaggggaaggccttgtccccctggagccgaggcagttggggagagcaggacgagagtgagctggagagcagccacacccgcggggaagggtggcgtaaagccatgggtgctgaaattttcaaaatgttaccccaagaatttgtcactgaacaggtgccttgtgtcacttgggccaggctggtagcagcagaggggataactctgcatcagggatcaattttgaaggtggagccaataggggttgtgcatgaccaggatgcagggctcaaagaggagttaaggacaacagatttggcctgagcaagaggaaagatggagctgccaggtcctgcaatggggaggcaaggagagaatggtctggagtcagccttgggtgtgtcatgcaggaagtgtcatccaagtggagatgtctagttggcaggtggacacaggagttccagaaagtactggagatggaactgtgcaagttcttaccacatagagatgacactgaaagccctgagcctgagtgagctcacagggacgccgcaagccccggaacacaatgagaggggcagagcgaagacgtggcagtgataggggaggacgcctgagagttcctggtggggtcctgcaacctgagccagtgaggacccctcacaggtcagggaggagcagtggctggctccatctgtccagtgctgctgctggtgaaggacagtgacctgcaaatgctcactgagtctggcaagggtcacgggggcctggcgagggtggcttgcatgagcgggtgcgtgtgaaaggctgggtggtgtgcgactgagaaaaggagtggcggcagcgcagtgtcatctgcagacgaagggagagacaacaacgtagttcacccagacaaggaaatatgagccagcctggaaagggaaggcattccaacacacgacacaacatggctgaccctggagggcatttctgtgaaatgagccatcataaagggatacttgctatagggttctgctcctgtgagagagacagggccttacatgagaggagggagatccacagagacagagggcaagggtgggtgccaggggctggggacagggtggggagtgttgagtggggacagagtgtcagtttgagaaaataaattctagaggtggatggaagtggtggctgcgcaacactgtgactgcacttaatgccactgaattgcacatttaacgatggtgaaaatggctcattacatatacactgatgacactatatatatgtatgatatatatgcgttttaccatgagaagaggtggagaggaattggagacactgagtacagacaggtccttcaacgggcgggaccccgtgcacaagatgagcatgtggcaccccaccctcaaagggctgggcaccatggcagggcacagcaggcaatgcagtgggcggctcaggcaagcacagagagcatcagagattggagcctgtgaagggggagcaggtgacccctcagagcaaagtgacagcttgggctgctccctttgcgtcctgcccaggactgctatcgtgctatgggagaacccccagaggccctgctcctcagcaggcagcaccccctatggaggggctttacccctaaacttctggagccaggggagggacctggcttggaatacggccaaccaagagcctgggtgagaaatacacggaccagacagggagcagagaaaggagtggcagtgcagtcccaccctagctcagccaggggctctggagcctgtcctgcagtccctggcccccatctcttcagcaaccgctgtttccagttttctttttctccctgagaagcctgtcctctcaccatgcctgcgccttcaagaaccccgcctgctggcagctcccacatctccggcctggccctccttagctgcaaaggtgcttcccaacatcagcaagacctctccccagggtgccccaggccctcacacagcccctgtccccaaccgactccaactgtcctgcagcccacagtcaccctcaggacccctgagctcaggccaactgctttatacactgtcagccaagtctctgcctggatgacaatcaccctctgctaattgttctccgcacctccaggccaaatgccctccaagccacctcatgcaccacgatgacactaaacacacagaaaaaagacattgaaaaaaggaaacttcacagaggcctgtcacttaaagagggtcctgaaatagagacaccatttcctcaggacttagctcctgcatcaggggttaggacacagagatcaacaagcagcaggctttgccctcaagcagctcgcagtctagtggaagatgggtaagaaaacagatcaggacgcccacgggtgcagatgccctggaacagaagctgatccaggaaggcgcgagctgcaggccgccctccagtctaggctgggcaagcacctcaattttcatctctaagagcctgtgcccacaccccctgccccgttgttgttccatcactccactagaaagggcgctccagaagctggcctcgtgcagctttctgtctgctgctggcctaggcagaacagcggaagaagccatcagggctggtgagggaagcacccgtttggactttagcctttcaaagctcagagaagggtgagctcagggaggtccaaggtagctgagagcacttcctggaaaagtgggatcagccttcggccttggcacagcaaccagagggtatcgcccacgtgtcccctactccctcagacaccacctctcagaccgcctggaaagggacagaactcgtcatgaggcggctgtgctctgagcacaagggaagggcgacaggatgctagagaagggaaccactggcctgggcccggacagggcaggcagaagcgagcatgcacagcaggccgtcagctaccctgccagcatcaacatccttcaggggtccccccagttccaggagacacacctctaacctgctcccctgacccttccgcccagtcctcatgcagacaccaggcatggcagaggccctgcagggtggaagcactgtgctgcgggcgggggctgccttcctcatgtgctactggagagtagcacagtgcaggggcctgggcactggtgccaggcaggaagccccggtactggcctggcttgctgtgggcctggaagacacagctctgagggagccacgggagggacaccctggagccagcacagcgctctggtggcaggcacacacccagcacgttctcagggccaagggccccagcccattcccagcccctttctgcctagctctgccctgggccagctccaggtcactgccaaggacaagtctcctctcccagctggcattagtcagaggtcatcctgcaaaccttcgggggggggggcagggagtgactagtggcgttctgccacgttctgtctgtcccaaatgtgacgaacaggaacccagagaaggcaagcgagtcctctacccggaagccccgccggtttactgagcctcccaagctgcccacacccagggaggcagacaggacacacactcggcgggtggccctgaagcgaggcctggcccagcccggggagcaggaggacagagagggcaaggccttcgagaacaggtgtgagcctggccttcagtgggggaaacaggttgaagggctgtggccgcttgggggctccaggcaggagagaaagcagagccctccccacagctgcagtcacacaccgcaccacgtacacaccatgacaacttttattgccctcaagagaaactccagtccacctgctccacccaccctcctgcgggaccaaagaaaacacccagagggcaaaacaaaaaggggctcaaaccaacaggaagtcagccccaccgcaagccggactacaactaactcgtgctctccacgctcaggcgtggaagccaaggctgtgccaggcctggccaggccaagcaggatgacagcaaacgcattctgaacgtgtagcaatcaggtcccctgtaatgtgcttggagagtgtggacaagggccgagatgacgagctatgagctgtggaagggaatgggggaagcagaagggcacaaacagaagtactggagggagaggccaggctctcaggaagcagcaggcacgtgccaggtggaagccagctgcaggcaggggaggaaggaggcccttactcttccttcttgtccatgggaccatctactgcagcctggaaagggacagaaatcccacagcagtaggttggccgggtccactcctcccctgccacctccagccccatgccccagaggtccacctcggttcccctctctcctaacaacagctattcaagtgaacaaggggccccctccccagctgcacccaaaggcctgccagggtgggagcgtcagccctggcccacgctctagggaaagccctggacctaacgccagccagggaggactgccaggacctcactgggggctgagtcctggctgcagggaacagcaaggcatccagtccccttcaagacctgatcagacccttcccaactctgcacacctttgaacaggtgccctcgaagcccatctgccaagcctgccccatacagagggcatgggtgccccctttgaggctggacccttcctccccacctgctgtggtgcccaaacttgggccaccaagcactgaggccagctgtccaaagttaggagtatttatgtggccctcactcccaacgtcaagaccgcctgggcttccagatgcggcctggtgcacccaagctagtctgaggactcagatcaggcctagggcagcaggtgatggccacaactagcgcctgctagggaaggtgcctttttgacaccttgtgccctcacttgcccagggatctttgccctacgtcactccccagcaccctaggaaagaaggccagcagtgggtcccagagtttcacctgcttctttgttcttgaccaggccccaaaccatggctgcgcctgagcacgaaggtaggaaggctcagagcctagtgagccagtgccactcctgagggccgccttggcaagtgcctacatctgctgccaggccacccccctcctgcccggtgaagggtcccactcagtagggcagaggtggccagggggagtggtggagagggcagccagcccctgggcccctggaaggttccctccgcacccgcaggggctgcctcatcctgctctgctctcctgccctgggcgcagcaatacgggagggctgacctgcagctttgcgtgctcctccagcaagcggtcgtactccttggtgaggccctcagactgcttccgcatggccagaacctggttttcagctttctctagttcttgaaatgatgtaaatgaccaagaaaacagaaacgaaaagacaggaattagggggaaaaaacccgactgctacagacaccagaaactggcccaaatctatctcaaacgaggttatacaggaggctacttctcaaaataaagcccctctgcttttgcaggcccccaaagtagagggaaagggctgacaaaaaagctcaagataaagcaaaagaaacacagaggccatcccccagtccctttaatggagaggaactctagtggctctcggcaagggtaacctccagggaggctgagagtgggagacagggagcaagatcccagcctgcaagcgagacccaatgacaaccacgccttgcacacagcagcagcaggcgaggcctgtggtattgggggaaaacgccccagacttaagtctatgcgtgggagaccaaagacaggcaggccgcttgggagccgcccactcccctcctgaacgccactcccacactcccctcattctcagcccccaggcatgctggggctaccgtgccacactctggacgggaaagccccagcatgcactgctctagtgcagggcaatcgaggcccaccaactgcagcctggttcctcctgagccccattcaaaccacttagcctcactggcctgccggctaagcatggctgcattggggttggaggcgcagggtgctattggtctgttttcagccagccctcgagcgtgcgtgcaaggcttgttactaatactttggcacaaaatgggcagcagcgggcagaggaggctcctctggacttccctgcggggaaggacacgaggtcgagcctcactttgcttagtgctggccagctcgtcctttagcttctgcaggtcagccttcaggctcctgttctcttcctccaacttcacctcagcattcccgacatccaacttgcctccgtcaacagcagctccctgggaaaagtgccaaaggccagggttactcaggagggagggagggagaggttccagccccatcctccccaccgagctgcggttcctcaagctgccctggccacacgccccttcggaaatgtcaacgcggaaccgagccaccacttgctcccagctcctaggcaaaggccagggcgtggctgcccgccgagggaaagagaagcgccagcggggccacctgctgcagctcgccgggcacgccttgcctgccctggcccctggcccctggcccctggccctgcctccttcccaagcagcagggctcagcagctccatggtgctcaccaacccctccacagatggcggtgcctcgtgctccctacatggtgccgctcactgcagttaggagcccccagtcggcctggccagctctatcccacctctgcatccacatccctccgagcttgccttgcagctcacctcctgacgggacgtctaagactggccaactaccctgcccccacctcctctccagcactgagggatgccacagaccccgagttccagagggggtgcggcaatcttgcagggaacaagggcctagctgagggccttcggatcacagcagagggcctggctcactgaggggccatttttctcagggaagggtctaactggaagcagtggatggaaacgagagcagcaacaccctcctcctcacccggaccctcacacacagacgcctccagcaggcatactctccccactgaggacttcccctctgcgcctccacccaactctggcttttcaggcacatttcccagcgtgacaggctagcagtggccactgaggccctgaagaatgtggctcccacagtgtaacaccaggacgccccatggtgggtcgggaagctgggctcaccttcttgagctggtcattctcctccatgtacttcttggccgcctcactagcactctccgcctgctttttaaaggcttcattggaggccagcagcgtggcctgctgcgaaatgagagtcaccaggcgtctaagcaggctgcaattatttacaaaaagaagggagaagtgagaaaaagagcatgaagggctggcaggagcacctcctggttgctcccactccacacctagctccagcctggacctgccctcttgccaaggcagccgagtgagaagccgccaacctggtgctggcagcgtgagggaaaaggtggggcccaggagccgtcctctgccgctgtgcccaacggccaccctcagctctcagaggggctggaagcaggagcctggggggctgggaagagcctcgctacagcatgaggtcccagaacgcggcactttccgggtcggggcctagacgtgccagacaagccacagcaccaccttcctccctgcgaggctgggcttgccttggtaaggtaacgagagaagctaatcaatccaagcacttccaacatgccaggccgcatcctcacatctacctgatgaggaagttactatcactgccccagcttatagaagaggaaactgaagttcagcagcgtaaatcaatgtacccaaggccaaaaaccagaaatggacatggctggaattccaaattatgtctgcctgactccagaacctgagctcggaaccactctgctctctaaactaacagggaacagctcccaggtcccaacgtaagatagaactctcttctctggccagcctccttcccaacccatcatgcaggctgcgctggaacacatccgttatgtaacagcaccccgaatgaggtcttcttgggctggagggtgtagaggaatcaggacacaggcgcaggctgcctctctgaagcagccaggagagacaggcaaacaggtggcagctggaggcagatgctagtccccaaacagagattggaatggccacttcatttcccttggttcacccttgccccgagatgttagctggcaggaagagaggagggaaggactcgttcaaacagtcaaaacaaggcaggggttcctttctcacacacctcagaaggcaagggtcacacagggcctgggggaaggaagagacaaatctgcttagtccagagtgcttcaacaacagcttactcagaagagtcgaagtggcctcctgccccagccaggccttcacacttcacagcctctgctcatggccaggggcagcccggaagggctggagaaagtaaagagcagacaaggtgagctacctccctggcccaagccatggctctccagggcctcggcagagcccctttccagatgtactcaggacagaaagtacccacccgggccaggagacacccctgaggttcctggtttggggagaggctcccaggggcccctggcagcaccaggagagccaggccgttgattcctggcagagaaggagagtttccagtgacatgtgctttctaaaattagcggcccaggacctcgtggcctagggctcaggtttccctgcctcagcccccagctgcccaccagcctgccccgcactgggctacagcctgaaggtggaggaagctactgagcgccctaggagccagagagaaacaatgcatctgactcacatcggcatggccagaagtcaatggagaggcctagaaagaaaggcaagtctgactaagacccaggcccccggcaaggagctgcccagccccagagcggatcccagtgatgtagaaagaggaagaggaccgctcctcccagctggaattgaggggtgggggtcatgccacctggtggtagagagaggaccaagcaagactgaaggctatactccccgccaccaggccaggcaagcggctgctggtgagtgcccatggctgtcaccccagtacccagggagatagctaacacaaatgcttccgcggcagtgcagcagaggcccagctcttttcggaccgtcccaggcccttcccggctattgagaaccagggcttccaagataggccagggcatacacaaagtccagcgcaagatccacgctgtgtgtgtccgaaagcctggccctgctcagccccagcccaggccttcagttcccagccttgagacagtctggggctcccctctgccaggccccggttccccttcctcttgccaaccctcacaggcgctccccacccccacagcaccccgggcatactcctcccactgcacccccagcccgatagttctttttcacaccttctaggtcctctctcttcctgctggatgacccgggatcattctccccccaggaacctcaccttcaactgcctccttcctggagtcaccctgcccaagcccctggtcttttccctcccatatattcctcaacctaggctggccaaggcctgcccttccaagccagcagcagggccaccagtggcctcctaaccgcccaggccggaggtcaccctgaactccttgctctgctgctaagttaccctcctgaggtcccctcgcaacaccctcctcccactgttattctgctccctctggggtctgcactcttcagctgacaccctataccttcctcccagccactcttatccccgaaagggttttctctgtggcccagactcatacctaacctcctgctaaacattggctcctggatgtccccagagacattctagactcagcttgtccaaaacgggccttcccttgtcctgcctgacctgaccacctcgtgtagcccctgctgtagtggtgggcaggcaaaccgccttggactcagccctcttggcccccagcccaagccacaacccagcactttccatgtcaactgcaaacatgcccaccatcatccccactgctggcgcctcctccctatctgctgccatacggctttcccatccacctcccagagcaaggcaaatccgaccatgtcagccctctgcttaagccacctgctgccagcacgcatgccctcagtgagctctcctccttcactaaccacgtggccccctgctctagtaacacctaacccctcaccattcctggaacacgcctggctctgtgtggcagttctccaggccggaatgtcctctcgacccagctcaatcctcacctccccccagaaacccttttggatctcccaccccatcagagggacgccttctgggggctcctgcagcagccccccaggcacccgcatgtaactacctcattctctgttctctgcgtggctgccatccgtttatatggctgccctaccaggctatgaaggtctttaggctgggcactgtgccttcatctctgcactcccatacctggcacactgaaaaggggtcttccgcccactccagcaagtatagctaaaaaaaaaaagggggggagggcgcggggctgggcttccagatgactggatcccactcccaggagaggaaatgctccctgacaggtgaggggacagatttgaggctgcacgtaaggctggacagaatctccctgggcctagactgcacctgtgttcacctgggagcctggcaccaagaggggcagaggcagacacagagctgctcagtctagcaacagaggagacagaagacaggagtgggaaggcgccgtctcagacccgttctgatgggcaagccaggctcatggctgcagggggaaaaaacattcactgccgcgacctgaaggcacaacccagagctccagcctctgcatcctcacaccctcaacccccacccagggcccaagcaatgcagaccaggtcctctctgatcactggcatttttcagcctgggagccagccttctagaacattttcccgctccctcacactgggtcactcaggcacgttaacgtgcgcttgtctgttcccttgtagcttcccaggcccccaggacagggcacgaacatggcctttagcttctgcctctgctggatctcccaagtagtcttacccgaatcactgttcttagctattcatttccagaaaacaggaaagaacctaagagccaaaggcaactcctacagatacagggtggtcaccaatagaatggcctggggtccaaaaaaaggccagtgaacgaaacttaacagaatccagatgtggccttggaagacacatggcagccccaatgcctcaatctgactgggctttcttgatagaatgttgttggacactgagcagggctatcgtgcttttataaaaggttgagtaaaccagagaaggcaggagaaacagaacctctccacagactagagaaacagggccaaccatatcaaatggagagagccatggctcataagcacttttcagcagccctgtcttcccccatgagcaaggggaagaggacacgggcttaataggaaatggagaaggagcaagtcccgaccaaaagattccatgctgtggccacccccggcccgccctgctgacgggtttcaggcgagtcaagtcattcaacccccagcccctgcatacacatggtgttcacataagctcactcctcagcccccagccggcagaaagccggtgtcccagcgccacctgctgactttccaggcctaccgcagggtggccagtggactctgggtgaacacgccccagctgtggaagaaaaaaaatgaggcagcgcccaggcaaggaagcaagtcaggtgacgcctcaggaaggcttcagtgaagaagaatgactaacaccagggcttccactgccctcagcgactcttacccaccagtctggaatcaggaaaacaggttacaactgggagagtcacctagagcagacccgagaaggctgccccaaagggctgccccaagtccattttggtacagctgcgtggccttccctgtagcctcccagcacacagacgctggagaagacgggaagaggagggctagagctgggggaaatggaggccgtttcaaatgagaacatgacttgtggcagctccagcccacgacccagatggagctcacccatcctgaggacagtgcactaagcgcagggcaaaggggcaggtgtgggtctggcctgtcctcccttcttcttgagaacaagtgacacagaccagctgggtttctggggttttgctgtgtatcttttttaaaaccagctatctgaggggtttggggtaagctggagggtagagagcaaccgactgaggtaagacaacttaggcaaaggtagtctgtgattagatgactcaacctaaaaaagaagaaaaagcagctcagcagagaagcacgggcagctccatctgggctaatggcagcgatgggattctaccctggaggggtaaagaggaaacaaaagatgcctgtggatcaagttcaggtcagcaaaaattcagggggcttccacacaaacaggggccttcctgcgactggctgctaaccagcactttgggcctaaccttgaccgtcatttaagctgagtaaggcagagaaggcagtgcaggtcctctgaacacacaaaccccagcccagagggagctgccgtccccaacacactccaagactcaagagggcctctcgctagctgtgcccccgaagtgcaaggttggcaggaagggaacaggagcgactgccggagtcttccacaagtggaaaccagtggctcatccagtgtggtcccctggaggtggccccgatggacccgccttcacaaactgtcatagctcctaagacctgaaaagctgggcttcttggctaaaaagcccaacaagttcaacccaggcacgcacctaaagctgtcgccgtcagcccgggacagcccattcagtcaccaaatgtttcagcgcccttcatatgtgccaggcccttggcactgagctgaacagtctgaaggggaagagcccaggttttccacgatgggcaaccctgccaagtgccacacctcagagctgcgtgtgcaggctgccctgggacccgaggacagcgctatgggtcagccgggaacatggtgtgggcccctcggaacaggctccacagggaagcctcggagattcacgaagaggaggtgccggctgggccggcagctggagggggtgttccgcacagaggtccccaaaatgctcagagaatcgagttgggggagagcatgtgttacgtgaggctctcccatgagacccacatgactgcttcatgacagggggaggccgaagcagagactgtgggggagccgcgtcctggaggatccatgtgatagcgagccactggaagtggggtgcacaggccaaaggggggaaggcaggtggcagggagcccgcttggtctatacgggatggtggtggccccaccacagcagtggtcccaagggttgtgagagagaggcttaggaggtgacatctacaggctgtttcatgggtggagtccagctctgcaggctgaagacttctggaggttggctacttgacaccgtgaaagcgcctcaccctgctgggccacacactgagaaatggccacgatggttgggcagtcacatgggacaagaagaaagggcagagcagccccaggcttctgggtcaagtgacaggactgagacagtagtggcagaggcaggacaaaagctcagaaggctttggctgggaagctgggactctcccactgctatcccaggcagcagcagcagactatggggggccaagggtacagacttgcttctaggtgtgatgtttcctttcaggccaggccccctttcccaattacaaaggctactcgggagctctcaggctaacctcctatgtgttctgagcccagtcccgctgaaaactagtgccaagcaccaggccttctccagaatgtgctcccctccttggccactaacctgctcacatcctccttcttgatcttgcttccctcttccttctgctccccgatcttctatcgctctgctggaggctggaatccatcctgccagcacattccctttgccctggcctcaatgcctctgaagccagcaacccaagctcgactgcccggaagcaccctatcctgctcatctgccaggcctcccctgctcaaccctgctctccctgtcccctcctttccttgctgcccccaggcctggccagaagtcccactctgcaaccagccctcacacctagcacgatagtgttactccatgggcagccagagctccctttccagcagggggctgcgtcctcgcattccgcaagtccacagcagaaccaagatcatctcagactcccagagactggaaaagcctgctgattcaactccacctgggcctctcagctctgtcccctccaccccacttctactaccactgtaccactgcccccgttcaggttcccagcaagtctcactgacaacctccaacttggtctccccacttcaggctctcctgctccactccaacccatacacccttgcaaaatgttaatccacacaggtgactgcatgccagcagtactggaatacccactaggcaggctctctaccacgcagaaaagttgcatacgaagtctggaacccttaactcctaaccatctaacctgctcgggccatgagtacctgctcgcgccatgagtacctgctcgcgttcaagaactgagcctctcagtgggacataaagaacatggaaagaaagagagnnnnnnnnnnnnnnnnnnnnnnnnnnnnnnnnnnnnnnnnnnnnnnnnnnnnnnnnnnnnnnnnnnnnnnnnnnnnnnnnnnngaccagcctggccaacagggcnnnnnnnnnnnnnnnnnnnnnnnnnnnnnnnnnnnnnnnnnnnnnnnnnnnnnnnnnnnnnnnnnnnnnnnnnnnnnnnnnnnnnnnnnnnnnnnnnnnnnnnnnnnnnnnnnnnnnnnnnnnnnnnnnnnnnnnnnnnnnnnnnnnnnnnnnnnnnnnnnnnnnnnnnnnnnnnnnnnnnnnnnnnnnnnnnnnnnnnnnnnnnnnnnnnnnnnnnnnnnnnnnnnnnnnnnnnnnnnnnnnnnnnagacagataataggagtggcatgggtgctccaagaggatcaggaggcccaaagaaagctgactagctgaggccactgtttatgacatcagaaacagagctgcaggctcgacatccaccaatgaggaattgggtagacactcaagaacactcaagaacgctggagnnnnnnnnnnnnnnnnnnnnnnnnnnnnnnnnnnnnnnnnnnnnnnnnnnnnnnnnnnnnnnnnnnnnnnnnnnnnnnnnnnnnnnnnnnnnnnnnnnnnnnnnnnnnnnnnnnnnnnnnnnnnnnnnnnnnnnnnnnnnnnnnnnnnnnnnnnnnnnnnnnnnnnnnnnnnnnnnnnnnnnnnnnnnnnnnnnnnnnnnnnnnnnnnnnnnnnnnnnnnnnnnnnnnnnnnnnnnnnnnnnnnnnnnnnnnnnnnnnnnnnnnnnnnnnnnnnnnnnnnnnnnnnnnnnnnnnnnnntgctggaaacaggtcagttgtcccagaaaaacattcatgataaactgagtagaacactcaagtcaccaaggggcatttaaagcatgtggtgcttaaaagccccgtggttaactttttttaaacacgggaatgtttttaaaaagcatgtggaggctgggcgtggtggctcagctgccgcactctcccgtgttcccatccagtagcctgatccaaaaaagccatgaggttggtcttgcgtgacttcttagaaaaggaaacggtgatcccagagatcagtgtggattcaccagttgcccataagcgatctagttaatcatttctggaattttgccagaaatatatactccttgctagtctaagagttaaatctaagatggtggctgtgaccctagaggaccttggctttctgtgtgatgctcttgtccagccttatggccacacagcccatttgcagcttgcaggaaacactgaaaaaacnnnnnnnnnnnnnnnnnnnnnnnnnnnnnnnnnnnnnnnnnnnnnnnnnnnnnnnnnnnnnnnnnnnnnnnnnnnnnnnnnnnnnnnnnnnnnnnnnnnnnnnnnnnnnnnnnnnnnnnnnnnnnnnnnnnnnnnnnnnnnnnnnnnnnnnnnnnnnnnnnnnnnnnnnnnnnnnnnnnnnnnnnnnnnnnnnnnnnnnnnnnnnnnnnnnnnnnnnnnnnnnnnnnnnnnnnnnnnnnnnnnnnnnnnnnnnnnnnnnnnnnnnnnnnnnnnnnnnnnnnnnnnnnnnnnnnnnnnngagtgagccccctaaggcttctatgtgtatgtgtggatagagccaatccacatggcagccactcatgtgggttaggaccacacctaactacactgttctgccagcaccttccccacacttcggcatctggtcgttaagaacagactcagactggcaagcatcatgctaaaaatccatctacactccatctatagaaggctgacagaacttctccaggaattcacagcagtcaccaatgatcccgctcttcttttccaaaagcatacaagctattctttctagagcatggctggagatcaaagtcaaccctccccaggtcaattcctcatctaccttctcctccctttggaaattgggatgtttgccaggctgcagtctgccagtatctctcccactctgcaaatcctcaagcatcggtggcaatgccttctgcagatgatctcaacagcttctggacataatctcatcaagtacatcctttagggatgccactcttgcccacctgtaatttccattttctcatcctagtgtttcctttgcccttgaccacctaccctccatctccttccttacacagacatataaaagggactgccttctcctcacttctccatgtctttcatgattcagagctcccggcaggttttcaccttcccgatactannnnnnnnnnnnnnnnnnnnnnnnnnnnnnnnnnnnnnnnnnnnnnnnnnnnnnnnnnnnnnnnnnnnnnnnnnnnnnnnnnnnnnnnnnnnnnnnnnnnnnnnnnnnnnnnnnnnnnnnnnnnnnnnnnnnnnnnnnnnnnnnnnnnnnnnnnnnnnnnnnnnnnnnnnnnnnnnnnnnnnnnnnnnnnnnnnnnnnnnnnnnnnnnnnnnnnnnnnnnnnnnnnnnnnnnnnnnnnnnnnnnnnnnnnnnnnnnnnnnnnnnnnnnnnnnnnnnnnnnnnnnnnnnnnnnnnnnnnnacccctcccccataccattcttaaagctctagatgcttttctggtagatggcctagtttcctctctttccctctcaatgtggtcttttttcctcattttgctgactgtcacactcagaattctgggtttgagactcagtctttcagatctgcttccctttcagcctcagaccacaagataatacttgtttggaacttcctgaaaaatttagggtatgtgtctgactcctcccagccttcctgactttcctaagtttgaagacagcaagcttgtagatcaaatctgtgatcaaacccattatcttgaaaaaaatgtgtttgccttttctagctccacccctctttccaacttggtcgcagagagtaccagatcatctaaacaacagattttaagacaagtagtcatcgtagcgcctagtaaagcaggacacaccaggtgactagagagcaagaatctcctaggcatggagattcttgagtctcggggcacaaaaccaagtggggaataactgtccatgagcctgagaatcacttggtgctatggtctgagtgcccttcaaacttcatgtgttggaatttaatcctcactgccgtagcattaagaggtggggtcttttgagaagtgattaagtgatgagagctccaccctcaaagcaagcgcctttccaatgccttcatacatggtctgagctcccatccacctcccagccaggccctgctgatcagaacggctatgtgaagcaggaggcagcaaacagggccccaggctcaaataggcacttcgtagtggtctagttttgcccgactagttacccttagccttgattaaggtacttagttttaccaaaaaaatcatcagaaatactctggctgccatggaatgtaacatgtcctcattacgagtttcacgtggggaaggccctgaggtgaggagaggcccagcctcttcgtgccacttttacctgctgtccctaggtcaacac

SEQ ID NO: 51771 - DNA, 1842 bp, Homo sapiens
ctcagcgtagttggaatcttctgtattctcttagcgcatgaccactacactgtggacgtggtggtggcatattacatcaccacgagactcttctggtggtatcacactatggccaatcagcaagtgctaaaggaagcttcccagatgaacctcctggccagggtgtggtggtacaggccatttcagtactttgaaaagaatgtccaaggaattgtacctcgatcttaccattggcctttcccctggccagtagtccacctcagtaggcaagttaaatacagccggctggtgaatgacacataacagctgtacaaagtggggaaaagacaaattgtccgaagtgctaagaactccatgagagaagatgccataaaataaacacctccctaatcctattatctttcaatggttaccttgacttaacctattgagttacctggtcagcactgtgatctttttttctctccaaaggacctgcgttggacaacaataaagaaaaatttaacctatcatgcactgtacacatttcctgttcataagtttgggatttacataacccgcaaccaccatgttcctttgtatatgatgcagcagcataaatgtaagcttttatatcataagttctggtctttccagtcacatctggaaataaagcgtattattttcttgggaaaacatacttttcatatctcttgccccaaagattgggctgtaagcacttttctagcaaatgtctctatgaaggtttctaagtacctgaatggggtttgattctgaaatctttctacctgttgcaccgatattcaaataaaaatgatagacacagaaaggtttggtaactttgggttttgtaaaatcagcaaaggcagtgtttcaaaaagtgcaaaaaaaaagattctgttataaagtgattttctaagtatttcctaactttatttttcaaaatgatgttatgaacaccaaatttaaagatttttaacatgtcagagagaagagagttaaaatttaaaaatgcatcttgggagagaaatttgtctatgtttctagtgcctttcttgtcttgattgtatggtcagtaggcaatcttaaatgtttttatttaaaataaagtattccttgaaaatataaatatatgtatacactactaaattttgcatttatagctaaattgaatcagaagactgcttatggttttaaaattgcaatgacttaaataatgaggttgttaattagagtcagagcctgttcacatattgtgatcaggtagcaatgacatgtaccacttaaattattttatcgtcgatttggtagttcaattttaactactcaatgaaaacagccatgaatatcttttcttaaagagagttttgaaaatgatcacttacctaaaacttgaaagctatgaattagttatccatactctcatgacaattttgttggtgaacaacaaaaaagagatctatttctttaaaagatatttgtgcagaaactgcatgtaactctaagttttactcctaacatacatatgtttggggaagtattctattctatacttgccaatgtggagaacaaaatagttttttaagaatgaagaagtatatatatccattctgtattttacgtgcagcagaattatcttccgtaggatttttttgtgtattcacaaggtgatatttgtattgtaaaacaataatggtgaaggaaataaaaaggcttttaaaattttgtttgttttaaatctttgtaaagttattattccagagagtatactggtatcttacagcttacctagatcataaattaatcaaaatgcactttttaataaaaactgatacttaaaat

SEQ ID NO: 51772 - DNA, 389 bp, Homo sapiens
ggcaggaggagcatagaccaatggggcaggagcatagcaaagagaattaaaagttggataaagggcacaataagtaaaagcagagagcagaagcaaggtgaggggacgggtgagcaagaagcaagaggcagaagttgagcagccaaaacaaaaagtaagatagagaagtgagcaaggacccccgtggccagcaggatctggaccaaaccagtaaggggcagttcttcagagctatgcatgtgcattagagagaaaaagtatccttaacatgaccctgtatgataatcagctcattaaagttcatgcatatggactgcatattatccatgtacttaaaattatgggatgggtcaaagtaactaagcaacatacttaaccatcaaaaaggc

SEQ ID NO: 51773 - DNA, 315 bp, Homo sapiens
caaaaacaaaagggagatactccagcttcagcaacagcacctacagaagcggctcaaattatttctgcagcaggtgataccctgtcggtcccagcccctgcagttcagcctgaggaatctttaaaaactgatcaccctgaaattggtgaaggaaaacccacacctgcactttcagctctagccaagagcttagaagatgctctgaggcaaactgcaagtgtcactctgcaggctattgcagctcagaatgctgcggtccaggctgtcaatgcacactccaacatattgaaagccgccatggacaattctgagatt

SEQ ID NO: 51774 - DNA, 2724 bp, Homo sapiens
acgcgggcacgcacacacggaagcacgcctccacttaactcgcgccgccgcggcagctcgagtccaccagcagcgccgtccgcttgaccgagatgctgcgggcctgtcagttatcgggtgtgaccgccgccgcccagagttgtctctgtgggaagtttgtcctccgtccattgcgaccatgccgcagatactctacttcaggcagctctgggttgactactggcaaaattgctggagctggccttttgtttgttggtggaggtattggtggcactatcctatatgccaaatgggattcccatttccgggaaagtgtagagaaaaccataccttactcagacaaactcttcgagatggttcttggtcctgcagcttataatgttccattgccaaagaaatcgattcagtcgggtccactaaaaatctctagtgtatcagaagtaatgaaagaatctaaacagcctgcctcacaactccaaaaacaaaagggagatactccagcttcagcaacagcacctacagaagcggctcaaattatttctgcagcaggtgataccctgtcggtcccagcccctgcagttcagcctgaggaatctttaaaaactgatcaccctgaaattggtgaaggaaaacccacacctgcactttcagaagaagcatcctcatcttctataagggagcgaccacctgaagaagttgcagctcgccttgcacaacaggaaaaacaagaacaagttaaaattgagtctctagccaagagcttagaagatgctctgaggcaaactgcaagtgtcactctgcaggctattgcagctcagaatgctgcggtccaggctgtcaatgcacactccaacatattgaaagccgccatggacaattctgagattgcaggcgagaagaaatctgctcagtggcgcacagtggagggtgcattgaaggaacgcagaaaggcagtagatgaagctgccgatgcccttctcaaagccaaagaagagttagagaagatgaaaagtgtgattgaaaatgcaaagaaaaaagaggttgctggggccaagcctcatataactgctgcagagggtaaacttcacaacatgatagttgatctggataatgtggtcaaaaaggtccaagcagctcagtctgaggctaaggttgtatctcagtatcatgagctggtggtccaagctcgggatgactttaaacgagagctggacagtattactccagaagtccttcctgggtggaaaggaatgagtgtttcagacttagctgacaagctctctactgatgatctgaactccctcattgctcatgcacatcgtcgtattgatcagctgaacagagagctggcagaacagaaggccaccgaaaagcagcacatcacgttagccttggagaaacaaaagctggaagaaaagcgggcatttgactctgcagtagcaaaagcattagaacatcacagaagtgaaatacaggctgaacaggacagaaagatagaagaagtcagagatgccatggaaaatgaaatgagaacccagcttcgccgacaggcagctgcccacactgatcacttgcgagatgtccttagggtacaagaacaggaattgaagtctgaatttgagcagaacctgtctgagaaactctctgaacaagaattacaatttcgtcgtctcagtcaagagcaagttgacaactttactctggatataaatactgcctatgccagactcagaggaatcgaacaggctgttcagagccatgcagttgctgaagaggaagccagaaaagcccaccaactctggctttcagtggaggcattaaagtacagcatgaagacctcatctgcagaaacacctactatcccgctgggtagtgcggttgaggccatcaaagccaactgttctgataatgaattcacccaagctttaaccgcagctatccctccagagtccctgacccgtggggtgtacagtgaagagacccttagagcccgtttctatgctgttcaaaaactggcccgaaggggtaccaatgattgatgaaaccagaaatagcttgtaccagtacttcctctcctacctacagtccctgctcctattcccacctcagcaactgaagccgcccccagagctctgccctgaggatataaacacatttaaattactgtcatatgcttcctattgcattgagcatggtgatctggagctagcagcaaagtttgtcaatcagctgaagggggaatccagacgagtggcacaggactggctgaaggaagcccgaatgaccctagaaacgaaacagatagtggaaatcctgacagcatatgccagcgccgtaggaataggaaccactcaggtgcagccagagtgaggtttaggaagattttcataaagtcatatttcatgtcaaaggaaatcagcagtgatagatgaagggttcgcagcgagagtcccggacttgtctagaaatgagcaggtttacaagtactgttctaaatgttaacacctgttgcatttatattctttccatttgctatcatgtcagtgaacgccaggagtgctttctttgcaacttgtgtaacattttctgttttttcaggttttactgatgaggcttgtgaggccaatcaaaataatgtttgtgatctctactactgttgattttgccctcggagcaaactgaataaagcaacaagatgaaaactgaaaaaaaaaaaaaaaaaaa

SEQ ID NO: 51775 - DNA, 318 bp, Homo sapiens
ctttttcaggaatttcagtgatcaaagatcttctaattctgtgctaccactgacgtttgcacttaatacagagccatttgctctgtggccacctgataaatatttgctgatgataagacaaaaatatacacgtctattaagaggtctgcaatgtctgaacacagtgagggagaaaaatccttagagaaggtcgcttaatctcaattacccaaagtcattgcttggcagaatatctgtggtctgttatccttagtgaagtgacaggcttggagaagcagggaaatgtggggaccatgtgtgctatataaaccaaagact

SEQ ID NO: 51776 - DNA, 333 bp, Homo sapiens
  misc_feature (1)...(333): n = a,t,c or g
ggaacaaaagggagagggaggaggtgccaggctcttttaaacaactagctataggatgaactcatatccatgtggaggacaccaagccattcatgagatccaccccataatccaacacctcccactagggcgccacctccaacactgggggtcacatgtccgtgttgaggttttgaggggaacaaatattccaaatcctntttaccacttttgtttattcctttcttccattgtgaactttggggttgtacgttttcttgggtattgtggattatgctgcttggatttctcctttttttttagtntttacttcnttcatttgtttgntgtttc

SEQ ID NO: 51777 - DNA, 446 bp, Homo sapiens
gttagaatgaactcctagtattccagtattacacagaacgaagtactactactaacacatagaagtcattactgtgatataaaaagcaaaatagatccttaattaaaaattagtcactcatattcagtgttgaataagaagttaaagtttctagcataactatcttgagtgcattaaaaatgcttttagagcaataagataagcttctagctgactgcctagaaaaacagaagatacaaattcagtgtcagaaatgaaagggaatacactacagacactatagttattaaaaggctaactaggaaaacaccatggaccaactccaagggttgtattatttaacaacttagatgaaacagattccctataggatcaaactagaaagctcactgtagaaacagataacctaaacagaaccatatttattaaggaaattgagtttgtgg

SEQ ID NO: 51778 - DNA, 575 bp, Homo sapiens
aaaaaaaaaaaagcatatcaaaacaaaattttaactactaatgggaaggttaaaaagctgccacgtatttctagtacaatgtatccaataagagcaaggacattgttaaatggaacaagacagctgggaaaggccccactatctctaatagaattgtgctactataaaacatgaagatatcagcaatttggccacttgcagtttttttcagcatgttaaagcaagtgctaagtactttattagtactttatttagtactttattttaaaggtctagaaaacaacagtcttcctggaggccccagaatccctttcatgggattcataagggactcaggtattcttattttctgccaaaaggtgtgcttatttagggactcttttacgatactttgtttctgaagttaggtagatcttgggtttactgtgccaaggtcctacctagcattccctgtaggaatatttgaaattccactagctagtctaagaagtcaaagcacaaaattaattgtcaacgcttctctcatattcttaaaaattgaagcagtttgcaggggagaacaagaatgaggtgtc

SEQ ID NO: 51779 - DNA, 419 bp, Homo sapiens
  misc_feature (1)...(419): n = a,t,c or g
cacagacactgccctacagcccaggacctgcccagggggctcagcgtaacagacccaccttggtggggggctgctgcttccagctgctttgcagcttctgtcaggccagggctgcttgagtccttgctctgctatttaaatctatcactcgttggtgacagctttctgcttaagcagtggcagcatgtatgctacaggtttcagctcattacctctgtagggctgttcctggactgctggctgggggaaaggccagccatacagactgaggcaccagccccaaactctgtattggatgttgctgagcctgggtggagagtggggccgtgctacctacagttcctgctacctgtccttcagaggacctgtctgcagcagggccagagcctaangtttgttttctcccacctgatgggact

SEQ ID NO: 51780 - DNA, 360 bp, Homo sapiens
aaaaaaaaaaaaaatcctaaagttgatataaaatctcaagggactcccaaaagcaaaaacaatcttgaaaaagaacaaaactgcaagcctcacacttccttatttcaaaacggtattacaaagctacagtaatcaaaacagtgtggtcttgacataaagacatacagaccaatggaacagaatagtgagcccagaaacaaaccctcacacatacatagccaaatgatctctgacaaggctgtcaaaaccacacaatggaaaaaggacagtcttcagtttttattcaaacatatagtttcaaaataaacatttaaataaaattctaggaactgcagattatctctatatgtcctttcaaga

SEQ ID NO: 51781 - DNA, 1907 bp, Homo sapiens
gtggagattggaaatcctccctgatatttgggcagagctaaacgtgcatgcttgtcactcaaacaccagaagtttgaatcagaggtctgagtgacctcttttgtggctgttcttgatggtttccaggcctcgttatgcatggtttgcttgatgcccattttttgtgccttgtgctgttggatggtaacgaccactcaccatgtaaacacagtacctcagttttctgtccacagctgcagtcgctctgtccctcgtgcttcactgtgggcagccagggacaagcttctgaaagcagtgtgatacccaagtcataggtgcttctcgtatgtgaacaggtgtcattctacagatctgttatgtgttttcctgttgactcttaagagtccctgcatgtaaatctcaaagctgagcctggctcccagagtccagactgacattacagcgcaagagtttgcaagtgtgtccagcatgcaccaactgtgcagaacttggctcggtaactttgcgtggaaaaataaagtacattttgaagtatcttgagggttgggtcaattgagacatttctagcattacttaatgacttgcattgtggtttttctgcaagcaactttaatgactttttttataccacatgggtctcccagtttctaggatgaatgcaacatgatgatggtgatgatgacgatgagtttaatcattgttcatttattgcctttagggctgagggaaagggaaggtttgtttttttttctccccattttcccccattctgtctttcttttggtgacttacaccacatgtaatgacgctatgactaattctgctcccaagcccttgtatcttggggcttcattttaggctcatgtgtcagatctgcatgcattgcttgcatttttctggtatctgaatgttggttccttgttccaggaattcaacattaatttccaaaagtatcatgggacttgtgacaatacaagacatgaatctatgtataaaatttatcggcctttctcatttacctgctctagtattattgtattgtgtgtgcgtgcgtgtgtgatgtcaggctgccacgtaaaacttcagagaaaaatcttaaaagcagaccatccttttttgcatgctctattctaagtagaatgttcaatgtaactgactaaaattgcatgttaaagatatttaggtttttttgttttctttatttttatttgttttcagtttcctgtatatttgcttactgtgccgttttagtgggttttaggataaaaatgcactggtgaagcaaatgtagtgccaaccagaaggtgattttccagttgtaaatgtcatgcagcatttgaagggactgtgttttcttaaaaaaaaatcacagttacttctaaaccagatttcatttcttttattgttttatgtgccaaaccacgaagtgcattgggcttcaatctctgaacactgtagacccattagaagactgttccgattgttacaaattgtagtgcctgaaaacactcttaagctgattgtcttaacaaaatgaaagttctccaaagacaaaacagaacaattattataacaaaataattatggttgaaatgtctgtggttccttggaaatgctgcgctctttgtgtttttccatcattagtgcagttggaatgaatgtgtataggtcagaggtcttcgtgttcacattttaaaattaggtaaatgacctcatctttcaagcttgaattcatttttaattttaattttattttatacaatgtgtagacagttccctgttctctgcatttagaagtatacacaatataaatctgttaattctgtaagtaatttttataattatgatgtaactctatcttatccttaaaacatttaaaataaaccctttatgtgcaaaaaaaaaaa

SEQ ID NO: 51782 - DNA, 700 bp, Homo sapiens
  misc_feature (1)...(700): n = a,t,c or g
cgcctcaccctgggggtgctatacgaggagctctaggccggcgtgggcagtggccgccctggggggtgagcgtgcctgtcactgcctggggaggcatttgcctctgtaccatcgcctttgccgctgccccgtggctgccgtgtgcgcttctgagctggaagaggccgggcattggtggtccccaggctgggccctgcaggtgctgggccttcagcatcnctggagcctgctctgcaagaagggaggggacagctggcttcagccaggctcggtggacaccctggccctctcggggcagagccgccagtgtttctcagggatgtgactgaggcccaggagggacctgtgagggtctgtttacagaggctgggcaggggccgcttggctgtggggtgtgcgctgccccggcacctgcttgccctccgcgctcatctggggccgcagcatgcctatggttccgcttccggccgggagccctgaacacgggtgtgcagactcaccctaaagggcggcccaggccccacgctagaaggctggcgagaccgaaggcagcatgtgaggcctctcctgggagtgggggttgtgtttcccacagtggcctcagctgcgcccccgctcaggtgagcccgaaggcaggagccgggaggcactcctcccaaacactccactcagaccataaagcactcctgtttcactctga

SEQ ID NO: 51783 - DNA, 1124 bp, Homo sapiens
  misc_feature (1)...(1124): n = a,t,c or g
cggttacacagaagttactttttaatttttaaggaggaaccagtgatgattggtgacaaatctctcacaattaaaaatgggtggaagggccaaatataaaaacattttgcagtattttattctttcgtttaagaagctataacttaaaccatcttcagaaacaagatctgtcacccgtagagcttagagtccaaatagacacctatgaggcgagcacaaggggcggtgtgaggcagctgcaggggcctgaccaggggccggggttggctgtgtcctaggcggctgggcagccactggctcaggcaggcccccgaggtacagaggggctggggcaccagctgcagccgccagcaaggggcccacggtgtggttgctctgcgcgtccacctccagccggagcacattcccgcttttcatcaccgctagccggtgccactggccatcacacagcactgaggggcgggtcactgacgtggagaactcccctgctccgtcatccgcccgcagcaggacttgcttctcggtcacctgcaactgcaagtaggggggcgttccggcctggcccaagtggaagatcagtccggtgactgccaggggccgcacctccagttccaggcccacatcaggcagtgtagctcctgggaggtctaaagtgataactcccccgctgcctgggaagaacagcccgcctccagggggcccaagatgcagggtgtgacccctgccatcccgttgttgggggccccaggggcctcccgtgcagcctcagtctcttcacacagccgctgaacccgacggtcaccggaagtttggagcttgtggcttgcttgccgggaggccgcccacaaagagggtgtggggcntgggggtnntctgccccctggtgctncggtgcggcccctcctggctccaggcccgggccccgtccgtcaccagcaggatccggttcttctcccagcgcacggagaccttgtgccagcgccaggccgggagcgctggcggctctgggcgcggagccgagtcccgaggccttccatctgtgcaacgaagtggccattgctcaggaagagcgccagggaggggctgccgggcctcagacgggcagtgaagaggaggagccgtcg

SEQ ID NO: 51784 - DNA, 1549 bp, Homo sapiens
tttttttttttttttttctctttgcactgatttttattaaacaagtaaggctggtagtggaacatatttttatttaatgcataaacatataagtcccttattagagaaactgtatatattgatgaatatggtcaatggtcacatctatgggttaattctttaaaaatcagaaccaataattaggatagattttatgctctcttcattacattgtgaagtgtcttgtgtagtcatattctattgttggaatgacagcttgtacaaatttcaagaaaataagaagatacatatgaactccaagttctccccctccttctgcaacagtctcaatgattttcttcatcacctcagcatgcctgcatgggtgaactgaacacatgggaggtggtggcagatgagggtgattttcaatggtcactgttttcttcacatgatcctgactgatgtcttcatacatgtgctcaactgttaaaggctgccgttgctcatcatagccaaacaaccataatcgtggagtctggtaatatttatcgtaagtgatgtaaaggtcataagttctggtttgcaaaatagcatcttcaccgcccagcatcagttttggctttacaagcttctactattttccttgtatctagggtagcctcatctgtttccaacaatccactctcttcatattcttccatatctgcagcttctccttcatcttcatcttcttcctcttcacatagtgctgagcaatcttgaagccttatattgtccttattttccagtgtgatctctttaacggcttccgttattcctgtaatacctgtgttgtgatatgtatctacccatccgccatcaccatcatcttcttcaatgatagcttccaattcatctgaatattccatctgtttgcaccgcttatagcacggcacatttttggttaccaaaaattgtttgcctgttggtaggtatgccttcactttcaattcttcccctgtagcccattgccatgttggacagtggtggactaggtgatctccagctgccacaaactcttctggggtaattacacctgtttccttaaactttgattccttgaggaccggggtcaggtactcagccacttccagtgcctttcccttcacagtattaatcacattctgcatcctggggccggagtagcggccggccccgcgacgggatggaaagtgcagccgtgtcaggggccaggaattcaagaaaatgtcctcgctgccaccgactcgcatcagcacccggctggcagcacccgaggggacgggacgcgacgcgacggggacgggcgggacgagggggcggggcggcaggcacagcgcgcgaagacggggtgcgcgatcctcgcaccccaggcagcccgcgacggaccggacccagctgtcacccagccgcgagggagggcagcggggccgaagggagacctgaggtgagaagcggacgcacacgcacccctcgcctctgcagctgtctgtcctcgctttgcttcactcgcgcccttcgtgttcccttccttctccgtgtgccgaat

SEQ ID NO: 51785 - DNA, 3142 bp, Homo sapiens
tcaggggtgcagctgcgcaccccacgggatcttgccgaccttgctgcctacactgccctcaagttctacctgcagggcccagagcctgagcctgggcagggtaccgaggatcgctttgtgatgtacatgggcagccgccaggccactggggactacatgggtgtgtctctgcgtgacaagaaggtgcactgggtgtatcagctgggtgaggcgggccctgcagtcctaagcatcgatgaggacattggggagcagttcgcagctgtcagcctggacaggactctccagtttggccacatgtccgtcacagtggagagacagatgatccaggaaaccaagggtgacacggtggcccctggggcagaggggctgctcaacctgcggccagacgacttcgtcttctacgtcggggggtaccccagtaccttcacgccccctcccctgcttcgcttccccggctaccggggctgcatcgagatggacacgctgaatgaggaggtggtcagcctctacaacttcgagaggaccttccagctggacacggctgtggacaggccttgtgcccgctccaagtcgaccggggacccgtggctcacggacggctcctacctggacggcaccggcttcgcccgcatcagcttcgacagtcagatcagcaccaccaagcgcttcgagcaggagctgcggctcgtgtcctacagcggggtgctcttcttcctgaagcagcagagccagttcctgtgcttggccgtgcaagaaggcagcctcgtgctgttgtatgactttggggctggcctgaaaaaggccgtcccactgcagcccccaccgcccctgacctcggccagcaaggcgatccaggtgttcctgctggggggcagccgcaagcgtgtgctggtgcgtgtggagcgggccacggtgtacagcgtggagcaggacaatgatctggagctggccgacgcctactacctggggggcgtgccgcccgaccagctgcccccgagcctgcgatggctcttccccaccggaggctcagtccgtggctgcgtcaaaggcatcaaggccctgggcaagtatgtggacctcaagcggctgaacacgacaggcgtgagcgccggctgcaccgccgacctgctggtggggcgcgccatgactttccatggccacggcttccttcgcctggcgctctcgaacgtggcaccgctcactggcaacgtctactccggcttcggcttccacagcgcccaggacagtgccctgctctactaccgggcgtccccggatgggctatgccaggtgtccctgcagcagggccgtgtgagcctacagctcctgaggactgaagtgaaaactcaagcgggcttcgccgatggtgccccccattacgtcgccttctacagcaatgccacgggagtctggctgtatgtcgatgaccagctccagcagatgaagccccaccggggaccaccccccgagctccagccgcagcctgaggggcccccaggctcctcctgggaggcctgcctgagtctggcaccatttacaacttcagtggctgcatcagcaacgtcttcgtgcagcggctcctgaggccacagcgcgtatttgatctgcagcagaactgggcagcgtcaatgtgagcacgggctgtgcaccgccctgcaaagcccagaccccgggcctgggggctagaggactgcaggccacgcccggaaggcctcccgccgcagccgtcagcccgcccggcatcctgcctgcatgctgcccccacacctcaggaccacccgagactcctaccagtttgggggttccctgtccagtcacctggagtttgtgggcatcctggcccgacataggaactggcccagtctctccatgcacgtcctcccgcgaagctcccgaggcctcctcctcttcactgcccgtctgaggcccggcagcccctccctggcgctcttcctgagcaatggccacttcgttgcacagatggaaggcctcgggactcggctccgcgcccagagccgccagcgctcccggcctggccgctggcacaaggtctccgtgcgctgggagaagaaccggatcctgctggtgacggacggggcccgggcctggagccaggaggggccgcaccggcagcaccagggggcagagcacccccagccccacaccctctttgtgggcggcctcccggccagcagccacagctccaaacttccggtgaccgtcgggttcagcggctgtgtgaagagactgaggctgcacgggaggcccctgggggcccccacacggatggcaggggtcacaccctgcatcttgggccccctggaggcgggcctgttcttcccaggcagcgggggagttatcactttagacctcccaggagctacactgcctgatgtgggcctggaactggaggtgcggcccctggcagtcaccggactgatcttccacttgggccaggcccggacgcccccctacttgcagttgcaggtgaccgagaagcaagtcctgctgcgggcggatgacggagcaggggagttctccacgtcagtgacccgcccctcagtgctgtgtgatggccagtggcaccggctagcggtgatgaaaagcgggaatgtgctccggctggaggtggacgcgcagagcaaccacaccgtgggccccttgctggcggctgcagctggtgccccagcccctctgtacctcgggggcctgcctgagcccatggccgtgcagccctggccccccgcctactgcggctgcatgaggaggctggcggtgaaccggtcccccgtcgccatgactcgctctgtggaggtccacggggcagtgggggccagtggctgcccagccgcctaggacacagccaaccccggcccctggtcaggcccctgcagctgcctcacaccgccccttgtgctcgcctcataggtgtctatttggactctaagctctacgggtgacagatcttgtttctgaagatggtttaagttatagcttcttaaacgaaagaataaaatactgcaaaatgtttttatatttggcccttccacccatttttaattgtgagagatttgtcaccaatcatcactggttcctccttaaaaattaaaaagtaacttctgtgtaaaaaaaaaaaaaa

SEQ ID NO: 51786 - DNA, 509 bp, Homo sapiens
  misc_feature (1)...(509): n = a,t,c or g
tttcttagcaaatcattgttttattttaacatcactgtttactgttcttcctaactggcagttactcctttgtagatagtacaaatcacaatgtaattcccatcattatgtgtataatatgtgttccttcttgttctaccttaacagcaagtgacaaatacatcatttttattgaatattaattttcaatttatttcagcagcaagcaccaaaatcaaaacccaacaatcaatataataagtatatgtaacaaataatctgaaattcagccccattaagacatgtgggtgcaatatttttatattcccaaaggtctgcatattttgggggcattaaacaacagggaacctaaaatttaacacaaaatcaggtgccatttaatactgtttaacatttgaaaattatttatttaataatacagatcgtcttaatgtgctgtaaatatttctcggcncagcatcatattgtcagaagtttttcccttttggaggcttcttttttccattcct

SEQ ID NO: 51787 - DNA, 627 bp, Homo sapiens
  misc_feature (1)...(627): n = a,t,c or g
cggggttttggccaaattgggcgagggcacaaaataaccacttaccccttctcaccgaggaagagcgggagaaagggtatggcacagtcacaagggtgggtgaaaagatacatcaaggccttttgtaaaggcttctttgtggcggtgcctgtggcagtgactttcttggatcgggtcgcctgtgtggcaagagtagaaggagcatcgatgcagccttctttgaatcctggggggagccagtcatctgatgtggtgcttttgaaccactggaaagtgacggaattttgaagtacaccgtggtgacattgtatcattggtgtctcctaaaaacccagaacagaagatcattaagagagtgattgctcttgaaggagatattgtcagaaccataggacacaaaaaccggtatgtcaaagtcccccgtgggtcacatctgggtttggaaggtgatcattcatgggacacagtttttgacagtaattctttttggggccngttttccctaggganttctggcntgcccntgccacacntttcccttggcccccagagcgttnggcagaattnggattngttcttcccccagagcgtttaccatacagagnggagagggatgactgcngattt

SEQ ID NO: 51788 - DNA, 369 bp, Homo sapiens
gaacaaattagatatgatttgttttttaagttgaggcttagccagaagggtttgtatggacctcttagattaaggtttgtttcacagtggggataatgtttgctatgtcaataaacaggtacttttctttcatcattctccaaatttggttcttaatgagatctgacatcccctcttccattagaaggtattgaaatccagtggaccagtttctccaagatgtctcttgaaagtaaaactctgcttaaaatctgttttttccagggctctaatcactactctgttaaattcctcaaacttgtaatgccccaaggcttgattttttccagataatggctctatcgttgcacataccctgattctgtcagc

SEQ ID NO: 51789 - DNA, 309 bp, Homo sapiens
  misc_feature (1)...(309): n = a,t,c or g
tcacagaaaacataggcaagggaaaatagtcaaaggttttcaaaactgggaaagtggaaacaaagatctcagcccagactgttaagaaagtgtatagagtgcctctcagcataatgttcaaagatagacatcccacttgtcaatgtcttaatcacaaagtaaaaaatttattttagaaaaatataatgacagatttacctcagatgttatagaaaagggcgacgnngctatcctatagcgnnnganacttangggttttggntanncccaagtttgttctgccccgggcnttgccggcttttttaaggg

SEQ ID NO: 51790 - DNA, 410 bp, Homo sapiens
gaagatatgaacaataggtcaatgaatattggatttacagcattctttcctaaaattgagagtttctgtaatttataaattggatatttcttggctcaattctttgtactattccatttgggtaaagctgtttttcagaagaatttagaactatttttttcttgataaaaaggccatggaaatgatttaagatttgtctgcaaaataattgcatgacacaaggttttcatggctaaaaataaagggtattgttgatttgaggagttagccagtgacaatgatgcttaatgtgtttgttcctcatgaactcacatttctgagtaaactttgaaatatgattaatagttcagtaggtctaaaaaatgagaaattaatgaaatgagtgacagattttgttcacagtttaatgt

SEQ ID NO: 51791 - DNA, 725 bp, Homo sapiens
  misc_feature (1)...(725): n = a,t,c or g
ctcaaggagcaggagctggccagtgaggtggtggtgaagaacctgcggctgaaacacaccgaggagatcaccaggctgcggactgcttttgagaggcaagttcgagaaattgaggccaagtatgataagaagatgaagatgctgagggacgagctcgacttgcggagaaagactgagctccacgaagtggaggagaggaagaatggccagatccacacgctgatgcagcgccacgaggaggccttcaccgacattaagaactactacaacgacatcaccctcaacaacctggccctcatcaactccctcaaggagcagatggaggacatgcggaagaaggaggaccacctggagagggagatggcagaggtgtctgggcagaacaagcgcctggcagaccctctccagaaggctcgggaggagatgagcgagatgcagaaacaagctcgcaaactacgagagggacaagcagatcctgctttgcacaaaagcccgtttgaaagtcagggagaaagagctgaaagacctgcagtgggagcatgaagtgttagagcagcgattcaccaaggtgcagcaggagcgggacgagctctatcggaagttcacccgcaccatccaggaggtgcacagaaaacagggttcaaagaacctccgtgctagaacgcaagcttcaggctcttnagcgccncttgtggagaagaaggagggnnnttcaattgtacgtt

SEQ ID NO: 51792 - DNA, 732 bp, Homo sapiens
  misc_feature (1)...(732): n = a,t,c or g
ttactggcatgagcaccatgccttactttggctagtcctatattctctagaattctctttactttgtgctagccaatctctcatgctgttcccctgttataatgaataattatctatattaaattttagcactttgggcttttgagtggtttatgtctcctgattggaccctgactaatacagagttgatgctgggaagggtcccaggagacagacccacacagatgggatttggggatcagtttggttatcttaggggccgtgctgagctccttgcaatgggaaatgggatgctgttgatttccaggaagtgacctcacaatgactcaagctaccacttagtgtttgattgtgatgaaatgccagctgtggcatatgccattgggagctaaagtggctgctgcacttgaccactatgaagactggtgtggaagggtccttctggatgtacttgagcaggggtccccaacgccagagccatggaactgtaaggagccacacagccggaggtgaatggtgttgaannnnnnnnnnnnnnnnnnnnnnnnnnnnnnnnnnnnnnnnnnnnnnnnnnnnnnnnnnnnnnnnnnnnnnnnnnnnnnnnnnnnnnnnnnnnnnnnnnnnnnnnnnnnnnnnnnnnnnnnnnnnnnnnnnnnnnnnnnnnnnnnnnnnnnnnnnnnnnnnnnnnnnnnnnnnnnnnnnnnnnnnnnnnnnnnnnaatattatcttcca

SEQ ID NO: 51793 - DNA, 107 bp, Homo sapiens
gtaaattcttcatatctttttagatctaattcaatattttctgactacttctgccatgtataataccatttttgtgcatgcttgatgtgacattcataaattgtacc

SEQ ID NO: 51794 - DNA, 633 bp, Homo sapiens
ttatgcagttgcaaaatggccatttattgcctacaggggaaggaaagggagggagatgaggggaagtacacaggtgcaaggaaacaagcatatatttagccctatacatcatgtgtgagcagtaaccaatctccaaaatggaaaaaaatattttgttatctgacatagtagttaaggttcttaagcacctcccttctgagctgccacaagatttaaaaggcaggactgcttttttttagtcaatgttcacattaatgaaaaaatactaccaaccgtgtccttttgcacgcacactttgtacagtgtctattgtgaaaaacatctcagctgagcagttttggtcaagattcagacctcatcaactgtttaactgtaataaatagaaaaataaagcagctggtgattttgtcagagagaatgtgttcagtaagagtagaaccactttctccagggatggcagagagtgttaaatggttaaaacacctacagaaccagtctattaaacattaaacactagcaagctacaattacatggcacttcattaaatagtctaatttaaaaaaaaatcttagattttaaactgattactgaaacacaaaaacaagttgatttagtccttggctttttcttag

SEQ ID NO: 51795 - DNA, 211 bp, Homo sapiens
tatcaccttcttaaacttctactgatgctgacccagtagaaaccattgagacagataaatatgagaggtattattcggaagcaccactgaagtgtccccaaaccactaccaaactacacattcttcttaactgtctttacaaaccaacaaatagaatataatcatcttttgaatatacatttaaaaaggtcataggtaccaaatgccaagc

SEQ ID NO: 51796 - DNA, 322 bp, Homo sapiens
  misc_feature (1)...(322): n = a,t,c or g
ggccttggaggagactctgggagaatcagccttacagcttcaagggtactggagatcaggctgccttctacaaggagagatttgcagacacagaagcggcacagagaaggccattgtgaagatcaaggcagaaaccggagttatggcatcataagccaaggaatgccaaggattgctggcaaccaccctgactgttagaagagtcgaggacatgnnnnttttggatggtgtgtggccctgccaacctttacattttggacttccagnctccgaaatgcactttcagaccatgctgaagtctaaattgaatgtcttaacactg

SEQ ID NO: 51797 - DNA, 3533 bp, Homo sapiens
  misc_feature (1)...(3533): n = a,t,c or g
ttttacggagcaaatgttttatttaataagttataagatacaatttacagtcggcgtttgattccagtttggcttccgtgtcccagcttacaacacccgtggtcctttcacatcaggctccgggctgttccactttctgtagggtgggcttttacccccaacactcgccccagatactacacctgccacaagagtggccacttcctcaggactaagcagcaaaacctaaaggtctgcctgcccagaccacactacacatttgggctcaggcaacgtccctgacactttaacctcattccaaagccagctcaggtctgcaggaaggcaggcaaaattccctacacctcatttctggatttctgcaccacacagctctcactgtttctgccaatggtgaaaagaccaccaataagctgctgcccttctctcccccaaccattcccaactttcaggccaaagagccgcaggagtttcattctgtcctgtctgtacagatcattattttccagaaaaagtgacccatgaagttggctggggcgggtgtggagtgttatgtcatgggacggaccttgggatgagggcgttaatccatgggcccctctgagatcactttaaacattttggtaagactgcccaggctgatgaagggctggagcgtgtgttaaaaacaagggctagtgttggttaaaagggatctttggcaagtgggaaactgctcgccactgcagaatttcttcaagaccaaggaagggactgaaacggacttggaaaactaaagcaaaaccatgactgccgggatggtctcgtgtggtgattctgcaagaaataatcaccagagcgaggggacaggtacttgagagacatgtgggccctggctgccactctgccctctgagtttctgtaggggtgccccggctgccactctgccctctgagaagtgtaagaaggccacagagcatgggggtgttggcgatgaggagcggtaaagcagtgctagtgatctaatagccaaatacattaacacggacactggaagagattaagcggattttaagtcatctcctttgccaaatgacaaccaaactaggtgtcccctttttctctgcccatcttcccctagccttgtttcataaatgctgaagagtgaaccagcagctcaggctagccagttttgtttttttgaaatgtcagtctcattgtgttcctggtctgtctgctgcagtggctggtctgttccaccaagagttctggtttgcacctagtgtactcaggatcttctcagccccctgaacaagcttgcatttcttaagattctccaatatgtccctcaagagtccagtctaggacttatttctgaaggcattttacaacagcaatattttagggatggggtttcagccccacaaacaggctggagggctttgtataaaatgaattacaaacaagcaacaaaagcaaccacaagaactctctccaggatttgagaaaactgttttaaggcactgtgacatgaaaagggctgccagggatgtgttcctccccccacttcacagccagcacataatcgcccctctccttgacgacgtatgtgacgttgtattgctggttgcctacatgcttcatggagacctcctcgcagggggtggtgggcccatggaccccgatcagcagcatgttggagccagctttgctgcagtccaccaggaaggaactcttctggcccacaaaggcctttgagagccctgcccccttagaggtcaccttgctggcgtccgaggatgccttgggaatggcgctatagcaggtctctgtagacgacctggtcactgactccaccaggatggatgaggtctcgttggctgagccagggctaactagacgctggcctgtcaccttggccttgaagggactgcccacgatgtggttgggcccaccgtatttgacgctgatcaggtagttaccaggagccatgggggtgtacatgactttgtacccttcaggtgtttcctggcaatccattttaaccttggatgggccttcgatggtgacggataatgtccctggacctgctcgggtggtgttaataaagaattccgactggatacctgtggtgcccccttcgagtcccgtgccataggcggacaccagggcagggttccccgcttgtccaggctccccaacgcgcactttgaaggggcttccaaccacgtggctcccattgaacttgacatcgatggtgtggacaccattctcatgagggatgaagcgaacagcatacttatctggctccagctcagacacgtggcactcctccacggctccagaggggctgtgcacctttgcatcaatcttgccttttgcgccattcaaccttatagcaaaggatgctggctggttaacttttaatcccgattcctgaaggctcataacagtgaggcggcgggcgtcgtcggagggtgcgatgaccggcaccaggtaggggctttccgggatgtgctcatcattgaacttgatggacacctcgtagttaccaggctcttgggcaatataagatacaccgcacgacccatttttatggtcatcgaatgtaatctcggccttaactggggccctcaacagcgatggagaggcctccagcgcctgcttcccgggtccaaatgctgaacttcagctgggactcccgcttctcctctctccaggccagggcctcctgcccgcaccttgtgggcgcctccttcaccaagtggccccacggtgaactggaaggggctgccggtgacgtgctgcccacggtacttgacgctgaccgtgtgcacgcccatctcctggggcacaaaccggacgcagtgtgagttcttccccatgggcacaatctctgcctcagtcacacggccagaggggctggtgacgtgggccgacatatcactgctgttgatttctgggattttcaggttcaggtcacaaatgctcccgacagtggccacggacggggcccgactggtgcgggtgatgctctctttgactcttccctccccactgatcttcacggtaaatgggctcccaggcacgtgctcgtcagcgaatttggtggagacgatataaaccccaggcacggtagggaagtaggagacttngcangtgccatcttccaggtcctcngtntggatgtccactttgctggggccttccaccgccaaggatatgccaccataacctgcatcccttgtgtccacgatgaagtcagacatctcgaaagtccggcctttctgaacaagccgcggccatagactttggctcggcgggcgtcaccaatctccgactggaccaccatgatagacacggggctgttggccacatggttgccatttttcttgatgctgaccagatgttcgcccacttcccgggggatgaaggagatgccaatgtggttgttgggcagcctcttcaggagacagggctcgtcctcggccagatggggccttaatgctggccgtcaggctgctgaggtcagtctcactgatgtcgagcaggaa

SEQ ID NO: 51798 - DNA, 1177 bp, Homo sapiens
ggagaaagaagatacaaggtggggaaatctggaaaaagatttcagacattaggctgataataagtggtagaatcaagtcacaagaatcacctcacttgtgtaggtaggttggaatcaggatagacactgtgatcaaggctgaggccacctgggatgagaatatagatagtcgtacaacaacccaggggatccagatacatgagaccagggcagcgttcagcacactcctgggcatggcggaagcaggaagcagactccagagggcctccctgttgtccagggccgttggctccctgagctctcctgtctcctttgggatgcgacttagggctagagtgttcttttcttcacacgttagccattccttacggctcttcacgttccacgcctagatgtgaagtgggacatagtcttccattgctggctgtccctgaggaaacagacatgagtcttggaggttctgaatgattttattgctaattatcacagtgacatagactagaacagagattagaagcatagtaagattgccaaaatcagagaatcttgcaaagttctgtaattctaagtgttgttctagatttcctctagagaaggttattagaatctccattgcgtttctctttctccttctctttcccttgaggttaggaaacaggttaaaactcagagaactccaataataatggtttaaaaacatcaggggcttcctgtatctcctgtcaggaagccgaggaataagcaggctggggctggtgggcgtcaacatcccagttttgttctatctttctgtcccacctgcactgggatgtggcttctacactcgaatttgcttcttggtttcaagacagtggtttctttccatagctgagcagattattttgagaggtgggtgatatgtgagagagaaatctggaaccttcttctgggtagatacaggataagatagatacagggtaaaatgttgagcactttgtacatgctttgagagcataatctttgtcatctgtttttttcccctagacaatatcaggttaccgtcaacattaatccatttaaaaggacatggactgttgccattaatacttttggattccatataacccttaacacaataacttctagaaaatgtgtgtgccgtagacacaaagaagggaacaatagacaccagggtata

SEQ ID NO: 51799 - DNA, 607 bp, Homo sapiens
taaaagccctgggtgggggtagttccaggacacctggaccctgtgtgagctgcctcctctcaccccaacccctcggatcctgggaaagagacagccatggctcaagggccagggacccctgggctgagcccagaaatggctttccattctcgcctgggccggggtgggggtggaggccagagccttgacccaggcagatgaagcccccagctttcaagggggaaactgaggctgtgtgagggacacagctgtgcagggcccacaaacacggtcctttctctaggttagcggatgcagatgcctgatgagtgccatgccctctgtggacacctggggaggggggtcacctccagcgccgccctgggacttccacttgcacgtgcaagagacttaccctttcacacagatcacctgcctgccgcagggctgatgaggatgggttgagggagcgcagccactgggtgtcatgcactgtgggggttctcccaccttctgcccctcctcaggttccttgctgcttctctcctctcccaactgtggcacgctgagggctcaggcacaggaccgctcctctggggcaagccttcaataacctttggacaacctc

SEQ ID NO: 51800 - DNA, 1227 bp, Homo sapiens
tttttttttttttttagttataattactttattaaccttttgatctttcaacatttagatagtctttcttaatatttccaggagagtacctcatttttattttgaaaaccattcagcacatttatcttatgtaacatgcagagcatatatctatctgtatttttaaaattttcctgttactcattgatacatagtacttaattacatgttattccatgtacactgaaaacaatataggaaatatatacatctaagacttctactttgtacagtctttcattaaataagaatacttacacatacattttcagatatttctaccttcctgtatgtgtttggaattgtatgtaggtagccactgaaagaatttgggccccttgggaggatggcagtggaagtccatgaagtaaagagcattctttaaaaagcagatttgattgcataccttttagttatttgagattctgagaattctgataaaccccaaagcagaaagattccttagtacccttggaagatgggaaaggtgagggaaatatttgaagcagggtcagaacatccactaagaacatagcacctcagtagagcttacattatagtgccagggtagagttattactgaatagcttaggatgatgaacattaaccttcctacaggagtagtagcagctgatttggtgaccatcattggtcaccttttagtgtaactgcaaactaagaacaattatggcttgacatatactccatgtagggaagtgatgggagaggcagcctctgtgtggtccatccttggaagcactgcatcgattttgctcccctctggttttaaggagatcttttagacctttccttgctaactgctttcagtaaattcttgatggccttcgattctggattcagacatctcttctcacccttctttttcattgtagcaatgatctcaacacgtggacaaaattggcttgcaggaataatttcaagtttttctaaagaccttggattaacaggttgattactaatgctgatgcaggtacagcgtacagttctagagagaggtactccttgaatgccacttagagtcagaaagataaggcagcaaatcagaatggcagtttgattcatggtgctgagactggaggttcctctgctgtaggctcagaatatgtctaagcaattgaggaatgtctcagaaaacgtggggctagtgtgccatatttatctgcaaag

SEQ ID NO: 51801 - DNA, 402 bp, Homo sapiens
ctagtgttcatccctctcaggctttggcctcctcccactctcccgccctggggcccattcgtttaggaagaatgggagagccggtcgtggcccctgggcggggtaaaggagggaggcttggtaaacctctgctggggaggacccagtacagtggcagctccttgtcggggaaagaacggatctgcgtcacacgctcttacaggggaaccctaaggggcctgaggggtagggcttggtctccacccagagggaaggagaaatttttcgagtcgtaaagaaatgtatcagaagccatggaacatttacagccgcacacgctgggtctcccaacaaacagatccccaaaatattttccagtgctgtactcgtggcatagacccagacccacagaccaggaggaag

SEQ ID NO: 51802 - DNA, 497 bp, Homo sapiens
  misc_feature (1)...(497): n = a,t,c or g
gtaatctgcattttagaaaagtaactctggtgccactctggagagtagattggataagaaagaaactatagacaacatacaagctctgagacagtttcaagagtacagataacaggtgctgatgtaacatggtactgagttaatatagtggccttgcccttaaaaattctgggatcctaaatagaaacttcaaacttgaaatgttagtcttaatagatcttacaaatttaattctaaaaaaaaaaatgaanaccctgggggagnggcacanaaggactgtccttgcagtatggatgttgtagtgctcaactgatgcttccattctatacccaaatatcagaccagtacctcctgcctactattcatgatatattttcatctggttagatgtccagagcaagacattctatttttggagatgcttttgttttttccttcaagtaacctcaaactacttatcagtttcctanaggaagttctggcttctggactgccag

SEQ ID NO: 51803 - DNA, 448 bp, Homo sapiens
ggcgaagagcaacggagagaatgggccgcgcgcgcccgcggccggggaaagcctgtcgggaacccgggagagcctggcccagggccccgacgccgcaaccaccgacgaactcagctctctcgggtctgactcggaggccaacggcttcgccgagcgccgcatcgacaagttcggcttcatcgtgggctcgcagggcgccgagggcgcgctggaggaagtccccctggaggtgctgaggcagagggagtccaagtggctggacatgctcaacaactgggacaaatggatggccaagaagcacaaaaagattcgtctgcggtgccaaaagggcatcccgccttctctgcggggccgtgcttggcagtacctgtcaggaggcaaggtgaagttacagcagaaccctggaaagtttgacgagctggacatgtccctggggaccccaagtggg

SEQ ID NO: 51804 - DNA, 999 bp, Homo sapiens
tttctctatacaaggctgtttatttctgtacaaaaccatgtttctattttacacaaagaacaccccaccctttcccctcacaccagcaccctaaccctggggagcatcccccaggaggagggggctgaaggaggccccaccccccaggccctagcttctgcctgccctggctgggccagcctgagttgccactgtaaagaaaataaataaggaggctcaggcagaatctgtgttggaccaggcagaatctgtgttggaccagccagactccagcccagcccagtggccagggcagcttggccctcagagggtgggcaggatgtggaatgtcagttcatgaaccgtgtagttatatggagaccccgccctggaggccttagctgccagggttacaagtaggtgtcctcactctcttgggacgtcaagctctcctgggagcggtggtgggctgaagaccctggggagccaaatcctgaggggctgagtccttgggggctgaagtccttcgggggcacatgctgtgggggacatgcatctcctgcagcggccaccaccatggcttgatttggggctgggggcttctccagctgccctctccccttcatctgtttccgctgctccttctgggcctgcttgggtggcttgggcttggctttggagccagggaggggggcatctaggggcaggcggatggatggtgaaggttgtagggcaggccggggaccaggttctgcatccaagatagccttggcaccatgcagcctgggcggggagcggcactgcagctcaccccgggtctcctgccagcgccgcagctgaatgaggtgttcgcgctcaatctggcgctctgtcacgggcaactccaccacctcctggaccagaaaggcctcctgcatgatcttggggctgaggctccgcactcgctcgatggtctcgtactggccctggcaggctttgaccttctcaggggagcccagcgcgtgcttcagcagcaccagc

SEQ ID NO: 51805 - DNA, 136 bp, Homo sapiens
tttctttgtgattgaattataatggcaaagtgagtaaatgagtttgcgtgtgtgttttaacttatttgactaaaaggctgtcaaacctgtatcacaatttaaaatttttttcctgggaatcatgaggttttttaaa

SEQ ID NO: 51806 - DNA, 488 bp, Homo sapiens
ttttttctacagcatctttttattgtctttaccattactttaatgcattttaaaatttatctacattaattgggaacaaagaaaaatagacatttctttgtttttcataaataactaatcttcatatttgataaaaatctcaaatgattattttaccttcccacaaatataatacatacaaaatttttctgaagtaaggtcaacaaattaagtatcttgagactaacataaccacatacaactgctgtttctactgactcccaggaacgaagcagaaacaaaaactcatcaagctgctctgggtttccttttgtaagtgttacagattcagaactgtaatcatgtatcatctgccagtaataacatatggattcaaattgattgtctacaaataaagtatcgctggctctagtgtaacttctggatttaacataacagtgactacagcatgggataggcactatacatatatggaaatcataaacagt

SEQ ID NO: 51807 - DNA, 327 bp, Homo sapiens
gggaggcaaaacaaaacaaaaatccatacaaataaagtatctcctccatccatgtttgcactattccttctcattcccccgtccaatgccacaatttggtaagtttgcctcaacacgttttcagttcttaacactgtgataagaataaacaatagatcccatagtaagatgacctgttaaaaggaatggggcatggcagagatgagtttggatgaggaaaggtgtcagtccgtttgggctgctcttaactaagttctgagatgtgtgttaggtaattttgactttggttggaacatcatagagtgcactcacacagacataggtgac

SEQ ID NO: 51808 - DNA, 1577 bp, Homo sapiens
tttttttttgtaataaaagcagcttgttttctgcttgaacaatagctctgagagcaagaaggctggaaatgcacattcagaaatgaggtaagcaggacccagtgaggcacgacgtggtttactagaagtggccggtttcctggcagctttgtaaatggactctaacctcagtggaatctgggccccggctggatcaggaggcgaccatatggcttttcttgtttcacgtgaagaatctgttgcgctgagagcaccaggagcaggtagaagacccgggcagccatcctgcgggggctgagaggtgacaccaggctgctgaagtcgggctccctgttagcctgcagctccagtgccactgccctgtgcactgcttccagtgagagcagctcgagctctgggggcagcaccaaaggcatctccatgggcacctcagggagttcaggcaccacgggcaatgcaggagcttctggcgcctccacctcaggccaggcccaccgttcttctggtgggatgaggctgatgcgggacttctcctcttcagctgcctctagggagatctctaaagacaccataaggggaacactgggctccagggcctccctcgggacctcaatctcacttggaacttcaatctttctcctttcctcctcagcggtgcctcctcaggcagtctccctgagggcttttgggggtggctgggcacaagtgggtccagagacccagtagttcagggggtagccagccagagagagttggggttctgaacaactccgcagggcctctgatggtcctctcgggcggctgcaaccataggacattcccagcagtgggctctggtttgcagttgttcctggaatttctccggggagatctgagtctccttgtcccagaacagtaaccggcgacgacggcggcggcgaggaggtggggggactgggggcctcctctctgggctgggtggggctggcagacgcagcctctccgggggggtcacctccatgagtagggccccaggttcccagcctgtcagcctcagctcctcaggacccagtgcctctcctattccttccacctctgcaggagctggaggtgggagccgcgggatttctaacaagatagcttcttcttcctctgcgatcagcaggtccagttctcggcggctgacctctgggagctcccgttcaccctcaatctccagcatccgtaatggctctgcctcccaggatcgtgatggcctcaggtggcagcacagtgaccggaatcctctctggctccctgggctctgtaggaacttcaggagggatctcttcaactctctctgggattgcagcctctaagaggtgtcgaatctgagggatatcgaaaggactaggaagtctgggatccacagacatcatcccaaaaaagggatctggagcatcttctagggtctccatcatggccaggtggttaggaagcagcaggctgggtagctcagtctccatatctattcggatctgcagctgggcacggtggaggcgctccaagatgtgctggatgtcctccacgaggtactggcattgttgagaatagacgcg

SEQ ID NO: 51809 - DNA, 328 bp, Homo sapiens
  misc_feature (1)...(328): n = a,t,c or g
gttacaaagcctccaaggcctgtacaactgtggcctctccagagaagtggttctcagccttgactgcacactgtaatcacctggggactttaaaaagtactgaggcctggggcccacccacaaatgctgatttaactcctccagggtggggtctgggcagtggggaggcaggagccacccaggtgattccaatgataggtgtaggttgagaagcgccaccttccagcttcctaactggctctgggaggggagctgggtngggaagttcaggaggtnggaactttgttacacgcagagcanctggggcaactacagcatggctgtggtt

SEQ ID NO: 51810 - DNA, 391 bp, Homo sapiens
tttttttttcgttagaatttttttattaagtacatcaaaatttcaccttacatttgaaattgcatagaaatttaaagtgctaaagcaatcattgttttttcaaaaaaatgaatttgaagccaaagagtggagagtgtggggatccactgggtaggacatttgagatgtatgcaatgtaggaatcttatttgaatcctgacttgaattggaaaaaaaaaaaaaaaggcacaacttgaacactgctgggtagttattaacactaacaaactgttaacagttaagtctaacaacagatttgtgggttttatttaacagtccttatcttttagacatacatattgaaatatttaccaaatggaaatgatttgctatctggggatttgcttccaaa

SEQ ID NO: 51811 - DNA, 2921 bp, Homo sapiens
tgtaatgtaagacatttattttggctaaagttctggtgttttaacactgatttgtgatacaacggacattaaacttccttttaaaaagaaaaaaacaatttggtagctctcccttttctgtccagaaaaattcactctttcataatcaaattaccctaaaatttggtggcgttaagaggcaacaaaagttaagcttccaacgaatctgttctctcaaccggaaatgtcttctatttccaatcaggataaaaccttgacttacttgcaaggactatcacggttagcccttcagtgattcctgacaccagttctgtgaaaaagaaaatttcctgcgagaaaagctcatgtcttcatattgaagatcagtactttttttttttttttttcctttaaaacagtagcatcttaacttgtggcacaaaaggcaccaacattccctttccaaaccatccatcaccatgggtggaaggcagcgccacctgctgcccatcatattatggctcacatacccataatttccttgcggtgctgaattccaagtggggattattagagacccctcagagccaaaaggggaccttagaggtcttctagatgagtcccctcatttgtaggtggtggtttctggataactcagagtggcagggacacagacgagcctgtggaaaggtatactgctttaagattgagaagaaaaccatttggcgctctaattttgcctggatggtgctctgtcagtcaaagaaagggaacaggtctggggagggggtaagggcaccctgagttcctgttccatcacttcccaggcagtagaaggctgtccaggaacagctcccatccgcagctgggcatgtgttggctcttacacaagagactttaattttacttgaagaactaagagctaaatcttgttaaagtaaatacggggtttcaggggtgaaggactatccaagaaatccccaagttatcagcataaaagtagtcccaaagtaaaggcagtaattctcccaatggccttttctccctcatgcccccacagagactttcgagaggtcctagttagccagccacaccaacctgctgtgttcgcgtaagtagctgtgcctgtcccatggggtgaccactgcctggtcatgggaggggagccccagccccagctccctagccttttccaggagcagagcagaaagctctactttggggtgctacatcccacctggagaaagagctgcacattctagcctatgagggacccacccttttcacttgcttctccggggctggattgagggtaagtgcagtacacctggagatcccagggagcccccttcttgagaaagagtatcgtatgaaagaatccagcttcagggagcagcaaacccaaaatcttgcccagctccaccttatggagctggacaaccctgggggccaggcccttaatcattctgaacctcagttccttttttttaaaaaaggtcacaatacaagaacaagctctactaactttacagggttactgtgaggctcaagttagattaagttggaaggctacctagaagctgtgcagtgaggtacccagtttagaggatggcccatttcacttaggtgggtttatctggacacctttttcactatctggagaagaagacacatactggttgttcagggctgctgtggtcacagagaaaagcggacagcaaatgacccaggctgggcagggctgcttctgtgtgatcagagaccttcacagccgggagtgaggccttacgccacacctggcctctccggtgtcccagccaggagctcctggcccaactctgaaaaaggcacattcccctaccttggcatattaacactgccctgaatttaaatgtaaaactgagttgtaaatagtcaacaaaagtccctgatatttcttttgttttaggtaagactccttcacaaggccttgcgagtgatcctaccataaattcagtcttctgggagcgtgacacacccaccagaacaatgccctatatatatttggtgctcaaaaagtgtttaatttcttaaacttttatcagacacctatgtgcaaggtgctgggggcatggctgaggaccttctctttgcccagagtgaccctgaagataaatagcatcacaatcactttccataataacaataacgtaaaatcctaacaagactgtatttaaaacaaaactcttatattctggcaaatgtgcatacacatgtgagggctggtgcattccaatatcatccttagaaagtcttttgaaaggtttatcgtgtttgggtttttttgctctaccaccaataaaggatccatttggacactccaccatgtctcatgtctgcctggctgagtcacttcagggatcccgtgctggcaccagagagctgtaagagccacctgcaatgggcagggtgtgtgcctgggacctttcacttccctgcttgtcttctggccgcgtttctgagaggcacgccccccacacacatccatgcacacacgctgtaattggccaacttcctccttctgttcttggaatagcaaccgagacaaaaagcagttagcacgagtggcttgggcttgccaacactacaattcaggacaaaacccttgtaattctccaaatggtggggtttttaaataggttggacttcaactccctgttttctaaaaaagaaaaaaaaaaagcatgcccaaggcatcactcttctcaaaaacgaagtgactgagataagatcgaagggaaatattccagagcagcagattctgaactcaaggcttccaaagattcacattttgaaaactctatggatttaggagggttctccaggtttgcccacaaggcctctttgtgtagggaccattcatcctaaggaaatcattcaaatgcagccttgctgtgggaatc

SEQ ID NO: 51812 - DNA, 867 bp, Homo sapiens
cttatcagccaggattctgggagatggtaaagttcgcctgggtgcagtatgtcagcatcctgcttatcttcctctgggtgtttgaaagaatcaagatcttcgtgtttcagaatcaggtggtgaccaccattcctgtgacagtgacgccccggggagacttgtgtaaggagcacttatcctaggaaaggccatttctgaagactcaggcaggaccgtggctgcctcattgtcatcttctgggaacatcttagggacctttttgaaagagcccagcgggacacctgcgggcttgtgtgcttttccctcagagacaacggttctttccggttttgctctacacagttccgtatctttcagagctcctgcagaattgtcagggactagtttgtggaaaggtctgagagttcctggaggctataattagctttttgggttttccttctttgccttagcgttgaatttcaggagaaaattgcagtcagttcagacatcttggaaagagtcccatctctggtcaagcagagacttttcctctgttgaactgaggaacacactgtgcatttctaccttctgttgtgagccactcttactcttttcagggctctcttgtgacaaacatgccaatcactagcactttgcacccctgggcttctccatttcccattcacagctttgatttccagagctgaggcctttaactggagacctggaggggcagggcccaagggcaagggccgcattagcacaggcaatcagggagggccgctgaaggacacttggaccgtccacctgccccagcccaacagtcagtcatctgtcatcagctcagctgagcagccctggatctttgccgtactgtgactgggc

SEQ ID NO: 51813 - DNA, 581 bp, Homo sapiens
  misc_feature (1)...(581): n = a,t,c or g
agctgcggcacaagaatgagatgctgcgagtggaggccgaggcccgggcgcgcgccaaggccgagcgggagaatgcagacatcatccgcgagcagatccgcctgaaggcgtccgagcaccgtcagaccgtcttggagtccatcaggacggctggcaccttgtttggggaaggattccgtgcctttgtgacagaccgggacaaagtgacagccacggtggctgggctgacgctgctggctgtcggggtctactcagccaagaatgccacgcttgtcgccggccgcttcatcgaggctcggctggggaagccgtccctagtgagggagacgtcccgcatcacggtgctggaggcgctgcggcaccccatccaggtcagccggcggttccttcagttcgaccccagggacgttgcttgggagggtgtttgttgtttaagttcccagcctgggaagcacggggtgcgcgaacattcgccattagcaaccaggaacaacaagaagaaaccnggggcttttacaaggacantcttgttttattngggccaacaaggaacccggnaagaagttttttttccaagaaat

SEQ ID NO: 51814 - DNA, 796 bp, Homo sapiens
tttttttttttcattttaaagagctttattacaggatattaatatttaggacacttcagagcaccttatacttctaatcagattttgggtaactggttttaaagtgttacttgaatatttttctcatactgtctttcaggtaaagtacttctcagagactgtttaagagatgttaatttgattaaacagtttatccttaataacctgagacatcaatccatggatagcttctatggtagttttacagctggaaaaaaaaacacacatcacatgatgtcataaattgaaaactatttcaaacacacaagatcagccccaatccatccatgtaactccaatgagtttagttttattcatacttctcaaaccaccccaatctgaagttttcccttgtgattttattagtcttccccatgtctttttgaccatttcattacttactagaactttcacaagagaatgacaacgtaaaatttgatacaattgttctgttttagaaggtgagtaaaattatacaaacctgtaattagagattgattctaatattatattatattaaaatctgttattccttgtttattacttaggataatttgacaaataattttaaagaatactatgcttttttctgaaataatcacaagcatcctccaacaatcagaagtcaaacttaggttagcgggtgaaggccttagattttagaaatgataaaaagtataaggcaaaagaaatgacaaaaccccaccaatactcagaagagatgcaattcttgtaaagctaccccaaaaaggaaaat

SEQ ID NO: 51815 - DNA, 460 bp, Homo sapiens
gttggtgatctcataaaatggttttgaccttttggtatcttaatttctatctaaactttatcagaaaattttctttgaatatatcaattagttggctgtgggaattttccctttccacattaataaatgcctttctgtgtttctgaatcagaagcaaatgattagggaaaaatatatgtccaaacaagacaagattagtttaaacagttaagaacatttagtccacattgtcttgtcagccagcaattgtcatggaagctatcatttttaagagtgccactgtgtggatttttttttcaagtggttattacattaaaattacctcatactgaggtttttgcactgaaatatcacagtttcagatttcatggttaatgttgtgcgtatgtttgtatgtttttaaaggaaacttgcattttcaatagttgatcctaaatttcataaactgcacttctttaca

SEQ ID NO: 51816 - DNA, 890 bp, Homo sapiens
tttttactagaaaatttaaaatttttaataaatgtgctttgttcacaaaatgtgaaaaaatacaacaaacacacacgtacattttcaggtatgctacctcccaccacttggcaactatggtaaaaccacatgatctagtcatgatactgaagaatccaaccaaatgattaccatttgtttttgaaacaaccaaattattttggagaaccagctgtgaatgtgacaggaggcctcataacttctttatatccaaaatgaaataattctcaggagtacccatacagtattagaaggccctattaacttccacttgttattacatacatgatctggcatcaagctgcaatgactgcttatacttcaatacttatacactgaattggtttttgtggaatgtgtatcagtttaaatctgtgccaacctaattggaataagctgaatttacagtaacaaaagatataaattcaaacaaatttatactaagtggtagtaggttttataaagagacttcctcagagtactacgtaaaatacatcatgcacactttggagcataagcagaatcaacatctgtaaacaatcagaatttatagcaccaacattttcgctgtaacacaaaggctgactccagggtcatactataccagcctttcaaaagcgctgttttcatttactttcaaagcattttcatttggtgtattgttttctttgctcttaagatatttacccaaatcaaaaagcaaacagtatggtaaaaggtactaccaaaatagttcaaaagagttctgtattatccttaacatagtgcttttttttccttccccttctcttggggaagctacaagacataatccttcagtgcttaactggaaagaacagtcaatcctaaat

SEQ ID NO: 51817 - DNA, 823 bp, Homo sapiens
  misc_feature (1)...(823): n = a,t,c or g
catctgacagaatctcagtaatgtttaccaaaacatgtctttctacagctggtaggataaatgatgctaccctgtagctcagctacaggctgcagtgcaaacttttcttccatccagagaaagcagaattccctcctagtaacctcattacaaatactgttactagaagggcatgtgctgtctgtcaccttcagtaatatttgtgccatctcttgatgactgatgacctggatcgagtatttctatgaagggtcttcttaggccccttacatacgcaagaggggtgctctagtgccatagctgtagtttcacaggaaggacaccaggagaagttatacctagggctactgagcagctcatcatccctgtttctgcacagtttcctgaaactggccatcagggcctctgaggcactcaaatcagtttacttttagcatgcccccatcagggtgggtctcactgttagtgaggatacgggtctggtttgatgtttttctaggcaaaatgcttaagtgttctggttatgccattcattcatacgatgtgtgaaatttgcttaaaagggaattttcatgatttgatttagattagtatttaaatatctgctttagatagcaattaattttattgtaaaaataaggaaaaatatgtgaatatgtgaattttttaagcctgagagatgatagaatgttcccatatttttcttgtaaaggaaaataatattttaacttacacatcctgtaggaaaataccaccttttccccttgtattacagtacaatgtttacattactatactgtcaggctgaangtttaaaaatggt

SEQ ID NO: 51818 - DNA, 631 bp, Homo sapiens
  misc_feature (1)...(631): n = a,t,c or g
gaaatcctgcagtccgctcccatgtaccagtacctggataggaaactgttcaaggaagcctaccagattgcttgcttgggtgtcacagacactgattggcgtgaactggccatggaagcgctagaaggtttagattttgaaacagcaaagaaggccttcatcaagagtacaagacctccgatatttagagctcatcagcagcattgaggagaggaagaagcggggagagaccaacaatgacctgtttctggcagatgtgttttcctaccaggggaagttccatgaggccgccaaactgtacaagaggagtgggcacgagaacctcgcgcttgaaatgtgttggaagaaaagctgagtgttgggagagaagctgaggcagggcttgcatgtttgctagacttgctgctccttgcttctagcattcccatgttctcaaggagccatatgtttctcattcacttgatacaccgtttcctttcaacccccacatcctcaccacctgtttgttgcagcctccacacttgtgatagccccctggtcccattttgtctctcaaactgtctttctcattccttggactccanctggcttcgtcgcccccatgacctgctgttgggtctgatcaccccaa

SEQ ID NO: 51819 - DNA, 2192 bp, Homo sapiens
gtcaagagcaacactcaggccttgtttgccaaaaggcctggttcccatccctcccctcagtccctggccacaggcgtctcaggagctctgctggcttgggggctgcgtcttgggataacccccacatttgtaaagtactttaaattttcaacttcaactcaacatctattgagcatcttatgtcaagacccataatctatactagggataaaaatgagtaaaatagattcccatatcaagggctgggtaggggagccgtgatgtctttacataatggtaaagacatggctgattcctcttacggtgggtgccctcacactgagccagattccaggacatggttcctcacagcagcaggcaggaggagcattctcccggcctgggcacccatgcagagcggccgtggtgatggtcagttctcccatgttgtgttcgtcccacctcccaggccctcctttcctgagtgctgggctgagcactggtgggggctgtgtttaagtgggaggcccgagcttggggctctgggaggtcactgtgacacagaccctgtctgcaggcaagcaggctctcctgatgctctcaggagccccgcacctgtggggaatgagtcaaaggtggccttgcagccacaggggatgagagaaaggctgggcacctgctaggactccctcacagccatgttgaacccactctgtgtaccctgtcaggctgtgcgggagtgggagcgaagtgagtgagaggggcaggtgggagagccgaccccaagtggaggacaggcccgctcctccggggccctgggcctgagacaccaacctcaatatccggtctaggacgcagtgtggaggggcttgctttctccaaccctttctgacctggcatcttaccccaggtaaatactggggctgcatgcagcgcctgggcctcctgtccagactcctgggtgcctagagtgccaggggctgacaaagaagaagtggaggcagtgaccgcactggcgtccctctctgtgggcatcctggctgaagataggccctcggagcagctggtggaggaggaagaacctatgaatctctaaggctctggaaccatctgcccgcccaccatgcccttgggacctggttctcttctaacccctggcaatagcccccattcctgggtctttagagatcctgtgggcaagtagttggaaccagagaacagcctgcctgctttgacagttatcccagggagcgtgagaaaatccctgggtctagaatgggaactggagaggaccctgagaggagacgggctgggcggcgacccccacagggctctcgagaacagattctcccctccagtatgggccctggctgtggcccccattcctcaggactgcacagaggaggactggctccggctccgtcgggctcacccttaaccactattcctgggctctgcaaaccccagactttgcacacagccccaggctccacacagaaatgtgaacttggcctcagacaggctggcccttcctaggctctaggggctaggggggagtggggagccaagaggtcccatattcctgagtgcaggggtagtccctctcacctgcttcctcagacgactctggaagcttccctctaccaccgggcactgagacgaagctccctgacagccgagactggcagccctccatctggtccgtaccctcgccagaggcccccctacatcaacctcctgggcgatgcccctggtggagcagatgggtgctctgggagtcctgtgcttcctgatccaatggtgccaaacccttcatctcccccagaagcgcagccatacccctgggacccctcggccactgcccactcggggagccttctctgtttctggggcctcccccaccatagctctgattcccaccccacataggaatagcctgactgagggggaaggggtgggagagaagatacagacatggaggaggggaggctgctctggcaaagtcttcaaggcttttgggggtccaggcctggggtcaagaaggaaaatgtgtgtgagcatgtgtgagtgaggcgtgtgtgtgagcgtgtgtgtgagtgaggcgtgtgtgtgtgtctttcctaggacccaccataccctgtgtatgtatgcatgtttttgtaaaaaggaagaaaatggaaaaaaatctgaacaataaatgttttatttgcttt

SEQ ID NO: 51820 - DNA, 249 bp, Homo sapiens
ttttttttccccttgaaattcagacaatattaagggcaggaagggttttagagatcatgacttattcaccaggtaagaaaaccaagacctagaattacaaatctaccagttgacagagcacgaactagaactcaggcacccagacttctgggccagttatgctccaccaaacttacaaaaagcatctacttggtttccatagtgactttccttcctttgtttttaggtaaatctcactgatatggcttc

SEQ ID NO: 51821 - DNA, 2473 bp, Homo sapiens
tttttttttttaaggagaattcattaataattttattttgaattacaatctattatcacttcaaaaagagccacttcagaaaacatccaacggatgttgacttaccagtaaaaatgtaagtcatcaatgtatgatttatactacagaatacataataaattatatttacatgcaatgcactagactatcacacacaaggtaaaaaaatacagtattttatgtacattttaaaagatttacatgttcatatacaatttataaagttaaaaattctctgtacaaaatcttacatgtacagagtttatataagccccattcttatggctgtatcaccacacagatttgcttaaaactataatactacaaacactcgggttcttcatattcaatcttggcacccatatagcaatacactattctgaaatgtaaattacaaaggaaataaaatgtaatcatgcagacattttttaatataagaaaatgcgataaaatatactacaccagatcaacatttatcaattccatagatactgagttttcaacttactgcactgttttcatataagtacatgcaaaactagcagattatggatttttaaagtaacattaaaataataccatagtttgacaatacttgggcaataggaatgaaaactaagagccctagcctaattatttctgccttaacagaaatctcaattaagacattacatatataaaaatcacagaaatgtcaatattataattcccaaatttataagatctgcatcacatcaaatagacactgatcatttaaaaaacaaaacaacaaaaatgtgtttgacatttaagagcatactcactcttctgagaaggggggagggtgaaatctatgataaaccattaaggattatccactgtccctgctaaggaagcacttgcatacttccaatctgcttaaagacatctgaaggttttataaaatgtttaagataagctacactagttatttttaaaaatcttgaaaagtaacaaattgaaggtatcagcaccttccctcctccccaaagtagctaaagatctacgagaaaaataaagtgccaatgtctaaagtactgttaatggtttaagaggcactaccccatttgatggcttaggataaatatgaaaataggccagatctgatctgaataacaaatagaaggtaggtattccagtatattaattcctgactagatgggggctaaaccaggaaactacctattcccccatttattgctttgaaacctgtaaatataaattctgacagaacaatcagatttctaagatggaaagcacagtgtttgtgccactttgaagttgaaaaagaaggtgcactcttgatcactgggaggagagctgctgagactctcctctcccacaactcatatcttcacaagagtcctcactttcactttcatcaaaacaacccccctcaggtatcgttggcagctcaggaacactatagtagctgttgtggaggttctgggctgtgcgccttgaaacgatccaaaccaacttcttaagatctggtttgcaacattcaggagaagaatactcggcctaggcatttagaaaccaactctctccagtagaagaactcagtgtcattaatcttggaatgttttttaactagcaagagaatttccagtaattcaacagatttcaaagtttccacttccaaattgagaaggcacaaggctaatacagatggttttgcttttgaaaagatgagtcggcagttgcaagctttcagctgagcttctagtttatcaaggctcagtatttctttcctttctgaagtatgacaaagtataatagtatggtataagtgcaaaaagtttaaggcagtagtagcttccaattcatagtgcaatttttctgaaattattttttccatccgttttatgtcagaagcagtacatttacactgactaatccggatcacatcatgagtggatggaatattgcagtcttcttcaactattctagcagccagcaaaaaagaacagactccaatgcaagacaaatgtttaggtttcaccttcataagagccaagaacctgtccaaaatattgacagccaggacaaaagtttcagtgcaagatccaaaaaagttggctaaactccttaaatcttcaactttggcatttctcaatcctggacacaaagtgttatcattctccggggtagcctcaatcaaactcagccctttttctcgaggttggaatctctcttcttgttccaggtagacgttcaacaacccgagaagttggaccccttcatgacctgccaagtgctctgcccccaaatccttcatcgtgccggagacgcgcctccacccgcccgcggcctcgcggtccgcacggactgggcgcagcgggggcttccaaacctgtctcgcaggtcggggacccaccgcctcagcggtgcccccggtccggcatccgaccgg

SEQ ID NO: 51822 - DNA, 572 bp, Homo sapiens
tttttttttttttattttttgtacttttattgaaaaggtacatttaaaaaaatacacagacattttaccatttacaggttgcagatatagatgctctaaaagagtccactctattttgttgttctatgataactcttgcccctgatatcacaaacattccagtcttgttgatatcggcttagaaaggggggcatgggagcatgacctgcaatatattcagcgaacagaaagacaaattgttcaattataaatttttttatcttctgtacattattgcattagggagccacaaaattatgtagcatcattacaaatgaaaacaggttaaaaatgaagaagatacttatatagaaatacatggattcattgtcttcttgcagaatgcacaagaggtgcaaaaatgtgcaatttaggaagctctttttctgtttgtatacgtttgcttagcaacacaaaccagtgaggaagctacaaaataagttaaacaaaaatagcaaacaggtagtaattatagctatgttatatggctttctatttcatttaaatatctccaaataaaatgtgaaataaag

SEQ ID NO: 51823 - DNA, 363 bp, Homo sapiens
aacaaatgtcagataccaatttttgcaaattagatttaatcttattaaatgtttttatcttactctttctgtacagatatatcaaatcacatgaaatatttaaagtttgaaaattataattacctataaagctgtgaaaaatagaagtataatttgaaaaaacatttcacttatcagagatttttatatttatacaaaagattactaaatgaaggattgctaaatgtttttggttcaattacataaaaattaatattctgggtctgatctgtgcagagatttaaatatcaaatctaaatttaatgtagagatacatactatttctccatatgaattttaagatattttagtgcttcaagactg

SEQ ID NO: 51824 - DNA, 465 bp, Homo sapiens
ttttttttttggtattttcagttagattctttcttcttagaggtacagagaaagggaggaaaatagctacagacatggtgtaagtaggtcacagcagtttcaatgcaccaaaaaatgtgacatctccatccagtgatatttgtgcattttctcttggtattgcaagttggagttcatctccttcttccagttttgcaatgccagctgaatagcaggaattattgggtagtgtttcaggcatattttgaatacatcgaaacaaagtcaccagactcaattcatccccaaagacatggaccttcttcctctgaattagatgtcccatggcgtaggtcttatcagtatataaaacctgaccatatataaaaaagtaaccagtttctttgaccaatattttattctctttttcttctagggcacttccccttttaaagctgagaagccatggaacaaatgtgtaagatc

SEQ ID NO: 51825 - DNA, 238 bp, Homo sapiens
ctcggaacctccagcttggtccggtctgggactggaagcctgccatggcggcttctgcggcggagacgcgcgtgtttctggaggtgcggggacagctgcagagcgcgcttctgatcctgggagaaccgaaagaaggaggtatgcccatgaatatttccataatgccatcttcactccagatgaaaacccctgaaggctgcacagaaatccagcttccagcagaggtcaggcttgtacc

SEQ ID NO: 51826 - DNA, 93 bp, Homo sapiens
gtttatttttttgatttttattcctttaaggtagacacagatttgtttagatacaagctcattttaagagcacacagaagcttagcacaaaaa

SEQ ID NO: 51827 - DNA, 803 bp, Homo sapiens
agaaatgttcactatttcatcattaagcatataaaaataagacaaggatatctgctgtcaatgattttattcggcattgttcagaaggacctaaccagaaaactaatgcaaggaagagaaacaaaaggcatagagattagaaaagaagtaaaactttaaaaacgaaaaagaatataaatctctatttgcagatgccatgagtaaatttggtaagttccctgcataaaagttatgcaaaaagcattttatgatataccagcaaaaaacatggaaaatgaaattttgaaaagcaatgccacttcaaagatccctcaagtgcctagagggagaaaataagttaatatgctttgaagaactgtatccagaaaataaaattacaaaggaggagagggataggattccaggacaatctcaaaactattgctttttcctaaattcattgcaaccttaaaatcctagcaagttctttaatgtaaattaacaagctaattctagaattcatatgcatattcaaaagtcgaataattgtcaaggctatcctgtagaatggacagagaggattgaaatttctaaatatcaagacctgttataaagccatagaaataatgaaggtgttaatttggcacaaggatgaaaaaactgactagtggaacagcatacagattcaaaagtagacccacgtgtataccatcacctgagttttgagaaaggtgacattgaagtgtagtgggggaaagggtgttctttccagtaaatgtactttgccaataaaattttgtaatttgataaaaagttaaaaaaaa

SEQ ID NO: 51828 - DNA, 547 bp, Homo sapiens
  misc_feature (1)...(547): n = a,t,c or g
gaaccagttcaagttggaagtgtgtcttttgaaatcagaaaacaaagtcgtggacaaccaggctgggacccagggccagctgaaggtgctgggtgccaacctctggtggccgtacctgatgcacgaacaccccgcctacctgtactcgtgggaggatggtgattgctcacaccaaagccttggacccctcccagcctgtgacctttgtgaccaactccacctacgcagcagacaagggggatccacctctgatgttcagtgaagagtaccagaaaagtctgctagagcagtaccatctgggtctcaatcaaaaacgcagaaaatacgtggttggagagctcatctggaattttgccgatttcatgactaaccagtgtaagtggcagtttagcgcatgggataatgtacccgtcctcattttttcaggttgcttgcccattctggacattttggctgtaagaatattggaacaaaggggggaactggttaatccttgtaggtgggttgagaattctangaaaagtaattggcttatgannttgaaagg

SEQ ID NO: 51829 - DNA, 1640 bp, Homo sapiens
tctccatccccttattttgggccagtggctgtcattacatatgagatgagtctcttgaagactacagatgaactcaagctccatgaggagatgtttcattgtcgagagcagtcatgatggcctgcactccacacaatgcaacagagtgaaagagcaggttctgcttctttggtgtagtcctgaagcttcctaagaaacttcacatcaggtgatggataggagcaaccctgtaaaaccagccttagactatttttcaaacaggctggtgaattaccagatctccgtcaagtgcagtaaccagttcaagttggaagtgtgtcttttgaaatcagaaaacaaagtcgtggacaaccaggctgggacccagggccagctgaaggtgctgggtgccaacctctggtggccgtacctgatgcacgaacaccccgcctacctgtactcgtgggaggatggtgattgctcacaccaaagccttggacccctcccagcctgtgacctttgtgaccaactccacctacgcagcagacaagggggctctgtatgtggatgtgatccgtgtgaacagctactactcttggtatcacaactatgggcacctggagttgattcagctgcagctggccgcccagtttgagaattggtgtaagacatcacaatcccattattcagagcgagtatggagtggaaacgcttgtagggtttcaccagggctggtgaattaccatatctccgtcaagtgcagtaaccagttcaagttggaagtgtgtcttttgaaatcagaaaacaaagtcgtggacaaccaggctgggacccagggccagctgaaggtgctgggtgccaacctctggtggccgtacctgatgcacgaacaccccgcctacctgtactcgtgggaggatggtgattgctcacaccaaagccttggacccctcccagcctgtgacctttgtgaccaactccacctacgcagcagacaagggggctctgtatgtggatgtgatccgtgtgaacagctactactcttggtatcgcaactacgggcacctggagttgattcagctgcagctggccgcccagtttgagaattggtgtaagacatcacaatcccattattcagagcgcgtatggagtggaaacgcttgtagggtttcaccaggatccacctctgatgttcagtgaagaggaccggaaaagtctgctagagcagtaccatctgggtctggatcaaaaacgcagaaaatacgtggttggagagctcatctggaattttgccgatttcatgactgaacagtcaccgacgagagtgctggggaatgaaaaggggatcttcactcggcagagacaaccaaaaagtgcagcgttccttttgcgagagagatactggaagattgccaatgaaaccaggtatccccactcagtagccaagtcacaatgtttggaaaacagcctgtttacttgagcaagactgataccacctgcgtgtcccttcctccccgagtcagggcgacttccacagcagcagaacaagtgcctcctggactgttcacggcagaccagaacgtttctggcctgggttttgtggcatctattctagcagggaacactaaaggtggaaataaaagattttctattatggaaaa

SEQ ID NO: 51830 - DNA, 590 bp, Homo sapiens
tgtggatggtgcagacagggatgaaaaggacttcaggaatcctgggccaggaagtcaggaaactagacctgccagtgctgttcccaaacagacttggttttgagttcaagaacgagattaaaaaagaaaatctaaaatgggatgattcagaggaagtagaaataaacaaggctttacagagaaagtccagaggagtttattggcactctgagctacaaaaaggcttggagagtgagccaacatcaagaaggcaatgtagaaattctccaggggagagtgaggagaaaaccccatcccaggagaagatgagtcaccagagtttttgtgccagggacaaagcctgttacacatatcctctgtgggaaaaactgctctcagagtgttgcactctccccacaagccagcgctcaaactggaaaaagtatctcaatgtcctgaatgtgggaaaacctttagccgaagttcttatcttgttcggcatcaaagaatccacacaggcgagaagccttcacaagtgccagttgagtgcgggaagggcttttagtgagcgcttccaacctcactgcccaccttacggaactcacacaggg

SEQ ID NO: 51831 - DNA, 837 bp, Homo sapiens
  misc_feature (1)...(837): n = a,t,c or g
ttttttttttgctctcgntcctcaaactttaatttcatgatttagnaagatgcagacgttattgcctaaatattattctatacatttccatcagtgttcaggaaaacactttaattgctacttaatttacatcataatcactgggttacagctttagctcattggcaattttggaagcaatatttttgaaggctatggatgtccccgatatccgcttaaaccggaccccgttcagagacagtcttggcagcttgcacacttccatttcccactgcacgaggttctccgcgtgcccatctccgtggacgcagaagagcaagaagcgctccctctgctcatagtcgcagttattggcgtccaacactttgcggatttcccgcatcatgtccccgggatccattgaactagtggttttcatgctccaggtgaagcgtagggatcgaggctttgcttctttgttttcatctttttgctcagcaggatacattgcgacttgagccctcatatctcccgttcctctcatattcagttggaagcctccttgtgagttttgaagttaatttactaaagagattagtggagcctcggcttcgagtctgggacaatggtgtggcttcatgggacaggctgggagaggcaggagggccattatatgttgcggttcgccgttcccggggctggccgtggaaagtgctactgactggcagtgcctcttgggaagcggattcgatctggggtggctgcactactgatactgtgtgttgaagcaactggagttctctgatcaggaatagtgctgttttctttgccattctgaatcactcttgtgccgaaatc

SEQ ID NO: 51832 - DNA, 1597 bp, Homo sapiens
actagtctccagttttttttttttttttttgtaagaaatcaccaatttattgaatgaaaaacccaacatcaactcagtccctcccacccccatctcctctctctggcccaggagacgctcaggacagcagggctgagccctgggaagggctggaggagagcttgggggaggtatggagaatgagaaaaacactttcaaaatgaagttctgtgcaaaaacttctgggaaggagtgagaggacaagagaaaagctccaaaggggctgtggggcgcagatggccgggctggggggtgcagagggctgggctggggccctgtgtcctcaaccactcctgagaacacggacggtcaggaatgaggggctcagaccccgggttggtgagagggaggtgacagggagggaaggagcctgctggagggaaacctggctgggaggatgggtctgggcccaggctggggcctaaggagggggaagaacagagcagggaaaggcagaaaaactgacacggtgggaggagggagatgaatgggagatgaaacagaatgtctgaggggccacagacagcatgtatggtggtgggggtctgcctcccatctctccaagtccaggcagagctgtgctgggtgaggggctgggaggcagaggcaggagcatcattaacaagggtggaagccacgaagacagcgaccagtgcacagggtgtgtcacatggtacaaccaagagacttggcgtgcaaagaaccaaagaaacactcaggacacacacgacatctgcagggaacctggggggtggtgaggaagtcgtgcacgggtggtggggggagactgggaggcccctctgtcctagaaacgctgtgtcaccatagcaacagggtcctggaggcaggggagctgcctccctgcccctgtgagctgtgaagtaggggtcctgtgggctcagggtgcccccttaccctcccttgagaagctctggggcaggtggagaaccccataagagttgaaagtggccttgggtcctgctggaggcagcagagtgagtggatctggcagctgcatcctagaggacaccctggtggctggaggggctgggggaggactaggctctcctgctggggaccaggattccagctttctcatttccgagaaggaaactgataccacaaggaagagtttggaagtcgggtgaaggaaggcctgggggactcagtccaggggactatgggcaccagaaggcaaaaccaacacgccttgggcctggagcaggagggagaaggggaaaagcgggaaggaggaggggctgtgcaggggtgggctggaggggaggggagggaactttcttgttcttttctttggtgaccacagtcatggccatggtgccagaaagctgggcctccccactatggggcaggcgggacacctgcactgagcggaagacactcttgagggtgttcttcgagctggcgtccctcttgtcgccttccctcctccgctccccggggtggcccagccagtagtccacctggaggccaatcacgtccccatatgggctattagggctccccacgatggccagggcgctgctcatagatggggagg

SEQ ID NO: 51833 - DNA, 142 bp, Homo sapiens
ccatgatcacacatctgtattccagcctgggcaatagagcaagtccccattactaaaaaacccaaaaggccaaaaaacaaaaaagttagagttcgaggaattaccaactgtagttttagccttggttcatgctctcttgcat

SEQ ID NO: 51834 - DNA, 614 bp, Homo sapiens
tttttttttttttttttggtaaaatagctttatcctctgtcagaacacaaacaaacaaactttgagaggggaggaaggaaaccgtctagctcagggctcacttaggagagggatgagattagaaagttcaacacactgcttgtgcagcggagataaagtcaagaccctagcacccacttataaatatctcgttatattaaaaaaaaaaaaaaatgtccagggcccacctggctctgctcctgcacagaaagggttcatcttcactttgtgatctcacaggtcatggagtgagggtggtagagaggggcagaaatttcagggggaggggtggctgggaaaaagtaaaggggacaagccaatgtgtaactagcgctctccaagacatgcagaggagtggggtgagccagttttggggtcccccttcagtcccctgaccaggcggtaaatgtgatgctgggccccacgctcgctggtggagacctcgaagacataggcggtgcagagcagcagttcctgggtgtctctgtttgtcaccacctggaggatggtgaagttttccaggacgctgttcatcatgtatcgctcaggcagctgccgcaacttgtgcaagaaat

SEQ ID NO: 51835 - DNA, 1679 bp, Homo sapiens
ctggcatttccctgattagctgtgaagcaatctagtggctaagtgtgaaatcctgggtgcgcaggtgttctcactcccgccgtgttctcagtgcagtggtggtcagaggcccttccaaggagacatcactctgatcagttacagatagatgttctggaagcatctgcaggtgagtagatccagcagagtttcttcccaccaactctagaagaaagggccttatcagagttgaccctgagcctttggtaaggttttgtgtgcatgcgattcagttatctttggcaattcttttcttgctgcagtgagagattaattggttgctgatcaaaccgttcatgcagatgggggggactttgggattgtacggctttctcctcttgggctggctttcttttcaggaagtttggactttggccagggtttggcttttcccagagccgttcctttctctgtcctttccttgggtcctcatggtgtgcccattggatccttggccttgtgatcctctgggaactgggggccagttccacttttgcagccttctgtgctggaagaagaagcccagcgccctggaaggagcctctttaagtcccccatgtcgctttctctctctgctcttttagtgtctgagattgcctttctttgaatttcccagtgtttcttttccttgtcccttccctcaccaaccctggagttaatttgggttgactatgtcctggctttggcttctcctggcaggaagtcatcaggcatcctctccaggtgagccgaaattccaccctcccaggttggacatcatcttttaaacccaatggtctactcccctccttctttatgaaacagtgatttcccgtgagtaactctggttctgattttttgtaccggcgcttaaattctttctgtagacattggaaagccacaaagaacgtgactgcagtgagcctcccactggagcagccttaaccaacactttggccaaagcccccccacctcccctgtgtactgtgtgtgtgtttggtggatacagtattccttttcagtgtccctaaagctgtgatgggggagtccccacttacctagaaagcattaccagtcacctactctgcattctcagatgtaaaccttgtgtagtgttctttttgcaatgacctatttatttaacctatttatatttatttaatttttactctgaaatgtatccagttacaattgtacttgcttaaagcacatcagatttgttttggaccaacaccccttgcccattttaaaactggaaaagtgatactgtatccttccatgggatggatgctttacagtagtcttattattaaagggtgattaatttggtcggggtaaaatgttaatttttaggtgatttttaagaattctgtgccattatgtcttctgtgtggatggttaattgtttaattagtacgtgttaattgtgtgatacagtcttctttgtggaaccccaaaatcctctttttagctttatattttataaactgccagattgtacaacttttatgtgcatttttaaagcttgaagacatgagggtcattatctaagttaaacagcctatttttgtgcctcctgtacagttttataattctgctgatggcggcatcttatgtcgagccaaccacaataaaggtagttttagaaaaaaaaaaaaaaa

SEQ ID NO: 51836 - DNA, 379 bp, Homo sapiens
gcggcacgagcggcacgagaaaacctgtatttctcttttacatgacagtcctgggtgggggcacaggttagtgtggtagaattcatcttatagtattctaggactaaagttgaccaaagttcagccatcttcagcatgtggcttcgaaggtcctgccaagggatgggaaaggaaaactcatggaggagaaccatgcggatggtatttataggccagacctggaagtggtgtacatcactcacatcccattggctacagctcagtcacatgactatagccaattgcaagggaggccaggaaacattgcttctggctggggcagctatttacccagcagtgacactgtattatagaagatggaccacaaatttttgatgga

SEQ ID NO: 51837 - DNA, 431 bp, Homo sapiens
gtgtcctcggctctgaaggcgctctctgcacttagatgctgtcagccctcaacgtaggaggggccgtggggtccctaagtgattcttctccctggcaaggctcttccttttcagggatatctctgccaacccctcccctgtcctcgggttgggcttggccctctctgcctgagagagctcagcacacacacagctcagacccacggacaggaccccgggacagaaccccgggagcactgccctaggagcccggaccccacgagctcagtcccagctctgcctctgactcgctgtgtaccctcttgccaagtcatgcccattctctagttcttgcaaaactgcagtgttttggattagaaaacgtatttggcccctgcttaggccctgttgtttccagttttccagttgggggaatggggcagcctttattt

SEQ ID NO: 51838 - DNA, 562 bp, Homo sapiens
  misc_feature (1)...(562): n = a,t,c or g
ttcattgcctagaggagttatagtaagtggtgaggctgaagcctgattttcagcccccacacacctggattttttccatgttttcatgtttgtctgttctttctgtatttcaagtctcttcaaatcccgactgctgccttctgccttcaccacttgtgtgcactgttcaacctgtcttatgctttgcttccagggagtctccccaaccacttctttgagcacttacttgctcttgttcaatcttgggtaactctccgttaccatcagggcacatctgggattccttaacatcatgggagccctaggctaatttctttcgaggcaaacagttcttggctcctctatttattttccacccttgcgctttgggtgttaaatctcccatcctcgtgggaaagtttcttggatggttcctttccaccagtcctaggggccaggggttttaatcccatggatcttcccactattcttttaaaggcctttgttggaccaccatancccattccagtctcangaggganttttgtgtangggtagtggggtgcagttcatttgggcataa

SEQ ID NO: 51839 - DNA, 485 bp, Homo sapiens
  misc_feature (1)...(485): n = a,t,c or g
ccaattgacctgaaaaactgtgccagctacaaggagggtctgacttcaggaaagtggtttaaataacagtgcaatttcaaaaaaatttataactttcttttgatcatcatgtacagaggtgttttttttctttaggcttctcatgcatatgaatattttaagcacgaatggactactaaatatctgagttttttttttttttttttaaagatcctaacagaacatagcgtaacaatattggtcttccagggtgttactcatttcaattatgtgtagtataccagggacagacctattttcatgtcttatttctttaaagagctgcttcattgggccgggcgccatggctccacgtctgtaaatcccagcactttgggggaggnccgagggcgggtngggtttacttgagggtccagggantttcgagaccagccnggggnaaacntgggcngaaacccccttcttaacctaaaaattacaaaaaa

SEQ ID NO: 51840 - DNA, 436 bp, Homo sapiens
  misc_feature (1)...(436): n = a,t,c or g
gagcttcaataccctgaatgtagtatgtgtatgtgcttgtcctttcttcatgtttctcctgagagccttacaaacaatgtgacacacacacacacacaacctatatatacacacatgtattatatacacacacatatgtgtatatataatatatatgatgtgtatatgtatccatgggtgtttggtatgactattgtcataggcataacatagtcatagtgcaaatcctgcaaaattttctctcctttccgaggacttctcattctctcccatcctgacataggctccttacctggctcatagtccaactcaaagcatagtttttctgtaaagaaaataaaccaggatgagattttattagtcttacaaaaccatcagacacttaatgatgagaaaactgaggccnanaagagggaagggcaagaagaanaatgta

SEQ ID NO: 51841 - DNA, 321 bp, Homo sapiens
ggaaaaatactgctcaagtgggggcttcctcacagaccagaaaacccaacaagctggcccccaatcctgcagtgcctgcatttgtgaagaacacttgtccctccagaccgcgtgaacggcagacacacttcttaagacctcggccagaagacagaatggttgctctgaaacccatcgagattgttctgcctccagtctttatgccattttcaagtccccaagggatcagatctcggatgccaactcaacatttgtactgtcgttgggttgcacccaaggcacttgtgcccacctgccttcccacacactcactatccagaa

SEQ ID NO: 51842 - DNA, 398 bp, Homo sapiens
ggaacaccaaggaacctactggtgtcatgtatataatgatcgagtcagtcaagatagcaagaaggtagaaatcatcatagatgaattaaataatcttggtcatcctgataataaagagcaaacaactgaccagcctttggcgaaggacaaggttgcccttttgataggaaatatgaattaccgggagcaccccaagctcaaagctcctttggtggatgtgtacgaattgactaacttactgagacagctggacttcaaagtggtttcactgttggatcttactgaatatgagatgcgtaatgctgtggatgagtttttactccttttagacaagggagtatatgggttattatattatgcaggacatggttatgaaaattttgggaacagcttcatgg

SEQ ID NO: 51843 - DNA, 644 bp, Homo sapiens
tgctaaaaataaagcctctttattggtacctgtaagctcaggtacaaggtgttcccacaagcacacaggctggcaaggcctcctgggcaaggggcaggcccagagcctgcgtttcttggcacagacacagagagaaatggaataaattatagttctgacactcagggacaatgtagaaattatgatgcaaaattaaacattagcaaacaaagggtataaaaaccctcaggagccacccctcgccaactggcctcagggcatgggcaggtgggccacgctgaagtgcagtgcccagaaagccctgagataatagtctggggcatggttcgcgccccgaggtaggccctttgccctctctgggcttcctgtttcctccttccccctcctacatccctgggcctggaataaaggctgtggcctttgggaagggggaagatggaacagagggcaggaagtggagggggcagggtggggcagaagggagttttggtcacagctgttcagcccaggctctccccctgcctagatgatgtccttggccagcacctgcccgcagagccatctaggagccaggcagcagacatagatcacagagctcaaatccacacctagtctgcaccaaagcccaggcagggcaaggtgta

SEQ ID NO: 51844 - DNA, 541 bp, Homo sapiens
gcgcgactggccttgagggagagctggggcctgctcccggagagatacggctatgtcgatcgaaatcgaatcttcggatgtgatccgccttattatgcagtacttgaaggagaacagtttacatcgggcgttagccaccttgcaggaggagactactgtgtctctgaatactgtggacagcattgagagttttgtggctgacattaacagtggccattgggatactgtgttgcaggctatacagtctctgaaattgccagacaaaaccctcattgacctctatgaacaggttgttctggaattgatagagctccgtgaattgggtgctgccaggtcacttttgagacagactgatcccatgatcatgttaaaacaaacacagccagagcgatatattcatctggagaaccttttggccaggtcttactttgatcctcgtgaggcatacccagatggaagtagcaaagaaaagagaagagcaacatcacttccctgaagacctagctcctgcgcgcggccggggactgtgactccacatgcc

SEQ ID NO: 51845 - DNA, 247 bp, Homo sapiens
ggtaaggtccctgactatggctccccagagcctgccttcatctaggatggctcctctgggcatgctgcttgggctgctgatggccgcctgcttcaccttctgcctcagtcatcagaaccgtgaaggagtttgccctgaccaacccagagaagagcagcaccaaagaaacggagagaaaagaaaccaaagccgaggaggagctggatgccgaagtcctggaggtgttcacccgacgcatgagtggcag

SEQ ID NO: 51846 - DNA, 207 bp, Homo sapiens
gatggtgaactgtcccatctgcctggagctgttgacagaacccttgagtctagactgtggccacagcctctgccgagcctgcatcactgtgagcaacaaggaggcagtgaccagcatgggaggaaaaagcagctgtcctgtgtgtggtatcagttactcatttgaacatctacaggctaatcagcatctggccaacatagtggagag

SEQ ID NO: 51847 - DNA, 458 bp, Homo sapiens
aatattttaacatctatagactttattaggtgttccttatacagtcatctggtatgtttaaagagtgagcaatcatataaaaggaaatatggtcataactgattgaagtaataaaatcctgaaactaaataacatctcataattcattgcacaacatatattagatttcattacatcagtatatagcttagtagtaaattctcctgatggccataaacctctaaggtgttgtcatcctgaaaaaagaagaaggggagggagttggtggggcgcagaatggagaaatcttccatagtgctcgtgtgatgtaccctaagttgtaaagttatagggcatcgccacctagtggcagaatttcatgccttgttctaataaagggattttccttgttttccaaagagcaacctgtcttactcactttctaaccatccctctctgatactgtccctcctaaaatc

SEQ ID NO: 51848 - DNA, 438 bp, Homo sapiens
agaaaccggtgatgggactgagaaaccagagctaaaacctctttggagcttctgaggactcagctggaaccaacgggcacagttggcagcaccatcatgacatcacaacctgttcccaatgagaccatcatagtgctcccatcaaatgtcatcaacttctcccaagcagagaaacccgaacccaccaaccaggggcaggatagcctgaagaaacatctacacgcagaaatcaaagttattgggtttatcatctctggctctctatcaatcgccacagagaaaaggttgaccaagcttttggtgcatagcagcctggttggaagcattctgagtgctctgtctgccctggtgggtttcattatcctgtctgtcaaacaggccaccttaaatcctgcctcactgcagtgtgagttggacaaaaataatataccaacaaga

SEQ ID NO: 51849 - DNA, 383 bp, Homo sapiens
  misc_feature (1)...(383): n = a,t,c or g
atttgtttttcttacatttgtgtatttgatgcaccaagaagtccacctttttgtgtatcttgtccatttttcttgtcttattaactaaagttacacttggatttggatttcattggttttccccaaatgacctttttctgttccaagatccatgccaagctactactttacactacattacattttgtcatgatgtctcctcagggtcctctaggctgtctaagattttccttttccttgagaactttgatagttttgggtagcgctggctgagatnnnnnnnnnnnnnnnnnnnnnnnnnnnnnnnnnnnnnnnnnttttttgangtttaaagtatggggatgaatttttgggtggtgatnatgaggtaaagccccnttttc

SEQ ID NO: 51850 - DNA, 769 bp, Homo sapiens
  misc_feature (1)...(769): n = a,t,c or g
caaacaggccaccttaaatcctgcctcactgcagtntgagttggacaaaaataatataccaacaagaagttatgtttcttacttttatcatgattcactttataccacggactgctatacagccaaagccagtctggctggatctctctctctgatgctgatttgcactctgctggaattctgcctagctgtgctcactgctgtgctgcggtggaaacaggcttactctgacttccctggggtgagtgtgctggccggcttcacttaaccttgcctagtgtatcttatccctgcactgtgttgagtatgtcaccaagagtggtagaaggaacaaccagccaatcacgagatacacatgggagggcatttgcattgtgatggaagacagagaagaaaagcagatggcaattgagtagctgataagctgaaaattcactggatatgaaaatagttaatcatgagaaatcaactgattcaatcttcctattttgtcagcgaagggaatgagactctgggaagttaaatgactggcctggcattatgctatgagtttgtgcctttgctgaggacactagaacctggcttgcctcccttataagcagaaacaatttctgccacaaccactagtctctttaatagtattgacttggtaaagggcatttacacacgtaactggatccagtgaatgtcttatgctctgcatttgcccctggtgatcttaaaattcgtttgcctttttaaagctatattaaaaatgtattgttgaatc

SEQ ID NO: 51851 - DNA, 961 bp, Homo sapiens
cccgaaaagcactcctcctccaaagtaaattttcactttttaggaggaagttgtaggatagtgaaattccttcattaaagagttagtgataaactaactagtcttcagtcaatttagcagttcacatagtttattcagcaatataacaggagagaacctccattgtaagagacataaggcagatacagggtgcatctctggggtacattcttcatacagactaacaaataacttcaggtttcacaacatgtagcaagtatgatttgttgcacaccaacagccattcattcctcacgttttccttgctaaaagagccctggtcaggcacggtgtggttgttgccgtctttgcagtgccaaacgtgaacccgcctgtaggggccccagtgcctccaaaattaaacccgctcatggctccggactctggtggcggcagctactctggctcccaaagcaaatccgtcggtgtctgcagccttgggaagatttcacgcctgcgctctccgctcccaccttctttcttcagccgaggccgccgccgcctctccttgctgcagccatggagtcttccactttcgccttggtgcccttgtcttcgcccacctgagcatccctccagagcctcgtgccagctgctggtgcagcctctcctgttgccatcagtgcccagcacctgtgctacagccatgtcactcctggcgaccctggggctggagctggacagggccctgctcccagctagtgggctgggatggctcgtagactatgggaaactccccccggcccctgcccccctggctccctatgaggtccttgggggaaccctggagggcgggcttccagtggggggagagcccctggcaggtaagggcaggtggaaggtggagctggggagtggagggcaggggaagatgggggaggaagaactcatccatgtattcaataaatattgagtgcctacc

SEQ ID NO: 51852 - DNA, 2057 bp, Homo sapiens
ggcaaggggggcttcgcccgctgctacgaggccactgacacagagactggcagcgcctacgctgtcaaagtcatcccgcagagccgcgtcgccaagccgcatcagcgcgagaagatcctaaatgagattgagctgcaccgagacctgcagcaccgccacatcgtgcgtttttcgcaccactttgaggacgctgacaacatctacattttcttggagctctgcagccgaaagtccctggcccacatctggaaggcccggcacaccctgttggagccagaagtgcgctactacctgcggcagatcctttctggcctcaagtacttgcaccagcgcggcatcttgcaccgggacctcaagttgggaaattttttcatcactgagaacatggaactgaaggtgggggatttttgggctggcagcccggttggagcctccggagcagaggaagaagaccatctgtggcacccccaactatgtggctccagaagtgctgctgagacagggccacggccctgaagcggatgtatggtcactgggctgtgtcatgtacacgctgctctgcgggagccctccctttgagacggctgacctgaaggagacgtaccgctgcatcaagcaggttcactacacgctgcctgccagcctctcactgcctgcccggcagctcctggccgccatccttcgggcctcaccccgagaccgcccctctattgaccagatcctgcgccatgacttctttaccaagggctacacccccgatcgactccctatcagcagctgcgtgacagtcccagacctgacaccccccaacccagctaggagtctgtttgccaaagttaccaagagcctctttggcagaaagaagaagagtaagaatcatgcccaggagagggatgaggtctccggtttggtgagcggcctcatgcgcacatccgttggccatcaggatgccaggccagaggctccagcagcttctggcccagcccctgtcagcctggtagagacagcacctgaagacagctcaccccgtgggacactggcaagcagtggagatggatttgaagaaggtctgactgtggccacagtagtggagtcagccctttgtgctctgagaaattgtatagccttcatgcccccagcggaacagaacccggcccccctgggcccagccagagcctctggtgtgggtcagcaagtgggttgactactccaataagttcggctttgggtatcaactgtccagccgccgtgtggctgtgctcttcaacgatggcacacatatggccctgtcgggccaacagaaagactgttgcactacaatcccaccagcacaaagcacttctccttctccgtgggtgctgtgccccgggccctgcagcctcagctgggtatcctgcggtacttcgcctcctacatggagcagcacctcatgaagggtggagatctgcccagtgtggaagaggtagaggtacctgctccgcccttgctgctgcagtgggtcaagacggatcaggctctcctcatgctgtttagtgatggcactgtccaggtgaacttctacggggaccacaccaagctgattctcagtggctgggagcccctccttgtgacttttgtggcccgaaatcgtagtgcttgtacttacctcgcttcccaccttcggcagctgggctgctctccagacctgcggcagcgactccgctatgctctgcgcctgctccgggaccgcagcccagcctaggacccaagccctgaggcctgaggcctgtgcctgtcaggctctggcccttgcctttgtggccttcccccttcctttggtgcctcactgggggctttgggccgaatcccccagggaatcagggaccagctttactggagttgggggcggcttgtcttcgctggctcctaccccatctccaagataagcctgagccttagctcccagctagggggcgttatttatggaccacttttatttattgtcagacacttatttattgggatgtgagccccaggggggcctcctcctaggataataaacaattttgcagaattgg

SEQ ID NO: 51853 - DNA, 1548 bp, Homo sapiens
tttccgtaagtataaacattttatttcaatttaaggtagtagcaatacaaaataagttttgataattataaagtagagacaatgaaaaatcccaccctatttttagaattttaaaatattgagcatcattctgtcctgatgggtttttatgtaaagtgggaatttacatgacaccagtatcttggcaattcactttttttgaatgctacatatcccaatcaccatatattaaattctctattttcttcaaagtgctattgccacaagagactgaacgatacagcaatttaaaaaaagaccacacaaactaaattgtaatgtcttcaatatctcaattactgttttttaaaaataaaaactgcagtagtgaatttctttaagttcttgctacatgattgaatgggagataacctcaacaattttcattcttaggcatgagcatcttcatgctaaggtagtctatacttaaaagctttattctttcataacacctgggcaacaaatattttaaaatcataaataatgcaaaattaaaatcagttatggtggcacaattcatttggtaactagttgcccaagatgtatagtagaatcaagcaggtttaacttccacatgctctgcaaaaaagggaaacaatggaaatatttcggtatattaatctagcccactattccactcaaggaatctatatcctttctttttctcatctggtctcagttcctttatcctcttagcaaaggcatctcacagtgatgactgagtctaattttaatcatatgcactttttatacaaaatggcccctaaaatgcaagccaactctatatacacaaaaccatgtaaacggtacctctaggtgatttaggtaattctgactatatacagttcttaccaaacaccctgacaagcaccagattccactgtaacacgtttttagagatttaattccattctgattgttctgcttactgtcctgaagatttgcgtccttatttgaagaactgatgtttggtaagtataaaagccagtaacttgagatttctccatcactgaagttgtgtgatcttgatggggataatactattaaagtccaagaaaaaaggtccttcttgtttaggcaaaaaggtactaggaatgatattgaagatcccagaaggtatattttctaattccaggtagcaaaacccacacctatagtcaccactagatttcctcagaaagccatggggaccaggatctcctagagtagaaactgttacaacctcaaatccaacgctatattgccttggtcctcgtagctcaatcagtaacggcccagtcttttctatatggaattggtagatggggttatttttgtgagtctcttggaaatttccacatcctccagcactctgaccactccactttccattaatccgttttgataaggtgtatggtgaaggaatctttgaaaaagtaaagctgcatgctgaatatacccgaaccgtgtaatggattgtgttctgtttttcatattgagaaaccactaatgtaaaggtatgggtgccag

SEQ ID NO: 51854 - DNA, 419 bp, Homo sapiens
tgagccaccagtttgacaacacattttcatagtgttcctcatgtaatgtcctctgtgtctactggaatgaaggatttgcacataccaaggaatagaataatgaaatactatgagttagcaaaccagcatgatttgtctgtgtgtgtgtaaaaggcatgagtaaaattatttacatgatcatctattattgcacatacatatttgagtgttaaaaagttaaaccgttgtcttaataggaatttcacagccttgtgatctttctttttcttttctccttttttccttgagatatcgtctcatttaagttcaggcatatgaaattagtgtttttgaagtcaagaatggttggttgcatttcatgtaggtcaacccaatacatggctggttagcactttttctaaatgtattgcatggatgac

SEQ ID NO: 51855 - DNA, 368 bp, Homo sapiens
tcgaacagaacacttaagccctctcaccgtcatcaccaaagagactgaaaaagcagtgccccccagagacattgaagaaggcaatgtgaagatgctgggcatgcagatccccataaagaatgttgagatgctggcctctgttttggttgccattagtgtcacccttctgctcgttgttctggctcttggtggagtggtttggtaccaacatcgacagagaaagctacgacgcaataggaggtccatcctggatgacagcttcaagcttctgtctttcaacagtacatctggagcctggagatatcctcaggaagcacatctgtagtgcactcccagcaggccatggactagtcactaaccccacactc

SEQ ID NO: 51856 - DNA, 463 bp, Homo sapiens
tttttttttttacacaccctttatatttttattgaggagagaaagctttagcatacagagcagcttcttatcttcacaacacagtaatgcaacaataacacatgtattccaaaagggtttcctcccgagcctctgggagaccttgggctgccttcatacccctgcatgcatcccctccccccacccctctttcaacccaagaaagctcccaaagcccacagttcctcttacagctcttatggctgttacatcacaacaaatattgaagatctgggaaaggaaggaagagggtcaaagggaagcccaagcccctcctgccccagagggtggaaaccagctcactgctcatctgctctatccctgggctgtagctctgagggttcagggtgagaagcaccatgggaacaggcaggacctgtgctgaaggggtccctggaagtgtgggtttaaggcacccgtcctc

SEQ ID NO: 51857 - DNA, 427 bp, Homo sapiens
  misc_feature (1)...(427): n = a,t,c or g
gtgattgctgcggtgtttgaccgagacataaactgcagaagagcagcctctgccgccttccaggagaatgtggggagacagggcactttccctcatggtattgatattttgaccacagctgactattttgccgtcggtaacagatccaactgtttcctggttataagtgtgtttattgccggctttcctgagtacacgcagccaatgatagaccacctggttaccatgaagatcagccactgggatggggtcatccgagagttggctgcgagggcgctgcacaacctgggcccagcaggcacccgagtttcagcgccacgcaagtctttcccgaggcttgcttgtccattgacacttgagtccagatctttcacattgagggcatngggttcggatttttcgccttgcggcagaaagtttgttttaa

SEQ ID NO: 51858 - DNA, 751 bp, Homo sapiens
gcaggaggagaccatgcggatcgctaggaagatcgcatcgctgagccgtccggtggtgtccctgggcaaagccaccttctacaagcagctgccccaggacctggggacggcttactacctcacctcccaggccatggtggacaacctggccctgcgggacgggcaggagggcatcacggccttcctccagaagagaaaacctgtctggtcacacgagccagtgtgagtggaggcagaggagtgaggcccacgggcagcgcccaggagcccaccttcccctctggcccagccaccactgcctctcagcttcaacaggtgacaggctgctttcgtgacttgatattggtgtcatagcatttggcctacattaaaagccacaatttcatggggaaaggacaaaatggagagtgactgaggtgctgacctcagtgcaaggctggtgaaccctgcagcgggccagctatggtgggaagcctggcatttggggtgctccttgcaacgtcttaagcaagcgacccccctgacatagcaaaaggtggcaacccatggaggcagaaagaaggacgccagcctgacccttatctgaaacgtcctaagcagagttaatcctggctgctcaggagaggcgacacatttcaaatctccacgagatattctccacacagaaaatcttcttgattctatagagacttaatcatgcctatggctttgaataatcttatgtgatttaaataaattaaatctttataga

SEQ ID NO: 51859 - DNA, 120 bp, Homo sapiens
gtgttgtggaccctagcacagaggtgagaagccccttgggagcagcagggtcgagttgggcccaggaagagccagggcatccatcagcctccccgctggagcctgaccccatggttccgg

SEQ ID NO: 51860 - DNA, 374 bp, Homo sapiens
  misc_feature (1)...(374): n = a,t,c or g
tgttagaattgtggtaaagctctctgttgttcccatttacatgaaagatgtggaacagtcacattgtagaaaaatgctgtgagagttgggaatctggaaccacttctttattatctcaggtcataatgaacttgtaagaattcacagtggcaggaaaccctatgtaaatggaaaatatgggaaaggcttcatttaatccataggactgataccacaaaacttcccactagggagaaaacctatgtttatacggaatgngggaaaatcttcacttatttctcaagccttaaagtgtatgtcaggattcccagtggagagaagccatattgatgtaaggaatgtgggaaagcccttgcctgccacttagtccttga

SEQ ID NO: 51861 - DNA, 823 bp, Homo sapiens
gtggaattcttctcgggaggcagtgctgggtcctttccaccatggcacctaagcaaagcaaagaagagagccgggggcgccaactccaacgtgttctccatgttcgaacagacccaaatccaggaatttaaggaggccttcactatcatggaccagaacagggatggcttcattgacaagaacgatctgagagacacctttgctgcccttgggcgaagctgaacgtgaaaaatgaagaaattgatgaaatgatcaaggaggctccgggtccaattaactttactgtgttcctcacaatgtttggggagaaacttaagggagcggaccctgaggaaaccattctcaacgcattcaaagtgtttgacccctgaaggcaaaggggtgctgaaggctgattaccgttcgggaaatgctgaccacgcaggcggagaggttttccaaggaggaggttgaccagatgttcgccgccttcccccctgacgtgactggcaacttggactacaagaacctggtgcacatcatcaccccacggagaagagaaggactaggagggggctcgctcgtgcgccctgggctcgtctttgcagagtggtccctgccctcatctctctcccccgagtaccgcctctgtccctaccttgtctgttagccatgtggctgccccatttatccacctccatcttctttgcagcctgggtggctatgggtacttcgtggccgcacatcctacagttggaaatccatccagaggccatgttccaataaacaggaggtcgtgtatttggtcacgacatttctctgacaaaaaaaaagtcgacgcggc

SEQ ID NO: 51862 - DNA, 1233 bp, Homo sapiens
  misc_feature (1)...(1233): n = a,t,c or g
gaagagggaagagactcgggagcgaaagaagagggagaaagcaaagaagcagtacagctcaagcagctgaagaacctgaagaggnaggagattctggccaagctggagaagctgcggaaagtaacaggcaacgagatgctgggcctcgaggagggggaccttgaagacgacttcgaccctgcccagcacgaccagctcatgcagaagtgctttggggacgagtactacggggccgtggaggaggagaagccacaatttgaggaagaagaagggcttgaagacgactggaactgggacacgtgggacgggcctgagcaggagggagactggagccagcaggagctgcactgtgaggaccccaacttcaacatggacgccgactacgaccccagccagccgaggaagaaaaagcgcgaggcccccttgacgggcaagaagaagcgcaagtcgcccttcgccgcggccgtggggcaggagaagcccgtgttcgaacccggggacaagacgttcgaggagtacctggatgagtattaccggctggactacgaggacatcatcgacgacctgccctgtcgcttcaagtaccgcacagtggtgccctgtgactttggcctcagcactgaggagatcctcgctgctgacgataaggagctgaaccggtggtgctccctaaagaagacctgcatgtacaggtcagagcaggaggagctgcgggacaagcgggcgtacagccagaaggcccagaactcatggaaaaagcggcaggtcttcaagtcactctgccgagaagaggcagagacacctgcggaagccacagggaagccacagagagatgaagccggcccacagaggcagctgccagcccttgatggcagcttgatggggccggagagtcccccagcacaggaagaggaagcccctgtatcaccccacaagaagccagccccccagaagcggaggagggccaagaaggcacggctgctgggccccactgtgatgcttggtggatgcgagttcagccgccagagactgcaggcctttggcctcaaccccaaacggctgcacttccgccagctgggccggcagcggaggaaacaacaggggcccaagaacagcccctgagcaccagggagcaggcaggggcctcaggctcctctcctcaaatcaagccctggacaggtctcgcacccacaagtactatctgctgcagagatcctctcatctgtggccagg

SEQ ID NO: 51863 - DNA, 1026 bp, Homo sapiens
gtaaaaatacaaatactattaaaaatgacacaaatattatacaaatactacaaatagaaatgttataatagaaatactaaacgatacaatgaaccaaatgatacaaatattaaactgtatggtgataaccaatattaaatgactgagtgatatacaacactaaatggtacagtgatacaaatactaaatgatacactgacactaaacaatacaatgataacagatactcagcatctgttcatgtacaaagcatctccttgatcttcagcctgagaggaagaactgcctgcactgagagaactgcagagatggctggctgcagggtggctgcagggattgactctctgctccacccataaaaagatggttacaggtgcaacatcactggcaagaagagatgaagagataggatggagcctgtgttagagaaggtagtaactggttctcccatcatcagcagcaatggtgctattctgagcccttatccacaggaggttagatgccaaaaaggactctgaggtcagccaaggtgagcttggtgacagattctccagaccctgatagaacttgtttggccaaatctttctttttttcttggagctgtaagatcttttcttctactgttccctcacaaacaaatctgtgtatgacaacatctttctgcctgccctactcggtaaattcggtcacaagcttgatcttcaagtgatggattcctgttagaagacagctaaagctcaaaggaactgacatactagatcagaaatggcaaactatgggccatgggcaacatccagcccacagcttgtttttgtagctaaaaattattgttacagttttaaagggatttaagaaaagaaagcaaagcaaaacaaaacacacacatcatgtgacagagaactatgtggcctgaaaagcctcaaagaaaaaaaatctgtcgatccctgtcctaagctatactggcctaagacaagctggtgccagataccttcttgcctagtttctagtgagaaactagggtcagac

SEQ ID NO: 51864 - DNA, 2884 bp, Homo sapiens
  misc_feature (1)...(2884): n = a,t,c or g
ttttttttttttttcacaaccaaagaatatactgtttattaaaacaaagcaagggaaacaaaaggcttcaaaatcctttccatgtaacatagctttagtcaaaaaaaacaaaatacatgaatgcaggaatgtgtacaggtagaaaaagtacgcactcaccaagcgaagcgcagcattaattgaagtgagaagtaaagaaacgctttgtagccgctcggatttccttaggggacggcaagtcaatgcttatcagcggtcctcagaagagacaattttgattaatatcagacccatctgactcagtctattaaaccctgaaggaaggatactcttcagatatagaagatatgcctttgattaatcattctaccctattgccattccaagcattaccaactatgtagcacctctagaaagagagagccttcgaattctaggaagacacacttactaaaatccccaggtgctcatgaccgcttctcagctcgccccgctgagaagaacccaagttgtgagcggggatgggggggggtggtcaccactggagaagcaaaaacctagttacataatttacttcatggtctgcagttagggtcagtgacttacgacataattcctgcttgatgataatgaaattgacagaagcctgaaggcagagggagtgactggtcttgcgctagccactggctgactccgtaggcctgacacagtctacaccacaaccacctgagcgtattttcctttgcctaccgatgggttctgagatgcgcacgagggaggaaattgcttagtccaccatcaagagcctctgcactgtgtagctaacatgggatcgtcacacggaggtgggaggaaatcgattccattctgcctatttgcaaacttctgcccgattggcactgctcctctcacatcaatgcacttctcctgatgctcatgaccagccttcggccatactctctgtagtccacgggcttcacgtccatcacagtggccttaattcgagactcgtcgttgtaggtctccactttgaccctgactctgaatatgaaagatcggaagttggcattctggaaaacttcttcaaatgcctgttcattcttgtcttttaattccccaagataagcagcattttgtccaaggatagcttcagcagactcctggaaacaagtcacccactgattctcttgaaaatctgcaatatttactgacaggatcatgcggtacttgaaattgggaaattcggtgtcgcacttctcacagcggtacaatccattctgttgatcaatcactttcttattgcagtcctgagtcgggcaggcttggtacatgcagttctctttgcgaagatacaccactgtggccacagaactaaagtagtccggcttgtcgccttggcccaggttctcggatttgacctcatacaaggttttccagttggtgttactccctccgactccgccgctctttagatcagagatggaaacaccatctaaggcttgtccttctgcgtcaaaccatccacgaagcttataggcctctgggatgtcaggattcgcaatgatagtgcttgaagacagcacggagaggctccgtccaccgaaatcagagactcgggctcctttgatagccaacaccgggctgtctagaaccatcaaatttatcagcatcttccccccacagtgtagcagtcaccaccttcccggatgtgtccatcaagtagatattcctcttggcaacttctctgttgttagacctcactgtgattttagtggcgtcttcatagctcttgcagatcccgatgatgtctacaagtgagtctttcgacttgttctcgaggtcatcaatccccgtgaaatcaaactgaaccgtaggtaaatgatggtcgtcctcacagggcatgacggaagtctcgttattgaaggtcatctcgtagtcatttttaacagctgtgaanctgcttgttagcaatcttcagggtgcctttcgagaaataatacaccttgttcacttcaataagaggaaagaacttgtccacttgctcattgaaagctgtagctcggatttcaccactttcgtcaaccagttctagggagaaaagcttcccttcccctcgggagttgctccaggtacggatctgacttttgttggtaacacgagcacaaatggtccacttggactggtaaggagtgaggctggcaatgggcaccactttggactgtgttcccccagaagtgtgtgacaggctgggacctgcagcttttccaaatgtctttgaagcaccataagccttagaaacagtagaacccattcccgagcttccattctgcggctggggcctgctgcttgctgctgggctggctgctggcgctggaggagctacttgcggctgcccgagtccttcattatagggcactggattgccaatcttcactccaactgcttcagctgacttcaaaacttctaattccatcaagataactactctccttccgtctttcagagtgttcacaataaatctgtgaatctggcatacacagttgctggacaattgttcttcctccacgagagggttcaactgtgtcgccaacatgaaagaggatagagtgttcaatccatcactcatgagcagtcgataacgcggcggactattccccgtagtaatgggacggatgttgatgacttggaggatgggctttatgtttgtatcccccttctgcatgatggccgcaatggccccctcgctcagctggccgaccatggctccaccgccaagacttccccgcggaccccgcaacagctccagcttccccacccgggtncnccgcgctgcgcagttattggcccgagaagttgcgcgcaccgctcccgcccccnacgtgcg

SEQ ID NO: 51865 - DNA, 176 bp, Homo sapiens
caacaccatttgggtaacaatgccattttgaaacaggccaggaagagttataatgaaaataaacattgtttggaatggaggcagcaggcagagttcattttctctctttccctttcaggtagttctgaacaataaaagccaccaaccagtattcatatctgattaaacaaaagtta

SEQ ID NO: 51866 - DNA, 481 bp, Homo sapiens
  misc_feature (1)...(481): n = a,t,c or g
cacaagcatgcacagtgtgatgtggttcagaggcagcttctagacctgcaggagggagattgtattcagaggaagagcatcattttggcaacatctgaaagtgaaaacggaagccagaaacacttggccagccctgggggatttttttcttctatgcctctctggtggaatgacatttgctgtgtaggcatctttcctctgactgtatttcttggccttgaagagtactgagtttaaaaagacagtatgtgacagtccatggaaattgcctcttctgtgaaatctcgccacctgctccgaagacatgttgttgtctcccaaattctccttatccaccattcacatacgactgacggccaaaggattgcttcgaaaccttcgacttccttcagggtttaggagaagcactgttgttttccacacagttgaaaagagcaggccaaaagaatcctcgaagcttatngtatccagcccacagatt

SEQ ID NO: 51867 - DNA, 1022 bp, Homo sapiens
ttttttagcaaaacaaaactgttttatttatcaaagacaatgaaaaaattagaaaatacagaagaggttataaagcataataaattttattttttggaaatggaaaaatgtccctgaatagttagatgtaccttttagtagtaatgtctaataataaataagaaatcaattttataaggtccatatagctgtattaaataatttttaagtttaaaagataaaataccatcattttaaatgttggtattcaaaaccaaagatataaccgaaaggaaaaacagatgagacataaaatgatttgcaagatgggaaatatagtagtttatgaatgtaaattaaattccagttataatagtggctacacactctcactacacacacagaccccacagtcctatatgccacaaacacatttccataacttgaaaatgagtattttgcatatctcagttcaggatatgttttttacaagttaatcctaaagtcataaagcaagaagctattcatagtacaagattttatttgctaagctttacaaattaaactctaaaaaattattacaatgatactgaaagatattttattggccttttaaaagacaaacacaaatgagaattatcttatttagaaaattaactttgaaaattatcttaaatgaaataaatataatatctaatacaatctcttcctgcaagatctcttaagatgggcaatcctaaaaatgcagcttcccatctgaaaatccctaaaactagtatgtcccttaaaataaaatttatttttcttataaaggacatttggtattcccacattttcttaaaatttgtcctaaaacaaattctatctttaacactcacgtttctaaatatatatatgtgtgtgtgtatatatatgtgtatacatatacacatatatatttagttcacttaatttaaaattagtgaaagctatctggacacaatttctaagaaaacattgcagaaagtaagttatgcatggttatttacaggaagagttttcct

SEQ ID NO: 51868 - DNA, 132 bp, Homo sapiens
cttgaaattataaagctctctcaggttgaactctctcgtgcgctctcgctctcactttcgccctgtacctgagagcacaggtgtaactgtgatgtcatagtgccgagactactttcctttaaccatttgggg

SEQ ID NO: 51869 - DNA, 444 bp, Homo sapiens
  misc_feature (1)...(444): n = a,t,c or g
gattcactcactgcccacggccggctgagcagggacaggagaatgagaggcctccgctggcgttacactcggctgcccagccaggtggaggacaccctgtctggggaggagggtaacgaaaaggaagaggaggaggaggcagctccagacccagctgctgctcctgaggatcccacggtgccccagctgacagaagccagccaggttttgagtgcctcaaagattcggcagctcagctttcacttccaccaagagtcaccggccatccctggagtctggtcttctgcacgtcaagggacggtttcagcctgcagagcctgtaccggcggatggagggctgcagcgggccagtgctgctggtgctcaaggaccaggacgggcaggtctttaagtggactggaagcaactctttctttgtgaanggagacttggattcactgatga

SEQ ID NO: 51870 - DNA, 1022 bp, Homo sapiens
tttttttttttttaaaagcagggccccagaggcatttattgaaaacacagcatccaaaacacgacatctaggccaggcgcgatggttacagtgatgagagggtcactagacaattatccacaattctacgacatgagacagagactcagcaacagtcacagacagaagggtcatgtgttccttcctgggcagggctgggtgtggcaggtgcgggcgtggaggctgcgtcctgggcggtttgctcccaggcaaggggtacggggggccggcttggcctgggtggggacctcaagtctgagggtgaggatggctgaatctacctcgcttatgtctcagggacggtcacccatacctaggatgaccccagccagaccctaggaaggtctgatggccatcccaagtcccccgcgaggagaagagttccctggcaggggtgacacattcccggtcaacaagccacaacacagtggtgcctgcactctctcagctgttgccacaacacttggtgctggaattttctcccacgtagtgaaacttttaagggacacatgaataatttaaaaagtcacacaaaactctacgaaaggcaggaatcctcactctgctgagagctacctcctgagatgtcgcttccggaccccggcagagggcaggagcgacatcagctcggcaggaggatcctggccagcgcgagggctggctctggttattataaataatctaatttaaatacgcacatacacacagatgtcctgcttctacccaacgccaagaaaagcagacattagcatcacactgtcaacacttcctcgagaaccgaagattcgagacgcaagcaacagcatggccagccgacaggacgctttcccgtcctggctccaccacgtccttctctcagatgggctctttgtgggctggggggtggcgtgagtgcacaggcaggcggttccctgcccctcaggtagacaccatggggggccgctttggctcacccgccccaactcctcactgcagaaccagtg

SEQ ID NO: 51871 - DNA, 1109 bp, Homo sapiens
atagttcagactaggagccaaatgaagactcaaaaccaagctagttattaatccaagactggaattgtacttcagacatttagagcagaattccaagaactcaaaagtgaaaagcaacaagcagctttcccaaagcgatacacttgctttggtcaccagaggaggacagagcttagagcagctgtggagaatctgaagcattctgcggagttcttaagcgctcccctggcaaacaaattgaagtgccaaacagcactcgctgcagggtatttttagagtcatagctgagagcttgttagctaagacccattgggctttcctcaccaaaaaaggaagtgttattccattactagcgtcatggagctacctctgcgcatcagacttcagaccttgaacaaacttaaaaccttcttggggagcccggacgtccaaagagatgtcttctgggagccactgggcaattgccagggctccaggaagggctctggctcaggttgcagacagctgagaaaagatggccctgtcagccaccctctctcagtctgaaacatccaacatccccagaaggcttagctcctttttgaattgtgatgggaaagtagagttgggtttttccagttttgctctgtggtgtgtgagagatttttttaaaggctttgggttgtctttggcctttgtttagctttaagggttcgttagcatgagtgtccagtcgtgtgcatgaatttcaccccaacttgtgactgctcacttatgacgtctcccccagtaccctccatctcaaataggcttggtggcctgtggaaaagaagagagacagagagacagtgtctgaaacaggatggcagaataggctcacatgcccaaactctgggtggggaagaggaaacttactttctgccaccctcagtaagaacacacgaggaggcaggacctcccaccttcaggtctgcatcatccttttcaaatgttcctttaaatgcagcacactgagtttgtacaattgtgttaactgctggaagggacagatgcactgatatatatgcatttgctgttttggccaatattttgaaaatgtatgagctgagttgatctagctattatttaag

SEQ ID NO: 51872 - DNA, 1052 bp, Homo sapiens
  misc_feature (1)...(1052): n = a,t,c or g
ctttttctcacttgagcacgatatttaggctctcttccaactcactctattctgtcctcactccctgttttggatttttctctttgcatgtttgaaatgttttatgtgaatgtattagaactcttttcttctaaggactgagacttccaggggattgccatcttacctgtctcttctccatgagggagaaggaagcagctagctatgtccctagctgcaggaagcccctattttttccaagcacgaagccaccagtctcccccagggagcatcaggaagggacatggatgtgctcctgccacagggcccttcctacctttggatctgtgagaaggtgaatacaaagcagcaggcagagtaaaatctgctgggactgcctggagatttgtcaggagctgcagacaagtaccttggagcattctgttatttttggaaagttcaaatatgcagggacaaggaggttgctgactgtactgacaggctctaagtcattttctccaaaaactatctattcaattatcaggggctggtcttgaggaaggaaaaaaaaaaaaaacgttcccagaattcagtttccaaaatctctttttaaagggttnnnnnnnnnnnnnnnnnnnnnnnnnnnnnnnnnnnnnnnnnnatcattaaaaagtgtatgctctttaagaagaaaagtaaaatatctcaaaggacggtttcaccaccgtcctttattgaatcaatttttctacatttcagagcaagtgtagattctgagggactcctatttgccaaaaagacaaaactagcaaaaaaaaaccaaaaaaccaaaaaaaaacccactttaaagggtagcaggaaaagaaggtagttttgagtgtggttcactcagtgtctgtgagtctggtgtagtgtcaggagtaaggccgtgtctagctcaagtttacatttggatgtcctacaacactaaacaaaatttttcataatccatggtggggagcacactttggagctacatttcttgtctcctcattgttgacaattaattaaacatttattggccaggcacagtg

SEQ ID NO: 51873 - DNA, 495 bp, Homo sapiens
gtattttagaaattttgtatctgatgtataagatcagatcataagcctaaagtagcctaaagtatcagctcaaaatccacatgcctgatggtttccttcaaatgctgcctctgtgggtaggaagcacactctgattccactgagcctgtctctgcacggaacgaacacaaagttcggtagtcacaggacacccttgccgtgctgcataatgatgtctcactctgtccccaggtggctttaccaagccacatcactgacgtattcattgtagttgactcagaaccactagggcacttctgtgattcacagcagtcccatgcaggaagctttaccttcagggaaagctgctggattgagactggagggaagtgtgactgcctgtgcatgaagtgctgagatgagttcttggcctgtggtctgtgcttgtatacattattattatcatttaatgtatgtattttcttatgaagttaattatttgcccaatttttcttt

SEQ ID NO: 51874 - DNA, 397 bp, Homo sapiens
aaggcatctcagcggctgccccaccatggctacctgggccctcctgctccttgcagccatgctcctgggcaacccagcccctgcctccgcatctgcgtggtgaaggccattggccctcatcggtggatctgcgtttcctcgggcctacactgtctaggattgtgcggggctggtgagagaacaagatctcttctgtgttcaaggcagacttcctgccccctgcaccctgctctctcccaggccttgaggtcagtgtgagccccaagggcaagaacacttctggaagggagagtggatttggctgggccatctggatggaaggtctggtcttctctcgtctgagccctgagtactacgacctggcaagagcccacctgcgtgatgaggagaaatcctg

SEQ ID NO: 51875 - DNA, 1835 bp, Homo sapiens
  misc_feature (1)...(1835): n = a,t,c or g
tgcatggctgtggtgagtgctcagtaagcatttcacgactaactgtgtgaatgctgttaaggttgtctcgttcaccactaaatccataacatctacaacagtgtatgggacacacgacagacatttattgaaggactacacagctcaccccagcatgccactgacacccacccctcaaatccaccaaagaagaagcagctgcggctaaaatcttgcttgacactttattctcctgagaggggaggacagcagagggagtcaggggagggagactggagagtggattctggatcgaggaagcgaggagccggcagaggttgctgacgttcccgggatctgaggacaggagcctgtgcttcttccacaggacaaggtgagagggctcagaggggacctggagcggagagaacagctagctgtgggcagatgtggtgggtcctcaaggagaagcaggcactcagaatgttacttgcttaaggtcccagagccacctgaccctactgaacacacccagaggcacatcctggaagccagtcggcagcctgagcaggctgtggggccttgaatagaaaagccacaagctccaatgacaggaaatggtggggacccccgatctgccagcataaaatcccagagcattggcaagtgccagctgagctgccagagccaatcaccgaggcccctttctggccccatttcctacagccgagatctgttctctccaggcacagcctgggcagccatggagggaaaggcctcatgctcccctgcctgaagggttccctagcccagatctcagggcccaggattgtgggggaggatatggccccagctcccgaccccaggggccatgtgctgggctgggttggagtttgactgagggtctgatgaccttgaatagcctcagtctgaggacatttccccagggtcaggtccacacacacggtgacctccttcaattctcattccaatctcaaaaatcaggattgctatctctccttcnnnnnnnnnnnnnnnnnnnnnnnnnnnnnnnnnnnnnnnnnnnnnnnnnnnnnnnnncagggagagatggagaccagattttactccacaaccacctgtgtctgaagcccaagctctaatcagtatttctcaaacatttctagctaaagtccatctgctcaattctccacactttcccatgctgggagatgggggagtaaggaggcagctttgatatatcctgggggaagctgtctccaaccctcaggaggtatccctgctgtcacctctgcactcacctgtagaaggtatacacaacctgaggtcctcacagatctgctgggcagtttctccggccacgaggccctgggtaactctagactgatacctcctcatgaaatttctgcagacgtcgcgccatcgtgacctccccgtcctacacacccgggtcgcagcattggaaacacttctctgggtgggcttatccaccatcttcttcagtttttggactatcgtcagacaggtcctgtagtcacggcccagctcctgtgttttggtcaacaggtcaccctgggggccctcctgggccaggcacgggcaggatttctcctcatcacgcaggtgggctcttgccaggtcgtagtactcagggctcagacgagagaagaccagacctgggttgcccaggagcatggctgcaaggagcaggagggcccaggtagccatggtggggcagccgctgagatgcctttcacaccctgttttatgggcagggagcctgcagcttaatctttctcaggtcctgccctttttgtatgtcatctcccccgtgtcactgggtttaccacagatac

SEQ ID NO: 51876 - DNA, 1168 bp, Homo sapiens
cgactacgctcataaaaggaaaaaaaagcgtgtgcggttctcgacgtgccgccaatcttcgaacgcaggtctgtgatcatccgcagactccgaaaaagggttcgaggaacgcgcctgctcccctcgtcgcagtttccagcccgacgagcttgttttgtcccggactcggtgcccctgtagacaatggccctcgtgtctgccgattcccgcattgcagaacttctcacagagctccatcagctgatcaaacaaacccagggaagagcgttcgcggagcgaacacaacttagtgaacatccagaagacccatgagcggatgcaggacagagaacaagatttctccctattaccggacaaagctggcgtggcctctacacaaccgccaaggcccgatggcagaggctgagtgcaacatcctttcggaaagctctgggacaagattcgcggaaattcaagtctctgttggaagagaggcggattgcggccaagatcgcgggtctctacaatgacttggagccaccccggaagaccatgcgcagaggggtgctgatgaccctgctgcagcagtcggccatgaccctgcccctgtggattgggaagcctggtgacaagcccccaccccttctgtgggggcatccctgcctcaggagactacgtggccagacctggagacaaggtggctgcccgggtgaaggccgtggatggggatgagcagtggatcctggccgaggtggtcagttacagccatgccaccaacaagtatgaggtagatgacatcgatgaagaaggcaaagagagacacaccctgagccggcgccgtgtcatcccgctgccccagtggaaggccaacccggagacggaccctgaggccttgttccagaaggagcagctcgtgctggccctgtatccccagactacctgcttctaccgcgccctgatccatgcgcccccacagcggccccaggatgactactcggtcctgtttgaagacacctcctatgcagatggctattcccctcccctcaatgtggctcagagatacgtggtggcttgtaaggaacccaagaaaaagtgatgccgcctggcagactcgccatcccccaacgacacagggcaggacagcagaggacgtgctgggattaaacacattccccctctaaaaaaaaaa

SEQ ID NO: 51877 - DNA, 627 bp, Homo sapiens
gtttatttctttaattatataatttgcaattttacgtattataagtgctaccaggattctagatagttgatcttacatattcagatagtatagtttactcttataattacccgttacgttatctctaaaagtagtttgatctgtgcctttaacttttagaattcatcttttgacttgtttgccactgtagagttttcagttttctctgtagattcagtgtgacaaagagggaatacataatttgtgaccatttaagatgctgatattttctggaaaaggatatagatagtagtagtgacccgcaggagcctcacaataatgtctaaagatataaactgagtagatccctaagtactcttctctaaattataaaatgcattacctaggctttaatagttaaaagctggaatttattgaaccgcatctacttgatttcataatatgcattgattttagtatgttgctgttctgttatctgtaatcaactataacagagtaatatatttggtgttctggaccaaaattcgtgctacacatatgtctgatggcctttaccttttcaagaaaacagttgcaattttgagcaaaattttcctagttgtaatattttaatagtgttatgtattg

SEQ ID NO: 51878 - DNA, 873 bp, Homo sapiens
ttcggcacgaagggtttctattaccagcaggcagcatactatgcccaggagcggaaacagcttgcaaaaaccctctgtaaccacgaagcttctgtaatgtatcccaatcctgatcccttagaaacacaaacaggcgttcttgacttttatggacaaagatcatggcgacaaggaatactaagttttgatctttctgatcctgaaaaagaaaaggtgggaattcttgccattcagctgaaggagagaaatgttgttcactctgagataatcataactcttctgagcaatgctgttgcacagttcaagaagtataagtgcccgcgaatgaaaagtcacctaatggttcagatgggagaggaatattattacgcaaaggattataccaaagctttgaagttgctggattatgtgatgtgtgattatcggagtgaaggatggtggactctgctcacttctgtattaactacagctctgaagtgctcctacctcatggcccaattaaaggattacattacttactccctagaactccttggtagagcttcaactctgaaagatgaccagaagtctcggatagaaaagaacctcataaatgttttaatgaatgaaagtcctgatccagaacccgactgtgatatcttagctgtgaaaactgctcagaagctgtgggcagaccgaatttctctggctggcagcaatattttcacaataggagtacaggactttgtgccatttgtgcagtgcaaagccaacgtttcatgccccaagttttcatgttgatgttcctgttcagtttgatatttatctgaaggctgattgtccacatcccattaggttttccaagctctgtgtcagctttaataatcaggaata

SEQ ID NO: 51879 - DNA, 2083 bp, Homo sapiens
ccgcgtcgacttttttttttttttgaaagagaacatgtttatttacatcactatttcctttttacaatgcctccaccttttgaataataaaattttccaggaaatcaggtcattttaaattattaaggtattttaacaaatacaattttcaccctatgatttttatttacatgagttttcaagagttttaaatagttcttttgaaactgcacaatataaccagaaggcctgactcagaccctgcatcttttccaaaaactttcagtctaggaaattatgtttataatcaaatccttgcactttggatcttttccgatgaggattttattaacacctctaaaatatgaacctgcttcataaatgatccatattttggcagcaagctgaacctatttgacacttcttgatagtaagcaaagatatttttgataccttaattaaactgctttgattaaaactttctggaagttttccgtatcagtcatacaactccctatgttgttgtgtatgtgttctgagtacacactgaatttatgagaatgatttatttccggtctggccagctctgaaagagacacatgggggattcggaactttatggcacaggcactggtgcatctgctctctttgtccagtcacacttgggatgcttaattttcctgatattatacatgcaaatcacttacttttcatagaatttaccattcatcaaatgactttcaacaataacaatgggtctgacattctttcatgtcgtactgagatttcagatatttattagagaaactataagacagattttcctaatatttttgaagtatgagttcctctgaatagttggtataacatccattaaaaaatagaaaaggttaactttttaccatgatcaaagctagagttcacaatgaaacacctgcatagctctgcccaacatctctgtaacaacagccaagggccggtcttgaacatcatgcagcagcaatagaggtatcatccatgagtcgaccctgtggcttgacaaaaatactggtaggtataaaacgcctgagcagctgatttgtgaagttaggaaatctaagcaagttgatgttgagagatggcagctgctggtatccagccatcagaggatagaaattatatagcatttcctgctccgtgccagggaggatacgtaatcgaatctgtttgagacctgagaacatgaaggcatcactgggctcccacagaaatttctacatcttgaactaagtcggtcttattctgtaggtgatacttgacaggtaacgactctctgacacgcccaaatgacggcagatctacagagaaagatgacacactgcattcacatggagagggatattctccacaatcacgtgcggcagagtgatgacagttgtgatgatggggatattctccattgctgaggtccttttccaagagataatataatgcccggttgctactccaccttcaatatttccaagagatgggcattgaagacaaaagcattcactagcactctctccagtctgtaagataacattgtccacttgagactcgagctggtccactgtggtcatggatggagcaagctggagcctcactggaaacaatagtgagggcccagggtgaggcacttaagaggtccgtcatcaacagaaaggggatgtcagcataaaccctttcccaggtgctcaaacttggtagaaacaaatttaaccgcaacatcaaatggaaagactgtttcaattgttacagtttcatccttgtgacacttgcaaacaatttctttttcttcaacggttgtatttatcaggtaagaaacatatacaagaaacattctggaacccactgttccacagcgaacatacaacattttttccagctgttcccctggatgtaagtctccaacaggaatgtcagtgagtaaagccgggtaggattcatcacacacttctgttccatgaagagtcacgtgagtcttctgagttaaattggcatcctgtcctggttttaagccagcggtgagcttcacatactctgatttgggtcttttcatgggactgaacagtcacaaccaaac

SEQ ID NO: 51880 - DNA, 2974 bp, Homo sapiens
gcaggaacggcggcaaccggcctgaattcccggcgccggccccagctcctctgccgctgccgccatgctcgacttcttcaccattttctccaagggcgggcttgtgctctggtgcttccagggcgttacgactcatgcaccggacccgttaacgcgttgattcgttccgtgctgctgcaggaacggggaggtaacaactccttcacccatgaggcactcacactcaagtataaactggacaaccagtttgagctggtgtttgtggttggttttcagaagatcctgacactgacatatgtagacaaattgatagatgacgtgcatcggctgtttcgggacaagtaccgcacagagatccaacagcaaagtggctttaaagtttattaaatgggcacttttgatttccaaaatgacttcctgcggctccttcgtgaagcagaggagagcagtaagatccgtgctcccactaccatgaagaaatttgaagattctgaaaaggccaagaaacctgtgaggtccatgattgagacacggggggaaaagcccaaggaaaaagcaaagaatagcaaaaaaaagggggccaagaaggaaggttctgatggtcctttggctaccagcaaaccagtccctgcagaaaagtcaggtcttccagtgggtcctgagaacgaggtagaactttccaaagaggagctgatccgcaggaagcgcgaggagttcattcagaagcatgggaggggtatggagaagtccaacaagtccacgaagtcagatgctccaaaggagaagggcaaaaaagcaccccgggtgtgggaactgggtggctgtgctaacaaagaagtgttggattacagtactcccaccaccaatggaacccctgaggctgccttgtctgaggacatcaacctgattcgagggactgggtctggggggcagcttcaggatctggactgcagcagctctgatgacgaaggggctgctcaaaactctaccaaacctagtgcgaccaagggaacactgggtggcatgtttggtatgctgaagggccttgtgggttcaaagagcttgagtcgtgaagacatggaatctgtgctggacaagatgcgtgatcatctcattgctaagaacgtggctgcagacattgccgtccagctctgtgaatctgttgccaacaagttggaagggaaggtgatggggacgttcagcacggtgacttccacagtaaagcaagccctacaggagtccctggtgcagattctgcagccacagcgtcgtgtagacatgctccgggacatcatggatgcccagcgtcgccagcgcccttatgtcgtcaccttctgcggcgttaatggagtggggaaatctactaatcttgccaagatttccttctggttgttagagaatggcttcagtgtcctcattgctgcctgtgatacatttcgtgctggggccgtggagcagctgcgtacacacacccggcgtttgagtgccctacaccctccagagaagcatggtggccgcaccatggtgcagttgtttgaaaagggctatggcaaggatgctgctggcattgccatggaagccattgcttttgcacgtaaccaaggctttgacgtggtgctggtggacacggcaggccgcatgcaagacaatgcccctctgatgactgccctggccaaactcattactgtcaatacacctgatttggtgctgtttgtaggagaagccttagtaggcaatgaagccgtgggaccagctggtcaagttcaacagagccttggctgaccattctatggctcagacacctcggctcattgatggcattgttcttaccaaatttgataccattgatgacaaggtgggagctgctatttctatgacgtacatcacaagcaaacccatcgtctttgtgggcaccggccagacctactgtgacctacgcagcctcaatgccaaggctgtggtggctgccctcatgaaggcttaacgtggctcttgcccaataccaaatcgccgctttccccacaagcccttcttcctgtatcaagaatgtgctttagagtatgtgagcaacctgtcttcagtgtagtacaaaggcagagtgagggggcttgtggctccttccaaccccactccccgttcagcacagccgccatctgcaaggaaggcctaatcatgttacaatcactgcccactgaccctctcccagcgggcctcccccttcctactcaggcacccccttcactctgcctacagactcagtcttattacagctttgaccaatggttgggaacccaacaccagagctttgctaataattagtgtggtcaagagccgtctgagcctaatgagtcccagctgcattaggttaagagactcttccagagccagcgccaggtcttgaatggcacctctccctaggatacacagcctgcaggtccccaggacctggatgacacccgcctcactgtggcagtgtattgcctgttaattgctgctaattctaattctgatgatgactcctactccattgtttaccccaaagcatcagctaggctggagtgatttgttacaaatgagcaaaagatgattccttgcttccctcagaaataaaaggagctcagctggcagcgttgcattgggcttcttggcctcccaactcttcccactccccagaatccagaagtaagctctgcatgttccccttcctgggaggaaaccaattgtcagaaggatgtatgatgaccccctcccctcccatccttcacctcctaagcagtcctggcttttcctcatcactcccctctacagtgcctggtagacaagtgctacattgaagaacacaaacctcttgttaagacttgtcctgtagcttgatattacagatgtgctattagtgcaataaggtgaaggctgtctgcccagagaaataagtaatttatataagaaaataaatttcataaataaattgcaaaaa

SEQ ID NO: 51881 - DNA, 421 bp, Homo sapiens
attttcctgtgacagggatggtgttttatatgctcagcaacatgtgtataccttcattttgataagatttccacatttgtagggaaataaataatgcgtcagtctttttgggccgtatagttttgggcctttgaataattgaatcagccagttaaagctcttttaaggcatatgacaagtaaatataactgacttaattattaaaatatattaagcttttaaaaaagtttgagtgttagtttttattctcctagctgtttataggtaataaaacaagcaaatgtgtgccagtttacctaaataaattcttttattttcaaaaactttaatatgaaaactttacagattttaaacataaatttattagagtcatcatggcagatttcacttatgtcataactttatctttgataattataac

SEQ ID NO: 51882 - DNA, 1154 bp, Homo sapiens
  misc_feature (1)...(1154): n = a,t,c or g
ttttctgaagtagaaagagagatagggcaagagagagaagagatggaaggagggggagaggccaaagggtcggcattcccttcatccagccgggccagaagtatgggccattctcaaaaagccactgctctttggagccactcgagaggttcacagtgggctcccttctgaggcagtggcagtgggctcacagcagctacactggaaccacagtgcacatgtggggatgtgggcagcctcctggatcactcagggacagtgtggactcagggcccactccctgctggggctctggacgggccttactggtgcataggagagggaaatgataagaggaaatggcttctgactaggcctttccaagcgcatctcatgttttcagcttagatgatttgatagcaggtgttgtaatcctgagggggaaatgggtgacgaggaacactgctactcaaagccaagatggccttatcaaaggcatacaacatgagccttgtgggcactgcctcaccaaccactggtggctggttgtgctggttttacttggctcaagggctgctgggaaggtttgctgcgacaaaggcctgcatggcctacagagaaacccatccatccgcaggtgggggtgtggcttgaaagacctgctcttagttcccttctttaccctcctgcttgacatggagatgaggctccaggagagagagtgtaatggagttagtaagagaccctcatgaagtttcttgaggcaaacccgcaggctcatccactcctcttctctcggcagggggtagtgtcaaagtgctttggttgtcacaagacccagacacctaggttcccagtttggctggcccaagagttcttcatgaggcaaaagaagtggcagctggtgtcctaggtagagagcagccatacagacaccacatgtgttcctcctggctccacacagacgtcgtgtccagcaacagtctgatccttgcggtaagctatacaatgttctcttccccaggaaggggcnctgagggggtccacggtcctgcttactgtgcaactgggccagctgtagaactggcatgttgcacaggggacacactttacgaacctccagccacttaataaggcactttctgtggaaggcgtgcttacaatgggcaaatccc

SEQ ID NO: 51883 - DNA, 1212 bp, Homo sapiens
agatcccctcactccacccactggattcctgcattggtttttggttttttgtttttttttaacctcgacactgggtctcagatccttctgctgactgccagatccctgcatttcaagcactacgccttccacccccaggcactggatcccagattcccaagccttcacccaccagattctggctcctaaaacaagtgcgggggccccagtggcacagcaagtggatcctgggcaactgcagctgctggattccagattctgggtccccaatccctctgcccagtccctcaatgttgaaacctcatctcttgaaggcagatcctgatattccaaggcactgaatcccaagccctgaatccccggtttctgatctgaatcttccaggcgccgggtcccaaatgttcaggccccaagtctagatcctggcagcccagtcacagagtatcccacacacactggtgcccagagccggcttctcatgacatgaaattgcatggtcgagggagtctgtggggaaggaagcccaggtcctggctgcaacctgcacggatgctggattccccctcaccccacctctgcatggccaccccctcccagccctgtggggaaactgttccctggaaccactccactccctgcatccccacacttcacagcatcttccatccccctcccaccttctaggcgaatagtccccagagctgtgttcctccaaggggtccgaggaatcactcactcctggaggctggcaaggagacagtctgaggccagggacacatgaagggatgtccccaccccagcactatcagggcctccccaggcttccagagttgaaagccaggagaaaatcggcaaagaccacccttccctaaacccaagcacccaatgatgcaaaaaacaaaaacaaaaaaaaaccaccaaatccccaaattcattccagatctatttttctaccagagagaggagcaaagtcctcctcccctgcgcccttacattctgcacttcatagttggattctgagcttaggatcatctggagaccccatggagggacttggaaaggggaactgggatttggggaggggctggaggacttccgcacgcttccacctccttcgacctccactgcgccccacctccctgcctgtgtgtgttatttcaaaggaaaagaacaaaaggaataaattttctaagctcttaaaaaaaaaaaaaa

SEQ ID NO: 51884 - DNA, 701 bp, Homo sapiens
  misc_feature (1)...(701): n = a,t,c or g
cgcttctccattctctgtgggttgtgttgttttcttcatgaattccgaagtttactcttggatgatctagttgaagagctagtgtttactgatcacactgtcttctctccttgaaattggtgcatattagctgcttctagtcagccctcttgcccagaatccccaaaaagaaaattgttagttcagggattgtagctttttttttgttttaacatgagatatgtgattataataaacttcaagtattcaggaccattttatggataaaaggagaatctaacttttaaaagttgggaaaatgatttaatattggaaactcaagagttacaaattcttacagttatttcaaaactaaaggtttctttagagctccaaatttagagctataaatcctatatccgtaatcaaatccagtactgataacaatgaacaattgctgaagagtaatattctctctctctttaccaatgtaagccttagcattggtactttcttgtattatctttttgcatgccattatgatcagaaaaaacaaaaagctacccagaaagggcagccacattctaaatgataggcttttacctccctgagggggctgctaggtacctacctggattaggaattcatttggtaaacaacagggggccttttaaatctaaatnaccatttccnaataattngtttnccgtttattccgntta

SEQ ID NO: 51885 - DNA, 341 bp, Homo sapiens
ctgggctcaagtgatttgccgaccttggccttccgaagtgttgaaattacaggtgtgagacagcgtgcgcagcccaaatatactttagatggcccaaagacaacaaagactactgggtaactacagatgtatgtatactacaggaataaacaaataggattctggaccaaatttcaaaataatatactaccaaagaattattttaagtatatttttagttagatttcttccaactgacagaatcttaaaaatcgaatttgacccccagaaggcacagaaaaagtattttgtcttaaatcagaaagctaattagcagactgggatgacaaaccagaaattct

SEQ ID NO: 51886 - DNA, 379 bp, Homo sapiens
caggttttaaaaatatataatttaattccacattaaagccaagctatcgtggtgggaagaaggtgtaaaaatcggtggaaaccctgaaggccgagtacacacacgaagagagagggagttagctgagaagcagcatccagggaaagaaaggtctccacaagctgagatgatggccctctgccctctgaactgttcattaacaagtcaccagtcccagttctttgttcaaatcctcaaacttggagaggcactgctccaatgagacagctacagcaaccacagggaggaagtgctttgggctgcaggagagacagtcaaagccaaatcacgtccaggcgggatgaagtaaacctggaccgaggagcctgacccagctgcg

SEQ ID NO: 51887 - DNA, 1726 bp, Homo sapiens
tttcttttaattgcaactgcttttctgccgtgcctctcttccctacccaaaagtgatgagttctgaacaagacaagactgtcatattgtagagactttggtatgtgataccatagaatactgattggatagccatcctagtcacttaccaatactgactagaagttaactcttaattctaagctatcttaaaatgcatatatatacttcttgcatggaagagcaaaacaaattcaagttgtcatgcctgataatttcagatgccaccgtatagcaaagggtgaacatgttttcaaccctttaactttttacggtgtttgaagaccagctactccttaatatttatcaatggattaagaagtttaagattttgcagatttatcaatttgggtttttgtactgaagttgtcttgcggctttgcaagtgtccctttatatttaaatttgaaagttgtaagcactgatgttaatgtgattgatcagcatgggcatatgtaaaatgtccttttctggttgcctctctatgctattgtgttcagatacttacaccataattaaacagtaagttatagacttgctgagtttggcatagatagtgcactcatttaatctgtgcctctcaaaacttcagaatattagcatattaccacaaataatttttggtgaaactattgagatattaaaatttttgaaatcactactgttacctgttatagaaaatagtgttggcttagtctagtctctgtgtaactggttacattttgatggttgtctatactcaactggatatgtgtatgtaaattagaaaatacatacctatccagacataaatgctaagtaacatttttttcttcctccaactacataatttgtagctcatcatttttccttaatcctttcctaacttgttgcagcagtttgaatttcccagatatttatgtttgaacataatggctcagaatacatatttgaacatcatagttgtatatatttttaaagtagaataaataatggaaagcaacttgatatacaagtttatactaaaatttcaactgtgtgaagatacattttaaggcattactttgctaataatctacacattcttttttctattaaataaacaaatggtttgtggttcacagctttcatccaagcttggtgataatcaattttgaaaatacagtggactgaaaagcaaatttattctttcgaagatttcatttaaatctctgtactatgcatttttgtttcagtttgtaaatgtgtaacatttatagttaaataggacaaagcaggccctatgactattgttttcaaaaaattaatatataaataattcagaggggtttttcatttacttttgaaaagaaatttctttaacaggattgcacctatcaatttcttgtagaataaaaaaaaatctttcaacaaactgactttacttgtttctgtcaggatttaaatctttctaaagctccttataaacttaaagcctagagtacagttctgtaatgagagtgattatttatttggtattttattaaaatatctgagggactgtccaagaaagaaggtgaaagagaaataccacgtctgtactgcctaatttgtaaccttctctttgcattccttactgaaagtttgtgtaggtgaaaagcagttaaatcatcagttgctctaaagaggtcttaatttttaagtaaattacctttagtttgtatattaaa

SEQ ID NO: 51888 - DNA, 838 bp, Homo sapiens
tgttttagtttttcttttctttcattgtgcctttccaacttctcaagtacctcatccagttgtgaagatttttcatcaagttgttcttgagtgcatttttctatttctgtgatcttttcttgtaatcttttgatgtgttcatctttttcttgtaaacaatcttttaattttctaatagtttcagtttggtcgtctatgattttgcactttattcttaatgcatcactatcactttcatttgtctttcgcagacattcattctctctagataaactctcaatttgagcctccaattttccacgattttgggctagagaagatccttgttgtgccagctcatgtccccatacttttctttctgtccttaaaccaaatattagtgattccttggctgctagctcagaaataagctggactttttcgtgcttgagaagttctatttgaatactcttctgcttgtcatcttcaattaaaatttcaagggtgttgatttgattctgtaaatttgctgctgtttcttgtttcaatttagaaacttctgccagttttgttttttgttcctttaccatacaggtcagatctttaattaaagaggaagactcattttcttttcgttgagcccaaataagagcatgtttgctctttgctaactcagttgcaacattttcaaaaccatcttttaacatcttggaaatcttctggcttcaacagttaaagcaatacggaattcattttctaaatccatatactgctggcttaacacggtcaattttctcttggtattcttttatcagtttgctcatgctttttctcttctttggctatttctttagctaag

SEQ ID NO: 51889 - DNA, 1018 bp, Homo sapiens
tttgggtttggtttggttttgttttgttttgtttattgtggtaaaatacaaaatctaccgtcttacagtgaggtggcgttcagtaccttcaccacgccgtgcagccatcccatctgattccagaacattctcatcacccagaaggcagccctgtccccattatgtcacctagtcacccccaggtccccctccccagtcccggcacccacgaatcctctccctgattctgtggattggtctgtcctggacatttcatagaagtgggatcacagcgtacccttctgtgtctggtgtctctcactgagcgtgacatcctcaagggtgcatccgcactgtggcctgggtcagagcttcgcacctccttgtggctgagtctcattccagcgcgtgggtgcgtgggtggccgcgccgtgctgatcccctcaccttcactgggtgttcggtgttctccgcctcgggctgtcacaaatcgtgctgctgtgagccactgcgtgcaggtctcatcctgggtgtattttacaaacggactggatgtgagtgggtgaggagtgaggagctggggtgacaggtgcctgcgaccccggccaagcactgcctcctgcgatcgaaggggcagggggagacagaagcccctcaagggggtgtggagatggagaagccagaccccaggtggggggtgcatagagtgggggctcaggccacggaccccacctggcagtggccctggccttgcccacccacactgtgtcacccccagttgttaaatactcagaacgactctccagcccttccctcgaggccacctcaccccgcagctgggaggagggagtggtcagcgtggttgccgagacactgggtggcctttatgctgtcaacggtggcctcagaggccttctggcaggagcccgggggatccaggcagacatgcaaaccctcaggcaagaggctgcacggccctgtatcccctcggggaccctcgagaccagcttcccagcaccgctgtacaggtgagcccctc

SEQ ID NO: 51890 - DNA, 1786 bp, Homo sapiens
atctttttttttttttcactgttaagctcttgtactttattgagcagctgtggaattaggaaggggaagtaggataggggacacgattacgttcctaagtgaaggtttcaagctgggctttgcagggggtataattagtatggtcactgtgtcttgtaggatgtttggctccttggtgatagagcttgccaaaatggtgtcctttgataaggagggctggggggcagggagttgaagaaattcccttgccaggcttggggatctgtaaacatttccattaatcaacaagtgtgtactaatcccgagtcttacattgcgatgcctcactatccccacagccccatccctacctctctgcccaccagggctgagctcaaatctgtgtgttgtggacctctgcataggccccaagggagggagactgaggctcagcctgggactcagcagggcaggtgatcaggctcccggccagctggagccagagggggacggggcatccttggcccccgtgctgtgtgcagaacagagggctacgttgcagcgagtgcatccttgatggcattggtgagagggaagcgcagatcctggccgcagaaggagccctggaagtcatccaggtccagggcccataccatggcgcccgccagctgcctgtccttcaggtactgcaccttgcttttgacgctttcctggtcgtcgtatcctacccactggttgcccttggtggcataggggacctgctggccgaggattctatggactgtggctccgcggaggaagtcacagatctcatagtaggcaagggtccctgcctccttggtgaaccggcctggaattcccggtcctgagattggggctccaacaccagtctcagaagaagccagagtgaagctcctcccgaaggtggggatgcccatcaccagcttactggcaggagcccccagcctcaacatgtaccccacagcatagtcagtgttgctgaatctgtcaggacttgcatcctcctgacctcggaacaggggactgtgatggcctgtggtcccacgccaggctccatgaaaatcgtaggtcatgatgctaatgaaatccaggtgttgggatatcttggcaatgtcatagctgctgtcaatggtgaccttccccgcagacagtgctgcgctgagcaggagctgctttttccctggctgggccttcctttataaattcggccttcatttccttgattagggtggtaaaatgctgtttgtctctccgtccagggtagagccaggcaaggtccagcccatcaaagccatgggtgcgcagaaatggcggtactgacttgatgaaagtccggcgactctgggtgttggaggctatcttggaaaatctttgagacccaaagttccatcctccgacagacaagagagtcttcaggttggggttcctgttcttgagtgtgttgagcatgccgtagagcgtcacatcattccactcccaggtgtcgatgtgatcgttgcttatattggcaaagctgtagatgatgtgggtacagaggaagcggtcaagggcatctgggaagcagctcccatcgccttcccggtactgggaccagctggtgtagtagcagaccagtttgtatgcagagcagcactggagcagcaccaggaccacaaagcctgtttgagacgccttcacacccattctggctgcagcagagcagggcagggtgtggcctcttcccttgcccacggctcctggtgccagctacctagacagggcctcttccccaggccctgtacttcct

SEQ ID NO: 51891 - DNA, 657 bp, Homo sapiens
  misc_feature (1)...(657): n = a,t,c or g
ttgccctcgagccaagaattcgcacgagcgccggtgcccagacatggcggacggcacgctgcagccgccgccccctgcgagcctaccgcgccgagtggaagctctgccgcagcgccaggcacttcctacaccactactacgtccacggcgagcggccggcctgcgaacagtggcagcgcgacctggccagctgccgcgactgggaggagcgccggaacgccgaggcccaggtnnnnnnnnnnnnnnnnnnnnnnnnnnnnnnnnnnnnnnnnnnnnnnnnnnnnnnnnnnnnnnnnnnnnnnnnnnnnnnnnnnnnnnnnnnnnnnnnnnnnnnnnnnnnnnnnnnnnnnnnnnnnnnnnnnnnnnnnnnnnnnnnnnnnnnnnnnnnnnnnnnnnnnaaaaataaatgttttggataaaaccccatattaataataagtattttacattattatctggcatagactgttatatatagcatattattgttgaaatacaaaacaatatgtatccgtactgtatgtgatatagtgccattttcagtaactgctgtacacacagcaactcagatgaaactcaaggaaattcttcagagcaaaaacagccaatcttgaaaacatacatgtagcaggattccatttatgtaacattggtgaa

SEQ ID NO: 51892 - DNA, 812 bp, Homo sapiens
gtcgactttacgagtataatagtttattacctaacttacaggtacaaagtgcaaatgacttgacgcctctctttccccaatcccttgaactctctggatctcaaactttctttaggaaagcaaaggttaaaagcagacagtaactaaattccaaataaagacaagatttcaaacatgaatattatcttgatagcaaaaggtacagtaaaaccaaaatttcattactccacagtttacctttccatttaaaacttggatagtataacacttgagactgagagatttggtttcaggcattaaccagatttaattgtttttggcaggtaagtacaggctctggcagagttaccaactattctggtcaacaaaagtaaagacaagtggataattatttttagtggagctttaaaaacctgtgagaagctcacattgactttttggcctccagtccacaaaataatacttcatttgataagctaaagtaaagagcaattttatggattaactctatcaaagtgaagcacatgaaaaatgggcctaaagtcacaatatattaatcaggatataaaaaattaaattttcacagaggttttcagggatgtttgtttgttaacaatgacctatatgtaataatgttatttgttaataaattcacacaacacaaagcagtaattaactaatgaattttcatttttctttccccaatattaaaaagggataattatactatcattataatttgataatgtctatatctgctaattagggcacataatatcctgcaaactactactataaaatgtgggaaatcc

SEQ ID NO: 51893 - DNA, 1054 bp, Homo sapiens
ggtcgactttttttttttttttttaaggtaacatttctaagagcaagttggttaagctctccagttttcctatgacagtatgttgtttagtttaacctactaattcaatcaggcatttctattgattcacctggaaaaggggatacaacagaacatttttaagaggtcattttagcagttttattcaacagatgccataaattaactacattcaggaaaaaaaacttaaacaaagaacaaagccaccctatctagcattctctcactcacaaagaagtatcaaagatatgtttatgttccattaaccgagtatgaagcaaaatcattaaaatattacaactgctaaacacagaagactagaaatcaaatagtttcatatccagtatacaggcatcaaaaacttcaatttccagctgttttttttttctaattcatatcatggatttacttacaaggagcttattcctatgggattaattcaattactcaatggtaaatagattttagctcagaatttttaaaggatgacttgctttaagttactattctacggtgctgctctatttctgctcacacttgcatgtggccaaacagatcatgctctgatcagataagtatactgtaatctacttatatgtttaggagttggcatagggttaaaaggcacaaagctgtattttagtactcatttttcttattacttatttgtaaaggaacttctttggatcctgcttaaatgatcaccaagaaactgcaaatttctatgggggaaaatgtgagtcctcttcataaattttagcagcccttcaaggacatatacatcaaaatttggtggcctttaaagtattggaattttaaatgacataactgcactttactgttgaagacccttttagtttaatatttatagccatttcctcatattttctttaaaatttatcagtatagcatttcatttctatgcatgtatatgtatagtaattcataaaactaaatagcaaactgatattctacaccagttcatttatctcaatatatattttggaatataact

SEQ ID NO: 51894 - DNA, 494 bp, Homo sapiens
agaacaggccctggggtgcagaggcccggcacgtagagaacccagatagacgccggtggtggaactggtcaaactccacgcccgcctgggaggttgtcaggttgctgtggatgtaaggacaggaggtgcccagtgctccgctcaaggaaggctggatctgggccccacctacagagagggctcagggctggaccgggggcattgtgtgcttgggccgacccgggccggtggcagacgctgttctctgtcgggagatttgcgtccccaggaccctgttacacagtgggctgttgagttggtggctggcttttcctctatggacttcctcttcctgccccacctgcataggcacacacaccttgaatctgcaccctctggagggcatctgtactcctgtgcaaaatgcccagtccagagacaaaacctcagactttgtgcacctaggtttccttctcagcagcggagactgttttttgagttgcttgaagtggagg

SEQ ID NO: 51895 - DNA, 410 bp, Homo sapiens
atttgctgagcatcatccagaccattaatagaatcagcaaagcactggaatttcacactttaatgataatattccacatagtctatgggcaaatattttcaacatttccaatttttaaagcttcagaattgaagccaaacaaattaataaataattgttttaattactatttaaaaactcaggtttagattgtttaaaattagttgcttttgatactcagctgtcatgtttataattcaaacatgtagtaaacatatgtaggtaaggttgtttttttggagatgttgcagctcaaatttcagtccacatatgaatcatcagtgtattttccataaagtgattcgggcatatttgtgtgaaaacctcagttctgtcacttcttacctctataaacttggacgataatgtgc

SEQ ID NO: 51896 - DNA, 842 bp, Homo sapiens
tttcactgcctgaaagtctttattgaaaatctgggagaaaatatattgaaatgttagtagtgcataactttaatttttatactttttgcatcttacaaactttctacaataagtacacatgacttatataaacagagaaaagcaatcattatcttaaaaataactatccagtaactgccacaatctcctgagtccagacaatctagagcagaagggtagactgaggaaaatatacacagtataaaaaagtaacaaaatcaaaacctgaaacaaagatcaacatccaataaatgcttctgaataaagggagagtagataagaactggattttaatcccaacactgccatttaccagctggccaatactgagctagttactctaaagagttcagttttctcatttgtacaaataggatttgtctttccatctcactgagttgtgatgagagtcatatgcaacagcatatgaagaggctagcaaaaggtatttaacaagcgttcaacattctcatgatgacatgaataacactgtacatacaacataccaacttgataaatacacagcacagttaatagctgagggcagagttatggttgggaagagagagagtgcaacataggcagagtgaggggggattcccacaattttctaagacagaaaagtgggggaatcagtagttactggaaagaataggcaatgcctgactggatagaaaaagattctatgcctttgtcaaatttcacaaaagtgacttaagcctatactgcgggatgttcacactacgtccctttagtgcagttacggtacttcaggctgcaagtaaccaaatacaactaaaatt

SEQ ID NO: 51897 - DNA, 714 bp, Homo sapiens
atccacagattcttccatctccatatagattatcaccattgcctgcacctgttttccttctccagcctatctgatggaatggtgcttccatgacatgtggtatttggaaggctcttagctctgatgtaatcagggtttgacccatagtcacctgaaatagttcttctgtttctctttgttctatgaactgaagggtctcagaagcccgtgttatgcaaatacccttccatccccttccctctccccttgcctctatccatgttccctcagcctcagggtgcttgcaggctaagaggattgggtctctggcatcctggagctgaacagctcgtgtcaggaattccccaggcccttgagtctctggggtgagttgtaggggtgtgtagggtgctggggattaagatctgctgagtaggtgcttaccagagttatactgaaggacctgaagacagatcatcttcacataatcagcatgacccataatctgtgatgtcactgagcttcttttatttctgtagtcaaggaatgtgcacaagtaatgcaaatataattacttttagtcctgaggattagggaacttgggggatgttcacattacctgatgatgtcaatattgtgttatgtttaattttttttaaaaaagatgcttatttattactgaaataatctagactgaataaataactttttaaaaaaattacattggccagtaaa

SEQ ID NO: 51898 - DNA, 1990 bp, Homo sapiens
  misc_feature (1)...(1990): n = a,t,c or g
ttgtaaaccgggtacagaatccaagagatgagagaggacccaacatggggcagaagcttgaaatcctcattaaagatactctcggtctaccagttgctgggcaaacctcagaatttgttaaccaagtgttagagaagactgcagaagggaatcccactggaggccttgtaggattaaggataccaacatcaaaggtgtaatcagcctcattggaccactggtcagaaatgtctgcgttttgtcacgttatccattgtaaattttcattctgttttgcatgtcagttagccattatggtaaacatttacaattaggttacattgttttaagaactaagtagcataagtgaagcatgatccaaaatacttgattattgcattttcagagcataaaccatgattaaaactgctactggcatcagaattgaaaatcatatgtttaagtaaatgttaggtacagattacaaaaatctgttaaagcaaaacattttggaggagtgaaatagtaaaatgccaagtattgtggcagatttatgctctgaaccacacaaaaaaattgaggaagcatttttttaaacagtcggtttaaattgtttttagaattattgctttttgttctaattttccacaaccattaatctcacttgtatatggcacacccagcacttgtgcctgtgggccatattagatgttcattgtcagagctcaagatnnnnnnnnnnnnnnnnnnnnnnnnnnnnnnnnnnnncacacacacacacaaatgtctgtgcaagtaagaaaaaaaaagcatattctttgtgccttgtattttggggaaactctaaaactggtaatattttgtatgatgaaaaccctaatgagaaaaaacaagatatatagatggaaaaattatggggtttaaatgtttttttgttccaactctttttcagattttttgaatgtatataggactatgttgaaatgtagatatatgccacagagtctgtgtattgtataaaaaacaaaacaaaaaacaacaaaaaaaagatggctctagaaaactcatatttcggtacttgaccggaagaagacaaatacttgcacattattgcgattgttttattttttgtaccaaagacaaatgcaactgatatggcaaactgccagtctaagtaaagttttgcacagcttacatgatactgtatgaatgtatgaaaaaaaaggagaaaaaaaagaaaaaaaaaggtcagggttagggatcttactgaactgtgaattttatttctgtttgggtccaattatctacagaaggagcatccatacatacaaatattattttgctgttcctctagttcgcttccatagtagataagttggtggccatttagatgtcttttatttctgcacttattgtaggaaattttaatatatttcattttagtaagctattgataaaatagtttttgactttgaaaattaaaatgtttatttagcttattgtagtatacttccaccagacaacaaaatagattatttttattgtattatgtatatatatatatgtaaagaaagaaaaaagctaaaaatatctaattctttagttgccacttttccaattgatgtattattgtgcatgtaatattttcaaagatcaacacaggctaaaacaaaaacaatttatagatttttatatttttgtacaggtattttcaaactagcttcttcaaacttaacatgtgacttattcttctatagtttctagaattgagaaacattaacacatttagtttttaggtgctcttttttgctcatataaaacagcttcattagtcagtgttttaactgtgttcaagctttacctcttgatgagaaatttcttatgtcaaggcagcattataaaccttcccccacagatttttccatcctgtctctcttactgttttattctcaaatcttgtgctttgaactctgaaaactggtggcttaaaaactagaaaaagagaaaaagc

SEQ ID NO: 51899 - DNA, 1461 bp, Homo sapiens
ccgccgggggtgccctgcaagctgttccgcgcgtcctgcccgtctgtccccgcgggtcgtcgcccgccacagcccgcgccatgaccacccagcagatagacctccagggcccggggccgtggggcttccgcctcgtgggcggcaaggacttcgagcagcctctcgccatttcccgggtcactcctggaagcaaggcggctctagctaatttatgtattggagatgtaatcacagccattgatggggaaaatactagcaatatgacacacttggaagctcagaacagaatcaaaggctgcacagacaacttgactctcactgtagccagatctgaacataaagtctggtctcctctggtgacggaggaagggaagcgtcatccatacaagatgaatttagcctctgaaccccagggaggtcctgcacataggaagcgcccacaaccgaagtgccatgccctttaccgcctcgcctgcctccagcactactgccagggtcatcacaaaccagtacaacaacccagctggcctctactcttctgaaaatatctccaacttcaacaatgccctgggagtcaaagactgctgccagcggggtgggaggcgaacagcaggacccttaagaccatggcttcagcctccaaagcagcctttgtcatcgacaaaagaatcttgaagttttacaaagatgcttcaggagaaacagggagtttgaatggaggcccccgaaacagttccacgtctttcttggttttgcaggaaatcctgggagtctgaagaaaaaggggatcccaacaagccctgcaggattcagaagtgttaaagctcctgtcactaaagtggctgcgtcgattggaaatgctcagaagttgcctatgtgtgacaaatgtggcactgggattgttggtgtgtttgtgaagctgcgggaccgtcaccgccaccctgagtgttatgtgtgcactgactgtggcaccaacctgaaacagaagggccatttctttgtggaggatcaaatctactgtgagaagcatgcccgggagcgagtcacaccacctgagggttatgaaagtgggtcactgtgttccccaagtgagccagcagatctgaccactgttctccagcaggcctctgctgcagctttttctctcagtgttctggccctctcctctcttgaaagttctctgcctactttggttttccctctgcttgtaaaacattgagtcccctccctgccttggttaattgactcacaccagctgtgcgatgcccgcttttacaattaaaggaaaactgttgtgttcagtgtcaccttgtcagcaacactgtgtcccttcgccccgccgttcttctctgctgcatttggacatcagccaaatttgaacccaatcaaatataacgtgtctgacactgattttgtttttactcaataaatgtatagactacaaaaaaaaaaaaaaaaaaa

SEQ ID NO: 51900 - DNA, 1753 bp, Homo sapiens
  misc_feature (1)...(1753): n = a,t,c or g
ttaataattaaaataaagttgatatcctgtctttagggagttcccttgatctcttgaaagagacacagccccatttacattatttcgtggatttcaccagcatagtatagtttttttctgtaagtccctcattcttatgtaataacaggtggaactgaggtttgaagaacctcagtggcccatcctgatgacattggagactcaaagagacaagagagagtagggtttaaaacctgagctttaagactcccactagcttcgtgtcctttggcatgttaacgtgccctcagtttccctcatctgtataatgggggtatatgaaaggcaccagtcctaaggtgaacattaagtgagatgattctagttacagacttagaacaatttccagcacatagttaaatatccaggaaattctggtactgttatgtgtgggtgagctgacctggatgtagatgttttcctctctcttgctgacccctccgccagttttgtcttgtgatgccattaacacatctctccctttctgacctggctcctgcccattggtgtcccaagaaatcgtgagaatagttagccccccgtctccccagcctgttgctttctcgtgtagttgttcacagtagttgagaagttgaagagcttttgcctattgaaggtgcactgagaataaactctttcctgccaccagaattgcagtggttcacggcctgcactcattcccatgaatgcagttaatagccacagaaatgtcacattaaggcaaagcagccaggggctcatcgtgttgagactcgagtctctcagaccttggattcattccctggtgtcttttgagcctcagtttcctcattggtaaaagagaagtgaagcagtgtctcacagggtcattacagagattaaatgaaataaatgaaataacatagaccaggagggcgtggtgtttaaaagtcacagatggggcaccctcgggccatccagcccagtgttttctttagcccctatgatgttcattttttgttatatcccattaggtgcccatatttaaaaattgggagatttcacataaaattaaaaggtctgcannnnnnnnnnnnnnnnnnnnnnnnnnnnnnnnnnnnnnnnnnnnnnnnnnnnnnnnnnnnnnnnnnnnnnnnnnnnnnnnnnnnnnnnnnnnnnnnnnnnnnnnnnnnnnnnnnnnnnnnnnnnnnnnnnnnnnnnnnnnnnnnnnnnnnnnnnnnnnnnnnnnnnnnnnnnnnnnnnnnnnnnnnnnnnnnnnnnnnnnnnnnnnnnnnnnnnnnnnnnnnnnnnnnnnnnnnnnnnnnnnnnnnnnnnnnnnnnnnnnnnnnnnnnnnnnnnnnnnnnnnnnnnnnnnnnnnnnnnnnnnnnnnnnnnggtctgcatttttctttagaactcagaacacccaatagtcctaggcccccatcctcgcatggcagcaagctaaataagcatcttcccactgcgagttggggcatgacccagcctatggtttgccatactccctctttttctccgttttttcattaattgtgaacctgacctgcatcaccctttcatgtcagtgctctccaaacctgcttgcttgcacccctctagtcgaaatattttgtgcttaccccaatatatgtgtgtgactattgaactctattcgtagactgcttgtactaatgtcatttgcatcataaaatattcatatccaataaacatattaaaaggatgagataagaaaccg

SEQ ID NO: 51901 - DNA, 923 bp, Homo sapiens
cttcaaatattctggtctgtcagataacatatcccaatttttggcaaaaatatggtcattaggagaaaagcacggagagaggctgagaaaggaccagtgactttggtatgaagaagatacgtcctgacagcatctctcacctactgtcttgaagccccaaatcaccaagaaactgccataaccaggaactctcctgcttcctcaggctatttggttctctgagggggaaggagttgggtaagtcttggaggaagcaaaggagtgggtagaaaaaggggaaaatccccatttattccctaaagctgtctcccagacccataaaagggctattgcagggatggcaagaccccaattcctctggccagaaacctttaacacttgactccaaaaactaaggctggagctgtggggttcagtaggggtgttaggcacaggtgttaggggcatccatcatcagcagagggaacacccctgccctccggatcttcctccagccccttttctcttgcagccacactcctgggcctccagaaatagccacaaaatggctctgctcagcagggctttggtttcctggatctctgtagatctcaacatgtaagtttcccaaaacagtgagcaatccaggctcttctgcctgcccacctcaattccttttctgctcccaggaccactgtttctgccccatgggtatggaaagccagtggaaacaaggaccaagagccaaacatcaaaaaaatcaccctgggaagagcagggagagacatgtgcacttccctgggccacttcaccagcgtcacccatcgttagcagccaccagctgccccatgccctcacggatgtagacagactggatctccttggtcttgaggcagagatcgcaggcccagacggcagaagcttcagtggtcagcagcccatag

SEQ ID NO: 51902 - DNA, 502 bp, Homo sapiens
  misc_feature (1)...(502): n = a,t,c or g
taatgttttaagacttgtcttgtgacttaatatatggtctgtccttgagaatgatccatgtgctgaggaaaagaatgtgtattctgtagccattggatgaagtgtcctgtaaatatgtattagatccatgcagtctatagtgcagattaagtccagtatttctnnnnnnnnnnnnnnnnnnnnnnnnnnnnnnnnnnnnnnnnnnnnnnnnnnnnnnnnnnnagctgttattttattggggcctatctctcttattagctctaataatatttgctttctatnnnnnnnnnnnnnnnnnnnnnnnnnnnnnnnnnnnnnnnnnnnnnnnnnnnnnnnnnnnnnnnnnnnnnnnnnnnnnnnnnnnnnnnnnnnnnnnnnnnnnnnnnnnnnnnnnnnnnnnnnnnnnnnnnnnnnnnnnnnnnnnnnnnnnnnnnnnnnnnnnnnnnnnnnnnattggcatggaatttctttctccatccctttattttcagtctatgtgtgt

SEQ ID NO: 51903 - DNA, 2063 bp, Homo sapiens
cttgagaaatatcaaaaggtttattgaaacatactcagctcagacgtactggcttatgaagcggtcagtcctcccccggcccccaaacactaacctttttcatttttctttaaaggttaaaggcttatgggtagttttatagaaaaagcaatgtagtgattagagtatctgcagaaggacccaccctcatttatacattccatgccgtcaggttaaaactctgctttgaatcgatgctagaggttatgctggccaaacagtgcagagaacatgggggctttgaatggccgagatgttcgaaatgctaaataacaaaggaatgacttgctcaggacagatggaaaccatgacagaaacaatgggcttggaaaagggctgttttcatggaacctgcagaaaaaccaaaacaaaatatcccccacaccctccaaaagcaacaagaaaccctcatgtgatccattccatccaggaattttcaccatagcaacggaaaggacccgaggtgtcactgcttgtgaggcagcgagaggtcatctctgcatcctagtgggaacccctgaagccctgctaggtgacatcatcgcggaaaacctgccgtggtgcctgccttccaacctgcctcccggagggctttcagctggagaccccattggagctcttgaaatgaataagggaataaaattgggagaggatttggagatacacccgtaagtgtaggaacagggcgagatgatcaagggaagaagggactgctgccccaagccagaatatttctatggctctacaagggaaggggcggggcctgtgttctcaccatagacactagagcaagagccccatagaaggaacagtggttgatcactttccaaatgtgatggtcacttcatcacccagagggcctcttctttggcacatgcccagggtccctccacctctactggctataaagctcaccccacgattcagttgggcctcaccttggaatcccacccacaacctccttaactctcctgacccccctgaaatgtgcaaaccaccaggcaagccggtggcaaagtccccatttgtcctcaacgcaacggtcatctccaagaggctacctggggtccagcacttgctggggagaggtgataagagtgggagccccccacctccaaccaacaccagtctggcccaccagctgtgaatttggttctgttctacccccagaggatgaaacagtcttcccagccacattttccagtgagcctaatactatttgcaattagctttgctttagtttgcggggattgaggttggtctggtattacgtgtctgtgtgtgtggcaggggaggggcgggcagtcggtgttagcttttcagttcgtcagtgttcacatttacacgaaatccccttggctaggatttccaaatttcctggctgtgaggcggcctggttcggcaactgttaccgatttctccctcaagaaagacacagccagggaggcaaatcggtaagagaaattctgattctctggaacttaaagtctttcaccaaaggtgtcttcctgtgtgacttggcggacgagttgggatggtcccaccgttgagcacgacggccatctcagttggctgatacacgttgcttctaaacggagcgctgggtcttttccccaagctgccactgggtctttttcccaagctgccgttgggaaatcctgctgttcggagagctgcattgtgttcatccatggagaaggccttgttctccatataggcccgcggcagctgcacgtcctcctcgaaggccgtctcccgcatcctgggctgcgacgtgtcgaagtagttgggcgtgttctcctgcagggctggcagaagggtgcagtggatctcagggatggcgtggaagatgacgaagacccagccgctggccgccagcgtgatggccaaggtggggtcgttccaggcatccccctgctgcagcttgacattgccgaagaggtacatggtcatccaggccacccagatgagcacagagaggaaggctgtgatgaggaggaaggccccgttcagcttccacctct

SEQ ID NO: 51904 - DNA, 838 bp, Homo sapiens
tttggctttgggtattttttttgtcttcttttctttttttaagatcaatattcattcttcatttgccctcgtaacgaaaatagatttttaaatgcctcaaatatacaaacatcattgatgcacacacattccagaaatgcagaggtatgctgctgccacggggtaggggtgcgggaggcggcctggcctcatggccgcaggaccgtgccccagcccgggcctggcaggtagctggccactgataaatgccactgggatcctaggagaagctggggaccatgcgtgaggtactgaaggggaccatggtggatggcatcctgggcactttgtagcttgtctgagggaaaggcctctgctgccatagaaaagctggacacatgtcaccctggggccctgacatcctaaaatgccccactgactaccagtcactaggagaaaggtctccggctatgcccttcccagtgatgcttgccccagagtgactggtcacaggtgggggacaggtttgctccagaaaccgtaggcctttcttgtctggccccctaaggaggacccaagatcaggaaaactccccagtttaaaaaaatatctgtccatctgtatataaaatacctattattagctggagttgcacacatgcaggaccaggagagactgcctgaggttctgcctggaccgaaggaggcctcgctcacagcacctctgtgaggggactggtgctcctgggaagtcacttctcttggtgaccgagctgacaccccctccacttggaaagcacagggactgagcaggcgggacctgtgctggagggagaccctcctggtgaggaactatgcgg

SEQ ID NO: 51905 - DNA, 685 bp, Homo sapiens
  misc_feature (1)...(685): n = a,t,c or g
tttttatgtctgtatttaagaaataagtagggttccctttttgcaaatgaatttccaagtttctctgtgctttctcctacttttcatgtacatctatctctgatcctacctttgatcagataggaaacctacatttgttcctcaagagttaaaaaatacaggtggtttttttcttagccttctgcagtgaatggttagttttttgaccacctagtctctctctgacttccaatctttgtttgcagtttgtcaattagtgctttgaattacggtgatttagcttagtaggcagcttccctaagcctgggaaaaagccgttgaaatttgtagtcagttgtgtaacttgtcaaagttagtgaggaagaaaacgagaagtattaactaaagagaatacttcagttgtggtactaaagtattcttgagctgtgggattttcttttttcctcttttttcgagactccatctcaaaaaaaaaaaaacccccaaaaaaaaacccggccnttttnnnnntnnaaaanntnnnngtttangggnantnctccaaanaaaaaannnnaagnnttnaaannggntaaanaanggtnttggnnnttttnggaaanaatggcccnannggcccntgtttaattggnctcngnntttngangttcnttttnacncnnttttaaaaatnttnnaaacccat

SEQ ID NO: 51906 - DNA, 399 bp, Homo sapiens
ggtgttcttttaggggggtggtcagggaaagcttatctgagtagttagcttttaagcagagaccccaatgaagaggagggagatatgcgatgcatttagttaggggaagaacattccatgaaaataggatagcaagtgcaaaggccctgagacagcagcatgctttgtgtgttgagggaacagtaaggagaccagtgtggttggtgtgaatggagtgagaaggagcagcaggggttgagggcagaatggtagtgaggagcaggcccttataaaagatgggaagccactggagatctttcaacaaaggggaaaagtatgtttctgttcttgcaataaaatagaacagacaaaaaatctaggggagttgctaattagccagttttacttatatgccaggtg

SEQ ID NO: 51907 - DNA, 2690 bp, Homo sapiens
atgaaccatttgaaattcattccccacaaagactacacagccaatcgcttggtcagtgggctcctccagctgcccagcaatacttcccttgtaatcgatgagactctcctggaacaggggcagctggataccccaggtgttcataatgtgacagccctgagcaacctcataacgtggcagaaggtggattatgacttcagctaccatcagatggaattcccctgcaatattaacgttttcattacttcggaggggaggtcactcctcccggcagactgccagattcacttacagccccagctaattccaccaaacatggaggagtacatgaacagccttctctcagcggtgctgccttccgtgctgaacaaattccgcatttatctaactcttttgagattcttggaatatagcatatctgatgaaataaccaaggcagttgaagatgactttgtggaaatgcggaagaacgaccctcagagcatcactgctgatgatcttcaccagctgctcgtggtggctcggtgtctgtctctcagtgctggtcagacaacgctgtcaagagaacgatggctgagagcaaagcagctagagtctttaagaagaacgaggcttcagcagcaaaaatgtgtgaatggaaatgaactttaaagatgtaatacctatgaagagtaatgggcaaactgtagccacataattgtaaaattcagatattcatttataccacattgttttataggtaatttctatcacaaaccagtgacatttcctgaaatcaagcctggtaacacctgatgtttatatgatattcagtaaggacttttaccttactgatttcatggagcttttgaagtttgttttataataattatataaattagtaatgatgtaaaaaaagtatttgatattaaaagtttaatattgataatgttgctgattgtaccatttccttagcttcagctgagtcataggccagactgttgaaatgctgaaatgaagaaggttgttgcagtttcaaagtcagaggaatcgtgcttcggatttcttatgttttctagttctctgtttttccagttcacagtgggttggggtgcattcagtagtccatctttggggaacggaggcgtacttgccattgattcacatgactacatgaaattctgtactgtcatttcccagatgtttggccacagaaactttttcccacttaacatttgttaacagcctgcaaaactaaacttgtacatggcagtggttcccagacttttgtattttatggaccggtagtaatatttccaaaaatctggggtactataaggttgccaatttaccttgccaagtaatccgaataaatcactgtattatcaccatttttttcataaaaggaaaggacaatctatctctgaataagaggagtcctttaaacggaatgaatgtggcttttgggggcaaaagaaaccaagacactacattgtctttattttctcctatcccagtgcatttgagaaccatgcataagggaatgctgtgctacaaagctgtgcccaaatatgaaaacaaaataggaaacttaaaaagcaataccccctttagaaagtttttattttcttaaatgtcattgagttgctttgattctattggatttttggcattttttatgggatcatcagttggttccaagtatgttagatcagctaacatctgctactccagtaacagcctcgtacaactgcaggtaggttttctccagaccaattagttttaatagagcaaactaacaacagactgtagtagcatggttatggcaaccagaatcttcagaaaggttaggacattactttttaagctgtcagtggtatcaaataacttacctagttggaggcagataaaggatcccttacgttttttcctataaggcctaaattgaaattgttaaccaaggaaacagggtcagccttgaaaaatcaaggaattcattgtacctaataactgaagtaaaaataactagttgttcaacttttcctaaactcaaatctatttttataaacaaatgtaaataatgtttatattagagttgaactggttttcatttttataactggtagactagaccttccttaaacttttagaaataaaatgaaggcttcactggatttgtgaggataaaatacattttctttaattgtcctagagcaaagtacattagtcaccatgtgttttttgtgccaatgtaaattgtaatttaccaaagaaaaatacatacattgcttggtcttgcagaaaagttcccttgaaagaacctttccaataaataaaacgtcccaaattagcagtaccttgggctgtttttcatgagtaagaagattcaccatcccatgtgatctgtgtggaaaaagaccatgtcctcttggtggaagacatgagagagctgaactgaagtggaggaggtggtgcaagagggaccttcctgctcaaggcccgcccaggcagcggaatggagtgcagtgcttggctgcagaaaccctttgtccctcacctatatatacacggacagtcaagtttgttgctctaacgtaaggcacagcgttaatcctgtatggccaggaaactgagtagactcctgtgtaaccctgtttggaactttgcctttttaaatatgttttttcatagataaaataaaaaaaaatata

SEQ ID NO: 51908 - DNA, 181 bp, Homo sapiens
tctgagtgtgaggggataaacctggatgtagactattaagcagcataggagaaaagaacaatagaatctaatggactgggtttgcaatctctctctaaatgcactgcttcagacaaagtgaaatccaaaggtgtgaaaaagtatagctgcaaattggaaaaatgtgtttcaagagtcgtct

SEQ ID NO: 51909 - DNA, 427 bp, Homo sapiens
gaataactgaaatgtcagcaatttaaaataaattcaattgtgtgataaaatatctcacctataatagaagaaaaggaaaatcatattatttggcaattttgcagcattgtggttgcctaacaggtatatccagcagatgagaaacagtatgaaaggattgtattaacatggtaagttttgccctaaggaaaacgatcttgcattctggattcttgcagcaaagtctcagatacttaatacgttttcttggtttatcatctgtgctatgattcggcttcactttgtgtgggtattgaattatgtaacagagatttggttttcccaaaatgttatcacatttgaaactatgattgctttgtgttcagtccttttggaacacgtagcttccagcttaagggtagaggaaatatatacctaaaatcatcaa

SEQ ID NO: 51910 - DNA, 74 bp, Homo sapiens
gctggaagaagggaagggaagggaagctgagtgcttcagggcatgcttgtgggaggggaaggccgagggcactt

SEQ ID NO: 51911 - DNA, 428 bp, Homo sapiens
cggacgcgtggggtctacagactcctaaagcagcttgtctaggaagaccacccatgtgggcttatcactccaggttctgtgacccgggaccttctgagaaaacagcactgctgtgaaatatcttccttgaagcctgtgataagtctccttgttagaatgactccaacttcctgccaataatctttgtcctctccataggagatgttctaggggatgccttccttccctccatttcacaaagaggccagacttgaggactaagtcattagatcttatcccttagaattttgcatatcagcatctgctaacctccacaacacaccctggcacagggtggggctgagggccccaggaaacaaagattcccaaaagtgagagggatgagtcattatttcctagagatgactggtggtttagagaaccttggc

SEQ ID NO: 51912 - DNA, 420 bp, Homo sapiens
gaagacatgagtgctgaagagctacaggagttcaagaaacccatgaaaaagttgttctggagaatcatgtagcgacagatgaagacgaacctgctttgaaacgccagcgactagaaatcaattgccaggatccatctataaagtcattcctgtattccatcaaccagacaatctgcttgcggttggatagcattgaagccaaattgcaagccctggaggctacttgtaaatccttagaagaaaagctggatctggtcacgaacaagcagcacagccccatccaggttcccatggttgccggctcccctctcaggacaacccagatgtgcaacaaagtgcgatggtaagaacagaccagggtgccggggccttcaggtcacttggggagaagcgcgtcacctcctcgcccaggcccgcagc

SEQ ID NO: 51913 - DNA, 298 bp, Homo sapiens
tgcccaaatttcttgtaatctaaaggcagagccagcttcaagttgtgtgaccagtgcagttgcatacggcactgtgctaaggagggtcccatacttggggtttaattttctgctgttgctgtcttgaaagtctaattctatctttaattttgtgttttatcagtgaagtagtacaagagaataatagagcatgtgcctagggcttggtgtctcagctaacgtgcagtaccgctttctggtgcttccccagctgcctccacgggctaagtctgcagttccctgacaatggcctatcttt

SEQ ID NO: 51914 - DNA, 410 bp, Homo sapiens
gtccttgccgtccatcgcagccatcctcatcctcatgtttacctgcctcttcctcttctccgcggtcctccgggcactgttccgcaaatctgaccccaagcgcttccagaacatcttcaccaccatcttcaccctcttcaccttgctcacgctggatgactggtccctcatctacatggacagccgtgcccaggcctggtgattactgtcctggtggatagcttccagacggcgctgttcaaaggccttgagaaagcgaagcaggagagggccgcccggatccaagagaagctgctggaagactcactgacggagctcagagctgcagagcccaaagaggtggcgagtgaaggcaccatgctgaagcggctcatcgagaaaaagtttgggaccatgactgagaagtgagg

SEQ ID NO: 51915 - DNA, 414 bp, Homo sapiens
gcatccctcagctcgatccgttcaccaccttccaggcttggcagctggctaccaaaggaaaagttgccatttgccaagaagtgaaggaatcggggcaagaagggagcaccgacaacgacgattcggagttccgagaaggagcttggagaaacaaataagggcagttgtgcaggcctctcgcaagagaaagagaagtgcaaacactcccacggcgaagcgccctccgtggacgcggatcccaagttacccagtagcaaggagaagcccactcactgctccgagtgcggcaaagctttcagaacctaccaccagctggtcttgcactccagggtccacaagaaggaccggagggccggcgcggagtcgcccaccatgtctgtggacgggaggcagccggggacgtgttctcctgac

SEQ ID NO: 51916 - DNA, 1316 bp, Homo sapiens
tttaagaattaaactatacctttaatatatgaagaaaatgatagtttggcatcatttatagtaaatgtgttcataaacattctaaatattccaaacacgtacatacagaagaacataatcttaagacaatgatttttattacctttagtctaccacatttgtcactataaatatacttattgaaaaaaaaccatactatttaaataagaattcagttcatgaaagtttacaaaatacaaccaatgtactctgacttgtggttatatcttaactatctcaactgtacttttctggtatggccagaccttttgcaaatattaccatggtattttaattttatgatataaaacagtagcaatttattaagttttccattataaaaattaatatggcaattctcaaaatactgaaaaaactgttttatgaaagcagtacccacatcactgcaacgtatttcctttctcttagaaaacatcttcaaaaggcacattttaattactagtgtttatatctaaagatagtagtttgagttttgaatttccagtcaattttccattatctcaaaattgagctaatggagggttggaagaggtaggagaacgcaggtttccaatgaactgccctcagggcagcagaatcctcattcatctcgtccatgaagaccaaaaggaagatataagggaaaaaggaatggcagatctgttttgcatcctaatttaaccttctacacaaaatacttcattaaaagcaaataaacaaacacaagatagtaagcttagaaaacaaaaggccctagacccacaaattacccagttaagcccaagtggtgacattggttttaagcctcaagaaaatgaaacttctgcttctgtaaaatcacatcttcatcaattgaatttaaatcacttagtgcattaacaatgttacaaattccaataatgtcagacatatggatgatattcaaaataaagtacaaaaatacatttccaaaatccaaatataaatggacttttatggttatcctgccatgctcccctttaatttggcctgatagtctacatttgactgtaattataataacatctgtaatttcaagtacaatagtacaatcataataattttgaagaacgtatgacctaggaccccaaaatgcaatccaatatacaatttggagtatggtttactttttagtgaagtttaatactaattgaagtactaaattgaacaaggccagtactctgaagtactaatctcaagtatttgatcccatgtaagaaacagaagggaatttttaaggcaattttggtattccaaaa

SEQ ID NO: 51917 - DNA, 258 bp, Homo sapiens
aatgctttatgatcaacttgccataggactgatggattaaccagtgttcggctttatttgaagtctatgccctgcacagctcttgtatgtattttagatgctagaagtttttttagcatgtgatgtgtgattcttgtttgaattctaggtaccttgtgaattccagaaaaagagactgtgcttcacgattgttagtcccatgaacttgcactatctatctttcatggtgatgttttgaaaatacaatcaggaaaaaac

SEQ ID NO: 51918 - DNA, 1182 bp, Homo sapiens
tttttttttttttttgaagggcatgatagtttatttttaaaaattgtaccacactgatcatgatgaccagcatacacatgataatggcttttctcttgggtttaacattgcagtagttttgcatactgcaatgtttcaataggaccaagaacgttagagaataaagatcttagatgaaaatgaacactaataattctagtgtcctcccccatagaattaatgtaaatcccgtatgaatcagtggcattataatgttatgtggttatgaagaatgaaatttctcttagaagtaggcagcatgaatttatacttacataagtataacttatacttccttgtactttcatctttagtttttataatttaagctatgtccaccctggctaaagtacaatcatacaatatacctcagataatttccatgctaccattgcacaagtttagtgattttactattaaaaaaaaaaaatccaaccaccatcaaaataaagaggcaaataaaagtaatttttaaatcatttgaaaagcatggtgcttatttgtccaatacagactcaaacttaaatgctatagttataatttccagacttccgcaaaattaacatttatatatacatatgggttttgtttatagaactgtattttgcaatcaacaagttttagagacaacatatttggttacagttccacatatctgtagtaaagacaaagccacataatgttcatgatgttaaatctggctctaagtaacctaaggtacaaaattttgaccaaatatcaaaatgataatctgatcttaaaaatacaacccatatgaaactactttttagagagaaaatgtgctgttcagtaattatttcaataaccttttctgagtatctgcaaactgatccttttctttaatctttgtgactcaccaatatttcaaagtgacctcttcacttccatgttaccatttcagtacccagggatttctgaggcagcataagtttgacttcataaaaacagtagatactctaacagtgacaatttttaaatctgtaaactcaataatcacattagttagctcagcaactataaaaacattgagattggggcactgtaagccagaatctctttgtgctttttaaattaagctgcttttgaatctttttggtatttatcagccatctgtatttccct

SEQ ID NO: 51919 - DNA, 1872 bp, Homo sapiens
  misc_feature (1)...(1872): n = a,t,c or g
atcaaatctcaccctttctgcttctgaagtatgaaaatctagtctttttaggactggacacaaggaaaataatctctaaactattgactaaattccagtgagagtatgaatgaagaacaactagatattaatgtcaatcatttaagattaatgggcatgcaattaagtctccatttaagattaatgggcatgcaatgaagtctccagcagacaatcagatgttgttggatgtctagattatataggtttaggttgaagttataaaataaaataaaattcattttccactggaactctatgacattcagtggagtggtggaaagttaacctcttatacattatagataattctaagacagcacacaaacttatcaataaagccatctccttgtgggccttaccatcttcatcagatttagacccttaaaaaacaagtaaatatgcacttttaaaatgcaatcaaaagactggtggttaagcttgtaaaaccagaacatcttttggcattccactaagtatatattgtaaatttaatgaacaatcaaggttcacaataggaagttgtctttttttgccttccattctgtgagatttgacagatggtgacaataagaaaatgagctgattgtaattactctctgtgtgtttttttattgctagctatcattaccagttagaattaacattaattacaattaacaataattttaggtatggaatgttatgattacctaaagagatgtnnnnnnnnnnnnnnnnnnnnnnnnnnnnnnnnnnnnnnnnnnnnnnnnnnnnnnnnnnnnnnnnnnnnnaccaccatgactggctagttttgttttttggtttttggtttttggtttttggttttttttttttggttggttggttgttttttacaggcggggtctcactatattgtccagggctagaagaattttctaatggtctattacacctcccgttttgggcaagtaaattcaggataattttaggttcttttgttattcagtagttttgcagacttaaaagtataaatttaggaattaggaaggatgaagctatagtagtaagaatctcaagctgaaggggctttggggagccaaagcagcatattagagcataggcttgaacttaaatctcagctcagtcacctgcaggactttaggcaccagtgatttcacccttctgagcctgtttctttattcgtaaaatgattataataattctttcacagcgttgtgaggattaagtgaaatgtgttaaatgcctactacagtaggtgctcagatatttatttttatttttttattatgcacattgtttttcctgcctttttatggctgtctaaagtctagggaaaagggaagactggttaatgatgagtagaaaaaacttgtaagctaatcattcactgacttattttccttccattttctggtttttaaaattagccacaccacaggaaacccacatttttagatggaaagagcaagaaaattgtgtcagtgctcttagttattttcatcttaatggtatagtgaaaagacattgacttgagatgatactaaggaagctttggctcactctcacttgaagaggggatcttggtgttgtagtacttggactgtacaaatgttttactgacttttccttactgctgtaaaggaatcaggcagttgggtattgatatgttatttggtgctctcattcatggcaaaggatttgataaataaaagttctttaaacactaaagcaaaatcaaatgagcaaaactaaggatgaaatgtaatattcatcagaacaaggatcactgagaaaaaatattcagaaacaactttaataaaacctgaattgaaataactgcaaaaaaaa

SEQ ID NO: 51920 - DNA, 665 bp, Homo sapiens
gaaagaagactgagaagagcctgacctattacacaaacctgcaggtgaagacaggccagcggaccctcatcaaccccaagccctgtggccagttttgctgctgtgaagtgctgggctgtgagtgggaagacgccatctcttactacacacggatgaaggacaggctgctggagaggatcacagaggaagaacgccacgtccaggaccagcccctgggaatggccttcgtcaccttccaggagaagtccatggccacctacatcctgaaagatttcaatgcctgcaagtgtcagagccttcagtgcaaaggtgagccccagccgtcctcccatagcagggagctctatacctccaagtggacagtcacctttgctgctgaccctgaggacatctgctggtaagctcctagaccaaggagaggtgggagagaggcctgggttcctggtgggagctgcccatcacctggagcacaggtgtgacctggcagtcaatggagatctccacacatctgcaattctgtgggctgtgatgctgtgatgtgctcggtgtggcccaactggggtatctgcccagcccttccctccagtgttcctccctagcattcaagtgctacccagcaggaaatataatgccagttctgcatctaattttaaatttcctaatag

SEQ ID NO: 51921 - DNA, 493 bp, Homo sapiens
  misc_feature (1)...(493): n = a,t,c or g
cggattcatagatctggaattcgcggccggggtcgacttttaacttttatttttattttgagataattgtagatttacatgcagttgaaataatacnnnnnnnnnnnnnnnnnnnnnnnnnnnnnnnnnnnnnnnnnnnnnnnnnnnnnnnnnnnnnnnnnnnnnnnnnnnnnnnnnnnnnnnnnnnnngctgtgatatagaacatttccatcatcacaaggatccctcatgtttctcacagccacgcccaattctctcccatcctcaccccctccttaacacagccacnnnnnnnnnnnnnnnnnnnnnnnnnnnnnnnnnnnnnnnnnnnnnnnnnnnnnnnnnnnnnttttggtacaaaacctttttaaattggcctttttcattcagcataattctctggaattataagttgctgcctgtacccatagtttgttcttttttattgctgagtagcactcacggtatgaatgtactatggtttgtttaatc

SEQ ID NO: 51922 - DNA, 178 bp, Homo sapiens
gcaaaatttatgaaatgtagctgaagctgtgcttaaaggaagatttacagcttttataatgcctggatatttgaaaaggagaggcttaaagcactaacgtaagcgtccattgtaagaaactagataaaacacaaactaatccgaagtagctggatgtacaggtgtgtgttttttgggg

SEQ ID NO: 51923 - DNA, 207 bp, Homo sapiens
cttaaattcatgttcttatctgcctaaaagcaaacccatttagggagtatctctaggttccagtatcttcatctttgaatacaaaagcaagggaggtgaaaggaaatcttcagggctcaccctgctataacaatttgaaaatgtaaaatgagagggggtagaggaaaaagatatgtggattttacagtgttgcaaaaaaaaaaaaaa

SEQ ID NO: 51924 - DNA, 288 bp, Homo sapiens
cggacgcgtggggaaaaatgtgggaaacaatttcctcacaagtgaccagctgcaaatgttatttggtattcccattaaccaaccattttattgggtgcctgttatataaaagataaaactgggttctgccttcaaagagttcacttgaaatttaaaatttatgtgaaaatttagcacttcctacagtgttttaatagctatttcaacagtgttggtgttgtatgacaaggtgataaatttcttgacaataacaatagcacaattctgtatatggaaaaaaaaaaaaaa

SEQ ID NO: 51925 - DNA, 399 bp, Homo sapiens
  misc_feature (1)...(399): n = a,t,c or g
cttccccttcccgggcctttcagcttggtctttccgggcctcgcttcccccagcccctgcgcccggcccgaacgagaggttccggagccccggcgcgggcgggttctggggagtagacgctgctggccagcccgccccagccgaggttctcggcaccgccttgagagcttcagctgccccagggagtgcagattagaatcccaagaaaatcaaatggcatccggggatttctgctcacctggagaagggatggaaatacttcaacaagtgtgcagcaaacaacttcctccttgtaacctgagtaaagaggacctgttacagaacccatacttnagcaagcttctcctgaatctctcacagcatgtggatganagnggcttaagcctcaccctagcaaag

SEQ ID NO: 51926 - DNA, 392 bp, Homo sapiens
  misc_feature (1)...(392): n = a,t,c or g
tcaaaagttgtcaatcctcagccgttccctagtcctgttgcccggttctgccgaagccccttgaaggctgtggcctgggctgttccctcattcattcctgcctcccgagccaaacccaggtatccgcttgtgccctgcgtggtgtggcagcgtcttctctcgggaagggtcaggagtaatttcttctttcagtggcctctctgtgctagtcccggtcacctccgtgaattaaagtcctacaggtacaagggagacccccccccccacggaaggcgcccccagtccgtgtgggagactcgcacaccggttttctgcacaggtttctttctgctctgaagcgtgaacggcctagtttcaaaccanancctgcaaanacttttttttgttttttg

SEQ ID NO: 51927 - DNA, 698 bp, Homo sapiens
gggatctcataaatctgggtgtaataggcacagaacgttaggtgtaatatgggcgggactctggactcagcatatccaacaagctgctggctgattccgacgatgccgatgaattgccaggttgggaactgctgcccccagagaacctagcagagagctctgtacgtggtaggtgctcactcccctattgtttgggtgtatgcctcctgataatgaacttgatcgtaactttattgttgtattatgcctgtattgtttccttaagtgaaggaagaatgcttttgagtacctaataggtggcaagctctgtgcctacttacatacatgaactattccttttaataacctttggaaataaagtggcatttccattgggcattagaaatctgaagactttcgtttacagctgttgcaacagcagaactagaattcgacctccgacatttctgctcaccagagggcatgaactgctggtttgtacctggcttgcagataccttctttgggcagcacaatgttcaaaattaaaaaaactaccaacacttctaaactggatactttgtatcaatatctgggtttctggcttctcttcacgggaaaaaaacaaacaaacaaaaaggtttggtgaacactggggcccacattcctgcagggcaacagtcacatggagactttaaatgggcaccgtgcccaaaacac

SEQ ID NO: 51928 - DNA, 322 bp, Homo sapiens
tgacatccagctggcatcaggggtacagtcagaccaggtctcagggtgtcacacacctgagggcagatggggacatgaagaatcagagaaccccctgggtctcagtatgtgttgggaccaggaccaaactgcaagactcccaggttcatggccagtttctgcggggtccaccaggggatttgaagtccaagaagcatggcatcttgtcacagcttctttgattccaagttgtgtggctttgagcaagtcattctacctccctgagcctcagttctcctaagtgagattaacggtacccacttcatgggcatatcatgagcat

SEQ ID NO: 51929 - DNA, 597 bp, Homo sapiens
cgtggtattttacaaatacattcatattcaaagacatgggtgcttatgggagaggatggtgtaaagaaagggaaaaaagccataaaaccagagaatctttgcatgggactgtattcctgagatcccaaaccaaagggatgaatgtgctgttatgccttaaatgtgtgcaccaggaaatgcaaactagaaagggtggctctgaagggtcctcaggtgaggaagacccccagggctgagaatccaccaccttcatccttcaaaagagtacctcagttgtctgcttacgcttcagccagcatgtgtgagcttggtcatttcctgcaagccaggcaaccacaccagtgtataagcctcaagcaaatgtcactccccaagccccaaatgggactaaggcctctgctgggctaggcgtggtgtaaatcccaggcctggaagctcctacccaaccctcatttgtttcaactcactttcaatatgtgcatagtttcataaagcagacatttccatgaggaaaagaggatggtggtgaaaaagagagtgcttgttccaggtaaaggacttcaagataatttacaggcagatttatttttattagta

SEQ ID NO: 51930 - DNA, 341 bp, Homo sapiens
  misc_feature (1)...(341): n = a,t,c or g
ttatgggggggggaaattgtactaaattctataaagtaaaaagtcaaagtcttttactgttcttcatcccacatcccattttccagagtgagctataattgggtgaatttttccaaactttataaatacacttgcaaacatttatacacagcaacctaggataataatgttacaggcattgccttttcagttaatgtgtcatggccctttttctagactatgagtgcatagtcttctagtactaccaataacagcatttatcangcatttactatatgccactaattctaacagctctgtgagacacttcatgaagaacttgaggttccaggtaattctgt

SEQ ID NO: 51931 - DNA, 294 bp, Homo sapiens
aagaataggaacattttttaaggagcttaccttcaactgagaaagctacttcggtgagttgtagcatatttcaaccagaaaaatcaaaatattagttcactttgaagagacaaactgaagcccatccttctgcaacttttgtagaaacagactgacagacttaattcaattgaccccaggctagttgattgtttttataccatctaatataaaatggtagcttaatcctgcctgtgcctttgttcatgtaatttagttgagtacagtgaaatgagaaagaaactggaagtcact

SEQ ID NO: 51932 - DNA, 1571 bp, Homo sapiens
gcagagcaacatgtgtcaatttaaccaaattcacaaataaccctccatttttcaatatctgctactgtaaacatgaatattgaatactgacaagagaatacccatacaaatcgtcccaccgccctagaggccacagaattagcccaaaattatcaaagaacattaactggaaggtcaggtttttcaaggaacatagcttacaaatgcatcagtgtgtatctggagagcatcctaactgcatttcaactcatcttttaagtgatttcagtcaaaactggaaaacaactaagatgtagtaatttttttttcctggttcaaaccttcaataacttgctcattcagcagtctctctgagctacatttttatttgtaaagtgactctgtctgcatggcaatgagcaggtgcgtgttttttccacattcgccctttcttgcagtatccagggaaacacatcattacaaagggtttctacctgaaatctttcatggaaggcctacaattcgaaaagctgcacatgtttacagaagagctcttaccctccatgcaaacactttgctctgtggtgtcacagctttgtgacaataagatggcaatctcggatctacaaggtgctgtcgggaatcaaataaaatatgttatcagagatatcatcacatctatagtgtttaacagagctttatgccaactactaagacaaagctttaacaaagtttatagaatactgaaactcgtaacaattacctctctacgtgatgctgtaaggaatcttgctaatttggtaggaagaggaagcatttaggaaagggtttagtatctaccaaaagtacttgacctcaagtaaccaatagtaatgcaaacttgctttaaaggaaccaaaggcattgccaagtatttggccaaaaggaggcactttttatttaaaatttgagactaatgagatctcaaaaatcagccccaaaaaggtattatccatttaaggttataattttcactaagatgtagatatttctcttattgttttcatgtaaaatagtatagagttgttttgttggtttaagagtaacattcagtagtaatacaaagttttttttctatgtagaaattagttttcttttcttgcttgcaatagaaatgcaatgtgataggtgtttctcttcttattttcattgtcacattatgtcttagcatctcactttatgaaaaaaaggagaaagataccaatctacagagccctgcttgttgaagcactagtttaatcaacaaaaaattatggcaatcgggggtccattcatctattgcctttatgttgttttttaaaagaaaaaccatgatgcctttgtatttgctgtttgcacccctgaaatcaattccatatcatgtttgaatgccatacattttgcacatgtactgtacataagtaatgcatactgtatttttatatgtgtgcacatttatcatcagatcttttgtacatagtggcagtattgtagctgatcgggaaatgtttgatatctcagcaattttgcatttttgtgtctcaaataaaagacattttgatgtactaaaaaaa

SEQ ID NO: 51933 - DNA, 1472 bp, Homo sapiens
caggggagataccatgatcacgaaggtggttttcccagggcgaggcttatccggaggcgcctgctttgcgagcgccccctagcggcagcctcggaccggtgctccctgtggtcacctccgcctccaaactgtcgccgcctctgctctcctcagtggcctccctgtcggccttccccttctctttcggctccttccacttactgtctcccaatgcactgagcccttcagcacccacgcaggctgcaaaccttggcaagccctatagaccttgggggacggagatcggagctttttaaagaactgatgtagaatgagggaggggaaagtttaaaatcccagctgggctggactgttgccaacatcaccttaaagtcgtcagtaaaagtaaaaaggaaaaaggtacactttcagataattttttttttaaagactaaaggtttgttggtttactttttccttttttaatgtttttttcatcatgtcatgtattagcagtttttaaaaactagttgttaaattttgttcaagacattaaattgaaatagtgagtataagccaacactttgtgataggtttgtactgtgcctaatttactttgtaaaccagaatgattccgtttttgcctcaaaatttggggaatcttaacatttagtatttttggtctgtttttctccttgtatagttatggtctgtttttagaattaattttccaaaccactatgcttaatgttaacatgattctgtttgttaatattttgacagattaaggtgttgtataaataatattcttttggggggaggggaactatattgaattttatatttctgagcaaagcgttgacaaatcagatgatcagctttatccaagaaagaagactagtaaattgtctgcctcctatagcagaaaggtgaatgtacaaactgttggtggccctgaatccatctgaccagctgctggtatctgccaggactggcagttctgatttagttaggagagagccgctgataggttaggtctcatttggagtgttggtggaaaggaaactgaaggtaattgaatagaatacgcctgcatttaccagccccagcaacacaaagaatttttaatcacacggatcctcaaattcacaaatgttaacatggataagtgatcatggtgtgccgagtgggtcaattgagtagtacagtggaaccctgttaaatgcataacctaattttcctgggactgccatattttcttttaactggaaatttttatgtgagttttccttttggtgcatggaactgtggttgccaaggtatttaaaagggctttcctgcctccttctctttgatttatttaatttgatttgggctataaaatatcatttttcaggtttattcttttagcaggtgtagttaaacgacctccactgaactgggtttgacctctgttgtactgatgtgttgtgactaaataaaaaagaaagaac

SEQ ID NO: 51934 - DNA, 458 bp, Homo sapiens
caagatgcacccccacccggtggcgctgaccactgttgccttctccaccgatggtcagactgtcctctctggagacaaggatgggctcgtggctgtgagccacccctgcacagggacaaccttccgtgtgctgagtgaccaccagggcgccccaatctctaccatctgtgtcacgtgcaaagagtgtgaagacttaggggtggagggcacagacctatggctggctgccagtggggaccagcgggtcagcgtctgggcctccgactggctgcggaaccactgtgagcttgtggactggttgagtttcccaatgcctgccaccacggagactcagggccacctgccaccctccctcgctgcttctgcccttgggatggggcgctcctgatgtacgtgggccccggtgtttacaaggaggtgatcatctacaacctctgcagaagcaggtggtggagaag

SEQ ID NO: 51935 - DNA, 1132 bp, Homo sapiens
ttttttttattttctgcttgaattttttatttgtttgaaatgttaaatttagccaaataagtattttttttccaaaatggctcaacataatttattttttatgttaaaatgtacagagttcttttgaaagtacttgctagaaaggggaaaaaaaggtattacatacgagaagagaaagggaagctggctggcccaggagcgcgtgacatggagagatacaaaggcatctaggcaccccttccccttagcttacaagtcaccatgaacaaagtacaaagaggttacaaaacaggaaaagcaaatataaacagacaggatagacgtggcttcctttgtacatgcggcttttagaggcatctggagctctattcacacacgctagagatctctttaaagagaatttatctttcttaaaatagtttttaatattctacaacaaagataaaaaattttaaagatggaatgaaatgaaaaagctcttattttaaaaggcatcaaagtcactaacagtgagtttttaaatttcttttttagaagattacccaagttatcttgctaaaaatacattttttttaaacagaagtgaaaaaatgacaggtaccaatattactgtgttggataatttcttttataatatagaaaagaactttttttttctacaatagttctacagtcacaaagaggcttgtggaaaagggagctgcccgattgaattttttataaagaaacaaacaaaaccaaacacaaccgcaaaccaacagaaactgatttcacggccctcatttcaacagcttctccttctgccttgacccaccctcctcccaatatacctccctcccgacccaccccgtccccaccccaaccaggaagcaatgacacagctgaagatgtagggcgatggcagcacagtgcactttctacatagatgactgggaactggaatagtatatacagagaaactgggtcctacacagccttgcacatgctcagagctgagagcgggaagatgtggaattctgcgtttctacctagcacgcttgagaaagtcaattaaagtgtattaaaaaaaccaacaaacctgtgcatttgaaaaaagttaatgcctaattagtactttaaaaatttatctata

SEQ ID NO: 51936 - DNA, 418 bp, Homo sapiens
tgtttgatcaaaaaattttatagactcttgttctagagaaattcagtttcaagtggcttatgagattgtttcatctgttaatttggttttttgtggaattcttctgaagatcaccactgaattatccgttttatcatctcttcacccatccaccaatgcatctcctgtatggacgtcttgattgttaactcacggcactggacctccagtttcatgcctctccacattgcagggtcctctacgttgttgtatcagtcacctttctcgcggaagcacctgccggagctgtgtgcaccctttcctgccctcaacacaagccgtcggcgttcactactgtagctcattcagaccctactctccaacctactgtccaggcacagaaacgacagttaaggttcccccggaccgtacgctggcc

SEQ ID NO: 51937 - DNA, 999 bp, Homo sapiens
  misc_feature (1)...(999): n = a,t,c or g
ttttttttgactcattcaaatcttggcaattagcatgtatagtatgttatgagagagagagagagaaaattagcagaaatggaggaaaacatattacatcctaaataccaccaaattgccaaaatacacatttgggtagtaatctccagagaactctctggaggcacagcatctatcatgctgatttccctgaacaatattacagaatagccctgtgtactttctcttggggggggaggtgtaaagaattatcatatggaacctcacaagtctctaaaacctttctgcaattatccctcataggattaccacactgatgagtttgttcaacaggcgctgttgtgacttcctaatttaactcctatagagatgatttgtgtggaagataaaaccctatatttgaactcaattcccaccttatccctgagcttatgctaccaagcaattcttacaatgtttggagttctattagactacagagaagaatctagggtttcagctaaaccctttaatccacaggcctaggtaaaggactgtctcaaggtagtcgctagcccatgggttctcaaagtatggtctgaagacccctggaggagtccctgagacccttttcgtgggtctgcagattaaaaattattttgtataataacaccaagatgagttacattcaattaggcatttttcttttgaaattaagcagacttttggaaactaagatgtgcatagccctgtagtaggctaagtggaagttacaaaggcagtagtagctttttttccccctctcgttatctcatgaggatacagaggacttttccagaggctacatgacatatggttatgtcatctctctcatagctgagggatgtgtgcttctgtgttcttcttgagctttaaatatttctcagtcttaatacctaaaataattagtatcaatagatagaacccacacccaagaactccttggggccttcaatannttttaagagtgttaaggtgtcc

SEQ ID NO: 51938 - DNA, 313 bp, Homo sapiens
gaactcactgtctaacaaagttttgaaaatttgtctgatatgtaattaggtactttagggttattaggttttcataaaaattctggttagggctcttgccctgctcccaatgaaagcctttccacagggcaaatataaaagagagagtagagggaatccccctgaggtttaaataagtcaaaccagtaagtaatagtgctaagtttgtcagtgcctctctttcttactgtacttaacatctaaagggcacctcatttattttcagctaattatgttctttatggggtgactgtccaatcagggaagggtgtga

SEQ ID NO: 51939 - DNA, 622 bp, Homo sapiens
gaaataagttaaactttcatctcatttttttttttctattgtaaaatagggtagtaacagtgagtcctgggggaggacgtgttctgttagccaaatccactctccaacctgctgtctgtcctttggagccttaactcaagaaactttctttccctctagcttccagttgagtgaaggcactaggaagcaacagcgatggaacaaagaggaaggagtatggttatttattcccccctgggctcccttactatggcaccattgcaggctggttgcctccctcaaccaaaggaagcagccagtatccctccctagggtgacccagagtaaacccctatggtttcccttcattttgcacatacctttgcagatagtctttttataaaactctactcacattatccagtaggaatgaacatctcattccttcacagaattgttttgagagttaactgagaaaatactgtattattattattagaatgacctataatttctgtccaaactgagaaacttttgaggctgggaaaagggggtttgtgctgatagtaatgatgtcaggacaataggaaaaacaaggacttatggccaccccagctattattgccagtaaactctgctttag

SEQ ID NO: 51940 - DNA, 351 bp, Homo sapiens
gtgggctactgagatacctggcacagtcagtgactttgtctattcctacaggatctaattgaaaggtgttaggaaaggcatagcaaagagcctttttcctgttgttacaagcagtaaatggcccttaagaaacttcaaaaagaatgaatgcttgcttgagaaagaagggagtaagagaaaagcttttcggtaatgagcaggagaaaaaagaaaacctggtctgagagataaaagaggtgactattaaaacggaaggacacagtctaccagaaactcgtgaggctttacaaatcaaaatctagactcactttaccatggaaactgaagacaattagaaagtatatgtttaca

SEQ ID NO: 51941 - DNA, 438 bp, Homo sapiens
ctgctgttgaggacagaagcaggcacatggggaggagcagtttgaagactagaaaattgagattttgttttgtagtatctttaaactccaggtgaacttggttggtgaatagagcttctgtgagggcaatttactgttttatagaattgatttcctaaaagatttgccattaactgaactgtcttctgctaaccataacttctccttgattattaatggacccctgttactcattaaaacctttaaaattacttgagaatgcctgcttctagtcccagttcattcgcaccgaaagaaatctgaaaagaaaaaacaaatggtaattagcagaattgtattgaagtgaccccacttctctaccccagaaaaagacaaagatctggtactgtagataatgaataaatgagtggagctgagaacacccaaaaaaaaaaaaaa

SEQ ID NO: 51942 - DNA, 321 bp, Homo sapiens
  misc_feature (1)...(321): n = a,t,c or g
caccgctcgcagacccgggacgagtttgcccagctcttccagtacaaggcagtgttcattttggaagagttgctgagccccattgtcacacccctcatcctcatcttctgcctgcgcccacgggccctggagattatagacttcttccgaaacttcaccgtggaggtcgttggtgtgggagatacctgctcctttgctcagatggatgttcgccagcatggtcatccccaggtactgggagaggagggnccaggtggcctgggatgatgctggacatacagtgtcttcggnaaaccgcaaaaagacacctctcctgagtca

SEQ ID NO: 51943 - DNA, 465 bp, Homo sapiens
  misc_feature (1)...(465): n = a,t,c or g
ctgtctctgcatggctggggaggcctcaggaaacttagtcatgatggaaggcaaaggggaagcaaggaccttctttacatggcagcaagagagagaagtgcaagcaagggaaataccagatgcttataaaaccatcagatctcgtgagaactcactatcatgagaacagcatgggggaaactgcccccatgatccaattacctccacctggtnctntccctcaacacctgcganttataattcaagatgagatgtgggtggagacataaagcctaaccatatcaatgaagttttcaagcagtttcatgtgtctttttgtttcagcataacacatttttattgaatattcttaatatactttttaaaagtaactacaggaataaggnccaacttttaaggggtaccaggtttcccttaatttattttaaancaagggnttacntttcaaaaagggatggtttngtc

SEQ ID NO: 51944 - DNA, 722 bp, Homo sapiens
  misc_feature (1)...(722): n = a,t,c or g
ctgtgggagtagttctggagctgaggtggaagctaggggaagcaactcgccctctccacgtcagcatcagcgtgctcccgaggacaccggccagtgccttccttaggtggtgggaaaggggtgtccctgtgcagcggggccactgagaatgctgtttgtcataaaatttgcactacccgatttctcaaggggcacaggcctgctccgttcccctttgtcagccaatggccaagaaggaagaagatgactgccatcttattcctgaacttcctcattcaggacccccgtggaaacacagtgagcatccttatcagaggccctggcccaggctggcccctttgctttgtttggagaggctggctgagtttcagcccctagtgctggagacccccttgttggagaggcttcctgtttatgcctcacaagaagaaaaaccacagggctctgggaggggaagaagcatgcactcccgctttggctggagtcccagcgcttgtcgtcaccctcctccttgcctgtagtcttgacagcatccgtatgtacgtgtcctgggcatttcccctccctcttccctgatgactgatacccaccgggtctggacattccaagttaaccagtatgttaactgggtagttttgatcccaataggccntagcgacttcaggttgggagttgaggggagcccagccccctgttctgggaggtaactttagagtatgttt

SEQ ID NO: 51945 - DNA, 809 bp, Homo sapiens
acaaatcagactttacactatatacagatgtgacagataaattgaaccacttgtttgtgaaaatgagttcctgtcatcttcctcattcactcagccctcaccccagcagccttttccggtcattgtagctgacatggagcagtgacagtattcatttgagaacagggatgcaagtcacagacatcataaaatcagggtctccctgctgaagcattcactagttggcaactatgaatttattccatgtcattctgtttacttagcacttgcactacccttgttggttgagtgtatgctttatttgtttctagtttgaaatcccatatctgatagctgagagtaggcaaatacaacatttacctaatgtcattcactaacatggaagagttgtgaaaattctagagtgctgtaaatccttggcatacactatgacaaacaacttcattactctcccaccaggagctgctctcctgcacttagaaataatgtcacaagtagttttctaatgtacaatgcagacaaatgtactgctctctgaatacttgaagaaatggtattatacatacatagaaacttattagttataccttttcacaatcttattacgatgttgccgttaaaagggaaaaaagacacaggcaatgaatggtgggatagtaagaggacttagagtgtatgaatgagttgattttacttttttggaatttgattaagttgacagtaggcactgattggatgattaaacataagttaatctccactgtgataaaaacttaaataataaacatgatttaaaatagaaaaaaaaa

SEQ ID NO: 51946 - DNA, 432 bp, Homo sapiens
atgtattttagagttcatctttggcaaaatctttggttcagggtactagttgtttaaaagttgattcatattcttaccttgtgctgagaaaggttgcattgctgccccttatacacatgctgcagcttgatgttaaagaatttttattctttttgaagaactaattaatgtttaaagcaactgtttaatatgatggcatgtgtgtgtgtgcgtgcgtgtgtatgttctgagtccactttttttttcctaaataacactacagggattttgtcatattagatttaatttataatttgaaaaatcatctagtgtgtgacctacaggcttagaaatggtatagtcaaagacattttatccacatttctaatagtggacttgattaagtagataagatcagcatctgtttatggtagtaggagaaatagccaaagt

SEQ ID NO: 51947 - DNA, 2769 bp, Homo sapiens
  misc_feature (1)...(2769): n = a,t,c or g
ggcacgaggaggagtcaggcttaaaacttgttggaggggagtaaccagcctgctcctctcgctctcctcctcgtctgcgccgcgtttcagaggttgcccatcagccttgtgatttatttttatatctgctttttataaagagagaaatatatatatatatatatatatttnnnnnantcttcttaagagaaaattcctgttccaagagaaaataaggcaacatcaatgaaggagagaagagccagccagaaattatccagcaaatctatcatggatcctaatcagaacgtgaaatgcaagatagttgtggtgggagacagtcagtgtggaaaaactgcgctgctccatgtcttcgccaaggactgcttccccgagaattacgttcctacagtgtttgagaattacacggccagttttgaaatcgacacacaaagaatagagttgagcctgtgggacacttcgggttctccttactatgacaatgtccgccccctctcttaccctgattcggatgctgtgctgatttgctttgacatcagtagaccagagaccctggacagtgtcctcaaaaagtggaaaggtgaaatccaggaattttgtccaaataccaaaatgctcttggtcggctgcaagtctgatctgcggacagatgttagtacattagtagagctctccaatcacaggcagacgccagtgtcctatgaccagggggcaaatatggccaaacagattggagcagctacttatatcgaatgctcagctttacagtcggaaaatagcgtcagagacatttttcacgttgccaccttggcatgtgtaaataagacaaataaaaacgttaagcggaacaaatcacagagagccacaaagcggatttcacacatgcctagcagaccagaactctcggcagttgctacggacttacgaaaggacaaagcgaagagctgcactgtgatgtgaatctttcattatctttaatgaagacaaaggaatctagtgtaaaaaacaacagcaaacaaaaaggtgaagtctaaatgaagtgcacagccaaagtcatgtataccagaggcttaggaggcgtttgagaggatactcatctttttggaatcctgaccttaggttcggcatgtagaccaagtgatgagaagtgaatacatggaagagtttttaagtgtgacttgaaaaatatgccaaaaaatgagagatacaaatgagctagaggaagatgaggggggatgcgagtacctccaagaagaaaaatcacactctgaatggtgcttgccatttttgggttttttttttttttgttataatctattcatggatctccactttgatttaatttttaaatgttttaatctcctttacaaaaagtatacgttaatataccgtcctcaagggggaactggcactgtgaccttagcatttagttttctagaggatgtgatctaatttctttctagctcatcattaaaaaggaaattgtatcaggacccatgggatatatccagaggcaaactttatgaggctttgaaatcttgccttcctgaagatagctgagtaggatggttctaaggaaagcctttgcaatcttgcaagatttgtagaccagcactacaaagatcgcatagatcaaataggaaaaaaaatgtcgatttttattcagtctgatggttctgttcttcattgtgattgtcattaaaaagtggtaaattgctcaatgtaatatttttgtgcgctgtttagaagttgtgtgattttttgccatcgttgataaaaatgcaaagtcaaataaaaggtgtcttggtttgatgtcatagaatgatccaaggagagaaaaaaggtagttactgttttcaccagaaaaggtaatgagtgaaggaaagaatagtagcagaaagcacagtttgtgcagtaaagctgtctggaattaagttaccaaaaatacaaagcaaaaggactattattttgggttgaagctccaaaactgacagcatctgataatctgttggtttatttcacttttcattaaatgaacattgatgagagaagatgccacttacccaagctttagagaatccctagtggaagattatatgataaactttcagtcctgacataacactagggcatttctagagtgtcattgctaaaacctcactgaacagacgcagccaaggtctgtgttcagcacttggtctctgttgttacgtaaaataataagcatttaaaatagtttacagatatttttgaccagttccttttagagattctttcagagaagaaaccagatctgacctgtttattgttggcgcttgttgaaaacgagctttctttcccatgatagtgcttcgtttttgaagtgttggaagctgtgctccccttaaatcgtggcaggagagattaaggtaattacaacactcagttctatgtcttacaagcactttgtcttgtctctgcaagaaaattcgattccagtcatttcccataaaatacagacattttaccaacataatatgctttgattgatgcagcattatgctttgggcagtattacaaaatagctggcgagtgctttctgtatttaaatattgtaaaaagaaaataagttataactgttataaagcagaacttttgttgcattttttaaactgttgaagtcactgtgtatgtttgtttggtcaatgtttccgcagtatttattaaaacatacttttttttttcttcaaataaaaaagtaaccatgtctttgtctaaaaaaaaaaaaaa

SEQ ID NO: 51948 - DNA, 357 bp, Homo sapiens
ctaatttgatgctgccttttggcaatgagctggaagttccagatatccagaattgggtcttactgagttagggctcaaaatgtgctctgattgattagactgcttgggccttttgatgcctactgtggctgcagatgtgcctcttttgcttatttccctcttggttctaagtggcagtgagtggaggactgtggatgagtgacccccccaaaaagtaagatattgtccacataagccccttgaagacagttaactcattacctgcagtttccttcccattcccacaataggctacttatttttaatgctgtattacattgagaatatactcatgtataatttttataagaaaaatat

SEQ ID NO: 51949 - DNA, 406 bp, Homo sapiens
  misc_feature (1)...(406): n = a,t,c or g
aatggcatgccataacttaatatcacagtcaacatgcacaacagacctcataattattttttctaataacaaagccaaaagcaaagaagtaaatgaagcaatataaaaatgaaacagtgaaagacaaagggaagtaccacaaaaacgtttcaatgatatcactgaaatgacttgagaaaccagttaggcctctggagctnnnnnnnnnnnnnnnnnnnnnnnnnnnnnnnnnnnnnnngcaagtcctgtcatgaaaatgccctgaagattcagacctttgcaatttttccaaagctccttcccactggaacaagtcttaatggaaaagcacaagatgtacagagaagactgggatcacctctcccacggcattggaagagctgatgaaaaggagcagttcctctat

SEQ ID NO: 51950 - DNA, 681 bp, Homo sapiens
gagggcctgtgccttctggaggcaagggagctgtttcccagcgtttccagctcctagaggctgctagctagtggccctttcctttgtcttcaaagccggcagcacagccttttctaacctctcccactccaggtcatttcacatcaactctttctgcctccctcttgtaagtgtgatatgctaccttgttttaacctgaattgagtctcccttagctgagagagccagacaaactccattttggctccttcacttgcagctccttgcccacccaattcctcaaggacttaacttgtgcaagctgactcccagcacatcagagtgcaattaactgataaggtcctgtggcaagttatatccgcagttcccaggaattcgctcgggtgatagtatcctaagcccctgcatttgtatccagtagatagcacccaaagcccttgcacccatcaccttgtgatggatttaaagcccctgcacctggaaccatttgttttcctgtaaccatttgtctaacttttttttgcctgttttacttctataagattgctatagctaggctccccttcccctctctaaaccaaagtataaaagaaaatctagccccttcttcagggctgagagaattttgagcgctagccgtctctcgatcgctggctaataaagaactcctgaattagtaaa

SEQ ID NO: 51951 - DNA, 689 bp, Homo sapiens
  misc_feature (1)...(689): n = a,t,c or g
caggctgggtctgcagatggcgtccgagtgcacagtggccagtgtgattccgcagtcttgggctgttcggccacgtgcctcgccggacatgggacgctggagggtcagcagcgtggagtcctggccttttgcgtccacgggtgggaaattggccattgccacggcgggaactgggactcaggctgccccccggccgtttctcatccgtccaccggactcgtgggcgctcgcactggcgctgatgtagtttcctgacctctgacccgtattgtctccagattaaaggtacgacatttggaggccccagcgagaaacgtcaccgggagaaacgtcaccggggcgagagcgggcccgctgtgtgctcccccggaaggacagccagcttgtaggggggagtgccacctgaaaaaaaaatttccagggtccccaaagggtgaccgtcttccggaggacagcggatcgactaccatgtgggtgcccacaaaaattccacctctgagtcctcaactgctgaccccggggtcagtttccagagagaaggactccctcctgcttggaagagacctcacaccgtcatcacgatgccaacggtctgaaggtggatggcattcctgcgtggattcatcactcccgnnnnnnnnnnnnnnnnnnnnnnnnnnnnnnnnnnnnnnnnnnnngggctgggtcag

SEQ ID NO: 51952 - DNA, 680 bp, Homo sapiens
tgacgaattcaggagtcctttattagccggcagccgagagacagctagcgctcaaaattctcttggccccgaagaaggagctagattttcttttatactttggtttagacaggggagagggggagtctagttgaaacaatcttacagaagtaaagtaggcaaaaagttaaaaggataaacggttacaggaaagtaaacagttccaggtacagaggctttaagtctatcctaaggtgatggacgccgggctttgggcgttatcaaccggacacaaacgcaggggctctgggtgctattaaccgggcgaattcctgggaactgcggatatagcttgccacagtatcttatcagttaattgcattcttggatgtgctgggagtcagcttgcacaagttaagtccttgaggaagggggtgggtgaggggctgccagtgaaagagccaagatggagtccatctggcgctcttagctaagggagagtcaattcaggtggaaacaaggctgagtgattaaaggaaagggagagtctaaaaacagggttagtaaaaaccaggttggacactacattcccacttggtgttttttgggggaatcaatccttggatcccccagttataacaagggggttatattgagtccttaagatacataagtttgacagaagctatgcattgttttac

SEQ ID NO: 51953 - DNA, 1808 bp, Homo sapiens
cgcaggcgtatgtggggccgtgtgcagacccgcgtgtggcgcaggcaaggaccctcaaaataaacagcctctaccttgcgagccgtcttccccaggcctgcgtccgagtctccgccgctgcgggcccgctccgacgcggaagatctgactgcagccatgagcagcaatgagtgcttcaagtgtggacgatctggccactgggcccgggaatgtcctactggtggaggccgtggtcgtggaatgagaagccgtggcagaggtggttttacctcggatagaggtttccagtttgtttcctcgtctcttccagatatttgttatcgctgtggtgagtctggtcatcttgccaaggattgtgatcttcaggaggatgcctgctataactgcggtagaggtggccacattgccaaggactgcaaggagcccaagagagagcgagagcaatgctgctacaactgtggcaaaccaggccatctggctcgtgactgcgaccatgcagatgagcagaaatgctattcttgtggagaattcggacacattcaaaaagactgcaccaaagtgaagtgctataggtgtggtgaaactggtcatgtagccatcaactgcagcaagacaagtgaagtcaactgttaccgctgtggcgagtcagggcaccttgcacgggaatgcacaattgaggctacagcctaattattttcctttgtcgcccctcctttttctgattgatggttgtattattttctctgaatcctcttcactggccaaaggttggcagatagaggcaactcccaggccagtgagctttacttgccgtgtaaaaggaggaaaggggtggaaaaaaaccgactttctgcatttaactacaaaaaaagtttatgtttagtttggtagaggtgttatgtataatgctttgttaaagaaccccctttccgtgccactggtgaatagggattgatgaatgggaagagttgagtcagaccagtaagcccgtcctgggttccttgaacatgttcccatgtaggaggtaaaaccaattctggaagtgtctatgaacttccataaataactttaattttagtataatgatggtcttggattgtctgacctcagtagctattaaataacatcaagtaacatctgtatcaggccctacatagaacatacagttgagtgggagtaaacaaaaagataaacatgcgtgttaatggctgttcgagagaaatcggaataaaagcctaaacaggaacaacttcatcacagtgttgatgttggacacatagatggtgatggcaaaggtttagaacacattattttcaaagactaaatctaaaacccagagtaaacatcaatgctcagagttagcataatttggagctattcaggaattgcagagaaatgcattttcacagaaatcaagatgttatttttgtatactatatcacttagacaactgtgtttcatttgctgtaatcagtttttaaaagtcagatggaaagagcaactgaagtcctagaaaatagaaatgtaattttaaactattccaataaagctggaggaggaaggggagtttgactaaagttctttttgtttgtttcaaattttcattaatgtatatagtgcaaaataccatattaaagaggggaatgtggaggactgaaagctgacagtttggacttttctttttgtacttaagtcatgtcttcaataatgaaaattgctgttaaaaggatgtatgggatttagatacttttgcaaagctatagaaaattcactttgtaatctgttataataatgcccttgagttctgt

SEQ ID NO: 51954 - DNA, 674 bp, Homo sapiens
tttttttttttttttaaaaggaacaaaatgaattttaatggacatgtgctttaagcatgccaacagacaacacaccactagagacacacatcaaaagcaatcacagtgctatgatcaaatgatgggtacatgtgaacacatccctcgcaaccccaccccccacgttgcttctctttagcgattagtccagagtgctttagtggctgggcacacccgagatacttaaatcaggaggtgaacatgaatgcaacgtgacaactagtagcacagaaaacacctgattggtattcaaagtgcacgaagcaatgctattttcaagttcattgagtctctgcgtcatcactcaaaacaataaaaatactttttcttctcatacaagccaattgtaattaaaattttgttatgacaagctacatttaaaaatctagataaaaataggcatgatagcaaatgctaagaacatcatagcactcttttcttgtgtgcttatgtggttccttttttggagggtcttctagatacaaaaagtgtcaaattgggtgtcagtcctgatgatacaaaatttaaacacacacacatatatatatgaaaacatcacatatatacatatagatcaatgaaacacaaaatgtaacttggagccacaaacacacattagagctccctaatgacca

SEQ ID NO: 51955 - DNA, 687 bp, Homo sapiens
agtgtttgtggaaacaattatggaagattcttaatgttttattagtctaaatatggagccaattaatcacttcattaatacattgaaaactattctgggaatattgagcataatcttactcttgtacacttggaacataagagaaattttcaattaaaattaattgactctgatttttaaaaaatctacttgatcaggagcacattgctttgctggtgtctgtgagcagctggagatggtggtgaacggtctgtttgcatttcttggaagaagatcttttattctgctgctcaaccccaggtctctgccttccttagagactgaggcccatccttcagtttccctgattctggagaatggcccgcagcctcccactcagggcttgggctgtgctcctctagtccatcccagggctggaagggacatccctggcggtacacaaaggtgtcccagcagtactcaaactcatcgtaggtcatgatggagacttgggccccagcatcccgcagcatttgcagcgcctccttatatagggggtcgtaatcatagatgcgggcagcgaagatgcgcagtctcacgtgtgtgttctcctgaaggaacgcacgcacttccccggcacagccccaggagaagcaggggctccaggagatgaaccaagtgaccctgtagatctctcgtgccgaattc

SEQ ID NO: 51956 - DNA, 1316 bp, Homo sapiens
cgcggaggatcctaaggagcagctctgttgcgacataggccgagcagcgaggcccagctccctgaaacaacagtaacctacccctgtgggtcatcatcatgccctccgacctggccaagaagaaggcagccaaaaagaaggaggctgccaaagctcgacagcggcccagaaaaggacatgaagaaaatggagatgttgtcacagaaccacaggtggcagagaagaatgaggccaatggcagagagaccacagaagtagatttgctgaccaaggagctagaggactttgagatgaagaaagctgctgctcgagctgtcactggcgtcctggcctctcaccccaacagtactgatgttcacatcatcaacctctcactcacctttcatggcaagagctgtcagtgcaccaaactggaattaaactcaggccgtcgttatggcctcattggtttaaatggaattggaaagtccatgctgctctctgctattgggaagcgtgaagtgcccatccctgagcacatcgacatctaccatctgactcgagagatgccccctagtgacaagacacccttgcattgtgtgatggaagtcgacacagagcgggccatgctggagaaagaggcagagcggctggctcatgaggatgcggagtgtgagaagctcatggagctctacgagcgcctggaggagctggatgccgacaaggcagagatgagggcctcgcggatcttgcatggactgggtttcacacctgccatgcagcgcaagaagctaaaagacttcagtgggggctggaggatgagggttgcccttgccagagccctctttattcggcccttcatgctgctcctggatgagcctaccaaccacctggacctagatgcttgcgtgtggttggaagaagaactaaaaacttttaagcgcatcttggtcctcgtctcccattcccaggattttctgaatggtgtctgtaccaatatcattcacatgcacaacaagaaactgaagtattatacgggtaattatgatcagtacgtgaagacgcggctagagctggaggagaaccagatgaagaggtttcactgggagcaagatcagattgcacacatgaagaactacattgcgaggtttggtcatggcagtgccaagctggcccggcaggcccagagcaaggagaagacgctacagaaaatgatggcatcaggactgacagagagggtcgtgagcgataagacactgtcattttatttcccaccatgtggcaagatccctccacctgtcattatggtgcaaaatgtgagtttcaagtatacaaaa

SEQ ID NO: 51957 - DNA, 392 bp, Homo sapiens
  misc_feature (1)...(392): n = a,t,c or g
aagaagctgaagttgttttatgtggaggaaccgaaagcatgagccaagctccctactgtgtcagaaatgtgcgttttggaaccaagcttggatcagatatcaagctggaagattctttatgggtatcattaacagatcanccatggcaatgactgcaganaatcttgctgtaaaacacactntaagcagagaataatgtgacaaatatgcnctgcattcacagcatntatgtgaaagctgctaatgatgctgtttanttttaatgantaattggnatcnatttntctnattnntagnnntggtntttctnagntttcntgtcnttnnatnnatgtttntnccnanncttttnnncttttnctcgttncttcttcnncttttcntnattgctt

SEQ ID NO: 51958 - DNA, 245 bp, Homo sapiens
tgtcatgcaagataaattagatcgccctgtggggtttgcagaattagtgaagggtccaggacgatcccagtgggctcgcttccaaagcatcccactcaagggagacttgaaacttccagtgtgagttgaccccatcatttaaaaataaagtccccgggttccttaatgcctccttcactgggccttcctagcaggatagaaagtccttgcccagagcaggacctggctgtctttttttttttttt

SEQ ID NO: 51959 - DNA, 4366 bp, Homo sapiens
  misc_feature (1)...(4366): n = a,t,c or g
ccaaaaataagaagttattcttactggaagtgaaaattgcctcgtgatgataagagctccttcagaaatgtcagcatagccaaagccttttgaaggtttagtaagaagcagagaaagtgcctgaagctatctggggaatgccttagcccttgctaacgcagcagagctggggccatgccagggagaatggctgcccacatcctggtttcctctctccgagcagactcagccgaggacgtgcgcaaggtgtgccaagactgccccctgctggccccgctgaacgacaccagggtggtgcacgccgcgaaagctgccctggccgccttcaacgctcagaacaacggctccaattttcagctggaggaaatttcccgggctcagcttgtggtaaagactgagattcttttgacaggttgggcagttcggtggcacttcgggaatgtactgtacgtggtggagcgggaggcagggcaagaacaggcgcaggggcagcgatgagaaagcaaggagagggttgtttggaaagggaagaaagcatcctaagggggtatgaggctcctgagtgtcatgaggaccccaacaccctcagcgcctcccccatgctgagccactgtaacgtccagcagccacagctgccggcaggtacatccccactccctccgttccagctaaaaccaaagctcagtgtcagctggtagagtttgcccacgtcggccagaagcactcactgtaaatttgctgggctccagtaccacccatctccgctgaacatctgccacagactcgtaattaatactcacttgtgctgacaagcttataatggcaagatcttaaaatgcctttcgagtcactggagaaaacatctcattgtactgtgggtggtttagcacattggaattcaacagaattcaaatgtttaagaaaatgtattctggatatcagccatggccatacttggaaatacgctagtatagacggcaattctattaatcagaatatgtgattctcagaacatccccaccccagactacaccaaataacagatattttattgtgtccatatgctccaactactttaaaaaagaaaagctcaagtgatatcttccatactttcatctaaatcttttcatttgagcctgctctatgaaacaggtggaagaggtattaatctcttcactttcccaccctatcttggaataacctgaaccttgggtatcaagtgcagcccaagagtgagggctggggggaggcagggttcccactcctatcagtctaaggctggccttctgattccggtttcctatctggaaactcacctccaccctgaaggaccggtgatggaaactttcccctcctacaagggagacacaacccctacctctaaagcacaagcacttgagaacacaaccccataacaacttccctatgtaaaccattgagggacatgtcttctgggccgacgcatggtctgcatgaatggtgctccccgaaggaggctacttcccgctctccttctctgcccttttcattgtaagtcatctttcctcaagagcattttcatgtactcttctcagcccctcccaccttctacctatgtggagtttacagtgtgtggcactgactgtgttgctaaagaggccacagaggcagccaagtgtaacctgctggcagaaaaggtgagtgggccgggaccttggggtgttaccactcggacagagctgtttgtggaacagaacatccttggttagtttgtttcttggggctgcagacagagaataacagtgaaaatcccctctccctgtggatcacggaaagcctccttttagggtgtcacctcatccctttaagagctgtcatcaaatcatctcacccactggaagcacatgaagttaggagaaagagagaggttatttgttaatgaagccaagtcacgcccacccactgggaatgtgaagtgcacatttcctagacatataactctgatacaaaagctttcaagtccttgagccaataatgtacacttctaggatttcagtcttaagaagtcatcaagtggccaggcatgatggtnnnnnnnnnnnnnnnnnnnnnnnnnnnnnnnnnnnnnnnnnnnnnnnnnnnnnnnnnnnnnnnnnnnnnnnnnnnnnnnnnnnnnnnnnnnnnnnnnnnnnnnnnnnnnnnnnnnnnnnnnnnnnnnnnnnnnnnnnnnnnnnnnnnnnnnnnnnnnnnnnnnnnnnnnnnnnnnnnnnnnnnnnnnnnnnnnnnnnnnnnnnnnnnnnnnnnnnnnnnnnnnnnnnnnnnnnnnnnnnnnnnnnnnnnnnnnnnnnnnnnnnnnnnnnnnnnnnnnnnnnnnnnnnnnnntcctccgtgacatttgacagaatatatctataaaaatgatttattatggatataaagagaccaaaaaagagagatctgtatgtccaacaggaaggtgtcattgaataatccatgcacatcagtaaatagaaaattgtgcagacactaaaaattgtgttttcaaggaataatgaatgatatgagaaaatgctattatggcaagtgaaaacacacaggatacaacatcgtatagtcacaatgatctcaatttttaaatcatatttaatagtattttaaaataagttagaaatgcatcaatgttaacagtccttctttctaggccaccaccagaaagggattatgggtaatctctctcactctccaagtatttctgtatttccatgttatatatagaatcatatacctcccacaagcagaaactataactttaagaaaaatggtttttccaactaatttaaggttggcgcgtcaatgaaattgggggggatccatttttgaaattagttaaaataaatcctctttctctgtgggcagcaatatggcttttgtaaggcaacactcagtgagaagcttggtggggcagaggttgcagtgacctgcacggtgttccaaacacaggtaacagctccgtgaatattcttgcctacaccttcagaatacaatgaccccttcacatttatgcagtgcagtagtgatgacaggacatttgctctcccgtgcttctgaatctcacagtatgaaataacactggggtatgcggaatcatcaacaaatggaaggatattttagctatgcctttccctcccacgaactagtgacatacgggaagaaccatcttactgtgtagttgacaaagccacctttttatttgtgggaggtgggagtggttttctgagttgcagagaccaggtggccagatctacctgttagctcccagtggctgcagcttcagatgacaaagagggtggcactgctgggcaagggtgagccataggtggggtgcttttactcattggacatatgtgtgtaagtccaccatcacaaagacaatcctagtgaggccggggccaacataggccagtcacccctccttgtaaccttgatgacaatcccttgtacttgggtaggtcctttcttgctagactctttgcaaataaaaatgtataatgtgaggaaattgggtgccagtgccacctgggcctgtgggttgtcttgcctgggaggaggaagcaaactaactgaaggaaatggtcctttttccagcccgtgacctcacagccccaaccagaaggtgccaatgaagcagtccccacccccgtggtggacccagatgcacctccgtcccctccacttggcgcacctggactccctccagctggctcacccccagactcccatgtgttactggcagctcctccaggacaccagttgcaccgggcgcactacgacctgcgccacaccttcatgggtgtggtctcattggggtcaccctcaggagaagtgtcgcacccccggaaaacacggcacagtggtgcagcctagtgttggtgctgctgctgggccagtggttcctccatgtccggggaggatcagacacttcaaggtctaggctagacatggcagagatgaggaggtttggcacagaaaacatagccaccattttgtccaagcctgggcatgggtggggggccttgtctgctggccacgcaagtgtcacatgcgatctacattaatatcaagtcttgactccctacttcccgtcattcctcacaggacagaagcagagtgggtggtggttatgtttgacagaaggcattaggttgacaacttgtcatgattttgacggtaagccaccatgattgtgttctctgcctctggttgaccttacaaaaaccattggaactgtgactttgaaaggtgctcttgctaagcttatatgtgcctgttaatgaaagtgcctgaaagaccttccttaataaagaaggttctaagctgaaaaaaaaaa

SEQ ID NO: 51960 - DNA, 653 bp, Homo sapiens
tttttttttcacatttttagtctttattttttaggtaaattccattgaatcaaatataacaaaattacagtttttgtttgtaatgatctttgttcaccaccacacaatcatagtagaatcaaaagtaatatgagaacataaaatgatcaaggacatcaatgtttagtataatttcttaataaaggtaaatatccccatatttagaaaaaattgcattgctagttgcaaatcttaaacacctcagtgctgaaggatcctgtatttccccccaaagatccagcagcacggaggctttcagaacacaaactcaaaaatatagtattttcggggcagcattttaagtttcagaaaacccaaacaaaacaaaacaaaatcagaatcaggaatgtgaaagtgatggtgctctaaaaatcaatctggaagcagatctgccaacataagaatgtggttgaacagagtctaaccaggaaaaggagagatgcgaactcgctccccctcccctctcgccatcgtcccccgcccccagcgagcaagccgccccctgctctgcgctgtctctccaatggcgtctgcctccggggccacggcgaagcacgagcagatcctggtcctcgacccgcccatagacctcaaattcaaaggccccttcacag

SEQ ID NO: 51961 - DNA, 2133 bp, Homo sapiens
  misc_feature (1)...(2133): n = a,t,c or g
ttttttttttttttcagtaggtcaggtaacaaagtccagtctgttttatttttaacccaaatattccaaatatacagaaaattaccagtacaaagttaaacacattcagatttatttacacaatgctaaagaaatttgagttttatttccattttgtggaattttatcatggggtctggctttaatgtgtaactgacgtgggtcactgaaactcgattatcccacctcacatgcaattttctgtcctaagggaatagaaaacttgggtttttagggcacatgcagtaatgatcttaatactgctttacactttcgtgggaaggcagctgtcccacagcctggggaaggaccacatgctcagaaagggaacaagagagagggctgaacaacaggcacatggggaccctgagcatttctgtgcacgaggataaggagagtatgaccaaaaccctcctccctagaggtccaaacacaggaggtgggccaaatcatcagggaacagtcagtcacccgcttgtggctgagggcatgccggaggatgagaactacattaaggatctggggcatagcaataaatcattaccatgtacactatacagtttatatatgtatatatgtacacacacatatatataaaggtacagattagtttatgttattccttataaacaagtacacttaagaatgtactggtgtgaagaaatgcatactgcaagttgtttcgaattaatgttctgactcttgttattataatgcaacctaaccaagaaatcaacatgctcctgctatttcaatgatgcttcagtgagggcaaggcctgggctctgctagggcaggatggtgctcctagagctacctgagctggacaaacccatggcagacagaacagaaagtctggcacctgctgactccggccctccctgtcacttcatcacacagcaaatcttaaaactttggttttttcaaagaacatttaagtccatgttcattttcctgcttcagggaagatggtagcaaagttgaaagccgaatcccttcctattttagcacttccaagtatcctggatgaatataggggcgagggctacactgacaatgagcaggatgcactctaggtcattgtggaacaggcacggagctcttgagagcactgcctcaaaaggaaaagagggaatctctatctggatggttggccctggaaactaaataatgactaatgcccaggccagccccgttaccctggggtgggtatggatggccctgggctcccctccgtatcctggtatcgtgacgaaggccatgagaaccagctctggtttacagactcgatgcaggagctggaggtggccagcacattaccagcctgtcaaggatgaaagaccaccttgggcatggagaggcccagaggcaagcatcagagcaagagagaggaggtgggaagtcccattcagaggcagacgtagattctacgttccagttacggctgatctatggactctcctgagcccgcccccagaactgccgcaactctncaaaggcttttattctttgaaatagagttgccattgaattaaaagcctacaggagagacgggcctggtctgtggtctcactaaagccccaatgcccaattaggtcccagagaagaaagaagaagtgagttcccctacccggattttaagaactcggaccactttggactggtttgtcccaatctctcttataatgctaaattcccattgctgaagcctccagaaatgatctcttctgctacatcaagcctgggagtttacacaatgatacactatgttttaccttcaaagataatgctcctaacatgagtaggacaaattagaaatctatttttttagaagctgtaacagatttgggctttcttactctctggctgagggcacacatttgtgagtgagcaggttgataaagaaagctaactagccaataatgagaatgagccaggctggctgtcagtcttcaaaccaacagagctagccagcccggggtggaaaccaggatggggagggagacccatcagtggagagtccactcctgcactcttgagcagtgaccctcaatgaggggaggggcagtttctgcaaacgtatttaaaattccc

SEQ ID NO: 51962 - DNA, 158 bp, Homo sapiens
ttttttttttgctaaggagtccggcttacaggaagtgctcaatgttttatttggggaccaggacttaacagggtgaatctggtatgtttggtcaacctcaggatgcaacctaatttttctatcctgactatgatatgccatgaatgtgatgattttcc

SEQ ID NO: 51963 - DNA, 2562 bp, Homo sapiens
tgtggtgagggctttgggcttgttccctgaagctttttattataaaaacaagatgaaacatagatcacattgcagtctcgattgtaatgaacctcagctgaatgtgccgacagcggagtatctgatctaatgtggactttgaagcattttgaaatgaaaaaatcttgggatgtttttgtttttaaaattcctgtggttgttcgctaaatggcaaaatagggggccaccagccggacaagctccagaccacctacagaaagaaagtctcaggccattatgaaggccgaaacgctaacagccatcttcttctgggtgcacagccctgcggccatccccaccgtgagatggtagaaagggcgcgtgcaaggatcagcacccagtgtagaaactgacttgtaccccgaaggtaatgcaatgcgatcccaacaggctcattccagatataaaaaatatgtcatcactttcattaggtaatattaaaccaacactaagaacttctgcaagatcttttatattacacagtagagttaaaaactgtagtaaatgttcagatatttaaatgagcaccaaacactacaaagtgcaaccaacatggttctattaaaaactctctttgactatggcattcaaggacagcaatacaatctttttttttttaacaaagcaactaatataaaaatctgcaaatgccatatattcatatctaggctattcttctcatataggcatgtcattagatagactttctttctattctttcctgaggtatttttttgtggtttacttttattgtactgctggatgcattatttttgatcatcctttcctaaaatgatttaaagacctgcaaataattttattgcataggacactattgatgacacatagaatgggagctgcaagtatgtggcattggaacaagccttacaaatattgcattttaagaatacacacattttttacagtttgtctcttttaaaaaatttgaagttatagctacgacttaactacgtacagtgaagcattttaggaatgttaagtgattaaagaagaagatgaatgatacaaagaaaagaagccaccattcttgccagctatatattgtattccttcaaaagcaactatacatgctgccttcagttcatagttaaatatttctagtaatctgttttgggagaacaaatgtctttcaaggtttcaagttcctctataagcttcttgttctggacttccagcactgcaactcggctctccaggcattttacatattctttctttcgacgtcgacattctttggcagcttccctgaaaaaaagcagaagcaaagggcaaacaaagcattttttgcatgctattgacaaacagatcaaagtaagctcggtaagtgtgatcacgctgcattccacatcctggaacaacattcccaattcaatttcaaacactaatccaaactggattcttaagggttcacacgtgtccttcccaacaagtccacatggcaataagtaggactgctgcatctcctgccttgattagagtaaacaaggtccaagtcaaagacagttactctactttatggcaataaagatctttgagggccttgagttcctcaatgagagtcttgttttggttttcaagcacagccacacgattttcaagacatttgacatattctttcttcttcctgcgacactcccgggcagcttccctgtttttcattagcctcagctctcgtttgcgtgttgcttcttctgccagctgctggggactgtgcaaacttccgggcgatgcagccatcaccactccctgtggcaaagcagcagtaggagctcggatctggtaagttggcatgtcaccagtggcagcttgaacaacaacctggctgcctgggacaaagaactgctgtgtgccatcagctgattgtgctgcgtactgtacaattgtagcacctggtggaggagctcctgaatttgtcattgttaatgcctgcagtccctgaacaccatcagatcctgggttagaaatctggattgttccaccttgggctatagcaatgtattgccccgtgctagtctgatatatgctagttggtactgccatggtagcaatactaggtggtgttccttcttcctctgatctctcttcttcaatcttgggaacaccaggcacatcagaggacagttcattcagtattttcctataagagggtcttcgtgaaaggatttctctacgtttatgagaatcaattacaccttctgattctgcagattcatctgtctctgcaattgctgctacctgaacggtgtgtatttctgatgactgaataacccatggctgtggtgtctgaattactccctggacatgtatagtttggcccgaaggtaactgcactagagttacagctggggagcctcttctggtgcctgatctcagctcactgcactgagctaaagcagggattgaaatttgcccagtctgagtctgcacatgagcagacttgctctctgtcaaagaagctgttatacttccatcatgctgggattcaactgtttccatggtcat

SEQ ID NO: 51964 - DNA, 1920 bp, Homo sapiens
cctggaatccccggcggcagtggggctgttgctgttgctgtggctgtcgctgcccgtcaggctgccttcttttgtcgtttcccagcgctgcgcaggacttctcctggcggcgctgcggatccagggggtcggctgccaggtacaggtttcctaaagacaaaaaaaaatggaggaatctgtaaaccaaatgcagccactgaatgagaagcagatagccaattctcaggatggatatgtatggcaagtcactgacatgaatcgactacaccggttcttatgtttcggttctgaaggtgggacttattatatcaaagaacagaagttgggccttgaaaatgctgaagctttaattagattgattgaagatggcagaggatgtgaagtgatacaagaaataaagtcatttagtcaagaaggcagaaccacaaagcaagagcctatgctctttgcacttgccatttgttcccagtgctccgacataagcacaaaacaagcagcatttaaagctgtttctgaagtttgtcgcattcctacccatctctttacttttatccagtttaagaaagatctgaaggaaagcatgaaatgtggcatgtggggtcgtgccctccggaaggctatagcggactggtacaatgagaaaggtggcatggcccttgctctggcagttacaaaatataaacagagaaatggctggtctcacaaagatctattaagattgtcacatcttaaaccttccagtgaaggacttgcaattgtgaccaaatatattacaaagggctggaaagaagttcatgaattgtataaagaaaaagcactctctgtggagactgaaaaattattaaagtatctggaggctgtagagaaagtgaagcgcacaagagatgagctagaagtcattcatctaatagaagaacatagattagttagagaacatcttttaacaaatcacttaaagtctaaagaggtatggaaggctttgttacaagaaatgccgcttactgcattactaaggaatctaggaaagatgactgctaattcagtacttgaaccaggaaattcagaagtatctttagtatgtgaaaaactgtgtaatgaaaaactattaaaaaaggctcgtatacatccatttcatattttgatcgcattagaaacttacaagacaggtcatggtctcagagggaaactgaagtggcgccctgatgaagaaattttgaaagcattggatgctgctttttataaaacatttaagacagttgaaccaactggaaaacgtttcttactagctgttgatgtcagtgcttctatgaaccaaagagttttgggtagtatactcaacgctagtacagttgctgcagcaatgtgcatggttgtcacacgaacagaaaaagattcttatgtagttgctttttccgatgaaatggtaccatgtccagtgactacagatatgaccttacaacaggttttaatggctatgagtcagatcccagcaggtggaactgattgctctcttccaatgatctgggctcagaagacaaacacacctgctgatgtcttcattgtattcactgataatgagacctttgctggaggtgtccatcctgctattgctctgagggagtatcgaaagaaaatggatattccagctaaattgattgtttgtggaatgacatcaaatggtttcaccattgcagacccagatgatagaggcatgttggatatgtgcggctttgatactggagctctggatgtaattcgaaatttcacattagatatgatttaaccataagcagcagcacgatccagagatccattgccatcagtgatctcactaaaaatatacagctacttcccagctaatctccacccaatgaatgatgatggtatagtatgtgcataatggaaagttaccttactgaa

SEQ ID NO: 51965 - DNA, 392 bp, Homo sapiens
ctttcttgatgcagatttggtatgttttggtccatgctcgttaacggtgtccagtgtaagctttaaaccaggaggtcaccgaggctgctgcagaggagatcatcccacctgcactgctgctcgcgatgggtggggactcctgggtgctttgactctgggagacttccacagactgggaagggatatcacaaaaccggggactaggcaagttctcccagtctgtgcccaggtcggtttcttcatcgctgacgcgctcatctccgctctcatctgattctccagcaactccgggatccacaaattccatggactcctcaaggtctgctcgtacttcaaagggccctgacctgcctaggtgttcagagcttggactgaccaggtacattagattc

SEQ ID NO: 51966 - DNA, 769 bp, Homo sapiens
gaaggatgagcttctaagatcctgaattttactttctacttgattaacattttcgctttagccagagttgctatttgcaaacagctttccacttccaaagtgccactttctgaccggtttttcttcctgttttcgtcaaatcatcctactcccaaataggcacccactcactaccttggcgtcgttttttgggtctgacttgactcgtcaactgctggtctctcccacctggttggaaatgtcgttggaaacttgcaaagactctccagaccttagggaacaagaggcatcactcagtccttctgggacagcttccctgtaagcaaagccaggtttgttttagattcactctggcctgaaaaaaaaagtgccttttgctgctttaaagaattggggtatatggtatgaagcagccatgtacttgtattttcctggtctttcctgggcactcttctctcttggcagatgttttcttaaagtgaacacaccagaagcactctaccccaccatatccagtcctctttgcatgcctgttgtgtgcagggtggagggtgtcccacgtgccagagcagctgggagccctgtccgctgagttacactaagcactgtattttattcatttatattatttttttttttctgggcattagagcagactccatctcataataataatacataataagctattattttctacctgatgtcatcaggtgttaatccacctctatatctgttggccagtgaaatactttgggctgggacgttg

SEQ ID NO: 51967 - DNA, 742 bp, Homo sapiens
tttttttttttttgaatatatttcccaccttttatttccatcggtatcatccgtttaaaaagaatgacaagaagattcccatcagtccaaactggaccacccacactttgaaaaagttggagcatttcagccggctccgcatgatccatcctgtcttcagtcagtgccttctggaagggagggaaagtcttggatgcacctggcactcaatccactcggcacctggctgctgctgcggtcctggggctggaaggaactcccactgggcacacatctacagaggagtgcgtggcgcagtgaggacggttactgctggagccgacacacagcgaactacatacttttagaaagagcctctgtcacatggctagaacaacaacaacaacaaagaaaacccacaaaaaacctggagaaaatatatctaaatctctgataggtctcttagctagcagtgagttcagtatgacagcacagagtctaaaaatattaattaaaaataaattgctttggttagcatttaaacctttcccattcaatagaagatttctgtaatgaggaatgctgaatatatataaagcctgacactcaatcttgaatttcgggggcgtattttactgaactaagagcataaaacactggcgtcccaggctgaagccatttgctgcgacctggtgtggcccccaaggccagcgcctcatcgttatgccccacagcacttcccacgcgtccgcccacgcgtccg

SEQ ID NO: 51968 - DNA, 1153 bp, Homo sapiens
ttttaaaatacaaaaatgtaatgtatttatttactaaatggttagctataaagatacaatttctgccttggagtttaaagcagtttcattttttgccatagttactttttctgataatatgctagaatcacagtcttctctgttttatctggattgtagggattgtttacattttatatgtttgttcacttgagaaccaaatttttttttcttcatgatgatggaagctctgtaatataaaaatgtcattgtgctcatatatttgaataataccgatcacggttttcaaagtctctgtgagcatatcttgcataagtcttgttatgtgggatccttccaaaaggttcatggtcattgaaacaagattcaaaaacttcatcaacagcctttttagctacttctttgctgatattcctaacagccaggatagaaagagtggctctgtctcgcacacaagtctggtggtgttgttttaatccaaaatgtaacctgaatatttcattgacaagtgagcagtctccactaaggttagcagctcgaacctctgagcacgccaaatgtctgatgttggtgaaccagtcgacatgggcacgacaatgatcaaatgcatgaataagctcgtgtgtgaccactctgttcatatgggcctgattatggatattattctggcacaaaactatctgagatgttgaagcatcaaaacctccactgacatttccattacagtcttcgcaagaaaagtgtctatctttgttaacagcacaacctgagtgtttcatagcatcaagcagaagtttgacatatggatttgtctccagcgtcttcaggagcctaagctggcacttctggttgcaggtgaagaagctggagaagaacccttgctggggattcccctgggccagacgctcggggaagacctggcaagagacgtgttgctgctgcagctgctcccctgccgcggggccccgccggcgctcgtccggagctcccgccatgcctcccgcagacctcgccgctgcttcctcctggctcaggcggccagagcgagactgggaaaggtaacctccctcccgccaacgcgaccgcccaggccctccctccgcagggaagaagggcagcctggctgggctgaagacgttaggcgggaggcggc

SEQ ID NO: 51969 - DNA, 685 bp, Homo sapiens
acttttatgaagttattgctactctgacctacgacactctccggtttgctgagtttgaagattttcctgagacctcagagcccgtttggatactgggtagaaaatacagcattttcacagaaaaggacgagatcttgtctgatgtggcatctagactttggtttacatacaggaaaaactttccagccattggggggacaggccccacctcggacacaggctggggctgcatgcttgcggtgtggacagatgatctttgcccaagccctggtgtgccggcacctaggccgagattggaggtggacacaaaggaagaggcagccagacagctacttcagcgtcctcaacgcattcatcgacaggaaggacagttactactccattcaccagatagcgcaaatgggagttggcgaagcaagtccataggccagtggtacgggcccaacactgtcgcccaggtcctgaagaagcttgctgtcttcgatacgtggagctccttggcggtccacattgcaatggacaacactgttgtgatggaggaaatcagaaggttgtgcaggaccagcattccctgtgcaggcgccactgcgtttcctgcagattccgaacggcactgcaacggattccctgccggagctgaggtcacaacaggccgtcgcatggagaccctggtacttctcattcc

SEQ ID NO: 51970 - DNA, 599 bp, Homo sapiens
ttttttttgttttctactgaaacttattatttgccattaagaattgcaaactatactactaagaatgaacaacattctcttcattaagcctttttcaaaacacacgagacaaagctcccctttggtcaaggtgtcccacacattaccactgcagctcccagcacagcggcgcaccatgaactcggacgtgggagcccaaggaatggagatcgcaccagccttccctgcttccccaccccaactacacccaagggagaaaggatacgaggaaatacactatgtcttcaatgcttggggggctgggggtgtcctctgctaccaggtgggccggtcagtgccgactgtccggcgcgcgtcctcggggatctccggctccccgacctacacaagcagcagcagcagcagcagcgagtcctgccaacgccgcagtagctgctcatgagaaaggtgcccacgctccccaagccctcctgtttacatttcctagtggggcaaagctactttcccaggacaggcagcagagcagtggggcagagtgcactctgggacccgggacagcaggttacacagggtcaggcggtggtgggtgctggaatcgg

SEQ ID NO: 51971 - DNA, 443 bp, Homo sapiens
ttttttttttttgagctaacataaaggttttattgaataaatacatgcactgtcacgtgaaattagttgaacagaaaggaggttctctactttttaacccccatcccccaccgctgttctctatttgcagtggggggtccagctggaggtggaataaatgcggcaaccacagaaaaaacacacagctacacacaggcctgcatttggcttatgtgcctgaaaaagaagggccgacctcttgataaagaatgtctgtaaaaggaattcttaccgtgcagaatatattatcatggtaaatacagttacaaggctgcttctattttatttatttttttgagacggagttcatctactgtttgcccgggatgggagtgcagtgggtgcgatcttgggctcactggcaaccttccgcctcctggggtttcaagcaattctcctgcctt

SEQ ID NO: 51972 - DNA, 1389 bp, Homo sapiens
acatgattacgaatttaatacgactcactatagggaatttggccctcgaggccaagaattcggcacgagtccttccgcgggacggggagaaagagagagcgcgaaagagagaggatgtctctctcagactggcacctggcggtgaagctggctgaccagccacttactccaaagtctattcttcggttgccagagacagaactgggagaatactcgctagggggctatagtatttcatttctgaagcagcttattgctggcaaactccaggagtctgttccagaccctgagctgattgatctgatctactgtggtcggaagctaaaagatgaccagacacttgacttctatggcattcaacctgggtccactgtccatgttctgcgaaagtcctgggcctgaacctgatcagaaaccggaacctgtgggacaaagtggctgccatgagagagttccgggtgtttgcacactgccctggcacagcagctcctcttacagggaggcggtctttaagatgctcagcaataaggagtctctggatcagatcattgtggccaccccaggcctcagccagtgaccctattgctcttggggttctccaggacaaggacctcttctctgtcttcgctgatcccaatatgcttgatacgttggtgcctgctcacccagccctcgtcaatgccattgtcctggttctgcactccgtagcaggcagtgccccaatgcctgggactgactcctcttcccggagcatgccctccagctcataccgggatatgccaggtggcttcctgtttgaagggctctcagatgatgaggatgactttcacccaaacaccaggtccacaccctctagcagtactcccagctcccgcccagcctccctggggtacagtggagctgctgggccccggcccatcacccagagtgagctgggccaccgccttggccctggccagcactccggagagcagctctcacacaccgactcctggcacccagggtcattcctcagggacctcaccaatgtcctctggtgtccagtcagggacgcccatcaccaatgatctcttcagccaagccctacagcatgcccttcaggcctctgggcagcccagccttcagagccagtggcagccccagctgcagcagctacgtgacatgggcatccaggacgatgagctgagcctgcgggccctgcaggccaccggtggggacatccaagcagccctggagctcatctttgctggaggagccccatgaactccctgcttcccctgaacccccagcaagttgcagaggctactgcccttgggaggcactcatgaaggtgcctccatctctcccttccccaatatacctgatggtcaactctcaaaaaaaaaaaaa

SEQ ID NO: 51973 - DNA, 1253 bp, Homo sapiens
aagtgaggaaagccatatttgggtatatttgaagtggaaagtgtgtatgaataacagcaagggaagagcattcttacataggaggtatgcatcttcccctgagccttgagaacctgtctcaacacgggggcggggagggggcagctgttggttctttctaaccctctccaggtcagggaacaaatttgcccctaaacttccacaggaggcactctaccctctgggccagagctgggcacagtggcaaagtcagattagaatttctagagttctaacagcgattcccaaccatttcctcaacttttcttctgtttcccacatcccaaggcagggaaatccctgctgcctctcctcatcttctaactcagctgtaaggcggtttaggagccgctggcagaatcaatggcatcgaccaagggagggggggtggcaagggattttcctgtgcttaactactgatcacggctaagtggaaatcctataaacacgagcggaaatcaatggaggctgcttagcggccaggggagaggggcggtccacagattgcatctgacggatgagcgagaggaagcagccagggagggctcaaggaagagtagcttagaggagggggaagaaacaggcagcgctggagagagaggagtcactgtcagaagggacactgaggggagaggcacagtgggcccaggagtggactccgttagacccagagttcccttccccttctaggaagtgacacccctagcccaggcagtggtcaggatcttcagtctcctgtggcctctctctggagctgttcacttctagcaggcgctgatagtcttgaggccggaaacgctgtagatacacaatcagcttggctggtgctgtctcctgtgcaggcacacagagttgggccacaattgtaggttccgctgtgagttccttaatactccgtgtggggtcctaagacacctgctgctccaggacatttgagctcccatccactatcctctcgtcgtcgcagccagtggtcagcctgcatgaggctcagctcaggggtgtcatagtaggtgtctcggaaggtgacccggtactccagggtgccccccaactcctgcagccgctcctctgtgccaggccctggaaggaactttcgctccacctcaatcaagccctgggccatgctacctgcaattggctgaacaaacgtttgctgagttcccaaggatgcaaagcctggtgctcagctcctggggcgtcaactcagtaca

SEQ ID NO: 51974 - DNA, 292 bp, Homo sapiens
atatgcttcccaagcttttctcatagcttcacatgacgataacaacaaaggaaatttaatataaatatcaaagtctccctgtaggtttcctttctcttctagtgaacaggtcccactcccatgacaagctcccaaagggaaaaaattgtccaaggctagagaaaagtaacttgcatagctgttccaacacaagctcccagggccttcccagagtccacggtttgagtcttcaaaattgctgctgaaaggctgcagaatgagtccaacttgacttgggattacagctatcatc

SEQ ID NO: 51975 - DNA, 419 bp, Homo sapiens
ttgagtttaaattcgagatgcatttaggtaaattggataaattcaacatttgaataaatccgtcaggttttagatggtgggattgatgaactttggtactttctcaatccaaaactaatttatttggaactagtacgttatggcttctcagtcatgaaaagctcagttatttggggtctacattttctcactgagagccttgatattttgccttctttgttatgcattataacttgactgtatcaccactgagtatctgctgtatcagaagttcagaagaaaaggtaaaactgaaatcagaatgggggtagaggaagtttaaaaacaagttatttaaaaagaactcttggtttttggatgacttgaattctgttaaatctgtgttcttggccttgcacttccgttcctcttccatctct

SEQ ID NO: 51976 - DNA, 281 bp, Homo sapiens
gataggcttccctggaactcccacccagcaagagccagctctccaccgagtgggggtttacctggatcgtgggactgggaatgtctccttctacagcgctgtggacggagtgcacctgcacaccttttcttgttcttctgtctcacgcctccggccatttttttggttgagtccattagcatctttagtcattccaccagtgactgataggaaatgaggcttttcttcccctgaccaaaactccttccctgtagtccagctgagggacacacatccctggg

SEQ ID NO: 51977 - DNA, 1031 bp, Homo sapiens
ggattacatatgatagtaaagcccacctcgtttggatgggagtagaggaagttggtgtagaccagctgtggagctgaaggcacagtctgccccacccccacctccccactgtggttagtcagaggcatcctgctccaagctctgcttttccttcctctgaaacaatgccattcttgcttctattgctacacatctccttctggctcaggtgaaatccatgcccttctgcttatagacctaaagttcaggtacttattattggccattgatcttgaatttgccctctcctagtgctgcagtcccacttcaaagccattttcttgagggagaaatggttttttaatggaggtagcaggccaagtgaaaaaaagattctgccccctgccttcctgggagattgggagttggcagccatcattcccaagctgatgagtggcatatgactcaccaaggtggtacaacatgggtgggatttttcaaggacaattgccagacctaaaccatcctcctcagaaaatggctttgaagtgggactgcagcactaggagagggcaaattcaagatcaatggccaataataagtacctgaactttaggtctataagcagaagggcatggatttcacctgagccagaaggagatgtgtagcaatagaagcaagaatggcattgtttcagaggaaggaaaagcagagcttggagcaggatgcctctgactaaccacagtggggaggtgggggtggggcagactgtgccttcagctccacagctggtctacaccaacttcctctactcccatccaaacaggtgggctttactatcatatgtaatccacccagaggcacaggcaagccactaaggcaatgcactaccgtaattcaaacagaaagaagaggcatctggattataattgtcacaaggaaggaaaacccaaaccaggtacaaggatcccaaacagggaagatacgcaatagctctaaaaaaaaaaaaaaagcaggctactaagtttcagtgataatagataataggtcga

SEQ ID NO: 51978 - DNA, 536 bp, Homo sapiens
ggggccgctcccacttcaggcattggataattcaccgaaggcaccgctgaatggagtgggccctcagtaaatacctggaggaatgtgacctggccagtgaggttattttcttttgtaggtgaaaggtgtagcagtcactcggcctacacccacagcatcgaccttgtgaacccagcgacctgactgccttgggtgagtctaggcaagctccattctcgccagagcggacttgctccttgtcttcctcttgctgctctggccactcttcttggtccctcccctgttccctccccggactcccggttgtactcccgctgcttttctgtgtactcacctgctgggagacccctgatgccagcaccacgcttcactgctgtcttcattttcttctttctttcttgaaagtgggcattgctggctttactgactacctgttcttttgttacaaagctgctaaaaaatgtatctcttccgctccagacccagtaggatagagatgatctgtgtaggcatcaaaaatgtagaacatctgcaag

SEQ ID NO: 51979 - DNA, 410 bp, Homo sapiens
atcataaatctcttgttgattatatgtattgggaaaaggcatccaggcgcatgctggaagaggaacgagttcctgtcacctttgtgaaatccgaggaaaagactcaagaagagcatgaagaaatagaaaaacgtaataaaaatatggcccagtatttaaaagaaaagctcaataatgaaatagttgcaaataaaagagaatcaaagggcagcagcaatatccaagaaacagatgaagaagatgaagaagaagaagatgatgatgatgacgacgaaggagaagatgatggtgaagagagtgaagaaacgaacagagaagaggaaggcaaagcaaaggaacaaattagaaattgtgagaacaactgccagcaggtaactgacaaagcattcaaagaacagagagacagacct

SEQ ID NO: 51980 - DNA, 423 bp, Homo sapiens
ttatgagcatctacttgcggctgcactcagggccatttgaacccagtgcagagttatctctatgaggaggccccgggtctccagccccctccatctcccctggggtttggcatatttgacatgggagccccatgccaagggatgcagctgttggtgtctgtccagtccattcaaggctagcctgcccatgcactgtggcaggggttggattggagggagagaacagagttgggaaaaacaacaggtttgagtcctataaagccataatttaactccagtagctgatgtcagacaagcttgtcctatgtcctatttgagtggcagcagcgccagcccagcaagaaggctgggggttgtcaaggttgtccccagaccttgcttgcagtggttgggagaacccagggggctgccttgggccctctg

SEQ ID NO: 51981 - DNA, 823 bp, Homo sapiens
tttttttttttttgactcatcaaagtttattatggcaattaattacacaaacatacaaggcggtcggtcatccagctcagaagcactcaaaccagtagagtccattagtgatttctctttataaataacttaggagaagcaagcacatttggtaaagaaccggcagcgctgacctagcgtcacgcggatggcacgtaggccggggaggggcaggcaccagaaggtcaaggtccctccttgggccccagcagccccgggcccaccagatgctgcgtcctcaggtagtggacatttcaaggcacgtacaacttcctaagcaatagcagctccaggctcttccctgagacctggtttacctctggaacaaccaagttaacactcatcacaccccctttgtctattgtattcattcttattactgaacatgccccaaaccccacagtgcagggggctgcatattaaacagagacataatccccaccctttacattctgaagacagggaggtgtgaaaaaattgcccctaatgtagtgatggtgttttttaaaaagcaccatttgggaagtaaagttagggcctcttttgatgcctgtcttaggatggacactgggggtgggaggattacatcaacagagtgagaaggggaggggaagggagggggctgcttgtgaatgagattcaaggcactaaaggagtggatggatgcgtgggcctcgggcaaagtcgccctaaagtggggaccccagaggagagaagggagggtggctggggaggtgacctggccctccaatcctaaacaagccccaatgtgaccacaatctcc

SEQ ID NO: 51982 - DNA, 891 bp, Homo sapiens
  misc_feature (1)...(891): n = a,t,c or g
actctcaacttcgagtacgccgtggagcgcgtcctcgcaggtacagggggcgcgccctgggtgaaggccctccttagcagggcttgaaccccagaaatacccaggcaggtattgagaggtgaggtggatggaaccatcacacaggaaggaacacacgttgcgtttcagttctgcgtaactcatgtctttatgataccttgtacttttccttagtttaaaatatcacagatttacctaagagtagacgctcgtccaacagaaataaaaaatgccttgccaaagaaagtgaaaaaataaaaataaaaaatgccccccaaaaataaaaataataaaaactaaaaatgtcttgccagcctgggtgtggtgggctcagcctagccccagcctcatgggggctgagctccagccgctgactgtgggccggaggctgctgccgcccgtggctgtggagggacagccgtgctttcagcgcacanggggctctgcggagaggtgtggatctgcagcaccacctctggtgaaactcatggtcccgaccgtcagtaggaacgggagatgagttttggtgacgggtgaccggtgggctgaccgcctctgactgccgttccgtggctgctcagtgtggggtctgcgacgtctgtgaggagagaggaccaaactgggaatcggagctgctggaggtttccatagctatgatggcaacacccagacgtgatcagtcatcttcatggaatggagttcagacccgcactgttcagtgtgagacaggttgaacgttttgaaaagggaagttgttcttgccccaggtgtttgaggagcacgagcctcctttgcgagctatccctgcgagaactgagttcctcaccctcaattcgagtgaattcctagcac

SEQ ID NO: 51983 - DNA, 1960 bp, Homo sapiens
tgcttctgtaagcaacgggaacacctgctgagggggctctttcacgcatgtatacttcaagtaagatcaagaatcttttgtgaaattatagaaatttactatgtaaatgcttgatggaattttttcctgctagtgtaccttttaattgcatgggtagttttaaataaatggagaaagcacctttcagaagctacactagcaggaaaaaattccatcaagcatttacatagtaaatttctataatttcacaaaagattcttgatcttacttgaagtatacatgagggaaagagccccctcagcaggtgttcccgttgcttacagaagcaaactaaaggacctaaaactggaggcaagccaggatgccaaaaagggggaagagaaatgataaagaaccattcataaattccatgtctacttcaagacatttgtctaatgacccttacataataagtattttagggaaaactaccacccttttaagataaaagtacaatcttaaaagtacaatcttaaaagctgtagttctcaattatagtaatatttcttacttccagtaatatgtctcaataccttggactgctggatgtcaaaagacaatacctgggggtcatctatgagatctgaacaaatagaggaattctctaggactgtatactctctattttggctttttgaatgaagtacagacaggcttctctgctatcctccaggcagtgtaatagtcaaggaaaagggcaacagtattggatcattccttagacactaatcagctggggaaagagttcattggcaaaagtgtcctcccaagaatggtttacaccaagcagagaggacatgtcactgaatggggaaagggaacccccgtatccacagtcactgtaagcatccagtaggcaggaagatggctttgggcagtggctggatgaaagcagatttgagatacccagctccggaacgaggtcatcttctacaggttcttccttcactgagacaatgaattcagggtgatcattctctgaggggctgagaggtgcttcctcgattttcactaccacattagcttggctctctgtctcagagggtatctctaagacttaggggcttggtatatatgtggtcaaaacgaattagttcattaatggcttcccagcttggctgatgacgtccccactgacagagaaagggaggctggtaaggaactgggtccttctgggtagacctcctggggagctcctccccaggctgggcaggctctggggaagggcatttgaagaacatgactgggtcccaagttgtcccagaatgcccaacaggatatcagactctgaatctgaagagtcaataccgccagaatccatggggagatgttctggaggggtgacaactgggcctgcacctgctgcagaggtgcacgtagtctgagtgctgcggactcagcagacccggccactggcctcacttcattccccttggcttccgcctcctcttcagcaaccagggcatccatccccaagcgctgtcttaactcctggttctcaactacaaggccatgagttttctctcgtaaaagctgattttctagcaaaagtttttggttctcttcttctaaatctaccacttgctgttccagctcactcattcgagccttctttcgatctctggcagtctgagctgctactctgtttttcagtttcctcctcagcgccttctcctcggggctcaggtgcgtgaggcgctgtcgcttgcgcgcctggggcagccccccgctcgctgcctccgggctggcccctctctgggctggcaccatgagcggcagggcctggccggccggggctccggcggcggaggcgggctgccccgacagaagcagaactttaggggtcccgtcggccgggttcggcgcggctgccaccaccaccatagctccagactacgcaccgcgcaccgcgcggaattcc

SEQ ID NO: 51984 - DNA, 500 bp, Homo sapiens
ttttcattgagatactagaaggctttaatcgaaccatcaaattgagaagtagaaaaataaagagaagcacagttccagaagtgctgggagtcttccctacagggaaattagtaagcctccaacctcagcccctacatgtacataccccatggcccgttacattaatatgcaactgaaaatccagaacagagaacttgggaaaaacaataataactttagtataagcctctcagctgacaatgacccaaggactgttcagcggcccaggcacctgaggagcaatgacagtctacgaggacatcttctgcagcaacagccatcaggagaccagcagcagcacagcactcagggctcggtgtccacctccctgcagatcactttctccctcactggaatcaaccgcagcacttggagtctactcatggagtagaaacttctttatggggtctggcagaggcagcgaaggaatcagatgaagccggtgtttgccaagagctctt

SEQ ID NO: 51985 - DNA, 2017 bp, Homo sapiens
tccattagctatgacatgattacgaatttaatacgactcactatagggaatttggccctcgaggccaagaattcggcacgagcggcacgagcccttttggccagcagtttttaggtctgtcagtactgcactgcaagaatggcagattttgggatctctgctggccagtttgtggcagtggtctgggataagtcatccccagtggaggctctgaaaggtctggtggataagcttcaagcgtttaaccgggcaatgagggccgcgtgtctgtggaaaacatcaaggcagctgttgcaatgtttagtcccaggaagcaccactcctgcacagtgcctgagattttggcctgaaatcgcccggatccttcggcctggtggatgtctttttctgaaggagccagtagagacagctgtagataacaatagcaaagtgaagacagcatctaagctgtggttcagccctgactctttcctggtcttgtggaagtgaaagagctgcagcgggaccccctaacccctgaagaagtacagtctgttcgagaacaccttggtcatgaaagtgacaacctgctgtttgttcagatcacaggcaaaaaaccaaactttgaagtgggttcttctaggcagcttaagctttccatcaccaagaagtcttctccttcagtgaaacctgctgtggaccctgctgctgccaagctgtggaccctctcagccaacgatatggaggacgacagcatggatctcattgactcagatgagctgctggatccagaagatttgaagaagccagatccagcttcccctgcgggctgcttcttgtggggaagggaaaaagaggaaggcctgtaagaactgcacctgtgggcctttgccgaaaggaactgggaaaaagagaagttcaaggggaaccagatggagctcccaacccaagtcagcttgtggaaactgctacctgggcgatgccttccgcctgtgccagctgcccctaccttgggatgccagccttcaaacctggggaaaaggtgcttctgagtgatagcaatcttcatgatgcctaggaggttcctgacatgggacccatctgctcctccagccaactcctgtccctcacatcccaccatggtggctcctcccacctcctctggatttgttcactctgagatctgtttgcagagtgggtgcttagcagacagagtgaagctggctggggggcacagtggtgtgtagtgctgctgtgtatcaaaagaccaaggtattatgggacctggtttcagaatgggatgggtttcttcacctcatgttaagagaagggagtgtgtcctgaagaagcccttcttctgatgttaaaatgctgaccagaacgctcttgagcccaggcatcgttgagcattaacactctgtgacagagctgcagacccctgccttgagtctcatctcagcaatgctgccaccctcttgtctttcagagttgttagtttactccattctttgtgacacgagtcaagtggctcacaacctcctcagggcaccagaggactcactcactggttgctgtgatgatatccagtgtccctctgcccccttccatccccaaccacatttgactgtagcattgcatctgtgtcctgttgtcatttatgttaaccttcaggtattaaacttgctgcatatcttgacatatcttgagattctgcatgtcttgtaaagagaggggatgtgcatttgtgtgtgatgttggatagtcatccacgctcagtttggaccattggaggaacttagtgtcacgcacaaatggggctattcctacgcttagaatagggcttgtctgcccactttagaagagtccaggttggtgagcatttagagggaagcagggcagaactctgaacgacaatacgtctctctgagcagagacccctttgttcttgttatccacccatatggacttggaatcaatcttgccaaatatttggagagattgtgtggatttaagagacctggatttttatatttactgg

SEQ ID NO: 51986 - DNA, 611 bp, Homo sapiens
tttttttttcggcatcatttgataatttaatatgagggacaaaaagcagtaagtccaaactggccttgggtaacatctcatcaagtagcacacagaatctgtactgtaattgaaagggtttaattgtaagtcacggctgtgtcaacgctgttcagctcatgccttgaaatcacctgcacagccacgttaaactcagcacctccagactctcagcttgtaacagaagtgccaagctctctacctcgaaacaggatagaggaggatgcgggcaaatagccttttaacgtgtatcactcacaatgtcaagaaggtgaaaaaaagtcaggtttctttttgaaaataattgtctaaaatcaaactaaaatatgaaaaattaacataatttgcaagaatataggtcaaaatgttcaataggactgactcaagttcacaaaaaaccaaatgtcaaacagatgaatttaaactaaagattataaaacaatggctattaagaattagttttcaactgatctaaacagtgtttgaaagtttaaattaactcaatacttttatcagaactttagctagaaacagtctgaaagtaaaaaaagtatcattagactgttctcaag

SEQ ID NO: 51987 - DNA, 321 bp, Homo sapiens
ttttttttgccaatctgctcaaacacccagttggaacaggaatgcctcgtggcactggctttaggagtttaatctagatggtttgctgtttctagcagcagagcacctgttcagactctacgtatatgcacccatgaatggtgcagctgccaagagaaccaaagctaaatgttggcaggatcacagcaggtgtggaggggaggtcactaggaattccctggagactcagtcgttacccactcaactggaaggctgagcatggctttttcctctgatggttacccatgccaggccccacctctccatgtccaatgttctttc

SEQ ID NO: 51988 - DNA, 285 bp, Homo sapiens
  misc_feature (1)...(285): n = a,t,c or g
gacgtcagggcagcatgaagatctggagtgagggcagcgtgctactgactttgcgtgaccttgaacaaatgacttcattcctctgagcctcaatttcctcatctgtacgtggagataatattagtactggtggttgtggggatcaagttaaatgagataaagcacgtaaaagcatgtattctaggccaggtttggtgtcttatgcctatannnnnnnnnnnnnnnnnnnnnnnnnnnnnnnnnnnnnnnnnnnnnnnncccaaatctaatcactactcttggcct

SEQ ID NO: 51989 - DNA, 1344 bp, Homo sapiens
tttaaaggtgaaacatttttatttagtttcattacagaggttaaatagacttttatgacatccatacaaaatatagcaatggttgtgggcataaataagaattgttctaactattctaactgattttataatgcacagctctttcagttgattacaaatatgaagtatatcacctcaggatgcagagatttttgaattctatttagcaatttccaaaagctgaagtctagaaccgaagacacatataaaaagatgatttttaaatggaaccagccaccttgaaaaatattttgaaaaacatgatttaaactttagaaaataaaacttttaatacttaagagataacatgatgcaaacgttgcttgttggcctgactttccaggactaagaccctctgggaatcaatggggctcggtgacatggcgtaacctgctactggggtgtggtctcagacacaaaatcacactggatgttggtctacagaggcaggattctctcattgctggatgactcttgaaatgaagcctttgccctttgttacacatttggctttacaatcttcattgacaaatagttcggcaaagagtagaggagcacggcccacgaagagcagcaggataagcaggaacagcaagccgatgatgacccacttaaagcggcgccacacgatgaacttcatggtcttgcatgggttggtgaaccagaggaaggaggtttctggtcgatttggtaagtccagcttggggttcatgttgggttcgtcccgccccttcccggctgcctctcgtcggcctccttctcgttgaggatttccaatgtcatctccactttcccagccattacgcgggcgccatctttctctgcgtagcatggccaccatcctttcatggacttctgctcaaagagggaggctgtcttggctttaagggggttcatggctttgaggtccggaatcatgtccaacctgcatttctctggtgattttgcaggaatgatcgtgtgacgcaagtcaagttctaggaaacccaagtagtcatccagagaaaacttgtcattgtcccatatctgaatgatcagcctgggtgggattcgaaattccgtttggtcaatactccagaaatgctcttttttcgcaacgatacagagttgttcggctggaaggtagtcaaacgggaaaacaaatcgccagttaaaattcccttcaccatccaaagatctgtaatggacatctgttttctgtttgttttcttcattgccaggaatccagcctttgacgtagatgtcactcatttcctctcctgtgatgcttttctcgtccaagataacgtccttggtgttccagat

SEQ ID NO: 51990 - DNA, 1422 bp, Homo sapiens
ttttttttgcagagaaattccagtaacaattttatttatccccctaatttttatcatgggaaaaatccagaaatcaaatgtcattatgttatataaggtttaacttactttaaacaaaaatgtaacatagtgttaaaactggctttccaaaacagtcacagcatagctgtactctgtactaataatcacaaaattgtaatatagaactctgttatgcagtcccattatgttcttacaaaaatagaattaaactgtgtgaccagacaaggacttcaattacactacttggcaaacttagaatttcagtggagtctttttcctcttgcagtttaaagcaaaagtcaaatatcacatctttttcaagactcacaaagatgattcaggttggtttgtttgggcatgtttttaatctctatcacaacggagggatgttttcagctttagtcctcctgggcttcttctctagattgttactaagttctaaacaagaaatgctaactgctggggtcttttctgcatccttttccagaaggggcttgtggtagtgtcccacaacattgcttcaaagcacactgggttctgcaggcaagttcacacggaactacacttgatttagagcctacactagcaaattcaggctgaatggtagtagcgtgaattccgtgattatgaaaaacggtctttaatggttttagccacctccatgtatgatgttggatcttcacattttatgtgagcagtggcaatgattctgcttccagcaagttgccaaacatgtaattcatgaacttcctcaactccttcaacatttcgaagttcttttatcaaatttctgatatcaatttgtttaggaacagtttgtagaagaataagagcagattccttaagtaatggataggttgtgtaaagaagtatacaaaccattacaacacaaagagttggatctaaatatagcacccagcaaggaccagcctcataaactgatgcatgagtactattaattatttctacaaatgctttgcaggggtcagggaaacatggattcacacaaaaatccccttcagaacaacctttccaagaaaagtaaaagactaaggcatttactactacaatcactgaacccaaggcatctccaaggacatgcagaaaaactccacgcatgttaagttgtccagccctatcttcttccagttccatatggtcaggttctctgacaagatttccattcacttgtacttccactgtatcaccacttctggggttttctgggtctgcggggtccaatttcagcccgttggagttgctggtattggccaccagggtgttggtctcctcctggtcgggaccctgctcgccggggccacgttgatgtcgctgctccggggcgggtgctcttaacgcgaggcccttggggagccgtgg

SEQ ID NO: 51991 - DNA, 192 bp, Homo sapiens
ccaggaggtggtcctcaccccagaggtgaatatgcacatcaaagaagagaactttttcaccctgacaacctatgccatttcgtggacccaggatgaatttgatcgccatgtgctgggccacactcaactgtactttgaaacagaacattttctgaagaaatttttcagaagtatggcaatggtgaacaatat

SEQ ID NO: 51992 - DNA, 620 bp, Homo sapiens
ttcataccacagagaatagttgggatgaaaggcatccagcccctgcttcctttaagatggcctctaggcagtgggtgttctgtaagcctggcaaaaattctggagccaatctctggcaaggctgagtgccaggcggggctagggacccagggtcggtgcttaatgcctcccgcccattggaaattactgacctccaaatatatatatatatatgttttttaatttaaaggggaagtacactgcacaccttcctccactgggagaaagagggcccaatccccagctacccaccccccaccccccaaacacacacacacacacacgtacacactgactaaggcacagcgagggtgggcaggcatgctttggcaatggggccccttggggggctgtggcatggacggctgcaaggggtgtggatgtgagctcagcacctttggaggtgggtggaggcaaggagagaaagaagtctcagggctcccaaggacacaggagaaggtgcttgcaaaacaggcagataagaaagccgacaggcaacccagaaaagagatgagaaaaaagaagagtggaaaaagagaaacaggctgggtgcggcagctcacacctgtcctcccagctac

SEQ ID NO: 51993 - DNA, 427 bp, Homo sapiens
agagagaactcatgatcacatcaaaagatgctaagaaggcatttgatgaaattcagcagccattctttaaacctcggaaaaacaggaaagaacctatttaaataaaatagagattatttaccaaataacaagtaaaatactctaaataactaaataccaaaaccatttccactaaagttaataacagacagggaggcctacttttaccattataactcaacaccacattggagtttctagacaacaaaaatttcaaaaaaaaatcagtcaaacattggaaaaagaccagatccaattatttttggggaatgtcccaattggatttctaaacatctcgagactctagtgaaaacctgctataattcatgagatttagtaagcatttacaatgtttgttgtatataagcatacaaaaacagattttctc

SEQ ID NO: 51994 - DNA, 331 bp, Homo sapiens
gaaaaaagaaaaccttggagtcatcctcaattcctctctttatttcgtgccccatacaatatgccagcacaatcctatcatcttttttcaaaatgacacccagaactgaccacttctcaccaccaccaataccactgcaaagggctgagccaccagcatctctcatctggactattagagtaatttcctcactggtccctcttgtggctcccacctggctcaaggtcctctgactcctgcccagctctcctgatttggtctcttccccacccttctctgctgtctactctcactctctccatttcagtcatggtgactttcatgatacccc

SEQ ID NO: 51995 - DNA, 403 bp, Homo sapiens
cagaattagctgactctgaaggaggtgaggagtataatgccatgatgaaaaactgccttcgtgtgaatctcactttagctgatttggaacaattggctggcagtgatctgaaggttccaaatgaagatactaagagtgatggaccagaaaccaccacccaatgcaagtttgacagaggctccaagagccccaagactcccactggcctccgcagaggccgacagtgtattcgtcctgcggagattgtggcttccctgttagaaggagaggagaacacctgtggcaaacagaaaccaaaggaaaacaatttaaagccaaaatttcaggctttcaagggagtaggctgtctatatgaaaaggagtcaatgaaaaaatccttgaaagacagtgttgcctctaacaa

SEQ ID NO: 51996 - DNA, 301 bp, Homo sapiens
caatgtgttttattaattgtaacaaatataccacatattaatgtgagatgctaataacaggagaaactgggtgtggggtaaatgaggacctctctgtactaggttcacattttttctgtaaaactgaaactgtttgaaaataaaaagtttattttaaaagaagttaatatcgaaaacctttgtcttgcccataatgcactctgcctaatctacccaatcagttcatactcttcacactcatagtttttcctaaattttactataattatgaagtttatgttcaactgctgatcatcagata

SEQ ID NO: 51997 - DNA, 1032 bp, Homo sapiens
  misc_feature (1)...(1032): n = a,t,c or g
gtttagatgttttcccatagtatggtgtcccattggttttttaangggaaatttttggtcttcccttaagggaattcctatcactcagagaattttagccattctgggttctagtctaaccaaattattcatctaataatttgacattaagaaaactataaataactggtagaaggaaagtgctttgcacttcagtggattgaagacttgactttgagagtaagtccaaaaacatatatgatgtttctcagtgataagagtaaaaagtaatgaatcctgagagttcttaaacagcatgctacttggcaagacttcatattttttagttacaattcttccactgtttaactccagtttgaaatttgaaatctaatatgtagctaaatctgtgacttgtaaaactctatgcataatttttcctaatcagtggaaataagaataaaagaaaaaggtaaagttaattttttttctaagtctacatcctatctcttgattcagttgcctgaagaagctgggtaaggagattagtcttgttattgattcttttatgtgtcagtgccatcttaatctcttcacatggtacactaaatgctgcctataacccatcctcatcttctttactcatcattgctttcttcaaggaaggtcttgatactgccctcgtctacctcactatccgctagtctagatagtgactctttggaaaattggtagcctctgaatgagttatccaacttctgcttcctcacattggccactttgcataggttcgggaacttagcaggttttaaatcatcatgcccatgggaggtgaaatactttgaggaatgggaacatctcttcactgtgtttttggatcagccttctctcaaccgccaagaaatgcatgatttccctgccaactctagggaagtagtgctgcatgattgaatccattatttagatgaattcttttcattgtaacataggggagttcatttttcaaaaagggtaggtatggaacttaaattaaatttggacttatggatgctt

SEQ ID NO: 51998 - DNA, 421 bp, Homo sapiens
  misc_feature (1)...(421): n = a,t,c or g
catggatcctgttgaaaatgtgatgaaagcttggagtctctcccatcctgaagcatacttgcctcatatgtatgcacagaccttcccccagccctcatttcaactgcagatccccatcaggttcctgttggactaaggttaagttgtctctagtatttgctgtttgtttctgataaccatgttttatcatgttcagattcttttttattcatccttgtatgctaatgtttgttttaaatcaaaaaatcaattttatcatgccttttcagcatctatcaagatggcatgtaatctaacctttcagctgctacagtgctctcacttatattcacagatttcctaatgttgatcaacacttaacatttctggaatatatcctgatggcattatgttttgnttactggctgctagttttaatcta

SEQ ID NO: 51999 - DNA, 833 bp, Homo sapiens
tcttttttttttgttatcagactttggtttattgtaaaatttagcaaagtttttcttgtaatccctgacccattgctctgaaaacaaaagcaaaaacataattattgcttattcttttccccctactttgtttgtgctactgtaaaagaagggagaaaatcattgtaataaataaaaaatagagatgtaacagagaaaaataaatcagctcagatgagaagtattaggagcaacagcaataccattaagcagtttcaaaatcagcttcttttaaaaaggtcatcttattaaaataaaaatcacaccaaaaatatagcagcggagaagaaggataaatacaagttcattgcacaccagtcccatgcaaaaaactgtcactagccaaagcagtagtattcagaatccaatttaggacgcttgtgtagtgcctgtgagtcctctatgagggagctgtcactgaattggtccaagtctgaaggggtctgatggcctgggacatcatccgccaacgtgtccagataacttcccacggaaatgccatccagcccatcactgcccatcgtgtaggctgttgtagctgcccacgtaaggaggtgctctgactctccaacaaactgcacaggctgccactgaggctgctgcctctgctggtaatggtggctttttcttcgatcatccacttgatggactcgatgctctcattgattacaagcaactggcgcatgagcctgacgtctgtggctctgaggttaacgttaccatggaaataaacatcatcagtttaaaaattctcacaaaacttgtgacttctctacaggacaacatggttgtgc

SEQ ID NO: 52000 - DNA, 467 bp, Homo sapiens
caggacggacggagcccggccactgctacaggctgtattcatctgcggtttttggtgacttcgagcagtttcctcctccagaaatcacccggaggcctgttgaagacttaatccttcaaatgaaggcgctcaacgttgaaaaggtcatcaacttccccttcccgacgcccccctccgtggaagcccttcttgccgccgaggagctgttgatcgcactgggtgccctgcaaccgccccagaaagcagaaagggtgaagcaactgcaggagaaccggctgagctgccccatcactgcgctgggccggacaatggccacattccccgtgggcaccccgctacggttaagatgctggcactgagccgacaacacggctgcctgccctatgccatcaccatcgtggccagcatgacggtgcgggagctgtttgaggagctggacagaccagcggtccagtgacgaggagctc

SEQ ID NO: 52001 - DNA, 622 bp, Homo sapiens
ttttttttttttttttctgggtgcaaggaacattttattccataactgtctccaccgaagccgcagaagcaaagccaggagcagaatccattctgccagcgctgggctctggggagacatctgtgccctcaccatggaggacagaaggcaggggcctcccgactccttggtcctgcctggggtgctcctgtccctctttcttgctgggggacctaccccaccctccccctcccacctcagccacagaggaacaagggagacaaactgagggctctgcagtccccgttcaaggccaacataatagtcgtgtggccccagcccagctaggcgcatcctctgcggcatggcagcggtgaccaagcacagccaacgtcagctccgctccctgccgtctgagagctgaccacaggcagatgagatgcccactccctgttgccataacacaggaaaggcgttggcggccaccctcccaagaaggcatggagcctgggggcccccagccaggcccctcaaggtcaacacagagctcggtggctcacctaacatctgggacggctgtgaggccagggctgggtagccctccctgactctggagagggaagaattgcaggaaggaggcccc

SEQ ID NO: 52002 - DNA, 1545 bp, Homo sapiens
cggacgcgtgggctgtggcaccgctactccgtgccgcgcccgtcgagcattgcgttgctgcattgcgccccaccgactccactatgttgaagaaattcgacaagaaggatgaggagtcaggtggaggctccaacccattccagcaccttgagaagagtgcggtactccaggaggcccgtgtatttaatgaaactcccatcaaccctcggaaatgtgcccacatcctcaccaagattctttatctcataaaccagggggagcacctggggaccacggaagcgaccgaggccttctttgccatgaccaagctctttcagtccaatgatcccacactccgtcggatgtgctacttgaccatcaaggagatgtcttgcattgcagaggatgtcatcattgtcaccagcagcctaacaaaagacatgactgggaaagaagacaactaccggggcccgccgtgcgagccctctgccagatcactgatagcaccatgctgcaggctattgagcgctacatgaaacaagccattgtggacaaggtgcccagtgtctccagctctgccctcgtgtcttccttgcacctgctgaagtgcagctttgacgtggtcaagcgctgggtgaaatgaggctcaggaggcagcatccagtgataacatcatggtccagtaccacgcactagggctcctgtaccatgtgcgtaagaatgaccgcctagccgtcaataagatgatcagcaaggtcacacggcatggccttaagtctccctttgcctactgcatgatgatccgggtggccagcaagcagctggaagaggaggatggcagccgtgacagcccactgtttgacttcatcgagagctgcttgcgcaacaagcacgagatggtggtgtatgaagccgcctcggccatcgtcaatctgccaggctgcagtgccaaagagctggccccggctgtgtcagtgctccagcttttctgcagctcacccaaggctgctctccgctatgctgctgttcgtaccctcaataaggttgccatgaagcatccgtcagctgtgacagcttgtaatctggatctggagaacctggtcacagattcaaaccgcagcattgccacgctggccatcaccaccctccttaagacgggcagcgagagcagcatcgaccgcctcatgaagcagatctcctccttcatgtcagaaatctcggatgaattcaaggtggtggttgtccaggccatcagtgccctgtgtcagaaatatcctcgcaaacacgccgtccttatgaacttcctgttcaccatgctgcgggaagagggtggctttgagtataagcgcgctatcgtggactgcatcatcagcatcattgaagagaactcagagagcaaggagacagggctgtcacatctgtgcgagttcatcgaggactgcgagttcacagtgctggccacccgtattctacaatctcctggggccagggaggggcccaagaccaccaatccctcaaagtacatccgcttcatctataaccgagtggtcttggagcatgagggag

SEQ ID NO: 52003 - DNA, 874 bp, Homo sapiens
  misc_feature (1)...(874): n = a,t,c or g
ttttttttttttttttttcagatttccatagaaaggaggaaaatatttattccaaaagatggcagaaagaagaaattcatcctgaaagtatagtttggtgcgattctgttgagatggctcttccctctgaacgtgctctcctactgaccaccccactggagtcttgtttgtcttgcagcagtttctaaacacttcactgattcccacgtgagaaggcaggagccatcttcaaatccacagattccaaggagagagtaacgtatctctcagaagaacagcatcttctatctcagaagagtacataatccgttttgtggagtcggcacagttcaggttatggaggcacgtaattcaccaaagtgcaaaaaaggcaaaggaaaacacgctgcattgtagaattaaggcattcaaatgtgctgttaacgtttaagggcagctaatggcccaaaacaggcaagtcaagaaaagtggtctggtttggaggtgattttgcatctagaaggcattctcttctcgtgacctcaaagactgagcactgtagagcatgtcttcttcctcaaggccaatgatacttcagataccagatggtttcatttttcaattgcggtccaaagagagggttgagttgggccagaattgcaatcagccaaaagagatagcagcaaactgaacaggtcaccaacatggtaatgataactccccggttaggacccttagggatgaaccaaggcaccaagaagccgacgaagccccagaacacgctcatcacaatgagaggcacatgtgaggccgtgatacgccatggtcgcccctgagcgccaacccctaccccgtcgcctcactcggatcccaccaggaagtgtcaatantgacc

SEQ ID NO: 52004 - DNA, 284 bp, Homo sapiens
ccaggctggtctttaactcctgaccttgaacagtctgcctgccccaacttcccaaagtgctgaggtaacaggcatgagccactatgcccggccagcatggataattgagaattgatcatttattttgactgattatttttaggaatacatactgatccatttaatgttttttccttagaagattttgctaattgtcagatttgtgtgctaaagatttctagctgctactgttttctttctttagtaattacttcaagtttatcctgtctcaaaaaaaaaaaaaa

SEQ ID NO: 52005 - DNA, 2740 bp, Homo sapiens
  misc_feature (1)...(2740): n = a,t,c or g
aaggtgggcctggaagataacagctagcaggctaaggtcagacactgacacttgcagttgtctttggtagttttttgcactaacttcaggaaccagctcatgatctcaggatgtatggaaaaataatctttgtattactattgtcagcaattgtgagcatatcagcattaagtaccactgaggtggcaatgcacacttcaacctcttcttcagtcacaaagagttacatctcatcacagacaaatgatacgcacaaacgggacacatatgcagccactcctagagctcatgaagtttcagaaatttctgttagaactgtttaccctccagaagaggaaaccggagaaagggtacaacttgcccatcatttctctgaaccagctcctgtagtgataatactcattattttgtgtgtgatggctggtattattggaacgatcctcttaatttcttacggtattcgccgactgataaagaaaagcccatctgatgtaaaacctctcccctcacctgacacagacgtgcctttaagttctgttgaaatagaaaatccagagacaagtgatcaatgagaatctgttcaccaaaccaaatgtggaaagaacacaaagaagacataagacttcagtcaagtgaaaaattaacatgtggactggacactccaataaattatatacctgcctaagttgtacaatttcagaatgcaattttcattataatgagttccagtgactcaatgatggggaaaaaaatctctgctcattaatatttcaagataaagaacaaatgtttccttgaatgcttgcttttgtgtgttagcataatttttagaattgtttgagaattctgatccaaaactttagttgaattcatctacgtttgtttaatattaacttaacctattctattgtattataatgatgattctgtcaaatgaaaggcttgaaatacctagatgaagtttagattttcttcctattgtaaacttttgagtctggtttcattgttttaaataaattaaggggacactaaagtcctatcattcatttccttcattgctgaacaggcaagatataatattacatgaatgattactatattttgttcacactaataaagcttatgctcagaaatgccatacacacacacaaacacacacatttatcatttaatgcataaatcaacacaaaaggttttcccattaatatgaaatattacatatatataagtgccatatttaaaataatttgtctaacagtagaactatgtcggagcactcactgaagcttgcattccactgaaagagttatttgtgtaagtagagtatccggagaaggaaaagaacttacgacctttctttataacagaaactcaactctaaattcaacaagatgtgcaaaccggacatgcaggtgaatattttaataggttactataaggttctcaattaaattctttaatctgtccagtcccagtttctcttattaataaaactttggaaattgctttaaaccatttaaaggaaatttctagatatagaaactaaggactgtgactatacagctgtcactcatttgtagtaaaacttaaaaagcaaaaacaaaaaacaaaaaagaccttcctgtgatactttatttccgaactaataaaaatctatatgactttttattattgtgtgataaccaagtaaatgttttctattttgcatattttcaggcatggtaacagaaatttaccttttaataaattaaaaaatctaaattttaacctacttgtatgttcggagagtgtttttgtactatattgactacttaaaatagagaatgagactaagaagggaacatttctgttgatacatgttttttaaaagtaatttttaagagcattattaggttaatttaatccaattaatgacccaaatgccaaggtaattttaaatttacatttttaataaaagcaacatgttgaaacaagagagggtgagattaacctttttgctaaagtaatttacaagtcaaagacaggaagagatcagagtgaatgtgccttcttaaccagagctacagaatttagtgaataattaaagtacaaactgctttgacctccttgaacttttccaagcaatttctctgtacttctatatatgaatgtcttagccaattttcnnnnnnnnnnnnnnnnnnnnnnnnnnnnnnnnnnnnnnnnnnnnnnnnnnnnnnnnnnnnnnnnnnnnnnnnnnnnnnnnnnngcgaaggcatggcactgacatctgccttgtaactgatgagaaccttcttactgcatgataacaaagcagcaaggcaagcaaaagcgtaagatgaagagagaggaaatgaagccaaacacatcctttcatcagaagcccattccctctataaggcgttactacatttatgagaatggagtcctcatgacctaatcgtgaccttaaaggcccctcccaacactgttacaatggcaattaaatttcaacaaaggttccagaggtgacattcgaatcagcaatgaaattttcatagttaaatttggtattcgtgggggaagaaatgaccatttcccttgtatttttataattaaatcagcaaaatattgtaataaagaaatctttcctgtgaagataccatgaccccatggatggctcatgttggatttcttaaaattggggatgggatgggatgggaaggtttggtgatgctgattatggaattgtactcttcag

SEQ ID NO: 52006 - DNA, 622 bp, Homo sapiens
cctgactgactgtataattttaatatttgaaaaattgcatccagaaattaatacaatacagatttgtacaaaaaaggaaggacgtaaaaacttctaatcatacagacaaaaatatgactgactaagcaaagattttaaaaaaggacaggatgtttaaaaaatactgataaatactgtgtaatgctttaatttactgtggcagatacaaaaatcaataattcattaacagattatatatgtaaaaaaagtaactacatgaattttctagctttttaaattaataaaatgtaacagtagtggtttttattttttaaatgaggtattattacactgtaaaccaaaaacagagcacaaataaataaaggcaatgtgcaatttagtgataaatgattatacatttcaacttaacaacagataacaaaaattctctagttatttatggacttcgtcatctaaaaatttggcttgcttgtgtggacttcttatttaaaagtgacacagctaatcgatatacaagcacatcattaaacatgcagaccaagccaacacaatttttccatgagtcatctctaccaaataaaaactgtttacattttatttaaaacacttaaatctggtttct

SEQ ID NO: 52007 - DNA, 777 bp, Homo sapiens
caaatcagaaatctaaccctaaacttatctgagagataatattcctgaataatcatagagtaaaataaaataaaaaagttacattgtaaggtataaaaagcctgggcgagatgctccaggggccttgcccagaggccggcagacccccgccccgccaggtgccccatggtggccatggatgtcgcagcccccgctggggcggtattctccacggggcgggcactctgctccccaccccatgtggggacaaagtgtcagtgtgaggaagggcaggggcagaagcccatcagtgccgggggttcctccggagcgcaccccagcccaccctgtcgtctttggcaaatacgcatatgcagatgcaggaatccaggggccccgagccccaggtctccgtgtgcctcctcctccctggcactccacccactgagaagtccgacgctgaggcagggtaggtggggtagggcaggctgtggggggtgggtgcaggggtcatatctggagagcgcaggcaggtgacacaaagctcaatcctcttccctccacagggcagcagggcggggtggcactcccggccagcccgctcatgcgtcgtacttcttaccagtccggtggatgtgctggaagagggtcatggagaatgccatgcccaggatctgcatgatgaggatgcacatcccgcacctgcccagcacgtgcttattgtcatcgaaccacatcttcaccttttcatagcagcccgttctccacaaaggcgtggtggttgcgccgcaccctggg

SEQ ID NO: 52008 - DNA, 439 bp, Homo sapiens
ttcccttcaaagatttttttgtattaaatggttttttaagatcctaaagtctcccagtttcccctatatacataagaccatttaaaccacaacctggttaccaccgaccctttcgtgatgattcttggccaaacccctgaactacaagcacatccatttacgcctgaaaccagaattgtcctgagattcgagcaagacacaaggcggcaattgggtaccacagcttcatggaagtaagtggtgggaatttgcatattattttgttaaatgagggtccagttcttttgggccatggcaaactattgttgatcccagtgagggtacagatgagggcctggatttagggtgtgcggtaaggactgcccttcacagaagcaaaacaggcagctgcccctttcagcaggctcggagtctccctccaaggcagggtctgcccgag

SEQ ID NO: 52009 - DNA, 447 bp, Homo sapiens
  misc_feature (1)...(447): n = a,t,c or g
ccagacatcggttgtcagcaggtacccgcagagagcagaagggagactggaagcgtccccacaggaccggaacccatgcaagtcctggcagctccggtggatgtcgcatgcggatnccgtgcgcggatcagccttgtccctccacctctgtacccagaatgtcctgcactgaggccccacagcctatcccaagcgggtaccaccaccaccagcaccatcattgccttggggccaccgcgcgcntcagcatctctgtggagggtgacctggaatgcttggtgtgccgagagcctacaactgtgctcggtcccccaagctgcttagctgtcagcacaccttctgtgccgtatgcctgaagcttcttgctatntgtgcaggaagacacctggtccatcccctgtccgcttgtggcgaaaggtcactgctgtcccngggaggnctcatctg

SEQ ID NO: 52010 - DNA, 796 bp, Homo sapiens
cttagcatacaccaagccttgtggaaggtgctttcctgccatatctcatttaatcctcacagcaaacctatagaatatggcattatcatctgagtctcacagaagtttagtcgtgtactcaaggtcttaccagctagtgaacagcagaccaagactggaaacccaggatagtctgatacctgagccatctcttcttgtgctacgcctagttattctgtcccccaaatcaaaaggcatgacctttataagaggcgctttactgacaatagctgcaattttaactttgaaaatgattcagaattatcaaagatagtagattcgaatgacatgattgtctataatctcgctagccttgtactgtgtgtgcatagcaattacagggaagtaatctagctcctgactattatgttgaactatgtcgctgctttttacaaacttgtcttgatccaaagcagtcacaatgataaccctgcatatctgggaatcataagtcaactatgtatctctgtgtgtgtatatatatgtatgtatgtatctattttcaaactgtgatttaatatttaaatattccctactgccatttttgtgactgaaaaactacacatgaggaaacgtcttagaattttccaatagaggaaaaataacacttgggcaatctgtcatgtttcacaacagttctcatttttctcatgatttgtgtagcgtggaatgtgtttgctcaatgtgaagggttttcattgctcaatttctctgtgtaagtcttttccttaaggtaataaaccatcagcaaagtcaa

SEQ ID NO: 52011 - DNA, 1024 bp, Homo sapiens
tttttactttgtgtgttgtgttttattaacaccaaaatgtgccacatcatggtttagaagaggtggagggtgcaggcaggaggctccgaagtcccaggcagggcgcgcagcctctggcctctccatggactccagctggagagcctgtccgctcagcaacaccccaggcagcaccaagaataacatgcccacaagaacatcatggccaagagacgcacaggcgcatcccgcttccaggcacctttcccacctggccagaagtccctgctgtcatcccgacttgcacggtggttttggtaaccagtgggctgtgcaggagtgaaagtggggtcactttccttcctttcccagctgctggagtcggaactgctgcctttgtttggcggccttgtttcttaaatcagttccctcttaggatttattacactaaaaaaaaaattagtttttgaaaagaaataggagaatacagaaacatgaatttcacgaggctatcatctaacagtgggggctttctacacacgtggtgccaaaaatgtgtcattctgagtcaattgcaattcctctctaggagtgaaaagagataaaagataagccaagaaccctggacagattcttggtgttggtgacaaagaggaaaggacctgagaatggggctggtggggagaggggggtgtctgctggataccaggaggacaaggaccactcccacctgcaggggtgcccaggacctagttgggctcggcctcagctgcaccttgtcccctgccctcacctggccccatacctgtcaaggataagcactccacaaccagcccttctagcgcctggcttgggccgggcctgtgcagggggtgctcatgaggccggggccacaggttgtctggaccatgttttactgtgctgcaaaggccagtgccccctccccactctcacccagtgctggccagagcctcgctggaggagatggcagacctggccaaggcagccccttcgggcttccctgtgtaccgtccccagaggcctg

SEQ ID NO: 52012 - DNA, 2511 bp, Homo sapiens
  misc_feature (1)...(2511): n = a,t,c or g
agtttctggaactttcctggtggatcagagttacgtaatgcagtctgagccttcagactgctagctagaattgttttaggtgttcagaaagggcaaaataggctaatgtggcctgtcagagtgatgtgttctcaaaaaagctcacttgcacatctgtgggctgcttttgtcctcagacccttagtggacagactccacaaaccctctgatgagacgattgatgtggccagggtccagttagcatcagtagaaggatgtcactaggaaaggcccaggtatctggtaagtgactgtgaggtgtcacagtacctgtgacaggagagtgtcctgatgtgcttgggagaaaggccgtatgggggccagggatggaagagacagtgtgtggccacagaaattcctgtccatccaccaccagtgctgctccctgtgtgggctttagggcgagtggccccgaaccttggcccagtgctttgtcccaggccagagtcttggcaatgccacatgctggcagctttctcactgagaaggtcctagcttacccctgtgtgctggccttggattcagccccgagagagggggagagaccattcctcctgtggagtgggttccttatcaccagaccggccactctnagaactggcgtccactgtaaatccaggtgccttacgtgtggctctgtcccttatgctgcaggggaaagctgcattgccattgttcccacctcctcactggcagaaagatgccagggctgttagcactgtctcctcaccttctgtttctcattgtggctcctcaaatgggatttgcatgttcctgtcaagcgtaacaacaatcccttctctctttgacagaggcccaggtgggacagtttctactatttgatatttgagtattatctgggatgtggttctggagctgcccagagctgtgcttagtagagtgtgtcttggaaacatgcccctgggcacactgtatctgctacattagtgggctatctcttatctgcagtgttcgcttttgctagaaagaggatgtggaggaaggaggaggtgggcaatctggcttgagttgtgctgtatcctcttccttgttagcttgccttagtctcactggagaccatttgcggatagtgcttggtccatgcccagcaggacagggctttgctgcttctgaaagtctggtgttctgtatctggggctgtgggttcctgtgtctagctgctcaggaaatcttgagaagcattccactctggggtgtaaaccagtatgagtttgaaattcaagcgtttgtacctgagttggggagagaattgcaaggcatactttctctgaaagtaacagaaccattcaggctgccatgttattaaggaatctgaactgttgatagcagttaccttgtgggtgatacaatgggaggcggcaaaaaaactacctgcataggagaccctgccctttgtcaagagctgggagcacatttcatcagagtagcaggcccacctggtgccagagggcctgcccctcctgcttctgttcctttgccttgcagtctcctgggagagagcctctcttttcctgtacagcctttgggccaaaatgcccttctagcttctccaaagaagatccgagtttatttcattctatgttttaagaggtaaaaggacataacaagtgaaagaagttttgggctaaagtaggctatgtctccttatgtattactcaatactgttttgcagagaaaacatttttcaagcatgtgcttcctgaagacacctcagtctttgggccatttgatttccaatacatagggtggaagaatgtgattttggggctgaccataaactggaaatttgtgaaatggcagtgattgggcaatcttcagtttattttttcagttgaagtggaactcatttctggaatggatttaataggctgtgtctaatgtacaaactgggtgagtcctgccttagtgtgtcctgccccaccggtacgcttccaggatactcttttcccctctgtaaagtcactttcttctgatggccagtgtcactatgatgtcagtgaggtctggggatgaggacagtgtgtccctgaaattcacaggactgactcctcaccccagtgcacgaggattcctgtggcatcaggtgctgctgtacctggtgtaggagcctaatcattgaaccattgtgttactcacattccatgtcacagaacatatcagcctcaagaaggatttggtggaggtggatttaccactggttttacaaaggaccgtgtaaagtcattgaagttgtgaaagtctattttttttcctgtaaatctattttttacagaatataagaaacatcaatgacctgatctgtccttcctcctccttcccgcttcccccaaaatcacattccagtttttattgtctttgtgtccaaagtaaactaggtgacttatttgtataaaatgttattttgccacatgagacagtaataaaagaaagattttcacagtaaaaaaaaaa

SEQ ID NO: 52013 - DNA, 582 bp, Homo sapiens
tttttttttgtagtccacagaccagcaagttccattaaacacgtttatggtaacaattcagatttaaagacagacgcattaacatgtcagaacttactagcaatttcacgcacagctcaatctacagcagattctgaagaaaataaagttaaatagctcatacgaaagtcaccgtctgggctacggatctcctagtgacagcccagacgaccgcgggagtgtgcggcggcggggcggggaccccggagcaggtcttacctgcaaggacaggatgctgatatccgtgttgagggtggtcagcggcgtcctggacgcctggttctgcccgggtctctggtgatgcaggctgacaatagtgggatgcgagtccagggcgatctgcaggtccaagatgtagtcgatgacgtgctgcaggatttccatcttgctcaccttcttgttctgggggatgctgggcaccagttccttgagcttggagtagcagtcgttcatgttgtatagcaggctcatcgggtcgtccacaggggttttgctccgagagatgcacaggctgtggtacgacagcatgtttttcttaacgga

SEQ ID NO: 52014 - DNA, 1307 bp, Homo sapiens
  misc_feature (1)...(1307): n = a,t,c or g
ttttttttttttttgacttcagacatgttttattataatcttatacagtctacataaatttgaacttgtatttatttgggttcagttataacatagcataataaaaatcaaagcactggtcctctgaaataaagcaggcaatcaccattcaataaacacacttgatttattttgtataaaagggttaagtttacaactaaacttttataaaaagtttagcatgaataagtacatcattacacttttgaatgcagaaatagacatctctgccactatacaagaaaactctaattaaagagttcacaaggtttcactcaaatagatatatttatatataaatatatacacagcattcagtaggcttgtgtcaaaaaggtaatttctgaccaaaagacttcatttaagtgactgaatactggatccttctggtattcacgctccacctttgaaaaaaggcaaagtctgcttagattgggcaattccttgtgattttaacgttttcgctccccatggtgggaatagtatataaagaaaaccttccaactgcagaaagggcatttaaaagtctttttcataaataacgaatatcacagtccaagtaagagaacaccctgggaagatgatcattcttagttttccttccattttttttttctttttaaaaaggtccattcaacttgtcctccttgtgaaatggttgaaaaataagttcagcacttaaaagattccgtgaatttgttgttgttgttgttgtgcaaagaataaaagaaatcatgaacaccgcttattcagccacacagtgctttgctgtcatttgacattaactcagaagggaattcagaagcctgcaaggacaggatgctgatatccgtgttgagggtggtcagcggcgtcctggacgcctggttctgcccgggtctctggtgatgcaggctgacaatagtgggatgcgagtccagggcgatctgcaggtccaagatgtagtcgatgacgtgctgcaggatttccatcttgctcaccttcttgttctgggggatgctgggcaccagctccttgagcttggagtagcagtcgttcatgttgtatagcaggctcatcgggtcgtccacaggggttttgctccgggagatgcccaggctgtggtccgacaggctgtttttcctaacggacctcacgggactgaaggctttcatgctgcaccgcgagggaaggcgagaccgggagggagctggctgccctgaagctcaggccgccgctgccgcctgctgaggcttantgcgcttggcaccgggctcctagtgccgaat

SEQ ID NO: 52015 - DNA, 214 bp, Homo sapiens
  misc_feature (1)...(214): n = a,t,c or g
cccagtgaggacagatattttggtcaccatcaagtggatctttttttttatctaacatttacaattctgccagttcttactcttaattctctttgccttgaatcccaggatccacctctnatgttcagtgaagaggaccggaaaagtctgctagagcagtaccatctgggtctggatcaaaaacgcagtaaatacgtggttggagagctcatct

SEQ ID NO: 52016 - DNA, 380 bp, Homo sapiens
ctctgctgcatgcactattgctgtaagtcttgctggaatgagtacctgacaactcggatcgagcagaaccttgttttgaattgcacctgccccattgccgactgccccgcccagcccaccggagccttcattcgtgccatcgtctcctcgccagaggtcatctccaagtatgagaaggcgctcctgcgtgggctatgtggagagctgctccaacctgacctggtgcaccaacccccagggctgcgaccgcatcctgtgccgccagggcctgggctgtgggaccacctgctccaagtgtggctgggcctcttgcttcaactgtagcttccctgaggcacactaccctgctaagctgtggccatatgtctcagtgggtcgac

SEQ ID NO: 52017 - DNA, 251 bp, Homo sapiens
acacaccttttgtggcgtccacttaatttgtgcctatatttgtatgatgtcataatttaatctgttcatatttaactttgtgtgtgggctgcaaaataaacagcaggacagaaattgtgttgttttgttctttgaaatacaaccaaattctcttaaaatgattggtaggaaatgaggtaaagtacttcagtttcctcaatgtgccagaggaaagatggggttgttttccaaagtttaagttctagatcaca

SEQ ID NO: 52018 - DNA, 1872 bp, Homo sapiens
  misc_feature (1)...(1872): n = a,t,c or g
tgtttgtgttcaattaagaaattccagaataaataaaaatgaattaattcaacaaacattttctggggcaccgacaatctgcccagtgcaccaggctaggtatctgatacaaagataatgaaaacagtctcttggaacctaattggggtcctcatttgaccaggaatttctttcgtcccgttttaagccaaccagttttgtccggacaagacaaaaacaacttgggctgctttagagaagcccagctcagtgtagacaatagctgcccagcctctgaaaggggctgattggattatgtggcaaatggaggtgcaaggatgacttggacggtgacaaatgaagtgggcggagacctgctttgagttaatccagggctattaggaggggaccttttgtcttcccagagactggcaggagcttttaccagtggtttttacatccttaatgttcaggacgaataatttatggtcagtgaaaatccaggccccagtgagattcgagtgggctgtaaaatcgagagtcctgctcccagtgagtaatggtagtgaatgtttctgtcactttttgcaaccgtccattcatttgatcctcacaactccctgtcctgagccaggaccggccactgccactcccagggaaacagaggctgtcaagaggctccacagattggggccccactggatcattgaacccctgttccctgagttctagaggaagaattgtacctgtctcagtcccggccacctccagaaggcctccctctgcatttctgactttgctgtgccggcagcctgggagcctcccagggtccctgctgtcatcttttctagccactacagtctctgtctttcctttcacagccaagcttcttggaaaggcctgtctacacttgctgtcttccttcctcacctccaatttcctcttcaacccactgcttcctgactcgctctactccgtggaagcacgctcacaaaggtaaagacttttctgtggcttaatccttgtcatgttttcggctcatggacacaaggacacattttcatgccttctctcacagggctctgcgtctccggtttcacttctgtgtctttacactcccttcacagagacacttgctcccccttctctcgttcttagcatcccctaggaacttgcacacccaggtctctcgacttctggacctgcttcttaccatgccgtcttaagcagtcaggagtcgctgcctgggttcgagtcctagttaaattacttagtgctgagaccttggggtaggtaaacttttccaagccaggtttatctcagtttcaaaatagggttaatcgtctttatctggcaggtcaggtgggatgtctcacaggtaagcaccagatgccatttgaaaggcttgaagcaaagtcaataaagcattcatgggaaaatacaactggaggcaccactagattttcgtatacattaggttcccacggggaggaccgaagagagaagaaagaagtggaaagggaggagcgtgcaggagagacaggagaagagaataactaaacaaagacattaaagacaaaaaaaaagtaggaaagggagacttagaaaatattaaaagccaccaaaaacacatccaaagacggtttccccttacgttagttgggctaaaagaaagcaaatgggaagaaggttttaaattgattatcccagtgacaaatcccagggnagctttcacatcaaatcaccctattctgggtttttaactccttccatcgagtttaacctctttacctcccacatcctggttnaaccctggacnccctnccctaccgncccccttttgctggtgattaaaatccngtaagggtacacgatggtnttttccaggtggaa

SEQ ID NO: 52019 - DNA, 949 bp, Homo sapiens
ataaatatttgtgagcgagttgtaagaacccattcaagaatggcaatttttgaactagtttctaaacaaagggaattgtatcttcaacagaaaatattatgtgagctttctgggcatattgatctttttgtagatgtgaataagcatctctttgatggagaagtgtgtgccatcaatcactttgtccaagttgctaaaggatataataatctgtttcttaaatatcagagctaaaaatgttgcacagaatcctttaaaacatcattcagagagaactgatatgaaaactttatcaaggaaacactggtcatctgtacaggattataaatgttcaagttttgctaataccagtagtaaattcaggcatttgctaagtaacgatggatatccattcaaatgagagacctaaaatatattaacattttaattaagaatacttgatcaacattttttgaagttcaatttaccatattttataaattgcgcattctgcacagtggacaagtttgcaattctgacttattaaaatttcaaattctgcatatcacaaaatctccttatacttttggtatggcttgcagcatttatgagttttccaaaatatagaaagcagtaggtcagtaggagcaaactagccaacaggtactgtctttgaatttactactgtaagactaagcagtgttactggacacagttttaacttgttcaatctgcttcaaaaacaagaaaaacaacaactatgagttatcaaaatattgactccatttatgactagactacatttctgaaagatctttggtttatgattcttaagaatattgacaatacctataaaactttgaagataacttttacttaaatatgaaaattatagtttgaaaattaggctcaagcaaatatcaaatactgcaaaaatccccttgcccaggataccctaaaatagaagtgc

SEQ ID NO: 52020 - DNA, 624 bp, Homo sapiens
  misc_feature (1)...(624): n = a,t,c or g
aaaatctaggtatattagcagaataattttaatagtttatgttataatctctcattggaaggaatagaagcaagtacttagctttccacaattaagccttataatgatgccacaagaataaactaatccccaaagtcgagaatgtataattttcaaacacttttttaaaaagctggtgaataacaaagagctaggattaaataatttatttaaaaaaaacttttctcataaatctgtttcataagcatatataataacatcatatatattcttaattggagtagaaacgtttttaaaattactgtgaaaaacaagagtgagattccagaaaaaattgtgccctaaagaaatctggtttannnnnnnnnnnnnnnnnnnnnnnnnnnnnnnnnnncaaatgaaactttcctttaaggaacaagtgcatttttaatagattctggaactcggcttgcatagtagtcataattcctcagtgtggccaggactcctgcagagttcatatgcttcacatccttgtggtactgaagaacattcccatggatatcggttaacttgcctcccacagcatgtaaaataacttctggagcacaagtatcccacttcttacaaccaggacttgca

SEQ ID NO: 52021 - DNA, 411 bp, Homo sapiens
gaggaggtagatcctgggacacatgggatccacgtgcgagtggcccttaaatgtatcagttcagtccagaaaatgaaatacctgtttgggagaagcagcatggcccattgaaatgaggctcatctgtgcaattatgaattccaaattctgacctcagttctggaattgaagtttcagtatgttttggcctcgggtttcgttatttgcaaaatgagagtttctttgaactgtctcacgtgactattaagcaactatacacaggacatcggttattttagagtgaaagacacagtgctttttccaaattgctctggctaccatatagaaaattgactgaaggagggccaagatggaaacagagagaccagtgaggaggcttctgtggttgccaggctgaggtgatggtaactt

SEQ ID NO: 52022 - DNA, 609 bp, Homo sapiens
attttacattgcctttcctagttcatgctggtgctgccttcgtccatgcttgtgagtggaatccccatgctgtagttgctctgagaaataaccttgagatcaatggagtagcagatcggtgccaaatacactttggagataacagaaaactgaagctctcaaatattgcagatagggtgatcctggggctgattcccagctctgaagaaggctggcccattgcctgccaagtgttaaggcaggatgctggaggcattttgcatatccaccaaaatgtggaatctttcccagggaagaatcttcaggctcttggagtcagcaaagtagagaaagagcattggctgtatcctcagcaaattaccaccaaccaatggaaaaatggagctaccagggattctaggggaaaaatgctgtcaccagccaccaagccagagtggcaaaggtgggcagaatctgcagaaactcgaatcgccactcttcttcagcaggtgcatgggaaaccatggaagacacaaattctgcacatccaaccagtgaaatcctatgctccccatgtggatcacatagtcctggatctggaatgctgcccctgtccttcagttggctaga

SEQ ID NO: 52023 - DNA, 372 bp, Homo sapiens
tagacagggatagtaaaatgaaaattgagaaatataagatgaaaaggaatggtaaaaatatcttttagggggcttttaattggtgatctgaaatcttgggagaagctgttcttttcaggcctgaggtgctcttgactgtcgcctgcgcactgtgtaccccgagcaacattctaagggtgtgctttcgccttggctaactcctttgacctcattcttcatatagtagtctaggaaaaagttgcaggtaatttaaactgtctagtggtacatagtaactgaatttctattcctatgagaaatgagaattatttatttgccatcaacacattttatactttgcatctccaaatttattgcggcgagacttgccat

SEQ ID NO: 52024 - DNA, 4288 bp, Homo sapiens
ttttttttttttttttttgaaagctcattcattttaatagttgagcacagttttaagaattccccgtaggaattatctcccaggtcccccgctagaattattcacatacaaagcctgcaagtattcaaatttcacaaacacaattgcaaaagcagaagaactaagaaaaaccttcatagtcttaagattaaaaacaatgcttcatcattcttagagtacctgttaataaatgctaaatactaagtgctaaaaaaaaaaaaaaaaaaaaaaagctaggctggcagctggctcgtggtggctggcagctggtggcttgagagataaaaaggaaacttttataatgacaagcactcttatattcattttttatctcataactggataacacagggcagatctctctactttcataacttagttggttttgaagatagaaaaccttggagaaacactctcggagcaacaaatgaagctggttttaattatgcacataggttagaaagggccaatattctcagactccttataactgaggtaccctctccagttcatactttggtgtaaagaattgaaacaataaacagagcctgactcatagtaataacacaataaatatctgttgaatagatgaattgatacctgaggtgcagtgtgaacaggctggacctaagtgtctctaagcagaaaccatcctggtacatttcagaaaggctatattcgcacagcaggccttatttgtcagacctaccctcagtgccctgaggattctgggagacgaaaggaatagtagtatgacaaagaacaactgagttcttatttagttcatcctagtcccttgaataatccccctcagcatcaaaatttgtgaccagattttaaaagattcaataccatagataatcaaaacaacatcagtatgtgtatacctccttcaattatattctatacatatcaaactttaagaaatctggggcagggaatgaccaatatgagacccccttcccctctctctcccttttgccttttttattttctctcactctcccattctcttttctccttatttccttttcctcctaaaccagtcttctgcccttcccccagctctttctccttcttcctcattaccgaagttgaagagttctaaacatttgtggctccaaggggtggggcaaataaaactggttttagttcccagaaatgggagcagttctaagaacaaaaagaaaaccctgctcttggccacactaacagtgatttagagactctctcttgaacatatattcagaacatactattgagtgtgaatttgatctctgtatagagatttttgtttctgggttgttaattttaggatgatgatgatgatataatacaaataaaccattagtcacacagatgcgatccattttgtgtgtgtatttacggaaaataaggggtgggtgttatttaaaacaaatgaccatatcagatacatatttgtcacaattcctaagttcaatattcataagggctagctggagaagaccactttgggcaggaaattagtctgcatttattttatagcacaaggagcaggactagatgagccagagtcatggcaggaggttaattctccacctccaaccctcttttttcatgcttcaaataagaatgtgcagaacccttcaggcaatcctattggttagtatccttagcctgttcttgaccctagggagaatcagattcctttggtctatgacagtaatagaagttatttctttagataaattttgtttaaggctttaaattaattctatcttggcattgtgtggttctaaattcattcattcatttaacaaaacttacttgagtatccgctctctgccaagcacagtggtaaatgatgagtattacattaactccaatcaatccaatattcttctgtagaaagaacatctggcccagttaccctgctgtattagtaaactggagtatgctcagatgtcaatactgtcactaataagtgttgagacactctcaacatgtattatgtcctaatgatctggaaaatttccttcagtatgataataatgatggcaaaaatgacacaaagtagaaatatatagctactccttggtttccttcttcttttggggaatataaaaactgattttgaggattctgaggcagctcagtattgtggaaagagtatcaaacctggagtaagatgggctagatctggtcacagtttcataatcttagggaagttactgaaccttttgatcctttcccttttgattctaaaattgagtccaagaatcttttccctaacttccactgacattactgagaggaaaaaaatgaaataatgtttgtaaaagtgctctcaaaaccatagagctccacataaatgtaacttatcactatcaaacaatctttgacattcctttaagggaaaaccattacattatagtttctttttgtccatttttaagcagggggtatttatattatcaattagcattatttgagcatttggcagcacaacccacatttatttcctcatggaagagacaagttagaagttttccttgttgaaaatgaaatgcactccccgagggccagactcagagttggagatgctttgtttactcagggtttcagccaaggcttcaggtccacagaggaaaactcctattctggtattagggtgttgacttgcaattgtcttgaattcattatcccagttgggccgtccatacaaagtcttttgtttcaggcctgtgatcacatctttctcctcatcatggtgcacagcaaagtgattggcctgagactcatcccagccagtgaggtagatgttgtagctgaggaagccggcattgttcctttcctgcatctggctctccagcagttgcagcagatctgcaaaccactcaaaggcatgtgtgtcccggcacagccagtagaagtagatctttttgagcttcagattggtggcgttattgcaatatttgtaccagactgacttgagaatggatgcgaagggtgtgaccccaatccctgctcccactaacatcaccacctcatagctgaacacatcttcactggcagtgccaaagggcccatcaaccgctatcttaggtagtttccacgcatcttgaaactcctgcttatcacagccacaagcattgaacagcccctctgtccagtccccaacgatgcggatatggatactaaagaagtcttcctcaggggcggatgtcagtgtaaaagggtgccactccagcttggacacctttgggcacttgacaaaaatgtattgtcccacttccattttgaaccccttcttcttcatctgtagctcgatggttttgaaagggtgagtgaccaccttggtgatgaccaccttctgttgagatcgccaaaaccgcaccaacctctcacagagatacagaaacatgggacccactatccatttccaagtcataggagggtttccagcaaactgagggattgggcattcctttatttttccccattctgagattttttgttcacaaactgttatattatgcacagccaaactctctgcggtctgcccacgtacaattcgttcagctccatggatggcaaggccaatgaagaagatcacaaagagatgatgtgtgtaccaaaagacttcaaagtaagacctccggatggttttggtggaggaagtgataattaatatgaggcacagcgtgatgacaactccagtgatgcctgccaacagggtcacagccaggtacaggcctccttcagggttctttattctctttcgagcaaaattgagataactttcattttgcctgtctccaagttcagagagtgctactgaataaggatcagaattattgactcgggcattcacacaccattccacattaaatagatgtgcaatggtgtgaatcgcagagtgaagtgcaatcatccatgccaccattttatgaaaggtgagattcctgtccagttgtcttcgaactcttgttgagcagcacgcactggaacccctgaggaaggacagcagatttcgacagactggcaagagaatcagcatgcagttgaaattcaggcaggctgcaggggccctggccagtgccagtgctgacccaagaagttttcttgtgtaaaagaacttaggtggaatatcataaacccggtaataccagacaaagaggaagacgttcaaccccagccaaaccagaatagcaaaaatggagagcccctcattcacagcccagttccccgatggtggcagaggaag

SEQ ID NO: 52025 - DNA, 717 bp, Homo sapiens
tttttttttttttgttctgaaaatgctttaatgccaccaagaaatctgaaaggtgcaggaagctgccgccatccccctgggtgcctgggcccaggctgtccctgaagtggccatcagcaggcaggaggcttgcatagccaagcagcccaagcaattgctgacatccttttgtcctctgccctaaatgccccaggttcctcctcagctggggaaagaaagaggaggaagtggaaaaagagtaggaggagggtggttctctccagggcacccttcctgctttgggatggtgactcacccagcaggccctgggagaggcaatttatcagccccaacgaagacaggccaggcctcgggctccagaaggggcagaggaggttcttctgatgcagtggccaggaggagtcaccagcagaagccaaggggcggtgggaccatccctctgctgcctctgtcactttgggcctttctttagtacaacattgtcatactcagttcctggctgccagccagaagcagagaaatcctgcccagctggctggacatgctggaggccagcagggatggtgactcacccagcaggccctgggagaggcaatttatcagccccaacgaagacaggcccaggcctcgggctccagaaggggcagaggaggttcttcctcagctggggaaagaaagaggaggaagtggaaaaagagtaggaggagggtggttctc

SEQ ID NO: 52026 - DNA, 6309 bp, Homo sapiens
ggtgaaggacctgggcagcctcaatgggacgtttgtgaatgacatgcgcatcccggaccagaagtacgtcacgctgaagctcaacgatgtcatccgctttggctacgattccaacatgtatgtgctggagcgtgtgcagcaccgagtcccggaggaggcactcaagcatgaaaagtacaccagccagctgcaggtgagcgtgaagggtttggcgcccaagaggagcgaggcactgccggaacacacaccatactgcgaggcctcgaaccccaggccggagaagggggaccggagaccaggaacagaggcagcctcttaccgcacacccctgtatgggcagccctcctggtggggtgaggacgatggtagcacgctgcctgatgcccagcgccagggagagccctacccagagcgccccaagggacccgtgcagcaggacggggagctccacggcttccgcgcccctgctgagcctcagggctgctcgttccggcgggagcccagctacttcgagatccccacgaaggagaccccgcagccgtcgcagccccccgaggtgccggcacacgagatgcccacgaaggatgcagaggcaggtgggggcggagcggcccctgtggtgcagagccacgcctccttcaccatcgagtttgatgactgcagccctggcaagatgaagatcaaggaccatatcaccaagttttccctgcgccagcggcggcccccgggcaaggaggccacacctggcgagatggtgtcggctgagaccaaggtggccgactggctggtgcagaatgacccgagcctgctgcaccgggttggccctggggatgaccgccacagcaccaagagcgacctgcctgtccacacccgcaccctgaagggccacaagcacgaggacggcacgcagagtgactcagaggaccccctggccaaggcggcctcggccgctggggtgcccttggaggccagcggggggcaggtgcggctgcagaggcagatcaagcgggacccccaggagctactacataaccagcaggcctttgtcatcgagttcttcgacgaggacacgccccgaaagaagcgctcccagtccttcacgcacagcccgtccggggaccccaaggccgacaagcgccgtggcccaacgccggccgatagggaccgccccagtgtcccagccccagtccaggcagggggccgcagctcggggccacagagggccggctcgctcaagcgggagaagacagaggaacggctgggcagcccctcgcccgcctcccgaacccctgcccgccccttcggaagcgtggggcgccgctcccgcctggcccaggacttcatggcccagtgtctgcgggagagctccccggccgcccggcccagccccgagaaggttcctccggtgctgcccgctcccctgacaccccatgggaccagccccgtgggccccccgaccccaccgcccgcccccacggacccccagctgaccaaggcacggaaacaggaggaggatgacagcctcagtgacgcagggacatacaccatcgagaccgaggcgcaggacacggaggtggaggaggctcggaagatgatcgaccaggtctttggggtgttggagtcccctgaactctccagggcatcttcggccacctttcgcccagtcatcagaggggacagagatgagtctgatgacgggggcgtggcccagcggatggcgctactgcaggagtttgcctcccggccactgggtgcggccccccaggcggagcaccagggcctcccggtgccgggctcccctgggggtcagaagtgggtgtcccgctgggccagcctggctgacagctactcagacccgggcctcacagaggatggcctgggacgtagaggcggggagccggaggggtccctgcctgtgcgcatgcggcgacggctccctcagctgcccagtgagagggctgacagccctgcgggcccagagagcagcaggaggagtgggcctgggccaccggagctggacagtgagcagcccagccgcctcttcggccaggaggagttggatcctgacagcctcagcgatgccagtgggtcggacgggggccgaggccccgagccaggggtggagccacaggacagcagacgcaggagcccccaggaggggcccacgtggagcaggggtcggcgctcaccaagggcccccggggagccaactcccgcctctttcttcattggggaccagaatggggacgctgtgttatctaggaaactgcttgcggctccaggggatggggagggcctagggcagacagcccagcccagccccccagcacgggatggcgtctatgtcagtgccaatgggagaatggtcatccagctacggcctggacggtccccagaacccgacggccctgccccagcctttctccggcaagagagcttcactaaggagccagccagtggtcccccagcgcccggcaagcccccccacatctccagccacccgcttctacaggacctggccgctacccgggccgcacgcatggacttccactcccaggacacccacctgatcttgaaggagacggagacggccctggcggccctggaggcccgactcctctctaattctgtggatgccgagtgtgaggggggcagcaccccgaggccgccggaggacgccctgtctggggactcggacgtggacacagccagcaccgtcagcctgcgtagtggcaagagcgggcccagccccacaaccccccagcctctgcgggcacagaaggagatgtcgccatccccgccagctgcacaggacccgggaggcaccgccctggtcagtgcccgtgagcagtcctcagagaggcagcatcacccacttggcccgacggacatgggccgtggagagccggtacggcgctcagccataaggcgtggccacaggccccgagggtccctggattggcccagtgaggagcgtggccctgtcctcgcccacctacccagctcagatgtgatggcctccaaccacgaaacccctgaggccaccggggcaggacggctaggttctcgccggaaaccagcggccccaccgccatccccagctgcccgggaggagcagagccgtagctcagccagctcccagaaggggccgcaggccttgacccgctccaacagcctgtccacccctcgccccacacgggcctcccggctgaggcgggcccggctgggggacgcttcagacactgaggctgcggatggtgagcgggggtccctgggcaaccctgagcccgtgggccggccagctgctgagcaggccaagaagctgtcacgcctggacatcctggccatgccccggaagcgggccggctccttcacagggactagtgaccccgaggcagcccctgcccgcaccagcttctctggccgcagtgtggagttgtgctgtgccagccgcaagcccaccatggccgaagcacgggctgtctccaggaaggctgccaacacagccaccaccacgggtccccgccagcccttcagcagggcccgctcgggcagtgcccgatacacctccaccactcagaccccgagggctggcagctccagccgggctcgttcccgggcccccggcccccgggacacggacgacgatgaggaggagcctgacccttatggtttcatcgtgcagacggcagagattgcggagattgccaggctgagccagacgctggtgaaggacgtggccatcctagcccaggagatccacgatgtggctggggacggtgacacactgggctcctcggagcctgcccacagcgcctccctcagcaacatgcccagcacccccgcctcgaccatctctgcccgggaggagctggtgcagcgcatccccgaggccagcctcaacttccagaaggtgccgcccggctcgctgaactctcgggactttgtaccagaacatgaacgacagctgtgaggacgccctggccaacaagacgcggcctcggaaccgagaggaggtgatcttcgataacctgatgctgaacccggtgtcccagctgtcgcaggccatccgtgagaacacagagcaccttgccgagaagatgaagatcctctttcagaacacagggagagcttgggaggacctggaagccaggatcaacgccgagaacgaggtgcccatcctgaagacatctaacaaggaaatcagctccatcctgaaggaactgaggcgggtgcagaaacagctggaagttatcaatgccatcgtggaccccagtgggagcctggacctgctcacaggaaacaggagcttggccagctctgcacagccggggctggggaagggccgcgtggctgcccagagcccaccctcacccgcctcagccgaggccctgctgccagccctgcccctgaggaatttcccacagcgggccagctgtgggcctcccagcctcccggaccccaccttcctccctgatgccgagaggttcctgatctaggccccagacctggccaggccagcctccctgtgcgtgtgcgtctctgccttccgtccgccgcacacccgcctgcctggccgcaggtggttctccctgaagacccccacatgtgccatatccctgtgggcgggtgcctcccacgcccttgccccctcgtcagctcccagccagcaccctactcaccctgtccagccccatggccacccccacccctgcctcgccccctacaggcctctgggcccagctcctggccaggctgctgccaaggtcaagccctcaagggcattaccccgcctcctcttcatcactgttatttttgtctttagctttaaaggaaagagttgttggtgccattgcaggtgccccctccaggcctgactggctccgccaggcactaacctgccataaccctttgtgctggcctgcggccaggcagaggaagagaggtcgactgtggggtcatttggtgccaaacatggaggtgggcaggctcacctgttcctgggactgtctgagatggcagggcacttgccctggtggctcccacctgaccccaggccttttataggcaggagccccactgcttccagcctctggtgccaacacagttgccaaacccattgagcttggggctgccccgtggaggcctcctgggtatggaccaggggcttgttgagagctgagccatgcacacaggtgcagacaccccccaactcccatgcacacggctagtccaggcgcctccacgctgcaccgtgaggactgcagggcatgtccccgtgaggggctatgggcctctgtaggtgggcttccaaggtcctgggtgcagccgggtgcatggcagcccttctggcgggggtgagcgcacgaccaaagtcactggaagccgggtttccggaagctcgcagcttggcctgcaccacacgccctccccttttggcttcacgccatcaggcctcaagtgggcatgggggcagggacgggcccaggaactgttgttttctcaggattctttcagctgggaacatggcaggtgagcagagcttggtgcctctgccgtggcccctgctggggcagcccgtgttgccggagcctctaagccaaagagcccgttggccgtggttggtgggggtggacgtgggggtgtcccacctggaccagactggcgtgggtgagctccacaccctgcctggcaatggtatgagagtcggacctggacagggccagctgctgggggagcggcactggggactggaggctggaagcgggtggtgtgtgtcccctgtttacttttagctgagctggggttgggtgtacgggttctgttcctctgagccctgcggcccacctgatgtttacgtgtgtgtgtgagggggggcgggggtggcaggtgtccccccctggtccccgccccaagagcctgctgtctgtatggaggaggtgctagcccggtccaccgggctgctgcccacccctgcatgccccagttgcccaccccgcctgcccctggacatgaagtggtcacgcttcatccacggctccttcccacccctcggcagtggctgtgcaatgttttaagttcacaagttcctgctcctccccacactgagctcctttgttcctccccctccagcctttgcctgggaactggtccttgtttgccgggcttctcggagggttcactgtacattcgttctcaggtggtcttgtggctgtctttcggaaaatggttattttatatgatttgtcatggaatttgttctaataaatcattcttctatcacatggcagcacgctggagcctgtcaaa

SEQ ID NO: 52027 - DNA, 1786 bp, Homo sapiens
catctttggaaacctgcatcttgactcattgccagaggagtcagatgtggccactgattctatcccaagagagatcttggtcacaggaacctgccatttgaagtgtgtgtgttacggcattgggaactttgccacctgcatcgtagctagaaaccagctaacgtttttgctgcttttgttggaaaagtgccagattcccagaagtcactgttgggtatatgaccctctgtttagccaacttgaaattgaagtccttaacacccttggtgtgactgttctcagtgagaacgaggaagggaaacggagtattccgcggggagcctaccatcttttacaatgctccattgtgggacggccttgtacaacaatcttttaatggagtaactggtcagtagatgccccttcctaagatggtcatcatttggggaacaagtttccaaaggacttgaagaaaaggttgttggcaaggattctgcagaaaaattatccctacattgcaaagattttaaaaggactggaggagcttgagtttcctcagacttcacaatacatggacatatttaatgatacctctgtccactggttccctgtgcaaaagctagaacagctctccatagatatttgggagtttcgggaagaaccagattatcaggactgtgaggaccttgaaatcatcaggaacaagagagaagatccttctgctactgactgaactcgttgtgaggtactcagtgttggctgaggtagaagctgccaccagagactaaagggaaggctgctatggaggaactacagagaactcctttgccaggaaagaacatcaacttggctgtcctgttttgaggacgataccccacatgaggacttggtataaagattcctgccctacgtggcattgtcccgttttacatccttccctcatgacctggcctgatgtggagtagctcctgagtaaagaagttacccttttgaaggtgatctaaaaatactgtttatttacagtacatccctcttaggggcaagtctctgactggattctggacctgccacagttcacttggccatgtcgatcaggctctgcagtgaggtgggcacccacgtcttctcgccctggacaaagaccactccccggtcgatgtagatcacaatgcggccaaaggtgtagagctgcttcccttcgtgtcgcttcccaatgacgggcatgaagacaatgttgtgctcctcagccttggtctcaatgaggtccttaaagttcatgggcacagagctagcggccacgccaatgcccctctgagccatgttctcagcctcccgcctctcctgcatggcctcgtactggaagtccttcctccgctccgtgtgggtgagataggcaatgttctcccgtgctcctggctgcatgtaggcaccaacgttggaggacaccgcccggttcatgatatcaagtgcctcattaaatttgtccttgacagatggatgtgccagcacttggtctgagaacatcgacttccaacccaggtaccacttggtgatctcctcataatttgggctgttactgagccaagagcacagcacctgaagccacttggggaagaagtgcttttcaagaagtcccaccaggctagagacagagatcatcccttcccagtcaatcacccaatagaatgcatccatgtgctgctggtgggggttaatgactagctcaccaagacacatccccagcttgggcactatgtttttgaccatgaatgcttcccaggagccaggagtgaagcccacgcgtccg

SEQ ID NO: 52028 - DNA, 364 bp, Homo sapiens
ctcctagctgtcccgggtttattcattccctgagcctgaatcctgataagggagcagagtagggtttaagacctcggaccccagaatacaccactgcaattgaattttggttccaccttaaggtaaactacgcagctgctgtgagcctcagtttccctacctatagaaagaggatcgtagtggggaattgttgcaggggttaaatgagattgtacggatcgtggagcagcgcctggcgtgtggtaaacgctcaacttatgcgggttgtaactgcctgaggcgtttccttcggcgcgccacttggccttctctttctaaatattagcataataaatataaatggacccagaacgcgagggggcag

SEQ ID NO: 52029 - DNA, 246 bp, Homo sapiens
  misc_feature (1)...(246): n = a,t,c or g
attttaatagtaactccaattcagtaaatggtatcactgtttaccccttttaaagatatgattagacttcgttagtaatgttcaacttttcacaaagatggtgagtgccatcttaaaacttactggagattggttttatatttagatttatataactggttatgtgaatataaaattgcttnactgtnttanaaccaancaagattcacctgtgntntgngtnnnngnnnatttgntntnaaagga

SEQ ID NO: 52030 - DNA, 139 bp, Homo sapiens
ggaagagctagcaccgagcttcaataccctgcagattaaaaaaaaagtttggattcacgtggcttctgccacagaaaggtacctcccgtttctcattcagctcttcaaattccctttagtggtcttagctgatttttaa

SEQ ID NO: 52031 - DNA, 449 bp, Homo sapiens
cttcctactggttcatgcttctcccccattcccaccctctctgcccggcctcccgctcccgccctttctcctcatgcacccggcctcgtctctgtagtctctgcacttgtctcccattaaggtcccatccatggggggggcggaagcgggagccaaaaggctgccgtcgaggaaggacacctccctgtcggagagtgaggggccccgccagcccgattggggattgaggaggagagcacagccctcagcatcaacgaggagatgcagcgcatgctcaaccagctgagggagtatgattttgaggacgactgtgacagcctgacttgggaggagactgaggagaccctgctgctttgggaggatttctcaggctatgccatggcagctgcagaggcccagggagagcaggaagatagcctggagaaggtgattaaagatacggagtccct

SEQ ID NO: 52032 - DNA, 449 bp, Homo sapiens
aacagagaaaaatgaacttgagcctgattcactattaactgcagtgtctgcttcaggttattcctgcttttcagaagcagatgaggaagacattggatccacagctgctacaccctgtatctgagcagttcagttcatcacagaagcaaaaagctgaaactttccctttgatgtctccgcttgaagacttaagtctgccgccttcaacagataaatcagagaaagcagaaattaagccagagattccaacaacctcaacatctgtatctgaatatctcattttggcacagaagcagaaaactcaagcatatttaagagcctgagtctgaagacttgattccttcacatttaaccagtgaagtggagaagggagaaagggaggcaagttcatcagtagctgcaatacctgctgctttacctgcacaatcatctatagtaaaggaagaacc

SEQ ID NO: 52033 - DNA, 1632 bp, Homo sapiens
  misc_feature (1)...(1632): n = a,t,c or g
gagaaaacaggtgagttgggattgagaactcctgattttcatccctggtttagattcttggccaaagtagtggtagagttaatctttgcttgtggaaagcattaactatgttgcagattcagttgtgttacattattgtgggttctataacaacatattcctcatggacactttaccagagttgctcacacctttttcaatttctcatcccttttggaggaatgaacatgagacttaactgcctttaagcctaaaacggacatgctttccaatgacaagagattttctaaagagaagtcttgggagcacatctgttaatacctgagcatctactctgtctcaagaaaaaaaaaacaaaaacaaaaacagaactctgcctcatagcgtcttttaagttatacactggacctatcctttcctcactgacagacattttaaaaattttttggtaaggcctagttcatataaaatgtaatccaagccaaaagttaacaagaataaggggaggaaaggggactccaatagcagagaaaggtatttacctgggatatacactgcaagaaaatcaaagctataagaaacgtccatgaatagtagccataaggcatcagagtgataaaattcctgtccctaggagggaatattggagtttgccagagcaaacagaatgagagagacagagaggtttattgtannnnnnnnnnnnnnnnnnnnnnnnnnnnnnnnnnnnnnnnnnnnnnnnnnnnnnnnnnnnnnnnnnnnnnnnnnnnnnnnnnnnnnnnnnnnnaagtccaatggccagagaagcaagtgtactgatatccaagagcaggagaaaatagatgtcccagaacaagcagagaggctgattttgtccttcctctgcctttttgtttcatatggggcactgaatggactgatgcccatccacattagtgagggtggatcttctttactcagtctaccagtagaaatgtcaatgacttccannnnnnnnnnnnnnnnnnnnnnnnnnnnnnnnnnnnnnnnnnnnnnnnnnnnnnnnnnnnnnnnnnnnnnnnnnnnnnnaaattaaccatcacagaaggagactggccttactctgaaattaggaaactaaagaagtgaccagaatggagactaggtagagacaactagttctctaccaaacatgtacagttattcgttggtatctgaaggggattgggttccaggaactctcagggataccaaaatctgcaggtgctcaagtcatttatataaaatattacagtatttgcatataacctttgcacatcttccatatacttctcaatcatctctacattaccttataataatgaatgtgtaaatgctatgaaaatagttactacactattgtttatttgtatttttattgaattgttttggggtggggggcagctgtatctttcttagtaatagaacccctggttttagctgggcacatgactgccctcaataaagattaaagtaccccagccttccttgagattgtggccatgtgactgaactttagacagtgagatataagcagatatcttctgtggcagtgttaggaaactattaaagacagtaagaacattgccctttgccttctttttcctttcttca

SEQ ID NO: 52034 - DNA, 446 bp, Homo sapiens
  misc_feature (1)...(446): n = a,t,c or g
atagaatcacagatctgagagttgaaagaccagcactggtcactcgggcccaccctctccagtgccctaggggaacatgccagtgcagttccagtttgcctttgttaatagggccaaaaaaagtctgaggcttggcttccaaggagtattagagttcaacaaattctcattctcaataggcaggcgtgaaacactcttaacccttggctcactccaccagcacatgtgtttgaagccccttagtcttcactaacacactttctaaagaagtagaaggaagttgtgatatcagcactgaagggtggtgaggaaaaaaatgggtgggacccaaacaccaatggganggaaggtcatgggacagtatttgactcccagaacattaacaagtgnactgtgctttttccctnttatnatttcccccttatcgccacccccacaggcttctt

SEQ ID NO: 52035 - DNA, 687 bp, Homo sapiens
tttttttttttggggctgtgactgtatttacttcattcttgaatcccgcgtccccgtggctgggggctgacacatccctgggcaccactgtgacttcctgtgggtcccttcccttctgtccctgactctgtagaccccccacaggaagggtcctaggtagggggaggttcctcctcccttgaaaccctgggccactctgtcaaggcaaagcctctgggcccagcaccttgtaaaggctttgatgagaggagctctggcttttgctcagggcctttggaccccaccctccagcccccaggaatgcaggcgctcaaagcctgtggctaggctgcccgaagcgcgtgccgcagttcttctggagtgggagcagggggacagagctttgggtagaggagggtcacctgcaaagctggaatgccaggggagtgggcggtgcctccagctcctgggggccagggtgtctccatacctcatgggcctgagcctgggcaggggtctggagtgcacatagcccccaggcagggagagggcagtgacaggacagagccactcatctgtcccaaagctgcacccaaggggtgtcagcaaccccaacctactgacctactttgggaccacaggcccatctagtgcaaatgaggcccagaaaggagaaatgctttgctcaacagccacagtaggctgacg

SEQ ID NO: 52036 - DNA, 2016 bp, Homo sapiens
ggaagttctagtagtggtagttccagtagcaatagcagaactagtagtactagtagtactgtctctagctcttcatacagttctagctcaggtagtagtcgtacttcttctcggtcttcttctcctaaaaggaaaaagagacacagtaggagtagatctccaacaatcaaagctagacgtagcaggagtagaagctattctcgcagaattaaaatagagagcaatagggctagggtaaagattagagatagaaggagatctaatagaaatagcattgaaagagaaagacgacgaaatcggagtccttcccgagagagacgtagaagtagaagtcgctcaagggatagacgaaccaatcgtgccagtcgcagtaggagtcgagataggcgtaaaattgatgatcaacgtggaaatcttagtgggaacagtcataagcataaaggtgaggctaaagaacaagagaggaaaaaggagaggagtcgaagtatagataaagataggaaaaagaaagacaaagaaagggaacgtgaacaggataaaagaaaagagaaacaaaaaagggaagaaaaagattttaagttcagtagtcaggatgatagattaaaaaggaaacgagaaagtgaaagaacattttctaggagtggttctatatctgttaaaatcataagacatgattctagacaggatagtaagaaaagtactaccaaagatagtaaaaaacattcaggctctgattctagtggaaggagcagttctgagtctccaggaagtagcaaagaaaagaaggctaagaagcctaaacatagtcgatcgcgatccgtggagaaatctcaaaggtctggtaagaaggcaagccgcaaacacaagtctaagtcccgatcaaggtagtatactttttaaagtattttgtctgatttttaaaaaaaattgactgaatttattcaaagttgaaagtgtcctttctctctctctttaataaactcagtttggtacttgataaataatcatagtcttaaatgttagaaatcctatataatattatttatttaaaattgcagatttttaatttaaaatacatttttatttttaaattttgtcttttcccttttttttcagatcaacaacccctccccgtcgtaaacgctgaggaatgatgtggcaagaatgccatgatgttctttaaaaaaattccatgagttttaagggcttgtctcattatagaggcacattgtggctgtgtaggtgaaaccagaatcttttttttttttaatctgtaaataggtgtactttttccaatgctgctccaagttacttaataggatttctttgtattacgtttttttcaaaaaatatagtgcataataagactataaacatgccattctctttcagctgtaatgttcttaaaattattcttgaatgtactgtgatgtcaataaagctctttagttcatttttgttaaactcttgcaccttaattttatggttttaatctaaggaacgtacttttataaaaaggcagctggaattttgtataacaggttttaaaggtaccttctctcacctcccccaaagaaaatggtttttacttaatagtttgtcaaagtttgtaaattgtacccatggacttttgccagattccaactttaagggtatgaaagagggctagaaatagacctttacttttcatttggaagtatttgacaactttctaaacttttcttcctattttggggattttcaagtaatatattctctgtgtgtataacgtgtggttcactcctgtaaaatgaaattgctggaatcaatcaagccagtgcaccagtagagttatttgtaaggaacgattgtgtttgacagtaatagtcaagtctggaactatattctacagtcacccacttctgttttagaagcattttgaaacactttttggggttatagaaataagactcatgattcaatatatttatttatatttttaaagtataatatgacctccaatcaatggaggaatgc

SEQ ID NO: 52037 - DNA, 671 bp, Homo sapiens
ggaaataacgtttctaggttttaaatgtgagccgtaaactgaagctacttcagttaaaaaaaaaaaaatcaatacttaaactgtagggaaaaggtggattggtgccagagaaaacattatttaatagtgtcagaacatggaactgcaacacagtttgtagcaaggcactgagaaaaacccacaactaatccttcatcgcagctgtctgaactcttgatcatctgccatcccccaaacagtgacttctttttttctggtgactccaggcctgaactccccttatagcctcaggctgcagtgtccttcccagctgtgtgagaaaatgaaagccgacgtccacagggacccaggcagggttgggtgttgtgactcactccacctctgtgccctgcagaggtactgttgggtccttgtcttgtgagcctggggtgagctctctgtacatgttgttgttccacgtatgggttgacttggcatgctggggggtcctcgttcactctctgaagttggcctcctttcactggggattgaaaagcacctccacccctaccctagtgatgtcccctgaggacccgggtgatagtacagtcaatattgtcagtactttgctttgattgaaggctgtagagctgagttaccaaaatttctatttcaaaggaaaccaaacctta

SEQ ID NO: 52038 - DNA, 1608 bp, Homo sapiens
ggaaggtggcggtggtgaaggtgcaggccgttggggcggctcataggcaggtgactatgaaaggcttatatttccaacagagttccacagatgaagaaataacatttgtatttcaagaaaaggaagatcttcctgttacagaggataactttgtgaaacttcaagttaaagcttgtgctctgagccagataaatacaaagcttctggcagaaatgaagatgaaaaaggatttatttcctgttgggagagaaattgctggaattgtattagatgttggaagcaaggtatcattctttcaaccagatgatgaagtagttggaattttgcccctgggactctgaagaccctgggactttgtgaagttgttagagtacatgagcattacttggttcataaaccagaaaaggtcacatggacggaagcagcaggaagcattcgggatgggagtgcgtgcctatacagctctgcattatctttctcatctctctcctgggggaaatcagtgctgataatgggtgggagcaagtgccatttggtacaatagctattcagttagcacatcatagaggagccaaagtgatttcaacagcatgcagccttgaagataagcagtgccttgaaagattcagacctcccatagcccgagtgattgatgtatctaatgggaaagttcatgttgctgaaagctgtttggaagaaacaggtggcctgggagtagatattgtcctagatgctggagtgagattatatagtaaagatgatgaaccagctgtaaaactacaactactaccacataaacatgatatcatcacacttcttggtgttggaggccactgggtaacaacagaagaaaaccttcagttggatcctccagatagccactgccttttcctcaagggagcaacgttagctttcctgaatgatgaagtttggaatttgtcaaatgtacaacagggaaaatatctttgtatcttaaaggatgtgatggagaagttatcaactggtgttttcagacctcagttggatgaacccattccactgtatgaggcaaaagtttccatggaagctgttcagaaaaatcaaggaagaaaaaagcaagttgttcaattttaattttcttctttctcagacctcagtcggatgaacatattccagtatttgaagccagaattttctttggaaattgttgagaaaaaccaaggaagataaaacaagttgcatttttaagcacgtttctctgctaagacaagatgctcagttgacacatttgaaaagtgtttgaaaaattcttgtgcaaatgatcaagataattctataattaacatcttaagggaatttttctaaaaaccttttcattgtttctatatattttgcccctgctataaaattccttccatgaagaaaactgctgctttcagcaaaagtcacactactcttgataaaagctgttgcaggcctttgctaagctatcaaagtaacgtattaattttgtatcaactccgttctcaacaccttccttaagtctttgctgtcataatttaagcatttgagtatattttgaagtcttaaaagacttagccataggcacttaaaaaaaaaaaaaaaaaa

SEQ ID NO: 52039 - DNA, 503 bp, Homo sapiens
tttcatggtaaggagtttggattttattcagataatgatcagaagcctcagagggttttgagcaaaggtctgacaggacccgacatccgttttaaggtattttctctggctcctgtgtggacaatagattgtcacctcttccagcgggagaggtggagatgatgggcatagtctggggtgatagtggtagatttgctcttgttcctagtgtaatccttgaaattagtggtgaaactggctgtggatggctcttgcgttggaaggctttctccaggttgtaatctggtcatgagcagcctttctgacagactagagcaggctggatcactggctcccatgggcatttgccagcctgtggggagggtagtcatgcgctgctgttgtactactgttggtgtttaagtgcaccagtggaggcgctaacttgccggagggttcaagatggtctcggggttgtggggggcatgatccagataggacgtggcagctgagctagccttagg

SEQ ID NO: 52040 - DNA, 742 bp, Homo sapiens
accatttctcacagaaacagcattcctaatggtagacaatttccaggccagcttacttcaccagcatgtaatagtctaatccaactcagaggacagaaacacagcttcatcccacataagcaggagggtggtggtcacagggatctcaaagtcacttgcctctaagtgacatttgctaacagacaaatgcctctacaagaggccccctaagattccaaggaaaggattcacaggaacgcattagtaaaatagcatcctagtgaagcaaatttgaaattatacacacacatcagacaaaaaggaaaatcgggttctacatcagcaatctgtcttaacttcagcatcacacaactacctatgaagaagacagaacaagaattcagttcttctggtctgtacttctcagaaatgtataaacaatttttatcaacattaaaactgtcctagcaaaaccaaacaatcactatcttttcacacagctgacactttcccaccatttgccatctcatcgctggagggcacagaaaaacgacactcaaaatgcttgtgcttttgaggctctgctatatacactaagtgaactactggcttccagttgggaatggagggctgaggacaccctaattcagtgcttccgcagctagcactcttcagccttccctgacgttccccttacctgagctgggggatgaagagcagggtgacagtgggagtaagtacagaattcctcaagccttggtag

SEQ ID NO: 52041 - DNA, 878 bp, Homo sapiens
tttttttttttttttttttagagatcataaatacttttaatatcagataaatcattaagaaattgcattctgtacttgatgaccacacgggaaccttgctagagtcaagagaacttgtcactagtaattatgaagacacctttacggtgagcgttattaaaaccctactagaggttttgggtgggactcaagagcaaggggtggccacctgtggacgagggttccctgttgttaacagaacacgttgcccacctcgcaagtatgcagcccaatcagtccccagggtctcggttcccgttgcgcccttccccatggccactgcgctcattcatgagcctagggtgatcaggcctccggcctataaagaactgcaggatcagtgcggctcttttctcgagatggtaggtggctctgaaaagagcctttatgtccatcaaagggagcccggggtgcggcgggcggcctcacttgcccttggccttgtggtggctctcagtcttcttgggcagcagtacggcctggatgttgggcaggacgccaccctgcgcgatggtcacgcggcccagcagcttgttgagctcctcgtcgttgcggacggccagctgcaggtggcgcggggatgatgcgcgtcttcttgttgtcgcgcccggttgccggcaagctccaggatctcggcagtcaagtactcgagcaccgcggccagatagaccgcgcgccgcgcccacgcgctccgaatagttgccttgcggagcaaccggtgcacgcggccacggggaactgcagccgccgcgcgacgagcgcgacttagccttggcgcgctgccttgccaccctgcttaccacgaccggacatttccgagtcaaggaaaaaagacaacg

SEQ ID NO: 52042 - DNA, 373 bp, Homo sapiens
  misc_feature (1)...(373): n = a,t,c or g
gcgggcacgcggttcctttttgcgagctttccgagtgccaggcgccggccggctgcgaagacgcggtgggccgcccctccgattgaaatcacagaagatattcgtgttcttcttaagagaaaaagaggacattttagctttctcagttgaaggcgtactttattgtcggcttccaaagattacnaacttttatctgtatcactaagattgaactgccttggctgtactgctattcttactgctgcttctattattgccttcttcagcacaataaggctttcaaaagccaaagaataacaagaaataagcaccattttagnagcctttccactatggaaacctaagctaaatgtggtcaccattaatttggttg

SEQ ID NO: 52043 - DNA, 1757 bp, Homo sapiens
gcaagtgttacctttatttatttcatatatgtatatttccagaaggacaacggttgactggtattaagaccaaaccagtccatcagaatatcatcgaccaaaatgagaatttccctgttgggccattagggttggagtcttattaaccctcccctattcctcgggcccataatgcattatgagatagaggagaagaaaccaggcacagaagactctccctgtcatgctttaaccccataccctgtgctccacttatggaggacgtctccccagttcttgccactcccacaatcagagaaggtgaggttcataattatttcaggcctcatcttccaagggaacctttaactgggcaacagagattggttgggccatcatgagatgctactttctagctctatgaacataaaatcacgtaagaaaaaagcaaacaacacaaatacatgaaagccatttactcctggtgaattcctcagggtcccaggttcaacactttccgtgatgtcagagtactcagtcagggatgatggggacagggtgtcagaacagtcttgatggtcttgccagcaacagctttttcttattttccataatttggtcttagtcgttctccagttgtcttcatgtaaataaagtggcccatggcaatcatgattctgtaattgttatagtgcctttgtaagttgacagtttccaaatccccttactcatacgacccctgtgaaggggggtgtgaaggggttggtgggcttgtgcatatgagggaatgtgaacgatttcattatgaccgaattatgctttactcaataagcactcaaacactaccatctcacttgtagtagaagtgctagggatgcaaccaagagactggttgaataacgggaaggttaaatgcatgagtattttaatagaaaaaaatattaaaaacaaaaccaaaactcgtatggaaagaggcttctgactaggccctcctttctagcagtgtttggcacctgataacaatttgacgctgggggagggagcagcttgacaaggtccacatgaagcagccttgagatttttcgcccacttccatttctcctcagcatcaaaggaaagtgcatggtaagaagtgaatcagacagcgagggatctatgcagttatcctgtgaatgtgtggcaaagccatcaggacgcaaacctcctgtcttgagtccagagctgtgtgctttaagatttgaccccagtaaagacagaatccttcaggctcgtcccttcccaaacctaaggggctgtccttggccactttcaacttgaagctgttgagcagtctttaggatatgtaacagcctattttttggacgatataggaaccacgacctcttaagtctcttagttctcctactttatacccatgatggtagaggcaggtgcactccgagtgaaggagaagcctcaattcaggttgtactttggatgaaacatcccctcaaggcgtagaggaaggctgagaggttctgcccaggctcgtgtttagttgcaggaagaggtaatgtcagatctgagcaggtcagggagactccctcgaaaaggtcttcccaggctgacaagagggcttttcctcttcctcacctcccttaggtgagggctgaaagcagatctcctcacatggggacctcgctaggaggtcttttctgagtgggtcctctgatgcctaattaagtgatatcctctgctgaagctttttccacaggtagggcacgtgaatggtttctccc

SEQ ID NO: 52044 - DNA, 2983 bp, Homo sapiens
gctgctgctccagatgaggtgatggcaacggccaacttcggcaagatccagatcgggatttacgtggagatcaagcgcagtccggccgaatacatcaagcaatggtaacatctttaaatgaagataatgaaagtgtaactgttgaatggatagaaaatggagatacaaaaggcaaagagattgacctggagagcatcttttcacttaaccctgaccttgttcctgatgaagaaattgaacccagtccagaaacacctccacctccagcatcctcagccaaagtaaacaaaattgtaaagaatcgacggactgtagcttctattaagaatgaccctccttcaagagataatagagtggttggttcagcacgtgcacggcccagtcaatttcctgaacagtcttcctctgcacaacagaatggtagtgtttcagatatatctccagttcaagctgcaaaaaaggaatttggacccccttcacgtagaaaatctaattgtgtgaaagaagtagaaaaactgcaagaaaaacgagagaaaaggagattgcaacagcaagaacttagagaaaaaagagcccaggacgttgatgctacaaacccaaattatgaaattatgtgtatgatcagagactttagaggaagtttggattatagaccattaacaacagcagatcctattgatgaacataggatatgtgtgtgtgtaagaaaacgaccactcaataaaaaagaaactcaaatgaaagatcttgatgtaatcacaattcctagtaaagatgttgtgatggtacatgaaccaaaacaaaaagtagatttaacaaggtacctagaaaaccaaacatttcgttttgattatgcctttgatgactcagctcctaatgaaatggtttacaggtttactgctaaaccactagtggaaactatatttgaaaggggaatggctacatgctttgcttatgggcagactggaagtggaaaaactcatactatgggtggtgacttttcaggaaagaaccaagattgttctaaaggaatttatgcattagcagctcgagatgtctttttaatgctaaagaagccaaactataagaagctagaacttcaagtatatgcaaccttctttgaaatttatagtggaaaggtgtttgacttgctaaacaggaaaacaaaattaagagttctagaagatggaaaacagcaggttcaagtggtgggattacaggaacgggaggtcaaatgtgttgaagatgtactgaaactcattgacataggcaacagttgcagaacatccggtcaaacatctgcaaatgcacattcatctcggagccatgcagtgtttcagattattcttagaaggaaaggaaaactacatggcaaattttctctcattgatttggctggaaatgaaagaggagctgatacttccagtgcggacaggcaaactaggcttgaaggtgctgaaattaataaaagccttttagcactcaaggagtgcatcagagccttaggtagaaataaacctcatactcctttccgtgcaagtaaactcactcaggtgttaagagattctttcataggtgaaaactctcgtacctgcatgattgccacaatctctccaggaatggcatcctgtgaaaatactcttaatacattaagatatgcaaatagggtcaaagaattgactgtagatccaactgctgctggtgatgttcgtccaataatgcaccatccaccaaaccagattgatgacttagagacacagtggggtgtggggagttcccctcagagagatgatctaaaacttctttgtgaacaaaatgaagaagaagtctctccacagttgtttactttccacgaagctgtttcacaaatggtagaaatggaagaacaagttgtagaagatcacagggcagtgttccaggaatctattcggtggttagaagatgaaaaggccctcttagagatgactgaagaagtagattatgatgtcgattcatatgctacacaacttgaagctattcttgagcaaaaaatagacattttaactgaactgcgggataaagtgaaatctttccgtgcagctctacaagaggaggaacaagccaggcaaggcaaatcaacccgaagagaccccgtgccctttaaaccgggcatttgctgctaaaggatacccagaaccctcactactgtaacatacaacggttcagctgtaagggccatttgaaagtttggaattttaagtgtctgtggaaaatgttttgtccttcacctgaattacatttcaattttgtgaaacactcttttgtctacaaaatgcttctagtccaggaggcacaaccaagaactgggattaatgaagcattttgtttcatttacacaaatagtgatttacttttggagatccttgtcagttttattttctatttgatgaagtaagactgtggactcaatccagagccagatagtaggggaagccacagcatttccttttaactcagttcaatttttgtagtgagactgagcagttttaaatcctttgccgtgcatgcatacctcatcagtgattgtacataccttgcccactcctagagacagctgtgctcaccttttcctgctttgtgccttgattaaggctactgaccctaaatttctgaagcacagccaagaaaaattacattccttgtcattgtaaattacctttgtgtgtacatttttactgtatttgagacattttttgtgtgtgactagttaattttgcaggatgtgccatatcattgaacggaactaaagtctgtgacagtggatatagctgctggaccattccatcttatatgtaaagaaatctggaattattattttaaaaccatataacatgtgattataatttttcttagcattttctttgtaaagaactacaatataaactagttggtgtataataaaaagtaatgaaattctgagaagagttttatcttaggaaaatac

SEQ ID NO: 52045 - DNA, 1482 bp, Homo sapiens
  misc_feature (1)...(1482): n = a,t,c or g
tgtttctgtttctcttcaggcaagtccatagatagaggaaaatcagacacaggctggtgacaactggtatagatacagtgagcatggaatgagaaccacctacaacattgcctgattatttttaagtttatatcaaaactgcttcacaagttcacaaaagttgtcactcttaatttgggttaagaaaagtaatagtattatctctgctgaagttgattgtttttctcttttaccatgactgttggccaaaagcaagctgaacctctgcactttggaaacaaagcacagtatggaatctttaacccaagcacttaggtttcaccactgaggattctacatcatctggcaagggaaatggcaccaaacttttgggtcccaatgttggattcttcaaaagtgcatagcaaaacttttgtgctatgccgcttgatgtaacttttaaagatgttatcaaatgttaaatgcctcattctgcgttaatttgctgttggctgttttgngaacacaaaataaacttgagattttttttttttttttttttgtgaaactcctccaaagccaatttcagcccttggtaagcttgcagacagttactgatcttaaatttaattttaaaagacaatgtatcttaattataatttagctttttaaaacaatgagatagctttacatttcccctttgtttgaatgagaaaatggatcttgggttgctatgctagaacacttgtagattgctgggtcctttgtaagggggccatggacacaccacactttctttcaatccttacatttgaagcattgatattcttcaaaaccttcttgttacatgtgcgcaatagaaatttctaatgttcatgacttttatctttcctgtccatcaattcactggttgtaaatgcttcctgagagctgtctaggtctgtatcccagattgttgcttaatgacatctgacagatgcattgttttctgaaatcagcttaagacaccaattgtggcaactggaaactcattacctgctgcattggatcaactatggaagttggagcaggggtgggcggaggtcaccctaaccaatcaatggaaggcaactcacacctgctccaagcctcagctttgagaaacaaacacgtttataagaaaaaatatatagctattattacagaagtgaatatgttgtgctctcttactgctcttggtgcattgacagtttctgtatctcaaccctattcatctttatgaaaaagcattctgaagatctatcctcagcactgctgagtgtgcagtcacactttcctaccaacccccttcttaccatctctagctgccatttgtggggggaacaaaacaagggaatcctgattgtgtacagtataaattgtattatattttttgtacttatgttttatgtaaatagtttgtctcattcaattgtatgtgagcattgaaataaatcctaccatttaggggaaaaaaaaaaaaaa

SEQ ID NO: 52046 - DNA, 469 bp, Homo sapiens
ttagggaattgcttggacctggtgacaagggctcctgttcaatagtggtgttggggagagagagagcagtgattatagaccgagagagtaggagttgaggtgaggtgaaggaggtgctgggggtgagaatgtcgcctttcccccgtgggttttggatcactaattcaaggctcttctggatgtttctctgggttggggctggagttcaatgaggtttatttttagctgggcccacccagatacactcagccagaatacctagatttagtacccaaactcttcttagtctgaaatctgctggatttctggcctaagggagaggctcccatccttcgttccccagccagcctaggacttcgaatgtggagcctgaagatctaagatcctaacatgtacattttatgtaaatatgtgcatatttgtacataaaatgatattctgtttttaaataaacagacaaaacttgttc

SEQ ID NO: 52047 - DNA, 1089 bp, Homo sapiens
tttttttagaaaatgttattcttttattatttcaaggaggtaatacatagcccaatatggcaaagcaaaagggaattagaggcagcaaatggccaggtttttctaagcgcctcatgctgcatctctgagctcctgtctgcccgcagcccacagctgcttacatgaaggccaggtcagtagacagatggcccaacttgatactccactgactgagaaagggctcaatgtgcagcacagcagaggcactgccaggaccccagcacgctgggcggcaccccacgctgccaccaccagctacagaggctagtgccttagtagcagccagtgtgtctagcacttgattttattcctgtgagcctagagtgggcaggacgtgaataaatcctgagtcataagttaaggtgaaagacttagtagtgttaatactcttggtgagaaaagacaacacagtcttggaggagagtgggcttggagtctggtggaagaaagatagaaacccccagaagggcctcggcctgcaggcactgccttgaggccatcagagggggttttcacggtacatgatagggaggagtgaggcaggtgggcactggagggctgtttcctctggcacagttgaactagagggtcactttccactcattaattggtttcctaggtctaagtcaccacacctggggctgaagcaagtcttgcctgtgcaccaagcgtggccttggaccctggagagatgcaaggctcagttctccagtgttgaagtggaaggactcccaactgaaggagatctttctctcccccacctcccagctcttttccccttacaaatgacccagggtgcaagtcgaagaggcagaaggacctccctggtgcaactccaccacagtcttacagagaactcatcttggtgggacccaaagcccagccttggcatgaagcagacttattccacccatcggagggcacccagtctggtgactgaatggtggcgtgcaagtgggagtcagcagtggctctggatgccgtaatactcagatgccattcatctctgtgtgatcgtcctggctggagagctggtgaggagggactgct

SEQ ID NO: 52048 - DNA, 419 bp, Homo sapiens
agaaagtgatcagaagtagtaaactatctttgaggaaatactgtaaccccagaatatttcctcttgacttctttttgtaacaaggataatttagggatttataaagttgtaaggatttcactgttttcggactgcctataataatagcacattaaccttcacataataagaaatctggacaagttcagttacacagtatgatgaatacttgaattaggaacattgtggaaaatttgctttagagaatcaaggcagtagtttggtatttggtgcttattaaaaatgtggtttgttttgaactggaagcaagttgaccagggacttatgactaatgtgatgctaagttccacttggccccttttaaaatcctcagtgttttgtgtatcttcaaaaggcacatacacgtttttaagtcgacc

SEQ ID NO: 52049 - DNA, 423 bp, Homo sapiens
gaacttggttttaattagtgaactgctgagagacagagctattctccatgtactggcaagacctgatttctgagcatttaatatggatgccgtgggagtacaaaagtggagtgtggcctgagtaatgcattatgggtggtttaccatttcttgaggtaaaagcatcacatgaacttgtaaaggaatttaaaaatcctactttcataataagttgcataggtttaataatttttaattatatggcttgagtttaaattgtaataggcgtaactaattttaactctataatgtgttcattctggaataatcctaaacatatgaattatgtttgcatgttcacttccaagagcctttttttgaaaaaaagctttttttgaatcatcaagtctttcacatttaaataaagtgtttgaaagctttaaa

SEQ ID NO: 52050 - DNA, 723 bp, Homo sapiens
atctcccttgcacagttctcctcctcggcctgcccaagagtccaccaggccatggacgcagtggctgtgtatcatggcaaaatcagcagggaaaccggcgagaagctcctgcttgccactgggctggatggcagctatttgctgagggacagcgagagcgtgccaggcgtgtactgcctatgtgtgctgtatcacggttacatttatacataccgagtgtcccagacagaaacaggttcttggagtgctgagacagcacctggggtacataaaagatatttccggaaaataaaaaatctcattttcagcatttccagaagccagatcaaggcattgtaatacctctgcagtatccagttgagaagaagtcctcagctagaagtacacaaggtactacagggataagagaagatcctgatgtctgcctgaaagccccatgaagaaaaataaaacaccttgtactttattttctataatttaaatatatgctaagtcttatatattgtagataatacagttcggtgagctacaaatgcatttctaaagccattgtagtcctgtaatggaagcatctagcatgtcgtcaaagctgaaatggacttttgtacatagtgaggagctttgaaacgaggattgggaaaaagtaattccgtaggttattttcagttattatatttacaaatgggaaacaaaaggatgaatactttataaaggattaatgtc

SEQ ID NO: 52051 - DNA, 393 bp, Homo sapiens
tgaaatgaaatgaaataatgaaatgagatgaaaagatgctatgaattgatgagatgaaatgaaatcatgagatgaaatgatgagatgaaatcatgagatgatgagacggagtgaaatgatgaaatgatgagatgagatgatgaaatgaaatggtgagatgaaatgatgagatgaaatgaaatagtgaaatgaaattgaaataaaatcgaaatgagagatgaaatgatgagatgatgaaattgatgactgatgagatgtgatgagatgaaatgatgacatgagatgagatgacatgaaataatgaaatgaaattgaaatgagataagatacgagatgagatgatatgatgacatgacatgatgaaatgatgagatacgatgaccagagttgatg

SEQ ID NO: 52052 - DNA, 1443 bp, Homo sapiens
  misc_feature (1)...(1443): n = a,t,c or g
gccgcttgagcatggcccgctcatggccatccacgatgtcctctgacagtgtgaggatgtactggccctggncagaggagatgggttcagcaggtggtcagcccacagaggactgcactctgcatcccacacacctgtctcccctgcctgcctccctaccttgtagtagttgatgagattgaggtactgcagagtggagatgacatcctccttcttgatgctggtgatttcactaatctcactgtgggagagcacaggtcaggttccctgaggacctttatctgtccccaggagccctgagagagaaagcccaggaacagacaagccatgccatgtacccccaggtagacagcgccaggctcacttgatggtgatctgtggcctctccccgctctccgacttcagccccatcaggatctccaggatggtctgggaccagtagcttcgataggataggaggccaaggtctgagaggggcttctcaggggtccctgttttcccttccactttggagagttcatagcctaaagcaatggagcaggagagggtgagtaagaggtcacagatgaacataagcaacatttaaaaacacaggttgccaaggcaggctgcctagttcctatcaatggccctgccacttggcagttctatgccctccacttctctgtgcctcagttccctcaggaagaactgagtattcactctttccgtgcgctgagcacagtggagggcatgagggcactgagaggagcagctgcagtcaaccatgagggtgatcagaggccagtgaaggcttatgggcaggggatgcagagaaaatggctcatgggaagaaggggcctccaattttccntntcctcccgggctctgtgtctagccatgtaaggaagtggagacagattcctgtctctaatccagacctgagaatgcttgaattctcaaagtcctcctagctgggaccttgggagtgtcacctgctgtaagacttgagtggcctgactgggtggttgtgaggatgcaaggagaaaaggtgcaccaaggtgcttcctaagtcggggagaccattcctgggagccacgtgactgacccccaccatggctctttccctccaactcgtgctgatagctggccgctgggaggccgtccccagtgagatcctcagaccctgcacagccctgagtggcttcacatctcttggtcagtgtcttcattctccccagtcagggacctgggatgtttgttacttctagaagcccttcctcaccctcataatggaccttagccccttgctggtcccactcacatcccgtctccattgctgtctgagttccaagactgagtttcttcaagcatccacttgtgctaccaggctgagaagttctgaggatgtgaccccatctgggcatcatttaaccaataaaatttctcgaatggaccataaaa

SEQ ID NO: 52053 - DNA, 521 bp, Homo sapiens
gtgaagatgcgtttatctgtgttaaatgaaatgttatgctgccctaacagaatcggagttgatgctgcttcctgtcctgacccctgtgggtctgtgttccctgataattttacacaacactgaggcgggaagaacgtaaattccaggaatgcatttatggttaatctgttgttgaggtttagtcagacagccagtgttttataaaccaagcctcccatgaaattgggctggaggaagagggatctaatagagcagataattaccacttgctctccattaactcagcccttgtgcccgggacacttttccttttggccagcaaaattggagtggctttgtcatgtttacagggagcctgcctgttggctattagagagggacagaaagaatctgcatatagaaaccctgaaagaatacacactaggcaactaataaaaatggtcgggaacctgagcagcatagtgagaccctttctctaaaacaatttttaaaaacttagccaggcatggaggcacacacta

SEQ ID NO: 52054 - DNA, 970 bp, Homo sapiens
gctatgattacattttcaattatctcccccattcattgccccaaagagaggctgtttttccttccttgacccatctggctgtccttgccttcttggtcttgggaccctggcctaccctgtttgacccctagtctctcatctgctttctaggactgaccactgagcagatgctgagaaaagaccagaagactatctatagacaaggcgtcaaggtggccattagtgcaatatatatggatttggaggcctttctgcagaggtctaacctccttgcagatctccatgctttctgccaggctcacagctatgatgtcctggttgccatgactatctttttcaacactcacaatgagccagtgcggcagttggctattttctgtccccatgtggcactccaaacaacgatctgtgaagtcctggaacgctcccactctccacccctgaagctgacccctgcctcaagtacccaccctaacctccatgcctatcttcaaggcaacacccaggtctctcgaaagaaacttctgcccctgctccaggaagccctgcagcatattttgactccatgaagatcccttcaggacagcctgagacagcagatgtgtcccagggagcaagtggacaaggaattggacagggcaagtaactccctgatttctggactgagtcaagatgaggaggaccctccgctgcccccgacgcccatgaacagcttggtggatgagtgccctctagatcaggggctgcctaaactctctgctgaggccgtcttcgagaagtgcagtcagatctcactgtcacagtctaccacagcctccctgtccaagaagtgactgttgagaggcgaggaggtagtgggtgaggctacctgactcacttcaaatgcatgttttgagatgtttggagattcagcaattctgtcttcattgctccaggatctggtatactgttctcataaaactgagaggag

SEQ ID NO: 52055 - DNA, 292 bp, Homo sapiens
gtctggagtctggcaagcggggtgtgttcagaaggtcctaggcctgtttcgcatgtccaggcactggcctgaccatccggctccctggcaccaagtcccaggcaggagcagctgttttccatcccttcccagacaagctctatttttatcacaatgacctttagagaggtctcccaggccagctcaaggtgtcccactatcccctctggagggaagaggcaggaaaattctccccgggtccctgtcatgctactttctccatcccagttcagactgtccaggacatcttatc

SEQ ID NO: 52056 - DNA, 1179 bp, Homo sapiens
ttttttttttttttttactgtatttaaaagcatttatttaaaatatgtcaacctccttccaaaagacggaagacacatgagcccattccttatatcatgaggtataaggtaacaacaacgaaaatcctaaatgcaaaaggaccatcagttgcctaaatataaaattgaactttggcaaagatatgagtgttatacagaataacagccaataaagaaatacattagtttacaccatttccccatatcatggccccgtccccctgcactcttccctttggaaggctgagttacaaccctgtcccagaagattcagaattttaaatacgtggtctgctgatcaacatttatttttcctcaaacctcagtactacagctatacaaactacacttctaaaatatttgaaacagatactgaatttattggttggctatgagtaggaaaatacatcggtaaagaaaaaagaccctgtatataaatataatgctagctaattacaatttgaccaagaaggttccactgaacagaacagtaaaagcccttgttactgccagtccgtatggtttattcagttcccatcaccctcatcaaagagctgtctgggcggatgtgacattctttgagcttatagtgcagataatgtgctgggttttgttacatgaatggtaaacaagagttagtccagtgcatcacacaatataatgtactgtgaataaagactagatacttttagacactacttcaacataccagttattaaaatgtatgtaaccaaaaagaagagcaaagtgaacatcttaaaatactgtttacgaatggtgaagaacacctgctgaaggagttcttggaattatctgcaacatctgtactggacattctgagagcttcactgaaaaaaacggtgctgtcattgttttgcctagcttggctttagtccttatatatgaccccaaaaccttacaagtcagtatggaaactagttccataaatctaaatagtacctagtgaaactctaaaacttgaatattattattgagaacctgaatctcaaaagagctttgaaattttaatttaaacatttagaagtgcattccatccaatttaataatgtccctaagtttgaaagtgctaataatcccaagtaagttttcctggttgtcactaaatcatattaaacacac

SEQ ID NO: 52057 - DNA, 361 bp, Homo sapiens
ccgaattcgcggccgcgtcgactatatgtatgtaccacattattcactgttttaattaatgtgatatatcctaaaaatacacaattataatttaattcatatattaaatttcttttatgtaaaacgtcaagcaaactacacatatatttgttccttaagtctatttaaggtgaaaaggaaattgagatactattttaaaccagaagtaactactacactaagttcagactatattaatcccaaaatatgttctatagtcccaaattctttgaaacatgcaagttaattcatgatataggacagagttcttaactctggttccttttatgtacattctttagaatgcctgattagaccagga

SEQ ID NO: 52058 - DNA, 395 bp, Homo sapiens
tttgataattttcctagcagtgaattaactattctcatttgaatctaaattaaattaaatttgagtaaattcagccatttctaaattcagtccatataaattcactttgggtaaaagaagacaaaattcctgaaaacagtagattaaaaaaataacattttaagagcaggtatgatctcaatgaatatagtgtggtaatttctgcctaatacctacccttttggaggaaggaaaggtaatcctgtttgtgtttaatgttaattactgaactctttataacttgttttatttatttattgtttgattttaagcatctgcttctggtggacttacatatgttgggtttgggaaatttcaacatacaggttggcattccagtggctatagttgtttct

SEQ ID NO: 52059 - DNA, 275 bp, Homo sapiens
gcttggtgaaccctcaaaaaggctgtcaaacacccagaggccttggggatcaggaaggagccatcatgtggtctttcatgtcctgtagaacatagctgcgcctggaattgaatgatcgtgttttccgtgcagagctatctgcctttggacaggaggagaactctcagcaccattccctttccacgggagcttcttttttctcattctttttcttgcctccctcaactcccatcctctgttctgggagaaggtgaagctggcctgacaggcctgag

SEQ ID NO: 52060 - DNA, 5215 bp, Homo sapiens
ttttttttttttttgtctttatcatttattatttttatttggacaacatatatacatatgtacaaaatacctactgtcagaatcctcttttataatttcatttgatttacaaaaacgggacagcaaaataacttaggtcactaatactgtacaaaaataaaactgattaaacagttgtaaagatcagtatcttacagtgttacagatcatctgatgtgaaagaacatctcaatctatccgagtgatgagtactgtgctaaatctatctgcaaactgacaaactaatcagtttctgtaattgtaactaccaaatagaattctcaagagaagcatgatgtggagctaaaccttaaagccagggcatcattccacaatggtgaagggctttcttcttccctaaccaaagagaggagatatcttaactctaaaactattaaattttccagaatatgacaactacttacagtattagataaaacaacttttctttctttttaaacacctgcaatagtctttcaaaaattcagtttggttaaaaaagtaaacaaaaattactatcctgcatttggattttcataagttaaatccatggtctttttaatataaaaagtaattgtttcatagttttagtgttcaatgaactctagtagtcctatttgaaccatatcttgatatagtaaatctaattagaatgctggttcctgttttgtgacattttaaaacaggatttaatcacaaagaataaaaaggcttgagtttatacgttacattactataacatataagagaatatcaaatgtgtgtttgtcaacaacttgaaaaggcaagtaacaacttttttgggaagtaaattgtgcatttttttaaaacaagttgctgcatttatatccatctaagtgcttgacaaaagccacatttagatttactcctgaaactataaagattgtctttcactgactttgctttggctttctttcgtttctttctgtgagggaaagatgactttttacaagttagcaagttgctaggcaaccccaaactcctcactcactaaaaggcagccgtgcagagtatcataagcagaaccattccatgagctcagtgagaaataggcagcctaacctatttcgtatggaagaacagatgtccttaaaacttattttggacacagaaattaaaatttggtttaaaataagtgtttcaaaaatctgaaacagaggtagaaagtgttctttatttttcctgacatgttttctcgtgagaaaacactttcctttttatcccatggactgctccccagtcccctaatgttaaaagcagttctctttatagaactactaattacaactacgttggttaaacaaaaaaacactgtgctagtgatggctgttgtattggaagttggagtcagccgtgacccgcgcccactgcaggagccccacactgattctgaatcagaaacgagtatgggtcaggtgaaataggtaggcaccctatgtttacacatttcagagcgcaagtataaactagagtgcaccatagctccctgttttaaatatcagataaaatcatcagaaagcgttacttctgaagaaaaaaaaaatgtaaacatttcccccatgatcactgctgactcccctcatttgaggtcttaactacgaaaactcagttcacttttctggcctcataaaggccacagttaagttttcaggtaaatggcatagatggatgtagtggtttcagccattatagacacctagatacaagatatattagtggtgaggctattgatgtaaaagatacagtgatgtgatttcattcgtagtattccatgttgcctgcattctccacaagggacgattttgcagagtctcctctgaaatcattgtggtattttcccttggtgttcactagttataggggttgatttttctgttcctatttcagctccctttccttctacataactcttgcacctgagagtgggagttttgtaggaacacaggaaggagaccaacaaacctttttccccaaaaaataggtgtttccagatctcattactgttatgcacacattcaaataaaacccaacagagtcaaaagctctctcccctagtggcattaggatacaataatgatgttaactaaaagcataggaaaatttggaaaagttaatagagttaaaattctgttggttcttttctttttcttttgcaaaacactaccctccttctccttcagcatctgttgtgtatattctgccctcacatctctgccatgatttcttagggaaacgtgtatattgtaaaataagcagattataacgtggtgccaaacagaacatctgcttctatcctcaaagcatgtatttaacttattcatcctctgcattagaaaataaaagtgcagcttatgttcaaaaagtacaactcatacaaagcaaggtttaaaagttctgtacttagtgtaacctttcaaaggtttgtcttgattagtataaattcagactctgcttacccattgactataagtaactgttttttgttttcaagtctttagatgacagatcatgctggagtagatgtgctcttgcttgcataaagacagctgtgctatggcgttttttttttttaatctcaaaagttaacgtgattcaagagaagtgggttttgctaaacaaactgaagcacactcgtcattacattaaaaggtaagaaaacaattctgagagacagcaagcataaagggcctagaatcactgtgcgaggccacaggtcaactcacccagcggacatatgtacaccagtgttgaatctttaaaatctacccagtcttggccttaccccctcccccccacccactccctaccctcccccgcaaaaaaataaaaggagaaaaaaaaacaaaaacaaaaaccaaaaaacccaaaagcatttgccttccctccaacagtcagagacgggttcagagagttgcctcttcaaggggaccgagtgttgttgactttgatcttaggctacaatgtgctttttaaaaacaatgcagggagaggaaaatcagaatattgaccaaagagcagtgacttcctgtgccgtcaagtgtgcctcttctggggctcagttttcacgcgtctgtttcctgggagtacttttgtcctttcggggtccatccctccctggcttccacgggcagcacctcacaaagcgttggccagcgcctttttcgatcgcttgatcatgctggggtggaactcggtgtgccgccgggcgtgctttgtgaggtggtcactcctcatgaagcgcttctcacacagcggacagcggaactgcttttccccagtgtgggtccggtagtggcgggtcagctcgtctgagcgggagaactttttaaggcagtctggccacgtgcaggggaagggccgttcacctgtatgcactctgtaatgggctttgagatgggaggattttccatagactttcccacagccactgtaggggcacttgtgcctcttttcggaggcgtgtttccccttcgcagccactccaggatggaggagggagagcgggctggggcgcgctgccaggatcctgtctctcctccgggctgtgggaaggactcgacccagattcggtggtcacgtcgctgtcggatcccatatcctcatctggactttccagactgtcgctgcacacggagggggtctggatgggtcggtacttgttcaggtccaacaagctcttggcgatggtgaccagtgtgcagtaatccttccaggtgtcccccgggtcaccgtgctccttggtcacctcgcgctcaggtagtcgcagccgctcggcgtccggagcgaccccatgctccggcacgcagcgcggttcgaaatggaaaccagacactgggcagccacgaagtccatgtaggcggccgcggacatggtgcgggcgacggcagcccaggcggcgcggacaaacttggcggtggctgcggaggttcggctcgccctccctggcctcggacgacgacccgcccgcccggcacggcgcggcggccaagggggcgggggcgcggggcgcttccgactcgcaggagcgccgaggcgacctcagcccctcatctttacgtaaccggcagcgcctccgcacgcagcatccacggccccgggctccgccgcgccgccgcctctagccgccgcccctgccccgcgccggccgcgatcccccgacgggcgcgccggcccctctgagccggctcccttggaaagatgccacacgtggcggtcgcaagtttattcgactgaaaacgcccccgaggcgctgggagaggaaactgcaagagaggtgcacgccctcggccgcctcgccgtcgagccaaagccccaggacattcacccgatcaccccgacgcgggtggcgagggccccgccgagcgccaggtctaagagacactttttcccgagtccactgacggcttctgaacccctgctccggccggtccgcacgttccggcattctcttgctcagtaacaatttcgcagaatcccatcacgtcacaaaccaaaccccctccaattggccagtggggagggtgattcaactctgtttactttctccccctgccagtcagaacggcttcggtggagaggtgcgtctagaactgaggcgtgcggccaatccgactgttccgtttcgctgcctcgtgctacccctacagcctcgaacactgacatttaaaagggtaacagctgggaggcagggaaggggcagccgcacactttcggagtgcctcgcggtcccgtggccggtccgggcctcctggctcacgttccagcttgcggagctttgggacacatctttcctagtcagttgcgctcgttcctatggcaaaagagaacttcagcttcggttttccagctcccaaacagttaagtgacttcctgcaaacgctacagtcccagcaaccagccttccaatcaaaagtaagttggttgatgtcactggcattggctcggccaatcacaagggcgttccgaaagcaagcgctcgacacttgtaaacgcgaagagctgtagtgaaactggacacatctttgtattttgtgttgctggtagtaaatttgagttatggatgagaggacaggggtgatgaataaatgcagtgtgaatctataattaaaaaaaccccattatgtcaggataagtccaagaataaacacaaatgagt

SEQ ID NO: 52061 - DNA, 214 bp, Homo sapiens
gaaaacccaggcataaataacaagtcatggtaataatttgtattattcattggttatagcactcttcagctgtaattcattatgcctcttctttagatattgatggtaaaaacaaatgcgataccattcctacaagacatagtcgcccatcataaagaattatatttgtggaaaagacttcaagaaattacaagataggcatctgcagtggagg

SEQ ID NO: 52062 - DNA, 384 bp, Homo sapiens
ttcaggtttccctgctcattttcccagtttatatacatttcccacagtctgtcagaacggaaatctgttcctgcagctagaacagcatgctcaaaagttcctcttattgtattgtttgtctcaggatcaccagggtccaatgtttcttttaagaagtttatataatgtatccaaaggtcaacactaagaggtattgcctgaagcccccgccgataaaccatttgggtggaggttggatagaacatggcaatgttctgatccccacgtgcagagtcttgatcttcaaagcgcagcagtccctgcattctgaccgggttgtgtgggcaggctttgggttacagaccatagggcacagacccattagagcatcaatgacagcgtctg

SEQ ID NO: 52063 - DNA, 420 bp, Homo sapiens
gttggttggacctgtcacatgaaatggatcagcacttgaatggggagaagtggagggagaggccctgggcctgtccctgcggggaaatcttttatggaagaagggctggacccactttacctgcagtttcttcccagctcgggcagatggcagaagggaccccttggactttttctcgccatccctccccccagcgcaggggcacaagctgagcttgtaaaagcccacagatgttgggggctggagaaggggcaggagagcatcacactcagccccagcctcctcaacctcttggggccccgtgatggggaggagagggcaggtgcggggaaggctctggccttccttggtgccccgccctttgtttgcactattggacttaggagtgccgagggtggggagatggagctgcccgactca

SEQ ID NO: 52064 - DNA, 1613 bp, Homo sapiens
  misc_feature (1)...(1613): n = a,t,c or g
cttatcttcatttcctcagcaaaaaagggaaataaaaatattgatctataaaataagccgatgataacacaatgccaaaaatagcttatgttaagtgcaaggggtgaagcttgaaagcaagctaaattgcaacaacatattgatttaacatttaaatacaagacttgcaataaaataattcttgaaatatgcttctcatttttagtttacttttgaaaaactactctatatacacatatccagttgtaacacttgacagtagcattatggggcatgatataactttggtacacattgcagatatggatgtttaatgtctgtaaatgatattccttcaccagttagacttctgtacatccaggtgaccagccacctggttctaagtcatatcccaccagaatccctggagtccttgccagagccatcagagacagcaggcgaaagcaggctcactgaatccatattgtgtttcctctctcggttctcctgggttccactgtcagttctccaaacgtggaaaaaaactgctccatttatttctgtagcatgtcatttcttttctcggcatcttcttttgctcgctcggcatttcgcatttttatttctatcattgtgaactttttcctctcctgatccagttcatcatggaggctcatcatttctgtttccaaagtcaagtttcgctgttctaagctctttatcctggactcatactctatcttctgtttggtcatttcctgtttcaggctggaaactaaactgtgcagtgcnctgtggttgctgctgctgttgcccacaaatgtctcactgttgtcactgctactggtggcacgactacttcgacctcccacactcctgtggtcacttttgctttcatagtccctgggggtggggaaaggtcgtcctgcggggggnccatccaaaacagggtcctcaaagttccccccaaaaaagtcttgctctgggcaggtggtggtagaagagcgacaggagttggagttctcagggagggagatttcacaggaggaagtggaccaggtagcactgtcaaatntctgcttgtcatcaaggttcatcatggagaactgttgatggacattatcataggtggacagtctgttgtgctggcctaactctccagcttgttctttctgcttgttatccctcagggtcacatagccatttggcagccagctcatgtttcgaacatttgtggggttcccgagtgtgtcgctgttcaaaatgcccatgcgcaccgttccattctgtacactgtgcgtgcccattttggtaccagataccttcagtgaagagctccttcgtgcctgtaggcgtccattgggggtggtttgggttttctcaagaccttctgcattactgctgctgaaggacccattggtaactatcccactacccttattaaaggctgggttctttttgaccatgagaggggggcttctagacacatctagcttgtgaacactgttctttgggctgttggttttgctgcctgatagagctgtgggggatccattgttcatgctgcttctctggggtgactcagacttgtcccaggagcactgcctactagggctgtccttggtgttattgtt

SEQ ID NO: 52065 - DNA, 476 bp, Homo sapiens
agaagtttggaccagaatatattttatttttctcataaaagttataccaaaaatatattttcttaacttaaaaatacagcttcaaaaagcaaaatttgagttgttagaattcattacacattttataaacagcagtgaaaggaagaagtcagcagaatggattcaatttttaaatacacaaatgttcatttcacaagcttgactttgtcctttaataacttaaaggtagggttcttgctgattttcttgttaaagatgaccaggagttcctcttcggatctgtgatgctcatctgtcactgtgtagtactgagctaaaacctttttccttagctttttgatggttatttcattgtctggggcctgtttcagaattgctttaatagttcccttccagttgaatttaccttttgcaggagcctcatcgtcttctggttctccgccctcaggatgctctgggagccgcatcctttgccg

SEQ ID NO: 52066 - DNA, 455 bp, Homo sapiens
ggaaatcattttagccccctccaccacaaagcccatgaaaaggaaatgttaatcctgcctttttcatgctaatctgagtctacctccagttttcctatttccaatcctttccctacaggcttatggatctggcataggcaagaggttctggtttcaggaaagactggctgttctcttgagatctgtaaagagaggatgtgaaaaaggaaggtcctggaaggcagtcagatggagccctgtttcccgcctttccatgtccattcctcctggggcccctgatctgtctctctggagatactcaagctcaggcagccgttgccaactcagactggtctgacaaacacttcttgaacactgggcggggtgctagagagacactgaggtagccacatcggatccctgccctctgggagttcacagacccaaacccgggaacactgtgagccaaagtggat

SEQ ID NO: 52067 - DNA, 836 bp, Homo sapiens
tgtggccggagaggtgggagtcggagcgaggccctctcgggggagcagggtgaacgccggccactctaggatcctcactcggggagaggaggcatagctcgcggtgtcacctccagccgcaacgtactccgggtcggccttgcgctcggggcctgagaggggcggcggcggggtcaggggccgcacaaagaatgaaccagcagtggaagagaaaatactgtaagctggctgactgctggtgaagaaaatgctttatttttgtggcaggcatctgtgggatctgtaatagaaatgggatcttcaatattcatgttattttctcctttggtcttatatgattgttacctttatgaagctttagtgattacaaagcactttttttgtccatttttacctgagctttgtaaactctgatttgcaggatggctggctgtggtgaaattgatcattcaataaacatgcttcctacaaacaggaaagcgaacgagtcctgttctaatactgcaccttctttaaccgtccctgaatgtgccatttgtctgcaaacatgtgttcatccagtcagtctgccctgtaaggcacgttttctgctatctatgtgtaaaaggagcttcatggcttggaaagcggtgtgctctttgtcgacaagaaattcccgagggatttccttgacaagccaaccttgttgtcaccagaagaactcaaggcagcaagtagaggaaatggtgaatatgcatggtattatgaaggaagaaatgggtggtggcagtacgatgagcgcactagtagagagctggaagatgctttttccaaagggtaaaaagacaactgaaatg

SEQ ID NO: 52068 - DNA, 913 bp, Homo sapiens
tttttttttttttttttgataaactctagtatttattaaattataaattttgtaatcaaaaagaaaaatgcagaccaaaaaaacctcaaactataagactagacagcaaagcctatgggaacaccatgaagtgtgttacaaacattctgaaacataagttactggctgttttcatttccatttcaataactttactataaaatagttgttattcatctattttgaaatcccaaattcacatctattcatacattaaattatgtttcctgttcataatatcaaacatctcacaggtgccaaattttagtaatggtcttatgccaatccatgcagaaaaataagacacaatgcaggagtcagatgaggaccattaatgcacagataatacaaacacactggccaaaagaactacagaagtttttaaaaagtataaagtaaacagacctcaagaaaactgggttattactaaacagctctcaactattaacacccaagttccttacattaaataaatttctcaacagagacatgttagacattttaattatgagtctatccttcccataccccttcccacccaaactcccaaaatgcactactagggatgagtataatgttatgtgggcagaaatttacaggtaaccctttcaaccttgagcatggagctgaagacatttttatttaaacttcagttactgtgcactgtccatcaggccttctagatctgacactgacactcactgttccaccccctgctactgatcgatcagttcccgatcgatctgatcgatcgggtactgtctggtttgcattagaaaccaaaagtctctgttgggtcaaggagtgctgtgcaacaactgcagatacatcctcactatcactactggcatctgattcagtttcttcaatggag

SEQ ID NO: 52069 - DNA, 479 bp, Homo sapiens
tttcggtaaacaaaatttaatacaaccatatagtcaagtaataatggttaaaagacattttattagatacaacttttaaaaaattaaactatgcaagaagtatatttaaacaaaacatgtaagtaagtattcacgtgctacaacttaactaagaacaattaaatacaaagcattctttccactatgaagactctggagcctctaattgaaagcaaatgaccttaggtctatactagttgtaaagcagattatacttttgttcaactctaaatttgtattgtcttagagctccaacaactctcaataaaaatttaaataaagaaaccttgggggaggggtgatagggaaggggagagtaagtgcttttttaagaaagttaaatgaaaaagcctgaagagggaaaaaattgtacataagtatggaacaaaaataagtatacttttttgacattcgatgtagatactgcaaatgaatttaca

SEQ ID NO: 52070 - DNA, 1584 bp, Homo sapiens
  misc_feature (1)...(1584): n = a,t,c or g
ggcagacagcgggcactaccactgcagtgcatcttccagagccctggtcctgggatcccagaaacagcatctgttgtggctatcacagtccaagaactgtttccagcgccaattctcagagctgtaccctcagctgaaccccaagcaggaagccccatgaccctgagttgtcagacaaagttgcccctgcagaggtcagctgcccgcctcctcttctccttctacaaggatggaaggatagtgcaaagcagggggctctcctcagaattccagatccccacagcttcagaagatcactccgggtcatactggtgtgaggcagccactgaggacaaccaagtttggaaacagagcccccagctagagatcagagtgcagggtgcttccagctctgctgcacctcccacattgaatccagctcctcagaaatcagctgctccaggaactgctcctgaggaggcccctgggcctctgcctccgccgccaaccccatcttctgaggatccaggcttttcttctcctctggggatgccagatcctcatctgtatcaccagatgggccttcttctcaaacacatgcaggatgtgagagtcctcctcggtcacctgctcatggagttgagggaattatctggccaccggaagcctgggaccacaaaggctactgctgaatagaagtaaacagttcatccatgatctcacttaaccaccccaataaatctgattctttattttctcttcctgtcctgcacatatgcataagtacttttacaagttgtcccagtgttttgttagaataatgtagttaggtgagtgtaaataaatttatataaagtgagaattagagtttagctataattgtgtattctctcttaacacaacagaattctgctgtctagatcaggaatttctatctgttatatcgaccagaatgttgtgatttaaagagaactaatggaagtggattgaatacagcagtctcaactggggggcaattttgccccaagaggacattgggcaatgtttggagacattttggtcattatacttggggggttgggggatggtgggatgtgtgnnnnnnnnnnnnnnnnnnnnnnnnnnnnnnnnnnnnnnnnnnnnnnnnnnnnnnnnnnnnngccagtnccccacaacgaaaaataatctggcccaaaatgtcagttgtactgagtttgagaaaccccagcctaatgaaaccctaggtgttgggctctggaatgggactttgtcccttctaattattatctctttccagcctcattcagctattcttactgacataccagtctttagctggtgctatggtctgttctttagttctagtttgtatcccctcaaaagccattatgttgaaatcctaatccccaaggtgatggcattaagaagtgggcctttgggaagtgattagatcaggagtgcagagccctcatgattaggattagtgcccttatttaaaaaggccccagagagctaactcacccttccaccatatgaggacgtggcaagaagatgacatgtatgagaaccaaaaaacagtgtcgccaaacaccgactctgtcgttg

SEQ ID NO: 52071 - DNA, 1765 bp, Homo sapiens
ccggccctttgtagtgtttttaactaaagaatttgtagagttgcccaggccaggaagcctggtggctcgtaaagggtaatagaccttgtcagtaacagataaggagtggtaagaggacattactcatattgaagatgaagaccagactttgctgcttcacaggccatgcgctgggttgggccacttcagctccactccattcgttttcctttcctaacttgacaatcagctcactcaccctcccttagtgcctccagtgcctactcctgtcactccaatgtcaacccattgggagttgaggcctgtcactccaatgtcaacccgtggggctgttactttgcgtcatatgatgctgtgagaggccttgctgggaatgtcctagggaatccctagtaggcagtggctattagtcttctagaaaagaactattgctgctgccttgtgcacatgccccaccttctgggcaagtggcagcattgcgctcatgaggggctttgcattcttagccaagggcaataaactgggtgggtgatctggcccaaacttgcccctaggctctgctagccctgaatcagcaggcttcagagacgagggtgggtgttataaaagccagtctgtaaagggtaaattccaaatcttgtgccttgttataccaatccttcctgattcccgtttaaaccaactactctatttctgtgctgcctacattttcaatcctcccaagcattagcaaattcctgaaatttcctcatttggtaggccttccataggagtcagctatggacttccataggagttggcagctaaaaccagactgtgagcttctgtctccgttctgatttttgctgcacctcccaggggacagtccccacatgattacaaaagccaggtgccctcatcacccgttacccctgacctgtccacttgttttgaataaaccttcattctccaagcagatccccaaacttccttgtccttgttacacgtctacctcacaacctcacaattcaacaacaggtaaatacctggattcactgatttctttactgtccttctctgagggttgggaaggtgggggctagaaaaggctcataatttttaaactcttgggaattaaacttgggaatttctattcctacagtgttttctctgggatttttagctcactgatcgccctagaatagtgtgaactctccagataggtcctgctgtgataggccaggggagtagggctgtgcagtgacggcttagggtaataagtaatggttggaggacaccagcataggagcagagtttagaacttaagaggacaagaaagctgctcagtggctggcgtatagctgtgaaggtaaccaaacaccaaagagggagtctgtcatttttataaggctggaagcgaatgttccttttctaccttaacatacagtttagggggttgcaccaagacaaagtttccaggctggagggtaatacatatccagcgcgagtgaagtccccactccaacatataccctttttgggtgggtaaacacctctttgcatgtggacagaaaatgtttatacttaaacagacatattttgcatatttttatctggagacttcttctagttttatactcttcccacatctatgccaatgccaccattctaaaacttacactccttttctacccctggtcttttccttgtccttccctacaacttggtagaggtccattttgtcttacttcacactttttttttttaaataaaacacaaaagtcta

SEQ ID NO: 52072 - DNA, 369 bp, Homo sapiens
  misc_feature (1)...(369): n = a,t,c or g
aatgtggtttttgtttttagttctgtttatgtgatgaatcacatttattgttttgcgtatgttgaatcgatcttccatcccaggaataaagctgcannnnnnnnnnnnnnnnnnnnnnnnnnnnnnnnnnnnnnnnnnnnnnnnnnnnnnnnnnnnnnnnnnnnnnnnnnnnnnnnnnnnnnnnnnnnnnnnnnnnnnnnnnnnnnnnnaannnnnnnnnnnnnnnnnnnnnnnnnnnnnnnnnnnnnnnnnnnnnnnnnnnnnnnnnnnnnnnnnnnnnnnnnnnnnnnnnnnnnnnnnnnnnnnnnnnnnnnnnnnnnnnnnnnnnnnnnnnnnnnnnnnnnnnnnnnnnnnnnccgaccccctgct

SEQ ID NO: 52073 - DNA, 653 bp, Homo sapiens
ttttttttagttcgtcttgaaatttatataccatacttacataaaagaagttaaaccaattgatcattatgtacatatattagtgaatattagtattttacatttacatacatgtgcatatgtaatcaagtaaaaatataaatgttaaataatttttatcagcgaaaaatacacaaaacatgactgatacttcaatttgagtgcttgttcgatattcagtgcttaaaaatgtttgggaaaaataataccaaaatataacctggtgaaagatatttaaaaagtgaaagagataagaaaatagtaagtgtttggtgtgattttaaataaagtaggggaaatgagcagaaataagatctatatttggggaggaattgccatagcgtagaccggatgaagaatcggaaaggaagaacgtggtttttcccaaggccaatttcgctcaaaatggaacagaacccagggaattttcaggacaaagtaaatgaactgaagtttccatcatgagttcattctattagcagatgcccaattgacttcctccttgagtctttattaggaggcaggcctcagacattcaccctacagtcagatacaacttcagttccttacttggcttctgtcaagacggtaagagtgcaaggtgtcatataatg

SEQ ID NO: 52074 - DNA, 837 bp, Homo sapiens; identical to SEQ ID NO: 14182

SEQ ID NO: 52075 - DNA, 751 bp, Homo sapiens
aattcttctaaattaccacttgccattaagctatttcataataaattctgtacagtttccccccaaaaaaagagatttatttatgaaatatttaaagtttctaatgtggtattttaaataaagtatcataaatgtaataagtaaatatttatttaggaatactgtgaacactgaactaattattcctgtgtcagtctatgaaatccctgttttgaaataagtaaacagcctaaaatgtgttgaaattattttgtaaatccatgacttaaaacaagatacatacatagtataacacacctcacagtgttaagatttatattgtgaaatgagacaccctaccttcaattgttcatcagtgggtaaaacaaattctgatgtacattcaggacaaatgattagccctaaatgaaactgtaataatttcagtggaaactcaatctgtttttacctttaaacagtgaattttacatgaatgaatgggttcttcactttttttttagtatgagaaaattatacagtgcttaattttcagagattctttccatatgttactaaaaaatgttttgttcagcctaacatactgagttttctttaactttctaaattattgaatttccatcatgcattcatccaaaattaaggcagactgtttggattcttccagtggccagatgagctaaattaaatcacaaaagcagatgcttttgtatgatctccaaattgccaactttaaggaaatattctcttgaaa

SEQ ID NO: 52076 - DNA, 470 bp, Homo sapiens
ttttgttttcaattagtttaatttcatctctaggcaagttctgtttccaaacattagtattagttggtgatatttccccttcatagggaaggtaaaaaaggtttgtagaggtggcaaacaatatttggtttaaactagcaggagacaaaggaattccaagaaaggcaaaaatcctttcagtagttttctgaggaaaatgcacaatatcttcaaacttgaccagctggtagctagtaggcagcaaatctgtatttattctcaaggctgctgctgtatttgctagccacaagtgagacaagagggacactgcatttgatttggattttgataattctttcctcaatggttcatactcgaaagcataacccgaatttaagttacatttgccttttacctccctccattttaaaacaattttgctaaatgctctggtacattcttcaagaataaagacttggtttactattgta

SEQ ID NO: 52077 - DNA, 1792 bp, Homo sapiens
ttttttttttttttcacaaaaagatgtattttcattcatgagtatttacatttttcatatttgtttaaagaatatcatataactgataccttctgaaatgtttcatgcttttaaactcttctatttacacttatctgacatggaattaaaactaaaatggtcaaataccatgataatagaaagcaaccagccaacatagctaggtcttctcttaaatttgctgatcaacattagcagtagttaccttaataataaattattcattttaaaatcagtagtaactttaggacaattcataaataagtgtgctctgtgcaatttacacgtttaatatcctgtggatactaaaagcttgtatattgtcagatttgcacattattactttatcaaaaacagtaagctttcccaaagatgaagctggggaaacttgaaaagatattctaaaggttctctggagagttatcaaagctctgcctgctttacaggaggaggttccaatttacgcgagagggcagttaaaatctggttgaatttctcatatctctctgtctgattgacttgtgcacctttgctgccccatagcaatcgcatttgaaattcagtcttgcagatttcattcatttcttcatctggttgaaaacctgccaggatcctctcagcattcatccggtagctgtctgcagcctcggccatgaatcgcgctgttgccaaatggttcagcatgatttcacagctctggtcgtttttttcccacatgtcggttccttcaaaagtcacagcctggcgctccattaacgtcacaagcggcatcagcagtgggactgatacattgtttgggggaacacatgtggactctctgccttcatgcaggagtttgctgaagggcttcagctgtttctcatagagaatggcagtttgggtgtactggtgccgcagagcagtccacgtcttttctaaccttgtgtctttcaattatgtccaggcgcagctggtgtccgtgaggcaaggtaatgagttccaggcctgagctcaccccccatgttcctcctcatctcttcagagactccaagtatcctagcaaccctgcagtcccatgcctcaagtacgtgctgggcgatgaccttggggtcgttgttggtgaaacagttcttttgcacgtttcaacattgctgtttccaggggcttattctcagggggaaggaactttgactcaaactcgttgggcctgaaggaggagacagtctcccaggaggggcgtcacaaactcgcccttgtcccactgccccttctccatctgagtgccgcaggttcccaaggtctttccctgtcatcatcatcaaggatcaagtagttgacgccagagttccggggacctggcgcctcattctgcttggctgtgaaccagttctgtgtggcttacccctgggcaacatgagggtagctttgctcccctgccgcaacctgtggcaaacgctgggttcagttcacagtagttggcctctgagttgagccaggcagagggagacgagggaaccttgaggaacggcaccttgcagggcttaggcgggggcttagggcacagttgactgtctgatcccctcagcgcctccccagccctggcgtctgaggagaccctccgaaccactgctgggctcagggcaggctcgcttcccgtcctgaacacaggtgagtttgggcaggggcttgtgtccacacccgaggactgaggtggcagttgcagccaatcggcaggtagctctctgactggtgggctttgagggacaaggcactt

SEQ ID NO: 52078 - DNA, 1466 bp, Homo sapiens
  misc_feature (1)...(1466): n = a,t,c or g
tcaactcaaaatgtttatttcctgccaagaatcaagttgcagataattctcttacagcttttttgaagaaaacaaaaacaaactgtagaactatgatgcactccaagtgccatatatctattttattcttcaggaaattatatttttcttttacaagagcacaacaggaaccaaagtaaaagagtaatagatacagcactcaggataaatcatatctttaaaataataataaaaaaatttacaccttgtcctatatcctgttagtattttcataatatggccatgattgaaaaaacaaaaagcaagcatctacaattttttttgataaagactttttatgccaggaatggattaattaccaacaaaatttatactaatcaggctgatgtcaatctatttttgtaatgtatcattaacaaatttattttggaaaagataaaaatattgccccttgataataaatctttttttcctttgatgcaaacagctagaacacctttttctttttctttttgatattctaagacaaaaaaatggttaatcttcagattaataaattaggtcattataataataaattaattttttttaaagttcagcaacctctgtccaagtatttacaacaatacttgaaagttcctttacaaaacagaacacattttcttttcacgttaagcatactgggtatctgtgtctttcacaacaagcatttttaaaagaaaactcaatgcacaaatggggttaattagtataaaagtgctaagggctgtttgaaaagttaccactatagtatacagtcagttatatttgaggcatactacaacaaacttccagcttattgtggacaatattccagtagttgtttcaaaccattgtttgaaaaaaaaaaaaaaaaaatccaggagctgattagtgatgcagataagaactgccatcaatgtctctggccagtgagcaaattgaaaaccaactgaaagcaaatccaaatgaggaagattttaataaaggaatacccttctccatagcaggtgcaatgctgactgctcaaggcgtgcgtgcgcgcgcgcgnnnnnnnnnnnnnnnnnnnnnnnnnnnnnnnnnnnnnnnnnnnnnntccaattaaactgcaggtagaatgagattttgtgttattcaaaaaatttgtaagtgatcaaaagcactgcctatggaatgcctgtttatctgcctttgttctggttaaaatctcataaaaatacattcaacaggaaaacataaattgtatgtgtataaatatatatgtatatatatatattatatacacatgcacacaaatacttttgttttttgaagcataagatagttacataaatactcctataattgctaaagtttaaagaggcatcattttttttgagcttcaacaaaggtgcttgaataatatacaattaaaatgaagtagtttctattttgtagaatcagtatat

SEQ ID NO: 52079 - DNA, 925 bp, Homo sapiens
ttagcacaaagcattttaggtttatttaaataaaaattataatttatacaatactttttctttaaacaaacaaagttttcttaaaaaaatgttacaggagaatttttttcatcggttcttaatacagtacaatccttttgttgaacaaaagtcacactggcaatgattatttacagatccaaaatagactcaggcttcagacataaaaaatttaacattcgtctagttcagtgattagtcacagaaattaaacatctgcccagatgtacacaatttggtaaaaactacagcttctctccacggggagcccagagcccgtgccgatccgcgctccgctcccgaggacttccagggaggggcctgtgctggcagcagagccagtcggtggccctcccccgaccccccgctccccgaatgtggccctccctgggggcttcgggccacacctggcacgtggtcagttttcatctccctttctccacaaaagggactcgaactaaaccacccgacgctggtaaagccccatctgccccagggacccctcccgctgtgtttggggactgaatcccagcacctaggaagaggcgctcattggccccgaggccccggacccatccttgggcactgccgggccctggggagagaggtgtggccattgtctgcgggcactgcctctgcagccgcccctgggggtgggtcagtgcccaccctgtgttgcctcaggcgccaaggtggggttcactgggatatgtccccctcccctggtgcaccaagagagccagtcccctacaggagccagacccacggctcagagcgggttctgtccccattcgggaaaggccgccgtgtggtcatcctgactgccaacgtccgcgcagtccagagccacgggggctccgctccaccgcctgggataggacatgtg

SEQ ID NO: 52080 - DNA, 511 bp, Homo sapiens
  misc_feature (1)...(511): n = a,t,c or g
tttggagagtgctcaatggacgtagttattattatcatcatcagcacagtgcggggcacatggtgggcattcagggatgatggcccttgtgtcacagccgacactcttgaccagtgagtcctctctcctccctttgttgactcctgaccgtccacaaatgaggttcagaatcctccatccagcatcttccctggtcacatggtcccaaccttttgctccacccccttctctgttccccccgcagtccatgctccagccatcctgactctgtccctggatttctggcttactgacacctgagcctgtgcacaggccctcccttctgtatagagcacgcttcccatcttgtggacttgcttcccatcttgtggactcggagggttccgagcagccgttgaggtgangctcctatgacacctcctccgtgaagcctccctcacttttccattaccagtgaggcctgccacagcctgatttgtactctgatcctggcacgcatggaagccatctt

SEQ ID NO: 52081 - DNA, 666 bp, Homo sapiens
gaatgtttttctacaaactgtcttgttttggccacgctctcagaataggtcatgcctacaggagggtgccattgttgaggcttgttaagagtgtagagaaaaaagaatactggcaggcattgtgcagtggactgtgcatagacgatctcatttattccattgtacggtcagattagctgaggtcaggggcaggattcgaacccatgtctccctgacagcagaactcaggtgctcatccacttgccaaccagctttccacttagatcattaggataatagctactctctcaggcactaagtgctaagatctcattaaatacataccaccaggggatgaggtgagaactgttatctctgttacacatagaaggaaatggagacatgattgctttgattttgacctaaatgctctcctgccccctcaccctttgatcttccattgaggtgagattgggggagtgccgcagtgtggtcctcagaagacacaccatagatacactgttagcattggatgaaaaagaagggcttcatacctttccacagaggtcggtcctcttcaagaccatttgaatttaatgctcaaagagtttccttctctccctgaggctcagcaaccctccggccttgcagtttagcctgccttagacttagtcttgcatgtgtaaa

SEQ ID NO: 52082 - DNA, 400 bp, Homo sapiens
catttctttgtcccacctcactcactcaatcatccctggccaccctgccacctttctcgctagccatcccatccacatcattcccgcctcagccatccatcctgggcccttcacctttcaccctgtcccacatgctgccctctaccccaccctacttgctccacggcctgctgcagcagctgccactgcacttcaccttcacccactacttcaccccatcttctcaggtcaggacctgcaacatccccccagccatggcacgtgagttgggggatgggatcctaggtagggccaggggaggagacccataaatgttcccttgggggtgttgagccattaataccagcaagtagaagctgggatgggcagtgtctgacagccaaaaaattgagtttggctt

SEQ ID NO: 52083 - DNA, 480 bp, Homo sapiens
cgtggggctcgggactggctctgtgtttgctttcattggaatacttgcctccaagcaaattactgaggctgctgtaaacctcagagaggtttgtactctctaaaagcagaatcagctggcgttttctgtttttttccagtgctaccggtaaaagaaccaccaccgcagcttctaccaggaggagatcggcttcagccacacacggggacgcctcctccccacccttcctcgcagctcttcctgacccctctccctcagggccacaggccgtggcacctctacctggggatgacgtcaactccgatgattccgacgatattgtcattgcaccgtctctgcccatgaagaactttccagtttaggtccccgtcactgtctccacgctgtgatggcagcgctgccgaggacataggaaccacgactggaaagataatttatcgtgttaggagaagaacgatgatacctacttaacacctcaaa

SEQ ID NO: 52084 - DNA, 262 bp, Homo sapiens
ttttgtttgaattccttcatatcttttgaaaaaaatcactgatattttatattcagataaaattacgtatctggatcttactctcttttctgctgcggatagtctatctgccccaataataattgtgctatcacttcatgtttctttcttagttcagattttcatatgcagaagatatgtggttaaatgttggcaaactgacttttactttagtgcttatttgtaaatgatgagttattaaaaataaactaaactgagaagt

SEQ ID NO: 52085 - DNA, 422 bp, Homo sapiens
gtaggatgatgggatatggggagaacagaaagtggttttatgcctgctctcctttccttcctcaggtttaggtattgattgggaaagggctgccaggagctcagtttctttgagaaacagcattaggaaacttgttgttgttgttaatttaatttttttatttcttacatggtcccagcttttgataatcctgatatctccactgacctgttatagtagtcatggacaaaattagacctgtatagtagaatcaactaggaagaatggccatatgtgtttattagatttggggagccttccactgcagacttcatttggtggtgaaagtatcaccacccttaacccagagctttgccaattcaagggtttttttcccttccaactggcctttacatttttaatgacagcaccataagggtctg

SEQ ID NO: 52086 - DNA, 1123 bp, Homo sapiens
  misc_feature (1)...(1123): n = a,t,c or g
acgattaaaataaaacttcagggcaaagtttttgaatcttagcaacacatggaaacatatgtcctgttgccaaaaaaattttaattgcctaatccaaaccagaatatttagatcaacctgtatactatatattatctctgatatactatatctctagtcctcagcattattcttcataaaaccaaatacccacttatttgctgagtggccagatctaagaggaagcttttctgcctttacagggatggccttttgaataattgaggcagacgaagcattggaatatgaaatatttgtaaatcactgggtcaggctctaggtcaacctcttgggtgcttttgtttcctctgggtcccaggatgtgtctcctggctctggaaagggagaggccagtagtaggatcagaaaagggagcaaccaaccagaaaacacctaagttatgaggtttgtgcttttcctgacttagagaaagtccatatctcaggagataaacagttctggctgcagctctctggagtaatcccctgaaatggtgccagagggagcatgtagggtagccaagattctgactccttgaaccatggtctagcaaagccctcagatcctgcatgagagcgcttcctatttgtaaaatacccttgggatctctccagtgaggcttgggggccagatcagccccattcctagctgagacttgcagagctcctctgagagattggaacttcgcattccttgagatggacattcacattctctacctgctcaccctcagcgaccagccccactgcctctgccgcccttctcacacacacaaagctntgccgcagttgcccaaancattcggtcaaaagcagggcgccacaaccacagagcaaatgagggaagtggggcccgaaaacacaaacatcctgtccctcatgaacatcaaatggctcccagcttgaagaatcggggtcactgcccagtgacatacacaaacgtctcatccctctagccactgccagtaagagggcattttctcctgagtccatggattgaaaaagtgctatcctttggcttgtgatgtcagtgacaggtgacagtgactggaacgcgccgctgctgaccggatgagtagggatat

SEQ ID NO: 52087 - DNA, 314 bp, Homo sapiens
caacttcagacacaattttgttaatttggatatatacatatatataataagaactcatggttagaatagaaatacagatactttaaaaatggtaatagaaattgtaccaatcaggttgctgtgagaaaactgacaaaatatgcaataaagaataccaagagagaaaggacaatcgccaattcagtttcccagaacagaatttttatgaactgcacaaatgtttaatgtaaatggtgatacctacagggaagaaatagaagagttgataatatatcactgggacggggtgggggaaagacttgaaatttttggtg

SEQ ID NO: 52088 - DNA, 891 bp, Homo sapiens
tttttttttgcctttgacaagttttttattgtgaaatattggatctagaaaaaagtacaaaatgtcaacagtcagatgtgtacaagtacagtatttcaatagtctatacatgtgaacagcttaacaggttcactgcagaatgcatatttagaccaatataatctaaaaaggactgcaatattcacaggctattaatacataaataacttgaggtcaaaatgacccttactggtaaatgctaattaatagtggaaaacaggctaaaagcacaatacaccacaccatagtatctcccttacaggtccacatttaaagaatatcagtttattatgtcaaaacactacagagatccaggactgggactgaattactaatttatacaattgcaaaaaaatttaagttataaaataaggtcatggaataaagaagggtatttaattaggactaaatactgtgaagcccatgaaagggttttagccttggaatttacaaagctaaattattagactgttaatgttagctaacactaaaactgaattaccttccattttaatgttagctaatattaatattcaactttttaattttgatgttagctaaggggaaggacgaggacaactttcttttgtagtttctccaacaaggtgtaagaactatcaaaaagtaaaaccataatgaccactgtggactgacaaatggctatgaaacaagaatataaaacattacaaatttcaaagaaaggtaataactatcttatgaatttagcaaatcctgcaaacgttaaaatccatgttaaggcattatctatcatggttgagagtactaaatttaagaaaattattacatgaagatcccataaaaataaactggtttagtttacaagattctaac

SEQ ID NO: 52089 - DNA, 362 bp, Homo sapiens
gagattttctactacctctaggaactatacaatattctgtatgtgttcccttggttgcatgacaatattcaagacaactttgtaaataatagataaaaaattttaatttttaacatctagtctttctagatgtatagagtctcacaaagtataattttgtaaataagtcattgtaaaatttcatggtttcattgtgttttgcaaatgtcttggcaaagaacttgataaaattttgggcttcttgacctatacatattttggtatctctttattgggttgtttagtgtaaggaaaaagttgaaagaatgtattttcaactttgaattgtaatcagaaagaaaatatattttaaccattgttta

SEQ ID NO: 52090 - DNA, 1578 bp, Homo sapiens
  misc_feature (1)...(1578): n = a,t,c or g
tttttttttttagttttttttgaatatatttacaatataaatactaatttgtttccaaagtacatattcttttaacaatttgagaaaattatctagcatacgacagtaatttaatgtaaagactctatagtagtgattaaggaaaaatagaactgttttggggataaggaatcctggctatgaatgggcatgatgatctgaacttgcaaagggaaagtgaagcagcttagtccacattgcactgctaatacaatatgttaaaggactactatgtgagatagcaacctggatatggtgttataaaaactaaacatgagagatataaaaagtacacatgcttgcatagtgtgttacttttaaagaagctcaacattttattctcattttcaataacttaaatgaacagcacttaacacattacacaaaattaaagacttgtgcatatatttgatttcaacattaatgtcaaaaatacatagtatgattttacataggatttgtgctacattagaacactagagacaaacatcacttgagtattaaggaaaacattaaatattaaataactgagaaaatgtgtaaacactaatctaactgggggttttgctattgcaacatgtccaatgaagtggtttcaacagtacaaaaaggattaggacatgagtttttccagtctacatggaatatatggatttcatttcaggaatcctttcataaaaactggtccaggataacaggagagaatccactctcctgattgttaatttggtacactccattctatgctaatttttacttgcaaacttgggtactgagtaaatactttaaatcatcactccttatcaacatcttggtgaaaactgagggtttgttggtgattcagtgtaagatttgagttcatatgcagcaccgctatcaacctccattgactttctagagaacaggagccgtacgtctctatggaggtagatctttccagatttagaactctggaacctcagatgtatgaggtagcgtaataaccgttcttctgtgtgtcggatgttctctttattaacacttctcttcacttcttgtttaacaggtacagaaaaagttctttgtcgtaggaatgtctgatgattgnctggcatatcncgtaaatcatatatcacaacaaacatcttcaccacagtcttattaggattaaataaggtcacttgtattgttcctgaaggaggtactccgataaccccttttaccaagggactctaaagtaatcacacccatataaggagagggagcattgtcatctgaaacactgtagaatgacacttcaactggaagagtcaaatgtgtggggcagaaagcaccacttgcccctacctcggcagtaaaaccatcaacaatgccgagaggatcgaaacgatagttcaagacagattcctcaaaatttcctaggagactaagacttgttataggtggagcactagaactcaaaaatggtttttcatgaatatctggatcatcttcaatgtttaaacatggtcgaggacttctagatgagaagcttttcagatgtagtaatgaagaatccag

SEQ ID NO: 52091 - DNA, 341 bp, Homo sapiens
gctccatgctctggccagcagcgacggggtgcagatccacaatactgagaacattcgtctcttactggaaggaggggcagacgtcaaggccaccaccaaagatggggacacagtgttcacctgcatcatcttcctgcttggtgagaccgtgggaggggacaaagaggaggcccagatgatcaaccgcttctgtttccaagtcacacggctgctgctggcacacggggccgaccccagcgagtgcccagcccacgagtccctcacccacatctgcctgaagagctttaaactgcacttccctctcctgcgcttcctcctggagtccggagctgctacaactg

SEQ ID NO: 52092 - DNA, 97 bp, Homo sapiens
tctattctacagcattaaatgctttacatagcatactgtgcatactaagccgtaagggtccttaggaccccctgctctagaggttgaattagaggca

SEQ ID NO: 52093 - DNA, 1582 bp, Homo sapiens
tttttttttttttttttggaacatacaggacaatttattgaagtcaatctcaagcaaaatctgaaatcagtggaatgtcattaaaaacctttccaaattaatcctcacggaagcaaaaaacacattggaattccaaagtatttgtaaaataaaaaaggcaacatctcagtaaatataatgtacaaaaattatatgttcctaccagcacacacatcagtaaagaagcttaaatattacaggcaaccctaaatacactataactagtcaacaataagctatctatatacaggttaaccaagctttacacgtttcacactatgcaataaaacataggccaatcaacaaaatcctcaaaatattatatatcttgaagtctatgtggcaacatcaagtcattatacagtaatgccctagtggaacacccccagggaaaattaacactaatcccttagtgtcaagagcttctagccaagtcacagaaactcaaaagagattgactttagtgaatattgatgctttgttattaaagactcaagtctcaagtgatttaggcaaagtaatggttcacaggatctacaaagtttattacagataaagtacagaaataaccaatctacaaagatcattatcataaagaacacgagaaaatgaaaacggagtctgtaggtatctgtgtttgttgtgcaatatcactcaaatgggtacaaatgagtttctcatatcaattccaaatatacacatacccttgtatataaaaaatgatattagccagttgtaatactcatttagcatcttgattattagtggcaatataattatcttaacatagggcatgtaacaggacaaatgagataaaataatgacaaccaagtaagttttatccagtccatttctaaactgacaagaataccttattcaataccttatataggtcatctgacagatacttgagggctgtttgcacacatcaagtgtgttggcaggcagggaggggagcagtaaaagctgagggtgctttctcactaactagcagatgcagtaatgccacataagaaaactaaggactgaataaatgactttggcatctattctattttccctttttacttacatgtaaattacttttacagcctactgaaggacaggcaattctcatccccctcccgcttcatacatacgtgccacaagcacccaaacttgtcacttatgcaatggactgaccaaaacaaaacaaaaaacagaaatgttttttgaaagacacggattacccacattttgggagtgtaacgtaagtgcaattttttgttttgtttttttccctacatagacatagtaaaaggaaagaagatgtgcttggggagagggttgacaaaatgacaaaataaagaatgtacataaaaagtatttgtaaaaatgctggtatctcatgcaggagtctcttcctcaaatgtgttcaatcaatctgagctatctactgtgaacactctcccatttgcagaacttcacctttaatccacgctaaagaggataagagactaggctatttattttcaaaacagtttacaaaacaatgctttctact

SEQ ID NO: 52094 - DNA, 726 bp, Homo sapiens
gcgtattggtagttatgcatattcttacatatattaacagtattttacatgcttaaaaccttaaaaataattgaaaatgtcaaaattatatgccatatacatttctgtgggcttgaaaatgatacaatataggttgtttctttaaagcagtcactaaaatgtgtaaacttctagatagagtaatcactaaaaaggaaagttcataccaaaagtagtaatactaggaataaaagagggctcaacactgcctttgggagtcctcctcccatgaaacatggctggatttttctccttgtcctgtgtaacctcccttactttatcatagttttactgcccttagttactctctcattccctcccaagggagagccctcaagaaaatttaggtaacccccagagtgtgggccccagcccagttgccctcagttaccaaggagcaattaggtaggaaatggccactgaaagactgaaaacaagaaaaaaactcaggtccctcacccaaactgggcagtggtggtcaggcttccacacggaaacctttcactgtcaccagagtgtccccagccagagacctgcagttgcctctgtgcttagatgctgtccaccaagggtcccgagttggaaaagggaaaggggggggagttcccctatgtagagcagagggatccccacatggagatagctccagctcatgcctgcaaatgaaggctctctagagagggaaaa

SEQ ID NO: 52095 - DNA, 396 bp, Homo sapiens
  misc_feature (1)...(396): n = a,t,c or g
gccgcgccaggggttgctgaggtagaggtggctcccctgctcctccttccacctctccgattccacctcctcctcgcaccccgctgggaactcctccaggggctgagattggattcaccgagcctgatggcagcaaaggtgggccggcttggtgtgataaagttccaactgggtccttccgcgagccctgggtccataagatgtcatcggcgagcgctggacttgaccgtcaacttgggattgttaaggtaaatggtgtctccttctgtcgccaannnnnnnnnnnnnnnnnnnnnnnnnnnnnnnnnnnnnnnnnnnnnnnnnnnnnnnnnnnnnnnnnnnnnnnnnnnnnnnnnnnnnnnnnnnnnntttcatggcagggcgcttgctggcttg

SEQ ID NO: 52096 - DNA, 805 bp, Homo sapiens
ccttctttcggaagaagggctctctgtagtctcggcttctcccgggctcggctgtcccgcctcctctccttgctgtcctccttcaccgtctccaagatgagcttggccacagagtcgctcttcatgtccctgtagtctgtcactggcgagtcccagctgtcctcccctttgaaatcaaaggatgaatcggacaagtcagaaaaccaccgatctcgctgatcgtcagaaaggctaaatttggtgtcttcattctccagaaactgatttttgttacaatattcgtcaaaagcagaatcttccctataaaccttttcttttttgagtttttctttatcttctttaaaaatcttctccttctcttttgaaattttgtcctcttttaaatcattcttcttctctaattttgagggccggtcttttgatttcttctttctctcctctttgtacagtctcagtttttcttctttcggagacttttccttcagcgatctctccttttctgctttattcgaacggtctttctcttctcggaaagacctgctgatgtctttgtttgtgtctttgattctcttcagtgatttttcatctttaaagagccattctttttcttctaatttcattttgctaagtttctcttcttttttaaagtggtcgcgatcgtgctttaacacttttagcttgttttcagtggaaagatcattctctaacagtatagccttatctgacttctgcttggagtcctcatattcgtaagtaaaacttttcaacttcagctcttggctgatggaacactgtcccttctcct

SEQ ID NO: 52097 - DNA, 401 bp, Homo sapiens
tttttttttaatctcagatgtcttcaagtttccctaattccctaatttttcttcttcttgcctcaggttggtcttgttttttctttgttaaagtgattttccttgtagtggtgtaggttctattgacagcattgctatcctgagtgtcttttcttctctttaggagtcagcattggtaatagtgctgtgctgcggaagagtggagtctaaactttttcattgccagtgccccgaaactggagtgtgaaggaccgagacaagatgaagactgtgctcatggttgctgaaaagccgtccttggcacagtcaattgccaaaatcctctctagagggagcctgtcctcacacaaagggctgaacggggcctgctcagtccacgagtacactgggacctttgctgg

SEQ ID NO: 52098 - DNA, 402 bp, Homo sapiens
tgttaatctcatccagtgtatttttcatctcagtaatgatagttttcctctttataatgtgatttcaggtagatatttttaatgtctctacttaatatgatcaatattttttccagctgcttgaacatatggaatgcgggtataataacttttaatgtttttgtctaccaattctatactctgtgacatttctggatcagtttatattgattaatattcatattcacatcagctgactattcctgcttctttccattcctggtaggtttagattggatgtcagacactataaattttataaattttaacttgttgtatgttgggtatttgtattcctataaatattcttgagctttgtcctgggagtatagttaaattactatgaaacagtttgatcctttc

SEQ ID NO: 52099 - DNA, 1081 bp, Homo sapiens
  misc_feature (1)...(1081): n = a,t,c or g
ccctggggaagctcacgtgaccctggcacccacttcagcctgattctccggaatcaggagatcaagttcaaggtagagaccttggagtgtcgggaaatgtggaaaggcttcatcttaacggtggtggagctccgtgtcccgaccgacttgaccctgcttcctgggcacctatacatgatgtctgaagtcttggccaaagaggaggcgcgccgtgcactggagacaccctcgtgcttcctgaaggtgagccggctggaggcacaactgctcctggagcgctaccccgagtgcgggaacctgctgctgcggcccagcggggacggcgccgacggcgtgtcggtcaccacgcggcagatgcacaacgggacgcacgtggtccggcattacaaggtgaagcgggagggccccaagtacgtgatcgatgtggaacagccgttctcttgcacctccctggacgccgtggtcaactatttcgtgtcgcataccaaaaaggcgctggtgccattctgttagacgaggactacnaaaaggtgctagctacgtggaagccgataaggagaatggcgagaatgtgtgggtggcgccctccgctccgggcccaggtcctgcaccctgcacaggtggccccaagccgctgtcacctgcgtctagccaggacaagctgcccccactgcccccactaccgaaccaggaagagaactacgtgacccccattggagatggcccagctgttgactatgagaaccaagatgtggcttcctctagttggccagtcatcctgaagccaaagaagttgccaaagcctcctgccaagcttccaaagccacccgttggacccaagccagagcccaaagtctttaatggtggcttgggcaggaagctgccagtcagttcagcccagcctctcttccccacagccgggctggcagacatgacggcagagctacagaagaagctggagaagaggcgggcactggagcactgattcggacacaccagggaccagcgggctagtcccgagggcatgcccagcggccagattctttttcccaggattaaaactctgaccccaggaaaaaaa

SEQ ID NO: 52100 - DNA, 386 bp, Homo sapiens
acatatttgaaaatcagtcatccatatgtaaaataaatacgaagtaacaattaactacaatattccactagctgaaatagccagtgccccagacacgtggataaaatgatatttgtacttgtgaaatagtatctttcaaattgcagtttgcccatattggaacaaaaactaaatcattttgacctgcagcctcacatttctcttatgttttgtaatattataactttcttctcaacatgcatagtttttcagaaattaatctttttgctcttgtgcaagttgctgtgtccctagattttcgctgcccccaacaaacaatccatcagtttttctatagtcagatgagcaaagtttcaagggattatatgtaactatcataatctctt

SEQ ID NO: 52101 - DNA, 599 bp, Homo sapiens
tttttttttttttttttgaacagtaattcatttaattgcaaagcattttgaaataaaaaaaatcaaacttaaaactgtgttctgttcctggaggtggcctgaggctccccgacagcccagcacctgcgttcctggtgcgaacacgctagcacagggcctgccgcagggcctggatgcgggcaacgcaggcgccaatgggctggcgctgagcctggagctcctctgccagcagctggatctgcatttccacctgttccagctctttctgcacctgctgctctacttcctggtcctcaggccccggctcctctctgttcagctccagccacctgcgcaggctgctcgcttgccgccgacaggaccagaggttctgcttggtggtctggtagtgcagtagttgctgctggatctcctcaagttcagcctcaaggtccaggctgcctgcagttgaaagtccaggcccagccctggtggctgagaagtccccaggaaggagtagatgggggtcagggacactggccagggatgaggggaccgggggcttatccctaggagtagcccgctgtgctgacaccctggctggtgcagccgccccgcag

SEQ ID NO: 52102 - DNA, 383 bp, Homo sapiens
  misc_feature (1)...(383): n = a,t,c or g
tttgannccctaacagctatgacatgattacgaatttaatacgactcactatagggaatttggccctcgaggccaagaattcggcacgagtctgatcctgctgaaagccattaaggagaaacgaatttcccagtgcccgggctgcaagagagccttataggggccctgtttcctgggcatgcgcttcctctgccagccaacccccacttgcccaagtcactggtgcaataacttttctgccttcctcagagcagagaaattgggaattgtgttaggtggtgtgggcagctctgctgagccaagcagacacggatgtnnnctcttctgggagganggtanngctnccangcctnangantncnnacnnanaccnnnnnnnctga

SEQ ID NO: 52103 - DNA, 383 bp, Homo sapiens
cagaaggtctagacgagagcccttttcccctgtggccaccatgtcgcactcccaggtccaatcatggcagaaggggaaggaaacgggtcctttttcatatggcagcaggagagagaagaatgagtgaccagcagagagggaagctccagagctttgcaaaaacaaagcttgcgctgtagtttgaccatcctggctttacatcgtagactgctctagggtaaacgattccagacagtgaactagtaaacacataattactatagtaagttctagatgaaagaaactgtttagctcaatggagattaagggagaggaggccaacttcagctaagatggtcagagaagatcacatctcaagtgaggccggaaggtggggaaggagc

SEQ ID NO: 52104 - DNA, 386 bp, Homo sapiens
cgttcctacagatggatgaggtgggccacatcccacagacagcagccagccacgtggactcctccaacgctcttcccagggatgagcagccgcccgctgacatgcttcggcctgacccccgggacaccctctatcgagtgcctctgatccccaagtcgcatctccgccacgtcctgcctgactgtccctacaaacccagctatctggtggatgggcttcctctgcagcgctaccagggactccggtttgttcatctgtcttttgtttaccccaatgactatacccgcctgagccacatgggagacccacaataaatgtttctaccagggaaaacgcctacttaccaagaccgggtcaactttcaggagtacatcaaagattgacag

SEQ ID NO: 52105 - DNA, 404 bp, Homo sapiens
ctggaaactacagtctatgctttgaagcgcaaaagggaataaacatttaaagactcccccggggacctggaggatggacttttccatggtggccggagcagcagcttacaatgaaaaatcagagactggtgctcttggagaaaactatagttggcaaattcccattaaccacaatgacttcaaaattttaaaaaataatgagcgtcagctgtgtgaagtcctccagaataagtttggctgtatctctaccctggtctctccagttcaggaaggcaacagcaaatctctgcaagtgttcagaaaaatgctgactcctaggatagagttatcagtctggaaagatgacctcaccacacatgctgttgatgctgtggtgaatgcagccaatgaagatcttctgcatg

SEQ ID NO: 52106 - DNA, 474 bp, Homo sapiens
tcaagttctaagaaagatgaagaagaacaaatactagccaaaattgttgagctgctgaaatattcaggagatcagttggaaagaaaggaaaaagaatgggaggagtcagcaaagaccaagataaaaatggcacttctctggaggagcagtggtggtggacccagagttctgagtatacctgaggcatttatgaagaacagcttcactctcaccccacctggcttctcagaacacaattagaaaaaatgactgactcaccccaaggtgtccaaaagccccaaacaagcatttgggaatagtccctaacttggcagcagcctcaagttcagtacaagatacccggcagagagagagcactgctttttcattgtttgcactgctgtcaaatcctactcttcaactaccatctctggactcacagcttccaccctttcacacaattcatgtcatcagacagagaaagtagattaggct

SEQ ID NO: 52107 - DNA, 358 bp, Homo sapiens
ctgaacttaaaagttaaatgtaaagaaaattcttaataaggttctatttcttgtgatgtataatttctactatttttattcaacaggtatggagctacattgataaatcatttttgccaaagttgtacaaaaatatagatgtttgccaaacaactaaaagtaggtaaaaagaggagtgtgagggttgtgaaagtgagctgccaaatggtagctgacaaaaagtttgttaaacaagtatccaaaaaacgaaaaccttagaaaagaagagagtgcactcaatcaaagaggaaggcttaaaggagaaaaataaaaaggattttcagcagagagacagtataaaaacaactttatatttggc

SEQ ID NO: 52108 - DNA, 1350 bp, Homo sapiens
gcgcacgtgtttcagccggcagcgctttaagatttccggggatggaatccgaaatggaaacgcagagcgccggggcagaggagggctttacccaggtcacccgcaagggtggccgacgggcgaagaaacgacaggctgaacagctgtccgcagcaggagagggcggggatgcgggccgcatggacacagaggaggccaggccggcgaagaggcccgtcttcccacccctctgtggggacgggctcctgagtgggaaagaagaaacaaggaaaattccagtcccagctaacagatacacaccattgaaagaaaactggatgaagatatttactcctattgtggaacatttgggacttcagatacgctttaacttgaaatcaaggaatgtagaaatcaggacttgtaaagaaaccaaggatgttagtgctctgacaaaagcagctgattttgtgaaagcttttattctcggctttcaggtggaggatgcacttgccctcatcaggttggatgacctcttcctagagtcttttgaaattacagatgttaaacccctaaaggggagaccatctatccagggcaataggaagaatcgctgggcaaaggaggaaaaaccaaattcaccatagagaatgtgacacggacaaggatagttttggctgatgtgaaagttcacatccttggctccttccaaaatatcaagatggcaagaactgccatttgcaacctaatcttgggaaatcctccttccaaggtttatggcaatattcgagctgtggctagcagatcagcagatcgattctgatttcaagtcagagactttttatcttgcctttggactctggtgaaaaatactttacagtggtcggtcacaagaaaccatctgaacaatttcagtcatttgaagcctccgtcccttcttccattctcagccagaagcataaacagaaaagaaagatttaagaggattcacactcaacaggttttaggataatttaaatatcaaaaattgattgttatacttacacattaggtataatttatcatttatctgaaatcacatgtagcagattgcatagtctgtaatcctctcagagggaaacttcttgtttaaacagctctatatggatttatacttttatatttataaatttataacttcatacaaatttataaacatttctttataaattgtaatttaatagattatctcagaaaaacctctctgaatgatgacccttccttaatactgggtgatgtgtgaatatttgtttgttggcagacagggtctcactttgtcacccagggctaggagtgcagtgggtgcaatctcaggctcactgcagcctctgc

SEQ ID NO: 52109 - DNA, 803 bp, Homo sapiens
cagctacgagactgagagaaaggaatgaaaggatggaagaattacaagatcaggcactgctgtctgtctgttccacggatgtaaccacagcacacgcgtggctcacggtactagtgtgataaatgcttgttacatgaaggcgtgaacagggatgagaagagacttcctggagaaacaaaaggactaacaatcaggaaggggaggtgatcggggcaggagtaaagtggacacctcagcaaagccattcgctgtgatctctgattgtgcagtgtcatgtcctgtcaccagagccccctcgtgtttgatgttggccaatgccgccagcatgatctagcaggccaaatcctaatctaccattctctgacaccagctggtcccctgggtcgtccacccgatgtcccccattctccccacttggcctcccccacaggctctccgcaaaggaccgtgggaggcacctgtgacactgcccttttcctgtgcagctgtttttcttcttcattcttttcactcctcgttactcttttttttttcactctcagcccacacaaaactaggaactttgttattctacttatttttctgtactctgtctgtttgcacacagatggatatctgagagccagcgaactttctttacctcctagtatcatttcatgaaaattagtagcacctgcacaatggggccttggagacaggaataaaaggaaaaatctggaatggaatcacatgacgcaacaggctatgaagactccctgcccggctgctatatgtctggtaaacagaataaatagtacttgagc

SEQ ID NO: 52110 - DNA, 625 bp, Homo sapiens
  misc_feature (1)...(625): n = a,t,c or g
tttttttttttgaacaacaataataaatctttattgagattttttaacaaaataatttttgaaaacaaaagctcccacatgtaaacaagaacgtaaataagttagatggcattattatgtacattcaagaatcaaaacatgttctggtaaacattccataatccggtaaaatgttttcacccatcactgttaagagaaactgtgtatttaatactatcaataacaaaacctaatctttgaacattataaaatggtttacggaatataaactatacagtttagtttttcattcctcctagcaatccgtgtcacatgtatactagtcctaagatgtattttgtcagtattagcccaaaatgtccaccatcccaaattaaccagggttacacatatctcctccagtttttatggtaggatgtgttagaacccatatattacaacatcatttttcaaaactaacctaatcctaaattctattctaactagtctggnaacctcatttatctccctgtctaccattcataanataccaaggcnattcaccttaaaaaatacgctaataccatttanatagtaattctggtaaaacgttgtttattatcaaaaatgtgattttatttaaaaa

SEQ ID NO: 52111 - DNA, 295 bp, Homo sapiens
  misc_feature (1)...(295): n = a,t,c or g
tcaggaaacttacaatcatggcagaaggggaaacaaacacatccttcttcgcatggcagcaaggagaagtgcagagcgaaaggagggggaaagccccttataaaaccatcagatctngtgagnnctcactcgctatcacgagaacagcgtggaggtaaccacccccatgattcaattacctcccactggggtccctcccacaacacctggggggattatggggagcttgcagttcaagataagatttgggntgggggacacagcccaaactattattcagttnccgtttacacgg

SEQ ID NO: 52112 - DNA, 606 bp, Homo sapiens
tctggggctttttgcaggcgggcctggggtctcagtggaggggacaaaggcaagcaaaagcccatgtccagggagccctggggtgtccccacaggcctcgcctctgagagcctctttggggtgagcagccttgtattggccacaggtgcactaaattgactgtgaatcccaaacctccccagaccaggcagggccgcctgcccccacccagaaccttccggtttgccctgtatggaaagccactctcggaaatccctctttcctgagtcagcaatcgtggcaaggggacatgtgttccaacagcggctggggagtggacctctctgtcccttgcccaccttaagccccaaatccggaccccctctgacatcactggcattgcacctgggtgtgcccccctccccacgctatggacccagataggaggggttaggcatgggggaggcacagaatgctggagagatgcgtcctggtgaacgtggggcaagccctcccaaggacccccaacagaactggccttaggttttgtcagccccactccctttccttcccctctgctcccacccactctgggggtccacatcaagatagctgggcccagtgtgg

SEQ ID NO: 52113 - DNA, 1042 bp, Homo sapiens
  misc_feature (1)...(1042): n = a,t,c or g
tttttttaaaaaaaggccctcaaatatatacagacaaaaaattactgtgaagattttttcgggaaaagctaccaaattcagtgttgtgagaaaaactggtaaccatgcagaaattttaacatctatgaattttttttccaaaatacacacatatttttttaaaaaaggaattctgtgtcaagtataactcaaaataaatacaaattcacaagtagaactattgaatacttcatatggggtaaacaccattatctcccaactagatcgctagatctaccaactgcaagcgattgtcccttttgaacgtactaaaaccacacactttcccatcccctgggctcctggccctctgagcacttaattctcaatggcacctggcctgcatggcaggggctttgctgaccacaagagagttccccagttcagccagagccgagtcaaggggagtatggaaggtgggcctcaaagcgggggaccccagcccccaaggtggctggctctgcacagatggcagggcagtggctacctgctgaacagctcactggcaaggtcactttggggtgatatcccaactccccttagccccgttgcagggaagccctggcctccagtggtctggggcctgggttagttttagggtgtggccccccaccttttganacatgctggcagncccaggcatccttggccaaggtcccccatggccggggtccctggaagggttggcaacagcacgccgcccaccactgcgaacattctctttagcagtgcggtaggatgactgtcagtggcagcttctccttgggacagaagcctggccggggccaaccccagctcacctcaacaccttggagaagacgggggaacaacgtgctcggggagtcctcagtggcagtccccagtggtggcaagggtgtccacagcctgctgcctggcctggagcaaataccttttttaagtgctcagagggtatggcccctcaaatccaccgctnagctccctggctgcaaatacactcactccatcttttcaactcgctcca

SEQ ID NO: 52114 - DNA, 456 bp, Homo sapiens
atccaggggagatgcatgtggaaatgtggtcctctggggtcagacccctgcacgggacatcttgcctttgagtgtgcagagtacatggggaaggggctgggggcaccactgtgtacctgggcccagtaaggcatttgccgtgattcccacaacggggtcaaaagctggccttcagggtgacctaacaccacctcatgccctgctatagaccttcacaaacgacttccactgctgaagcctgtaggctctgtttagagacaagaagatggctggtaatttaagcaccgatttcccaagtgcccactctcctttgtgctctgttggcttttggcctaaagctgccccagagtgagggtgtagatgtctgtgtctgtgagatgcctttcccttccccctctgctccaccgtggttgaggggggtggggcctgggcccgcacacaggtgagtcgtgtaca

SEQ ID NO: 52115 - DNA, 633 bp, Homo sapiens
  misc_feature (1)...(633): n = a,t,c or g
ggaaggaggactggttaatcccatttgaaagcatccctctctgcagcccgcaccatcttccagtgacactgtaaggatactgctttgagatgtatcaaaggctttaagtcaatgtattttctagggtctgggagacctgacattctgtgtcagaatgaaaatctgtcaagttttttcctgttaaatatgatgaaactgcaggttcacagagttacatggcttacttgaggtcacacggggatgagttttcagcactgccaataaaagcaatcacaataattattcagtaattattcataggatccatacaatccagtaaatattcacatatttagtaattattcattgaccaattcatacaaggcattttgctcaaaactgtgtttatatttggacattgtatcttcatcataatccttaaggtaatgctattatctataagtaacagataagaaacctgaagatgagggacagctaatcacgtatttggccatatttccattttttgggtttttgtgatgctgggaaggaatgacccagaatgggtcacggggaaggaggtattcattccctggtattattttcccgggggncagagggtgtgcccccttcctaggaggtactggggggccc

SEQ ID NO: 52116 - DNA, 144 bp, Homo sapiens
ttttcctaattttttttttgtaagaagacaaggttttgccatgttgctcagttggtctgaaaatccagggccaagcaatctgcacgctactcccggccttaaaagcttttgtgcctgggcgtggtggctcatgcctgtaacaat

SEQ ID NO: 52117 - DNA, 674 bp, Homo sapiens
tttttttttttttttttcctgttacgccgtcaatgcagcaggcaatgaggggaatgacacagccctctcattcccggaacgtagtcaatctcggctctgcggatttcacagaacacactttgcctattgccggctccaacaagaagtaactttccaggaagctgccggccccggacgcgccaggatcgctgcctgcgctgcgctggccgccggggattcacccggggaggcggggccgcctggggaaggctcgcggggaatacagcacactttcccctaaatccctcgtccgcgccgagtgcagggctctcagagttcacctagtcccacctctcacccacaacagtttataaatggggaaggtcagacaagttagtagcagagctgggtctagaacccaggagttcgaatacaatccgaggctcatatcgagactttaagttgtccgattccgaagtttatttgcttttttccctctttttgccttccattctccctcacccccgttcttttaggggaatgtttgagcgagacttcaaggtcaaaagatggagtccctaggggctgagggtctccatcataggcgccccaggcaaggttggagaaaaactaaacagaaagccccttccgcctacgttggcaagaacgggaacccagctccacttggtttccgc

SEQ ID NO: 52118 - DNA, 1485 bp, Homo sapiens
  misc_feature (1)...(1485): n = a,t,c or g
cggaaacccaggcacctcgacctcaagaggatcagcctggccagggtggcacaactcttccttccccgtgcacagcaggaaagctgccatcagctgagcaagtccaccaacagtttctgtgtcccacttcatctttaataaggacaccatcttcttgtattatacaagaaaggagtgtacctatcacacacagggggaaaaatgctcttttgggtgctaggcctcctaatcctctgtggttttctgtggactcgtaaaggaaaactaaagattgaagacatcactgataagtacatttttatcactggatgtgactcgggctttggaaacttggcagccagaacttttgataaaaagggatttcatgtaatcgctgcctgtctgactgaatcaggatcaacagctttaaaggcagaaacctcagagagacttcgtactgtgcttctggatgtnaccgacccagagaatgtcaagaggactgcccagtgggtgaagaaccaagttggggagaaaggtctctggggtctgatcaataatgctggtgttcccggcgtgctggctcccactgactggctgacactagaggactacagagaacctattgaagtgaacctgtttggactcatcagtgtgacactaaatatgcttcctttggtcaagaaagctcaagggagagttattaatgtctccagtgttggaggtcgccttgcaatcgttggagggggctatactccatccaaatatgcagtggaaggtttcaatgacagcttaagacgggacatgaaagcttttggtgtgcacgtctcatgcattgaaccaggattgttcaaaacaaacttggcagatccagtaaaggtctagacaaactgaaaggcaataaatcctatgtgaacatggacctctctccggtggtagagtgcatggaccacgctctaacaagtctcttccctaagactcattatgccgctggaaaagatgccaaaattttctggatacctctgtctcacatgccagcagctttgcaagactttttactgttgaaacagaaagcagagctggctaatcccaaggcagtgtgactcagctaaccacaaatgtctcctccaggctatgaaattggccgatttcaagaacacatctccttttcaaccccattccttatctgctccaacctggactcatttagatcgtgcttatttggattgcaaaagggagtcccaccatcgctggtggtatcccagggtccctgctcaagttttctttgaaaaggagggctggaatggtacatcacataggcaagtcctgccctgtatttaggctttgcctgcttggtgtgatgtaagggaaattgaaagacttgcccattcaaaatgatctttaccgtggcctgccccatgcttatggtccccagcatttacagtaacttgtgaatgttaagtatcatctcttatctaaatattaaaagataagtcaaacattaaaaaa

SEQ ID NO: 52119 - DNA, 657 bp, Homo sapiens
ttttttttttaaaatcagagactatttatattaaataactcttcccttaaaaatggcctgaccacagcaatgaatctgtaaacacagagtaatatttttcctacagtaaagagtcactttaatctcaaaagatacttttcactgttctaaatgacaggattttaagcattttttcctatatataatacagcatcacttaaaattttatttaaagacagttgattcaggcctgccttggactggaaagaagtctttaacttagtgggattagtgcttcagcttggtcccaaatattttccccattattgtttctcaaaactcatgtcatagatggttttacagatgatggttttacagatgatgtcaatgctgtttaaaatcactgaagactgagttgggcctggtaatattggagagaactgaaggcaaggatggtttaatccccaactgctaagtattggataagagatgatggccaggagtttaggtcttctcactcaccaaagacatgtgacccataagacagggccctgcttccttgattcatcttccaccaaagtctaaacaggaggttttcactatttaaaaatcttagtaaagcaattgatgacaacttcaaaaaagaaagaaacacagaacatccctaaatacaacgtc

SEQ ID NO: 52120 - DNA, 303 bp, Homo sapiens
ccaaaggctttcttgaccctccagttcacaaggatctctccattctgtacattcacagcacttacaggataggcctacattcaactggcacttcatcctatatgccttgtggcagctcttagagtattattttactgcacttttatataactcatgaattgttatatgaaatttctatggatgataagtccagcaaaaaggaatatttaatttttaattgtgatactgattcatatatcatatctctccaattacagggctcccgggggagttttaacaggggtcttcagcttccgggggttt

SEQ ID NO: 52121 - DNA, 223 bp, Homo sapiens
ggatcattggtggcacctgctagctgctaggtcgtacttgctttatgctaatagagatttattaaagcacttgttaggctccacggagaatataaaaaggaaccaatgattgaattacttgttttaaatttcctagttcaactagaccattgattcttaacaagggcaattttgccctccaggggacttttggcaatcgtcacaactggggatgggggatgcc

SEQ ID NO: 52122 - DNA, 530 bp, Homo sapiens
tttttttttgtttttagtaagacttttattttaaaaattttcaaaatataaaaataataaacaatatggatttaacaaaacataattcaactataaataataaaaatgttgacaaccccacataaacatttaacactataaacattctaagcatacaagagtagtattctagttcaagttttatcttttttcagttcaagttttattattactttaaaaaaataaacaaaaaagctgctacagcttaaccaattgctttcgctccactcaaagagcagggaaattttttccccatgccaacacacattcatgaaatgggatacttatgggcacaggtatttaaaactggaacaatccagtctccagacaagaagactcctttggtgtttttcaattcaacagtccaccgaaattgagtttaaataaaccacttattagaagaaatcttgtgccagacaatatgttctgaagtagcatcatacccaaaacaggtttagccttctgagaatgaaaagcaggcatccatgaat

SEQ ID NO: 52123 - DNA, 296 bp, Homo sapiens
gcttggaaattgtatgaaattcagacttcattgtctatgaatttttattgggactcagctatactcatgtatttatgtattgcctgttggtactttcacactacaaaggcagagttgactggttgcagcagagactgtaatggcctacaagcctaaaatatttactgtgtgactctttacagaaaatgtttgctgatttctgatagagagttgatgaagagtaagacaaaaatgtcatatagggtgaaatgcagatccttggtgatccttacaagttggtgaaactggaacataat

SEQ ID NO: 52124 - DNA, 4072 bp, Homo sapiens
attaaaagtaagttttaaagaatgtttcaaaagaaatacacaatacaactaatatagtttgtgttcttttaataaacacacttgcatagttatattacaattttgtaaaaataaaaacagattatctcatgccaagcgtgcccagcatttgcacaatctcaatacctttaatactataattttcaagacacacaaaataaaattttaaggcaaaaacagcactttgcaacaatttaataatttattacattacagtagcatcacagcagcattcaataatgccactttaggcaaaagtctttcagtatttccattatagattctgtttacaagaattcataaactggtaaaagtcattctaagaaaacttggcaaataaagctttggactggaattggtatttctttctctacttttctttcccccagtttctttcttttaaactacagtatttatattttaaaatgttttatttcaaaacatttaaatatcagttacatttttaatagttatattattttaaaatgactctttaagataaagttttagagaaactatattatggatagggctgatttacattctcaaattttctaaaaatcagctttggttttagaactgatttttttcatttctggaaaacctaaaaggtttaatcaaatactttaaaaatgattattatacattgcaattgcaatctttaaataggtgttttgattctttacctcctacagaaattcaaatttattcagttgaactcacattttaaaattctatgtttctgatgaactctaaccttctaatgttgccttctaagcaaattgaaagctgacttatactgaatgaggaagagaacaaatactcggctgaatgaggtatcgcaaaagactgcatgcactttggagaaagacttaagttattgtcatacaatttccattctttttagcgttttcttaaatatatcacaaaatacctacacaaagagtggtatttcagtcaatatagtaaatttattttccagactgaccttcagcttaaatatgccagtgtgtgatttaatccacaggtacctgatgaacacattattgtcagattggttacagttgctaaacgctatctgaaggtcattcctagtcatttatacgtgtcagggtaaaagtgaagcgatttgaactataaaaatacctttgaaataatttatcaatgtattagataaactcagtttcagaatgataaacaaaaactgttagaccaaataatgtggctaattaacagtggtacgatttctagcccgagggtttaaaatggagttaaagtaagtgtctttaaactgaactcaaagaatgcaaaagcggcaagttcagaaaataaaaggcaagaacaggtaattaatacaatttgggagagtcagttgaattcacaaggacccagtctttgcactctttcagtgaatgcaggcaaatctgttattctatctgtaaaatgaaattattgctttcctattaatgtcatatttataaaagtatcatgaggatgccaaatgctaaaaatagaggtggtctagtaactagaaattgccaccctagggagcacacatacttatctccctacatcctaataatgtgatgtattttggaacacagacattagaactttatgaagttttaactgttgattctttcccaagcatcataaagttatgatttaggcaatgtatgactgaaataattcattcataatgtataggcacattaacataaatattgcacaaaatatgcctctaactgaaactgagaggtacaaaaacatatttcactctttgtaaataactttgtgaggaaatatgactctgtgattgtatatacacttttcctgatactttgacattcacaaacagtagattgcactgcagtttgtaaacattttaagttgcataaaattctccttgattttcaaatatagtataatactgtctactaaaactcctttttgtatcaactaagtactctcacatatattagtttataataatgtttgttattattttttaaagtgttttccattccaggaaaagaagtaaattcttatgtcaaagtagccaatatggttgaagaacaggtattagagaagtctgatggtaaaatcaatcttagagcctcaaagaagctccatgaacacagaggaatgccaggtgttacacagctttccttcactctaattcattcttgactagagcccgcatgtctgttttggggacatttaaactcttaaaggatttcttatgatatttactaaatacattaagaagaatgtcaaccagtgcccctttgtatactgggacatgtagtcacctgattaaaacaggtaacaatgaactctgactttaaaatggattaagatataaatgctctaagctaggaaaggtttttcccatctcacagtcaatgatgggagcctttcattcctcaaaaataatccctttataggtcatcgaaaaagaatacacacgctgcagcacatgatgcagtaccttcattagcccagagcacataaagatcctaagcgaactaccataggacagtgctcatttttgggactggaacaaatgaaacactgcacatacctgccagagcaggccactttccttttctctgagatttaaaaagctcccccaaaatgttgttattcccatcccaaatacacagaaaacagggcatggctgtttccagtttttggcctttaaacatatctaaatgtcagtactcatagtggcatattacaaagtaataaacagtgcacacttgagggcaaaccacatattgagctaattaagagctcactgtgattaggattagatcaaacataatagcagaacataagcaaattttatctgaattctgtaaatgaatacacatgttgcaataacattaaaaaagcatggcagcctattccaaaccagtaagaatagtttgtgcaaatagtgggtctttgtgtgtttgaactcccaccacataagggcaaactcaatatgcatgctaatgacctacaattatcaaattaaaaaagaagaaaaatgctaaagatgccagagtgaacagcagggaaagccacacaaagacccactatcctttaactttttacaaataaatttaaactgtaagttagaaacacaaaaaaataatcacaagtggctctaacattcaaacgaagtaaacgaattgtgtaggagatatttgatcagggctgcctgccctgcctccacgctagagtgaaacttggatagtgggtctctggggtgctttcacaactggaagacaacattgggtcactgttgacttggatctgagtctgtcgtcatcttaacgtagtttgaaggaaagagaccagtcaccccgttgatctctccttgccaccaatcaggatcatctttgttcataacattaatgagttgtcccttggagaaactgagctcatcttcattatttgctgcatagtcatacatagcaatcacctgacatacaggatgaaaggcaggtgtggctctttcactgcttggacccaaaagtttaacatgactggcaggaaaccatcctttctgtcgcttttttcctctggcctgtaactctccttgccaccacccacttgtatttttctttagaattaatattaactgtcctggtgcaaggctaagttgttcagaaccagaagcaacatatgctgaagttacctgagcaatctcaggttttttatttgatgctccagacttgctagcactcccaaaactctcttgatcctttggtttgacatagtttgatggaaaaattccacttctatctccaatacttcctgtccaccactctccatctttctgggtcaccaatatttcttcaccttctgtgaaagtcaaatctccaggttccacacttgaatatggataaagtgcaatatattcttctccaactgaataggctgccgaggtaggtttcttatttacagctgcatacaaagcttctggttcttcccgttttacttcactcccaggaatgatcttggtcgacgcggccgcgaattc

SEQ ID NO: 52125 - DNA, 679 bp, Homo sapiens
cttctcttggttttattgtttggtagaaaaacaggctctttaacactgaataaacatctcacgaactgtcgctcctagattacaaaaagtcaaaaccaatttcctttgacgccgggcccttgaatctgacattcaagtcaccgtaatagaaaccagagctgctgaaccttacattctggaaggtgcttgaacaaaggcatgttaaggaccgtttaaaacttctagcatgtaagaagatccatctttccttccaacgcctttggataataacagcagaatcccggaggatctgctgctgagtttgagaaggccaagtttaaggattccaaactccagccttcaatatttctgcagaaacttagagaagtaacctccccgtcctctccgctggcttccccaagtacagatgcaggatgcaggtctttcttcctgctacccaggcaccgaggactcaaaccatctcaccgtctcatcactgggcttcttcaatgggctcttggaggaagaagcttttcgtttttgccaatcttcagtccttagaaaagtcctttttgttaagaaaaggcagggagggttaactaagttctaagaattcaataagaaaaggaaagaggtaccttttatgaaaaggacttccaagctctctcagccagcaatttaactcaaacccacgcgtccg

SEQ ID NO: 52126 - DNA, 7003 bp, Homo sapiens
  misc_feature (1)...(7003): n = a,t,c or g
gcgaagtggtgactgctctgggcaagacctaccatcccaattgctttgcttgtactatctgcaagcgcccgtttccacccggagaccgagtcacattcaatgggagagactgcctttgtcaactctgtgcacagccgatgtcgtccagtccgaaagaaaccaccttctccagcaattgtgccggctgcggaagagatatcaagaatgggcaggcgctgctggcgctggataagcagtggcacttggggtgctttaaatgcaagtcctgcgggaaggtcctcaccggggagtacatcagcaaggatggtgctccgtactgtgaaaaggactaccagggactctttggggtgaaatgtgaggcgtgtcaccagtttatcacagggaaagtcctggaggcaggtgacaaacattaccaccccagctgtgcacgatgcagcagatgcaaccagatgttcacagaaggagaggaaatgtatcttcaaggctccaccgtttggcatcccgactgtaagcaatctacgaagaccgaggaaaagctgcggcctaccaggacatcctcggaaagtatttattctaggccaggctccagtattcctggctcaccaggtcatactatctatgcaaaagtagacaatgagatcctggattacaaggatttagcagccattccgaaggtcaaggcaatttatgacattgaacgtccagatcttattacctatgagcctttctacacttcgggctatgatgacaaacaggagagacagagccttggagagtctccgaggactttgtctcctactccatcagcagaagggtaccaggatgttcgggatcggatgatccatcggtccacgagccagggctccatcaactcccctgtgtacagccgccacagctacactccaaccacgtcccgctctccccagcatttccacagacctggcaatgagccgtccagcggccggaactcccctctcccttaccggccagacagcctccctctaactccaacttacgctcaggcccctaaacatttccatgttccagatcaaggaatcaacatttaccgaaagccacccatctacaaacagcatcgtgccttggcagcccagagcaagtcctcagaagatatcatcaagttttccaagttcccagcagcccaggcaccagaccccagcgagacaccaaagattgagacggaccactggcctggtcccccctcatttgctgtcgtaggacctgacatgaaacgcagatctagtggcagagaggaagatgatgaggaacttctgagacgtcggcagcttcaagaagagcaattaatgaagcttaactcaggcctgggacagttgatcttgaaagaagagatggagaaagagagccgggaaaggtcatctctgttagccagtcgctacgattctcccatcaactcagcttcacatattccatcatctaaaactgcatctctccctggctatggaagaaatgggcttcaccggcctgtttctaccgacttcgctcagtataacagctatggggatgtcagcgggggagtgcgagattaccagacactcccagatggccacatgcctgcaatgagaatggaccgaggagtgtctatgcccaacatgttggaaccaaagatatttccatatgaaatgctcatggtgaccaacagagggcgaaacaaaatcctcagagaggtggacagaaccaggctggagcgccacttagcccctgaagtgtttcgggaaatctttggaatgtccatacaggagtttgacaggttacctctttggagacgcaacgacatgaagaaaaaagcaaaactcttctaagtcccactcgtgtaatggcaattagagaaaggactgaccagtggcggtgcccccataggatgtcatattgaggcccaaacttgattggagatttgcaaactaccgtcgctcagcaacaccaaaaagagaaagtctggttaaaacaccatgagtcaaatgtcgggccagccaacagtaacacttgccaagaagcatggcgtagaaatttctatgttccgaaacacagagtagtgtccacatgtgaccttttcacattaccttatgtatacaacaggagctgcgttgttttcttctttttcttttcctttatctgttgtccaacaacagtgctgactgtccggataagagctggcaagtgcccttaggatgccgcatgggaaaaatcggttatcataatttcaaagtataaatatatttattatgtagcgctgcggctaagaaggaagagtgaggggtctgtccatggggtggcagtgatttcacacccgcctttcttgaatggcttcgtgttactcagccgtgccctggcaggaatggaactccatcagggaacagggcagctctgtttgaatggggtgaaaaacagcaaaattaattcttagcaagctccttgttctctactgttcaccgggacctggctggcaaatgacttagctattagtatatttaaaaactgttcaaaagcaaaagagaaggaacaggaatgaaaggaaaccttcccttaactctttctgcttcccatagcaggtctggttcctgctccccgcctaggacaggagctgtctggagctccacctttgcaaagaaaggaaaaacacaaattgcccccagattggcccagtggcatgccattaggtgattttgcataggggccatatcattcatggccaaaaaaaaccaaaaagcaaaaaacaaaaacaagtcccatgtcctactgactctagttcttccagtcgttatcctctgctgtctctctggcatcctatgaatcagatcaagcccatgctgttgttggtttttaaggtttctttcaataataggctaaggaaagacatgtttttctcttttaaatctctgcaactccaaagtagactccttcgaacgtatttaatttggccttttcagctttcttcttgcccagctctgtcgaattcatgggtgtgtgtgcacatgttggtttcactcacccagagtaattttgtgagcatgcatgtgctttttaatttctgcttgaatgtttgtcctgctgtgttgcagcttctaaagacattgtcaccgagtgtgtgtgactcaaagatcaagagtgaggctaaactgcgaccccaacatcacttccttcatggaaaggtgttggcgctgatgtagctcatggaaggatcagactgggaaccacagaggaaggatgaggtgggatgtggaggtcagagcatctcacgagagtccctcaggctctgcaacactagattcgaatatgagcctagggtttccccaacacgtgcgtgcatatgaaaccacatcatgattcccgacgtgagttagatgagggagagtttgtgtaactccacacccaggagggtaagccactttattatcatgctttggggctgtgcttaagaatttaagctctgttttaaagccgaagaagaaaacatttgaatttaccttcatatgccactaagaacaaaagctctgaagttcttcctgctggcaccaaatattaggattacaagctgtctctctgacaccagtggtaaaaaagcaagtagaatagtttctgagtctgtgttgcagcctctgacacgtggctcactgctgtcatttggggggtggaatgaacagtcactgttctatagcatcctcctgtgctcttacctaaggaatctaaattgtcctagccttccattgctatgcactgaatgaggactactctnnnnnnnnnnnnnnnnnnnnnnnnnnnnnnnnnnnnnnnnnnnnnnnnnnnnntctactaacatgtttagcaaatggctctgacagggtggccatgagcagatgagaccagctcttgcttggttggaagccacactgcagtttgcagtttagcctttggtgtctcagtggcctcttgcttattccatgctttttctatcccatcctctctctgtgccctcctgcaatggcagccttggcacaatgcctgggtgtcctcatccttgctttactctggaaagtgtggggatggagaggatggtgcatttccagtgcttccttacctgtcaataacaatggtggccacctgggtcccagcacttggctggtggagagatttttttcattatggagctaataaagggtccctacgttttacattgattaatgaattatcacccagacatgtgcagatgaaatgtcaatataagaaaaatcaaggtatttgggaaacatgggcataatcaggtagttttgctaaaattcctcttccttggtctacataaagaagacatgggtctgtcatagaatggggacattagactgaaaactgggacaacccccttccttattttatagagactaggagttaaggggcctgcctaagattgcagtgataaagaactgaaccctaaatcagctcccactaatgaaaccctgctttccttgtatcttttaaactcagttctgcatccaacttgagaagaaaaaaagcttctttccatatcaagtaccatatgagttcatttaaactgcaccttgcagaaatgcattgccagaaagcaccagtagcctcctatctgcaagcagagtagtgctctgctctggggaggggtcattggaaaccataatgcagagtgggccccctactccatttcccagcaaaaggctccagctggagggatgggttgtggggcaacctggttcctgctaactgccagattgaatgtgtgggctagaatgcctgcgcatttagttaaactgggctcagcatgcttgtcctcaaaatgtccatcctggtcacagcacacaagatggctattggtctgcttttaccctaccctgtactatacatgaaaattccagttattaacacactcaaactggtggagcttgttcaccctaggaaggggattgtatatatggcaggcttccctggtgccgatgtaaagggctacatttgggaacatttgacttccttgggactcttaagtgcatactgatggcatgaagtaaaaggggcctcaatgatgataggaaaatcagttcttttaaaatttcttcaagaaaatccaggctatcacatagtctttctgtgtgacttattaggagataggaagagcattgggaaacttgcacagctagctatgcatctacattttggtttggggttagttatgaaatgttcttaatatgacgtgttcaataacttcacataaacttcctgttctccaaaacctcaaagagatagagttaatgagttgttgtttttttttaaatgggggtagttttctatctgtcatgggctctagcatctactccgctacccaattctgtcatctccaagctgagtttcctcttctgaggcagaggctggagcagttctttttcagttctcatcctctccatcccaatccagtatatcaatcaactctaactcggagacgtctagctggcaatgtttctaaaactttcactgggatttctttaggacattgaagcaaacatttttttctaaggaattgcttctcagatgatgatatcaaatgtatatggcttttgcaagtttgaaaagttcaaattaaccacttttgactaggtaagtctttctaaaaaccatttaaagctaactgggtcttagcatcctcctgtgtatggaagagacaggtgaccgctccaggttgggtgctcacagaacccttttcctgactctcatggaagatggtggaaggaaaatagactgtctcatcaaccctcctgtgtcctctgaagcaatctcagtttttattaaccacctcttctgtgtttctggtagctatttaacctgtatttaatctgtacttcctatgccagcctcaattttatttgatttttaaaattattctcttctaaccaatgaagtgtttgtcagtatgccccaaagcttgctcttttgtgctcccttttgaataactttctatccagaaaaagagattatttgggacttgagatttgcagtgataccaacttatagcaatgatgtactttaagggaactacccaactatgttgtgatagaagaaagagaaaccttcactttggcattttttttaatcactgtttatttttctgtttgcggcccaggaagcagtgggaggtggtggcagatatgctttgcatatggattgttatgtttttatttgggcaagtttaatcatggaaaactcaaaaagaaggggggaaatggtcagtttaagccaaaagaaactttctaaacaatgtataggtacacagcaaaattaaacaaatccaacaatttctgaagcttagtgtaattgagtggtggttgttattcaataaaattattcccaaaagtgtttcctcctaagagtgcagttcccatgagtcacttcctgaacccattgaccaaaggtggacagagacaatcctgtagaccttgacattcagaaagatgtgagctgcttactgatcatatatgcatacgtttctttacagcagaggaaaccattgtccacaaaactgatgttcttttggggttttatgtacagacttgtccaatcatgtgtgtggttcctgcgagttgctgatgactccgcattgaagctctctgagttctttgattttaagttgggtttatggaattttttcaaatgttggaaggcgtgtggttcttcctgccctccctccccttttggaaatatgaaagcaaatgtttagaagaattccttttgaaaagctgtgtcgtgttccctgtgaaactgagcaggtgtgtgttggcgcgctaagtgccacatgcttgtgtgtagaggaggaggtggccctgccggctccgcgctgctgtgcctgtgatccctacctgctccccgctcctgttgccagcagcactcactgcactcctttgtcatatactctgcatcactgtcatactcacaacttcgtgaataaagttgtgtgctttattcgtaaaaaaaaaaaaaa

SEQ ID NO: 52127 - DNA, 645 bp, Homo sapiens
ctacccaccactgccgcccgcctgccgatgccaacctcagcaagaacggggggctggaggtctggctgccccgggacaggcaggggcagctgagtcctgcctccgcttcacctccccgcagtggggactgccctttctcaatggcacagaagccaatggcacaggggccacagagccctgcaccgatggctggttctatgacaacagcaccttcccatctaccatcgtgactgagtgggaccttgtgtgctctcacagggccctacgccagctggcccagtccttgtacatggtgggggtgctgctcggagccatggtgttcggctaccttgcagacaggctagggcgccggaaggtactcatcttgaactacctgcagacagctgtgtcagggacctgcgcagccttcgcacccaacttccccatctactgcgccttccggctcctctcgggcatggctctggctggcatctccctcaactgcatgacactgaatgtggagtggatgcccattcacacacgggcctgcgtgggcaccttgattggctatgtctacagcctgggccagttcctcctggctggtgtggcctacgctgtgccccactggcgccacctgcagctactggtctctgcgcctttttttgc

SEQ ID NO: 52128 - DNA, 564 bp, Homo sapiens
ggacattcttttccggcttctcctgattgaactgatgcacagaatctttttactttgcaatagatttgtactaaccagacctgttctatcatgttttgaggagttaacttttttctgtgcagataatgttgaaagtaagttaatttgtttctgcatatatgcacatacatacgtaaggatcttaaacccagtcttgacagactagaagttaagtttaatacagaaaatgtcctgttcacttgaaagaaaagacctactttttaaatggacactatcttggttcttttttttttaagtcatctttttgttataagtgacctttgtctggaatgtctgaaaagtagttaatgctttttggtattgaagtaatgggtaactaaaatggacttccatagtattgactgtagaaggagcctctacaatattgactatatatttttataaactactggcaaggaacttacccagctgttatacatgttttcagttctctttgggggccatgtcctacatttgcatggatggatgcatgcattgcctagtcaactcacttaaaaagctctt

SEQ ID NO: 52129 - DNA, 4928 bp, Homo sapiens
cggacagattccagtctgctgttagatgattattcatccaagttgagccccaaaccaaagagagccaagcacagcctactgtctggagaagagaaagaaaatttgcccagtgactacatggtacccattttctcaggacgtcaaaagcatgtcagtggaattactgatacggaagaagaaagaattaaggaagctgctgcttatatagcccagaggaatcttcttgctagtgaggaaggaatcacaacacctaaacagtccacggcatccaagcagaccacggcatctaagcagtccacggcatccaagcagtccacagcatccaagcagtccacggcatccaggcagtccacggcatccaggcagtctgtggtttccaaacaggccacatccgctcttcaacaggaagaaacttctgaaaagaagtcaaggaaagttgtgattcgaggaaaggcagaacgcctgtccctgaggaaaacattagaagaaaccgagacatatcatgccaagctgaatgaagaccatcttctccatgctcctgagtttatcattaaacctcgctcccacacggtttgggagaaggagaatgtaaaattgcattgctccatagcaggatggccagaacctcgtgtcacgtggtataaaaaccaggtgccaataaatgtccatgcaaaccctggaaagtatattattgagagtcgatatggaatgcacactctggagattaatgcatgtgattttgaagatacagctcagtaccgggcctcggcgatgaatgttaaaggagagctttcggcatatgcttcagttgtggtaaaaaggtataagggagagtttgatgagactcgcttccatgctggggcttccaccatgcccctcagctttggtgtgaccccatatggttatgcatcccggtttgagatccactttgatgacaaatttgatgtgtcttttgggagagagggagagacaatgagtctaggctgtcgtgttgtcatcactcctgaaattaaacatttccagccagagatccggtggtacagaaatggagtacctctttctccatcaaaatgggtgcaaacactttggagtggagagcgggcaacgctgacattttcccatctcaacaaagaagatgaaggcctctatacaatccgtgtacggatgggagaatattatgaacaatatagtgcttatgtctttgttcgagatgctgatgcagagattgaaggagccccagctgctcccttggatgtgaagtgcttggaggccaacaaagattatatcatcatctcctggaaacagccagctgtcgatggagggagtcctattctcggatattttattgataagtgtgaggtgggcacagatagctggtcgcagtgcaatgacacacctgtgaagtttgctcgttttcctgtcactggattgatcgaaggtcgttcctatatcttccgagttcgagctgtgaataaaatgggaataggtttcccatctcgagtttccgaggccgtggctgctctggatccggctgagaaagctagactaaagtcgcccctcagcaccctggactggacagtcattgttactgaagaggaaccttcagagggtattgtgcctggccccccgacagacctctctgtcactgaggccacccggagctatgtggtgctcagctggaagccccctggccagcgtggtcatgagggcattatgtactttgtggaaaagtgtgaggcaggaacagaaaactggcagcgagtgaacacggagctccctgtgaagtctccccgctttgctctgtttgacttggccgaggggaaatcctactgtttccgtgtccgctgttctaattctgcaggagttggtgagccctcagaggcaacggaggtgactgtggtaggggacaaacttgatatccccaaggctcctggcaaaatcatcccaagcagaaacacagacacctcagtggtagtttcgtgggaggagtccaaagatgccaaagagctggtcgggtactacatagaggcaaacgttgctggctctggcaagtgggagccctgtaacaacaaccccgtgaaaactcaccgattcacttgtcatggattagtgactggtcagagttatatattccgggtcagagcagtcaatgcagctggacttagtgaatattcccaggattcagaagctattgaagtcaaagctgctattgcaccaccatctccaccctgtgatatcacctgtcttgaaagttttcgtgactcaatggttcttggatggaagcaaccagataagattggaggggcagaaattactggctattatgtgaactatcgcgaggtcattgatggggtaccaggaaaatggagagaagccaatgtcaaggctgtcagtgaggaggcatacaagattagcaacttgaaggaaaacatggtgtatcagttccaagtggcagccatgaacatggctgggctgggcgcgccctccgcagtaagcgaatgcttcaaatgtgaagagtggaccatcgccgtcccaggaccaccgcacagtctcaagtgtagtgaagtcaggaaagactcactggttctccagtggaagccgccagtccactccgggcggactccggtcactggttacttcgtggacttgaaggagaaggccaaagaagaccagtggcgagggctcaatgaggcggctattaaaaacgtatacctgaaggttcgaggcctcaaggagggcgtcagctacgtgttccgtgttcgagccataaaccaggcgggagttgggaagccatctgaccttgctggccctgttgtggcagagacccgtccaggaaggaaagaggttgttgtaaatgtggatgatgatggagtcatttcattgaacttcgagtgtgataagatgactccaaagtccgagttctcctggtccaaagattatgtatccactgaggactctccacgattggaagtcgaaagcaagggcaacaagacgaaaatgaccttcaaagaccttgggatggatgacttgggtatttactcttgcgatgtaacagacactgatggaatagcatcaagctacttaatagatgaggaagaattgaaacgtttacttgctctcagccatgaacacaagttcccaactgtcccagttaaatcagagttggcagttgaaattttggagaaaggccaggtccggttttggatgcaggctgagaaactgtctggcaatgccaaagtcaactacatatttaacgagaaggaaatttttgaaggcccgaaatataaaatgcatattgaccgaaacactggcatcatcgaaatgttcatggaaaagctacaggatgaggatgagggaacgtacactttccagcttcaagatggaaaagcaactaaccattctactgttgttctcgttggagatgttttcaaaaagctccagaaagaagctgaattccagcggcaagaatggatcaggaaacaaggtcctcactttgttgagtatttgagctgggaagtgactggtgaatgtaatgtactattgaaatgcaaggtggcaaatattaagaaggagactcatattgtgtggtacaaagatgagagggagatatcagtggatgaaaagcatgactttaaggatggtatatgtaccctgcttataacagagttttccaagaaagatgctgggatttatgaagttatcctgaaagatgaccgaggaaaagataagagcagactgaagcttgtggatgaagcctttaaggaactgatgatggaagtatgcaaaaaaatagctttgtctgctacagacctgaaaatccagagcacagccgagggcatccaactgtactcttttgtaacttactatgtggaggatttgaaagttaactggtccccacaatgggtccgccattaggtactcagacagagttaagaccggggtcactggagagcagatctggctacaaatcaacgagcccaccccgaatgacaaagggaagtatgtcatggagctctttgatggcaaaactggacatcagaagacagtggatctctctggacaagcatacgatgaggcctatgctgaattccagaggttgaaacaagctgccattgccgagaaaaatcgtgcccgggtgttgggaggtctcccagacgtggtcaccatccaggaggggaaggcccttaatctcacttgcaacgtgtggggagacccgcctccggaggtgtcgtggttgaagaacgagaaggccctggctcagacggaccactgcaacctcaagttcgaggctgggaggaccgcgtacttcaccatcaacggtgtgagcaccgctgactcgggcaaatacgggctggttgtgaagaacaagtatggctcggagaccagcgacttcaccgtcagcgtgttcatcccagaggaggaggcgaggatggccgccttggagtccctgaaaggtggcaagaaggccaagtgaccggaggtgcgaggagagcagccggcctgtgtgacttgggtgtgaatggtttgggttaaggatgagacgtcttcatgctttctcctccctattattttctggcttgaggggaaaataatgtcaggtctttcactcatataaaaaagcaccaactaatgacactttaattgtttttctttatctacaaaattatgtgttaagaaaataccattcatagcatgaagattaggaaacagttttaaggagaagacttgaatgaagttggagggacattgaatgatggtcagagggcagacgaatgtgtcgtggggcgaattgggatttgctgcagctgtgaagccatggccgtgtctcgtgtgttgttacagaggtgatgtgcttttcgacgggcgcctcgtggcttggaacctcctctgtatgaataaacagttttcacgtctgtcctcttccccga

SEQ ID NO: 52130 - DNA, 1278 bp, Homo sapiens
ttttttttttttgcattaatttaagatctttataattaagtaactcactggggttgtcacagtatgttataaaattacacagataattagagatatatgttacatagaaatgctgattttacactctcttctgagtacaagcatttgattacagaggctcatagcacaacaaaatgtatttcacgggacactgatgcccctattctgatattgacaaggcaaacatcagcagtagcagagtcaacaaagcaaagcaagatgaaatgaaactagatgtaggtaaaacaagctaaaaatatttttaagtgtttttgtttattgtcatggtggctgttttctacttacaagattgcagtactctaatttagccaagtaattgctgctgtaaaatccaaatctacagagcgcacaattttttaaatggagtgtgcattcctcaagcaagactaaaaacaatcttacttgggtctctaatattaagcttcagaacagttttgcaacttttgacctgaacaaatctcttatccataaaacaagaggaataaaagattgcatacgtgcatttaaaaagtaactttattactcccaggtcaaaaaaaaaaaaaaaagggaaaagaaggagaaagggaaggatgagggggaggagggaagaaaggaaggaagaacaaaaaaagaaaaaagaaaagaaaagaaacagaaaggcactctatctaccctataccctatatattttacttgtatttctaatcttggactatgtaattacttcattcacttgtgtgttttaattttcatggagagagaagagaaagaaagattttccagaaaaagcaaaaactgtgtgtgtgtgtgtctgggtgtgtatttaaataacataaacaaataaaaacagtgccacatacttattgccagtgcagcaacaatgtaaaacaaaaacaaaacacaaataattctgaatgttcctaatatctctttgatttataaagtttaaagtgactctttactcagtggatgtgggcttaaagtaatcatgattaacattttaacatgaaagtagagtatacaactttatctcatgttctaaaacttaagaaatttcattgtactcagattatccacttactgtgcattcaaatcgctttaattgaattctatctcacaaaatccttcatttaaatggttgttccaagtttaataaaagagtttcttgcaatccacaactcgagtcatttgtatcttgtacagtaaccaagacaagaagcatacataactgcttct

SEQ ID NO: 52131 - DNA, 6723 bp, Homo sapiens
gcacgagcggctccggcggcgccatgacgcgctgggtgcccaccaagcgcgaggagaagtacggcgtggctttttataactatgatgccagaggagcggatgaactttctttacagatcggagacactgtgcacatcttagaaacatatgaagggtggtaccgaggttacacgttacgaaaaaagtctaagaagggtatatttcctgcttcatatattcatcttaaagaagcgatagttgaaggaaaagggcaacatgaaacagtcatcccgggtgacctccccctcatccaggaagtcaccacgacactccgagagtggtccaccatctggaggcagctctacgtgcaagataacagggagatgtttcgaagtgtgcggcacatgatctatgaccttattgaatggcgatcacaaattctttctggaactctgcctcaggatgaactcaaagaactgaagaagaaggtcacagccaaaattgattatggaaacagaattctagatttggacctggtggttagagatgaagatgggaatattttggatccagaattaactagcacgattagtctcttcagagctcatgaaatagcttctaaacaagtggaggaaaggttacaagaggaaaaatctcaaaagcagaacatagatattaacagacaagccaagtttgctgcaaccccttctctggccttgtttgtgaacctcaaaaatgtggtttgtaaaataggagaagatgctgaagtcctcatgtctctatatgaccctgtggagtccaaattcatcagtgagaactacctggttcgctggtccagttcaggattacctaaagacatagacagattacataatttgcgagccgtgtttactgacctcggaagcaaagacctgaaaagggagaaaatcagttttgtctgtcagattgttcgcgtgggtcgcatggagctgagggacaacaacaccaggaaactgacctcggggttgcggcgaccttttggagtggctgtgatggatgtaacagatataataaatggaaaagtagatgatgaagataagcagcatttcattccctttcagccggtggcaggggagaatgacttccttcagactgttataaacaaagtcatcgctgccaaagaagtcaaccacaaggggcagggtttgtgggtaacattgaaattacttcctggagatatccatcagatccgaaaagagtttccgcatttagtggacaggaccacagctgtggctcgaaaaacagggtttccggagataatcatgcctggtgatgttcgaaatgatatctatgtaacattagttcaaggagattttgataaaggaagcaaaacaacagcgaagaacgtggaggtcacggtgtctgtgtacgatgaggatgggaaacgattagagcatgtgattttcccgggtgctggtgatgaagcgatttcagagtacaaatctgtgatttactaccaagtaaagcagccacgctggtttgagactgttaaggtggccattcccatcgaggacgttaaccgcagtcaccttcggtttaccttccgccacaggtcatcacaggactctaaggataaatctgagaaaatatttgcactagcatttgtcaagctgatgagatacgatggtaccaccctgcgagacggagagcacgatcttatcgtctataaggccgaagcgaagaagctggaagatgctgccacgtacttgagtctgccctccacgaaggcagagttggaagaaaagggccactcggccaccggcaagagcatgcagagccttgggagctgcaccattagcaaggactccttccagatctccacgctcgtgtgctccaccaaactgactcagaacgtggaccttctggggctcttgaaatggcgctccaacaccagcctgctgcagcagaacttgaggcagctgatgaaagtcgatggtggtgaagtagtgaagtttcttcaggacacgttggatgccctcttcaacatcatgatggagaactcagagagtgagacttttgacacgttagtctttgatgctctggtatttatcattggactgattgctgatagaaaatttcagcattttaatcctgttttggaaacttacattaagaaacactttagtgcaacgttagcctacacgaagttgacaaaagtgttgaagaactacgtggacggtgctgagaagccgggagtaaatgagcagctgtacaaagccatgaaagcgctagaatccatcttcaagttcatcgtgcgctccaggatcctgttcaatcaactgtatgaaaacaagggagaggctgacttcgtggaatctttgctgcagctcttcaggtccatcaatgacatgatgagcagcatgtcagaccagaccgtccgggtgaagggggcagcactgaaatacttaccaacgatcgtcaacgatgtgaaattggtgtttgatcccaaagagctcagcaaaatgtttactgaattcatcctcaatgttcccatgggcttgctgaccatccagaaactctactgcttgatcgaaatcgtccacagtgacctcttcacacagcatgactgcagagagatcctgcttcccatgatgaccgatcagctcaagtaccatctggagagacaggaggacctggaggcctgctgtcagctgctcagccacatcctggaggtgctgtacaggaaggacgtggggccaacccagaggcacgtccagattatcatggagaaacttctccggaccgtgaaccgaaccgtcatttccatgggacgagattctgaactcattggaaacttcgtggcttgcatgacagctattttacgacaaatggaagattaccattatgcccacttgatcaagacttttgggaaaatgaggactgatgtggtagatttcctaatggaaacattcatcatgtttaagaacctcattggaaagaacgtttaccccttcgactgggtgatcatgaacatggtgcaaaataaagtcttcctgcgagcaattaatcagtatgcagatatgctgaacaaaaaatttctggatcaagccaactttgagctacagctgtggaacaactactttcacctggctgttgctttccttactcaagagtccctgcaactggagaatttttcaagtgccaagagagccaaaatccttaacaagtacggagatatgaggagacagattggctttgaaatcagagacatgtggtacaaccttggtcaacacaagataaagttcattccagaaatggtgggcccaatattagaaatgacattaattcccgagacggagctgcgcaaagccaccatccccatcttctttgatatgatgcagtgtgaattccattcgacccgaagcttccaaatgtttgaaaatgagatcatcaccaagctggatcatgaagtcgaaggaggcagaggagacgaacagtacaaagtgttatttgataaaatccttctggaacactgcaggaagcacaaatacctcgccaaaacaggagaaacttttgtaaaactcgttgtgcgcttaatggaaaggcttttggattatagaaccatcatgcacgacgagaacaaagaaaaccgcatgagctgcaccgtcaatgtgctgaatttctacaaagaaattgaaagagaagaaatgtatataaggtatttgtacaagctctgtgacctgcacaaggagtgtgataactacaccgaagcggcttacaccttgcttctccatgcaaagcttcttaagtggtcggaggatgtgtgtgtggcccacctcacccagcgggacgggtaccaggccaccacgcagggacagctgaaggagcagctctaccaggaaatcatccactacttcgacaaaggcaagatgtgggaggaggccattgccttgggcaaggagctagccgagcagtatgagaacgaaatgtttgattatgagcaactcagcgaattgctgaaaaaacaggctcagttttatgaaaacatcgtcaaagtgatcaggcccaagcctgactattttgctgttggctactacggacaagggttccccacattcctgcggggaaaagttttcatttaccgagggaaagagtatgagcgccgggaagattttgaggctcggctcttaactcagtttccaaacgccgagaaaatgaagacaacatctccaccaggcgacgatattaaaaactctcctggccagtatattcagtgcttcacagtgaagcccaaactcgatctgcctcctaagtttcacaggccagtgtcagagcagattgtaagtttttacagggtgaacgaggtccagcgatttgaatattctcggccaatccggaagggagagaaaaacccagacaatgaatttgcgaatatgtggatcgagagaaccatatatacaactgcatataaattacctggaattttaaggtggtttgaggtcaagtctgttttcatggtggaaatcagccccctggagaatgccatcgagaccatgcagctgacgaacgacaagatcaacagcatggtgcagcagcacctggatgaccccagcctgcccatcaacccgctctccatgctcctgaacggcatcgtggacccagctgtcatggggggcttcgcaaactacgaaaaggccttctttacagaccggtacctgcaggagcaccctgaggcccatgaaaagatcgagaagctcaaggacctgattgcttggcagattccttttctggccgaagggatcagaatccatggagacaaagtcacggaggcactgaggccgttccacgagaggatggaggcctgtttcaaacagctgaaggaaaaggtggagaaagagtacggcgtccgaatcatgccctcaagtctggatgatagaagaggcagccgcccccggtccatggtgcggtccttcacgatgccttcctcatcccgccctctgtctgtggcctctgtctcttccctctcatcggacagcaccccctccagaccaggctccgacgggtttgccctggagcctctcctgccaaagaaaatgcactccaggtcccaggacaagctggacaaggatgacctggagaaggagaagaaggacaagaagaaggaaaaaaggaacagcaaacatcaagagatatttgagaaagaatttaaacccaccgacatttccctgcagcagtctgaggctgtgatcctttcggaaacgataagtcccctgcggccccagagaccgaagagccaggtgatgaacgtcattggaagcgaaaggcgcttctcggtgtccccctcgtcaccgtcctcccagcaaacaccccctccagttacaccaagagccaagctcagcttcagcatgcagtcgagcttggagctgaacggcatgacgggggcggacgtggccgatgtcccaccccctctgcctctcaaaggcagcgtggcagattacgggaatttgatggaaaaccagggacttgctgggctcgccaacacctccacctccccctccacaccagaggcatctgccacctccactgcccagcaaaactccgcctcctccccctccaaagacaactcgcaagcagacatcggtggactccgggatcgtgcagtgacgtcgcaaggctctctggaaagagtgtgctgcccctccccatctccatgccctctccttctgtgtcccctgagtctgctgtttacctcattgggcctgtgatgttaacatttcgtgcgactgctttttcttcaaaggagttcagttctcaccatggagtgagtggcctttagcgtcatggagcaaggtgggtctgggaggtagatatgggtccgggatgtgctatcgtagttatcagagttgggggcctctgagtgtgtctggctctgagagagtctgagtcttgcccaaacattctttctttttgtgccaaatgacttgcatttgcaaagagctcaattgctctgagctcagccaagtaggagaggctaggccatcactcttgggaagctgtgtagtgatgatgtataagaatcctcctcactgtcatgggatgttgtatccagcccctccttgttccagccggtggtgtgacttcgttggttgaggtgtgtctccaacctacatcagaccatgaagttcaacccctccagggaagctcctgatttcccctgcataattgaaaataggatatttctcagctattgaacagttactaatttatggggtggaaacagcattaagaatactgaatcaaatggaaaaacaaatgaatacaggaagataagtgttcgttcttttctgaaaaagagtatgtgtaccacaagagctggttttaattgggtgaattgtttttgtcctcattctgtacagaaatttgtatatatgatggttcttagaacttgttttaatttttgtggtccttctgtttattataataggcgtccaccaatgattatcccatatgtgttcttaatttttaactgctggaagtgttaaaacacacacacacacacacacacattttttttttgagaactccaaagtcctgaaaattttggtggacaatgatttttaaaaaactaactttgtataacctaatatttgtattctctcatctatatttttttattcactataatcatgatactcttctaatagacttaaaagttaatcattgacaacgaaaaataaaatgttattttaaaagaaaaaaaaaaaa

SEQ ID NO: 52132 - DNA, 432 bp, Homo sapiens
gtaaattatatctcaataatgctgttactctaagagaaaaaaaggtcatcgacatgattatctactactcacatgctatagaggtcaattaataccacttgcaaatgagcaaggaagaagaaaggtttatttagccaaagagaatctgagaatcttgatactaagaattgctaattcatataatggcttagaatagttttacttcatactgtgatcaataatggattagctactttatccttatctaggacaaattccaagcataggcagctacagtctgaaaagaattattataagctagaatttttctaagaaaaagatttgttctcaggaatacgaaaatagatacaaggaactgacccagacatgacaataagtctaacaaaagttaacactagtaataatgtgtcagataaaaggtagaactgagct

SEQ ID NO: 52133 - DNA, 898 bp, Homo sapiens
gttgactggctgacagccacacttggaacaggcatgtgtggaagtgcagaaaatcctaggtctcaccgactccagttgggagttctgagaagttgacaaaagttagtatattctttgtggacagatattcaagaaccatagtctagttctcctggacccatcaccaatggtattcacactcaacttcctatgcctcttagtaccaccattccaactccccatctccttggtcataaaatgggcccagctcccaggtcataaaaaaaaagatgattagctttacatgctagcatccagaattccatctaattactctctctccttctgtacttcccattcaacctgccaatccgcatccatagaaagatgggaaaataagttgcctttctgtcctcaaagtctcaacattcatcttgaatgtgaacttcacagcagcatgtgtggaacaatgaataatttttagcttagtaaacagcaaaaatataatatatataatatatttatataattatgtttaaatacttataaagaattaataactaacttcattatttaagggaaactacacaaaaagaaaaagagccagttgagagcagacaagctctgaaagatggcaatccattcaaaatgggtattaacagtatccctgccaacttctcctctagtattttggtattggtttacaagttgggtgggactgagtagttggcagggggtggagcggagagcagggcaagagttgaggataggatttaatagaatataagtgagggaggagggtccttatatatctatcatatttccccttccatgttaatcaactgccactttaaagaaacttttgcctatgattctctcctacttgggctacttgatggactagttcacacctatcaat

SEQ ID NO: 52134 - DNA, 556 bp, Homo sapiens
gcaaataatgaaagatcgatggatgaatgttggtcatgaagaggaagaactaaagccatatactgagcctgatccggatttcaatgacacaaaaagaatagacattatggtcaccatgggctttgcacgagatgaaataaatgatgccttaataaatcagaagtatgatgaagttatggctacttatattcttctaggtagaaaaccacctgaatttgaaggtggtgaatcgttatccagtggaaacttgtgtcagaggtcccggcccagtagtgacttaaacaacagcactcttcagtcccctgctcacctgaaggtccagagaagtatctcagcaaatcagaaggcagcggcgtttcagtgatcatgctggtccatccattcctcctgctgtatcatataccaaaagaccttcagggcttaacagtgtggggaaagttgaacaggaaagagggagtgggggacaaagatgttgggcttcggaaaacttggggcaggcacaacagtttggggttccaaaaaaggcggaggttgacttgccaagccctttttgttg

SEQ ID NO: 52135 - DNA, 292 bp, Homo sapiens
  misc_feature (1)...(292): n = a,t,c or g
gtggttcctttctatacagttttaacttttgaaatgtgtgagagtgttacttactgaaaactgaaaggatatgacatgctggaacaggcaaaactacaaagacagtaaaaagatcagtgatttccaggagctgcaagggcagtgagaggaagggagggatgaggaggtggagtgcaggggatgttagggcagtgaaaggnnnnnnnnnnnnnnnnnnnnnnnnnnnnnnnnnnnnnnnnnnnnnnnnnnnnnnnnnncatgtacagcacaaagcgtttgctctaatgtgagc

SEQ ID NO: 52136 - DNA, 608 bp, Homo sapiens
  misc_feature (1)...(608): n = a,t,c or g
ctgcaaccgatccaaataattctcatctatcagttgtcccaacactaactgaacatgcttttctgatttaataatgtcaccaattctattttcaatatgaatcaggtccacattaattacctgttgtagatcaacaatgtttactcgaccacctcggacatgtagctcatctctcatttctttactaatttgggctggagtaatatattcctttccatcgagtgtatgaactacttctagctgtttctgagcaatcaatttattaacaatctcaatgcagttccgctcggacaacctctgcgtggcctcggcgaactgcgcccgctggaagtcggccgccaaccgcctaatctcttcccaggcgtccgccatcacggcctgactcgcagtagacgcggaggaactgcagacacgtcagccgacacgttngtggagaagagaggcggaacgggccgcgcagagggacaagaggctccgcccgcgacgcagacacaccaaacgcttgcgcccgagcggagatgggcgggcggaagtgccgtggttgtaccgcggcgctgggggttcctcccggcgagactggcgggtctgcggcggctaggagagtggtg

SEQ ID NO: 52137 - DNA, 337 bp, Homo sapiens
  misc_feature (1)...(337): n = a,t,c or g
tatatattttttaaaccctcagaagacacctgtccatcctgacctctccttatggaaccttgcatcgtgctagggggagcaccccgttttctgctgcctcttggtttggggaggagccccctctggggcaaagtctgtaactaggtttctcggctttttctagtttttgtttgtttgtttgtttgtttgtttgtttttgagactccatctcaaaaaacagacaaacaaaaaagtcagcccctgcacatctctgtgagtggcttttncatgtatttcaaaccacttccgtatatgnacctcttcactttagtcctcatgacaatggagcacttattat

SEQ ID NO: 52138 - DNA, 235 bp, Homo sapiens
tttatacatttttaaagaatggacaatgatgcagatgatttgtgagcattttgatgagaaagtggtgattagaaggatacagcataaatttaattgtaaacatgcttatctagctaacctaatctgtttctgtagaattactggccatgggggaagattgggatagatgcctaacctatctcaattttaagtaatgtgagcaagtctttaaggtatacataatgataaaatggag

SEQ ID NO: 52139 - DNA, 371 bp, Homo sapiens
ttttttttttttttgctcccacggcattattttaatctttattacagactgctttctgctttgcattttcgttagtaattacaaaggtctttttaaaccgtaaatgccttgagacggcatggaccctgtcttatccctgtagttccaggaccttgcacatgggagatgctcagtaagtattaaagtgaatgcttggcttcaagtggcattgatagtacacaggcaaaatctcaatcattcatggtccactaaatcatggcctctgctctggaacagttaggcctaattaagacaaggaaaggcaacccaccctattgggaaatggaacctctagacagtcccatgtaatacacacacacatatcctctgcc

SEQ ID NO: 52140 - DNA, 375 bp, Homo sapiens
  misc_feature (1)...(375): n = a,t,c or g
aaaagagtgtttttttctagttttattcttaacagatatgttgaggtattcatatttgtttccttttgtggttttaatgaagacaatttgtaaagtaatactgttatgtatatgctaaatgttggtaaatactaattaatttccatcatttgtagacttgttttgcaatgggatatatttttacttataataccaatttaggctgggcgncagtgtcacgcctgtaatcccagccgaaagataatcttaccttcaaaagtaaaaattctgtattttgtacttactgacattctgaataagaaattggcctcaatgtaataaaaatgcaagggacaactatcttaagggatataacttcttcaattctttagaatt

SEQ ID NO: 52141 - DNA, 763 bp, Homo sapiens
  misc_feature (1)...(763): n = a,t,c or g
aagtttctgtgggtcaggagtccaaacgtgatttagctgggtcctctgctcagagtttcacaaagctgcaagcaaggcgttggctggggctgggcttttatctgaggttcagatgcttcttccaagatcacatggttgttcacaaaacttatttccttgcagccgtagagctcatggcagcttgcttatttaaggctaataggagagagagtctctgactggttcactctcttttaaaggactagtctgattaggtcaggcccacccaggggatctctttgattaactcaaagtcagctgattagaaaccttatgtatatctgcaacttctcttcacttttgttatataacataacataatatgggagagatgatccnnnnnnnnnnnnnnnnnnnnnnnnnnnnnnnnnnnnnnnnnnnnnnnnnnnnnnnnnnntgggggagaggattataccaaggcatggattattgagaatcactctagaattctgtctatcatagtgtaattatatatctatgtagtgaaaaaaatagatgtttgtaatttggaggtattaaaaagttgaatacaaagaaaaaattatagaactttaaagtcttaattttaatggagatggcacattattttgaagatagagaaaatggctttctatccttttcctatattacacttagtccttgggcaggatatatgtccaagtatctaaactgtagattatattatatgaacttaaatggaataattaaataagtaattctgaaa

SEQ ID NO: 52142 - DNA, 401 bp, Homo sapiens
ctgtgcccctcaaagtggcccatagttttgtccctaatgacaccccatccgtggggaacctgggggacggggagccgcccatggacaagcatggtgaaaggatcagctaagggcccatctaatttaaattcctatgcagagaatctaacctccagcaagcagttgaagaatcataccccctccttgcctaaagagggtgcataatgaatacttgattggagaaggatccatttttacaggaaggccgtttccttaggtccaactatcaggaatttgcctttgagtacttccttgtttaatggaattgttgctcttttcttctctgctacagatagtaactgtccctactgaaggccccaggagtgctccagccaggtgtggaaagctggtcacgattctat

SEQ ID NO: 52143 - DNA, 419 bp, Homo sapiens
cggacgcgtgggctgaatctcatttaaaatgtagaaaacccctttttagtaaagagacatcttctacagtaaccactgagaagaagtggaagtttttcatctcctttttttattcaaaaagaaaaagaatttctcaatttctgaaccacagttcactttagttaacccctttgattgcctaataatgccaaaaatgatttctctgttaattggcttcacatttttgctctatgctgaagtagtattgggaactgcagtgtagcttccatctctgtttggaggtacactgatctgatctgatactagagaagataaaaaatgaattagcaaattgtgaacacaatgaaatgactgacgtaggtgtagattccaacatttttctgaaggtgtcttgaccaaaaaaaaaaaaaaaaagtttt

SEQ ID NO: 52144 - DNA, 793 bp, Homo sapiens
ttttttttttttttttttgaaagaaaaacactcgtatttggatccaacaacagacacagagagtgaatggtcagcaaagaaacaaaaggaatcagagtggaacagagaggggctcccgaaaaacccctggcaggcaagaggcgacggcgggaagttaacctcatgatggtgagcatgaggcatggaaatgcactgctccacttttttttaaggtagtgtgttgattgagctttatttcagcaaacaaaaaatatttctaagaacttgcataggttctgtcgttagcataccctccctaactcagtttgctcaagaactgtgaattgtcctgccagtggggtgatcagaaatgggacctgcatggtatgaggaccagttatccccatcattgtatgttcactcacaaagacagaacaatcccctccggtgtcacaggcactgttctgtaagatcactttggcattttattgaatactttctggtgaggttctctttccctgcacacaggcttttcttccctaaaggcctctaacctgctggaagatagggaccaagttgagtattttatttcttctgtctacagcatccagcatagttctaattaaatacaattaggcaagtactcaaataagtcttgcctaattatatttaaagtaagtatcctgcttaagtgagagaaattcttggcagatcttacctctagtactattgtttagtgccaggatggaaggtgagtctctgaattagactttttgctgaaagaacgctcccagctgggcactggcgcacgccc

SEQ ID NO: 52145 - DNA, 407 bp, Homo sapiens
  misc_feature (1)...(407): n = a,t,c or g
atgtaaaatgtaacaccattcagacatagctgtggaatagttcagtttactagtagctttaattaaagctgagccttttacagctacttggtaattaaacaaatttaaaactatgattaatgtatttgttaactaattagcttttggcctttgatagaaatgtgtaggtaatataaattttagaattggtcttgactactaaactattgctaaaattattaggctaaaagtttttgtctcatctgcaaaaggtgagattatcacctatttcatgggaagatttagattggtaataatgtagtctgggggccgggcgaggtgggctcacgcctataatcccagncactttggggagggncaaggcagggtgggatcacctgagggtcggggagttcaaggaccagccc

SEQ ID NO: 52146 - DNA, 1625 bp, Homo sapiens
ggccagggatcaggcagcggctcagcgcgaccctgagtgtgcccccaccccgccatggcccggctgctgcaggcgtcctgcctgctttccctgctcctggccggcttcgtctcgcagagccggggacaagagaagtcgaagatggactgccatggtggcataagtggcaccatttacgagtacggagccctcaccattgatggggaggagtacatccccttcaagcagtatgctggcaaatacgtcctctttgtcaacgtggccagctactgaggcctgacgggccagtacattgaactgaatgcactacaggaagagcttgcaccattcggtctggtcattctgggctttccctgcaaccaatttggaaaacaaggaaccagggagagaactcagagatcctttccttaccctcaagtatgttccgaccaggtggaggctttgtccctaatttccagctctttgagaaaggggatgtcaatggagagaaagagcagaaattctacactttcctaaagaactcctgtcctcccacctcggagctcctgggtacatctgaccgcctcttctgggaacccatgaaggttcacgacatccgctggaactttgagaagttcctggtggggccagatggtatacccatcatgcgctggcaccaccggaccacggtcagcaacgtcaagatggacatcctgtcctacatgaggcggcaggcagccctggggggtcaagaggaagtaactgaaggccgtctcatcccatgtccaccatgtaggggagggactttgttcaggaagaaatccgtgtctccaaccacactatctacccatcacagacccctttcctatcactcaaggccccagcctggcacaaatggatgcatacagttctgtgtactggccaggcatgtgggtgtgggtgcatgtgggtgtttacacacatgcctacaggtatgcgtgattgtgtgtgtgtgcatgggtgtacagccacgtgtctacctatgtgtctttctgggaatgtgtaccatctgtgtgcctgcagctgtgtagtgctggacagtgacaaccctttctctccagttctccactccaatgataatagttcacttacacctaaacccaaaggaaaaaccagctctaggtccaattgttctgctctaactgatacctcaaccttggggccagcatctcccactgcctccaaatattagtaactatgactgacgtccccagaagtttctggggtctaccacactccccaaccccccactcctactttcctgaagggccctcccaaggctacatccccaccccacagttctccctgagagagatcaacctccctgagatcaaccaaggcagatgtgacagcaagggccacggaccccatggcaggggtggcgtcttcatgagggaggggcccaaagcccttgtgggcggacctcccctgagcctgtctgaggggccagcccttagtgcatttcaggctaaggcccctgggcagggatgccacccctgctccttcggaggacgtgccctcacccctcactggtccactggcttgagactcaccccgtctgcccagtaaaagcctttctgcagcagctgaaaaaaaaaaaaaaaaaa

SEQ ID NO: 52147 - DNA, 1213 bp, Homo sapiens
  misc_feature (1)...(1213): n = a,t,c or g
gaaataagaaagtactttaagcaatagagttcatctcctgctgtgttatccaacctcgatgtatacttacagcatctcaggtcaccctttttatttcagttatttaattatgaaaccataaagaagcatgtggaaatagtgtttattgctctttgaagaaaaaccaccaactatttctggatattttggctgtacctactactaaagtcattagtctttaatacataatacatatttgaaaagtaaacatattatatagattatgtgagggacttaatcatgaaaccagtttcacagtccaagtaccaactcttctggtagcaggtgcacaagcttgggtgtttaaaaacaacctgtgtagggtatgcccagcaaatgaggacaaatgtgtagacagtacttactggatcttatttaacttttagctacattaactaactttcttatttaaaaacaagaaagggagactaaacatctgcttaacttgtacacattttcagaattctttttaaaagtctagttaaagatgtttcttagaagttggagactgttaacaacttccataaaatagatccaggtttttcagttccctgaagcagcattcagtagcatctatataaataaaggcaccttctgagaataaaactattttatggagtgtgtgaacacacttgttctgtcacctgggttcatcttgttgtgaagcacattaggtccaggtccttccctctgggagtctgactgtgaaactctttaacccaacaactcaattagcccctgtagataagacatgcttcccagagtgagatttttgaaatccccttttcatccagaactatatttacccacctattgtaactattcagatagagcaaaattaggaggcttgataaatactaagaatttagtaccacagaaattatttattattttccctgtagtccacaattagtgataacgaatcctatttttgttaactgtgacataactttgatgtcatatgttgtcctatgtggttcttcctaagtaaactctgtactgattatatactgacttagcaatgtggccttggaatgctgagcaaaatgtggatgtactggttgtaaatgtttatatattgtacagtacctttatatatacacttgaggttctgattagagaaagatctgtaaattgctcattattttttatatagatatttaaaanaaacaaa

SEQ ID NO: 52148 - DNA, 552 bp, Homo sapiens
  misc_feature (1)...(552): n = a,t,c or g
tttgtcactgataccagaatatatagaagagatgactactgagaagttggacatggaaagctaagaccaagttccagttgggtttaattttccctcttggttattttcggacacaaagggaatgcttaaaactgagtttagtaataaaaagcataaatctcttctgtaacttttataaaccacagggaggtttcaatccatgcattttccttcattactcaagattataaatctgtttttaaaatacatctaaacaaacagttgagaaacaaaagtttggcatgttgtcagatccccttaagaggaagaggttaagctgtaaagtagtggccctgttttgatgccagaacattcatatgctgtttgttctggatttcttttaaatgcatgtattttaaatactggttaaatcttagaatcttggctatatcttagaattctggctcttggtaaccatattacagaagtctatattgtaaaagcctaaagatctggacaagttttccaacaaccttggtttccatggagtatataattttgggcagtcncctg

SEQ ID NO: 52149 - DNA, 367 bp, Homo sapiens
  misc_feature (1)...(367): n = a,t,c or g
aacatgaagacatcaaatcaaatatgtgtaagatgtacattgggcccaatccagaaaggtgggacagctccagggtgaaggcaggacagctggaagccctggaggggacttcnnnnnnnnnnnnnnnnnnnnnnnnnnnnnnnnnnnnnnnnnnnnnnttctgatgagcctctccaaatgaggcaatcagatatgcatttatctcagtgagcagagtggtgactttgaattagaatnggaaggcaagtttgccctaaggcagttccccgctttaactcttcccttttagcttagtgatttttggggccccaaggttttattttcctttcacaattctnttaaaacctggttaatgcacttcttatta

SEQ ID NO: 52150 - DNA, 580 bp, Homo sapiens
ttttttttttttttcaaagcaattgtgacacctacctgtggaccaaggaaaaaaccaaatcatccccaatctttcagttccacaacaacaccattataaaaacgagttgatctgaagtggttccaaatctttcttatcttcaagatctatgattagtaattctgactcgttgcaaagcaacatattttttgagatactgttgtgagccccgggagaatgtcagagtcctgtccacttggacatgggtggaggggaggttggacagggctgataaaagactagtacgcctcgtgtctcttcagtcttattttgcaaacatcatctataaaggtttttgctactccaagttttggtagcccaagctcatcaaagcatgtgtctattatgtgtctagcatagtaaaaatggctctaaattgcatataaatgcccagattttaataatctattgtttcaaaagaaaacaacagtagtgtgtaatatatatatacacatgtactatatatatccatgtactatatatatcatatatatattcccaccccacacacacatatatatatattttttttttccgtccc

SEQ ID NO: 52151 - DNA, 812 bp, Homo sapiens
cgcgaggggctgctggggtgtttgtcgcagcgggttttcctcggcggtttgcggagctgctaggatggagcaggttgcggagggagcaagggtgaccgcagtccctgtgtcagctgccgacagcactgaggagttggccgaagtcgaagaaggagttggagtagtgggcgaagataatgacgcagccgcgagaggagcggaggcctttggcgacagtgaggaggacggagaggatgtgttcgaggtggagaagatcctggacatgaagaccgaggggggtaaagttctttacaaagttcgctggaaaggctatacatcggatgatgatacctgggagcccgagattcacctggaggactgtaaagaagtgcttcttgaatttaggaagaaaattgcagagaacaaagccaaagcagtcaggaaggatattcagagactatccttaaataacgacatatttgaggcgaactctgatagcgatcagcaaagtgagacaaaagaagatacttccccaaagaagaaaaagaaaaaattgaggcagagagaagagaaaagcccagatgatctgaaaaagaaaaaagcaaaggccgggaagctaaaagacaagtccaaaccagacctggagagctccttggaaagtttagtttttgatttaaggacaaagaaaagaatttctgaagccaaagaagaactaaaggagtccaaaaagcccaaaaaagatgaagtaaaagaaacaaaagaattaaagaaagttaaaaagggtgaaataagagatttaaagacgaaaacaagagaagatcccaaagataatg

SEQ ID NO: 52152 - DNA, 548 bp, Homo sapiens
aaaaatctatcaccctggaatattgaaagaaattcagtaaaacaagatgtgtctcatagttaaggagagacataaaaataaaaatgtcatttaacagtttgaatttaggatttactgttaatcagaaacaccgaggaggcttagctcaccttttaattgagaatgtgggaaggaaagagagtaaacacattaactttagtagcagaagtgctgctaaaagaaatacgtgaaaggaaatgtaacagacaaattggcttttatcccttttgataccaatatatgtgtatacaagtcataacactgtaagtagtgtcttaagggcaaaaatgtagcttcttgtttataaaacctaatgagcacttgaaaaaatttacactctgaaattaaataagaccttaataatgaggctgtgtatgactggtgatatggaggagcactgtgctggctccagaggggtgttgcttgtctagaatctaatatgctgcagaactggttggaaaacgggtcacaactggaaaagccaaagaaaagtttccattaacttcaag

SEQ ID NO: 52153 - DNA, 257 bp, Homo sapiens
gctggattacaggcgtgaggcactataccaggcagggatccggtttttcaaactgcttctaagagaggtggacccagaaagcctctgacctgcaccggaggctcttggcagacctggactgtttcagaaatgcattcttgggccccacaccagacaggcctagtcgggaactctggggaacgcagcactctggcctcttaacagccaagccttctgggtgattctgacacatatcggaatctggggaatcacttagg

SEQ ID NO: 52154 - DNA, 1973 bp, Homo sapiens
cctcaagcagctcaagaaggtggaagtgcccaaactgcttcagtaggaccaggctgccaggcaccatctgccaatgccatgactgctcaggcctcacctcccagggctacacagaccctgcccaccccatccctggctgacctgctgtggatgtccctattctgccatgggagagtccaggcctgggtcacgctcaaggaaggatgccttatctcttctcactttccttttcttgtctctgaggctctccaaattttgctttagtacatggagctcaggtttctggacaagaagagtccttttagcacatcactgagaagatggcactgtccagggcccatgtagctggcaagctgcaaaaggcctgtgatccaggaaagatgtcccacagggaccacatccaccccagccccactgccctccagggccaggattcaggcctctgaggagcccacggggcaaagctgctgggccagtggcactctgtgtgggaaaatggcagaaagatggagaggcatgggggcccaaaggggagcgtggggaggggctgaggataccccaaagtccaggctaattagaggatgtggcaggggcagtggcctggatgcacagtgcctgatgggagtaggctccagacaggaggagtgggacagacagcagctggacttgaaggtttgatgccaaagcagacattttcctcacacccacctgctgctgtatgaatagctgtgtatctgtttttccataagattttgataatatatacaaacctttagctgtgaatggctgtgccccacctgttgtcctgaactgtgagtcctgatcctaaccctgggctccctggaggactctagaagctcaggttccctgccacactatttgagttggccaagaaataaattcacatcctcagaaagtgcagcatggaggaaaatctgaactctaagcagaagactctccactgacctggttgtccaggtctagaaggccaggcctctactaggtctgctcctgaaccagtcctgctgcctggagtcagtagccagagttgttctcaggggtgctggggcagagtggagcccagggtgctgggatggctatattaggcatgttcagggatgctcattccatgactctgcctaaccatgggctcagggccaggtcctcacagcagtcacaggcccaggaaggcggcaggcagagaagtggagtgactatttggagaatagcacccatatctgtgtgccctagggctcagaggggcctcatcttccccagccctccccacctgctcaccaattccacttcctgccccaactgcaggaatgctgacaatgctgccatgcccaccatcgggtgtaggtgaaaggcatctttctgaatttcattctcttgaagggtgctgccaccccttgggcactgtgggaactgcccaccttgggtctgtgtcacttgtaggtttctctgcctccaggttgcctcaacagcaggaggcacagcagtttcaccatctttgaggtgagggtggggtgccccagctaggaagcaagatcgctgtgctaggtctgaccaaaaccagagggcagtctagtcctgggggtaaagccctcagatcccagggtacactcttctccattccctccacccacttgcctgtcaccccagtcacctaagcaatcactgggcccagaggagaggagacagacacacactggctcctggacctaaagggtatgagctggagctaaggccagctagagcttccactgtcagccctcactgtcagccccactgcacccccctgtgcctgctgggcactgggcactagctagatgctttaggttgcttcagctgatccttcaactctgtgaggtggataccaatattctattttgcagatagaatttggcccagagaggttaactaatatatccatgatcacacagctaataaaagtcagagctcaaaaaaaa

SEQ ID NO: 52155 - DNA, 523 bp, Homo sapiens
ggtcgacttttttttttttttttcttccagtttcctttcagtacctacaattcctacagcccttattcttcctggctggggtcctctatttgtttgtaatgactgggaaactggcatattctcccatcttctttgtgtcatttcctctgataaacgcctgtaaaactcaatctggccatgttctttgaaggagagtttgatgtaggagttcttactactctggaatgggccaggttctttgttaggaggagctgggtgaagatgaaccactattttggcactcttcccaattccagccgcctgttcttcaatgaacacaatttgggaaaggagaatggccatgcaacactcatgatttttctgatctctccaaatcagtcggtgtgtactaagaaggagagtcccagcatcaaattttatcttctcctcgccatcgtagattcgcaccccgcgctgctggatcaccagggtctcgttgatctccaggaggccgctggtccaaacgaagcggtccatggccgct

SEQ ID NO: 52156 - DNA, 343 bp, Homo sapiens
gccaagagtcaggccctggggatttagaaatgggcatgacatggtaactgacctctctgcaagctcacactaatgtaatgtgataagtactttgccagcagtgtgactaaagctctgtgggaccacaggtggcagtgtgtccgctgagttgtgcacacacattagcagtgggttaaaaggaggtttatggaaagacttggtagaagctgtcttgaggttaggcttgagggccacataggtacagaaaggactgccaccttctgaggcctgagagcatgctgagactcttcagaagcttgagcactaattatttgtctcctttcacaaacgtactttccctcaa

SEQ ID NO: 52157 - DNA, 240 bp, Homo sapiens
catatttctcaatagcatttttcacagggcagttcttcctagtgccaaaaagggcttttgctgtttttgcattattaaatgtaatatagtggacataaccattaaacatttgaattagttacatggtggtagcaagaaatggagaactcatgttactaaaaatttttaagaaaaaatgtgtaatctgtataatgattcgaagagtacctgttgaatgtccatttttgataattgtgtgca

SEQ ID NO: 52158 - DNA, 1286 bp, Homo sapiens
ttttttttttgcgtgggtcattctgatggtggctgctgtcagcatccaagtggcttatgggataggacaaccccccaggcacttcactgtaggacagttagcaccaagagctaaggttgtgagataatgcaaatctggcctgtcacctctgcagagtacaggttcccatactgtgaggcagcagccagagagggaaccaccagagaaacagcatttcagaattgtctttcctttggtgtatggatatgtgtgtgttctagtctttggtgggcaatggaatctgcagctccatgacaatcttgttaagtagcttatgtgggaagtgtttcaggtcacaagggccacccattctaaggcttctcatttaattccccaggctaagagacaggtggggaaaggaaaaaacctagcaccttgctatactgaattggaatcagaagccaatcaatgcatattacctactttctggccaaatcaaatgaggataaatcaaagctgagtcaaaagctgtttttactatgaaactccacctgctaaattcaaatatctaccactctttctatgggtgaaaaaattccaaaagatttgttatctcagctgaaatgtctgaagaggagtaactaatgtggatttttctgccttcacctagaaatggttgagttgggaggtcctaggcaacagaagtgtcaatctcttaatcaaagaaaaacaccctacctgtgggcagaaatggacctgcacctacagagatacaacttctagtactctgacaagttttaacagagaaaaacacattttcatttgtcaaaatctttacagaacatatccaaaaccagaattacagcacacagacacccagtaacaagagcacctcaatctcaggtgagggaatttgtgtgaaagatagagcgcttgctccaggttccaatgcaggaaactgcccttctctcacaaggatggtgaagaccaaggaacagttctcttcttccaacagctcaggtcccattagtgggccactgttcaatcacttgggtaggcttttggccccaagtttgggccttccctgtggtaaatctcagtcagttccattgagtttttatgctttccacattcatctgtcttgaactagtaaagtacaatgtatcatgtcctctactctttttatccctctgctccttcacaggacctgtgggtcaaacccaataggggagaaaacttttagttaactgatcaatccaggtgtcttgtttgttctgagagagcttccaaaacaaaactgcatcctc

SEQ ID NO: 52159 - DNA, 834 bp, Homo sapiens
cggacgcgtggggctgtaagcttcggcgcctccgcttcacctatgggactcagactcgggtcagcctggcgctccctggacagtatgaactagtgcacacgctggttgctcatcagggcaactgggagaccatccctgaggaggatctggaggtccaagagaacaatgaggatgctgctcatgttttagcggaactggaggtaacgatgcaccatgctctcttacaggaagtggacgttgtggtagcaccatgccaaggcctccggcccacagtggatgttctgggtgacttggtgaaatgatttcttgcctgtgataacctatgcactcacaaagatgaactctctgagagggatgagcaagagcttcaggaaatccgaaagtatttctcctttcctgtattctttttcaaagtgccgaaactgggctcggagataatagactcctcaaccaggagaatggagagcgaaagatcaccgctttatcgccagctaattgacctgggctatctgagcagcagtcactggaactgtggggctcctggccaggatactaaagctcagagcatgttggtggaacagagtgaaaagctgagacacttgagcacattttctcaccaggtgttacagactcgcctggtggatgcagccaaggccctgaacctggtgcactgccactgccttgacatctttattaaccaggcatttgacatgcagcgggacctgcagatcactcccaaacgtctggaatatactcgaaaaaaggagaatgagttgtatgaatcattgatgaatattgccaacccgaaagcaggaggaaatgaaggatatgatt

SEQ ID NO: 52160 - DNA, 1059 bp, Homo sapiens
tttttttttcacatttaacacttgtacattttatttaattaaatcagccattgtacacattgcagctatgtattgttagtgttgtatttttttttccattaactaatacatgccctcatagatatattcaattagtgttatcaccatgggaacaagatgctgattcgtcaactgaaaattcacttcttctcacagtattcaagtttttgataacacagcaaaaatcaaaatcaaaaaaaggtgaataaccattatgttgttacacagacatcatctgcactgcaaataacacaacagaaatgcttttcttgagctccagtgaaggttttgacaagaaggccatagggtgtctcaaaaagtttcaccatcggcctctcttattttggctgccaaagaatgtctcatttcctatccaactgccaaaaagtgctagcatttgaggcttaggagatttggcttgtgggaaacctccctcccaggaaattttttctcttggcaacattactttaaatgatgaagtgccattgtttgtcgcatttgtttttgacattcggagcaatgagtcatttttgcacaacaggaaaagaccagataattggaaaatgttcaatccctggaggatagactctgtccttttttatttaaatttcatcttcattgaatatacttttctttaacaaatgactgattcaaaatgtatactgtttatatgaatatatttgtgaatatatatatgttaaaatgctacacagcttcaaccactagaggaataaggaagaggacatggaaattactcagattgttacagtcccttctttgagacaaacaaacagaagtgcacaaatgcacttaagagtttccaagggagtgtggatttcaaataaataaaccaaaaattttaaccaaaaccaaattttcaaggatttctcaatcttgtctgcaagctgaaaaacagacctagctggaaagtgaaaagtgctcactcagggtaaaaagaatggaaacaattaatgtgattagaagaggggtttgaccgtggtcttgatttttaaacgccac

SEQ ID NO: 52161 - DNA, 526 bp, Homo sapiens
tttttttttatgatcacaaatatttttattaagcccaagacataatagcgcattacaggaagaacccaactacatttcattagagataaaagtatggatataacaacaacaacaataacaacaaaaaaagaaacagcctatcattgaaaatacattaatacagaaaacatgagatatccattatgagattttaaaaggtaaaattcctaacaatttgaataactgatttgggtatagtgatgtacaaggaggtagtattaacacacgaagactccttttagccctgtaatggtaaaatatattcagtctgttcaatataccatcaagactggggttaagccgtgaggttctcagtctttaatatctaaataatcactgtaagagttttatttgccttccaaatccagagggtcgtactacctagcatcttagcaagttaggatgctttgaaaagcatgatttccaaaaattaaccaatctttgatttataaataagtttatttataatgggtatttaccctaataa

SEQ ID NO: 52162 - DNA, 1082 bp, Homo sapiens
cttcaacatggccgaagcaagtagcgccaatctaggcagcggctgtgaggaaaaaaggcatgaggggtcgtcttcggaatctgtgccacccggcactaccatttcgagggtgaagctcctcgacaccatggtggacacttttcttcagaagctggtcgccgccggcagctaccagagattcactgactgctataagtgcttctaccagttgcagcctgcgattgacacagcgaatctatgaccaagtttatagctcaagttgcagacatctatccgggaggaaatctctgacatcaaacaggaggggaacctaggaagctgtcttgaatgccttggataaaattgtggaagaaggcaaagtccgcaaagagccagcctggcgccccagcgggattcccagagaaggatctgcacagtgttatggcaccctacttcctgcagcaacgggacaccctgcggcgccattgtgcagaaacaggaggccgagaaccagcagctggcagatgccgtcctggcagggcggaggcaggtggaggagctgcagctacaggtccaggcccagcagcaggcctggcaggctctacacagagaacagagggagctggttgctgtgctgagggagcctgagtgaggagaccgccagccccagaagcagagggcagtcaaggtcaagagcctgtggtccagcatgcctggcctgggcgggctacctctgagaacggctgaaatggtgcccagtccatcagcagtgatggaatttgctggaggactaggccagagcaagcctcactgccactgtgcctttggggcacccttggggttggacatacaccccctttagattcctctgtttcttctacctggataattcttggccatgttctctcttctctaggttcaggtcagctctgcccctccgcccccctcctgctggttccccagcccttttccctggccctggcttggagaatctgttttcaatctccactgattgcccccttgctggccagcccaggggcctttaccatgttctctccacatccgtaaataaacttccttcactacactgtaaaaaaaaaaaa

SEQ ID NO: 52163 - DNA, 540 bp, Homo sapiens
tttttttcctgtgttcactgtgaaagtgattcctgggtgcctgtgaagccttcacccaaaagcaggcttataatggtgaaatttcaggcatggctggaggctcaaagacacagatccttggggaataggagcggctgagttttagaatggctccaggcaggagctctgtgcaggatgtgcagactcagtaaggcacaactcaggggcaccctaacccccggagcggtgcagggaggatacccctcaccccagagcccctgggaggcagaattccgtgctccagtcatataggaagtatggggccttcccagtgctcccttcagcaaatattattttaagagaagagctaaaaaatgaaatgtcagtggagcagccgagggacataactacctattcacccacgtaccctgattctagcccttgtctgttataacattaccttatattataagagtgcgtctatctagaagtcccttaacctcccggtgtcctgacttgccaatctgttgaataggaggaaaatccctacctatttcattt

SEQ ID NO: 52164 - DNA, 361 bp, Homo sapiens
agatacctgacataaatagatactaaaaatcatgaattcacactgatgctttgagaccagccctgtaggtttattccagtctgcccccttttccatgttgttaactctttcctccagagagacaaagatttcaggttgctttgttaagttccatctaatgatcattctgacgtaagtctgtttttcttatttccttggaatgatgtctcctctggtttcagaacttcctcctctgcttcctgtatcctgaggctggcggggccagttgtctttagggcttgtgcattttttgtaaagagcttgcacgtgtgggaaatcaagtaggccagtagtgggttaggggtactgagccagaagcctc

SEQ ID NO: 52165 - DNA, 296 bp, Homo sapiens
  misc_feature (1)...(296): n = a,t,c or g
caaaaggctcattttaaaaactgcaagaataaatatattttaaatgctgacatgttaggtttttattttttgttttattttgaaaatatgtatacactaaattaggtttttgattaatggttaagaatagtgaataaacaaacatggatttaaaaattaaattgaattacgaattataagactttgatacttttatttaatattctgtatgaggaagatagtatattactatatcaaaggatgaactgtgttttgtgntgacaagaactttgctattanaaaaaagatttatattt

SEQ ID NO: 52166 - DNA, 1364 bp, Homo sapiens
aaaatcaattattttatttctaccatcaggtaatgaaaaggactaggatccatctataccatcagatgatttttggatgaagcaattctgaaccgggtaatagaactgcttgggaaagcccaactttttctggaaacaaaagattaacatttgtcccttcataatctcagtgaatacaatatacgataaattccaaggaattcaaatttaactagcattcattaggttgatgaaactaactctataaattacatttgatttagctgtacaaaaacattaagatgaacacaaacaagaatagtatatgcaagggtctactttttacttcacaatagaccacaaggaagtaatacttatactcctaaaacagaggcagttacaaatttgcagaaaccacaaactgaaataaacagacatatataaaacagagagaaatttggctaatattttaatatcccaatgaagaatctgaaaaacactctctatgaagaacatacggaatccactcttcaacagaaaagcctgcccattaatgacactccaagaagtgtcatgatatatgcgattcactttcaagtcttcagcaaactaaaaatagagttatgagacttaaacagataatagacagtgaaagcaaatatgacaaaacaaattattatatgataaacaacccgttaacaaaggaaggtagatggaaagtatgtggttattctttgcattttttcagcttttctctatgttgaaaactcttatgatacaaaatttggaaatgaacatacattctaagcttaaaagtataactgaaattagtctcttttccccttaaatattaaacatatttcagtaataattatattttatttgaggattttcaatgaactataaaaccaatcaatagagttgagatagacatagaattacctttgaatataacagaagctcctgaatatgaacaagaagggcttcttttgaagaaagaagagcccgcttcctgggctcagaatttcttgtttcagcagcctgaatttattccactggaatccatcaaagtatcaaaaccacgcagattcaattagagtcagtcaactcacagtaagcaaagttagttcttggcttttccttttttaacaggaagttgacctgtagcttccaaatacttattaatgacgtcttcttgtgtggatggtaaacatggctgatacctgctatactccattgtgtattctccctttccctctgtgcatgacctaagttcagtggaataaccaaaccatatcatttagagggacatctgcatacagtgtaaaatagtcctcaactccatcttgcccagtgattaccccatggcgtcggttaattcctgc

SEQ ID NO: 52167 - DNA, 395 bp, Homo sapiens
cacacagcgtcactcactcccacacacaccccctggctctgctgaggttactgccttaccctgggcctcagccccaccttccaaagggaggagcatcattccttccttaccccctttctagctgtgtgatgtagaccaaagtcgttgcccctccctgggcctgggaaccagtcggaactgggttccagtccagctgtgctgtgtgagcctgtgcaagtgacatgacctctctaaaccttggttttctgctctctggagcggtgaaccagtggttgtctgcggggaagagatgataaagagcacgggcacggtctggttcatttctgtatctaccccccttccgcccacgcccccgaccctttgctcaataaacattccgcactccaaaaaaaaaa

SEQ ID NO: 52168 - DNA, 1384 bp, Homo sapiens
cgcctttctccgctggcaacggcgccgctccccgctcctcctccccagccatggcgttcacgttcgcggccttctgctacatgctgggcgctgctgctcactgccgcgctcatcttcttcgccatttggcacattatagcatttgatgagctgaagactgattacaagaatcctatagaccagtgtaataccctgaatccccttgtactcccagagtacctcatccacgctttcttctgtgtcatgtttctttgtgcagcagagtggcttacactgggtctcaatatgcccctcttggcatatcatatttggaggtatatgagtagaccagtgatgagtggcccaggactctatgaccctacaaccatcatgaatgcagatattctagcatattgtcagaaggaaggatggtgcaaattagctttttatcttctagcatttttttactacctatatggcatgatctatgttttggtgagctcttagaacaacacacagaagaattggtccagttaagtgcatgcaaaaagccaccaaatgaagggattctatccagcaagatcctgtccaagagtagcctgtggaatctgatcagttactttaaaaaatgactccttattttttaaatgtttccacatttttgcttgtggaaagactgttttcatatgttatactcagataaagattttaaatggtattacgtataaattaatataaaatgattacctctggtgttgacaggtttgaacttgcacttcttaaggaacagccataatcctctgaatgatgcattaattactgactgtcctagtacattggaagcttttgtttataggaacttgtagggctcattttggtttcattgaaacagtatctaattataaattagctgtagatatcaggtgcttctgatgaagtgaaaatgtatatctgactagtgggaaacttcatgggtttcctcatctgtcatgtcgatgattatatatggatacatttacaaaaataaaaagcgggaattttcccttcgcttgaatattatccctgtatattgcatgaatgagagatttcccatatttccatcagagtaataaatatacttgctttaattcttaagcataagtaaacatgatataaaaatatatgctgaattacttgtgaagaatgcatttaaagctattttaaatgtgtttttatttgtaagacattacttattaagaaattggttattatgcttactgttctaatctggtggtaaaggtattcttaagaatttgcaggtactacagattttcaaaactgaatgagagaaaattgtataaccatcctgctgttcctttagtgcaatacaataaaactctgaaattaagactcaaaaaaaaaaaaa

SEQ ID NO: 52169 - DNA, 494 bp, Homo sapiens
ggaagtaggaggagagtcaggactcccaggacagagagtgcacaaactacccagcacagccccctccgccccctctggaggctgaagagggattccagcccctgccacccacagacacgggctgactggggtgtctgccccccttgggggggggcagcacagggcctcaggcctgggtgccacctggcacctaagaaagatgcctgtgccctggttcttgctgtccttggcactgggccgaagcccagtggatcctttctctggagaggcttgtggggcctcaggacgctacccacttgctctccgtgcctatcctgccgcctttgggacagggacatactctgcctgcctggggacatcgtgcctgctccgggccccgtgctggcgcctacgcacctgcagacagagctggtgctgaggtgccagaaggagaccgactgtgacctctgtctgcgtgtggctgtccacttggccgtgcatgggctctgtggtat

SEQ ID NO: 52170 - DNA, 396 bp, Homo sapiens
gaaatgaaatcaggaagggtgcaatgttatcattataaagaagagcttattaccacaacattatgggggcagctgtttcattaattcctaaggctgaatgcaggagcccatctaaacactgcatttgtcataagtcatacagatgaacaccgtactccaaacatggctgaccgaagtacttagtttctttacagtttctccctgggtgatctcatccgttctgtgaccttaaatcctttctagatattgataaactcttaaatttacatccttagctcagacctctcctctgagccctgatttacagatctaacttcttgctttacatcacttcttggaaatctaacatatttaaaacagcttttgccttttttcctcctgatgaaacctgtcctt

SEQ ID NO: 52171 - DNA, 420 bp, Homo sapiens
taaattcctttttaaaatttattttttgttatcaaagagaatgtccagaaacattgagtactaaagaatttgttcatggcattgttttacaaaattttctaatggagagtgaatattttattttctgatgtattcttcacttattaatgatgaggtcaatgaactgatgcaattatttaaaaaaaaaaaacagacaaccttataaaggaaaaaacaaaaacaaaaacaaaaaaaaaccaaacgtccattctcattctgaatctgttgactggagtgaattcagtggtcacaataccaccatcaaataagaatcaacttcctcagagtaaggagctgttccgatcttctcaatagttcacacaggtctctcagatataggcaccatgttttaagtctcacacaaaatgtctgtgtcactta

SEQ ID NO: 52172 - DNA, 202 bp, Homo sapiens
aaaggaaggcaaaagcttggggagaaacatgaaaatgtccgtgtgaagacatgtgtaaaaaaacaatggaagtgcaaaactgattttagtattatattttgttggcaataaattccatcccgttgtttgaatgcattttgatcctacgctgcagtgtccatgtgctaataatttaaataattactgttaacgttatagtaaa

SEQ ID NO: 52173 - DNA, 1149 bp, Homo sapiens
cttccaactcgaaagtcgtctttgtccaaaaataatgctcttaaccgaaaaacgataccatctaaacgatttagtgttgcgttgaagatgggaggggctgtgttttcgttgttgaaaacacctctattaatctggacaccagctgctgttaattcgcctaggaaccctaatgaggtgtgtcggggagggcagctgcgggtgccagttcagactggagcggtcactgcagagaaaatcaattcacgtggtgttgtaactgcactcttgggaggaaaccttaggacggcccgcagccagcgccggggctgagcggactgcagaggattgagatcttaaatgcgcatttttacaaaatacacagccaaatgaaatcaatgatcaggaagtgtctgcagacaaatgtccattgcaggtttgatgagtaattcctttttttagatcaaattgttctcggtagccttttcttcttttttaaaaaaaaattgctgatgaagaaggaagttgctattaaaaaaaagtagggtacattatataaaatgttgttagaaaaactagctaaccccatccatagaagatgctggtgagcaattaaaatttaggttaatagaaagatttttttactatgatttttaaaattttacttgaatgaaggctgctccggtccttattatcggattttttttcatgtgttggtttttataagtgtcacagacatgaagcaagattttcttctccagcaagctcttatgaaatagcttgtattaaaatatgaatctaaacatcgtgctctctatctctaatgacgaaaactgtttgagttaaaaatgtctgtttttgtaaaacaaatgtgttctatatttttgtagattttagattttctactgattggatactccaaatttatcaagttctgcaccacacagaaggagattttgagtgtcaataatgaaacacttaactcattaaaaaaaatgatttaagaagactagttaaaggtttattcttgaatctgctagcatggtgtaaagttgagccttttaacatacttcctttgagtgacatgaaattggtgctgttgcttgtggtgggtagagaagtatgaaagtattaacttcttctaaaacaaaatcattcagacttaaaaaaaaa

SEQ ID NO: 52174 - DNA, 462 bp, Homo sapiens
  misc_feature (1)...(462): n = a,t,c or g
gagtactttattcattttagctagaagtactttattcattttagcttatcagctacatgatttgcaaaaattttctctcattctgtggattgtcttctcactttgttgatggtatcctttgaaccacaaaagttttaaattttgatgatgtccagttagtctatgttttattttgttgtttgtgcttttggtgtcatatctaagaaatcgttgcctcatccaaggtcatgaagatttacctctatannnnnnnnnnnnnnnnnnnnnnnnnnnnnnnnnnnnnnnnnnnnnnnnnnnnnnnnnnnnnnnnnnnnnnnnnnnnnnnnnnnntaagggtccagcttcattcttttgcacgtgggatattggagttgtgccggcactatttgttcaagggctgttttcctctgtttaatccagctnaaccctttttgggaattaattgaccagaangtggaggtg

SEQ ID NO: 52175 - DNA, 591 bp, Homo sapiens
ttttttttttttttttttaaatcattgggtattgactttttattattagtcactgttcataatttgtttcaaccaaaagacagtacacacagcagaattctaatgcatcccatgtaaatgtttacatccattttattcctcactcgcctctaagacttatcatttaactttaaattttttttttttacatctcaaaaatatgtctgcaataattagagcttcattagctgtcccacttggaaacagctttttaatatttttacagtaaagaagatgtgatggggcataatgaaaatgtaacttacaacactaagaaagaaaagggcctttataggaacacagtgggagttcataaaggaaagagttcagaagctctttcccatggggcccccaaatggaaaacaaaaacaaaacacacaaagcgcaaccgcaggttctttgagggaagaaaaaaaaaaaaaaaaaccaactccaaggctccatcttgaagccagaatcagcctcttggaagtctgtaaagcaactgtgcaagctgcttcggcatttccttctgttaaagtgttccaggtcctggaaccctgtcggtcgacc

SEQ ID NO: 52176 - DNA, 1214 bp, Homo sapiens
  misc_feature (1)...(1214): n = a,t,c or g
tttctgtttttttttttaatctgccattagtaattaattctttgaagatactttggagattcattttcttgagtggcactgccatgctcattcagtgaaaacttgtggggtatagaaatggaatggagagtttcaaacagctttgctgaaactgtactttgggctccagacttcactgtccttaggcattgaaaccatcacctggtttgcattcttcatgactgaggttaacttaaaacaaaaatggtaggaaagctttcctatgcttcgggtaagagacaaatttgcttttgtagaattggtggctgagaaaggcagacagggcctgattaaagaagacatttgtcaccactagccaccaagttaagttgtggaacccaaaggtgacggccatggaaacgtagatcatcagctctgctaagtagttaggggaagaaacatattcaaaccagtctccaaatgggatcctgtggttacagtgaatgaccactcctgctttatttttcctgagattgccgagaataacatggcacttatactgatgggcagatgaccagatgaacatcatcatcccaagaatatggaaccaccgtgcttgcatcaatagatttttccctgttatgtagcattcctgccatccattggcacttggctcagcacagttaggccaacaaggacataatagacaagtccaaaacagtactgcacgacgtgaatcatgacattggatgaacgacactgactgtagaggctctcgaagagtcttcgtaagctgtgcagccacagaaatactagcactaagaatgcagacagtgccagctcccctccctggaactgtgccgccccgagaattctgagcaaaccatgaagcccagcttggaaaaggtgctcccaggaacagagattgagtaaggcaccaaagcaggaagccattccacagcactgagatgatataaaagtgggaaaaatatctcttggggacatcaaaggctcggcaggcggcggggcgcgacggctccccacacttggttttcccatagcggatcaggtcctggaagatcgcgcagcccgggagcaggccgggcggcaggagctgcagcagtagggtcagcaggaaggcggcggtcagcgtgagccacgaccgcgcgcagcgggttcagcncgagtgctcgcctccgcccagggagccantggcccggtgcccccttncgcgc

SEQ ID NO: 52177 - DNA, 504 bp, Homo sapiens
  misc_feature (1)...(504): n = a,t,c or g
ggtcttttttttttaactgaggcccaaaaaagggcagcggcccactgaaggccatgcacaagctaaggtcctctggttgatggctccaaggctgtttcctcctcccagcctccctataatcctaggcaagggtaagtacagggtcactgagtatgcatggcaggtccaaccttatgcaagctgctttccttggggtaagcagtggaaaacacttccaactaaggactttaatttcaggtcttccattaatgtggccaagtccctgcccctctctggatcccaatttccctatctgtaaagtgaagtaggcgagtttggtaatcttttgctaaaggctcagccagttctgaacctctgaggttctaattagaaagtactgcaaggggccgggcatgggtgtgnnnnnnnnnnnnnnnnnnnnnnnnnnnnnnnnnnnnnnatggtgcttgatggccaggggtttgaagacaagcctagacaacatgatgaaatccatctctatta

SEQ ID NO: 52178 - DNA, 368 bp, Homo sapiens
tagctgggattaacagggactggggtttttctctctttgagattaaaacagaaaggatgtatctctaggcaactgcctacttaaatcactgcctccaacagcaaggacagaggcagcttccagagctgcttcgccctcaaacttagaaacctgctctaccaggcagcttcctaagcactgcagggaaatttctgggcaaaatctggaaagtgaagcagaggacgaggacaattcactgctcaccacaaggctgaaagagccctaactttcaaagcaaaatcccagaacaaaatgccatgaaaaggggcagcaatcgaggctcagtgaaatccatacagaggaacatatgggtgaaagccagtcacctt

SEQ ID NO: 52179 - DNA, 275 bp, Homo sapiens
gccagggtacatcgccgccggtcgtgagctgctacaacgccagcgatcatgtctacaagggctgcttcgacggcaacgtcaccttgacggcagctaatgtgactgtgtccttgcctgtccggggctgtgtccaggatgaattctgcactcgggatggagtaacaggcccagggttcacgctcagtggctcctgttgccaggggtcccgctgtaactctgacctccgcaacaagacctacttctcccctcgaatcccaccccttgtccggctgccc

SEQ ID NO: 52180 - DNA, 433 bp, Homo sapiens
tttaaggctgcgatgttgctggggagcgtcggcgatgctcttggctacatgaaatgtctgcaaggagaacagcagtgtaggcatgaagatccaggaggagcttgcaacgttccgggggcctggaccacctcgtactctcgccaggagaatggcccgtgagtgacaacaccatcatgcacatcgcaaccgccgaggccctcaccacagactactggtgcctggatgatctgtaccgggagatggagagatgctatgtggaaatcgttgagaagcttccagaacgccggccagacccagctaccattgaaggctgtgctcagctaaagcccaataactaccttctcgcctggcacacaccgttcaatgaaaaaggctcagggtttggagcggccaccaaggccatgtgcatcggcctgcggtactggaagctgag

SEQ ID NO: 52181 - DNA, 424 bp, Homo sapiens
ttttttttttttttttgctgatcaaattcatttaatctttgttaaaagcatcacaaatgattcatcgatttttaaaaaggaaaaataagaaggaatgcattgtctctttgttatgtgcatggcagctgatggcctcgttcccaggcgcccaggtctacctgaacatcagatatgcagaccctcgaatttacaaccagggacagccacgggcccacgcctggatctccatgggtgcacagacgggaacgtatcaggctgtctcagatgccacctccttcccaggtgcttgggtccacatgcccaacatgttcttaatagaaatattaacataaaatacaggaaacccacagataactaagggggaaaaacccaacccaaacaggcagagagaattaaatgggagtgggtcaagggaagggccaac

SEQ ID NO: 52182 - DNA, 364 bp, Homo sapiens
ggaaacttactagatataggcgagttttatatggaccgtttatggacctttcttatttagaaatctaatgaactaacggttagcttgatagatacgtctggggcatttgccatatcttggtttcccatttctcaggttttaataacagtaaccttgaaaaaagttgatgttcctctggctgtgaaagggctgctgtacctgtttaattattgagttgtgatgataaagcaggctgtatgtgcagttccttgttctttggatgaaaaagtaaactaggggtatagcgtcctagtaatgtaatttttagaaaatattcaactttaggtttccaaaattgggaaatcttggattattaaacattgtc

SEQ ID NO: 52183 - DNA, 245 bp, Homo sapiens
ggctgatgaaatggaacagttccctgatccctctcacaggacctgtgacagtggtttggctcaccactgctcaaacccctgacaggagggagagcatgcagacaggcaggagcaggagctagggtgagtgctttgggctctggccccatagtagtatctaggggtgggtgcctgcagcctcagtgttacagtgttcttttaaccttgccatccacagatggtttaagtgttaaccagcttcagtg

SEQ ID NO: 52184 - DNA, 479 bp, Homo sapiens
gtttttttcaactggtacctttagatgctgcgcccactgaatttcatgactattacaatctccatcttcccaggcaatcttgtgtcgttataatgaggagagtcaaaaacatgcagccttaagcctcagcaaagagcataatccaactcagtatgaagagcggatgaggatacagaaggctggaggaaacgtcaggtaaccaagggactgagaggagctcatgggaaggagggctgttagctgtagaagggtcccgagaccttcaaggagtagaacttcccctgttacgtagtcttcagtgtgacgaggctctgtctgagatctaacactggtgacataggtggatgacagttgtagatttcacatgtgtccacgtggaaggaaacttgcctccctacatttgcaaaaggacaaattcatatttaccattcacagtgttttctctgtgcctaggaagtttcttaaatactgtcactttt

SEQ ID NO: 52185 - DNA, 883 bp, Homo sapiens
ttaaccctggctgtatgtgggaaacactcaaggagctttaagatacaaaacactgccaggctcccttacccagtcagtcaaatccgattctggagttgggacctaggtgtgtgatgagaactgctgagtcctgtcgaaggttaagctgggcagcactgcttggcagccactggaggtgctgttcccacccatgtgcagctgggcagggtccctaccccagggcagcagttaatggcctagacacccctgcatatttgagatcaagaaatgtcagtagtggttaataatgtgaattccacagtctgtatctttcacacttccattctctgcttttaaggtgagattctaagtactgtggacccataatctgtcaggtagagtctgaaatgtttttcctctcattttagggatgggcgtgttttgggcgtgctagaggtgtcacgctccattggggacgggcagtacaagcgctgcggtgtcacctctgtgcccgacatcagacgctgccagctgacccccaatgacaggttcattttgttggcctgtgatgggctcttcaaggtctttaccccagaagaagccgtgaacttcatcttgtcctgtctcgaggatgaaaagatccagacccgggaagggaagtccgcagccgacgcccgctacgaagcagcctgcaacaggctggccaacaaggcggtgcagcggggctcggccgacaacgtcactgtgatggtggtgcggatagggcactgaggggtggcgcgcggccaggagcacgcatggtattgacttaaaaggttcattttgtgtgtgtgcacattgtgtgttttgtgtactcctgtgggactcccatggttgtaaataaaggtttctctttttttttcct

SEQ ID NO: 52186 - DNA, 519 bp, Homo sapiens
  misc_feature (1)...(519): n = a,t,c or g
gtctcctgagtaactgggaccacatgcatgcaccatctgtctggctatttattttttttgagagacaacgtcttactacannnnnnnnnnnnnnnnnnnnnnnnnnnnnnnnnnnnnnnnnnnnnnnnnnnnnnnnnnnnnnnnnnnnnnnnnnnnnnnnnnnnnnnnnnnnnnnnnggatacatctcagtttggacattaaattatcagaactttgtttctcaagactttaaaaattaaaaacattttttcattagaacacctgatctgcagattcacagttcacacacccaggttcctaacgtacctgttttccactgactgaaccaagtcagtggtttttaaacttaaccacaccaaacactgtgctggctgcgttttccttgctccacagcacacgaggccagaggtgctgcagacgcnggaagtggcttgtccaagtgcagtcccagaccagacgtgtcacccgggcagctccaggtgtaactgagtccacctcagaccacagaaccagggcct

SEQ ID NO: 52187 - DNA, 1200 bp, Homo sapiens
  misc_feature (1)...(1200): n = a,t,c or g
tttttttattttatattttgtataaaaggatgtttatttagaaaagaaaaattagctttgacaagagacacctgcacatttgtgtagccaaggagatgtcagtgagagcagaaggtgaatccttcatggagactgaacacaggtggccagctgtggcagcgacagtgaacacatgtcagtgtcggcctgggggcagagtggttgaatgctttaagtctggtggagagcctgccttgctcagccctgttactacatggaagtcactgtaggccacacatgtgcaacttacaactctcgggtttcctgaatgtgttttggatgcactggccagtgggccgcaaatgcttggaagctaccatgatgcttcacagatgatgatcattttggtaactcaaaatataaatgcgggcttggtgcggtgacccatgcctgtaatccccagcactctgggaggcttgagcccaggactataagaccagaccagcctgggcaacatagggaaanccctgtctctatatacagtagttcgcctggagccacagctacctgggaggctgagttnnnnnnnnnnnnnnnnnnnnnnnnnnnnnnnnnnnnnnnnnnnnnnnnnnnnnnnnnnnnnnnnnnnnnnnnnnnnnnnnnnnnnnnnnnnnnnnnnnnnnnnnntttacaattttaaactcacaacaacactacctggttacgatcctcaaaaaaaaaaaaataataaatataaataaaataatatttaaaatnttctagaaattgtnntttgtaatggggatgggagggttactcttggccctggtttaaaccaagcatctagcagtgcccgggcctatgctgtccctagcagcaccctggagaattcaaatgtcacaacagctgaccacggaggggactctagaggggaagtgtcctgtgcaccagtcacaccgcggctgtgctgaggggttcgggggccaattctgcgcttcttgggttcttacaccacagtttgatcttcacgttcattattcaaattcttccagcaaggattggaaatcaacaagacaactgaatnnaactcaggtctgttttcctcaaagtgtggtcctgggttcaggtgctcacatcggaattacataattgtgcaaaacttggactgccctgtgtccctagagacctcgagcttgtttttgtctcggaccaagatggcct

SEQ ID NO: 52188 - DNA, 2173 bp, Homo sapiens
tttcaaaagacaggttcatataacgcttagtatccgcaatgctgatactcacgtttgcagtttgactgatcagagacagaaagatgagtctgcagcccgggggtccttgtggtagcggtggtgggagcggacgtggtacacattgagggagacaaatcactgtttggcccaggggaaccccacccacagtaatggaaactcagggcaggttagcattttattagataaaaacaggaaggagggtgcctacccacccctgcctgctactggctctgaagggcactcctcaacttccccaagaaagaggacgcgtctctgacactgtgatcatgacaggggttcaaacagaaagtgcctgggccctccttctaagtcttgttaccaaaaaaaggaaaaagaaaagatcttctcagttacaaattctgggaagggagactatacctggctcttgccctaagtgagaggtcttccctcccgcaccaaaaaatagaaaggctttctatttcactggcccaggtagggggaaggagagtaactttgagtctgtgggcctcatttccccaggtgccttcaatgctcatcaaaaccaggcatggggaaggccctggcaaaactgctccacccgttgcctgaggttggccagacgctgacttgtttctgagtccttaagcaggaaggatttgaaatcctggagcttggcagtcttgctcttcacctctaagccaatgttgacccccttcatctataaaagtccacaactctccggaagtcaatcctcacggaactgtcgagaagttaaaggcttggggcccccaaagcgcaggccgcccggtgtgatggccacttcgggtctcccaaggacaggtgttcttgtttggcagtgatggatacaagctctagcacccgctcagcccgagctccatccaggcccttgggccgcaggtccaccagcaccaggtggttgtcagtaccacctgataccagtgagtagcctcgctctagcagggcatctgccatggcccgagcattcttcagaacctgcagggagtactcccggaacatgggggtgcaggcctgctttagggacacagctactgcagcaatggcatgattgtgggggcccccctgcagggatgggaacacggcaaagttgattcggtcctcaaatgtgtaagggatctcccggccagtcttggggtccacagccttcacccctttccggtagaagatgagccctgacctggcccctcgaagagtcttgtgagtagtggtggtgacgatgtccgcgtgcttgaaaggcgagggaatcaccttggcagccaccaggccactgatgtgggccatgtctgccagcaggtgtgctttgacttcatcacacacctctctcatgcgggcgtagtcaatgaggcgagcataggcgctggtgccagctatgatgagccgtggcccggaaaagtcgagcagtcagtgcccagctggttgtagtcaatgaggcccagttttggggttgagcttatagggcatagactcgaagaagatggacgtggctgatatccgcttgacgtcagacatgtagccgtgggtgagatggcccccatcgggcaggtccagccccatgatccggtcgtgaggttgcagaagggctgtgtagacggccaggttggctggggacccggagtagggctggacattgactccccactgtgcaggatccaggtcaaaggcttccaaggcccggcgctggcacagcagctcaatttcatccaccaacttctggttccccccatagtatctcttgcccaggataaccctccgagtacttgttgttcagacaggacccccagggccttccaaggccagctcgggcttgcagaagttcttctgaggcaaatgagctcccaggccacgacactgcctgtccttctccctctgcagcaactcccacatctcaggatcactgtccgacaggctctcctggcctgtccagcccctgtttgcttccccagtctgagtctgggctgcgttgctgtgctgagcccgaatggccatcctgaccagctgcccacatctctgcagaggccgagccgcccaaaacaaagagaagtacagcatcgcaactcggaagtcgcaggaggtccagccaccaactctggtctagggagcaagctgtcgg

SEQ ID NO: 52189 - DNA, 630 bp, Homo sapiens
  misc_feature (1)...(630): n = a,t,c or g
acctgatgttcctaatttgaagggtccttgcagctgcagacctgtaagagnagctgatgttcctagattgagggtcgtgcagctgaagacttggggaggagctttagttgttcgcgttgagggtctttcagttggagactcagaggagctgatgttctagatttagggtcacggaactggagaccctggacagaagttgatgttctagtttaagttcttgcagctgcagacccggagaggagctgatgttctagattgagggtcatgcagctgaagacccggagaggagctgatgttctagattgagggtcatgcagctgaagactctgggaggagctgatgttctagtttgagggtctttcagctggagactcagagaggagcttatgttctagatgagggtcatgcagcagaggactcggggaagagctggggttgtagtttgagggtcgtgcagctggagatctggggaggagctgatgttctagtttgaaggccgtgaagctggagacctggcggggagctaatgttgcagtttgagggccgtggagctggagacccggcggggagctgatgttccagtttgaggtccgtgcagctggagatctggtgggggagctgatgttccag

SEQ ID NO: 52190 - DNA, 771 bp, Homo sapiens
ttttgtttctgttccataaacctttattgtgcacagttcctgtgtcaggcactgggctaggggctgggatacaaagacggaggcttacaatctaacagggaagaaagatcacagttacccatcatgtagggcagaatggagcaggtgccagctgaagagtacaaaggaagaagagccaaagggtcagaggaggaagctgtactgggtgggcacagcaacacatctctcacccacagaaacaacccccagatcagccagagagatgaggtatggcttctgagtgcttaaaggactttacgttcctaaaaggcaactggtgctgagaattcacagttgatgggcccaggtggcagtgagtgatggctggcatctcccgtccaggccctcacagtgtcctcaaggggtcattgccctcaagctgccgttcttcagagtccgtgaaggggtcgtaggaaggttctgggggagctgaggttgtgctctcatacaaggggttcgagatattctcaggctgctgcttgccaagagctgcaacattaatgtcctcttccgactcaaaatgctggaagccgattgttctccggtttatccgaaagtaggagtaagcagccaagcaacagccccagtcaccaggatgatggcaaagaagatccctgctcccaagccagtgtgggtcaaggtcacgggggcagggggtgcttttaaaggcctggaaatgacatgaatgatcccattggaggcaaagatgtcccactgcagaatggctcttcc

SEQ ID NO: 52191 - DNA, 337 bp, Homo sapiens
  misc_feature (1)...(337): n = a,t,c or g
ctgaattcctgtccattcctccaaatattttctactaaaatttactacttattattgattgtgtttttccctgttattgtggaatattttttggtcatactcattttgtaaagttaatttaaaattgcattttatgttctagcatattcactaaaccctgcctagttagtgtcatcttaaaatatgaagatcnnnnnnnnnnnnnnnnnnnnnnnnnnnnnnnnnnnnnnnnnnnnnnnnnnnnnnnnnnnnnnnnnnnnnnnnnnnnnnnnnnnnnnnnnnnnnnnnnnnnnnnnnnnnnnnnnnnnnnnnnnnnnnnnnnnnnttgcagctactt

SEQ ID NO: 52192 - DNA, 1367 bp, Homo sapiens
tcacggagaccattttatccacacaatggtttttgttttttattttttcccatgtttcaaaattgtgatataatgatataatgttaaaagctgctttttttggctttttgcatatctagtataataggaagtgtgagcaaggtgatgatgtggctgtgatttccgacgtctggtgtgtggagagtactgcatgagcagagttcttgtattataaaattaccatatcttgccattcacagcaggtcctgtgaatacgtttttactgagtgtctttaaatgaggtgttctagacagtgtgctgataatgtattgtgcgggtgacctcttcgctatgattgtatctcttactgttttgttaaagaaatgcagatgtgtaactgagaagtgatttgtgtgtgtgtcttggttgtgattggattcttaggggggggggaactgaaacatttgtcatatactgaacttatatacatcaaaagggattaatacagcgatgccaaaaagtttaatcacggacacacgtccgtttctgtagtccgtatgctctttcattcttggtagagctggtatgtggaatgccatacctctgaccctactacttacctttttactgacagactgcccacactgaaagcttcagtgaatgttcttagtcctgttttcttctgttactgtcaggaaactgagtgatctaatggttctctcactttttttttgttcttttagtgtactttgaagtatcaaatcttaacttggtttaaacaatacatattcctaacctttgtaaaaaagcaaagattcttcaaaatgacattgaaataaaaagtaagccatacgtattttcttagaagtatagatgtatgtgcgtgtatacacacacacacacacacagagataaacacaatattccttatttcaaattagtatgattcctatttaaagtgatttatatttgagtaaaaagttcaattcttttttgctttttaaaaaatctgatgcttcataattttcattatattattccacatatttttccttgaagttcttagcataatgtatccattacttagtatatatctaggcaacaacacttagaagtttatcagtgtttaaactaaaaaaataaagattcctgtgtactggtttacatttgtgtgagtggcatactcaagtctgctgtgcctgtcgtcgtgactgtcagtattctcgctattttatagtcgtgccatgttgttactcacagcgctctgacatactttcatgtggtaggttctttctcaggaactcagtttaactattatttattgatatatcattacctttgaaaagcttctactggcacaatttattattaaaattttgaatccaaa

SEQ ID NO: 52193 - DNA, 713 bp, Homo sapiens
  misc_feature (1)...(713): n = a,t,c or g
ggaacagacaggaaatcaactgggtttgaaactctggtggtgacctccgaagatggcatcacaaagatcatgttcaaccggcccaaaaagaaaaatgccataaacactgagatgtatcatgaaattatgcgtgcacttaaagctgccagcaaggatgactcaatcatcactgttttaacaggcaacatttcatacaccatttagtcacctaggccaaagtccggaaggatgctcctcttacacttttccgaagataatgagcccagccaaggcaacagagatgcttatttttggaaagaagttaacagcgggagaggcatgtgctcaaggacttgttactgaagttttccctgatagcacttttcaaaaagaaagtctggaccagctgaagnatttgccaagcttcccccaatngccttggnaattcaaagaggtatcnggaaaagagagagagaaaacctaccgctgttaatgctgaagaatgcatgccttcagggaagatggnatcagatgaatgcacaaatgctgggngacttcttatccagaaaatcaaactggatgaccctacagcagagtaaanatgtccaaggnagatgtntggtacctntganttcagctggactaataagcttcntgggcctttgagnntagaatatcaataccatgatntttcctacgctntgnggaaaaaagttgaacaaaaaaaaaaaaaa

SEQ ID NO: 52194 - DNA, 926 bp, Homo sapiens
tgtgaaaaagaggtgctttttactctagtattccttgttctgggatcacttaatcactatttcgatgatgaaggaactctgaactcctaagcaaaccatgccatgacatactttatatatatgcacaaaagttggataaaacacaaaaccagcattttgacaaattcactttaaaatgttttccacatcaactacttaaaagaagttacagcaatatgatcttccactgctcaggaagacagagtgaacttggatatgatgaatattaaaaacaaacatacagagcacctgggtctggacttgtgggctaaagaaatgcttcctgaatttgtccgagggtgatgtgttgaggcaaccgtgcccacagttcaccagcagtgaacactcctagttccttcaagtatattcctgttgtgaacctatttctttgaatttaatcatctgggatgattgctgcagtgtgagtctttagcattttgaaaatcccacagaagagattaagaaggttcctcttcccagaagacactcatataaagcatgcttctatagggttaactgttcagaaattgtaaggtgcatggtcatcaccaggtaagcagctctacaggggcccatggcccatactcatccttgcgtgcccaggggagccagcgtgcatatgagcagtagggaagtggcataacaacgcagaagggctcaggacaacttggcatttttgttgttgttaaactcaggcttatcaagagtcataaggactcatctcagtttgtatatacaccttcagacccatacagatagatgcataagaatatgatcatttctgttcttcacagagtactcagaattctgacaagaaacatcacaagtttatataaatgcccatttgcatagcagcttacaaattcaatagttgtcagaggcttgac

SEQ ID NO: 52195 - DNA, 1134 bp, Homo sapiens
  misc_feature (1)...(1134): n = a,t,c or g
cagttagctgggactaaccaggatgcgccaccgtgtctggcctctattcttgtaattgaatgagatgctatgaggccctgagcgacccacaggaaagtacttatcaaaagctttgtgtcatgagaagatgcggctgtggaaggaggttcaaagcttgcacacacgcacacacacacatgcacatgatttggcttccataaagctcgagtagaatattaaatattgagtactgagtttttaattgtaaacttaagatctcatccttaactttacatatacatagataacagggtggtcatgaaaagcactttaacatcaggacagatgttaagttctgaggttctgttttcaactgctctacatacaaaatgccctacaagcaaagaaaggcttaaataaatagatggggatgaacatgatgcacgccgtggtgacatgagtggtgtgcaggggtcggacagtgcggaacccgggtgggcaggagcacattgtggagacacaagtggtggcatctctgggatgtaggggaggatgtggggggctccttcaaggtggagctagcagaggccatggctcgggaggaagacaggacagggacagtttgtgggccagtgccacacgctctcctattggcttcatgggcctgggggcagccctgggtagcaaaggacagggccaggctctccccctggagacccagagatggcggtggtcctcttaggacaaaccctcaccagccccgccctctgaccagcctgtcactggtgctgatgtcaggtggtggccagtgtggaagggggttattgacagccctgtctgtggctaaggcacacccagcctgggagccccgaagcagctgacctgagcaatccagcgtccctttagtcacagacgccaaagctcccagaggcagttccactgagtgagggtgacaagacctaaaaccaccacctaccctgctgagcaggacccccaccccctgtagcagggagaggctcctgggccccagaagctggagggggtggtgtcttgagccctgacacctgctgctgctatcttgacccgaccacccgccccaactcggaatgccacactgtgaccantggggcacctcctgattatccaanaaaagtg

SEQ ID NO: 52196 - DNA, 3314 bp, Homo sapiens
gctcgacttttttttttttttttaactttgctagatgttgactccaatttttcagagggttcttttgtgtttgatatattttctgtacttccaattttcttcccagtttctctgttgagtttgatttttttggctggcgcacttaaagaaattttgtccttttcaggggtcctatccattttttcagtatcaggttccattttgcgctttggtgatggtttcactatttcagtcacttctagtttcgagattttcattgaagaagactcaaaatctttatctacgcctttttcttcagtttttctttttcttttttctcccttattatcaagtggtttgtttttctcattaggcttcttggccttttcttccttagttgttagcttttctgatttgacatctttggaatagtccttcttcactttttcctctttgactggttttgtttcttggtgttcttttgctgatttagagtgagcttttctgggggttccagtgattttttcatccttctgagaggaagatgatgatttagtattgtcagtcttcggagtctcctctttggcttttttaattggaggttcagatcgaggagatctctcacgttctccatctactttttcttggggtcctttagcaggttttacaatattttcttttttggacacagcagatccatcattcttccgtttggttttatcaccctttgcttttggtttatccctttctctcttgtctttttcagacactgatttaaaagtgattgattctgcatccattggttcatctctaacaggtgtggcatcatctctacttgggagaacaaacaatgagtctgttttattttcttcaacacctgtaggttctcttgatttcctagaagtctctaataactctgggttcagaaaaccctcactttcctccccttttcttctttttctgtgtttcttatgcttatttcctttaccatctcctggagcgttttcactctccttctcttttgactttgtattatccttctgattgtgaccatctcttgctgaaagcttttctggatagttgctacctatgtttcgacttctatgactttgcccaccaacatagtcttctctgcggcctcttgtgaagggagaattcctgatgttaagtggcaaaaatctctctggagaaaagttctctctatttgctgagggtcctaggctgtgctccagcagcataacctttataatatttttcataccactctctatattttctctcccattctcggtagcgttctttttcaaatgggtctctaaagtcaacacttctcccataatatgctttcatgtcatatggtggtggaacttctctgtatctattaaaatattcacgttctgtttccccttgaggtacattacgtttattaggagactgtcccctaaacgcttgaggagatcttgatcgtgaatgatagcgtctgtaagggggtgaccttgacctagatcgatgatatccatgagatctagacgtgaacggtaattgcggctcttgcctctgcctcttctggggtatggaggtgaccgtgaataggaacgagaatgtgagcggctgaatgatcgagaataagagcgtgaacgtgttgacccagatcttgatttagaataagtatatgaacttcttgaatacgaagaaccactatagggagatttagacctggaaaatgagcgcctacgctccttttgaatctttttgtattccatcaattccttagcaaaatcatttgtaaactcatctagcttggactttttcttttcctcttcttttagtcgtcgctgctctctatagaattcttccctggacaaaggtggtgcttgtgttgttgggatggtatttgaatgagctgtctgcactcctgatgatacccaaggtgttgataaattggcaggagctggaggaaaccctggaggagggacactatacccagcgggtggtggctggccaggaggaaactgaggagaaaactgtggaggaggaacacccggagggagaggaagtgtatggggaggaggcggatacaaaggaggtggtggaacaggtacaaagactggagttgctggtagtgacgggccttgagtcctctgtgatctttcgctgtggtgtcgcccacggtttatacttctgtagcagctcctctcccctcttctaatttgttgtggtggagaaaccagatagccaagtttgttggaatgttcccagcctggtcgaccaccacctggacgagcagtatttattcttactggaccagttgtggggatcaactgtccatgcaataatgactgtccaagcaaagatggggttccaagaacaggcacctggtaacccttctcttccataagagcggtaattgcaattgaggaggttccctttgagtgctctgatgcaagagctgcagctggcaatattttattatcagaatcccgaaaaggtcccatctgatttttcctgaatgaactgatatggatactgttgccagttatatcaggtacaggagctggagcagaagacggatttccagacacaggaggggccaaggaagactgattagaagttaatgaagatatagacggagctgggtgagttgatgaagatgtcactggaatcataagaggatcttgttgtcttgatatcggagatctcatcagaggttgtaggttcctctgaatcagtggtctcggaggtggtattgggggtggtggaggaggtaactgttttcgtagtctttttgtatagccagtttcatttttgaagttatttacagcctgtcgtaaaaatttattggcaattaaagcatcaggagaaacatcattttgatgacacgtcggacatgtgtgctcatctgattccaggagtgctgttcttatacattcatcacagtaactgtttccacagcagggaatcacaacagcatcagtcataatatccttgcagatgagacacaacaattcatctgggataggatcatcttcttctgaggaagaagatggctcctctggtaagaagggaggtttctctttcttcccaattgcatatgcttctgcatctatagttggtattgcatattttccagtgttggtaagcattgcacctttcatattaggatctttcacttccatcatgaaacttctgggaattccagtgctctttttaatcctaggaccagattcaaagtttttatccccatttgttgggcaattcttaatataatgtccaggtttaccacaacggaaacacgtgtaagatggaggtggtggacctagaggtttcctcgtgcc

SEQ ID NO: 52197 - DNA, 521 bp, Homo sapiens
  misc_feature (1)...(521): n = a,t,c or g
ttttttttttttaggtgtgcatgtaataacaaaacacaatagatttccattagaaccatcctttaattcaataaattctttggatgaactctgtaaatagactactgacacatagcactcaaaaagtcttatgaaccttaaaacacaaagtagtagactgggtagacatagggacaatacagctcatcatttcatttttgacatgttggacttcaccatgcaagtaaattaatgcatatatgatattttgttttgttttgagaaagggtcttactgtgttacccaggctggaatgcagtggcaatgatcttggctcacagcaaattctgtctcctgggctcaagtgatcctcccaccacagcctcccaagtaggtgggactaagatgcatacctctatgctcagctaatttttaaacttttttttgtagagatgaggtctcactatattggctcaggctggtcttgaactctcgaagtgtttgggattaccaatgtgaggccncgtgccgaattcttgggc

SEQ ID NO: 52198 - DNA, 360 bp, Homo sapiens
tctttaaaatgaagcatatgctcaagaggaactcacataactcatgaagaagaactataaagaataaccactggaggtttattcagtagagagagacacagagatcaaagttcggggaagaaccagggtgtctctgtgccttggtttcctcaaatgaaacagggattgataagtatcttagaggtcatagttaaaagtaattaagacaacctagctcacaataagcatccaataaggccattccctctcctcgccccatccccatgctttctttctcatttgtctagaacaacactccccaagggaacctcccaagctgaagttctccatctgcaatgtccaagctgcagccactcaccc

SEQ ID NO: 52199 - DNA, 274 bp, Homo sapiens
  misc_feature (1)...(274): n = a,t,c or g
ctaaaagatcactggtggatcattagggtcactaatgagaacactggtcaaggttactcatgagtcactgggcctgggccgaaatcatcagtggaactttgattaggatcataaaatgggaagttggtcaaaatcacagatggcnnnnnnnnnnnnnnnnnnnnnnnnnnnnnnnnnnnnnnnnnnnnnnnnnnnnnnnnnnnnnnnnnnnnnnnnnnnnnnnnnnnnnnnnnnnnnnnnnnnnnnnnnnnnnnnnnnnnnnnnnnnntagttc

SEQ ID NO: 52200 - DNA, 278 bp, Homo sapiens
ggggcattcaaggattccttctgcaaaaggcaagaaaaatcagattggattaaaaattctagagcaacctcatgcagttctctttgttgatgaaaaggatgttgtagagataaatgaaaagttcacagagtcacttactggcaattaccaattgtgaggagaggttcagccctgtttaccaccagccaacagcctatgttaaaggcctccaactaggacgcggactgtccctgcaagtccagcttgagaatcttgcgatgaaaaattaccctggagtt

SEQ ID NO: 52201 - DNA, 415 bp, Homo sapiens
ctgttttccaagtgaatgggtctcaaagacttggtgaccccagcctcatcttctaggccttttccacccaaccaggcctacctgggagagggtgaggttcagcacatcacacaccatccccactgtcattcagggcctgggtctccagctctgtaaccagtcctgtcccatttcctcagtccctgggcctcccagccttcaggctgtagggctgccttactaaaattgaaaaatccacctcttaacatctctttcactttggttttgctaacactgctctctgctgccctcccatcctccctgtatccattcatgccctatctttcattctccactcctaatccctctcctttctggcatcctggcctctcgtggtcctcagcccctcaccccagactgcagatctcacagtttg

SEQ ID NO: 52202 - DNA, 2477 bp, Homo sapiens
gcgacatagagactctggatattcctgagccaccacccaattctggatatgaatgtcagcttcgtttgcgcctttccacaggcaaagacctcaagcttgtggttcgcagcacagacacagtattccacatgaagagacggttgcatgcagcagagggagtggaaccaggtagtcagcggtggtttttttctggcagacctctcactgacaaaatgaagttcgaagagctgaagatcccaaaggactatgttgtacaggttatagtgagccaacctgtgcagaacccaacaccagtggagaactgaactgagccctgttggccagctcccacatccctctgctcctttttatggttcttgttgtcatttcctactctgcggcgtgaaatctatttcactgctctaaattccctatgaatggatttagttctgaggaattaccagtgaaaaattccatctgtgatggagaccaacaaaaataataaaacacaaagagccaggctttgagactcatgtaattacaatttctaatttgaaaggcagttaagaaatagataaccatttattttagaacactcaacaactatgtaatggctatatttcagtgacttggactgtaaatgaaacattgcatccatgaaggacagcaccaagcacctttttgaatacagaatttttttagaaaaatatatcaaattatataatttccagaaaccataaataatggatataaaacttaacctttttgttttgttttgttttgttttggttaatggaaactgaaaagagcagtatttgaggttgcttctattctggttttttattcttagctcaattaatatttagccataaatgagtagagactggcaaattgtgctttagtgttgctttcctcatccccacatcttgagctccttatttacattcacactaaattttggtgccttccagcacattagtggccagggcacccttctggaacactaggcaataatttcatcaatacagtcaggtctcttgagtttcaacagatactcagttgaaaagtcgctgtcatcttgctgcataagtattttgaaaggtctgtataacgaagccatttttatatccaggcttagaaggtcactactatatagtaccttcattgatctatctattctgcttggaacttttcatagctaagtataacccccaaatgcatggttcctgggtcaggagacaccaaaatcaattatagctgttcccactcaagttaataaagtaaatgatttcctccactttgcatggaggggtgtaaggaaagcctattttatctgtgcctgggagaactgtgcctattttcagtcttttagaggaaatttcaactcaaaatttttaagtgtgaaaggtttactggtgtcacataaacattagcagtgagaccaaataatgaaacattgctttataccttagtgctttccagttcactgttacctctagtcatggtagatgacaattttcctccctcatcttttgtagcaaagaagcaaattaagagccttttgcaagttagattaggggactgaaaaatccagggagataacctgattcttctatactatgactggagtaaagctgccaagagttaggttgaatttggagccttttaaaagttggttccataagtgagaaggggggctaacatgtgaccactgtgcccctgagaatccatgagatggaaaagtacagacaagaaggcacttaacgctgttctcagttggaaaatgtcagccctccacacctgtttggatgtgaagtgcattattaattttaatgacaaaatgaaactgctaattagtttaaatgtaatgtttaaatggtattgaatttcctattgcctgattaaatatatctgtaattgtaacatcatgtttctgagagctttaactacttccttatttttatgcaatcattttaaagattgtggctatatctaatttaaatttgctgatgattgaatctaaattcaagtgaagaccacagcattaatcccaaaggagattttttttatgtttagaggtggagatattagggtaaatcagtatattgctcctgtcatcaaagtttttgttcatttgtgtgccacatcgaatagcagcacttctcaaagtttgtcaactggaaaaaagtgtttaaaactgtttttttcttaagcaaatttggtgatgtcatcaatatctatgatatcgattggtaaaaggtctttctttgttgaggatttgagctctctttttaagagtttattttattttaaaggaacatatgctttgaataacaattctctgggcatgtttaactaacctaggtgggaaaaccatggtgctgtttaattgtaaatagattgatataagattggaccagtacttgatgtgtataattttagtatgtagggtttatgtgctttttttaaaaaaaaaaaaaaggttcaattttaaaaaa

SEQ ID NO: 52203 - DNA, 466 bp, Homo sapiens
agtcttgacacattttaatatttggtattaatatatctttttgaaaaatggtgagacattaaattacagtcaaatgttctgacaaatttggacaacccattaactattagatacttcagctttaaaaaacagtataatttaaggaaatacatagtacctcatgattccttaagtatttccggtgactacagagtctgtcattgttcctcctagtcaacacgtagtacaaacgtttcagaaacgggctgcagtctacagattttaagctgaagcttgggactgtctaaaactcagaaatctcctgaatgtaacagcaatgcacataggtacagtacttaaaactgcaaagccctttcaaatatatattttcagtaaatcttctcgaccccattagatattatctcagttttactggataaatacaatgaagccttgaatgggtagtgattttcatcggacgcgtggg

SEQ ID NO: 52204 - DNA, 534 bp, Homo sapiens
  misc_feature (1)...(534): n = a,t,c or g
gttccttttcaagtaatatgcccccaggagtggacttgctggggtcatatggtaattcttttttttaacttgaggaactgcccaaactgttttcccacagtggctacaccatttaacattcccaccaacaacgaatgaaggttttcaatttctccacatcctctctaacatttattttctctattattcatttttttttcctgtaggtttagatcctaggtctatttcgtcattctaataggtgtgaagtggtatcttcttgtggcgctgatttgcataatgactgatgaggttgagtgctttccatgtgcttgtcgnnnnnnnnnnnnnnnnnnnnnnnnnnnnnnnnnnnnnnnnnnnnnnnnnnnnnnnnnnnnnnnnnnnnctnttngttgtcgagcatcggagttccttatatattctaggtattagttccttaccagatatgtaagatttacaaatattttctcccattctgtgggttgtcttttcactttcttcatagtgtcccttgatatgtagaagcttttaatt

SEQ ID NO: 52205 - DNA, 610 bp, Homo sapiens
  misc_feature (1)...(610): n = a,t,c or g
attaattagcttttaatactacttctttgatgtattactcatattacccaaagaaataactggtgggcacagggtcaggtgctgaagggacattgtgagaagtgacctagaaggcaagaggtgagccctctgtcacgctggcataagggccgcttgagggctctnnnnnnnnnnnnnnnnnnnnnnnnnnnnnnnnnnnnnnnnnnnnnnnnnnnnnnnnnnnnngcgtctccctttccttggaggagtcagggaacactctgctccaccagcttcttgtgggaggctggatattatccaggcctgcccgcagtcatccggaggcctaacccctccctgtgnnnnnnnnnnnnnnnnnnnnnnnnnnnnnnnnnnnnnnnnnnnnnnnnnnnnnnnnnnnntttgaagtttgtagtagatagcagtagaagaaatagcgaaagtcttaaagtctttgatctttcttataagtgcagagaagaaaatgctgacgtatgctgccttctctctctctgcttcagctacctgaagccggcttcttgtctatgcctgctctctatctgctcaaactcctccgaggccagcaacatcccactgtctgtctggttgt

SEQ ID NO: 52206 - DNA, 654 bp, Homo sapiens
  misc_feature (1)...(654): n = a,t,c or g
gtaatggttagattgaaactcggtgtcagctggttactgattgcatccccaactttaggattttggtaaaattaaagcaattaatgcaaataaaggttcccgaagagcacccagcatatagctctcatttgttgattctgttagatcatgatcaatgttaagcctaaaaacaaggtggccacatcagtggtttgtaacccatgtttattctaatcagtcaatctggggctatatataatagtagttgaatgtttatagtactacccttgggaaaattcccatatattcacacccccggcatgggatataaatacgggaaagatttccccattggaggtacttcttctttaggcactccagttaacacctaggacaaataaggcacctaaatgcccgagtgtttgtcagttttaaaattagaaaagaaggcaagttgttttcctgtctacctgtttaataaattttttattgcccaagtacgtatgttcatttgatttaatacgttgaaatgtagtttaaaatatatattcaaataactaacaagtgaaggaataatttatttagaaacgtagaaataatggtactgtaagcagttgctttagagtcttttatagtattgtattttgaacattaaaaataaacattttnttcctg

SEQ ID NO: 52207 - DNA, 999 bp, Homo sapiens
ggggctgaggcggcgcggcggacctgcagcggcggtgagcaggctacgcacaggtgcgggggcggcgcctggacgaccgaggccagctgcagtggcggcgagggcgggcagagcagggtctccccgcgcctgcccgcgcgcagggtggcggtgctgagggacgcggagtcgccgtgtgacgtgcgggaggcgcgcgagggccagcatggctgagagctagcaaggaaaactcaggaccatgatggctcagtttcccacagctatgaatggagggccaaacatgtgtgctattacctctgaagaacgtactaagcatgacaggcagtttgataacctcaaaccttcaggaggttacataacaggtgatcaagcacgtaattttttcctacaatcaggtctgccggcccctgttttagctgaaatatgggctttatcagacctaaacaaggatgggaagatggatcagcaagagttctccatagctatgaaactcatcaaactgaagctacaaggatatcagctaccctctgcacttccccctgtcatgaaacagcaaccagttgctatttctagcgcaccagcatttggtatgggaggtatcgccagcatgccaccgcttacagctgttgctccagtgccaatgggatccattccagttgttggaatgtctccaaccctagtatcttctgttcccacagcagctgtgccccccctggctaacggggctccccctgttatacaacctctgcctgcatttgctcatcctgcagccacattgccaaagagttcttcctttagtagatctggtccagggtcacaactaaacactaaattacaaaaggcacagtcatttgatgtggccagtgtcccaccaagtggcagagtgggctgttcctcagtcatcaaagactgaaaatacaggcaaattattcaatagtcatgacaaaacctaatgagtggacactttaacaaggtccccaagcaagaacttattcttaa

SEQ ID NO: 52208 - DNA, 840 bp, Homo sapiens
  misc_feature (1)...(840): n = a,t,c or g
tttttttttttacaaaatagtaattatttatattttcaaaaaaaaaaaaattaacatttggaagttctcccctggaggaagaggggctagtcagaaggaacagaactggctcctatgcaggcggcaagtcaggtacaaacagctgagcaatctgggctgggattttatcacacagcatttttaattgataaaatttccttctctcttcttttgttctgtttttgttttgtgtgtttttttttttgtttgttttttagaaaaaggggtgggggagaagaaataaaatcagagaaaaatgcccaaaaacattttccacaatatctaaaaacagagaaccatagttcttgtcaagacaatatgaattctggatgagttattttttccagttttcaacaccaataaagatttttgcaaaagccaccacatcagaacactcatcttccagatcaaataaccttccccttttgccttcacttgtcatttttcataaaaggataaaaggatgtattctgttcttgcaaacaataagtgctaacaacaagagagctcttctgatgcttgtatggtggtaaggagttttcacaaatatccaagttttagcacagttagaaggactaaaatttgtttctctcaatataaatactactggaatccacaaactgatttttgagaaattctgcaaaaatcttttcttctttccttttcccttctgttaaaactcaatggcctttctttttttttttcctttttgctccaggcacctgacgattgtctgctccagcagatgcagcaggtgntccgaagnccaccgctggatatcccgggccaggctaactgatc

SEQ ID NO: 52209 - DNA, 604 bp, Homo sapiens
agtgatatagacaggataattatagacaatgttcaaattcttggttaattgtaagcttgaaattgttcattttttaaagaggaaatgaaataagtttactccaaataatgatagcttagatgactaactaatgataggtgaaaagcaaggattgatagttaaaatgcctctcttttgttattatcttctttgctctgtacttaggaatgggacgtacttgttctgatttgaggacttcttcatggtcacatgttctgtttgcaccacgcttaggaaggagcgtgaagaccaaggggagtaatagtcaaagtccttacctttgtttgggtggtttgtttaagagtaatcaacgtattatttaaaagtgtgaaatacagtcaaagatggccaatgttattccagtgatatgggagtgacatgaagtattatattgatgatgcatatataaaaaacgaggatagttaatgaaacacccaatgtttgagtgattctgtatactgatagggaatatcaagagtgttactgggttttgtgaatcacgggccttgaaagtattattaatgaataaatgacataatcaatagacaaggtagaaatgaatagc

SEQ ID NO: 52210 - DNA, 492 bp, Homo sapiens
ctatcccaaagtgagaagaacaattactattcaagccgttttagccctgacagccagtatattgacaacaggagtgtgaacagtgcagggcttcacacggtgcagagagcaccccgactgaaccacccgcctgagcagatagactctcactcaagactacctcatagcgcacacccctcgggaaaaccaccatccgctccagcctcggcacctcagaatgtatttagtacgactgtaagcagtggttataacaccaaaaaaataggcaagaggcttaatatccagcttaagaaaggtacagaaggtttgggattcagcatcacttccagagatgtaacaataggtggctcagctccaatctatgtgaaaaacattctcccccggggggcggccattcaggatggccgacttaaggcaggagacagacttatagaggtaaatggagtaggatttagtgggcaaatcccaagaggaagttgtttcgctgttgag

SEQ ID NO: 52211 - DNA, 933 bp, Homo sapiens
tttttttttttttttttttatctgtaatagtttattttaaagactttacatttacaagtagaaacaacatgtgttatctgtgggtaaggtagagcaggaactctaatccaagggtcggggagatcagttggttccttcacagaaaataagcctgttgtgtgggcatcttgcttgcctgtagatctttgttcccagttcaggaggtttttattcagtgcttgcttcatttactggaaaagttcactgggcccacctgtcaactccttcccccacagcttccagctcagcagcaaactgtagggaacagatttactccccagttcctactgtaaataatgctttaagaacagcattccttttggacagtatgtcatagacccaatttttaatactcccaagtcagatatctaactagagagtttaggaaatgtttggtatgatcaaacttttcccttcagtacacaatttaatttacgcagaagagcatcggagacatttgtctcatagatatgattgacatgagtgataggctaaaactaaaattttagtggtttgtggagtggctagaaaacatgaattgtaagcagtttttcagaatttaaaaatctcttagtttgaacagtagaagatgtaaataagcatagagactgttggcaagttatgtttatcacaaaacaaagaagaaggcacagagggtccctttgacccttgaacttgtggttactaatagtattaaggttggaaatcatgaggaaggacacagaacataaactgggatcttgaagacaggcatgttgataaaagtagccctgaagccttaatattagcaacatcgaagatgggaaagacaggattgatttatttgggaactaagtttacacattatatgtctcaatataaaacaaaagctatggctttagagtttaacaggtt

SEQ ID NO: 52212 - DNA, 569 bp, Homo sapiens
ctaagactttcaactaagcatcaggatgggaggaggaggtgttggggttttgaggagtgacctcagctgagcacctgtttcccaataataactcctccaatttgtatttgaggacccccaatgatgctcagagaggttaagtgatttgaccagggtcacacagcttgagggaatggggtagctccaggattgaagcaggccatttcatgctctcagccaggtatgatttagtaaatacagaagcagagtaccttcatggtgtctgggacatagtgagtgctctgtagcgggttgtcagtgaaaagactgagtggcacgtccagtgtattctgtttaataccacagaggcgtacacagttgtttggaagtccttggtcccttccaccaatgattaagtgctggctgtgggaagactgggctcctggggaggggaggtgggctcagcaggtggccctggtgtagcgtaaccttcaacctggcacacctgggacagccttggatgttggggccactaacctggcacataagccccttctctctcccagtgcaccggctgctgacccatgctc

SEQ ID NO: 52213 - DNA, 841 bp, Homo sapiens
tttttttttttttttttttctccaaggacgtccaggttgaaaaacaaactggtttttattctaaacacgtactagggcagcatgctggggggcctctcctgcctccagaggtgcccctgctccccactgtggccctctttagacagagtaggagctcgggctacccacatgcagcccagcccttagcacccaagggcctgcctgtgccccactctctgcctgggctagggaggcccaggaccctcggagtgggcaggcccaccctttccatgggtcaccagggtctcagtgcccacttgtcctccaaccaacagtgacacgggcaccctccacacggcctgtggctgccagtgccaccaccgcctgctccgtagggaagcccatgcgctccagctggctgcagccgcagagaggagacagaggacttggacagccatggtgcgctctggggttcctgggctgggccgttcaagaagcgaggcctggatgccctcctgcagcatctgctcatccaaggccgcccacatcggagtccctggggagaagctggccccagcccagtccaggcctgcctctgaggagccctcccaggtgggctgcacaggcctcaggcttggtgggggcagggctgagtcttcccagtgggaccagaggtcaggggaggccacataaggcggtccagggatgggaggcctgctattgccttcagacaggcctggataactcctgtcaccaatccagagtgcagaggccagcctgttctctccagtggcactgttttccccgataggtatgaatcatcttagggctggacgcagtggctcacagctgtataatccca

SEQ ID NO: 52214 - DNA, 1324 bp, Homo sapiens
gcaaagttctttaacattccaaagctctgacccagaacagatgcgacagagtttgctgactgcaatccgttcgggagaggctgctgccaaattgaaaagggttaccattccatcaaatacaatatctgtgaatggaaggtcaagactcagccattccatgtcccctgatgcccaggacggccattaaatgttaccctgccacaccactgcacttcacttccacttcagaccaacttcatactaatggaacattttggcaaatgtatattcagatgtacactaatatattatctattaaaatattagaatttgtgttgtggcttttaatgccagaagaaaagttaccagaatttataatttatagtaattttttgatcttttttttgccttaagagttgaatatgctgctttagaactttaaaacaaggtgtaaatgattttcattttttacaaatgaaaaataattcctttgtattgatttcacttaccagcacattctctacaatggtgacttagacaaaagtataagattcatagactttatatttgtatgacatacaactaggacaaacatagatatgacatttgctgcctcagtgtagcaattggaaatatttataagttatatgaaagcctgttttgggctgaaagaatgatttagaaaactagtgataccaaataagtatattcagttcaataattattttcaatgatgaatcacttaggtgtggaaagacttgccttgtgtattctttatgtaattacaaatcactgtcaattttatgggaagctcatagtattttaatattttattaacatggaactcttgtttttttaatctttagaacttaaattctacaagaattttaaatattttctgtatataattatgacattgtcacacagaaattacacattttatgtgccagaagccttaaacatctttctgtgaaaatgctgatatattgtgacagttatttcacatttgatatgtagagaggaataggggttagtttatgtttatattgaaaaactttaaagactatttggaagttccagaaattctggttttaattcaagtaaaatgataaaatagtcattatatagttcagatgctaatattctaagtaataatatatatttacattgaagctaaaactgttaagcaaaacaatgcccatttgtcggcttacagctcttccggagtctagagcctgttggtgttctgtccctactttaagaatttaattgctcacttattctgaaagctttgttcaaacaagatgatattaaatttgttttcactaaaactactgggaaaaat

SEQ ID NO: 52215 - DNA, 985 bp, Homo sapiens
ccctggcttccttctacctgtgcggccctcaacgtctccttggtgcgggacccgcttcactttcggctcccggagtctccctccactgctcagacctctggacctgacaggagacgcctacttggctctgacgcggcgccccagcccggctgtgtccccggcgccccggaccaccctccctgccggctttgggtgcgttgtggggtcccgaggattcgcgagatttgttgaaagacattcaagattacgaagtttagatgaccaaaatggatatccgaggtgctgtggatgctgctgtccccaccaatattattgctgccaaggctgcagaagttcgtgcaaacaaagtcaactggcaatcctatcttcagggacagatgatttctgctgaagattgtgagtttattcagaggtttgaaatgaaacgaagccctgaagagaagcaagagatgcttcaaactgaaggcagccagtgtgctaaaacatttataaatctgatgactcatatctgcaaagaacagaccgttcagtatatactaactatggtggatgatatgctgcaggaaaatcatcagcgtgttagcattttctttgactatgcaagatgtagcaagaacactgcgtggccctactttctgccaatgttgaatcgccaggatcccttcactgttcatatggcagcaagaattattgccaagttagcagcttggggaaaagaactgatggaaggcagtgacttaaattactatttcaattggataaaaactcagctgagttcacagagttcgcagtatgtgcagtgcgtggccgggtgtttgcagctgatgctccgggtcaatgagtaccgctttgcttgggtggaagcagatggggtaaattgcataatgggagtgttgagtaacaagtgtggctttcagctccagtatcaaatgattttttcaatatggctcctggcattcagtcctcaaatgtgtgaacacctgag

SEQ ID NO: 52216 - DNA, 943 bp, Homo sapiens
  misc_feature (1)...(943): n = a,t,c or g
gaaacattttcaagtcattttgagaggccttacctccagttcaaagctgagcccccactaacctccagaggattcgtggaaaagagtactgccttacacagaatcagtgctgaacatccagagagcatgatgagtgaagtgcatgagagagctttacagcagcaccctcaggctcagggtggtttgctagaaacacgggagaaaatgcatgctgataataacttcactaaaacccaagataggctgcatgcttcctctgatgcattctcgggcctcaggtttcaatcaggcaccagcaggggctatcagaggcaaatggttcctcgagaagagattaaaagcacatcagcaaagagcagcgtggtcagcctagctgacacggcacctaatttctccaggctcctgtctaatgtaactgtcatggaaggttctccagtgactttggaagttgaagtaacaggatttccagagcctacactgacatggtgggtagcctataatgacaagccataaatggaaacaaattcaatcacagagaaaaatcattctgtgagcactaactgaaaggtttagggctagctgattaatattctatgacactgcaactctgcatgattcaatctcacatcagacccctctcattttagtagcagcatagttaatacctttaagaaaaataaaaggtaaccatataaagtactaataatttaacaaatttccaaagcactgtaggttggttgtgcttgttttcttctgtgtttaacattccacatttctaaagattgtgggttgaaattattttttattgtctatttccatataagcatggcatctgcttgctttaactacctttatgcaattgaaaatataagaatttgnttttatttccctttactctcatttacctctttcatctttttcctctttccaacagagcacacgg

SEQ ID NO: 52217 - DNA, 858 bp, Homo sapiens
catagcagtgctactttacatttatatagttctatgaaactgatgtctgaattggctttcccttagacaaaagaacaaaatttaccgtcaccatgtgtcaaaccattccactgtgcagatcactcagctgtgatatgaaaagaaatattaagtaaagaagtatttggtcagattctcttcagccataatgtgtaatgtcaggcaatgaaacagaacagtagctaagagtcaagccatgcgtttgagtctcagctctgctactaattattcctccactttaccttttgaaggagatccggactacaaaggaaaggtctttaacctctctgaatctcattgtgaaatgtgctcttccagttctataataagatgtacctttgatgcatcaaccaatacagcaaaattgcctttcatagctaaaatcatgtaacttgagttccacagagcactccagcatatcatttatacaattactcatatatcctttatccccatattttaacatcttcatttatttggaaacactcaactacctgccaattcaaaagtcaaccacatccccatatgtaactaatttttatctttttttttttttaaacaggtgaaggtgccgagctataaacctccagaatattattagtctgcatggttaaaagtagtcatggataactacattacctgttcttgcctaataagtttcttttaatccaatccactaacactttagttatattcactggttttacacagagaaatacaaaataaagatcacacatcaagactatctacaaaaatttattatatatttacagaagaaaagcatgcatatcattaaacaaataaaatactttttatcac

SEQ ID NO: 52218 - DNA, 845 bp, Homo sapiens
aaggtagggatagacccaaatttacacaacaagataatgacatctccagcttttaagttgatcatcaaaggctgggctggatttgtcttgctgtatgtgtcaggaaatttatacctattacattttccattttctcaaaatttaagtcacatgactaatatttagctgcaactttcctcataacaaatagtgtcatgaagaatgttgtagtgtgaagtttgtacatttcagggtcagatatacaatatgaactcttaatctacaggaatgagaatggaggatcattgaaggccatgatataaacaaatttgcatgttgaagcctgtataaaacatggtacagtgagtgaatatacccccatccccaagaacactttatacatattaaatggatatatgattactgtgcaaaaattcattctggaaatgaacatatatttgagcactaatatgtaatgtacacctgccctaaggagaaaataaattataaaactttttacattcaaaattactttcccaagcatgtcttagaataatctatgtgttgatgcatgtaaattgtactttaggtaggcaaagaaatctggttatttatgtaaaaactagtctaataaagttagttagtggctttatcactttaaatctttagtgtccaaaagtggtgtttaaagtaatagcacatcagaaaaccttgtctggacaaaactagttcactcactgcttctgcacctgcgttgctccctttagggtttattaaaataatgacccaatgttacctgtgttggtattataacttgtccgttactgatgtctgtgggatcctaccctcctctctggaagggggta

SEQ ID NO: 52219 - DNA, 1388 bp, Homo sapiens
aggatttcaaaatacattagtgagagtaacagctagcagaataattacaatggctaaaacgtttttatagagaatcttgtttttcaaaaaagaataaaaagtttgaatagctattattaaagaaaagccatgtcttcaacatctgagtcaccaagaagtaacactttttaaacttgttagaaatccctggaggcatttcaaattcatcttctaacctacctaagcactttaaaatacagcctccttctgttcctctggttccccttcatgcctccttttgaattgatatctcagctgtccaatatttctttgacttcagcattgttattttatttctctatatcaatgtgtccttagttttcttagcctgttaatttaaaaatcccagacttgggggtcattgtgttgctacccaagagaaaatgctacagttttatagattgcacatcattctttaaggcatacttttacctcaggaaacttactctagtatgttctcatatattgaattctcaactaagtaactatttctttatacctataaactagtacctaattcactgttagttaaatgagctatagataaggcagctaaatttctgaaagatagccagagtaagtaagcagccactgcaagctctgaatcagttttttaaaaaaaaagaaaaaaaaaaaaaaggagctgtgccccattgaacaatgacaacatcacaaggggaagggagggattttgccaaaagttagaaaggtggagctgtaagccatgtgcttgttgcctttgacagtgacagtgcgcgtcttacaactaattccactaggcatgggaatgtcacctcctttgccactgtaccccatcaagcttactctgaatcaaaggttttgtaaaacttttgaaaatgaacttagctgcaaaatatagctaaccactttccattgcaaggctttgccaaagtgaagagaggttcgtacttctcataattggtatttagcacaattgtaagatacagttttactgtttgtacatcgtttttttccattaaacttttctagagaagacaaaagcttacactggtgacatggataagtgagatggtgtctaacgagcagtgcaatattagggcggtgcaatagaggccctgttgggcaagatgagttttgctggagagctggacagtgttggttagcttcctgcattgattgccccctgggcgttcttcccccttaactgtgaaagcagagtctataaatgaactctttgctcttacaaggtaatttacatattttctttctgttgaaataactgaaaatgttaaatctaccagtttatgtcttgtaaacagagtgtcatatgtatttaagttgtgtatttttataaagtaaagccaagt

SEQ ID NO: 52220 - DNA, 14703 bp, Homo sapiens
gcagacctaaaggagcgttcgctagcagaggcgctgccggtgcggtgtgctacgcgcgcccacctcccggggaaggaacggcgaggccggggaccgtcgcggagatggatcgcgggccggcagcagtggcgtgcacgctgctcctggctctcgtcgcctgcctagcgccggccagtggccaagaatgtgacagtgcgcattttcgctgtggaagtgggcattgcatccctgcagactggaggtgtgatgggaccaaagactgttcagatgacgcggatgaaattggctgcgctgttgtgacctgccagcagggctatttcaagtgccagagtgagggacaatgcatccccagctcctgggtgtgtgaccaagatcaagactgtgatgatggctcagatgaacgtcaagattgctcacaaagtacatgctcaagtcatcagataacatgctccaatggtcagtgtatcccaagtgaatacaggtgcgaccacgtcagagactgccccgatggagctgatgagaatgactgccagtacccaacatgtgagcagcttacttgtgacaatggggcctgctataacaccagtcagaagtgtgattggaaagttgattgcagggactcctcagatgaaatcaactgcactgagatatgcttgcacaatgagttttcatgtggcaatggagagtgtatccctcgtgcttatgtctgtgaccatgacaatgattgccaagacggcagtgatgaacatgcttgcaactatccgacctgcggtggttaccagttcacttgccccagtggccgatgcatttatcaaaactgggtttgtgatggagaagatgactgtaaagataatggagatgaagatggatgtgaaagcggtcctcatgatgttcataaatgttccccaagagaatggtcttgcccagagtcgggacgatgcatctccatttataaagtttgtgatgggattttagattgcccaggaagagaagatgaaaacaacactagtaccggaaaatactgtagtatgactctgtgctctgccttgaactgccagtaccagtgccatgagacgccgtatggaggagcgtgtttttgtcccccaggttatatcatcaaccacaatgacagccgtacctgtgttgagtttgatgattgccagatatggggaatttgtgaccagaagtgtgaaagccgacctggccgtcacctgtgccactgtgaagaagggtatatcttggagcgtggacagtattgcaaagctaatgattcctttggcgaggcctccattatcttctccaatggtcgggatttgttaattggtgatattcatggaaggagcttccggatcctagtggagtctcagaatcgtggagtggccgtgggtgtggctttccactatcacctgcaaagagttttttggacagacaccgtgcaaaataaggttttttcagttgacattaatggtttaaatatccaagaggttctcaatgtttctgttgaaaccccagagaacctggctgtggactgggttaataataaaatctatctagtggaaaccaaggtcaaccgcatagatatggtaaatttggatggaagctatcgggttacccttataactgaaaacttggggcatcctagaggaattgccgtggacccaactgttggttatttatttttctcagattgggagagcctttctggggaacctaagctggaaagggcattcatggatggcagcaaccgtaaagacttggtgaaaacaaagctgggatggcctgctggggtaactctggatatgatatcgaagcgtgtttactgggttgactctcggtttgattacattgaaactgtaacttatgatggaattcaaaggaagactgtagttcatggaggctccctcattcctcatccctttggagtaagcttatttgaaggtcaggtgttctttacagattggacaaagatggccgtgctgaaggcaaacaagttcacagagaccaacccacaagtgtactaccaggcttccctgaggccctatggagtgactgtttaccattccctcagacagccctatgctaccaatccgtgtaaagataacaatgggggctgtgagcaggtctgtgttctcagccacagaacagataatgatggtttgggtttccgttgcaagtgcacattcggcttccaactggatacagatgagcgccactgcattgctgttcagaatttcctcattttttcatcccaagttgctattcgtgggatcccgttcaccttgtctacccaggaagatgtcatggttccagtttcggggaatccttctttctttgtcgggattgattttgacgcccaggacagcactatctttttttcagatatgtcaaaacacatgatttttaagcaaaagattgatggcacaggaagagaaattctcgcagctaacagggtggaaaatgttgaaagtttggcttttgattggatttcaaagaatctctattggacagactctcattacaagagtatcagtgtcatgaggctagctgataaaacgagacgcacagtagttcagtatttaaataacccacggtcggtggtagttcatccttttgccgggtatctattcttcactgattggttccgtcctgctaaaattatgagagcatggagtgacggatctcacctcttgcctgtaataaacactactcttggatggcccaatggcttggccatcgattgggctgcttcacgattgtactgggtagatgcctattttgataaaattgagcacagcacctttgatggtttagacagaagaagactgggccatatagagcagatgacacatccgtttggacttgccatctttggagagcatttattttttactgactggagactgggtgccattattcgagtcaggaaagcagatggtggagaaatgacagttatccgaagtggcattgcttacatactgcatttgaaatcgtatgatgtcaacatccagactggttctaacgcctgtaatcaacccacgcatcctaacggtgactgcagccacttctgcttcccggtgccaaatttccagcgagtgtgtgggtgcccttatggaatgaggctggcttccaatcacttgacatgcgagggggacccaaccaatgaaccacccacggagcagtgtggcttattttccttcccctgtaaaaatggcagatgtgtgcccaattactatctctgtgatggagtcgatgattgtcatgataacagtgatgagcaactatgtggcacacttaataatacctgttcatcttcggcgttcacctgtggccatggggagtgcattcctgcacactggcgctgtgacaaacgcaacgactgtgtggatggcagtgatgagcacaactgccccacccacgcacctgcttcctgccttgacacccaatacacctgtgataatcaccagtgtatctcaaagaactgggtctgtgacacagacaatgattgtggggatggatctgatgaaaagaactgcaattcgacagagacatgccaacctagtcagtttaattgccccaatcatcgatgtattgacctatcgtttgtctgtgatggtgacaaggattgtgttgatggatctgatgaggttggttgtgtattaaactgtactgcttctcaattcaagtgtgccagtggggataaatgtattggcgtcacaaatcgttgtgatggtgtttttgattgcagtgacaactcggatgaagcgggctgtccaaccaggcctcctggtatgtgccactcagatgaatttcagtgccaagaagatggtatctgcatcccgaacttctgggaatgtgatgggcatccagactgcctctatggatctgatgagcacaatgcctgtgtccccaagacttgcccttcatcatatttccactgtgacaacggaaactgcatccacagggcatggctctgtgatcgggacaatgactgcggggatatgagtgatgagaaggactgccctactcagccctttcgctgtcctagttggcaatggcagtgtcttggccataacatctgtgtgaatctgagtgtagtgtgtgatggcatctttgactgccccaatgggacagatgagtccccactttgcaatgggaacagctgctcagatttcaatggtggttgtactcacgagtgtgttcaagagccctttggggctaaatgcctatgtccattgggattcttacttgccaatgattctaagacctgtgaagacatagatgaatgtgatattctaggctcttgtagccagcactgttacaatatgagaggttctttccggtgctcgtgtgatacaggctacatgttagaaagtgatgggaggacttgcaaagttacagcatctgagagtctgctgttacttgtggcaagtcagaacaaaattattgccgacagtgtcacctcccaggtccacaatatctattcattggtcgagaatggttcttacattgtagctgttgattttgattcaattagtggtcgtatcttttggtctgatgcaactcagggtaaaacctggagtgcgtttcaaaatggaacggacagaagagtggtatttgacagtagcatcatcttgactgaaactattgcaatagattgggtaggtcgtaatctttactggacagactatgctctggaaacaattgaagtctccaaaattgatgggagccacaggactgtgctgattagtaaaaacctaacaaatccaagaggactagcattagatcccagaatgaatgagcatctactgttctggtctgactggggccaccaccctcgcatcgagcgagccagcatggacggcagcatgcgcactgtcattgtccaggacaagatcttctggccctgcggcttaactattgactaccccaacagactgctctacttcatggactcctatcttgattacatggacttttgcgattataatggacaccatcggagacaggtgatagccagtgatttgattatacggcacccctatgccctaactctctttgaagactctgtgtactggactgaccgtgctactcgtcgggttatgcgagccaacaagtggcatggagggaaccagtcagttgtaatgtataatattcaatggccccttgggattgttgcggttcatccttcgaaacaaccaaattccgtgaatccatgtgccttttcccgctgcagccatctctgcctgctttcctcacaggggcctcatttttactcctgtgtttgtccttcaggatggagtctgtctcctgatctcctgaattgcttgagagatgatcaacctttcttaataactgtaaggcaacatataatttttggaatctcccttaatcctgaggtgaagagcaatgatgctatggtccccatagcagggatacagaatggtttagatgttgaatttgatgatgctgagcaatacatctattgggttgaaaatccaggtgaaattcacagagtgaagacagatggcaccaacaggacagtatttgcttctatatctatggtggggccttctatgaacctggccttagattggatttcaagaaacctttattctaccaatcctagaactcagtcaatcgaggttttgacactccacggagatatcagatacagaaaaacattgattgccaatgatgggacagctcttggagttggctttccaattggcataactgttgatcctgctcgtgggaagctgtactggtcagaccaaggaactgacagtggggttcctgccaagatcgccagtgctaacatggatggcacatctgtgaaaactctctttactgggaacctcgaacacctggagtgtgtcactcttgacatcgaagagcagaaactctactgggcagtcactggaagaggagtgattgaaagaggaaacgtggatggaacagatcggatgatcctggtacaccagctttcccacccctggggaattgcagtccatgattctttcctttattatactgatgaacagtatgaggtcattgaaagagttgataaggccactggggccaacaaaatagtcttgagagataatgttccaaatctgaggggtcttcaagtttatcacagacgcaatgccgccgaatcctcaaatggctgtagcaacaacatgaatgcctgtcagcagatttgcctgcctgtaccaggaggattgttttcctgcgcctgtgccactggatttaaactcaatcctgataatcggtcctgctctccatataactctttcattgttgtttcaatgctgtctgcaatcagaggctttagcttggaattgtcagatcattcagaaaccatggtgccggtggcaggccaaggacgaaacgcactgcatgtggatgtggatgtgtcctctggctttatttattggtgtgattttagcagctcagtggcatctgataatgcgatccgtagaattaaaccagatggatcttctctgatgaacattgtgacacatggaataggagaaaatggagtccggggtattgcagtggattgggtagcaggaaatctttatttcaccaatgcctttgtttctgaaacactgatagaagttctgcggatcaatactacttaccgccgtgttcttcttaaagtcacagtggacatgcctaggcatattgttgtagatcccaagaacagatacctcttctgggctgactatgggcagagaccaaagattgagcgttctttccttgactgtaccaatcgaacagtgcttgtgtcagagggcattgtcacaccacggggcttggcagtggaccgaagtgatggctacgtttattgggttgatgattctttagatataattgcaaggattcgtatcaatggagagaactctgaagtgattcgttatggcagtcgttacccaactccttatggcatcactgtttttgaaaattctatcatatgggtagataggaatttgaaaaagatcttccaagccagcaaggaaccagagaacacagagccacccacagtgataagagacaatatcaactggctaagagatgtgaccatctttgacaagcaagtccagccccggtcaccagcagaggtcaacaacaacccttgcttggaaaacaatggtgggtgctctcatctctgctttgctctgcctggattgcacaccccaaaatgtgactgtgcctttgggaccctgcaaagtgatggcaagaattgtgccatttcaacagaaaatttcctcatctttgccttgtctaattccttgagaagcttacacttggaccctgaaaaccatagcccacctttccaaacaataaatgtggaaagaactgtcatgtctctagactatgacagtgtaagtgatagaatctacttcacacaaaatttagcctctggagttggacagatttcctatgccaccctgtcttcagggatccatactccaactgtcattgcttcaggtatagggactgctgatggcattgcctttgactggattactagaagaatttattacagtgactacctcaaccagatgattaattccatggctgaagatgggtctaaccgcactgtgatagcccgcgttccaaaaccaagagcaattgtgttagatccctgccaagggtacctgtactgggctgactgggatacacatgccaaaatcgagagagccacattgggaggaaacttccgggtacccattgtgaacagcagtctggtcatgcccagtgggctgactctggactatgaagaggaccttctctactgggtggatgctagtctgcagaggattgaacgcagcactctgacgggcgtggatcgtgaagtcattgtcaatgcagccgttcatgcttttggcttgactctctatggccagtatatttactggactgacttgtacacacaaagaatttaccgagctaacaaatatgacgggtcaggtcagattgcaatgaccacaaatttgctctcccagcccaggggaatcaacactgttgtgaagaaccagaaacaacagtgtaacaatccttgtgaacagtttaatgggggctgcagccatatctgtgcaccaggtccaaatggtgccgagtgccagtgtccacatgagggcaactggtatttggccaacaacaggaagcactgcattgtggacaatggtgaacgatgtggtgcatcttccttcacctgctccaatgggcgctgcatctcggaagagtggaagtgtgataatgacaacgactgtggggatggcagtgatgagatggaaagtgtctgtgcacttcacacctgctcaccgacagccttcacctgtgccaatgggcgatgtgtccaatactcttaccgctgtgattactacaatgactgtggtgatggcagtgatgaggcagggtgcctgttcagggactgcaatgccaccacggagtttatgtgcaataacagaaggtgcatacctcgtgagtttatctgcaatggtgtagacaactgccatgataataacacttcagatgagaaaaattgccctgatcgcacttgccagtctggatacacaaaatgtcataattcaaatatttgtattcctcgcgtttatttgtgtgacggagacaatgactgtggagataacagtgatgaaaaccctacttattgcaccactcacacatgcagcagcagtgagttccaatgcgcatctgggcgctgtattcctcaacattggtattgtgatcaagaaacagattgttttgatgcctctgatgaacctgcctcttgtggtcactctgagcgaacatgcctagctgatgagttcaagtgtgatggtgggaggtgcatcccaagcgaatggatctgtgacggtgataatgactgtggggatatgagtgacgaggataaaaggcaccagtgtcagaatcaaaactgctcggattccgagtttctctgtgtaaatgacagacctccggacaggaggtgcattccccagtcttgggtctgtgatggcgatgtggattgtactgacggctacgatgagaatcagaattgcaccaggagaacttgctctgaaaatgaattcacctgtggttacggactgtgtatcccaaagatattcaggtgtgaccggcacaatgactgtggtgactatagcgacgagaggggctgcttataccagacttgccaacagaatcagtttacctgtcagaacgggcgctgcattagtaaaaccttcgtctgtgatgaggataatgactgtggagacggatctgatgagctgatgcacctgtgccacaccccagaacccacgtgtccacctcacgagttcaagtgtgacaatgggcgctgcatcgagatgatgaaactctgcaaccacctagatgactgtttggacaacagcgatgagaaaggctgtggcattaatgaatgccatgacccttcaatcagtggctgcgatcacaactgcacagacaccttaaccagtttctattgttcctgtcgtcctggttacaagctcatgtctgacaagcggacttgtgttgatattgatgaatgcacagagatgccttttgtctgtagccagaagtgtgagaatgtaataggctcctacatctgtaagtgtgccccaggctacctccgagaaccagatggaaagacctgccggcaaaacagtaacatcgaaccctatctcatttttagcaaccgttactatttgagaaatttaactatagatggctatttttactccctcatcttggaaggactggacaatgttgtggcattagattttgaccgagtagagaagagattgtattggattgatacacagaggcaagtcattgagagaatgtttctgaataagacaaacaaggagacaatcataaaccacagactaccagctgcagaaagtctggctgtagactgggtttccagaaagctctactggttggatgcccgcctggatggcctctttgtctctgacctcaatggtggacaccgccgcatgctggcccagcactgtgtggatgccaacaacaccttctgctttgataatcccagaggacttgcccttcaccctcaatatgggtacctctactgggcagactggggtcaccgcgcatacattgggagagtaggcatggatggaaccaacaagtctgtgataatctccaccaagttagagtggcctaatggcatcaccattgattacaccaatgatctactctactgggcagatgcccacctgggttacatagagtactctgatttggagggccaccatcgacacacggtgtatgatggggcactgcctcaccctttcgctattaccatttttgaagacactatttattggacagattggaatacaaggacagtggaaaagggaaacaaatatgatggatcaaatagacagacactggtgaacacaacacacagaccatttgacatccatgtgtaccatccatataggcagcccattgtgagcaatccctgtggtaccaacaatggtggctgttctcatctctgcctcatcaagccaggaggaaaagggttcacttgcgagtgtccagatgacttccgcacccttcaactgagtggcagcacctactgcatgcccatgtgctccagcacccagttcctgtgcgctaacaatgaaaagtgcattcctatctggtggaaatgtgatggacagaaagactgctcagatggctctgatgaactggccctttgcccgcagcgcttctgccgactgggacagttccagtgcagtgacggcaactgcaccagcccgcagactttatgcaatgctcaccaaaattgccctgatgggtctgatgaagaccgtcttctttgtgagaatcaccactgtgactccaatgaatggcagtgcgccaacaaacgttgcatcccagaatcctggcagtgtgacacatttaacgactgtgaggataactcagatgaagacagttcccactgtgccagcaggacctgccggccgggccagtttcggtgtgctaatggccgctgcatcccgcaggcctggaagtgtgatgtggataatgattgtggagaccactcggatgagcccattgaagaatgcatgagctctgcccatctctgtgacaacttcacagaattcagctgcaaaacaaattaccgctgcatcccaaagtgggccgtgtgcaatggtgtagatgactgcagggacaacagtgatgagcaaggctgtgaggagaggacatgccatcctgtgggggatttccgctgtaaaaatcaccactgcatccctcttcgttggcagtgtgatgggcaaaatgactgtggagataactcagatgaggaaaactgtgctccccgggagtgcacagagagcgagtttcgatgtgtcaatcagcagtgcattccctcgcgatggatctgtgaccattacaacgactgtggggacaactcagatgaacgggactgtgagatgaggacctgccatcctgaatattttcagtgtacaagtggacattgtgtacacagtgaactgaaatgcgatggatccgctgactgtttggatgcgtctgatgaagctgattgtcccacacgctttcctgatggtgcatactgccaggctactatgttcgaatgcaaaaaccatgtttgtatcccgccatattggaaatgtgatggcgatgatgactgtggcgatggttcagatgaagaacttcacctgtgcttggatgttccctgtaattcaccaaaccgtttccggtgtgacaacaatcgctgcatttatagtcatgaggtgtgcaatggtgtggatgactgtggagatggaactgatgagacagaggagcactgtagaaaaccgacccctaaaccttgtacagaatatgaatataagtgtggcaatgggcattgcattccacatgacaatgtgtgtgatgatgccgatgactgtggtgactggtccgatgaactgggttgcaataaaggaaaagaaagaacatgtgctgaaaatatatgcgagcaaaattgtacccaattaaatgaaggaggatttatctgctcctgtacagctgggttcgaaaccaatgtttttgacagaacctcctgtctagatatcaatgaatgtgaacaatttgggacttgtccccagcactgcagaaataccaaaggaagttatgagtgtgtctgtgctgatggcttcacgtctatgagtgaccgccctggaaaacgatgtgcagctgagggtagctctcctttgttgctactgcctgacaatgtccgaattcgaaaatataatctctcatctgagaggttctcagagtatcttcaagatgaggaatatatccaagctgttgattatgattgggatcccaaggacataggcctcagtgttgtgtattacactgtgcgaggggagggctctaggtttggtgctatcaaacgtgcctacatccccaactttgaatccggccgcaataatcttgtgcaggaagttgacctgaaactgaaatacgtaatgcagccagatggaatagcagtggactgggttggaaggcatatttactggtcagatgtcaagaataaacgcattgaggtggctaaacttgatggaaggtacagaaagtggctgatttccactgacctggaccaaccagctgctattgctgtgaatcccaaactagggcttatgttctggactgactggggaaaggaacctaaaatcgagtctgcctggatgaatggagaggaccgcaacatcctggttttcgaggaccttggttggccaactggcctttctatcgattatttgaacaatgaccgaatctactggagtgacttcaaggaggacgttattgaaaccataaaatatgatgggactgataggagagtcattgcaaaggaagcaatgaacccttacagcctggacatctttgaagaccagttatactggatatctaaggaaaagggagaagtatggaaacaaaataaatttgggcaaggaaagaaagagaaaacgctggtagtgaacccttggctcactcaagttcgaatctttcatcaactcagatacaataagtcagtgcccaacctttgcaaacagatctgcagccacctctgccttctgagacctggaggatacagctgtgcctgtccccaaggctccagctttatagaggggagcaccactgagtgtgatgcagccatcgaactgcctatcaacctgccccccccatgcaggtgcatgcacggaggaaattgctattttgatgagactgacctccccaaatgcaagtgtcctagcggctacaccggaaaatattgtgaaatggcgttttcaaaaggcatctctccaggaacaaccgcagtagctgtgctgttgacaatcctcttgatcgtcgtaattggagctctggcaattgcaggattcttccactatagaaggaccggctcccttttgcctgctctgcccaagctgccaagcttaagcagtctcgtcaagccctctgaaaatgggaatggggtgaccttcagatcaggggcagatcttaacatggatattggagtgtctggttttggacctgagactgctattgacaggtcaatggcaatgagtgaagactttgtcatggaaatggggaagcagcccataatatttgaaaacccaatgtactcagccagagacagtgctgtcaaagtggttcagccaatccaggtgactgtatctgaaaatgtggataataagaattatggaagtcccataaacccttctgagatagttccagagacaaacccaacttcaccagctgctgatggaactcaggtgacaaaatggaatctcttcaaacgaaaatctaaacaaactaccaactttgaaaatccaatctatgcacagatggagaacgagcaaaaggaaagtgttgctgcgacaccacctccatcaccttcgctccctgctaagcctaagcctccttcgagaagagacccaactccaacctattctgcaacagaagacacttttaaagacaccgcaaatcttgttaaagaagactctgaagtatagctataccagctatttagggaataattagaaacacacttttgcacatatattttttacaaacagatgaaaaaagttaacattcagtactttatgaaaaaaatatatttttccctgtttgcctataggtggaggtatcctgtgtgtctttttttacttatgccgtctcatatttttacaaataattatcacaatgtactatatgtatatctttgcactgaagttgtctgaaggtaatactataaatatattgtatatttgtaaattttggaaagattatcctgttactgaatttgctaataaagatgtctgctgatttggttggtgatcattatagtaaatgatccaacaagaaaaggaattgactggggacctttagccgtgtctaaagaagaggcaccactcatatttcctataaaattatctaggaaaggaatccaggccccgctcttgggtccatttttacacattagcacttaattaatgttcaatattacatgtccaatttgattaatggctatgttgataggggccactatgtgttgtataggacatctgggacttgactgtaggactcctcagataatacagaggtagggaaaaggcatttcagtttgggcccttctgtgtgtta

SEQ ID NO: 52221 - DNA, 812 bp, Homo sapiens
ttttgctacaaatattttacatttattataggaatacaataaagaggttctgcagacacatgagtggtaactggtctattggaaaagaaaagacaattaaaaaatgatctaagtttacaaaaatgatgaatcatgctttaaaaatgtagaaacaattaaaaaatatcctacaatgttagccaaagttcaaagtgtatttcttttgaatgtaaaaactaacaaataaataagtgttaaatacagatctgagtaaaaatgataaaagatagacaaccaactgctttatatatttagctttcatccatttttcagacttgtttataaagccagataaacccgccaaagccttgtttgtgttttacactggaactttccaggaagaagcaccctatttccagtgtttatccacttcacaaatacattatcttaaaacaacaaaaatgattaaaggtgctttagcctaacattaaatggaccataaatcggcaaaccacagcagtgctttactcaaaatgctgcttgcaggtggaatgtctttaccagaagtgcctgagggccccactcctactccatcatctcaaactcatctatcaaaaggaaaaggaaggaacttagaaaaatcatatttccacaaccattcactaagagagccctagactagagggccacccacagtcaaatgaatggcatgggcaccatttgtacattttgtcttggctttcaatttgcttggattcctgaagaagtcagggctgttgctggaactttgacaacttgattttattcttccattttttcatctgggctttccc

SEQ ID NO: 52222 - DNA, 431 bp, Homo sapiens
cggagacatgcatttggggtttcccctagatcaagcatttctctaacattaaaagggcagagtgggaggaggggatgtggcagccgaccactttgaaggccagttttctcaggcaacttagaccatttttagtcaaattttatcttagattcacagtactggtggttttcgagtatattatgttaccttctgaaatagttcctgtcgttttgaggggcttttctttataaaatagtcaactttggctataaaatgttactttagtgtaattccaactggaccagtcttatctgtagcatgcaagaagttcaagtttctcttttatttttaaaagtggcccatgatacctgtaaatcttgggaaatgactgagtacaaaataacggagattaaattgagcttgaaatttatgggggaaatgcagctaacttt

SEQ ID NO: 52223 - DNA, 1056 bp, Homo sapiens
ttttttttttttttgtgctgttttttttttattgtgttttcaatggagaaatacatcatctgtttacaaaatagctcttgaaaaatacaaggagtacagatactataaaacaaagcaaactccagtcatgagacactacatacatcatgcgaaagcaacagtctgatctccaggttatgaaaactataattaaaaagtcactacacagaaaaggtccaagtttccagcttggcaaaacttgggtgcagttacatgaaacgtttaataaactgaattgttttccccaatgtgtaaacaaaatgacaagactaaatctgtgcctggtaatttcaatctaactctgaagctacacaaaacacacagacaccttgtacatttcacctgttagtatgaccatcttttttcttcggtggtggaaggaagggcaaggtgactgtgtaaagcaaagatgtgggaagtagaaatattgtttactagacattataaagtcatggtgaaaagaaagcttcgattaatgcatagcctaagggggaaaagactacactccaacttcagaaaattaatttagaaggataggggaagagattaagtaattgcagtttaacatgaaaaatgcacatgtgatagaatggagcacaatggaggattcataaaacatgctcatcagaaaaatctgttaagtcgactttgtccagattcagaaagagtaagtttatcaacatctggcatccctcatactttgtgaagatagatcttctactgcttaattatgagaaattattttattcaaagaaaggagctcttaatcttttgataaaacaaaataaaggagtagagagctgactagatgtcaagtgcttgctagaaatgatttttaaaatgcttctacacgtaaaatgtactgacaaattttggtaaaccatttaaaaataagaattagttttaaaatcttggagaaaatgcctttttgcccacatttaaaactgaaaatcaattttactatagatagggggttctgtgggagtgtacaaaattccttttagagatcaaatggcc

SEQ ID NO: 52224 - DNA, 923 bp, Homo sapiens
tttggtcaggatgcagttccaaaatgccaagcttttactcatcagatggttcaattcctcagcaccctttctggcagccattcttgagtgtgtctatattcctttcagacatggacagccagacccgccacatggccctcagcagcctctttatggaagtcctgatgatgatgaacaacgcgactattccaacagcagagttccttcggggcagtatccggacctggattggccaaaaaatgcatgggctggtggtgctgccccttttaacagcagcctgccagagcctggcgtccgtccgccacatggctgagactacagaagcctgcatcactgcctacttcaaagaaagccctctcaatcagaattcaggatggggacccattctggtatcccttcaggttcccgagctcaccatggaagagttcctgcaggagtgcctcaccttgggcagttacttgactctttacgtctacttgcttcagtgtttaaacagcgaacagactttaaggaatgaaatgaaagtgctgctcatcttaagcaagtggctggaacaggtgtacccaagctccgtggaggaagaggcaaagctgtttttgtggtggcaccaagtccttcagctctcccgtcattcagacagagcagaatgactccgtcctgacagaatctgtcattcgaattctgctcttggttcagagcaggcagaacctcgtggctgaggagagactcagctctgggatcctgggggcaattgggtttggccggaagtcgcctttgtctaacaggtaaggaagcgcctttctaacactgttgttctaaataggcctcagacatctgtacctacttacaggttgtgatatacttcagtaggtttttcgacttaggatctaggttctccagaaagattaatggaaaaaaaaaaa

SEQ ID NO: 52225 - DNA, 185 bp, Homo sapiens
tgagatccactttcattctcacctcacagtggctcctgactccttttccaatgcaccaagacacacaccacggagggatgtctgcacagacttctaaatgtggtttggggttgcaaactgtagttggggcaattttttgtagagaggtctggtcctggacccactgtcagagaccttagagaaag

SEQ ID NO: 52226 - DNA, 509 bp, Homo sapiens
tttttagtttgatttagaattgttttatttgtgttcctcatgctacaacacaaccttcaaagtcagcgaagtttataacattaatatgcttcctcaaaacatcaatttaggcaacccatagccagagcttctaaacttctacaatgcaacttcaacattcacaagagcacaatatgcttcaaatcccatctcaatgcaaatttaagaaaagcaaagcaaattgtattatcagtctaccaaaactcagtaagattctgtaatttaatatacctacttctcaactctctaaatttgtttctcaacactggggagtttttaaagatatcaatgcctgaattctactccaagccaattaaatcagaacaattaaaatcagaatctctgtggggcatcttttttttttttaaagcttccccagcaacgtcagcaagagttgcaaatcactgctcaacagaacctcttacgaagcaaaaacataaagaaaaataagccggggcagagtggctcac

SEQ ID NO: 52227 - DNA, 411 bp, Homo sapiens
aatcccggcacgttctagtttcagcccatttccctttgctctgcctaagtatgattggagaacagttgctcacttaccaaaccaacgttatgagactatccccagtgttgtatatatgtttcagcaatggaaattaaacacatagcccacagttgcctggatctcttctattccttcaaaaatatatagatatgatattggctctttttcagttttctgaaagttctccattcttctgcaaattttcagagaaatctgcccatcttttaaagcatttctccaggcaacaaaagcaaaagtagaaaatgggattacatcaaactaaaaagcaaagcacagcaaaggaaattattaacaaagtaaaggctctacctatagaagggaagaaaacgtttgcaaactccacatctg

SEQ ID NO: 52228 - DNA, 941 bp, Homo sapiens
  misc_feature (1)...(941): n = a,t,c or g
tttttttttttttatgtggttttggaacgcatatctgcatagttttatttctttctcaattccaccagaaaaagggattttcagaaaaaggcacagttgtgcttcctctaaagatgtagtctgcggtttgggaagtgctggttccctgaggttatctggagcgctggttgtaaagaagaaagttcttgtcttggcagagcaggcagagtttcaggcttcggcagctgcctcccgcagctaagaatgcccaggtgcccatgagcaccacggattataaatgctgacgccaggtttattccataataagaacttatgaaggtctgggctgacaccagcaggtggggtcaggagaacgataaggaggatgccccactttttcttctcacagccatcaaaaaatacaatgccccagaatacatgcagcaagataatgaccagcgtcatgaaagctgaataaaggaagaattgagggagaatctccatgaatgcccactgtgcctggccccaaggagtcagataggggtattcacaaaaggaaaantactccactcatgattccaaagcccaagccagaaacataggccagcagtcgcatagagggtgctgtctcacctgggtttatactcttcaaaccttcactggctttttttaagagttttataatatgcaaatcggaacatttcttggatatagacagagacaaacgctccaaagatcagcagatatttctgtgttggtccatctttgttgtcaataatgactcttgccatgaaccaaacaagggacgaaatcagtagagacaccaaccagaagaaagctccggcgatgaggaagatgatacgcaacggctcggtggcgatggtgaagacataaagggcgagcgcaggcccgaaggcaatgaaggcgcagccgaagaacacggccgcagtcatggccaccgc

SEQ ID NO: 52229 - DNA, 348 bp, Homo sapiens
cccgtccttcccctcttcttctttccttccatcaaaagatgtatttgaattcatactagaattcaggtgctttgctagatgctgtgacaggtatgccaccaacactgctcacagcctttctgaggacaccagtgaaagaagccacagctcttcttggcgtatttatactcactgagtcttaacttttcaccaggggtgctcacctctgcccctattgggagaggtcataaaatgtctcgagtcctaaggccttaggggtcatgtatgatgagcatacacacaggtaattataaacccacattcttaccatttcacacataagaaaattgagggttggaagaatgaaac

SEQ ID NO: 52230 - DNA, 406 bp, Homo sapiens
ggagaaagcaaagaagcaggaacagctcaagcagctgaagaacctgaagaggaaggagattctggccaagctggagaagctgcggaaagtaacaggcaacgagatgctgggcctcgaggagggggaccttgaagacgacttcgaccctgcccagcacgaccagctcatgcagacgactggaactgggacacgtgggacgggcctgagcaggagggagactggagccagcaggagccgcactgtgaggaccccaacttcaacatggacgccgactacgaccccagccagccgaggaagaaaaagcgcgaggcccccttgacgggcaagaagaagcgcaagtcgcccttcgccgcggccgtggggcaggagaagcccgtgttcgaacccggggacaagacgttcgagg

SEQ ID NO: 52231 - DNA, 324 bp, Homo sapiens
ggtttcaagccccaggtagaagtgttccctgcctcattactgggaagcagcatccacacaggggctaacgcagcctgggaccctgtgtgccagcacttactcttttgtgcagcacatgtgacaatgaaggacagatgtatcaccttgatggttgtggtgttggggtcctgattccagcattcatgagtcaggggaaggtccctgctaaggacagaccttaggagggcagtgtgctccagaacccacagttgctttcctcgtgtttcctgatcctgccttgggtctgtagtcatacttctggaaattacttttgggtccaagacg

SEQ ID NO: 52232 - DNA, 552 bp, Homo sapiens
atgagaagttagcatgaattgatttggtgctggcaggtgttctgatatgatttttaggaatcaagtcttccagttccttagcaggatcttgaatgagtgcattgattagttgaactgcatatcttgttgattctgtgccaccccttattgtgatcattctctcgccattcttatctttttgtttatccacatcaatatgggcaccagtaacatcctgtattgcagtgatgttgcatcctcctcttcccattatcctcgacaccactgaggctggaacagacaatttctttgaccttcgtacaacttctttccacccttcttctcttttctgaccccttttagggctagtgagaatcagacctttatgtttggagagcttaatggcaatgacactgtcttgtagctggttgacaaggaattaggagtcacttcaccttcaagtcgtgtctgagttttggaagtagcagtacttgtcttttcttcttgggaatgaaggagcagtgaggggtatttagaggaattcacatccatcacaaaatttaactcttggct

SEQ ID NO: 52233 - DNA, 1316 bp, Homo sapiens
accacggttcagctcagcttcaacctgtctgcaaagaaaagttttaccaagaccagaagttaaatatgacatttcctaggtagttgtaactctaacatagtttaaaaagtatgtggcttcagattgcctatactttgttcacaaacgtgtgatttagatatgactgatttagaagtgaacaacttggtaacatccctagactccactcatgaacgcagaattattacctgctgtttgctttctgaaagaatttcagaaatcagaacaaatgtgtctttaggcagattcagctccttttaatatttttctcttggcccactctctttgcctcccctgaatctgtgtggtactatagcagctctactctgtgcaccatgctaggaagcttcctttttggcagaatatgtttggcagcaaagctatagagacaggtgcattcagaacatcctgggcaccagtcatgagtcttactgtgtcaaaaatctgaaaacacttgctgagaaccaaatttattccattggaaaaaccctctgtggagctataagcctcttggactcttcttcctagattaaggcttgcatttccctccctgtttcagtaaaagatgatgaaagccactatcaatcctcactgctgagtggcagggagaagcagcaccactctcagctcttttctaatcttgtaacttagtgctagaagtctctccaggctattaccatgggcatttgttctctgttggagctgtaagcagatgaacccaagtagagaagatagatcttggaaggagagatccattgagtccagaagccagatcagcaaatggaggaacctcggaggtgaccagaaagatctccatcggttgcccaaggctgtaagtagtgatggttttagcgatgaataacgtaattggctatgaagtactgtggcagagctgctgttttctgaaggtgagaagccatttttagctcagagcaacccttaagagaacttttggcagattttgttggcattattgaaatatatatagaaaagttgctgattgcaatggttatgggaatggaatttaatgacatttgtaatttattacactcattggtttttattgattatagtattgtctgactttttattttctactatggttcctttagcgagaaaagtaacttttgtgcatatattgaagtggtttttcagctatgaattctttagggtagaaatttatttagcaaatgtgaattcttttgagaaagtatgaagttttgcagaaattgactgtgaaatgtcagagaaaaataaaagtcacttacttgaaacct

SEQ ID NO: 52234 - DNA, 1352 bp, Homo sapiens
ggcacgaggcgccatttgctgccgccgagcgtggacgcaggcggatctctgaagagcctgggtcgccagcctctcccgcgcacgttgcctggcctccagcacctacttggtcccgcgcgctccctcgtgtcgcccctcggagcagcagccgccgcggtcgccgctacccggaaagaagtcagagacgccgcgaggtcgccgccaccgccatgcccaagaataaaggtaaaggaggtaaaaacagacgcaggggtaagaatgagaatgaatctgaaaaaagagaactggtattcaaagaggatggtcaggagtatgctcaggtaatcaaaatgttgggaaatggacggctagaagcaatgtgtttcgatggtgtaaagaggttatgtcacatcagaggaaaattgagaaaaaaggtttggataaatacctcggacattattttggttggtctccgagactaccaggataacaaagctgatgtaattttaaaatacaatgcagacgaagctagaagtctgaaggcatacggcgagcttccagagcatgctaaaatcaatgaaactgatacatttggtcctggagatgatgatgaaattcagtttgatgacattggagatgatgatgaagatattgatgacatctaaattgaactcaacattttacattccatcttttctgaagattgtcctacaatttggattttgatcatgacaaagaagattaaaatttcattagcatgaatgcaatttgttaaagcagactgatttgtttctaagatatttttggtttttttaaaactgataataatgctgaattatcttaagtgagatgttaagcccactttgttcttttaatgtaatggagcttatgggtagaagaccatgtctactaattacaaaaaaaaaaaaaaaccatgcattgctgcttttcctaccacttccagtaagaaaatgggtgttttgaagaaatcatttgccttgtctcacggaatctgattaagccctggcctcttgattgtatagagtcattgtgtatattccagttacctagatattcccttgagattttgatacaatttgagggaggcagaagtctgcagttgaagaaaaaaaataagtctgtttgtcatatttaagtagcctgtggctatttttatactgattttgatatcatgttcttttcatagtcgtattttgccaccgtaaacataaaaaaaaaaaaaaagatttccaaaatgccgttttcagaacctgggttttaatagcagtattgaatttgtaagcttagtagttgcagaaattgaacactaggtggcactcagttatcttaacaggggaagtactgatacaatt

SEQ ID NO: 52235 - DNA, 1306 bp, Homo sapiens
tttttttttttacagttctgctcacggccatgatttattacagtgaaaggatacaaaacaaaatcagcaaaggaaaaaagacacatggggtgaagtcaggggaaactaagtgcaagcttccaagaatcctccgccagtggaatcacagaggatgagcttaattctcccagcaaccagttgtaacagcacttgtgaaacactgtcaaccagaaaagcttgttagagactgagtgcctggggtttttactgggagctggtcacaaaggtagtctctgcctggcacataccaaaattccagactcctagaaggaaagcaggtgttcagtagaaactatattgttttacagtttagatatagtaagctactttgatcagttctgggaatggtggaagccccctgaactccaagttcccagatgccaatcaagggccaaccttgtaaagcaggtctctaaggttaagtagtcaggtcggcttcattaacacttttttctgcacagcaattttatctcaacattttttcttcaatgcccataaatactcagtttcttgaattgtactttgaaccaggtttactatctgctggtttcctcattaatgagtcgaataagtcttcgacacatgctcatcttatacacatgtatatatatgagtcatgttgtcaacttaaaaggtttgacagataataacctaatcaagctaaataaagtccagccaaaattaattaataaaaaacattaactaaataatatcaaggctcaatctacacctcactttagttatttaggaaagaaaaaaaataacctttatactagcatttcacactttcttactgactttagaacgtcttctgatttaggtggcaatcacttgcctagttgtacttagggcaatattaataaaataatgaatgtttctgcaagaaataatatataaagattaatttcctctttaattttaccaatcagaatattaaaaatactacatcattgttttagatgaaattccccatttaaatatattatacataagccaaattttagaaatagctccttgtatcactgtacaattttgggcctttaaaaaaaaagctcaattttaagtttgaatataatgtgcagtttatataacatatatattatataatatatatactttatacattatataaagtattatccttattgtgaactttattatgcttctgaaatttctccatcatttcaaatttacttcaataaaaatttccctatattttgtgaattgcattttcaaatcagaagtaatgttacaaatttctgtctat

SEQ ID NO: 52236 - DNA, 1441 bp, Homo sapiens
gttccaggcagacatcatccaggtccatctggaactttcagtgatagctgccttcagccagcatctttgggggactctataatagcagcttgagatcagtgtctagaagactgttctgcaatttgctgccaaatgcatctcaggtttttaaagtcattgtttcttgctcatggtggctcatttattacatagtcccctcaccccactaatggataatgggaggaaaagttgctgcttccttcagcatcaaagcctttccttgggaatctgcctccctccatggcaggggtggattcgggagctgggagtaaccaggcaaagtcaaccagatgcctagctcctgctgagacccaggtcctatggcagctcctcattagattaaaggagaccacttccaaagcaggtgctgcatggctcaccatcatatgccccaaacaactgaaagttgggcggttatcaccagactgtgagtttctggcaagtagcttggggaagctgaataaactctaggcccagggctactaaagacttcaggatagaattctccatcaaatatacagcataagtaaaactgctctgcactgtttaatccatttccaaggggcttagaaaagctaacaagggtgtgtcccctgtcctgccccaccggtttgctggctttgtaataacataagaccattgtggttgttggtgtcagataccttcccatcctgagctctctcacctacctgctctctctcctagagcaggatactggggtacttttaagaagggtgctccttttaagatgcccagaaaagctgtatttaactcttgctatttgtaacttggggatgggtctcccctgccccagggcacataagagcaaaggctcccaatggtcagtggatgactctgcaaaagtgaccccctgtgccagaagctatagccctctccccaacaggtctctcttgttggccagagggcctgcttcccatgggcattgcaagtgccaccgtgcggggcctggctctgcacacccaggaaaagtctgcagacccccagccctccgcaataattcaccagaccagaagccactggtgtacagagaacacttaaaaaaatgtattttatgtgaaaaaaaattaaaactctgtatactgtatcagcagctttgtgtaaaaatggcaatcaagagagtctaatatatttaaaacttttttaaaaaaaatcttcgcagatctttgatatcgtactgaggtaacttccacgtagccccttgccacgcggcaccggtgggccttgggtccaaaactgtggctcagccacatcccaaagggggcacatgtccctggagttgcttccagctgccaaggcctgtgacagaattcgctgttaagagtttttaattaaaattattaaattccttttaataaccaaaaaaaaaaaaaaaaatgggggg

SEQ ID NO: 52237 - DNA, 266 bp, Homo sapiens
gacatatactaatcaaaataccgaataccaaataaaaacaaaactggcaccgcacccgggctcctgtaatgaactattataaacaccaccacctgtgctcactggttctctcagtatgctagcaactgagttaattccaagtcaaaccatgggactgttttgttccaccccaacctcatagtgacctatcactccagcctcacccctacccagatgttgataggaccaggagaagcctttaggaagtgttagtatgtagtgtgggg

SEQ ID NO: 52238 - DNA, 367 bp, Homo sapiens
ctgccataagatggcgtccgtggcggctgcacgagcagttcctgtgggcagtgggctcaggggcctgcaacggaccctacctcttgtagtgattctcggggccacgggcaccggcaaatccacgctggcgttgcagctaggccagcggctcggcggtgagatcgtcagcgctgactccatgcaggtctatgaaggcctagacatcatcaccaacaaggtttctgcccaagagcagagaatctgccggcaccacatgatcagctttgtggatcctcttgtgaccaattacacagtggtggacttcagaaatagagcaactgctctggattgaagatatatttccccgagacaaaattcctattgttgt

SEQ ID NO: 52239 - DNA, 1205 bp, Homo sapiens
aattcggcaagaggcggagtccagcaggccttcagagctaccagcaagccctgctccgcatctccctagacaaagtccagcgccctgggcccccgagcacccagcctccgcagcagtgtcctcatccataacaccctccaacagctgcaggatgcacttcgcctggctcccgcccctgccctgccccccgagcccctcttcctgggcgaggaggatttctccctgtcagccaccattggctctatcctcagggagctggacacctccatggatgggactgagccccctcagaatccagtgactccccttggcctccagaatgaagtgccaccccagcctgatccagtcttcttagaagctctgagctcccggtacttgggggactctggcctggatgacttctttctggacattgacacatctgcggtagaaaaggagcctgcacgggccccaccagagcctcctcacaacctcttctgtgccccaggttcttgggagtggaatgaactggatcacatcatggaaatcattctggggtcctaaaactgtgatagaggggatcgatccttcctcatgtcatcttcaggtggcctggatccctgaatgcaactctgggtgtgtgtttttgtgggggctcgaagcagtgactatggcctcctttgttcccatttcagggttccacaaactgtcttgcatgtgtgtgtgtgtctggttaccccgaccttctgtgaaggtgggtcttcctgaattaatttatctattccaaatgccttaacgagactctgtttctgggagtctgattttccacttacacatttcttccacctttcctgctagttcccactcccctgtgaccactggggcctcagggaagataaagaaagctgggcctgtcgaaggatgacagggatgtgctgccaggttgctatagaaacccaggctctgcctcttgcaccttgagggggtgggaggggctggtgtcctccctccaggctgaaccccacttcctcggcaggaccccagtctcagcagcctcctgatttcataaccaggccggaccacgtgcaatagggtggaaaccaaactgctccatgccgggatatttaaaagaaagagcagagttagtggtagcatataatttttttatttggaaaatttaaaatttttataaataaaagtatattggaagaagaaaaaaacaaaac

SEQ ID NO: 52240 - DNA, 422 bp, Homo sapiens
gtgatctgcatgtggcagggctgcgcagtggagcggccagtgggcaggatgacgagccagacccctctgccccagtccccccggcccaggcggccaacgatgtctactgttgtggagctgaacgtcgggggtgagttccacaccaccaccctgggtaccctgaggaagtttccgggctcaaagctggcagagatgttctctagcttagccaaggcctccacggacgcggagggccgcttcttcatcgaccgccccagcacctatttcagacccatcctggactacctgcgcactgggcaagtgcccacacagcacatccctgaagtgtaccgtgaggctcagttctacgaaatcaagcctttggtcaagctgctggaggacatgccacagatctttggtgagcaggtgtctcggaagcagtt

SEQ ID NO: 52241 - DNA, 237 bp, Homo sapiens
atctgtaaagcattttatttgtgtgtgattttatatgatagttcattagacattagataggaaagtatggaaagttttgagattgctacatgattgctcttttaatttgtccaatgtattcctttaaatgttgtgagggatttttttaccagtgaagtagcttttgcatgctaagttgtagtgaactgctgggcagaactaaaacataaatggtttgaggcatgattaatagttgta

SEQ ID NO: 52242 - DNA, 408 bp, Homo sapiens
ttttacatgaacacacagagtagctttatttgtaagaacctgaaactggaaacaacccaagtgtccttcaacaggcgaatgtttaaacacactatgttacatccatactatagaatattaatactattcagcaataaaaaggaataaactctcgatacatgtcaaaaccttggatagatctcaaagggattgtgctgaatgaaaacaatcaaatctgattccatttatgtagcatttttgaaatgacaagacataaagatcagattagtgactgcccaggggttagggaagtaccagggagggagggaggtagctgtggctataaaagggtagccatgagaaatctttacactgaaaatgttttgtatcttggctgtggtggtggtcatcagcatacatgtgataaaa

SEQ ID NO: 52243 - DNA, 377 bp, Homo sapiens
ttttttaattgtgttgagagtataatgtagttttatgtaggcaaaataaggtagagtcagaattttggcttctgtccttttcccttccatctacagataagcatttttattgttttgatttatattttgtttctttttaaaaatataagtaaatatatagatttttatatgctccccttttacataaaatgcagcctgctttgtacatttccatttttaacctaaacctagagatcactccatatcggaacgtagccatcttcctcattgctttgtacaactgcattttatgtgttgcattttatggatgtactgtaatttatttaaccactctccatttggtgaatatttgagtgttttcaactgtatgttgctat

SEQ ID NO: 52244 - DNA, 607 bp, Homo sapiens
ttccttttaatgtgttacaggggtctgttccaactaagagcttaggagagttggaagaaaaactgtttttcttcctctacactggcattaggcccaaacaatggtagcgttcctgccatggcccagctaacctgctgacgtcctgacagctccctggatgccccagtcccccaaaattcagtgagctgagcccagcaggaaggtggactccagggagaccgcagcaacatggcaccccagctcagagtggggctgcagaagactgttttccttcagtgtcattgaaactctggcccattccagctcctgggaggaatgagtgaggaagggagggaggaaggagaagaaccagcaggcagcaggctggggccagcaccctccgatctgtggtggctgtggttaagctggtgtctccagaaaaacatgagcagggtggtgaaaacctgccagctggccctggctcttgctgtggtagagaggcccaggaaggggcaggaacctcactggaggacgctcctttctttgaagctcaactactacaactccattaaagtgagaagagggggcatcaggttcccaatttgagtaatccatttctgcctctgcc

SEQ ID NO: 52245 - DNA, 1408 bp, Homo sapiens
tttcacactgtcacaatttattgaaattttataaaaactcaggccaagtggaagaataaggtacaactcaagagtacaaagacaactccgtttccgttcagtacttttctcctcagcactggtggtaagaaagccccttgctctctagtagccaggcagcatggacttacagtcttaaaatgaggctttatgtatttcaggctggaggcaggttgccttttctcctgaggaatctcaggcagggtaaaagttacttaccactcagtacctctgtgccagaagaaaagctcaatttattcaatccttagaaaagttactatcgtcccctggtcagacactaaggtgtcttgataaggtccagagacaaccacatagtccttattctaattcgtagtgaaaaggctgcaggcatatggtgctcctacgatgggcctgaccctttcctaagcacatctcatttccacatcctttgccttctctttcccccaacatttccagccagcatagaacccaatttctgggaaattgagaggagaaacagtattatgaacacagactcctttcaaattggaacaggagccaaaccaaataaataagagaattgtgtagggaagtggggtagaagggaggtcagggagcaatcccttgcctcaagtctggtgcacctcatggaacatcagttcacgggggatggctgtttctggaccaaacttggtggctgcccgacgctcaaaggcagcaacattctgtttgacaacctcatcaaaaaacatggtggcccagctgggagtgcagcagagaacgaaattcaaaggaaatcgaaaagtccacagtgcaggttcgaggataggcaggaataccagggctgaatcgccaaatagtctctaagtggttgaagagcttgccatcagtacaaacagccttgaccatgtgaggtttgaccatggaaactgcagaggtgtaacgttccatgacaggtggaaagccaacctccagctgggctttcaaatgaccttacggctggataccaccagagacttcttacaccagggcacaaactcacgatactcctggacgttggacaccacctcatacatctcctgcattgagtaccccatgattctacgctccgcagtaagcctttcgcttgttggtgaagggagcagcaaatcccatgaaggaacggctcgaaggtaagccagcctcagccgccaagatctgggcagcccgaggcaagaggaggctgcaggaggtcagaaaccccgagaacttcccttctcgtacaacttgcaaaagcattatccaaagctctacgttagctcccagggcatgattgctgccagtccccgccgcgcctgcatcccagtatagcacccctccaccgcggaaccccggggttcgcagcgac

SEQ ID NO: 52246 - DNA, 1027 bp, Homo sapiens
ggaaacagacacggacttagaggtggtgttggaaaaaaaaggcaacatggatgaggcgcacatagaccaggtgaggcgaaaggccttgcaagaagagatcgatcgcgagtcaggcaaaacggaagcttctgaaaccaggaagtggacgggaacccagtttggccagtgggatactgctggttttgagaacgaggaccaaaaactgaaatttctcagacttatgggtggcttcaaaaacctgtccccttcgttcagccgccccgccagcacgattgcaaggcccaacatggccctcggcaagaaggcggctgacagcctgcagcagaatctgcagcgggactacgaccgggccatgagctggaagtacagccggggagccggctcggttctccaccgcccccaacaagatcttttacattgacaggaacgcttccaagtcagtcaagctggaagattaaactctagagttttgtccccccaaaactgccacaattgctttgaattattccatttatgctggagattacaaattttttttggtgaaaaaatcagatcttggtgaggacctcgagcagtaagatataaataactcccataagcttagcgttccagtaatggaacactaggcataaatggtttattcagttgtgcaaatgaaagccatctgacagttggctcacattgaacacctgtggagattaaggacgaggacaactatattgatgggcttggatgaactggggcagggcagctcatatttcgggagccaggagaacgagtgagtgctaaaacctcctgttttctgtgttaaacattccgtccctgtttgagacatcagtatgtacagttaacttttgttgagtgtttagcaggtactagggacatactagtgttttccttaatgtatttaatcttcataattatgaaatgggtgctattattagccccatcttatagatgaggcaactgaggttcagggataaagtaataaaattgcctggggtcacccagccactaaaaaaaaaaa

SEQ ID NO: 52247 - DNA, 491 bp, Homo sapiens
gttttttacattaaaagtattatttatagtagactaatatgattttgaataaaatcacacttaagcaatatagataggttcctagaatttatgacgaggataaacctctcacataagaggaagcactagaaagtttatttttaaaacttgttgatccatattctataaggactaatgcatattttttatcttttgcttttcttgttggataaattattatgtccagtgatagtttaaaaagaacaagattttagtgtaagtcacctcacttgaaatgccagtaatgtggtattacacacattttatataatacctggaatctttgccctaaattattctgctggtttgtcgctatttttttcctctcctctttattatttcacaaatggtagaatttcttgatatgattcttgtaaagagtttagcttatcttgaacattctgtcttaagcaaatatttaacgaagagaaaactttgtagtttaatcaccc

SEQ ID NO: 52248 - DNA, 79 bp, Homo sapiens
taaactaagaacttatttcaaaatatgaataaaggcacctaattacaaatggtacattttttagacagtatcctacagt

SEQ ID NO: 52249 - DNA, 1002 bp, Homo sapiens
tccgaacgaccgcagcagggtcacaagggagatgtccgcccccagtcgtagcctcggacggtttctgagcgttggtgtttggcacgcgccaccctctcttgctttggttccgccatgccgatgtaccaggtaaaaccttatcacgggcgcggcgcgcctctccgtgtggagcttcccacctgcatgtaccggctctctaacgtgcaaggcaggagcggcggcccagcgcccggcgttggccacctacagtctttggtagatgagtggctggatagctacaagcaagaccagggatgcaggatttctggagcttgttaactttttcatctgatcttgtgggatgtaaaggactcgggggactatcctctgacagctccaggtctatcctggaagaagttccagggcagcttctgtgagtttgtggggacattggtctgtcggtgccagtacatcctcctccatgatgacttccctatggacaacctcatctccctgctcactggcttctcagactcacaagtctgcgccttctgtcacactagcaccctggctgctatgaaactgatgacctccctggtaagagttgccctccaactgagtctgcacgaagatatcaatcagcgtcagtatgaggctgaaagaaacaaggggccagggcagagggcacctgagcggctggagagcctgttggagaaacacaaagagctgcattaatactacattgtcaaagacaaagacgaacatgagacatgcgatatgagttttaaaaggagagaagagcaaaaaaacaatacagctatccaaggagcaagtgctgagcttgtgaaaaaacagcttctattttattaaataatagtgttcctgcagggatgtctgaagtactctgcaaggctaattaggacagatcaatgtacacttacctctccagaaggctgaaaggtgtgtagtgactatgtgtcattaaaaatttacttgaccatgggcaacagatgtccatgaaag

SEQ ID NO: 52250 - DNA, 1094 bp, Homo sapiens
  misc_feature (1)...(1094): n = a,t,c or g
cctctccccaaaaagacccgacaatcagatgaaaacaacttaaaagaccctgggggctccgagttcgactcgatcagcaaaaacacatgggctcctgctcctgacacatgggctcctgctcctgaccaaactgagcaagaccagaatagactgtcacagaactctgtaaatctgtctcccagcagtcacgcaaacaacttatcagtagtgacttacagtaaggggctccatgggccttaccccttcggccagtcttaaacgggtgtcagcaagaagaaaaattaacaaaagacagaaggcctgactttggggggttagggcaaggggttcctctggattgcagaccacatcgcacagacccctgggctctgaccccctctcatcccggaagaagaggaagaagcagaacagactagttttgagtaaactcagtatgcatgtgtgaatgctgaatcacaggaatggtgttgaggctaccaagaagaaatccatgcagccactttgggttttgttataggcatcagtctaacaagtcattaggtcactcgggaagggggaaaaagtttaaaatgggggaaaaaaagccatctttttaaacaaaaattattttgcctacagaaaggttgtagttttgagcacatgttaatttttttccctctttccccacttttatttttttaaataagggataacatattctttatagaatagtgcttgttctggaagagattcaggtgaaaagttggcgtggcatgtttgaggactctgcggatcagtgctacaggagtacatctgccctgccacatgactccagaagtctctgaccccatttgtttttaatggcatcagccaatgagttatcacccttttcctcctcttttctctttaatcttctgttgatttacacctttgacatttgtattcgtcaaccctgtggcttgttagcatcagaacctctctgaagaccaaacttccctgtgtggccagcagaggaagccttgaggatagatctcgggtgacgtgggattttctaagcctgagaggtgtccttctgcacacccttgtaacaattnaaattgcttttcttccatgtt

SEQ ID NO: 52251 - DNA, 713 bp, Homo sapiens
ttcagcagacccaccaccaataccctgcttatgaataaaagcatttaaaacattgatttctttgatttttccaggtcatctgtcaggcttgccaccttttgggccactgaaggtttgtgacccacagcaaaggcagaggcaaaccaccccaccctttctcagttggggctgagaaagagctgggaccctggcagcccacacacagtctcttcataagctgtaataaatcacttatactccttctcccaaccgcccagctagggcttcctacttatgaggtttttcctcttctagattgttctactaagtgttcatttaaaaaacgcttttgttgtctaccttggggaagggtttcacatcacagactgtccttccccagtccagaatgttccatctgctgccattcaaaaggaatcaataaatctctttaaagtctaataatgttagaatttttggtatttttctgaactgcccattccttgggaatttacagaactccagctcagaagctcccaaatcacagagacgttaggaaagggcatggagggaggatcgggaaatcttgctagcttgggatttggggaaaggaacaatccttcttggttttggtttcctcctctgcaaaacaggatattgataataatagtagtaacggtaataactgtcatcattagctacccagcataccactgccatttgtactgaggatcgac

SEQ ID NO: 52252 - DNA, 687 bp, Homo sapiens
gaccagggctggccttggcttcagctgcggttttggggtcccggactctgggatcggcggcgctatgagttctttcgaggggcagatggccgagtatccaactatctccatagaccgcttcgatagggagaacctgagggcccgcgcctacttcctgtcccactgccacaaagatcacatgaaaggattaagagcccctaccttgaaaagaaggttggagtgcagcttgaaggtttatctatactgttcacctgtgactaaggagttgttgttaacgagcccgaaatacagattttggaagaaacgaattatatctattgaaatcgagactcctacccagatatctttagtggatgaagcatcaggagagaaggaagagattgttgtgactctcttaccagctggtcactgtccgggatcagttatgtttttatttcagggcaataatggaactgtcctgtacacaggagacttcagattggcgcaaggagaagctgctagaatggagcttctgcactccgggggcagagtcaaagacatccaaagtgtatatttggatactacgttctgtgatccaagattttaccaaattccaagtcgggaggagtgtttaagtggagtcttagagctggtcccgaagctggatcactcggagcccgtaccatgttgtgtggctgaactgcaaag

SEQ ID NO: 52253 - DNA, 1266 bp, Homo sapiens
tttttttttaaaagttataaaacaaaatttattatgcaatactttctcataatgaattgcatctctttggtaaaaataaactttataaacattttaataatcagagattagatacaaaaactaagtatttgtaagttgtttttaatatgagcaaagattggcaactgagaagtggttcacttgtgactgggtcatctactggcagttataactcaaaccggggacaatttttatggctacatcagaaaagaggataaggaaacagtttgataacaaatttgttgaatcagaaagcattcttacactttcatttaaaaataaataatagttacaatcaattggcaattatacatttttatacactatatgatggcaacataatactttaaaattaagcacttagtttaataagaaatgtacaacgatttaaaaaataagttttgacaatggcactggcagttagatgcaaagcaatatgctttaagaaaaaaaatggcaggtataacattaaaatactcgaattcacctttcaataaatatttttactacatcattaacatactgaagtaaacttggtttaaatcaaagcttacacatttcaaactaaaaaaaaaaaaaaaatacaaaaaaacacctgtaagatatatgtaaaccagaaagcctcacagtttcttagataaatgctgtgatcttcacaaaagggtgttaagttgttgtagtatttaagacaatggtctttacagctttgtgaagtattcacatctgttgcttaaattgcctggcaaaggcctcctggtctaccaagacatatacattccctccttaacacattctctagtttgactttgtgctaaagtatatttaactgaacatctagtatgagccctttacataatgcctcagaaagtagcaaaaagaaaaaaatatatatatactaaactttactatatacaaaggaatccaagttaaaagaagtcatgctggctatgaggacaggaaaggcttgaaggtggaaaaagggaggtgatccaccttttccatgaattcaggtaatctgttttctttctctgaatttggaaaagtaaaataataactgatttagtaatatattgcacaaaaaaacttcaaaaatatatattcaagaaacagtgattctgtttgggatgtgaagatgaacaattgtgttgaatcaaagctttttactagggatctattataaactggaatcagctgcaacaaaacatattcttttgacgtaaggcaaat

SEQ ID NO: 52254 - DNA, 349 bp, Homo sapiens
gttaagttgttgccaggagctagggagaatggggagtgactgccaagtgagtatgcagcttcttttgggggccagtccttgtcaactgagttgatatgcagtgacaaaaaaagctcttaaggagagtgggattatgtgacgtgagccactgtgctggcctgattccattatttataatagaattattaaaaactctacagctgggatagaaataccctttcttggtttaagatacccaaaacactatagcccagcttttctgaggaaggccactgtttatttctaactgattttatctttggatgtaccatttctccaaactattccacaggggatataagaattatat

SEQ ID NO: 52255 - DNA, 50 bp, Homo sapiens
agaaggggaagagttgtgctcctgaaacccagacactattggaacagggc

SEQ ID NO: 52256 - DNA, 1531 bp, Homo sapiens
gcggccgcaaggaggccaactactacggctcgctgactcaggcgggcaccgtgagcctgggcctggacgccgagggccaggaggtgttcgtacccttcagcgcggtgctgcccatggtggcgcccaacgacctcgtgttcgatggctgggacatctcgtcgctgaacctggccgaggcgatgcggcgcgcgaaggtgctggactgggggctgcaggagcaactgtggccgcacatggaggccctgcggcccccggcccttctgtttacatccccgaattcatcgcggccaaccagagcgcgcgccggagcaacctcatcccaggctcgcgtgcgcagcagctggagcagatccgcagggacatccgagacttccggtctagcgcggggctggacaaagtcatagtgctgtggacggcgaacacggagcgcttctgtgaggtgattccaggcctcaacgacacagccgagaacctgctgcgcaccattgagctcggtctggaggtgtcgccctccacgctcttcgccgtggccagcatcctggagggctgtgccttcctcaatgggtctccgcagaacaccctggtgcccggagctcttgagctcgcgtggcagcaccgggtttttgtgggcggagatgacttcaagtcaggccagaccaaagtcaagtccgtgcttgtggacttcctcattgctccggcctcaagaccatgtccatcgtgagttacaaccacctgggcaacaacgatggggagaacctatcggcgccattgcagttccgctctaaggaggtgtccaagagcaacgtggtggacgacatggtgcagagcaacccagtgctctatacgcccggcgaagagcctgaccactgcgtgtcatcaagtatgtgccgtacgtgggtgacagcaagcgccgcgctggatgagtatacctcggagctgatgctgggcggaaccaacacactggtgctgcacaacacgtgtgaggactcgctgctgggccgcacccatcatgctggacctagcgctgctgaccgagctgtgccagcgcgtgagcttctgcactgacatggaccccgagccgcagaccttccaccccgtgctgtccctgctcagcttcctcttcaaggcgccactagtgccgcccggcagcccggtggtcaatgcgctttttccgccagcgcagctgcatcgagaacatcctcagggcctgcgtggggctcccgccacagaaccacatgctcctggaacacaaaatggagcgcccagggcccagcctcaagcgagttggacccgtggctgccacctaccctatgttgaacaagaaaggaccggtacccgctgccaccaatggctgcaccggtgatgccaatgggcatctgcaagaggagcccccaatgcccaccacctgaggccccggtcacacagtttctcggctcttcctccccgctgccccccacgaccctaccttgaaggcccccacaaataaaggcgctgccactcagccctccttccacctggggttcttggggcc

SEQ ID NO: 52257 - DNA, 1462 bp, Homo sapiens
  misc_feature (1)...(1462): n = a,t,c or g
aaaaaagtttaaagatgtcttcaaagaagactagagtctttaagtcacttatagctatattttactacaaaatttgtgtataaagatatatttaagtgttttagataaatttaagttactccatatgaaatgtttaatttcagctactgtgaattctttcgatcagtcctttgcttttttaaaaaatcttttccatcgtgttaaaaagaaaattagctattaggagatattaaaagattgatgtcttagaaggacagggttaaaaccttctgtaatatatttaaatatatatttttaagagagatgctacattgccaatgattttataaataatttaaaattaatttacaaatttatagatgcaaaccaaaagatctttttaaaagagagagagaggaaaaaaatcaccttttatttgtttgggtctcattgtcagaattattattcagatcaagaaatctgtgtcgataaaacctaatctcatattggagagtgaatgtcgttaagtatttctgaaatgtttctaaaaaatgaacatgaaaaaaataaggtattttctccctagcttctcattacagtatttctaattgcttcacactttacagttttaatacaaagtacaagctctacttttataacgtgtactacaagtttctttaaaagtattgttgtatttcagctgaactcttgtatctgcagtcttttgttatttctgcaggctacacccttaatttgcagaggccattttgttgtttgtttgatgctgaagctgttgttaaaatgccccaaactccaaggcagattgtctgtataatacgctatagcttttcaccatgtggtggtttaccagctgttactctgtattttaaaaagcccagagatttcttctgtctaaactgtttctatagcattttctaaacnnaaaaaatggttgttnntctttgccttgtaataagattgtaaatccattttcctgcttgtgttcttagtgggcatgattgtgagtgtgtgtggggtgctcacaccgcgtgccagtctttttgtactgtaactacctcatggtttgaatgatgattgtactgctggttgtgttaacagagcacattttgttgggtgagtcctatgtgatttttttcatgtttgttttatctgggggttgttcatgaaactgacagatgtttttctaaaaaggactattatcagtttccaaatacaatacttctctcttctggtttttcctgaatgagcctgattttgttgctggttttcatcatctatgagggtaaaacgagtacccttaaaatccctgtggccagtttgaacacccctgttgtattcttttctctgttcagtgtgtcagctattttgtgaagatgcttagatgtatagttttgataaccacagttttaaatcttttatctgtgcataataaaaagatatatatcagttattaaaaaaaaaa

SEQ ID NO: 52258 - DNA, 3903 bp, Homo sapiens
ccgagaggcaaatgagcttgtcagtttctgcctccattagaccctcaacccaaaggagcaggagatttcggtagcgttttaactttatctcagaatctgaaagcggaaggccaggcaagctgcacacatcaagcgaaacgcctgaggggcggccagcgcgagggtttctggccatcgaccctcacctcccgggacttccagggtcttccccccaccccgcgcacacctccctgcctcgccccgagggcgtcacgtggcagcgtggggcccgcctcctggtgatgtcacggcgctcgcagccgtcgcgctgaagaaaggatgctcgaggatgctgtccaggtgggcggccgcgggcgcgatgcggcactgcaggtgtaattagcatggtcaatgcgggagcgatagagtggctctggaaacctgatggatttcctcgatgagccgttccctgatgtggggacgtatgaggacttccacaccatcgactggctaagggaaaagtcacgggacaccgacagacacaggaagatcaccagcaagagcaaggagtccatatgggagttcatcaagagcctgctggatgcctggtcgggatgggtggtgatgctgctcatcggcctgctggcgggcaccttggctggggtcatcgatctcgccgtggactggatgacggacctgaaggagggggtctgcctgtctgccttctggtatagccatgagcagtgttgctggacttctaacgagaccacttttgaggacagagacaagtgtcccctgtggcagaaatggtcggagctgctggtgaatcagtcagagggtgccagtgcttacattctgaattacttaatgtacatcctatgggcgctgctgtttgcatttttggctgtctccctggtgcgtgtatttgcaccatatcgctgtggctctggcataccagagataaagaccattttgagcggctttatcatcaggggctacttggggaagtggaccctgctaatcaagacagtcacgctggtgctggtagtgtcctccggtctgagccttgggaaggaagggccgctagtgcacgtggcttgttgctgtggcaacttcttcagcagccttttctccaagtacagcaagaatgagggcaagaggcgggaggtgctttcagctgcagcggctgctggagtctctgttgcctttggtgcaccaattggaggcgtgcttttcagtctagaagaggtcagttactactttcccctgaagaccttgtggaggtcatttttcgcagccctggtggcggcctttacgctgagatccatcaatccctttgggaatagccgtctcgttctcttttatgtggaataccacacgccctggtacatggctgaactcttccccttcatcctgcttggggtcttcgggggcttgtggggaaccctcttcatccgctgcaacatcgcctggtgcaggaggcgcaagaccaccaggctggggaagtacccggtgctggaggtcattgtggtgactgccatcactgccatcattgcctaccccaatccctacacacgccagagcaccagcgagctcatttctgagctgttcaatgactgtggagcccttgagtcttcccagctctgtgactacatcaatgaccccaacatgactcggcctgtggatgacattccagaccggccggctggtgtcggtgtttacacggccatgtggcagctggccctggcactgatcttcaaaatcgtcgttaccatatttacctttggcatgaagatcccgtcgggcctcttcatccccagcatggctgtgggcgcgatagcgggcaggatggtgggaattggcgtggagcagctggcctaccatcaccatgactggtactacttcaggaactggtgcagacccggtgcagactgtgtcacgccagggctgtacgcaatggtgggagctgcggcctgcctcggtggagttaccaggatgacggtgtcattggtggtcatcatgtttgaattaaccgggggtctggagtacatcgtgcccctgatggcggcggctgtgaccagcaagtgggtagctgatgcatttgggaaagaaggcatctacgaggcccacatccacttaaatgggtaccctttccttgacgtgaaggacgagtttactcaccgcacactggccaccgacgtcatgcggccccggcggggagagccgccactgtcggtgctcacccaggacagcatgactgtcgaggacgtggagacgctcatcaaggagaccgactacaacggcttccccgtggtggtctccagagactccgagcgcctcattggatttgcccagaggagggaactgattctcgcaaataaagaacgccagacagaggcaggagggcattgtgagcaattccatcatgtacttcacggaggaaccccccgagctgccggccaacagcccacatcccctgaagctgcggcgcatcctgaacctcagcccgtttacagtgacagaccacactccgatggaaacggtggtggatatcttccggaaactggggcttcggcagtgcctggtgacgcggagcgggagacttcttggcatcatcacaaaaaaggatgttctgagacatatggcccagatggcaaaccaggaccccgaatccatcatgtttaattagcaacaaggtggcaattattttcagaaaaacactgactgtgtcatttaaaaagaaataaatgatatgttattatcccaatgaaagatcatgcattggggacagcagaaacaaaagcttttttggaaaggcggggaagaaggatgaaacctttaaaaacaaaaacaaaaacatcaatgagtaggcattttatagctttaaccccgtatgagtttcaagctgtgtttcctaatgagtttgctactgctgtgggggcatgtgggtgggtaaatgatgtaaatgatgtgatctgtacaagtatgtggagcatgaatgctgactcaagaaacttttactccttctgctcaaggctgatgtttgtaacttatgaacacacgtgaagtgttgagtccaaaagacaaaggggcatcggcatgtcagcgtccttatttattggttcttgaagttttgctgctatgttactgaatcatactaaagacatttgcgcttactttgttgaaaaagaaaaagaaattaaatttgaacacagtgaaagctgcaagtatgccagtgggtccgctcacgaccgtcctgtttcttgctcctgttcctcagccctgttatctggcttatccatccagtttcctgaaccaacatcaggggcacctgccatgatgagtgtgaagaatccatttctctatgcaagactggcatcctgggactgcacgatgaactattggagcatacagtactgcggtgtgtctcctcccatacaaagggacacatccttattttgagggtatactcacccgatcattgatttgcatccccatggcatttgcttcatttatttattgcttttgcccatgcattcaatattgatcagctcagcacttccatgggccatagccggtatgcccccagcctgccataagcgtgctttcattttcaagtagcatatgcaagagtccaaacaggctacccaatgttactacttatttttcctctcaggtcttatcagatacggctgtggagaggatgaggcatatgcgttgtcagttggaatccctccaaatggattgcaagagaaatactaaattgattctaaatctgttccattatcttctctgtaggatgcaaaacatccagttgtaatgtataagcatgcacttcatactagcaatcacagcacaggaggacagcattaaattttatatagccaatttgggcactggaaaaaaaaaaaaaaaaaaaaaaaa

SEQ ID NO: 52259 - DNA, 574 bp, Homo sapiens
  misc_feature (1)...(574): n = a,t,c or g
gtaagaatttaatgtgtaaataaatacagaaaaacaagcattacagcaaccagttttgctcatgatagcaattttaaagacacttcaacaaatacttttatgtaagaggctaattctgcaaaataatattcactttcctatggaataatttcacagtcccagattttaagccagaaaaatgagactcatgctggtaaagcaacctgcaaatcctgcttgttcttgcaactagtatactttaacattgtaaaaggatctttcaaagggggaaagaaggctcttaacggtacctcccagagtaaatccttgccccaagggctgnccctgctatctgcaagactaaaatggtcatgacaaattcaaagctaaaaaaagaaataacctttatcttcagtgtatttgcctggttcaagtggttatctgcagatttataagtaggtaaatagaacaatattgataagatttctgaaaactaaattgtatttggctctggtattaaggagttgagagaataaaacacctatgttaattatcaaccgcaaatgacaactttttgtgaggtttctattctaag

SEQ ID NO: 52260 - DNA, 507 bp, Homo sapiens
  misc_feature (1)...(507): n = a,t,c or g
gaaaagaaaacccaagagaataagactttagcaacgtaagatcaacatacaaatgcaaccgtactccttgacagcagaggttggcaaacattttctgcaaagagcagatattttcagctttgtgagccatacagtttcttttgtaatttattaacactccagttcttgcaggaatacagccacagacatacataaatgaatgggtgtagctgtgttccaataagactttatttacaaaagcagccagcaggccagatttggcccacaggcagtagtttgggactcttttttttttttttttctttgaaaacagggtcttngctctgttaccctgactggtgggcagtggcatggtcatgggctcgctaacagcctcgacctcctggggctntcagtggatatttcccacctcaggccttcctggantaggctagggantacagggcggcccaccatcatggccccggtaaattttttngtattttttaggtagggttgggggtttta

SEQ ID NO: 52261 - DNA, 177 bp, Homo sapiens
ctccttatgtctcagaattgttttcatttcttttcttaataatttactttgttgtgtgtttctacactttcatccctgttttttatcttgtatatcatcaggaaattgtgatttaatcattaacattggttttttttgtgtgtgtggtaaaaatcaacactaggctcatggtacata

SEQ ID NO: 52262 - DNA, 363 bp, Homo sapiens
cggtgtttagagaacttcctgactacctggatgtgagaagtgaggtaaaaagagccatgaatgatgtccaagtttctagcttaggtagctaggtgaaatgcggagtcaatcactaagggatgaaactggtggttgggggctaggaaagatgattatgtacagatttgaacatggtgattttcatttgtggtagaggacattcaaataaagatgtctaggatgcaactagaaatatgagttaaacctgttagagatctgggctggagataactgatacgggactcagcagatagaaaatgaggccatgggagcagcatatagtatcagtggagcatgtggaataaaactctgaagaacaccaac

SEQ ID NO: 52263 - DNA, 1171 bp, Homo sapiens
  misc_feature (1)...(1171): n = a,t,c or g
tttttttttttttttttttaaaagggagagtgaggctttttattgtgtatgaattcacgtggtatcgacaactccacacaatattaaaacactgcgagaaagtgggtgcggcacacctggaattttaaaaaagtcagaaataaaaacaaccagacatcccaatgcagatggcatagaacctgctagaaccacaggcggcggctggaaacaggagacaggtctttacgaaggttagatgggcagcggttccgtggacagaggaggaggcgcggctggccggcatatggcttctgtgcagagggcctggcctcaggcgttgggactttttaataagtgaccccttgaggaagggcgtggtggctccacctccacccggaagcccccccgggtcactcacgggcggacaggtgtgtgacggccctctcctacctgccccagaacttgggcaggacgggctgttaacttggagatggatgcgtggcctggaggcctagcgttgcgcctcggacacggtggccggcccgtcaaagggaccacgcagaaggagggaaacaggagcaccttccgccctggcccagccgccccgtttatgtccccagaggccagaggtcgcagctgagctatctgtgcttggcctggggttacccctggggagggtgggagaggggtgagggttctggctccttcctggagagaggagggcaggggaggcggagctggtccgggaaggtgcccaggtgggtcacaacagggtcggggcctggcccgctgtggcccttcacctggctactggtgtctcgctcagcagcggggaaggcccgtgggagacccaggctacagaaggagaaacggccttctctctcccacccgacgctgccttgtgtgtgtgcgtgggtgggggtgagtgtccttaactctcttttcccctggcgtagctgagagaggcttgtccccccaaggctagagctgctgctnccaccccngccnnccagctccccgtctggaggtgcacgcgcgctcctggaaacgcccataaaacatgcgttcaccccagggattcccggcagaaaagcacatgtggcggtcggtgtgtnactcgggtgccacgtctgcaaaggtattntccacagtgtggtcactgaagtctnctcaagaaaaaaaaaaaatggcg

SEQ ID NO: 52264 - DNA, 567 bp, Homo sapiens
atttactatgaagacaaaatggttttacatgtgtacacaccaagagcagagccttaaaatgcataaaccaaaaccaataaagctgaaagaagaaatcaacaaatccacaattgtaagttggacttcaacactcttctcagcaattgataaaactactagacataattttaaaagttataataatcaaaaaatggagtgaataatataaaaacaaattaagagtgtgtttgattatgagaaatgtcatttgcagactccttcctttggcagaccttgattgggcaggtttgatgtgcctgagcttaatgcaggatgcacttggatgtggtcaagagctagtctggactttgtgtctgcagctgtggccactttgccctccttcagactctgaggccacttttgctctcagaggcacacagaagagacatcgggcgcatggtaagcactgctcagcagcctcagtggggcaccaagcacattagcaaaagcatctgtcatgaattccaggcctctgaaagtcactgaccaccataaccatcggccagatggatcccacaactggggaac

SEQ ID NO: 52265 - DNA, 424 bp, Homo sapiens
aggtgcaggggacggttggtgccctttattctgaagggggatgtgctgcccagggcagcgggacctggaattacattttgagatttccaggaaagtttcaggtggaggcagaggctgggcgcagaggaaaatgtggcagtggcagagtgtggggtgagagccacgaagagaggaggtcactgaggtggacagtgggacagagagagggacggggagaggaacaggagtttcagaaacgtcctggacacattgggcagctgtcagcattgctttccattcatggacaaagcgtgggtgcccagaagaggccagaagccagtgcagaagcccaggcctccctgccatcacccggtgctggctgagctgcaaatggctgtgcagagcctcctccatgcctcaccctggtctggaccggaccacaggg

SEQ ID NO: 52266 - DNA, 660 bp, Homo sapiens
aaagggctggggacttggatgtctgtcccttgaatatcctccctttggtgcaaaaagtccaatagtggtttaatacacatgcaagttttatgacagaaacagctggggatatacatgtggggaatcttccccttgccctggtggtgccttattggaaatgtacagaagtagacaaatttaggtgacaaagaatactaactgctccatagattctaatattcctcctgtgaagagaggcatggatcattaatagaatgttattaacaacagtagaaagggaggccataggagaaactaggttccaaagagtgaggctgcgtggaacttgctacctattttctaactacatgtcaacaaccactgaccatccagcacaggaacaccatcgccactgtgagcacaatacattcttggagtttcagtctcaagagactcatgacttcacaacggaggttgacagacacttatgactgaggagatgaatgccgttaagaaacactgctaactctaagaattggggaagagacaagccaaggaagaggaggtgtgatgtgggggctgctggtacatcatagaaatggtccgaaatggtctatggcacttcaccaccaaaagacaatttagaaccagatctttattctacttgtaattcactggata

SEQ ID NO: 52267 - DNA, 404 bp, Homo sapiens
ttttaatctaagaatttctttattttatgcataataaaagggactacaaagaacagctgaaaagccagaagacaaaggaacaaaaataaacaatgacgtgtattccaacccaaacaatgagaaatctatgcaactagactatcagttcaatctatttccaggtcgctatcctcactgtgacacgtggcagagttacgcacagatgtcagcaccaagacttccttttctgggagtaatccaaattcctggagaaaagcttcaaggtccacagcaaagaaatcatcccccagctggtcagtaacacgaacaaaattgccgatcaattcaccccccttatagatcagcagggcaggaagggcattcctggtgaactgactgctggcgccaataactgagctcttcac

SEQ ID NO: 52268 - DNA, 442 bp, Homo sapiens
tgtgcatttggggggaattcatctctctttaatataaagttggatgcggaacccaaattacgtgtactacaatttaaagcaaaggagtagaaagacagagctgggatgtttctgtcacatcagctccactttcagtgaaagcatcacttgggattaatatggggatgcagcattatgatgtgggtcaaggaattaagttagggaatggcacagcccaaagaaggaaaaggcagggagcgagggagaagactatattgtacacaccttatatttaccgtatgagacgtttataagcccgaaatgatcttttcaagttaaattttatgccttttatttcttaaacaaatgtatgattacatcaaggcttcaaaaatactcacatgggctatgttttagccagtgatgctaaaggttgtattgcatatatacatatatatatata

SEQ ID NO: 52269 - DNA, 953 bp, Homo sapiens
cacgcgtccgagaaaatctctaaatgcagattccagaaaaattacagcacatctcagtgaatttgcaagtggatcatccttccttgtgggttagcaggcagttataagattgcaaaatgggtctccggattcactttgttgttgacccacatggttggtgctgcatgggtttgattgtctttgtttggttatacaatattgttttaattcccaaaattgtcctctttcctcactatgaagaaggacatattccaggcatattaataataatattctatggcatttccatattctgtctggttgccttagtgagggcctccataactgatccaggaagactccctgagaaccccaagatcccacatggagaaagggagttctgggaattatgtaacaagtgtaatttgatgagaccaaagcgttcccatcactgcagccgctgcggccactgtgtgaggagaatggatcatcactgtccatggattaacaattgtgttggtgaagataatcattggctctttctgcagttgtgtttctacactgaacttcttacttgctacgcactgatgttttctttctgccactattactattttcttccactaaaaaagcgtaatttggacctctttgtttttagacatgaattggccataatgagactagcagcctttatgggcattactatgttagttggaataactggactcttttacactcaactaattggcatcatcacaccttgcagtctcatcctactcaagtgtggctctgtatccaacaacagtcttggagatctcatgaagatttctgaaacttttgctctgaggataccttcctttgtggttatgtgccctgaaaactccagcctccgtgtcttcaattcagtgaaactactactctgcttggattcccctcttatacaatggtctaccaagtgactgcaaacagaaatc

SEQ ID NO: 52270 - DNA, 342 bp, Homo sapiens
  misc_feature (1)...(342): n = a,t,c or g
gcaacagagagagaccctgtctcaaaacaaaaacccccaaattattagattcccttccaacaacttgatagccatattattagtatttnnnnnttaaagaatacataacaaaaagctgctatgatttcagtaatgcttttnagttaatttattagtcacaccagaatctacatccaattgaaatatatacaaatatttgaaagatatttattcaggctgaagattatggtatatagattccttctgataacctcatggcctcacaggttcaaaacccgtgtttgtgaatcactcatacagattggggctaagatgcgtgtccagaaaaccacctattatgct

SEQ ID NO: 52271 - DNA, 540 bp, Homo sapiens
ttttttttttttacagttaatttaatgaaaatcagcaccattgtaaatgatagtaattgtaacaacatagttactgggtgaaggagtaggggagacactcagtaaccatctatttacctagacacttatgcaggggtacatgctaggtggctttattcagattcgggtacattggaatcacatcatgactttgagtctgatggctgtgtagataaagatttaagcaagtgcccttgtgtttgctggaaaatattaaaactcatttgggtgaaagcttcccagatgatgataattaatagcacttctgcctttttcctggagtaacttttagattgagtcacatatgatagtataaaagtccaaaattttctgggtttacctttgttttatttttcatatatatattcactgtctgcctggaaatagccttggtttaccttatttttttgtatatgtaaaactattcatatttgattttattccaatattatatatgatggaaaagccagaattgtctggcagaatttaattctttctttg

SEQ ID NO: 52272 - DNA, 3821 bp, Homo sapiens
ttttttttaactcttaaaaaaaatcattttattgatcctttaccatacaaaatttattcaaattacacccatttgaagtggtaagatcacagctagagaacaggtcaccctgtaacaaatctatttacaaaatccatcataaaagcttttttttgtttttttttacattatattacatattttcttttttaaactagcatacaacacaaagctaaactgattagtagtttgcctactcccaattttgggagaaatacttcctttttacaaaatcacgtaccccgtaggaaaagaaattcccacaccctgacaattgccacccgacttactctgcaagccatcttccttcatatccctccttctcatacacacgagttgtcatgcacacactgaattcttattttctttttcctgaaagcttaagctttaaatactgcaattttatttacagatctacacgtacaacaaaaatgaaaacaagagccacaacaaagaacagaaaaacaaaaacaaaataacactcttaaaaaattacaaagcagctagaaagtattctggcagtgtttacaaattaattgctatttttgtacaaaattgctaaataatgaaaatgtgagtagactacatatcaacttaaataaaacgattgctatgcacaactctgtacatataaacacactcctaacactgtttgacagctcatgtgttgccctttatacattttattttctaaggctcacgcagtcataatttgcacacttgtaacttttagccatttcgtgtgtgagctttaatagcagcaactcaatggtaccaggaaacctgcatacttagtacttaaagtaacggcaaatactgtagtacttaacccactttgtgtgccggatactaagtcaaaaagaaaattacttaatgcaaacaaaatacagtatggacatctaattaatgtacaccagttaagccccagtaactggaaaaaaatcttatgcatgaaggaacttttaagacttattagtattcctttcattttaaaaacaataaatacggcattacattatgaaaaaattcaacaaaacacacaacaatctagccaggtgagctcagtctttagactttggaaaaaatcagctttgtgcagctggcaaagagaattacacaaagctggaagcagaggcagctaaccagatgagataaatatgggaaatggggaaaagcttggcataaatggtttcccatacaggaaaaaaccccacagtgcatttccagtaggcacttaacacaaagctccctctccctcccccaccccaatgcttcatctaggaccacaccgacattttgtaccaagtccagtgtgtgtgaggggaggaggccagggatggaggctgaagaagaaaaaaaggaagatagtctgcacctttgtttttcttcccaaacatacacccacgcatacccacacaaagagtttaaagtgctggtgtcatctgtcttgaccccaccaccactttgcatattgtggaaatctacctggagtaaactggctggggctcttgtggttttttgtgtgttttttttttttcctaagggatattttcaattcaattaaacatatgagttgagtgcctactatgtgcctaccattgggtcaggcacatagcatttcaatttaactgttcgtttcgaggtttgttctttatctgactccctcattcccgcagtccttagcatccaaggaatggaccggagatactacgccatattcccagtgggagatggccgctgccacctgcccgagggaaagccattcttggacataactggtaggatttgcagctgacacaaagcctccaacttgggacaccattcctgaagagtaaagcgggagacaccctggcattgttttgcttcattttttacgtccccgacttcccttggtccaacttattccttcatagaggaaggggaacggggtctggccagaactattccagcccccgacacagggctgctccctgttcctgccagcttaaggaaatgccactcacacaatggggatgtctttctccctagaggtctctccatctgaccccatcctgagaagtggtctccctgagtgcggtgtaagagagccctttcccctgtcacaggggcccgggaagcccaaggatggagggacccatgcctgctgctccttggggctgttacatcatctgacctggttctcctttccaatgggccacccatgtcagcaagccccaggactgactcgctccaagctccccctcctgggaatggaagcacgatgggacaaagctccttgcagaggctgataaaccttagatcacacaggtttagatgctctgatcagtagaggttctctccctctgcttaagtaatatgaatttgcaaaaaccgcttcaaagtaaacaattaaattgaaatggtgatgggtgccacaggaatgcttaaatggcagctaaaaaaattaaaagtctagaacaatccacaaagaaactaagtaggcatttgctacaaatcaactggaaactcacaaacacattggggacgggggaatgggagtggttcatggagacaggaaaatccacaacagcttagagtggcagaactctactagtcttctgtatctgcaacaagtatatttgaaaacaggttcttcatccagaaggctgtggaggttttcttgacctcctactgggacacacagttcatagcttaaactgaattatgacagtaatttaaatattcctaagaagagctgaagaaatccatttcatacttttgcatgacttcaagtttgcatttgctgcagttccattccatattagcagacctcaaagacatgcattctgcggagaaggcacggcttgaaatgctattaaggaagattgctgtttcccagcaggccaggtggccagaccccattctacagcccatccgtcaggcacagcaagccaatccggggaggaaggaggaaggacaattcggggtgagagacacctgattgcacattttctcacttgctgacttagccaggagatcttggagcctggagcaaagcagggctttcccaagggagcctgcaactgtgcgtttagacaatttgtttattaattttttaaaaaattcattaaaatgtcagctttcttctgaagtttgtagtttacttcatgatactctcttggaggaagaaggtaggaagggacaacactgcatgacagatgttctggttccatgataaaaaaatatcggtttttaaggagagttcacacgaagcataatcaactacacatgaagtcttccaccagtgggagcttttccaaatcgtaagcatcgaagagatcgctgatgccttcctcctccccgaggctcaggagatagtcctcttgcagcaggggaggcagtaagttcacaaacggtccttctaggttggaaggaatttggtcctcagtctgctgtaagaggttggctggggaggccagaggagaaaggtttcccatagaaactgagcaatcgctatgtcctgagttggttgaagccaagtctttggaagcgggtttagggatattcccattgtggtcttggttgtttgttttcattggactgtgtgtttcagtctcttctggacataagtaaacctcaatgggcccttgggtacttgccaaatgtatttgtaggctctctattgagtcaggcacttcaagtcttgtttctggaggggctttcacaactataacagtttggtctttaaggccactaatttttcgaatatcttgatatgtaacataagctaacctttgattctc

SEQ ID NO: 52273 - DNA, 207 bp, Homo sapiens
taatacagataataggatcttttcctcattacagaaagttctgttagatagaactgctttagattgcttccaaattatccctattataaacaaccccaagattattgtaaataaactttaatatatagctctgaaaatttatttgggaataaattgctggaaatgagttgctggctcaaaaagcatacaaatatatacactctggag

SEQ ID NO: 52274 - DNA, 369 bp, Homo sapiens
ctgttggagcttaaagaaaataaatctctaatgtcctctgtattaattcacctgcttggaaagttagagattaaaaggtttagtaggatttttatattttctataatttctatttgtattggagtaaactgttcgttgtatggagtggcttagctttcataaaacagaaagattcctatattgagaaaagaggaagaaggaaaaagtgtaatataaatacataaaacttcctctagctttcttgtgttatgtgtaaaggagttaagtaccgttactttaattgtgtactttgaagaaagcaatctcctatttccattaatggtggactctgtgggtagagacatggatatttttccttttataagaaag

SEQ ID NO: 52275 - DNA, 486 bp, Homo sapiens
tcctacttagtcgtgtgtacatcattgggaatggagggaaataaatgactggatggtcgctgctttttaagtttcaaattgacattccagacaagcggtgcctgagcctgtgcctgtcttcagatcttcacagcacagttcctgggaaggtggagccaccagcctctccttgaataactgggagatgaaacaggaagctctatgacacacttgatcgaatatgacagacaccgaaaatcacgactcagccccctccagcacctctacctgttgcccgccgatcacagccggaatgcagctgaaagattccctggggcctggttccaactgcccactgtggactctgaggcctctgcatttgcgggtggtctgcctgtgatattttggtcatgggctggtctggtcggtttcccatttgtctggccagtctctgtgtgtcttaatcccttgtccttcattaaaagcaaaactaaagaaaaaaaaaaa

SEQ ID NO: 52276 - DNA, 1087 bp, Homo sapiens
caaacaatcagcagtacttatattttagtcctgtgctcctgaaactacccttgaatatctctaacccctgatccactggggaggctgatttgagaggccagaagaacttgcctggcaattatgagagtggatggaggaactgcctatccctgtcccatggtcttgtccacaggtcagcctcacaaagggaaagagccctggatgggaatacagtggaaggtcattctcttagtgacctggggacattggctcgagaggaagcctgggcaggagtggcaactccagggtgatttctgcacctttcctatttcctgggaggtggggccaggccacagtgttagcgggaagggaacagaacagccagcctagttagagggagtgtctggggaaggcctaggggtgggggaagaagctgtgcaggacagggcttgcccagtcagaatgaagtgggaggaagatgagggacacagagaagcagaggcagagacaccatggcagtgagcagtgagggagacactgacttcagagaccccagggaccagctgcccccagttccacagtccaggacaaaggagccctgagaatcctctggtggccaaagagcttcagagttgcatgaggtggggtggctttaggggcaagaggtagtggggggatgaaacatggatgtcagcctctgaaggacaagggacaggtgtggctagaacctcctaggattctgcatccaagatccaatctctaaagaggttttggatcattcatttcttcattccattccttcatttgtcatgtgagagctcctgagtgtgtgtctctctcgctgggcctgtgctggtgtagggtgtgagtggggaaagaaaaggtcctctccttgatcctctcatgacagtgacatggacactttgggaaacacaggatttcaggttcagtgatgggggctaagatctgagggggaggcctggacatgttttttccactgactctgatggttgaggcaggtgatttagttctggagtacagactaatcagttgaccattttctctcactcctctgaggtttggatgcctaagaagagaggttttgagc

SEQ ID NO: 52277 - DNA, 230 bp, Homo sapiens
gactggaagaacaaatgtaaataaaggtgctcaaaggagaaaaaagtttcaataagtgatttttaaaaacaggtataaatgactttttgctgatgaaaggagaaatgttcctgaataccatgcctgaaagcatcattccttgataatcatattatcatatgttcctgaataccatgcctgaaagcatcattccttgataatcatattatcataacttcctatggacgtaa

SEQ ID NO: 52278 - DNA, 441 bp, Homo sapiens
ttggcccccatgcttctatcacatcttcccacagtctttctcaactcagcagccagagaatgcttttaaatcgggagacagatcacgtcgcctctctgctcagaaccctcccgcagttcccatctgagtcagagtaaaagccaaagccccaccaataacctcccagggcttacacaatctgtacagatcccagcccagcaactccctggcctcctcattgactttgctccctctatctctttgctccactggccttcttccagagccttatacacaccagagagtttcctcctttatccaacaggattaagatcctgttgactcagcctacaatgctcttccctcagcaccttggccagctcccatcacctgcttcaaacttttgctcaatattcacttatgaggccaaccctgaccactctacttaacactgccatctgt

SEQ ID NO: 52279 - DNA, 306 bp, Homo sapiens
gtgctctgtgatgcacacaccaagtggtaggtcaaaggtcagtatatcccggtggtgtattgtcttgctagaccctgctattttcctgaccccctaaatcctctttagggacccagtcactataccctgtctatgccctgtgggcttcccagacccctgagctttgagtcagtggcatcacagtttgtagcctcagggggtctggctgggggctggtccatgcttgtggttagtggacagcagccaccctttgacagctacctctgggcatctcaagggcttgcagccccactgctccttctaaca

SEQ ID NO: 52280 - DNA, 969 bp, Homo sapiens
tttttttttttttgcacttccgtgtttaataagccacatcctcagttgagcctggggtgaaatgtgagatcctgactctgtgcagtaatattagtgggtgggccaggggctgtgaataacatcatcctcagtacagctgcaattccagggcccctctaccacaaagatggcttaagcaaaggcagccagatggaagtatgatatccaacaggaaggaagtaggcaggggtcactaaagtggctggtggcccagcagatggaaacagaagtatggccccgagggaaggaggcaggtccagggctacagtgctttcaggtactggtgtttctataggggcatttgccacccacatctttggaaactcccctggcctattgtgacatggcagggctgcctggttcttgaaggtagagaagatgctagtggggaggagctgagcctgtgacgtgcatttgtaccaggtccagatgggaaatgatgaggctgcaggctatgatggggccactgtgcactaaatgcttggtaccatcctatgaggggacaaggtgcagacccacattcccataggcacttaagcagtggtggataggaggctaccccaggggttcagctgtccttcaggtaatcagcttacccccaagaaggactgagaggaatatgagtaggacagttggcagatgacaatttcctttgcctggctcacgggagaagtctggttgggccaggtatgtgggtgtttggtgcctccatctggatagtgccagcaggtacaccaccctgccttatacctgaatggccagctaaataaccatagagcttaaggtctggctcaggtcaggattccctggctccttgccaacaaagcaaaaccagagattcagaaaactcagggcctaggagaaaacagacctgccttacaaaccccagagctggtcaacctcaggcttcctctcaggaaaaaaattttt

SEQ ID NO: 52281 - DNA, 469 bp, Homo sapiens
ctttttttttttttttttaagtagagacaggtttctattaaaaaaatagagtccaggtgcctctgtcacctggactggggtgcagtggtactatcgtagctcactaggaatgatatggacaggcggcagggaaatactgggtagaagagggtggttccctgcaaaggccccaccttcaacactggaaaccgtgggcattaccttaggaatagtcaaactccaggggaagattatcttcctattccttcccctttccagctccccatcccgctgagagccacctccatcacccaataaaacctacacattcaccatccttcaagtccatgtgacctgattcttcctggacaccagacaggaacccaggtaccaagacgggagggtgaaaaaggctgtcaccctgactctccattgagctgggttaacacttagccatccgtggattacaactgctaaaagagcattattt

SEQ ID NO: 52282 - DNA, 368 bp, Homo sapiens
acataatgtatatgcaaaactgctttaaatacatgattttggaagaattatttacaaaatctatcagtctgtggaacaattcacagacaaagcatacatagttgctttacttagttgttgcatctcaactttgggagatataaattcattcggcagtatagcaaacataaaaactgtgacaaagtatcttaagggcaaccaaaaatttgatcctcaaaacagtttaaatactaggactgccaaagtttctaaacaaggacatactttaatgatccagatgcccatttatagttctatactgtttgatggactgagacagactccctttaacacaggcaaggctgcaggatgcaacctcctgtaaaaag

SEQ ID NO: 52283 - DNA, 378 bp, Homo sapiens
cggccgcctaagtcccacagagacgggagtcgggtgggatcccaggctgggccccgcggcggctggattctcttccctggccaagtctctgagaccttctcccagggcgatgcaaagctactcgctaccagcttggacctgtctgcagtatctcctctgggacctgccatgctgaggacccattctcacctctgagggactcctgtcctaggactaaggtggagcctgggccatggtacagctggctcctgcggcagccatggacgaggtcacctttaggagcgacactgtgctgtcagatgtccacctctataccccgaaccatagacatctcatggtacggctgaacagcgtggggcagccagttttcctgtccca

SEQ ID NO: 52284 - DNA, 4370 bp, Homo sapiens
ctcggaaggaatttgcatcttcttcaaccagaggacggagtcaaacacgagagagtgaaattcgagttcgactgcagagtgcgtccccatccacccgatggacagaattggatgatgttaagcgtttgctcaaggggagtcgatcggcaagtgtgagccccacccggaattcctccaacacactccccatccccaagaaaggcactgtggagaccaaaattgtgacagcgagctcccagtcggtgtcaggcacctacgatgcaatgatcctggatgccaaccttccctcccatgtgtggtcctccaccctgcccgcggggtcctccatggggacctatcacaacaacatgacaacccagagctcatccctcctcaacaccaatgcctactctgcgggatcagtcttcggagttccaaacaacatggcgtcctgctcacccactttgcaccctggactcagcacatcctcctcagtgtttggcatgcagaacaatctggcccccagcttgaccaccctgtcccatggcaccaccaccacttccacagcatatggggtgaagaaaaacatgccccagagtcctgcggctgtgaacactggcgtttccacctccgccgcctgcaccacaagtgtgcagagcgatgaccttttgcacaaggactgcaagttcctgatcctagagaaagacaacacacctgctaagaaggagatggagctgctcatcatgaccaaggacagcgggaaggtctttacagcctcccctgccagcatcgctgcaacttctttttcagaagacaccctaaaaaaagaaaagcaagctgcctacaatgctgactcaggcctaaaagccgaagctaatggagacctgaagactgtgtccacaaagggcaagaccaccactgcagatatccacagctacagcagcagtggtggtggtggcagtggaggaggtggcggtgttggtggcgctggcggcggcccttggggaccagcgccagcctggtgcccctgcggctcctgctgcagctggtggaagtggctgctgggcctgctgctcacctggctgctactcctggggctgctcttcggcctcattgctctggcggaggaggtgaggaagctgaaggcgcgtgtggatgagctggagaggatcaggaggagcatactgccctatggggacagcatggatagaatagaaaaggaccgcctccagggcatggcacccgcggcgggagcagacctggacaaaattgggctgcacagtgacagccaggaggagctctggatgttcgtgaggaagaagctaatgatggaacaggaaaatggaaatctccgaggaagccctggccctaaaggtgacatgggaagtccaggccctaaaggagatcgagggttccctgggactccaggtatccctgggcccttgggccacccaggtccacaaggaccaaagggtcaaaaaggcagcgtgggagatcctggcatggaaggccccatgggccagagagggcgagaaggccccatgggacctcgtggtgaggcagggcctcctggatctggagagaaaggggaaagaggggctgctggtgaaccaggtcctcatggcccacctggtgtcccaggttctgtgggtcccaaaggttccagcggctctcctggcccacagggccctccaggtcctgtaggtctccaagggctccgaggtgaagtaggacttcctggtgtcaaaggtgacaaaggaccaatgggaccaccaggacccaaaggtgaccagggtgagaaaggacctcgaggcctcacaggcgagcctggcatgagaggtttgcctggtgctgttggtgagcccggggctaaaggagcaatgggtcctgctggcccagacggacaccaaggcccaagaggtgaacaaggtcttactgggatgcctggaatccgtggcccaccaggaccttctggagacccaggaaagccaggtctcacaggaccccagggacctcagggacttcccggtacccctggccgaccaggaataaaaggtgaaccaggagctccaggcaagatcgtgacttcggaggggtcatcgatgctcactgtcccaggccccccaggacctcctggagccatgggacccccaggacctccaggtgccccaggccctgccggcccagctggtctcccaggacatcaagaagttcttaatttacaaggtcccccaggcccacccggcccacgtgggccaccagggccttccattccaggcccaccaggaccccgaggcccaccaggggagggtttgccaggcccaccaggcccaccaggatcgttcctgtccaactcagaaaccttcctcttcggccccccaggcccacctggccccccaggtcccaagggagaccaaggtcccccaggccccagaggacaccaaggcgagcaaggcctcccaggtttctcaacctcagggtccagttctttcggactcaaccttcagggaccaccaggcccacctggcccccagggaccaaaaggtgacaaaggtgatccgggtgttccaggggctcttggcattcctagtggtccttctgaagggggatcatcaagtaccatgtacgtgtcaggcccgccagggccccctgggccccctgggcctccgggctctatcagcagctctggccaggagattcagcagtacatctctgagtacatgcagagtgacagtattagatcttacctatccggagttcagggtcccccaggcccacctggtcccccaggacctgtcaccaccatcacaggcgagactttcgactactcagagctggcaagccacgttgtgagctacttacggacttcggggtacggtgtcagcttgttctcgtcctccatctcttctgaagacatcctggctgtgctgcagcgggatgacgtgcgtcagtacctacgtcagtacttgatgggccctcggggtccgccagggccaccaggagccagtggagatgggtccctcctgtctttggactatgcagagctgagtagtcgcattctcagctacatgtcgagttctgggatcagcattgggcttcctggtcccccggggccccctggcttgccgggaacctcctatgaggagctcctctccttgctgcgagggtctgaattcagaggcatcgttggacccccaggtcccccgggtccaccagggatcccaggcaatgtgtggtccagcatcagcgtggaggacctctcgtcttacttacatactgccggcttgtcattcatcccaggccctccaggacctcctggtcccccagggcctcgagggcccccgggtgtctcaggagccctggcaacctatgcagctgaaaacagcgacagcttccggagcgagctgatcagctacctcacaagtcctgatgtgcgcagcttcattgttggccccccaggccctcctgggccgcagggaccccctggggacagccgcctcctgtccacggatgcctcccacagtcggggtagcagctcctcctcacacagctcatctgtcaggcggggcagctcctacagctcttccatgagcacaggaggaggtggtgcaggctccctgggtgcaggcggtgcctttggtgaagctgcaggagacaggggtccctatggcactgacatcggcccaggcggaggctatggggcagcagcagaaggcggcatgtatgctggcaatggcggactattgggagctgactttgctggagatctggattacaatgagctggctgtgagggtgtcagagagcatgcagcgtcagggcctactgcaagggatggcctacactgtccagggcccaccaggccagcctgggccacaggggccacccggcatcagcaaggtcttctctgcctacagcaacgtgactgcggacctcatggacttcttccaaacttatggagccattcaaggaccccctgggcaaaaaggagagatgggcactccaggacccaaaggtgacaggggccctgctgggccaccaggtcatcctgggccacctggccctcgaggacacaagggagaaaaaggagacaaaggtgaccaagtctatgctgggcggagaaggagaagaagtattgctgtcaagccgtgagctagccatggcaggacagctcctggaccaggtctcataatgcatgtggcacttaggtccaaggtctccagagggtgaaagctggagtctgtcaatgtcctactgagacagcacagccaacctagctagcaacatttgttttagtctgaacaatatatacttatagaattcagtcaaagatacacaatctgaaacagcttcatggggtggactctaacagtagttgcaatgttttagaat

SEQ ID NO: 52285 - DNA, 1075 bp, Homo sapiens
gccaagcactgttttccatgctggtgacatagcagtgactatagcagaccaaggtcccatcatgggactggattcagactccagctctaactgcagagcccaagcctttcatccaactgcctcagtattcttggctggatcaacatccccagcaactccctgtgtgaatgccccacttgcagaagaggctactttccgagaaaccgctggcccccatgatctgcccgatcacgtgcacctcagccatggcccttagcgcacttaacggttaggagaggagaaagcggcaaccggggttgtagttcatgggcttgactgcttcttttctccgcgggcgccgaccaggcctggctcgcgcctctcccaggacccgcctggctgcgagatatgaaacccctcctggagtttccccaaagccatggacagccctagtcttcgtgagcttcaacagcctctgctggagggcacagaatgtgagacccctgcccagaagcctgggcaggcatgagctggggtcccccttaagagagatagcctttgccgagtccctgaggggtttgcagttcctgtcaccgcctcttccctccgtgagcgctggcctgggggaaccaaggccccctgatgttgaggacatgtcatccagtgacagtgactcggactgggatggaggcagccgtctttcaccatttctaccccacgaccacctcggcttggctgtcttctccatgctgtgttgtttctggcccgttggcatcgctgccttctgtctagcccagaagcatccccagtgcctgacctatagtaggtgctacgtatctgcttttggaatacatgcatgaatgaatgaatggacccgccctagttgcccctacagccctcactgtgaaccctgaggccggcagcccagcaaatctgtgggcagagagtggagaatcttggtggatgaggctgcggcggcggcaggagcatctagaaacgggagcgagctggactggaacccttccccttcctggccaccgctcttcgggcggcagcaacctgagattaaacaccagacacccttgcagccaaaaaa

SEQ ID NO: 52286 - DNA, 290 bp, Homo sapiens
gacactcactcaaaaccagcagtgctgctatcagataagtagatgtcaatgtatacttacaaggaaaaactaaaaaatgtaatgtgttaattcagcctttttctatgtaatatttccaagtcagactttcttacattcctggaatttactttgatataccaagaataataatgataaaatgtttgctttgattactgtggggggaaagatgaaatgttcaattatattaaaacaaacaagcttttcagagatactggtttcctgcccttgaagggtataaagaatttaga

SEQ ID NO: 52287 - DNA, 325 bp, Homo sapiens
gccactgcgcctggccatgtcatcacttctttactgtgtttatcctaatttggacatcctctggtagatagatgccctcttgcagaaggtcaagaactctgctgatcctgaaatgtcagctttttccgccaacgagcacctgagtcttctttctccacccccttctgcatgccaaccaaccccatgttctgtctgcaaaagtagggcctagcatgccttcctctacccatctgcaacgggaagtagtgaaggaccgttgctttctaagcaggaggaacccccacttgtttttggttggttggtttttgggttttgggtttttttt

SEQ ID NO: 52288 - DNA, 2788 bp, Homo sapiens
acaagctctcgcgagacgagccgtgcaggctgaaaaaatggcgccacccagtacccgggagcccagggtcctgtcggcgaccagcgcaaccaaatccgacggagagatggtgctgccaggcttcccggacgccgacagctttgtgaagtttgctcttgggtccgtggtggcagtcaccaaggcatctgggggcctaccacagtttggcgatgagtatgatttttaccgaagttttcctggcttccaagcattttgcgaaacacagggagacaggttgcttcagtgcatgagcagagtaatgcagtaccatgggtgtcgcagcaacattaaggatcgaagtaaagtgactgagctggaagacaagtttgatttactagttgatgccaatgatgtaattctggagagagtgggtattttactggatgaagcctcaggtgtaaacaagaatcaacagcctgtcctccctgccggcttgcaggtccccaaaacggtagtgttccagctggaaccgtaaggcagcagaatatggcaaaaaagcaaaatctgaaactttccggctgcttcatgcaaaaaatatcatccgacctcagctcaagtttcgagagaagattgacaattccaacacaccatttcttcctaaaatcttcatcaaacccaatgctcagaaacctctccctcaagctctctctaaggaaaggcgggaacgcccacaggatcgtcctgaggacttggacgtcccccctgcactggctgatttcatccatcagcagagaacccagcaggttgagcaagacatgtttgcacatccttatcaatatgaactaaatcactttaccccagcagatgcagtgcttcaaaagccacaaccccagttatacagacctatagaagagacaccatgccatttcatatcctccctggatgaactcgtggaactcaacgaaaagctcttgaattgtcaggaatttgcagttgacttggagcaccactcttacaggagcttcctgggactgacctgcctgatgcaaatttctactcggacggaagacttcatcattgacaccctcgagcttcgaagtgacatgtacattctcaatgagagcctcacagacccagccatcgttaaggtctttcatggtgctgattcagacatagaatggctacagaaagactttgggttgtatgtagtaaacatgtttgatactcatcaggcagcacgccttcttaacctgggcaggcactcactcgatcatctcctgaaactctactgcaacgtggactcaaacaagcaatatcagctggctgattggagaatacgccctctgcccgaggagatgcctcagctacgcccgggatgacacccattacctgctatatatctatgacaaaatgaggctggagatgtgggagcgcggcaacgggcagccggtgcagctgcaggtggtgtggcaacggagcagggacatctgcctcaagaaattcatcaaacctatcttcacggatgagtcctaccttgaactctataggaagcagaagaagcaccttaacacacagcagttgacagcctttcagctgctgtttgcctggagggataaaacagctcgcagggaagatgaaagttacggatatgtactgccaaaccacatgatgctgaaaatagctgaagaactgcctaaggaacctcagggcatcatagcttgctgcaacccagtaccgccccttgtgcggcagcagatcaacgaaatgcaccttttaatccagcaggcccgagagatgcccctgctcaagtctgaagttgcagccggagtgaagaagagcggaccgctgcccagtgctgagagattggagaatgttctctttggacctcacgactgctcccatgcccctccggatggctatccaatcatcccaaccagtggatctgtgccagttcagaagcaggcgagcctcttccctgatgaaaaagaagataacttgctgggtaccacatgcctgattgccacagctgtcatcacgttatttaatgaacctagtgctgaagacagtaaaaagggtccattgacagttgcacagaaaaaagcccagaacatcatggagtcctttgaaaatccatttaggatgtttctgccctcactgggacaccgtgctcccgtctctcaggcagcgaagttcgatccatcaaccaaaatctatgaaatcagcaaccgttggaagctggcccaggtacaagtacaaaaagactctaaagaagctgtcaagaagaaggcagctgagcaaacagctgcccgggaacaggcaaaggaggcgtgcaaagctgcagcagaacaggccatctccgtccgacagcaggtcgtgctagaaaatgctgcaaagaagagagagcgagcaacaagcgacccaaggaccacagaacagaaacaagagaagaaacgactcaaaatttccaagaagccaaaggacccagagccaccagaaaaagagtttacgccttacgactacagccagtcagacttcaaggcttttgctggaaacagcaaatccaaagtttcttctcagtttgatccaaataaacagaccccgtctgggcaagaaatgcattgcagccaaaaaaattaaacagtcggtgggaaacaaaagcatgtcctttccaactggaaagtcagacagaggcttcaggtacaactggccacagagatagtcctggaagacacgtggcgcctgtggaccggaagcaccaaatgctggtgctgcttttgtacatacatatttttaaaccattaaaattctt

SEQ ID NO: 52289 - DNA, 1554 bp, Homo sapiens
ggccgcagcggactgccctttcccaagatggcgtcgaagataggttcgagacggtggatgttgcagctgatcatgcagttgggttcggtgctgctcacacgctgccccttttggggctgcttcagccagctcatgctgtacgctgagagggctgaggcacgccggaagcccgacatcccagtgccttacctgtatttcgacatgggggcagccgtgctgtgcgctagtttcatgtcctttggcgtgaagcggcgctggttcgcgctgggggccgcactccaattggccattagcacctacgccgcctacatcgggggctacgtccactgacggggactggcttgaaggtccgtatgtaattcgcgcacagttgccatcatcggcggctttctttgttgtttggccagcggtgctgggggaagctgtaccgccggaaacctcgcagccgctccctgcagtccaccggccaggtgtctcctgggtatctacctcatctgtgtggcctactcactgcagcacagcaaggaggaccggctggcgtatctgaaccatctccccaggaggggagctgatgatccagctgttcttcgtgctgtatggcatcctggccctggcctttctgtcaggctactacgtgaccctcgctgcccagatcctggctgtactgctgccccctgtcatgctgctcattgatggcaatgttgcttactggcacaacacgcggcgtgttgagttctggaaccagatgaagctccttggagagagtgtgggcatcttcggaactgctgtcatcctggccactgatggctgagttttatggcaagaggctgagatgggcacagggagccactgagggtcaccctgccttcctccttgctggcccagctgctgtttatttatgctttttggtctgtttgtttgatcttttgcttttttaaaattgttttttgcagttaagaggcagctcatttgtccaaatttctgggctcagcgcttgggagggcaggagccctggcactaatgctgtacaggtttttttcctgttaggagagctgaggccagctgcccactgagtctcctgtccctgagaagggagtatggcagggctgggatgcggctactgagagtgggagagtgggagacagaggaaggaagatggagattggaagtgagcaaatgtgaaaaattcctctttgaacctggcaagatgcgagcttaggctctgcagtgctgtttggagactgtgagagggagtgtgtgtgttgacaacatgtggatcaggcccaggaagggcacaggggctgagcactacagaagtcacatgggttctcagggtatgccaggggcagaaacagtaccggctctctgtcactcaccttgagagtagagcagaccctgttctgctctgggctgtgaaggggtggagcaggcagtggccagctttgcccttcctgctgtctctgtttctagctccatggttggcctggtgggggtggagttccctcccaaacaccagaccacacagtcctccaaaaataaacattttatatagac

SEQ ID NO: 52290 - DNA, 399 bp, Homo sapiens
ttttttttaattccaaaacagtttattaacaaaaaagtacaaagaagtacaaatggacatcctatttcccattgtggtccatctgtctatctacctttcagtccatgagatggttttttagagctttaagaatgggtaaaatacttctcctgtttctaatgggccctaataaccatcctaaaccaaataattgtgtatttaagttacacagtccaattttttaaaaatgttcaaatctattgttataaaagcctctccccttgcaatacaccaacggtacccaaactgaacattggcgtcaacatccataaatcatatatatatcactagtatgtttgctttgaaatagacagtttataagtgaaaacttagatgtaccaaaaatgattttcataggga

SEQ ID NO: 52291 - DNA, 795 bp, Homo sapiens
gccgcgcaagtgcacttgcgtgtcaccgttaccgtagcgactgggcttctggactgtatatcctagctgccttgtcaacatcttcgagcatcggcagctccggaggccggggtaactggcagcaggtaggaaactatgtgaaagaatctcctgatgtcataatttccgggtgtcaccggaacatttgatcatcattcctttggcaattccagccttctgtggaaaggccagtagaaagcattgatttattcacctctacaggaatcagactcagcctcttttggttttcagtgaagtatgccttttcaatttggaacccagccaaggaggtttccagtggaaggaggagattcttcaattgagctggaacctgggctgagctccagtgctgcctgtaatgggaaggagatgtcaccaaccaggcaactccggaggtgccctggaagtcattgcctgacaataactgatgttcccgtcactgtttatgcaacaacgagaaagccacctgcacaaagcagcaaggaaatgcatcctaaatagcaccattaagtcttttgtcaaggtctgactaggtcaagggtaatggaccagtatcatctggtgatctggtaaacaaataaaagtggtggcacctttagatgatgacaacagttgagctctttacttttagtaagaccgacagaaatgtagtcagtaaagcacatgtagtgataggctatcagttatgtctgatacataagacagaataatatttcacaattagaaagtaccttagagatcatcttgctcacagta

SEQ ID NO: 52292 - DNA, 76 bp, Homo sapiens
taatcactgcaagtccagcttgaagagggtgatttcaggatctacatgagaataacgcgcaatttttttttttttt

SEQ ID NO: 52293 - DNA, 2422 bp, Homo sapiens
taccacatacacccccagcttctgggcccatgccccatcacttccccaggaatgaaagactataaagagccaaaggttacaaagcccagaactggcactgtttatacagaaagggagatccatcagtagcatgactctttaatcattgttatttacaatttatcatctgacagacttacagagaataaataaagaaaagaaaatatacaattggtatcacgtttctttttctaatacagagaaattttacatattctatttggaacgtctatgatagttttaagcagaaattaaatccatttgccctttaccccttgacaagacacatcatcttccaaagcctgcagaagggggcccagatgtttcctcatcacaggaagagtgcaccacatcgctgcagaaactcagtcctcagaaaaagttaccaggcaacaaggtagaagaataggatatcatgaataataaaggacatataatggataggctagattacagactcttggtgtgtttgcagggaagccagctttcaattgtgtccaagcctgttttcaagaaaacagtttttcactgaaagtgattaccttatcccattgtgcttcccttgagtctctgcaaattcttcccttgacatgttcattgtgattgtggatgagcacaggctagcttgggactcagattattttcctgcaaggcacctgacactgttgcatgttgttgacaaggtgtctgcaggagaaactagatagcttgtttcaaataggctgggtatgaggccagagtctggtctctccttttgattcggtgtcctgtggagaactacctttcattgctgtctaaatgcctcaaaaaattaagcagttctatagatcaatttctccatcaaaaagtatacaaacagagaatgcacttcaccaggaacaagtctgagtaatttttttctctttcctcacttgaaaataaactctccatgttacaagcaaaacaattctccctacattcactctagttaactggatgagaagtttttgtttctatcttatgttcattcaaaaaaacaacattcagcaaatatttatcaagtgctcacaatgacctagaaacttagtaagacacacattgttataatcttgaccccttaaataggggacttaaaaatgtcaatcataaaactcaaaactgtaatccacaaaactggagtttcaacttctccccaggttgccgctgtgtttgcaattaatttggtctaatgtggttgttattccatttaataacggctatttaggcaaataaaacctctctaccactctgaaaatagtattttatcaaacattaggagtctataccattgtattctattctctccacaagctatttccagtgccattaactaagtgccaactaactcttgactgaaatactggtttactctaaactccttattttgtccccagtgctaatcctactcacgtagaagcagcaggaagcatctagaatatcctgctacctggttttctaggcaacaagctatgaacaggtcttactgtgttttgtgttgcctaatctttctaagtttgtcttggattgtttcagatgccaaacagccaaacaaatcagaaaatttagaagcagtgtaggcagggtattgctcatgacaaaggaacacattaatgtgttaatagtctctctaaaactgtagaactttatccagatagtatctttcctgttgtatccaagcaaggccagtttacaaatcagcaagaattaaaagtatccagcaactaaatgaatatgtgtggaaaaactggcgaaattgaaaaaaggtctgtagtttagttaatagcattatgccaatgttaattttctggttccgaaaatggactaagtgaaatgttataaatggggaaaactggatctagggtaaggccactctactatttttgtaacatcttgtgagccttaagttctttcaaaataacaagttttttgtttttttttaaaggatacagcaactcaacaattccccactgctctttggcaccaagtaatgcagctaattgtagcagaaaactcagaatgccagaaatcaaatcaccattaaccactccagtctctttccttctcaattcagctcttgaaaacatttactaagtgaaaaacacattaatctgtttttataaaaatgttacatttctatttagaaggatttcccagcaaaaataaggatctgcatcttcctggagatgcagaaacattagagacctaccatatgcactgccagaggacagaagtcttactaaaaaggaaagactaggatggcaaattccaggtctataaattcgacttatgatcaaagacttagtagccatgtattgcaattttctttttttcttttatttttgtagttttgggcaaaacattcact

SEQ ID NO: 52294 - DNA, 369 bp, Homo sapiens
ggaataataaaaatactgacttcagagaggtttgtgaggatcaattagacagtcatgttaagtctgtaaattgtttctgtaatgggcaagatagcaaatattttagattttgtggaccatgcagtctttatcataactgcttaactgccattatagtgagaaagcagccacagacaatatgtaaatgaaaaagtgtgtctctgttccaataaaactttattttcaaaaaccagctggcttgtcacatctggcctatgggccatagtttgcccatccctaatgtaaagaaaggactttagcccaaagccacaacttgcatagtaatgcctcaaaaaatgttaacatctttactgttattattattactac

SEQ ID NO: 52295 - DNA, 425 bp, Homo sapiens
cagactagctgaggtgtcaagacctgcctttcctttcatcatcccaaatttcccctgccatgtgtgctgatcctgctggcaggaccacatttctttgccactgatctcaatggccagtgatgtaagtcttttgcctgtcttcttgagactcgttgagatctttgttgagaaccactactatcattcactagctcatatctgccggcagcaattgaagagatccaatatttgaagattggccttcatttctcgatgtttctttccatgatggggatggaggtgttcagtgccaccgtggctgttacttttcaaagtagttgaagtattgaaaatgagtaatgttggtaaagtgaattcaaaatcctagtatgctaaagggatggtacaagtctaacacaaattgtaccgtaatgatacatctacta

SEQ ID NO: 52296 - DNA, 1030 bp, Homo sapiens
gaccgtacaagcagactccagccaccaggtttattttcatgctataaataaagttccctattagttcccattttcttatgttctacatgagatacagagacccagatattggcgtggtgaataatcaactgttttgtatacctaaataccaatgagataataagcgagacttgtaaagcactgaaactaaggctaacagcagcacaatccactatcaaaggatttaaatgccagaactgtgaaacattctctgtaggtgccgggacagtctggtggctgacaattaacgtccactccagcaccgagggctggacacttgtggtttctgttcacctttcctggcttggagcccagatctgtctcatgagcagagtaactactgaggaggcttctcggatggaaagttggttttaagccagaaatctggagagatgtcatgccaggcagcagcacccacgggcccaggccctttgtggggcagtgtcactgtctggtgtgccaccagtacccatgctgcaaggagtgggcttggctgctgtggttggcttgtccttcagtggttttcagattgtgtgcagttatcatgaggagtttgttgctgggagtgtacaggaaaagggaggaaaaggcatcgcagttgtccagtcattggaggatgaagtacgtcactcagggtgaatgatggttgggacgagagttgcctgtcttcagccagtgcctgtctcatatgtgggcgggactctgagcagcctggcagcgagggtatgtataaaatgcttggcctgcaccagggctagggagaggacgacaccaaggaggtcactgcgtcgtaggagagggccagcgtctgccgttacgaagagttgcaagagctgtgcctacttctgcccagataccaagaccgccagctcctggatggacatatccttgttgacatagcggtcatactgagcaggggtcagcctgccactctgcagggcctcttcgatggagaacttcttgccagacttcctgtcgtgtatgtcgacgc

SEQ ID NO: 52297 - DNA, 381 bp, Homo sapiens
  misc_feature (1)...(381): n = a,t,c or g
ggaaagggtcttactaggaaagatggccaaaagtttcatatgaaaaaaattggattataaaccagtaacttaaatattaataaggatattttatgttttaaaaaagtatttacacagaatcataatcagtgaaattgaccatttgaaaactaaaagtttttacctacctgctcaatttattaacatcattgctttggggactgtttgaatataggtacgtgttttcttgtgcattctctataatttcaggaaaagtactaatgcgaattctcttccaaaattgtgatgtttcttgtatttttgatgaaggagaaatactgtaatgatcactgtttacactatgtacacttaggncagccctttgtagcgttatataaaact

SEQ ID NO: 52298 - DNA, 1696 bp, Homo sapiens
ttttttttggttttgtcaaatgttttattgagtgtagacatctggagtactgtaaaacatgcattatctgtagattcaaaaaggagcaagccacattgtcctcactgtcaaatgtgtcaggcttggcatacatgatggagattaatgaagtatcatgagagtaatatggttcctgaaaagcttctacaatttggagtagggtcttaatcacgtgaaaagcaaagctgttcacatttagtgaacctgcatttcatggagtggggggggggtacacagtattttaattttaaaacaaataaaaataatttgtttgtcaaagattcccatctccccaactttatttgtcgcattggttttcagaaattttaattttttaaaaatcagatgccttttggaagttgtatgtttatctgagcaataactaaattttatttcttcttcggttgttgaggtgtgttaaatttgaagaagataatatctccatcttcaacaatataatttctgccttgttgtctgtactttccagcagccttgactgcattttcagaaccttcctctttaaaatcttcgtatttcattacttcagccataatgaatcccttttcaaaatctgtgtgaatctttcctgcagcctgaggagccttagtccctttcctgatggtccatgcacgcacttcatctgggcctgcagtgaaaaagtattctagttggagtgctgcaaacccagccttaatgatctttgggcaaagcactttgtgtcatgttcgcttccagatacttctgtctctcctcagcactcaattcttgcaacttgagttccaaggccccactaaaaggaatgaccaaagcacctgggtcatacttgtccacccactctttaatttttatcaaccatttgtttttctttctaatgtagtctttttcagaaagattaaccaagtagaccattggttttgaagtcaaaaataagtgtttattcaacacttcaatctctttgtcattccaatcatgatagaagcgaacaggtttcttttgatctataacccaggattttactttgcacattatatcatattcaggttttagttttttatctcctcctctcacagccaccttttctagtttatctataatgggcccaatcatttcctcatctttaagctgaagctcttcatgtattatttctatatctcggaataggatctacacttccttcaacgtgcgtgatatcatcatcttcaaaagcacggtgttagatgaaagatgccatcacaggcactaatatgagataaaaaagcattccccaggccctgcccattgtgagctcctttcacaaggccagcaatatccaccacatttagaaaggcaggaattttgcttgctggtttgtggtattgacaaagaaagtcaaacctttcatctggcacaggtactctgctctcaattaggatcaatagtgcagaacgggaagttttctgctgaagcctgactattggttaacacattgaagaaagtagatttcccaacatttggcaatccaacaataccaattttcaggtgagcttccaaatcttccaatgattgggggtggtttaattccatcacctccctttttagggggcatcgtgctcggcctgggcgatgacacggggtcccagcggcagcgagagaaaggtcctgccggcagctggaggcg

SEQ ID NO: 52299 - DNA, 562 bp, Homo sapiens
  misc_feature (1)...(562): n = a,t,c or g
ccgagcaggcgcggtttgcgtctggggtctgcttccatttattcactagccatcactacaatcaccagcttttaaaacaacagctaccagaaatacaaagagtgccattggaacagctgtgtctaagaattaaaattttagagatgtttagtgctcataatctccagtctgtgttctctcggctcattgaacctccacacaccgattctcttcgtgcctcaaaaatacgattacgagacttaggagcattaactccagatgaaagattgacccctcttgggtatcatttggcctctctgcccgtgggatgtgagaattggcaaactaatgttgtttgggtctatcttccgctgtttggatcctgctctcaccattgctgccagtttggcttttaaagtctccgtttgtatctccctggggattaaaaaaggaagaagcttaaccaggaaaaagctgggaatttgcattcgcaaacagtgattatctnggcccttctacaagcgtataaggggattggccagcttaagtacaaaagaagggcgtgcgttgcaagtgnataatt

SEQ ID NO: 52300 - DNA, 593 bp, Homo sapiens
tcttgctttttaattgtatttcttaacactagaattttctatttcaagtttttgtacgtggccttgcgtctccttagtacattttatagtcgctgtaagttgattccatttttcttgaaattgaattctcatctgacctaatttcttccttgaatcctacatctcactttctcaatggacgcagtgacgcaatgaagcatccagcaaagcttttgttgttgattgtttaggacgtcaccctgtttttgttgaagttgtctcacaactacttctctttctgctttctctctttcatattgatactgtctttcttttaagtgattacattcactgattaactccttatttctttcttctagcagaagactttgcttttcactctcagcttgaagtttttgcacaatagcatgaaactggtcttggatattaatcactgtcttctctttattgtcagccttgttgtgggcatcatccagttgttgtcgaagcaacatattctcactttgtagttgagacaatctctcctgtacagactcctgctttccaatgtattaattcactttaacttgttcattttgatacttttgttccat

SEQ ID NO: 52301 - DNA, 242 bp, Homo sapiens
ttttttttttttttaccaatattgatatttttatttcttttttttctcttttttttcctcttttttaagattctctgtttgaattccattactttagttgaatggtcaggagcaacatcaacatgctggacttttatatagtaaagcgttgggaaaatactcccactacagacatctctgaagaaacaaagtatgaataaaacctacatcaaattaattgttccaataatatgaaagttgag

SEQ ID NO: 52302 - DNA, 466 bp, Homo sapiens
aacctgttctccgggctaggggacaaacagggaaaaagaaaatagtgagccatggtgcctggccctttaattcccccaatatttttttatctgcattaatttattatttcaagtgaacttccatctcaaatacatggttctcagacgcttccatgaactctcaagtgtgacttattacagcctggggctccttggagcacagtgtgccagtgacctagtggaaggccatgagaaagccaggttcactgttcactgtgcagcatctccctccatggtcttcctgggagcctattcccactgcactgagcattccgtgtgtccagaggtaggggttagcagggatagatggacttcctgcttattttctgtttcacatttccactggaccttcaatcctgttaggacttgcaaaggtttgaggccagctggaggcccccaaagagattcaggcagtggcagaatgttt

SEQ ID NO: 52303 - DNA, 4145 bp, Homo sapiens
ttacagcctgcttctgtgctgttccttcttgcctctaacttgtaaacaagacgtactaggacgatgctaatggaaagtcacaaaccgctgggtttttgaaaggatccttgggacctcatgcacatttgtggaaactggatggagagatttggggaagcatggactctttagccagcttagttctctgtggagtcagcttgctcctttctggaactgtggaaggtgccatggacttgatcttgatcaattccctacctcttgtatctgatgctgaaacatctctcacctgcattgcctctgggtggcgcccccatgagcccatcaccataggaagggactttgaagccttaatgaaccagcaccaggatccgctggaagttactcaagatgtgaccagagaatgggctaaaaaagttgtttggaagagagaaaaggctagtaagatcaatggtgcttatttctgtgaagggcgagttcgaggagaggcaatcaggatacgaaccatgaagatgcgtcaacaagcttccttcctaccagctactttaactatgactgtggacaagggagataacgtgaacatatctttcaaaaaggtattgattaaagaagaagatgcagtgatttacaaaaatggttccttcatccattcagtgccccggcatgaagtacctgatattctagaagtacacctgcctcatgctcagccccaggatgctggagtgtactcggccaggtatataggaggaaacctcttcacctcggccttcaccaggctgatagtccggagatgtgaagcccagaagtggggacctgaatgcaaccatctctgtactgcttgtatgaacaatggtgtctgccatgaagatactggagaatgcatttgccctcctgggtttatgggaaggacgtgtgagaaggcttgtgaactgcacacgtttggcagaacttgtaaagaaaggtgcagtggacaagagggatgcaagtcttatgtgttctgtctccctgacccctatgggtgttcctgtgccacaggctggaagggtctgcagtgcaatgaagcatgccaccctggtttttacgggccagattgtaagcttaggtgcagctgcaacaatggggagatgtgtgatcgcttccaaggatgtctctgctctccaggatggcaggggctccagtgtgagagagaaggcataccgaggatgaccccaaagatagtggatttgccagatcatatagaagtaaacagtggtaaatttaatcccatttgcaaagcttctggctgggccgctacctactaatgaagaaatgaccctggtgaagccggatgggacagtgctccatccaaaagactttaaccatacggatcatttctcagtagccatattcaccatccaccggatcctcccccctgactcaggagtttgggtctgcagtgtgaacacagtggctgggatggtggaaaagcccttcaacatttctgttaaagttcttccaaagcccctgaatgccccaaacgtgattgacactggacataactttgctgtcatcaacatcagctctgagccttactttggggatggaccaatcaaatccaagaagcttctatacaaacccgttaatcactatgaggcttggcaacatattcaagtgacaaatgagattgttacactcaactatttggaacctcggacagaatatgaactctgtgtgcaactggtccgtcgtggagagggtggggaagggcatcctggacctgtgagacgcttcacaacagcttctatcggactccctcctccaagaggtctaaatctcctgcctaaaagtcagaccactctaaatttgacctggcaaccaatatttccaagctcggaagatgacttttatgttgaagtggagagaaggtctgtgcaaaaaagtgatcagcagaatattaaagttccaggcaacttgacttcggtgctacttaacaacttacatcccagggagcagtacgtggtccgagctagagtcaacaccaaggcccagggggaatggagtgaagatctcactgcttggacccttagtgacattcttcctcctcaaccagaaaacatcaagatttccaacattacacactcctcggctgtgatttcttggacaatattggatggctattctatttcttctattactatccgttacaaggttcaaggcaagaatgaagaccagcacgttgatgtgaagataaagaatgccaccatcattcagtatcagctcaagggcctagagcctgaaacagcataccaggtggacatttttgcagagaacaacatagggtcaagcaacccagccttttctcatgaactggtgaccctcccagaatctcaagcaccagcggacctcggaggggggaagatgctgcttatagccatccttggctctgctggaatgacctgcctgactgtgctgttggcctttctgatcatattgcaattgaagagggcaaatgtgcaaaggagaatggcccaagccttccaaaacgtgagggaagaaccagctgtgcagttcaactcagggactctggccctaaacaggaaggtcaaaaacaacccagatcctacaatttatccagtgcttgactggaatgacatcaaatttcaagatgtgattggggagggcaattttggccaagttcttaaggcgcgcatcaagaaggatgggttacggatggatgctgccatcaaaagaatgaaagaatatgcctccaaagatgatcacagggactttgcaggagaactggaagttctttgtaaacttggacaccatccaaacatcatcaatctcttaggagcatgtgaacatcgaggctacttgtacctggccattgagtacgcgccccatggaaaccttctggacttccttcgcaagagccgtgtgctggagacggacccagcatttgccattgccaatagcaccgcgtccacactgtcctcccagcagctccttcacttcgctgccgacgtggcccggggcatggactacttgagccaaaaacagtttatccacagggatctggctgccagaaacattttagttggtgaaaactatgtggcaaaaatagcagattttggattgtcccgaggtcaagaggtgtacgtgaaaaagacaatgggaaggctcccagtgcgctggatggccatcgagtcactgaattacagtgtgtacacaaccaacagtgatgtatggtcctatggtgtgttactatgggagattgttagcttaggaggcacaccctactgcgggatgacttgtgcagaactctacgagaagctgccccagggctacagactggagaagcccctgaactgtgatgatgaggtgtatgatctaatgagacaatgctggcgggagaagccttatgagaggccatcatttgcccagatattggtgtccttaaacagaatgttagaggagcgaaagacctacgtgaataccacgctttatgagaagtttacttatgcaggaattgactgttctgctgaagaagcggcctaggacagaacatctgtataccctctgtttccctttcactggcatgggagacccttgacaactgctgagaaaacatgcctctgccaaaggatgtgatatataagtgtacatatgtgctggaattctaacaagtcataggttaatatttaagacactgaaaaatctaagtgatataaatcagattcttctctctcaattttatccctcacctgtaggcagccagtcccgtttcatttaggtcatgtggaccactctgtcttgtgtttccacagcctggcaagttcagtccaggatgctaacatcctaaaaatagacttaaatcctcattgcttacaagccctaagaatctttagagaagtatacataagtttaggataaaataatgggattttcttatcttttctctggtaatattgacttgtatattttaagaaataacagaaagcctgggtgacatttgggagacatgtgacatttatatattgaattaatatccctacatgtattgcacattgtaaaaagttttagttttgatgagttgtgagtttaccttgtatactgtaggcacactttgcactgatatatcatgagtgaataaatgtcttgcctactca

SEQ ID NO: 52304 - DNA, 458 bp, Homo sapiens
  misc_feature (1)...(458): n = a,t,c or g
tactaaaattgcttaacatttattgcttcttttggggttagcaagttgtaagcctcattagatgcatacactaagaaatggaattgattagactcgaccgtaggaatggatcaaactatgtactcttcttgttccaagtttcctccaaaagtagtagttattttgtttttcttcatccttgtacagatacatttagtagagcttaccacatagccttcccctaacaaattccaaagacgtccacagcccccttatgtaatgaggtccaatcaatgatcaattagccatgctagtggctaatagacaagggagattatctccataatctctccaaagatggcaaattatggctatttatttttggttttgcagcatttttttttttaaagncaaggtctcactgtatcccccaggctgaaatggcagtggaatgatcatgggctcactgcagcctcaac

SEQ ID NO: 52305 - DNA, 480 bp, Homo sapiens
ctttaaacatggctacctacctggcagggctttgttaactactgaatacctgtctggtaatcactaaaacatcttaatgtttcccttttttctagtttgttatattcctattatgtccattgagagtaagcttagtatatcaaactctccatttgacagtgaagagaacatagtgaaagtctgtggcggcatttttataagtaattccttatttctgcctgaagaccacaaagcctcctggaggcgtaactgctcagaccggtcttcagggaatatttaaggacttagtggaatttatgaacaataagtctgatgagattagcctgggagtggtgtcctgcagctgtctaatctagttagagtggcattaacattctaatctccttgagaatgccttttatagtctgttcaaagcaagtcattgatggttcttcgaggtagtgttaactgaagtgttcttcagtttgtcaagataatgtt

SEQ ID NO: 52306 - DNA, 1458 bp, Homo sapiens
aaaaaaatcatattgcaacttgttttattgtgattttctacaagtattaaatacatttaaagatctttttatcttaccaagaaataatttggaatagcattggtatatttgaccttttgagtgtctgtcatcctcagagaatggcccatagtgtgttgcctgtggacatagtgtccatagtccctttcttgtccttctgagatattttgggttggataacatttttgtttttgcctgatgcacagggcttttataattgagactcagtgggattaataggagttacctatttaattctcccagtcatcaatgaggtaatcatcaattcctatagttcaaattagtcataaacaagagctacagcaagactgatagagtaaaaactatataaatacagtaaaaaaaaaatagaatttatggtgtgaaatatgaagtatagcaatatataacaagaacatgtaagcacttgcttccacagcataaatgtaatttacatctgcattaaaggataattttctctgtgaataagagcaaaatggtcttcagagaaacagactgttcatttgaagccatttctgtaaacatcttccaagatagaactgtaatggattgaggaaataacacagaaaagacaaaaacttttgatttcaggcatgcaaagtgcgtgggcagatggacagttcccattgtgcattgcctttgataaattgggccttaatttatataacgatgctgtgttcacatccctctcctacctaaagttgtctttattggtttatattgtgttaaaattagcttataattattacttttgtattgtgttcagttttttaagttgcatgtttatactatttgctacagtatttttaagtttggggtgaaggccatcagctgtatcaaaaagacaaaacaatcactatttattcagtattgctgctttacatctccagaataagctttcgatgccaggacagtgactgcctgaaagctgcaggagctcttttcaatgcattttatatatttttagaaaccaaataaatgcagaaaactatttagtatactaattatattaaaccagcagaaatataaaggcaataaagtatatacatatatatggggggaggggaaagattaaaaaatagatttacagccagacatggtgatagccctaaatgtatttctcaatatgtttttctttattgaccctaggaggatttgagttgctgcagctttaaacagaaaattgccatgttcactaattgtgagcacataaatatgcttttagtactgctttgcttatgtacaaataaatctgtaatatgtattatatgtaattatccttttctttgactttcattttaaatgtatattttctgatcattatgagctgtaaaacaaagaatcaatattggatattctcccaaataataaattttcaggattcattggggcaaaaaa

SEQ ID NO: 52307 - DNA, 383 bp, Homo sapiens
gggtgacctgaatacagcccaccgccccattgaccactgggatgcagtcaacctggaatgctttgaagaggacccagggcgcaagtggatggacagcttgctcagtaacttggggtgccagtctgcctctcatgtagggcccttcatcgatagctaccgctgcttccaaccaaagcaggagggggccttcacctgctggtcagcagtcactggcgcccgccatctcaactatggctcccggcttgactatgtgctgggggacaggaccctggtcatagacacctttcaggcctctttcctgctgcctgaggtgatgggctctgaccactgccctgtgggtgcagtcttgaatgtgcctctgtgcctgaaaacaagtgccacct

SEQ ID NO: 52308 - DNA, 471 bp, Homo sapiens
  misc_feature (1)...(471): n = a,t,c or g
gttctgcgtgaaggcttaggtcatagcacaagctcantgaaagctctatgaggtctctgagactgcatgtgcctccattttgagttgttagtgtagaaaagggcagagttttagcagaaagtaaaggttcaggaatccagctagactcaccagagcccgtgttagtcatggatgatccattcagcccctgcaggaggctgaacagtacccagggggagattcgtgtcggtcctagtcatcaggccaaacttccagatctgcaaccatttccttctccagatggtgatacagtgacccaacatgaggaactggtctggatgcctggagttaacgactgtgacctccttatgtacttgagggcagcaaggagcatggcggcatttgcaggaatgtgtgatggaggctctacagaggacggctgtgtcgcagcctctcgggatgacaccactctgaatgcactgaacacactgc

SEQ ID NO: 52309 - DNA, 465 bp, Homo sapiens
gcgaaatgtagtgcagttttctccaacatggccgcgcccaggggagatggcgtgcaagtatccgctgcggtgttctgctgctagagtggagaggctggcaaagaagaaggcacacgcatggtgagaatccggcctgagccgaagcggagtttgctatggacagcaaccatcaaagtaattacaaactcagtaaaactgagaagaagttcttaaggaaacagattaaagccaagcatactttgctgagacatgaaggcattgagacagtatcctatgccactcagagcctggttgttgccaatggtggtttgggtaatggtgtgagtcggaaccagctgctcccggttttagagaaatgtggactggtggatgctctcttaatgccacctaacaagccgtactcatttgcaagatacagaactacagaagaatctaagagagcctatgttaccctcaatggaaaag

SEQ ID NO: 52310 - DNA, 302 bp, Homo sapiens
tctagcagcagggtcagagtctagtgatcgtttttaaaatggcttagatgctacctttcttttctgagaactcagtgtgatataatccttataagatattgacagctaattttatggattatcctaccgggacagtggaacctaagtagtttgaagacgagaaattgttttgattcagaagcaatgggttcactagtgaaaggaaagatcccacgatcgtaagtggtaaatgtttatatttgttgaataactctctgaaaaaaggaaataaagtagattagccttggtaagaggtggcttaa

SEQ ID NO: 52311 - DNA, 386 bp, Homo sapiens
gcagcagctctgcctttactgaaatttcagctggagaaaggtccacaggtgaggtttcttccaaggagtaatttctcttatttgactcttttgagatccttttctcacataattgtcaaatttcaattggagagaaactgtgttttctacctcattacggggtcagtgctgaggagagtaggaactcaggaaatgcttcttgattgactttagtctgctgtattggggtgacaaattgaccacagaccaaataacacgttggaatcctctttatttctttctaggagatctgggggctgaggaattaagggtttatgcttcttcttaaaacccgtttcaatctttcatgcagttatgattctcatacaaacaaatggaaatgggga

SEQ ID NO: 52312 - DNA, 510 bp, Homo sapiens
accagggcccccgacggcactcgtttaaccacatccgcgcctctgctggaaacgcttgctggcgcctgtcaccggttccctccattttgaaagggaaaaaggctctccccacccattcccctgcccctaggagctggagccggaggagccgcgctcatggcgttcagcccgtggcagatcctgtcccccgtgcagtgggcgaaatggacgtggtctgcggtaccggacggggcgcggacgaggacgaggctggcgggcccgagggcgaccccgaggaggaggattcgcaagccgagaccaaatccttgagtttcagctcggattctgaaggtaattttgagactcctgaagctgaaaccccgatccgatcacctttcaaggagtcctgtgatccatcactcggattggcaggacctggggccaaaagccaagaatcacaagaagctgatgaacagcttgtagcagaagtggttgaaaaatgttcatctaagacttgttctaaaccttcag

SEQ ID NO: 52313 - DNA, 2029 bp, Homo sapiens
  misc_feature (1)...(2029): n = a,t,c or g
cgaccgaccgtgagggaggaggccgaggaggacgcggcgccggctgccgacggaggaagcgctccaccagggcccccgacggcactcgtttaaccacatccgcgcctctgctggaaacgcttgctggcgcctgtcaccggttccctccattttgaaagggaaaaaggctctccccacccattcccctgcccctaggagctggagccggagaggccgcgctcatggcgttcagcgcgtggcagatcctgtcccccgtgcagtgggcgaaatggacgtggtctgcggtaccggccggggcgcggccgaaggacgaggctggcgggcccgagggcgaccccgaggaggaggattcgcaagccgagaccaaatccttgagtttcaggagtggctgtaaggtgaagaagcatgaaactcagtctctcgccctggatgcatgttctcgggatgaaggggcagtgatctcccagatttcagacatttctaatagggatggccatgctactgatgaggagaaactggcatccacgtcatgtggtcagaaatcagctggtgccgaggtgaaaggtgagccagaggaagacctggagtactttgaatgttccaatgttcctgtgtctaccataaatcatgcgttttcatcctcagaagcaggcatagagaaggagacgtgccagaagatggaagaagacgggtccactgtgcttgggctgctggagtcctctgcagagaaggcccctgtgtcggtgtcctgtggaggtgagagccccctggatgggatctgcctcagcgaatcagacaagacagccgtgctcaccttaataagagaagagataattactaaagagattgaagcaaatgaatggaagaagaaatacgaagagacccggccagaagttttggagatgaggaaaattgtagctgaatatgaaaagactattgctcaaatgattgaagatgaacaaaggacaagtatgacctctcagaagagcttccagcaactgaccatggagaaggaacaggccctggctgaccttaactctgtggaaaggtccctttctgatctcttcaggagatatgagaacctgaaaggtgttctggaagggttcaagaagaatgaagaagccttgaagaaatgtgctcaggattacttagccagagttaaacaagaggagcagcgataccaggccctgaaaatccacgcagaagagaaactggacaaagccaatgaagagattgctcaggttcgaacaaaagcaaaggctgagagtgcagctctccatgctggactccgcaaagagcagatgaaggtggagtccctggaaagggccctgcagcagaagaaccaagaaattgaagaactgacaaaaatctgtgatgagctgattgcaaagctgggaaagactgactgagacactccccctgttagctcaacagatctgcatttggctgcttctcttgtgaccacaattatcttgccttatccaggaataattgcccctttgcagagaaaaaaaaaaacttaaaaaaagcacatgcctactgctgcctgtcccgctttgctgccaatgcaacagccctggaagaaaccctagagggttgcatagtctagaaaggagtgtgacctgacagtgctggagcctcctagtttccccctatgaaggttcccttaggctgctgagtttgggtttgtgatttatctttagtttgttttaaagtcatctttactttcccaaatgtgttaaatttggaactcctctttggggggtcttctccaccacctgtctgatttttttgtgatctgtttaacttttaattttttagtatcagtggttttatttaaggagacagtttggcctattgttacttccaatttataatcaagaaggggcctggatncccttttaaattacacacactctcacacacatacatgtatgtttatagatgtgtgtctttncctgaancatagnaagtaagactgcntacagaagacatattccttggatgtgagncctatttgaaaagagcc

SEQ ID NO: 52314 - DNA, 469 bp, Homo sapiens
cttaaagaatcaagaagttgtgtaatcttttaaaaatattatcttgcagataaagaaaaaaattaagagtgtgtttacaactgttttctcttttttacagtacatgtatttaaatcattgctataataaagttaagttcattaggaatataaaaacttgcagttctatgatagattgcatttattaaaaatgtttcattgtatcacatagaaatatggccaggaaggacttgagaagacagtttgatccattgcttttagacaggactgggttttgctgtccaattatatacaataatagtttttcttacaactaagctggccccagccttgtcttgatattaatacatgaaatttttataattgtctcattgtctcatttagaaacatccatatttttctgctttttctattgccattttttatttgtgcatgaattgattattgagaaaatgtagcagtttgcatat

SEQ ID NO: 52315 - DNA, 416 bp, Homo sapiens
gttttactcattttttaattgagttttttggttgttgatgagttacaggagttcttgatctattctggatattaatcccttatcagatttatgatttgcaagacttttctccaattccgtgagttcccttttcactctgttgagtgtgtcccttgatgcacatagttttgtgctttttgtttgcacatagttcttttgttgtgtgtcctcttagtgtttagtggaggttcataccctcttattttttctgcatttgtggtttttgaaaaattttatacaaaaagtattttaaaaaatagtcaaaatgattgtgattgtatccagcctctatcattttacattccatgtgattttaaggaatagtcttaagcaccctgagtttcatttccttcacccttaaaggggattatatctac

SEQ ID NO: 52316 - DNA, 744 bp, Homo sapiens
  misc_feature (1)...(744): n = a,t,c or g
aaaatctgtgctacaaagaagggtcagacaggtattatccccctcgagaagaggaaacaaatgaaatagaacgacagcagtcacaagtccatgacacccatgtccggacaagatcagatgatagtagcagaaatgaagtcataagcgcacagcaaatgtcccaaattgtttcttgtgaagtaagattaagagatcagtgcaaaggaacaacctgcaataggtacgaatgtcctgctggctgtttggatagtaaagctaaagttattggcagtgtacattatgaaatgcaatccagcatctgtagagctgcaattcattatggtataatagacaatgatggtggctgggtagatatcactagacaaggaagaaagcattatttcatcaagtccaatagaaatggtattcaaacaattggcaaatatcagtctgctaattccttcacagtctctaaagtaacagttcaggctgtgacttgtgaaaccactggtggaacagctctgtccatttcataagcctgcttcacattgcccaagagtatactgtcctcgtaactgtatgcaagcaaatccacattatgctcgtgtaattgggactcgagtttattctgatctgtccagtatctgcagagcgccagtacatgctgggagtgggttcgaaatcacggtggttatgttgatgtaatgcctgtgggccaaaagnaagacctacatgcttcttttcagaatggatcttcncagaagt

SEQ ID NO: 52317 - DNA, 1682 bp, Homo sapiens
tacctagtgtgttaatgaagtgtgtttatttatgtgacttgataccagtagtcataatagagactgaagaggtatgcgttaacacgcctacttctatgcagtaaacaggctgcagctgcctagattagattcttagaaatgtcatattttgaattgttttatttcttgtaggggaagctttgtcccacttcattcatttgcatgccataggaattacatattggttatcattacgtatctaacaagattcagaaacaaaaatcttggacttttcacatccgaaatatgtcagctcttaataaatgtgtggtgcttaagtctacatatggcatccatagttgatctagagtatggatatgagtgtgttgaccagttatcagtaggtggacaaatatttgggcatctacagatgagactatgcactaagtgtggactgagtcctaaagaagcttatagtcaggtgttgtttaaaacattatcagaattcttaaacccaaggaatttaattttatttggtatttcttaagcctaaaaatgaaccaagagaaagatgattttagaaagtacttgtagtgaaagatgattttagaaagtacttgtagtgcatgtgtggcttctgacttttgggatggcaccattttataatagtttcaaaatttagcttttgaaattctcaacattttatggtagaagactttggacctcaagtataaaattatacgtttataatttttttaaaatttaaattataagtattgtgaattcacactctcaggctattgtctgacttgatctacgtctcataaagcctgtacctgagtggagtggaaggtggagtcttaggttaatcagttactgactctaccctcaccctctttcaattgaggtaaactttgctgtttttctttttcataaagcattctcaaattgttgagtttattgctgaaaaaaatctccatgactttacagatagaattacaaactaaatgatgtcttgtatttagaagcagagtacagacctaacgaactgttagattctccaccatcacttagggtttgcccagaagcaacaccagagaattacagacaacgcgcttttgctgaactgtccattttggtggttgtgtttttcagtcaaatataagcaggatgggcgatagagatatatttatatatagatacatattctatatatctaatgcctaaatatgggtattaaagggaaaatttttaaagtctgattaaatccaatatgacatgaaattaaatatatggattagtaaggaaaaatgttaaaaagtagagaggataccaagaagattaaactggactagccttatttgcaagtgaaggatctggtgctgctttcagatgtttatcttttatttttttcccttaagctttaatcttcgtcattgtcttaaagtcaactggtgtttcttgttcattgactttggtacgatggtgctttgccaaggatgtatttatgttataatggccaacatttggtcagcccttgtccacttattcacttccctccttttgtaaaataagtgctttaattataaactgtataaaaataccttgtataaaccccttttttgattattacaataaataagctgaattgtaacaaatgaaatttgatttttgtaataaaacagtggaaaagtaataaaaaa

SEQ ID NO: 52318 - DNA, 221 bp, Homo sapiens
  misc_feature (1)...(221): n = a,t,c or g
tgggcatcgatggcgaccgggaggctgttcctctaacactacagattatttacagcaagggggccatcagtggacgaancgctggagcaacctggagaaggtctgtacctccgtgaacctcaacaaggcctgccggaagcaggaggagctggattccagcatggaggccctgacgctaaacctgacagaagtggtgaaaaggcagaactccaaatccaaga

SEQ ID NO: 52319 - DNA, 391 bp, Homo sapiens
gcagtggcgattcaggttctcttgccacatcaatatcccagatggtaaagactgaagggaaaggagcaaagagaaaaacctccgaggaagagaagaatggcagtgaagagcttgtggaaaagaaagtttgtaaagcctcttcggtgatctttggtctgaagggctatgtggctgagcggaagggtgagagggaggagatgcaggatgcccacgtcatcctgaacgacatcaccgaggagtgtaggcccccatcgtccctcattactcggggtttcatattttgctgtttttgatggacatggaggaattcgagcctcaaaattttgctgcacagaatttgcatcaaaacttaatcagaaaatttcctaaaggagatgtaatcagtgtagag

SEQ ID NO: 52320 - DNA, 551 bp, Homo sapiens
ctagctaattgttaattataattatgctcagaagtctatttaatgagctctgactgtacttacgctgcactgtcggtgttaaggagaaattactctcacaagagcagaggcctgaggattctttcttctgaaagccaagcaccacaaggaaaaaaaaattattaatagctcaggttaaaaacacccatttaaacaaaaacaagagcatttgtaataggaagtgtttatacaaatagcacatttgtgatatgttgaaaagcatctctcttggcaaccaatctatgtttgaggaagattgggtaatgctgatgtgttccattcatgaaactgtatttgatacataatcctattattaattcgtatgcttagtcaacctaggaaatcaaaataatgttttgaagttcttatttgagcaatatggccttgacttggagggtagttttagttgttttgtttttaagtgactgtggtttaaaggcacaaatgccccaaggtggggagacttctctctgtgattattgttgctattaaattctgaactgtatccatat

SEQ ID NO: 52321 - DNA, 425 bp, Homo sapiens
tgtgagaacctccttcatggtcaaaatgtgccaggccagggcggtcccagtcatccctcccaagattcagtacacccagatcccacagcccctgccctctcagagctcaggggagaatggggttcagcctctggagaggagccaggagggacccagctcaaccagtgggaccactcagaaacctgccaaagatgattctccctcctccctggaaagctcaaaggaagaaaaaccaaagcaagatcccggagccattaagtcctcaccagtggatgccactgcaccctgcatgtgcgagggacctaccctttctccagaaccaggctcgtctaacctgctctccacccaggatgcagtagtgcaatgcagaaagcgcatgtcagagacagagccatctggggacaaccttctttcttcaaaactag

SEQ ID NO: 52322 - DNA, 783 bp, Homo sapiens
  misc_feature (1)...(783): n = a,t,c or g
caaattctttagcatagcaattatgctagaaattgctctaacaaacttattaatggccaatgtagatacagctttcctcacaaagtggcttttaatccctaattctttatgtatattaaaaagaggtcattatgactctattactggatctcagagactttgtcagtagcatttttataattagcgccagatttttaaaaccttctcatatatcttgtggcttaaacatttttaaaagagccctcatccccacagagttgcttacacaggggaatcaactagactgttctcaaaagacactaagctactgttcaaattgctattaactgaagtcacttttattaaattgtgaccagctttaccacttcttagaacaaacctcccctatatctatcaaagttgaactgcagcttatttgtatgttaaaaatgtaactgtaggctggactcagcaacttacacctgtannnnnnnnnnnnnnnnnnnnnnnnnnnnnnnnnnnnnnnnnnnnnnnnnnnnnnnnnnnnnnnnnnnnnnnnnnnnnnnnnnnnnnnnnnnnnnnnnnnnnnnnnnnnnnnnnnnnnnnnnnnnnnnnnnnnnnnnnnnnnnnnnnnnnnnagatgagaggaaggatcacctgagcctgggagatcnnnnnnnnnnnnnnnnnnnnnnnnnnnnnnnnnnnnnnnnnnnnnnnnnnnnnnnnnnnnnnnnnnnnnnnnnnnnngtaactatattttcttttgaataaaaagtaatgtttctggaaaaaaaaaaaaaa

SEQ ID NO: 52323 - DNA, 1360 bp, Homo sapiens
  misc_feature (1)...(1360): n = a,t,c or g
gccgactgaggcacgagcgggtgacgctgggcctgcagcgcggagcagaaagcagaaccngcagagtcctccctgctgctgtgtggacgacacgtgggcacaggcagaagtgggccctgtgaccagctgcactggtttcgtggaaggaagctccaggactggcgggatgggctcagcctgtatcaaagtcaccaaatactttctcttcctcttcaacttgatcttctttatcctgggcgcagtgatcctgggcttcggggtgtggatcctggccgacaagagcagtttcatctctgtcctgcaaacctcctccagctcgcttaggatgggggcctatgtcttcatcggcgtgggggcagtcactatgctcatgggcttcctgggctgcatcggcgccgtcaacgaggtccgctgcctgctggggctgtactttgctttcctgctcctgatcctcattgcccaggtgacggccggggccctcttctacttcaacatgggcaagctgaagcaggagatgggcggcatcgtgactgagctcattcgagactacaacagcagtcgcgaggacagcctgcaggatgcctgggactacgtgcaggctcaggtgaagtgctgcggctgggtcagcttctacaactggacagacaacgctgagctcatgaatcgccctgaggtcacctacccctgttcctgcgaagtcaagggggaagaggacaacagcctttctgtgaggaagggcttctgcgaggcccccggcaacaggacccagagtggcaaccaccctgaggactggcctgtgtaccaggagggctgcatggagaaggtgcaggcgtggctgcaggagaacctgggcatcatcctcggcgtgggcgtgggtgtggccatcatcgagctcctggggatggtcctgtccatctgcttgtgccggcacgtccattccgaagactacagcaaggtccccaagtactgaggcagctgctatccccatctccctgcctggcccccaacctcagggctcccaggggtctccctggctccctcctccaggcctgcctcccacttcactgcgaagaccctcttgcccaccctgactgaaagtagggggctttctggggcctagcgatctctcctggcctatccgctgccagccttgagccctggctgttctgtggttcctctgctcaccgcccatcagggttctcttagcaactcagagaaaaatgctccccacagcgtccctggcgcaggtgggctggacttctacctgccctcaagggtgtgtatattgtataggggcaactgtatgaaaaattggggaagagggggccgggcgcggtcgtcacgcctgtaatcccagcac

SEQ ID NO: 52324 - DNA, 379 bp, Homo sapiens
cggacgcgtggggtccggggagccgctggtgcactggtgcacccagcagttgcggaagactttcggcctggatgtcagcgaggagatcattcagtacgttttgtcaattgagagtgctgaagagatacgagaatatgttactgatctcctccagggaaatgaaggcaaaaaaggtcaattcatagaagaacttataaccaaatggcaaaagaatgatcaggagttgatttcggatcctttgcagcagtgcttcaaaaaagatgaaattttagatgggcagaaatcaggcgaccatctaaagcggggtaggaagaaagggagaaacatacaggaagttcctgcatttactgaacctgacacgactgcagaggttaaaacg

SEQ ID NO: 52325 - DNA, 363 bp, Homo sapiens
gaccgactcttcagagccactcagtacacatgcatgctgcttagatatttgttagagcccaaagctggcaaagagaaggtggtaatgaagctcaagaaactggagtccagtgtgagcactggtcgtaaatggttcagactaggcaatgtggtacatgctatacaggcaactgagcagagcattcatgccactgacctggtacctcgcttatgcttaacattagccaacctgaaccgtgtgatttatttcatctgtgacaccatcctctgggtgaggagcgtaggtctcacctctggcatcaacaaagagaaatggcgaacgagggctgctcaccactactactattctcttctgctgagcctg

SEQ ID NO: 52326 - DNA, 1391 bp, Homo sapiens
attagattgaattgaaattttggtgatggtttgggtagactttttttttatatcaagtataatttaaaacatcagattaaataattacactgttcaggcttttaaaaaaataccactgtgagaataaagcgctagtaagatacatcacttactgattttaaaaatacagaaagattttgagtaaattttgtgcccagcaagctgttagttttatttttgtaaaggtatgtaagttattaaatggttaatcatggccttttaaaaataaaataaagtgatacctttacaatgaagacaaaagtttaaaactttctaatacaaacaccattttgggaaatgcttgatttttttctattgcatttgtctgctaaacatttctttggataaatcctgcaaatacttctaacattattctttgattccagcttttagaatgggtgtacaatgccctgtttgtacttactggttagggtcagggtaacttgccagcccaagataaatactttaatcgttaaaagtcagaagagacagaatatgtaggaaatgttttttgtttattatgtaaacatggcttacagaattatgaacagtggatagattaaaggcatttaatatttgtaattcataataactgtagaaatggccctaaagcatgctgcataattaataatttatattttcattattataagtgtttatattaatgatcttgcatttgattatatcaaattcgtcatttcatagcaacagtattgttttctctgtttttcttctctaacttctctgaaatcatctcctattaagggatagaaattgttactagaagagaatcacatgttctgtgttcattatccctacacatgtaaattaattattttatcaatactagatagagttcacatgctgactccctggatacctacagttgagaagaaaatgacagacaattatttttcctttaggtcaaaataatgtcactgctatctggataaattataagttcatatatttgaaataagatcctggaaacgaatttaaatggtgtcaaactgcagagcaacagggcttcagtatattcacatctaataggttaatatgtacatttggatgatgatttttcttgataacattaacattaattttattttttcagacatactgtaatttaaaaattaatgtgagcgtttgttttaagttcacagaaaacttaataattcaaattctcaggaattaaggactcaccataacattgtcagttctaatgaaattttgtaaaagatggcaagtttgttacctcacttgagtggggttttccttttcccccaattctaagagaatataatgtgtatactaaaacattaataaacataattttgaaaaaaaaaaaaaaa

SEQ ID NO: 52327 - DNA, 1153 bp, Homo sapiens
  misc_feature (1)...(1153): n = a,t,c or g
gtttcttttaaaaatatgacatagccagtgatgtgtttaattatataactgttcttactgattttattgccccctagcaataagccctttcctttgaatacatgtacaactttggtcatatgagaagcaggtgcgcagagaattccttgaaagatctgaggtttttaacatgaagtctgatgtggttttcctctagcattccaaaaggtttttgctttgaaagtgttagcagaagcatgttgatgtgaattatgatttcttcatgtgctactgttagcacactgagtttttatagttgcacatcattcctcattgtgccttgttttatccattttataaatagagtagatatttgatataccactctgataactcatataaaaatatcatcataaaaagcttaatttcatcccttttatgttgggttttaaaagggtaaatgcttaccctattttattaattgaggaactcttacatagtaggaatcccttctataattacatgtgttggacaaggctttaggggaaagtttcctattctcttccatttgcccctgcccaaagtgctgacataggcagtgatgaagaatctttaccaagattttcagggtgacttcaggtaccagcttaaagagcactagggatggggaacgaatgccaaatcagactccacctaggagcaccaggaaacagcttgtaccctggtaggggaaatggtgtcgctgaaaggggaggctgagccagtgcgagactgaacttgtgcagccttagccaagacaaagcagtgtttttcagcagacggctgatgggacaggaattgaagaagagaattgactcgtatgaacaggacagggtgaaaatgctgggaattataatgggaaacaaaactatctatgttcatattttgtaatatttcatttgttaagtttatatccccccctttttggggggggggggggggnnaaaaaattttttaaaattttnaaaaaaattgggtttttttttccctttttttaaacaagtataatcatatcgtcggaggttaagattatgaaattttaaaatctctattcaagatgatgttcactccaaatacactacagaatttagtcaacattttatataatgtttcaataaatgtttctttcaataaa

SEQ ID NO: 52328 - DNA, 506 bp, Homo sapiens
  misc_feature (1)...(506): n = a,t,c or g
tcatgctttaagattgagattttattactatgaagggcacatagtatctttattgaaagaaacatttattgaaacattatataaaatgttgactaaattctgtagtgtatttggagtgaacatcatcttgaatagagattctaaaatttcataatcttaacctccgacgatatgattatacttgtttaaaaagaacattatatccagatataaacttaacaaatgaaatattacaaaatatgaacatagatagttttgtttcccattataattcccagcattttcaccctgtcctgttcatacgagtcaattctcttcttcaattcctgtcccatcagccgtctgctgaaaaacactgctttgtcttggggctaaggctgcacaagttcagtctcggcactggctcagcctcccctttcagcaacaccatttcccctaccaggggtacaagctggtttcccggtgccctaggtggagtccganttggcantcggtccccatcccca

SEQ ID NO: 52329 - DNA, 438 bp, Homo sapiens
  misc_feature (1)...(438): n = a,t,c or g
ccccctattttttaaagtacagtatttaaaaagaattttattcctttagtttttggtccacgatgtgcatgggggacctgtgctgtgtgccacaaaggtgatgagggtggaaaagatgcggctcccactattcgtgtggttggagatgcaccagccnaatttggaggctttcttgattccatacaaatatggacattgaaattaggagttaagctcactcaggagagaggagattgccactgtttctaggactttaaagttgctgattcaacggagcntcaggtttaaagtcntcaggtttgatagactatatcagttctatcaaactagtttttgtgatantccagtatgttcttgcatgttaatattttagaatcctaaaaaaaatttaagtagatataaaactatgtcaatctctnanntaaaaaaaanaaaaat

SEQ ID NO: 52330 - DNA, 506 bp, Homo sapiens
  misc_feature (1)...(506): n = a,t,c or g
ccaaaatccagttttcatatttaaagcgaatgagccccctcctctcagtgggaaagatgagctgaagctttactccctcgatagtgttgggaaaagaaatcagacaaaaatctaaggaaggaccaaatattgtacagagtgtgccagtagnttttgcaactggactgaaaatacctgccttttctctccacaggggaaagtggaagttgaagctgggaaagaaggtatgaagtttgaagcgagcgccttctcatactatggcgtgatggccctgacagcctctccaggtgaaaataagtcccctcctcgcccatgtggcttgaatcactcagactctctcagtcgaagcgaccggattgacgccgtcacaccaacactggggagcagcaataaccagctcaattcttcgctcctccaagtctacatccccgattactcggtgcgagccctttcggatctgcagtttgttaagatctcaagacagcaataccaaaatgccttgatgg

SEQ ID NO: 52331 - DNA, 250 bp, Homo sapiens
gtttttcatcttgcccaaccatttctaactgccaaattgaattcaagaaaccgatgtgggttttgtttcctgtacaattatgagatataattctttttcccattgtaggtcttttacaaaacaagaaaataatttatttttttgttggtggataaagaagtcaagtatctgatactttttatttacaaagtgtgatggttttgtatagtaggttccaccctgagtattcctaaaagaaaaaaaaaaaaaa

SEQ ID NO: 52332 - DNA, 391 bp, Homo sapiens
ctatatctataccacagcccccaatcctttcaaaggctttgcatgtatttcagctacaagtgacaaggatattaaggatttaaaaggataagagagtgggaaagatgtataaggaagtgcctttgtcaaaaggcagcaaaaagtataatgatataaacataatatgaaataagcaaattttagaatactttgaaacagatttatagaggaatacatagtaaatagttatagacacacacacacccgttttaccattttctcagtgctttttctgctttcattcctttgattttagttagaagcacaagccatgatggatgtgggactcttctcaattgctctttaaattgtcactttttaaatcctattaaatgaagtgtcgattcctgaa

SEQ ID NO: 52333 - DNA, 354 bp, Homo sapiens
tactgtacacacatattgtgttgtgtgcacttcgtctattggaatgtacttgagctattaaactattaaataataactgcctagatgatcactgaaagagaaaaagagaccctcgcccagcccagataattcttaaatatcacaatctacataaagatgctgctgaactgaaatacaaataagttaaaaattttcagggaactaggcaaagttctactttcattatacatgggaatcagtaggtaggtgctggacactcatttttgacttggatattctttcacaaacaaaacgggcatataggggaaaacggggtcttatgctgtaggggtggggatgatccttataggctat

SEQ ID NO: 52334 - DNA, 234 bp, Homo sapiens
ttgaaaacctgatcttgcatgttaaggggctgatgacgaaaattgtaatcaatttcctctttgtttctgtgcttagtttgacaagtgatgggtgaattgagggtagttttttgtcctttttaataaaaaaggacaaaaataatgtgatatttctaacatttttctacccacgtgttgggtatatcatagattagttaaaactcaattcaggaagctccagaggaaatgattttt

SEQ ID NO: 52335 - DNA, 1268 bp, Homo sapiens
  misc_feature (1)...(1268): n = a,t,c or g
tttttttttttcactagccacaaacatttattgttggggtcaatacgtatatccttttgagaagtgtttcgagccattcatttgataactacaaacacgtcagaatctgttttactggtatatttttggcttgcatgacaagggaaaagagattattgcaaaattatgaatgaagtccaaaaggcctgattaaaaaaaaatctataaaatgggaaggattaaacactgcccagccctactgtgtcaacaaagacggtacaattcaaatcaagaagacaatcccatacaagtccagcaagggcaggatgttgggcaagtaggaagttaaggcaatctgttatacaaaatgcaaaaggagttaaagataaattacaaaaaataaaaaacaaaattttagtcagaaaactattactacataaagccatataagaatgtgtattagttgtttcctttaagggaaaaggaaatcaaactgttggttttctatttattcagaagaaaaaataaaggaaagtgtttggaaaatatttctgatattaagtgaattatttctcatctgctaccttagagtttacaaacaactgacttatccttgtcaatctgtggaaatgagaaaataaaatcagcgtctggccttcgtgggatactcataacaccctgaatgaggtccagagtaatcctagatcgggggatgtcaatgttgagtacttggacttccactctttctccggggcccagtccaaggcttcttctcttctttgtttttgaaagttttgcttctgttacatttcgtatgggaatcagcccagatttccccactcctatatccacaaaaattccaaagagagtggcattctcaactttgcctgtaagaactgtcccaatctgcagatcttccaggcatactatgccttctcttgaaatcaggtttatcaaaatctgttcgaaagtcaaagccttcaggctggctgaagacccatctatgatgaacctgtaaggtgtgtactgttgtttgcaatctttctgcaattttctccattccntccttttcaaggaatgaatttattttttgttgcatttcaggctttccaacctcatacagtgtccctccaatggatgacaaaaacctnattgctatgtcatatgattctggatgaatacaagtttggtccaaaggatttgncttcagtaaaacattcactgcagttttgctcttctttttgccctgcttctcatttgtgacctcaacgtctgctgaagatgtcaca

SEQ ID NO: 52336 - DNA, 1293 bp, Homo sapiens
tttttttttttcaaaccacagaatatttattgagtaataaacttgtggcacacaatccagctgtatttttttgcattcattcattttccattctgcaacctccatcacattagcagagtaaccagtaagttgttttctattttctaaagtatttttttctatcactatatgtatcacttctgagtcttacaggtatagagctgagtttagagagttgctaaaattcacctattggaccaaactaaggttggtacttggctgtttgttccccatctgagcctaagtatccagctcagacacatctctttatgggcacaactgggaacaacaaaatggcaacagttctacagctcataatataaccagtctgaagggttcccctactcacagaccccttcatttactgggagttaagcctcactgctaaataatatattttgaaactggaaaactgggcatgctgccttccacaatacaccactatactcatgattgcaggagggtggcttgggggactaggggcaatgacaccgggaaggatacaatcattgcccttacttatctttgatcttcttcccatcctcacactgaataatcacttgttcctaccttccctgtgaacctctcttgcctggctgcaaaattttaagacaccaaagacaaaattacattatgctctgagtgattacttacaagtacatcagaatatttacttacatagaaaagcactggaaaggaggaacacaaaatatgaaagacaattgatatggtactgaaatttttcttttttaactgttagatatttgtgcaataaataaaaaaggagggaaaaccatatcagagcaataggcaaggaggtggcaaactagataagtctccttggagaacaaaaaatatatttaaaatacaatagccctactacaactgatttatggctcaggtgactaaacacaatttgaagcagtaacaacactcataagctgaaaataaaatacttttagcccttttattcttcttgcctctttcccaaagaatatgccaatgaagctgttcttgatgtcacaatattcatatatcgcagaatttctgcatttaaactaccttgcctactggaaaataggataatcatttcatctctaggaaccagtaaccaaaaaaaaaatgtccttaggaggaatacatttttatttggtttgtttatttaggaggcgggggctcattttctggtctcccgggggccgggagtgcaggtgggcttggatctcgggctcactggaactctaggccgggggt

SEQ ID NO: 52337 - DNA, 369 bp, Homo sapiens
ggctttggcacatggagaatgagtttttgatcttgttttctcggcatgtctgtttcatgagatgagcctgtaggaagagttactaggctccctgactaagcagcccggagtcttgaccaacagcaggctgtcaacaatcctaaatagcatatttattacggactcaaaatgaaatcttgaaaaacaaaaacacaatatatatgtcactgcatggacatccatcactttttctgagcctgtattgcctctgcaaaacattatagcagttacttagagggaaggatttttttctagcctcctggtaacaggctccattcagaactttctcgacatcttatatcaatacttcctacatctacaagccccaga

SEQ ID NO: 52338 - DNA, 804 bp, Homo sapiens
agaaaaggatcatcaggataaactttgtggattttctctcactaaccacgctctcctttcaacattgaaattctagactttagacagaagtattgaactgggttacagggaggggatgtgagaggccccctgccattgaggataagtggacatgtctgaattggcctgctacctaaaattaataatctcaatcacttggatggtggtgtccataattttctccactgtttgtgtggcatataataagtaatggttgcacctagcaattcatttacaaatcttacttgattttgaagccatagaacacctcaactgttagcttgaatgactggagtttagtttttatttctcagaacaaaacagtttgaagcctaattaacatcctcggaaggaacttaacactaaaaactcctaaccgcttccaggttttctgaccttgaaggaaagggaaaatgaagagacccatggttcccacttccgaagcaaagccttaaagttctgtggctttagaggtggtgttgccatcctatgattgccaggagtcctggccttggccttggtggaggagccctgtggataaggccgaaggaaggtctgttttcattgggggtagaggagggtaaggagttgaaatgggaaggatctcttttttcttgctgtctaaaacttgtcttttcagacacatatcaagcctttccctctctgagctactgaagtcctgggcagaggttttctgtcttacaatacagacttttaccttaggcaatacctgacagagcctttaaataagtaaataaattgctt

SEQ ID NO: 52339 - DNA, 616 bp, Homo sapiens
tttttttttgtattctatattttatttttcaaacagccagtgtccacatttaaaatgcagaatttgcaaatattagtctaataattcaatttaaagtaaagcaaaacaacttcctttagtatcacaatacataaaatggttttataaactccaaatggcaaagataactatatgacaatagtgttgaaagccgtgaaactcattaaacctcttatcaataggtcagtttaaaggacatctctatgttccatgactatgcatgaaacaagctgtcactgtattataaagggctcaggcaattcattcatgggcataatataggggtcaggcagggttttgtttttacaatggacaattaaaacatatttaaagaacaaaaaacctcccaattgtttaaaaacaattctatttggagagcaaaatattttaaaatatatcgacttaccaaatttcaattgtcaggctgctgactactgatgtaaaagtttatatttaaaaatatcacaaatctcttttatttaacactgaaaatttcaatgggataagtttcattgcaaagcaactgtcacctgagtagattttaaaatttagtgctcctatttttcccacgcgtccg

SEQ ID NO: 52340 - DNA, 258 bp, Homo sapiens
aggagcctgagccatgaagtgggaagcccagtgcttgacactttctgcaactctagccctatatccagaagcctgcccacctccacccattctgtttgccccatttccccagtccagtggacatgccccacctccagacttgctcatgggagaaggctgtggtctctgccccctcttgccaaatgcttcatggaaatgaagaggaaggcctagagcctcttcctgcccactgtgggccatttccagaagtggcctaat

SEQ ID NO: 52341 - DNA, 451 bp, Homo sapiens
ggatcaggaagtttgtgctctctgcgtggctaagtttttcacctactaggacgggggtggggtggggagaacaggtgtccttctaaaatacagcacaagctacagcctgcgtccagccataacccaggagtaacatcagaaacaggtgagaatgaccactttaactcaccgggcccgtcgcactgaaataagcaagaactctgaaaagaagatggaaagtgaggaagacagtaattgggagaaaagtccagacaatgaagattctggagactctaaggatatccgccttactcttatggaagaagtattgcttctgggactaaaagataaagaggggtacacatctttctggaatgactgcacatcatcaggcctgcgagggggcatcctgatagagctggccatgccggggtcgaatctatctggaacccccgaccatgcgtaagaagcg

SEQ ID NO: 52342 - DNA, 1579 bp, Homo sapiens
cacgaaggttaaaaacagtttcctcaatgacttagatacacagtataactgatgctcttctggaataccacatgagacatggtcagaaacagtgcttggaaggacattacacaagaaattcagagtaatgctttgaagatttccccccttttgttttattcctgaaggaacatcagtacccgatcttgaagaaattcaagattcaaaaagaattttaaatacaccaacatgagacatcagtagtcagttggttttcagtaaagcttgttccaagttgttctcaacttaggaagtaattttggtgtgatctagcaaaagagtaggaatcagcgatacaaccactttggaagtttatagtataattgaaattattagaagaattcagcaggttacagacatacttaaactgggattaaaacctcatagtcatttttcttaattgcccttaatattttgacatatagggatacataaatttaaagaatattttttctcagttttttcagatattgccatactgaacctcattctaaactggtgctgtggatagtctttccctctcccctcctgttttagtttaaggaaaggtttccttcatggaaaagcacttttaattttgagaatttcacatttaaaataagccaaaagcctgatgttcacattgtgcttttaaactccgtaacagctgaatacaacataacatagtctcccttgaaattccctccctttttcagtagaggataaatagggtgactccagctgttggaatgagaatggggatacccccaaaataagattctggtgaagaaaaagtcttgtactaagttcccctttaggtgtagccaagtctataatataattatgatcatgaatagactccagaatccacaaagagaagagggcttggatgtcaaaaattcttccattgtggggtaggtggtcggggatgggagaaagggaaaagtcagggaaaggggagaagaaagaaaaacacatttggccttaaaatagcatgcattctcccagaagcccatagtaaagaaaatgacagatcgtggtcagcagactcttatcaaattggtatgtaaaagatttcttcaagctccattttgcagagaccaccacttagagaatcaaaaaattcctgttttgatacttctaagttaaaatatatgttacagtttatctggtacttcatttttcttaactaaaattactttttactttaagcttgaataaaaatcttcattggtaactgtatgtaattaagtggcaacttctctttacctcagtatagttaaaaaccattcatattttaagtgattcatgtataccctgaagccgttaatacaccccagtctctatggtaacatcactaaatgtgggcatagaaactccacagctgtttacaaatttggttacagtgtgctatggtgcatttgtaacactcagatttgtgcccattcaggggcaatttggcactcagattctactctacttcacctaaccacccctagatctgagttttcagagtgcttctgaagtacagtttaaaaacactttttaaaaagtggagtaa

SEQ ID NO: 52343 - DNA, 1026 bp, Homo sapiens
  misc_feature (1)...(1026): n = a,t,c or g
gaggaagtccctgaggcaagggagtggggggtgccctggagggatggcagcagggcagtctgtcagacccaagtggcctccagccctagaagccaattagtcctcctcaaaaagctgtcactgtcccctaagaattgctgccaggctcccactggcctgactcagtctttgagagtcttaaggaggaggtctctgaaaggtacacaccaagaactctccccagcacagctgtttttaagactctccaccagcgtcattggcgtgttgggaagaaaccctctgccacagaggccagcttcagcctttgcctaacaccgcaaggcaaatggaaaggtaaacgggaaggagatgtctccccagcaggctatttgaggacagtcttccctgcagaagatctcaacctggggtccacagagtgaganatgttagagtaggtagctagtcagacacaagcagagcaggagagggctccccgctcccaccaggaatgtcaggctaccatcaggtgatggtcaggtggttgttaaactgtctctgtaaaataataattggttgcagccagctccaagcaaggacagtctctcaatagatacaaaacaccctgatctggtgatcagccgcttcccgataagatctcaggagctgggcaagcagcctggagcatgcgcaccaagaggcaaaatggcggaatttaaccagtatatgacctaccttcctctgggaacgcacgactggtaaggggaaaaatgcctcaagtgagcatgcgcgcaacttcagtaatcacactgtgcatgcgaccccttccaagtgctggcaggtcaccacatacgcggacagcctgctgcaagggaagaatcaggggagatgagacgtaaatcccagaactatgccaaatacataaaaccccaagttaagggtcaggcagggcacttagatctctcaagttgcctgcctgatccaagtgtagtgtacttccttttgttcctgctctaaaactttttaataaactctcactcctgctctaaa

SEQ ID NO: 52344 - DNA, 1745 bp, Homo sapiens
  misc_feature (1)...(1745): n = a,t,c or g
cttcaccagcaactctgactctttgacgggaggcctcagttctagtccttggtctgctggtgtcattgctgtaggaatgaccacgggcctcagtttccccatttgtataatgggaagcctgtaccaggtcattcttaagatttctcctgactccagtgagctggaattctaaatgctggtctaggagctgtctccaggatggtgcaggatggctttgcggaaaggagatgggtttggaggccaacaaacctgcttgtcaatattgcctttgcctcttggcagcccttgaacttgagtaaataacaactccctgaannnnnnnnnnnnnnnnnnnnnnnnnnnnnnnnntatgtcccaggggtatatttagaccctgtttcctttcaggagggtccccagctggtccagggcctgggaaatttctacttatcctcattacccaggtccctcctttggaccctgtaaagggtccagggtgaatcagatgggggactgagcaagtagctatgaccgcagatcatgtaaggaagggactgacaagaagctcccagatgctggggagaatgaagagctaaaatagatcctaggtgctggatgctttgtcatccatgcgtgcacatatgggtgctggcagagcccccaaggactctggcctctcgagttctcctatcttctccattctagatgcttcccttgtatccagtgatgtgctggagctggctttgccaagcttgtgagagctggttgctacattttcaggatttttacaagttggtaaacacagccattataaaaaattaaatgatttaaatttataattaagtaaattacattaaaacaaaaaaattatactcaaaattcattacttaattttactacctgttactattatctgtgcttttgaggctatttctacatagtaactcttatggagacctaggggagacaccgcgcatctcttcctgattccccactcaatgacatcatgttagtctttggttgcttaactggctgtggggagtgtttttgtatcacaaagattagagaggactacacatcagggcttgatttattgtttgttgattttctagacttcagaacatgctggataaaatgtcagtaatgcaaattaaactttaaagtatgtcttgtttgtagccaatacatggtgtatagcaccaaaaaatggagggattattcttccagtagttgaacactgtcatccgtttcagctgacagctgctcaaatcatttaagaaggagttctgacattcattttcattgttttacttttgtcttcctcactagtgtaaacaaaaatttcaaccagcattcatgccgaacctatacccattcttcagtgcctagctgtacagttatcagggatttttattcgtagtctaattttgtcaaatcatggccaaatcgcagtgatagttgactttggatacaaggtttggcaaaaaaaaaaatattaacaaaatattctgtaagaatcaattggctatatggaatttaggataaagaatatttacaataaagaatatttacaataaagagtttattattatttgtaagttgtgagcaacaaacataccctttatctctgtaaaatttatacacacaaaaattaacaaaagattctgtaagaattaattggctatatggaatttaggatagaatatttacaataaagagtatttacaataaagagtttgttattatttgtaaaaaaaaaaaaaaaa

SEQ ID NO: 52345 - DNA, 701 bp, Homo sapiens
  misc_feature (1)...(701): n = a,t,c or g
ttttttattctaagtgcttatttagggagtatctttatttggaataaagaatttcgagttataaaactgatggcttatagaatgcagcttactaaattggtcttcgttcttacaaactggagtaatcttgtcctttgagagttgaaaatacatattcatctacatttctgcagcgagtggcccacagttaattttcatcactggtggggttggcagaatgttcactctcttctgctgctgtgctgtgtcttcgttgacttggaattgcaggaagcactcggtttgtccgcagaggttctccagatagaaatttttgatctggtaggggagctaggttgttccgagtgaaaggaagatccctgattttgtgtctgtttggggaaagatgctgaaaattttgtcctgatgatggattatgtagatggcgaaggtgtggtggcacggagacctcttggtgaccaggccggaacatgagcaatctgnccagaagccttatcagaagaagacacagtccaaactttgtaggaaaatacctgattagaatcactcttcccaggggttatctagtaacatctggcagccagttctgttatttaataaatcctgctcacttcgacttttctgagatcgctgggccatatgatgaggagcagagctcaggcctgcatgggaagtggccctatgggaggctgttaggaagt

SEQ ID NO: 52346 - DNA, 312 bp, Homo sapiens
gctggctgggctaggcagcatcacggggttctgcagcccaactgcacatcaggctggtgacagtcacgcagcctattacttcatgtgtcatcagaggatcgctagaacacagcacttcaagtgtgcagatttagtgagccatagtctaaagacaaatagagccactgaatcctaaatttcaatcaatcatctccgttgctcatcttattggtattaatcctttgaaattatgtggggtgggagttaaagctaataactaattatgttaatgctaaaactaagatttttctggcaagggaaaatcctcccaag

SEQ ID NO: 52347 - DNA, 406 bp, Homo sapiens
attcaagaccggtgttgtaaaatgaagaggaattttacttacatgttacagctgccaagtttttagatgttcctgtcatagctaaatagtcactgctagcctttcagagaacagatagtaacaattgtttgcagctgcagtgttgcatctaattttggtgtttaggctttttattttgtgggaagctttttgttaatatcctgcagggcaactgcctgttgggagggagaggatggaagaaggagcttactctgggggccttgcctattgagggaggctgttgcccagagcagttgcttcatgggaagtcatccaaagggcgctctcagtcattacaattgacagggatctcaaagttggggaaagggctgttaagtcatccagtctagtctccacataggtgctg

SEQ ID NO: 52348 - DNA, 1031 bp, Homo sapiens
tccgtggctgtgcagcttgggtgtcctgtgctcggcttaggggcacaggcttgcgggcggacctagggacggcggaggcatcgtgtccttcctgcaggaaggaaggagcttccggagctttcctgggaggctcactggggccgcggagataacctgaggtcctgcaacaggctgggggcccaaggaccatcccaggccttggaacagttggtatctttcagtcgccgccctgggagaggcaggtgtttgacttcctggggctaccagtggggcgcccatcctgggccaactttgtccacatcatcatcgtcatcctgggactcttcggcaccatccagtaccggctgcgctacgtcatggtgtacacgctgtgggcagccgtctgggtcacctggaacgtcttcatcatctgcttctacctggaagtcggtggcctcttacaggacagcgagctactgaccttcagcctctcccggcatcgtcctggtgcgtgaacctggccaggctgtctgcatgaggaggtgccagcagtgggcctcggggccccccatggccaggacctggtgtcaggtgctggctgtgccctggagcccagctatgtggaggccctacacagttgcctgcagatcctgatcgcgcttctgggctttgtctgtggctgccaggtggtcagcgtgtttacggaggaagaggacagctttgatttcattggtggatttgatccatttcctctctaccatgtcaatgaaaagccatccagtctcttgtccaagcaggtgtacttgcctgcgtaagtgaggaaacagctgatcctgctcctgtgcctccagcctcagcgaccgaccagtgacaatgacaggagctcccaggccttgggacgcgcccccacccagcaccccccaggcggccggcagcacctgccctgggttctaagtactggacaccagccagggcggcagggcagtgccacggctggctgcagcgtcaagagagtttgtaatttcctttctcttaaaaaaaaaaaaaaaaaa

SEQ ID NO: 52349 - DNA, 419 bp, Homo sapiens
gcctgcctattactaagttgaaaaagaaaatatgatcttatacttgtatgaaacaaaaagcaatctgcaaaaggttcatcccaaacctctatgtgggtgactttcctgtcattcattttattatccagatagagaaggactagaaaaagaaacaacagaaatgtaagaaaggaattttaaaagaaaaaaaagaggtagaaaagtaatcttccaacaaatatgagatgaggaaacagacatcaaggaaacactaaataaaatccaaacagtaaatacaactaatttcattgattaacctgtcatttttttttacaaattctttcttgtgcatgtttacactgatgccatatgacatttctccagaggggatagtgccttaacaacccacgcgtccgcccacgcgtccgcccacgcgtccg

SEQ ID NO: 52350 - DNA, 406 bp, Homo sapiens
gtattttacttctgtttgtgcaattactgacaaccacagttaccagagcctacaattccttacctgcaatctgaaacccaaaaagaaatctgaaaataaaaattatctttgtaactactttagcataaaacctgacctatggcaaaactcaacctgaattgagatgagacaaaatcttgatcccacttaactgtgctgcttcatggcttccagtgtagaactattaatatgtttgcttatgaggtgcagccctagaccctactggaggcattaaatgatatacagcatatgcataccacatttcagattataaaatctgaaaatactgaattccaaatcacatctgtccccaggggataagagggtaagagatttgtttgatatgctgtagcttgataagaatagg

SEQ ID NO: 52351 - DNA, 459 bp, Homo sapiens
ttgccctagaagcctctgatgtgggctcctcctgaacctcttgtcctgctggttactatattgaccgagattcaggaacctgccactcctgcccccctaacacaattctgaaagcccaccagccttatggtgtccaggcctgtgtgccctgtggtccagggaccaagaacaacaagatccactctctgtgctacaatgattgcaccttctcacgcaacactccaaccaggactttcaactacaacttctccgctttggcaaacaccgtcactcttgctggagggccaagcttcacttccaaagggttgaaatacttccatcactttaccctcagtctctgtggaaaccagggtaggaaaatgtctgtgtgcaccgacaatgtcactgacctccggattcctgagggtgagtcagggttctccaaatctatcacaagcctacgtctgccaggcagtcatc

SEQ ID NO: 52352 - DNA, 398 bp, Homo sapiens
cgaggatccaggcgcaggaggacagagcaatgggtgagagaactcttcacgctgcagtgcccacaccaggtaagtttgctcttaagctttacctttcaagtatatttgggttataacaaacaacaacaaattcccaagcgcagactgcacacggggagggttggagacttcacactggcgggtgacaaaggcagtggaggaacctcgcggggaagtctgatgctgcttgaacccctgagtgctttgctccgtgtggcccagcgtctctaggcggtccacaggcggcgaccagaggcgcaccggtgtctccaggatgcgctgctcctcctcgggcttcctcccagagctgtggcattttctcctgcgaaataccatcatctagtatacatatacacatt

SEQ ID NO: 52353 - DNA, 890 bp, Homo sapiens
  misc_feature (1)...(890): n = a,t,c or g
gctcgacaaaatgctgactcacacatgactcagtttgaaggttacagggaagactaaacatttatttagaagttacagtgtttgtttttacagagatatgttgccacggattattgattctggaaggttttttaatgctcatagtgctgtacacatcttggtctgttctcatgggcatcttaggaaaatgtttcccgtagcaccggatccagccatctgtgtgggtgtctccaggctgtgataccgtgccccttgctgttccctcatgctcgtgatgaaccatgtgcctgggatccttcctcttgccagcttatctgtgggcctcctgcagcctcgcctgccactgcagaggccccaggttaggagtctgtcccgcgccagcctgtgcggtgctttcctgggtgactcctgttaggtggcagcttctttattttccctctccaacctcaacgggtaggactccttatgtctttggcaggagtcaggactgtccacctcttcaactggcacaaggcccaagcagcatgggggccctgagtgaaatggagggtcccacactgcttccaggacaggactgtcgggggctctcctcacccctgactggcccacagcagcaggctgctcctggcgttggcagcagtcgtgatggggctgcagcagctggtgagtggagtcgtcgggcagtgtgtataagaaagagccctcgtccgggctagacttgggacccctcgtgatctggtgactttgggggtcatatccattgccaagatgggtctgcctcagcaggctgctggtgtcactctgctgctgaagctcgcctgggagttctgctgggcttatgccgggtagcccattgagccgngggaagccctattcagngattccattag

SEQ ID NO: 52354 - DNA, 714 bp, Homo sapiens
  misc_feature (1)...(714): n = a,t,c or g
gctacacactttgtttttcctgtgatatgcagccgcttgtagctctcctctgctcttaggtctttgcactggtggtggttttagtgtgggcaccctgtgagtctcccctgtgtctgcaaaatttgaaagttggctaaggatctgagtagagatggacttttctctgtggttgtctttattctggggattcccctagtttctagcactccaccagctttgagctctgtactctgacatttcaagctttatgccgccctaagcttgaagcataagttgggaaagagcatcatattcacagatttgggctccatgttaccctttttnaaaaatattgctttcnggtttcgggactgctttttcaccttgctgctggtgggtttcctccagcacatatgtagtatgtaagttccagctgtcaagcctagggatttccagcatccttatgctctgaatttgagtgtcacctctatattctagtgctgtcagagtgctttaaatttctagctgcttccccaattccagattttgatatctggcacctttagttggtgaggaactggcttttgtttgcccccatgttttgcagcaatagctgtgggagttgagcagtgccttgagccaagatgccacaaactcacaattcttaacccttctagttacagtttttgagatttaactctcttcctggcttttgcaaatactacctttagatca

SEQ ID NO: 52355 - DNA, 412 bp, Homo sapiens
actagtatactagatgcgagccggccaacagcttgcaagcatgctccgctggacccgagcctggaggctcccgcgtgagggactcggcccccacggccctagcttcgcgagggtgcctgtcgcacccaacagcagcagcggcggccgagggggcgccgagccgaggccgcttccgctttcctacaggcttctggacggggaggcagccctcccggccgtcgtctttttgcacgggctcttcggcagcaaaactaacttcaactccatcgccaagatcttggcccagcagacaggccgtagggtgctgacggtggatgctcgtaaccacggtgacagcccccacagcccagacatgagctacgagatcatgagccaggacctgcaggaccttctgccccaactgggcctggtg

SEQ ID NO: 52356 - DNA, 4144 bp, Homo sapiens
tttgaaagccagactgatcccatctgaatgcctttctggctttcctctaacaagctcaagaaaggcagcagcgtgggaacagcacacattctggggaccagcactctccctgtgagacgagccttttccagcgccggcagctgtctcactagcaatacatttacactaaccaagaaaagcaacattccaactagaacccccctcctccaaaggaatgctattcttggcaagagatcttccaaaggaaacatctgcagaacctctgccagtaaggtcaggggaaagctgaggcagctaaaaacttttcagtcctaggatccaagtcacaagggcttagcaatggaacaggatggaagcaaacccaagggcagatccctctgtctgagttctgcagcagcctctgatgggttttgccaaagctggagagaggtctctatttacctggttgctcaatcaaaccacaggagtcaatcaggtccccttaacaattacacagatgggacttgtcattgagtcacatccaatctaattttaaacttttgtaggtcctgcagcaacaactatgaaaattcctttccacatattcaagcccaaatccttgtcctagcccttcctcttaacagagaacaagcaagctgatgggcagacttccagaggaagctcggtggtgacaactcctgattccatagattaggttttcctttcttacataaccccctaccttctgtacggagtgtatgtattttagtcaaacttgagttagaaaagaggcgaggagctgctcaagtatctacgctgagttcctcagatgactgcatgtcagtatcacacaatttgaatagaatggatttagggcccacaggaaaaaatgagccctgaaattaggttttcaaaatctaattcagaactactgtctactatgcaaattcatgagctaagtgagaaaaaaacatgttatttagggattcgattcctggcaaaacctgggtctctcttgactgatctaaaaccaagtcatgattcaagagatacttagttccaggagacagtgtcacagtgtcaggaaccctctgttctgggctctgagaggttcagattgtattccaccattcctgattctaacccagtgctcaccagatcatttgctcaatttagatggctgagcacatgcagacgaaagaaagttttacatttgtgaagtattgagaacagtgagctcacttctccaggttcaaggcgcaaggacagcctggaagacgagggcttcccacacaactaaacaggaggaattctcaggggtgggctggaacatttctggaactgggcctcttccacctaacaggctctcattataccctaaaggccctctggaacccacctgagatgggtgctgcagacaggccccacatatacacagttctcaggggcagggcagtatctaggttcttctgtactgacccttcctatggtcctatggagccaaagatcgctttaggtgctctatcagtaaaaggggcatctgttaagactccccagctggaattcatgctaaaatccccatactaacatcctcagagtagaagaggaggaagaatcagccacccttcctcaatacccagtgggaagaggggtgggtatacacatggttattgaggtcatgtttcatcagcacagcaaaaagaaccaggaaaaaacaaagaaaccaccacagacctgggggtggggagccacagagtgccgcaagtccaagtcggtatctggaaggaaggagtctactcagttcttcctgctctaacttgggttcaaacctcccacctacatcctcatctccagaacaagacacatggatgccagtcaccttaaaaactaggtttctatttctggttagattctagagcagtggaactcaggagtgatactataccctacccagtcccaccacagcctgcctccttcctcccacagagataacattgtacaaaactgtatttacaagaaaaccaattaaaaattaagggtgtgtgcaaaagtagacaggagagtcaagacatatcaatgcagggatggctttggggaatgggggactcaggttctacactggaacctggggtcatgtatcatgtaccaggtggggagaagtgtagcaaatctcagtgccaatttgaggggaagccagtcattccaggagaagagctgaggggaaagagctgttgactttcataatgcagtcttaattatccagtcaccctcctgccacatggcagaagccaggtggcagtgatggtggtgggggaaacaaaacacacagtctctggcaagccccaccgggaaaggagggctcagaaggcgtagcgggtccggatatcctcgagtttcttggacacttcgggtggggttcggtccagttcttcagagacgttcttttgtttgttgggttccatggaattgaactgctcacagaggtctccatcaatcacattcttcacagggaagtagtaggagcgaaagctgaggtggtcccgcccacagagagggggatgttcagaccgcaggtgcatttccacatgctggaagaagtcatggtcctcatgggacgtgaatggcacaaggatgccaattcctccagacaaggtggtatagacaagtgattctgagcctccagggatcagcgtggtcttctgcaaggacagcaccgtctccccgacatggtagttcatgatcacctctgccttctgggaggccccattgagcaagccacggtcccacagggctttgtttcctgtaggatcctcatctacttcatcattggtgttaggtgggagcctcaccacacatatgttgccaaacttgtctgccccagccacagtgtcatagtccaggaggctggctgtagtgacccatcgggggtaggtatcatcagcaaagatgataagctggttttcattacgcttgtagcgaacccagatgaaactttcttggacatcagatacaattaccctatgtccaatagtctggatcccagagatataattggcaatatgccttattctcacattttcggagtaacttcttctttcccaggtcatagacacgcaacagcttccccacaccaatcaacaccctcccctggaatggggcaatagcagcagggacctcttccacaggagtcttgtgcaaaaactccagtttttccccattgttcacaagcttgtaagtatagacgaagccccctgccacagatcgggggtttagtatcaggtccttggccacacccaccagcacataccagtcttcaccagtgttggaaaacctgcacacagccacactaaaagctgcctcattctgttccagctggacaaggtccagtgtgttcccttgaatgggattcatcactcggatcacagaggcccactgcccattgccagccttgggagctccaaagatggattcagggaggttttcattgaggaatgctgctgccatctctgcggccagctcccgctcatcctcccctgctgcttccaccatttcctctgccatctgctgctttctctgagctttcgtggcctcagtgtaggcattgtggtccgtttcaatgataataaggttgttactctcagggtggatgacaaatttcctgggtgtgtactgcagtgggaaggctacttgattgaagacagcaccgagcttctctaatgccaaaatccgtagggtgttggtggagatggccacaatgccctcgggacactgttccgaggcaaaacccgatgcaaattccagtgtctcgtaagacagtggggtgagatggaagcgagattggtaagaatagctcaaccatgagcggcttgacatggccaatactgcctcctggccttgcattcggactcggaagagcttcacaggacgggaccccaggtaccgagtgcgagtatcagacaaatccccagtgacagggtccaagacagtcctcagcagcacaccgttctgtagcccaatattcaggtataggaagccaatcgagcccctctcacccagctcatcctgcttctcagtcccacccatttccacgatacacaaggactcaggctgggctgggagagcctgcatgcttagaggttgcaaacagtctgagggatccagggag

SEQ ID NO: 52357 - DNA, 413 bp, Homo sapiens
gaacctcttgggagttattttggaaaaagtacagtgcgagaagttgatagcgaagggttaccttagtaactggagattcgtcacacacacaagatgagccagcctcaagaaccacttgctgaagttgcagaatcagaactcccaccagtcctgcaggagggctccatctggagctgaaattaggccaaacacagtgctgatctgactggttggtaccagtttgcctggcttttgtgagcattgatgtagatctttctaccaggaaacctgcatctagatcctcaaaggctgggttcttcaactgaaactcatagtgaatgcgcccctgtgagtggggctcatgagcagcagaatgtgaggttgaaaggtggccaggtcttgaattggcccccagtgaaacccttcacagatgg

SEQ ID NO: 52358 - DNA, 282 bp, Homo sapiens
tctgcaaaagtacaagagcctctgcatgttcgaaatccccaaggagtagagtgaggctgacttccttagaaagagggggaagccaatggcctgtctccccactaccatccccaaacgctccttggggcgtggttcctgtggaccccagctcagcacgtcaagctgcaggggcggggctcctgtgctgctgcgcgcgcttcgcctgtgcgggagccagcgcagagcttggctgcgccgggggttcctcgtgtagatccatatgtctagatgcataataactgg

SEQ ID NO: 52359 - DNA, 686 bp, Homo sapiens
  misc_feature (1)...(686): n = a,t,c or g
gcggggaggatggagctgaactccctgctgatcctgctggaggcggccgagtacctggagcgcagggatcgagaggccgagcacgntnacgctcggtgctgcccttcgacggcgacttcgcagggagaaaacaaaggcggccggctggtgcgcaaggccccgaacaacaggtcttcacacaacgagctagaaaagcacagaaaggtgttccgtgatttctaaagcggtctgttcacggacctcccctgcaccccaccccagagaccgcatcccaggcactcagaggctgagccacatcctccactgctccccgcgggcactaacattgccgatgagacttggataaggaggggaccttgttctccatttcctcacttgatctttcacccgacaccacgtacgtaagtcctgtccgcctgcgtcagggcacactcctccaccttctcatccctgatgactgcacaggacacttggctgtgccaccagcgttctttgtgatgaccctctggtttacacagggacttccggacagtcctgcgatgtgccttggtgagcgcagacctttgtggatctggggggatagttttgtaggaccaaggccctagaagtagagatgctggttggcggtcagtgataactgtatcgatggcccttcagacctgtgtccccttttgctctcccaccac

SEQ ID NO: 52360 - DNA, 114 bp, Homo sapiens
tccacccaggtcccgagccctcacaccctggacgggaagggacagctgcattccagagcaggaggcagggctctggggccagaatggctgtccttgtcgtagagccctccacat

SEQ ID NO: 52361 - DNA, 559 bp, Homo sapiens
  misc_feature (1)...(559): n = a,t,c or g
ctagaattctgcattatacaggcaaattttctttaaagctagagacttgtgctaaatttgcctgattttcatacagatatgctgtagtaatacagctaccttttcatttcatctttgtgctttggttaacaagcaggctcaagagactgctttgtgtaattaaatgaattgacctaaacatgagctgtcaggtgaatacttaatatttccatgcagatacagaattccatattgtgttcagtaaatttcttttggttcttcacagtgaagaaagaatgtttctaacctaacatttgtaggaaggatactgggaaaattccttccaggaagggaaggaaggaagatgccattacttgggtgtatttatgatggatgaccacaaagctattgttctaccagttattaattaccttctaagatcttcagttactgctttattaatgtcactgaaattctaaaaaccaggacattcttcccccgttcattttatgcttcatggttgaaatttttctgtcagtgagtggaaaataaccatgagatacatagactgnagcgcaaa

SEQ ID NO: 52362 - DNA, 345 bp, Homo sapiens
gcctgtatggtaccaacttgacataaataaattagtactcataaattaagtaaataagcccaaacgcttttcaagttcacagggcattagtaatctgtggtaaatgaagatagtttaaaatttggggtaaaataaaatagaaacattttctgaatttaatttagatatttttctgggtctatttgttagacaggtttacactatctctgctatttttttaaggacctaaaactgaatggacatagaaaattgaggaaagaaataaaaccgtaacaattataagaggttataaaaggttcatggaacctttttatgttttttcttgtgcagtcaaaaccaattgca

SEQ ID NO: 52363 - DNA, 516 bp, Homo sapiens
ttttttttttgaacaagcagattttaggctgtagccaattacaaaccacttttgaaaagaatccaagtaaaacaataatcatctgtgaatgacaaaagacttagaagagccatgattactgatgcaattgacaaagaaatttcattatttctgtggtatacaataatttaacaggataacaattattaccaataacatataacaagatctatcaacattttagcaatatgatacaattttgggatgcatattaataacagatttatacaaatacaactcaaagaaaattaaacaacattttttatttgatcagcttcctgtatgattttaatataccaaattagcctaatatgtttcttttggacttccaggggccctatttggacttccaagggctttaatgcccaaaagttagcttgaggtcgaaaacatttaagttagaattttacatttgattttggaaagtttgtcaaatatcaaaggtttaaaacacttgatcaaaataagattacaggt

SEQ ID NO: 52364 - DNA, 326 bp, Homo sapiens
cgtcgaccgaggatgctgaggcttttgagaatcatgctgaaaaactaggtaaaaggagtattaaatctgctcacaaaaagaaggattcgccagagcctcaagttaagatggacaaacatgaacctcatcaggactccggagaagaagctgaaggctgtccttcagccccagaagagacaccagtggataaaaagccagaggtgcatgaaaaggccaagagaaagtccacccgtcctcattatgaggaagagggagaagacgatgacctccagggtgtgggcgaggaattatcttccagccccccaagcagctgtgtcagcttggag

SEQ ID NO: 52365 - DNA, 1528 bp, Homo sapiens
  misc_feature (1)...(1528): n = a,t,c or g
ttttttttgtttagaaactgattttaataagtcacatgatacaaaagaatgagaacattcaaagaatgagtaaaatactgctttgtcccaaaggacaagcagaaaatgttaaggcacaacggatgctcagaaaacgtaagaagctgaagggaaaacacatcatctgtgtactcagacacacacactccaacccatcacacgaacacaccctcgcccgcccatcagagaagaattcgcctggaatcnnnnnnnnnnnnnnnnnnnnnnnnnnnnnnnnnnnnnnnnnnnnnnnnnnnnnnnnnnnnnnnnnnnnnnnnnnnnnnnnnnnnnnnnnnnnnnnnnnnnnnnnnnnnnnnnnnnnnnnnnnnnnnnnnnnnnnnnnnnnnnnnnnnnnnnnnnnnnnnnnnnnnnnnnnnnnnnnnnnnnnnnnnnnnnnnnnnnnnnnnnnnnnnnnnnnnnnnnnnnnnnnnnnnnnnnnnnnnnnnnnnnnnnnnnnnnnnnnnnnnnnnnnnnnnnnnnnnnnnnnnnnnnnnnnnnnnnnnnnnntcacctggaatcaaagcagcagggacagcctgcgctggagccgccagaacaggcaggcgggcagctccgcaagaccgagcaactccaggacgggagacgagaactggcagctgacatgaccctgtgaccaggacattccaaaagactgggggcccttcccaggcctcttctttccgcctattattttaacaaagtccatgctgccagaaggcaagcctacctcgaaacacctggcacattcacaagctaccaaagggaggagggtgaacaggctctgatacttggagtagaggcccaagcttcctctcccacggttttccaccgggaacgaagacaaagccaagccctgtgcagccacaggaagtcccaggaagcacctgtgagacccgcacacccacctcggagggtcccagggctgggaaaccctcctctcaggggctctcagctcatctgggaacaagacagaacccctgctccccggagggcaagctgggaccagagaagccaagcacccatatcagtcacctttccaagtgtcctcgataaagaagagagtgtcccgtgtgtcccaggctttccctggcatgcgccagcccccagaggaatccatggcgccacctgggaaggagcgcacagcagaggttacccagggcacttcctggcgttgccccagcacaactcagatgaacaaagaccaaactaaaacctgaagacccagacacagggaggggaggtcaggtccggtcagtcccctaggggagctgcttgggctccagggagtgcccaccaggggattttcagtttttcacagactgtgagtgtgggtctggaggccaggtggtccacaggatagccacctcccagcagtgacatcaccaaaggctatcagaaaggcatgctctttctggtatctcgtgcctgcaaaggagaccagaacgaggggcacaggaccccaggtagggccctgctggctcctccattc

SEQ ID NO: 52366 - DNA, 587 bp, Homo sapiens
  misc_feature (1)...(587): n = a,t,c or g
aatgactatgtgtgtgagtgcagcacatggccagttcgtttctcactgttttggaaagccctgtgtgccaaaccaaggacgtgtctttcagggaaaggttaattttccgaagtttattaaaatagaacttggaaaaccaagcattttgaatttattccagtcctctgggcatcattcctatttcttctgccatgtcaaggagaaattccaagcctgcattctgtcatgctaaaataaccagcccatacttctcggtgaccttctgttgaacgtacctgagcctgcaaatgtaaaaatgattgtatctgaatttgcactaatggtgtctgagagcaaaaagagtgtgacctctattggaaacctttgttcaaattcaataattcagagatgctacatacttctgcaagcttcctgattatgtttcactgtaaatattaatggacctaagtttggaatgtatttccttacagtccattaatttgacatccatcttttacctggggggttattacaattgccattaggtcattaatggttttcttcacacagctttctttaaaccnaggttctctgccgctcttttcggt

SEQ ID NO: 52367 - DNA, 682 bp, Homo sapiens
gcacaggctctcatggattttattaaacagaattggctcaaaaatactatgttacagactgttgggtacccttgcctaacgtgaactggcagtgttaccttgcttttgcagtaatagtctacagattgcaggtctcatcaattccatccaaagtttaaaagcatttaaaattaccaaatctttaaaatcactttggtggtgattccaaattggtaccaagcaaactttctggatgcccaacatgattttcagtaaccaccctttagagtatttgtttactaagttcaccacattttgaacatggtagttttagactgcaataatatttagacttacattattacttactgctaagtaaaatctaaatcctgcaaatgcacagaattcaagctgaaatataatgatttatgtttagctcacattgaagtattggttggttacttatgtattaatgcagtgtgcattcacatttaatcaggtttagtctgtttctattttaataattttaaaaaattatacaagcaaattagatattagacatgttagttacaatggtaacacatttttaggtgtcgaaacacaattttcaaaattcctaatgaaagttataaaaatgtaaacaagaattgtaaaaatggacaaagtagtcaaatatatttccaaagcacaattttattaggca

SEQ ID NO: 52368 - DNA, 1809 bp, Homo sapiens
gcattcttagcattcaatacaatgtttattataaaatatacacctgagtttatgtttttctgccaggctgaagggcaataatgtcttgctatgcaaacactctattttatgtgtgaatttttttaactgtaattttatgtgtgaatttttttaactaaactctatcatcattttctatgttgacatcttttttttttttttaatctgtttccaactctgagtctgtgaactatctcttctgactggatgctggcctaaaatcctattacgtgcttaaacagacctcaaaacactctgaacctgtaggccaatacagagatgttgttctttgatatatcttgggtccttgatggcttcaacaaacaaggtcataatttgtttaaattcagtgttttctgtagataccttcttctcagtttcattaagaagagtaaccatctttggttttccaaagaatggaaactcctaccctagactttagacttagagctgtctgcctttcacgatgagtaagagatccagaatgtttaggggatgtgcgtcagcccacctggtacagtggcaaagctgaatgcgaacttgaggcctcctgaggcctgaccttctatgcccccagccctccaccccaagcaccttttggtgtggctggaaacacatgacattggatgtgatttttctcaagcccttcactgtggaaggcatgggagactgcccagcattgggcatgtggctgttaacgttttccatttcaagtccctgattcttactggagaagttaaggagccacttaatgttttcaaagacctctgattctgttgtgaatgtggcattccagtgagtacaacctgcttgctataaagaaagcagcatattttgacaattttatttcttccttgggtacttacatttttattacaaaaatggccgttataaaaaaagacagaagggctgggcagtggcttgctccctagaaactgagattccgaagcaggtgtttcctctcccctagactcagaggtacatttaatccatcttctccatttcctccttcaggaccagctatgagattcagtgcatttctagcccagcggatgttcattctccactaaacttcatcttttactaagcaaagggggattattccatgaggcagccaggagcaaggggccatgatattcatgactttgtctggctgggcatttttcaaagtgtccttgaattcactcagcaaacaaagctttctggagaatctcctcaaaacttaggccctgctccatttggccaaaaatgatggctgctccaaaactctgaacttcttaaaactccatctgctacattatttctggagtttaaacatgactttttctgtctttgagtatagatgtgtttgtttaattaacgaagcacaagtctgttaagcagaaggctccaagctgtattctatacttgggaatccttggtgccatctttattctaccaagtgccaatcaccatggctaaagtgggcgtatattacagcctgtgtcctaagcttagaagctttaatgtacttttttaaatgaaaagtattagagggggttgaacattgtaactaaagcataaagttagaccaattacatgcagagatgtttatttaatattgtgtgagctgagtccttctgtataaattatttgcacacttttcttgcatgatgaactgattttttatagttgtttgtaccagacggtggcatatttttgtaaaaaacttttgacactgaattgcaataaatgtttttccaacaacaaaaaaaaaaaaaaaagtcgacg

SEQ ID NO: 52369 - DNA, 3276 bp, Homo sapiens
tggcggcggcggcggcggttgtcccggctgtgccggttggtgtggcccgtcagcccgcgtaccacagcgcccgggccgcgtcgagcccagtacagccaagccgctgcggccgggtccggcgcgggcggcgcgcgcagacggagggcggcggccgcggccagggcggcccgtgggaccgcgggcccccggcgcagcgctgcccggctcccggccctgccggcctcctcccttggcgccgcggccatggcggccagcgcgaagcggaagcaggaggagaagcacctgaagatgctgcgggacatgaccggcctcccgcacaaccgaaagtgcttcgactgcgaccagcgcggccccacctacgttaacatgacggtcggctccttcgtgtgtacctcctgctccggcagcctgcgaggattaaatccaccacacagggtgaaatctatctccatgacaacattcacacaacaggaaattgaattcttacaaaaacatggaaatgaagtctgtaaacagatttggctaggattatttgatgatagatcttcagcaattccagacttcagggatccacaaaaagtgaaagagtttctacaagaaaagtatgaaaagaaaagatggtatgtcccgccagaacaagccaaagtcgtggcatcagttcatgcatctatttcagggtcctctgccagtagcacaagcagcacacctgaggtcaaaccactgaaatctcttttaggggattctgcaccaacactgcacttaaataagggcacacctagtcagtccccagttgtaggtcgttctcaagggcagcagcaggagaagaagcaatttgaccttttaagtgatctcggctcagacatctttgctgctccagctcctcagtcaacagctacagccaattttgctaactttgcacatttcaacagtcatgcagctcagaattctgcaaatgcagattttgcaaactttgatgcatttggacagtctagtggttcgagtaattttggaggtttccccacagcaagtcactctccttttcagccccaaactacaggtggaagtgctgcatcagtaaatgctaattttgctcattttgataacttccccaaatcctccagtgctgattttggaaccttcaatacttcccagagtcatcaaacagcatcagctgttagtaaagtttcaacgaacaaagctggtttacagactgcagacaaatatgcagcacttgctaatttagacaatatcttcagtgccgggcaaggtggtgatcagggaagtggctttgggaccacaggtaaagctcctgttggttctgtggtttcagttcccagtcagtcaagtgcatcttcagacaagtatgcagctctggcagaactagacagcgttttcagttctgcagccacctccagtaatgcgtatacttccacaagtaatgctaggcagcaatgtttttgggaacagtgccagtggttgcttctgcacagacacagcctgctttcatcaagtgtgcctgctccatttggagctacgccttccacaaatccatttgttgctgctgctggtccttctgtggcatcttctacaaacccatttcagaccaatgccagaggagcaacagcggcaacctttggcactgcatccatgagcatgcccacgggattcggcactcctgctccctacagtcttcccaccagctttagtggcagctttcagcagcctgcctttccagcccaagcagctttccctcaacagacagctttttctcaacagcccaatggtgcaggttttgcagcatttggacaaacaaagccagtagtaaccccttttggtcaagttgcagctgctggagtatctagtaatccttttatgactggtgcaccaacaggacaatttccaacaggaagctcatcaaccaatcctttcttatagccttatatagacaatttactggaacgaacttttatgtggtcacattacatctctccacctcttgcactgttgtcttgtttcactgatcttagctttaaacacaagagaagtctttaaaaagcctgcattgtgtattaaacaccaggtaatatgtgcaaaaccgagggctccagtaacaccttctaacctgtgaattggcagaaaagggtagcggtatcatgtatattaaaattggctaatattaagttattgcagataccacattcattatgctgcagtactgtacatatttttcttagaaattagctatttgtgcatatcagtatttgtaactttaacacattgttatgtgagaaatgttactggggaaatagatcagccacttttaaggtgctgtcatatatcttggaatgaatgacctaaaatcattttaaccattgctactggaaagtaacagagtcaaaattggaaggttttattcattcttgaatttttcctttctaaagagctcttctatttatacatgcctaaattcttttaaaatgtagagggatacctgtctgcataataaagctgatcatgttttgctacagtttgcaggtgaaaaaaaataaatattataaaatatgctattgtttttgtgttcttgctgcaatgcctttaccaaagtggccttaaatatgagtagtgaattgagaacatcttgaattcttaaaagacttcttagtgactttttataaaaaggccatgtagaaaatttattaaaactactatgactgctacattcaggaatatgccagtggtaaagcatttaaatgtagcttgtcagatttaccataatcctactaatttctttgcagcttattaattttgtgaaatttgtatatatgaagaatttgcatgtatgtgtatttacaaatttttctaagtatcttgaattctcagactgcaaaaggcctattttaactattgattttttttaaaaaaaattgtctttgaatgtattggaagtagacatgcattaactgtgacattattgcacctcagtttttttctttctttttttgggcaaactgatattatctataggatatttgtttatgtttgttttttgggggaaagaaactggaactcagtgttaccttaaagttacggaatactttgttttaaaggaaaagataataagtttagttatatctttttgttaatattcaaatgaacttgtttaagtatctatgtacagtaatgcctcattcatctagaggtaatctggcagtcttgtgaaaaccgaacacaactcagaaacttggaatcgttttttttttaaaaatgcctctgagc

SEQ ID NO: 52370 - DNA, 1341 bp, Homo sapiens
  misc_feature (1)...(1341): n = a,t,c or g
ccgttttcccgtcgcacgtggtggccactgttggcttctgaatggtttgcaaggcggatatccacgccaaggcctttggatcggccgtgggtacatccgtctgagccgttcctttccatcgcagagcggcggcctccggcggcgctctccagtcatggactaccggcggcttctcatgagccgggtggtccccgggcaattcgacgacgcggactcctctgacagtgaaaacagagacttgaagacagtcaaagagaaggatgacattctgtttgaagaccttcaagacaatgtgaatgagaatggtgaaggtgaaatagaagatgaggaaggaaggagggttatgatgatgatgatgatgactgggactgggatgaaggagttggaaaactcgccaagggttatgtctggaatggaggaagcaacccacaggcaaatcgacagacctccgacagcagttcagccaaaatgtctactccagcagacaaggtcttacggaaatttgagaataaaattaatttagataagctaaatgttactgattccgtcataaataaagtcaccgaaaagtctagacaaaaggaagcagatatgnatcgcatcaaagataaggcagacagagcaactgtagaacaggtgttggatcccagaacaagaatgattttattcaagatgttgactagaggaatcataacagagataaatggctgcattngcacaggaaaagaagctaatgtataccatgctagcacagcaaatggagagagcaganaatcaaaatttataaaacttctattttggtgttcaaagatcgggataaatatgtaagtggagaattcaggtaagttcagatttttccctccagttggtttaatttctatttcctaaaacattaaaataataatggaatgattgaaataataaacatttttcttattcaagatttcgtcatggctattgtaaaggaaaccctaggaaaatggtgaaaacttgggcagaaaaagaaatgaggaacttaatcaggctaaacacagcagagataccatgtccagaaccaataatgctaagaagtcatgttcttgtcatgagtttcatcggtaaagatgacatgcctgcaccactcttgaaaaatgtccagttatcagaatccaaggctcgggagttgtacctgcaggtcattcagtacatgagaagaatgtatcaggatgccagacttgtccatgcagatctcagtgaatttaacatgcatgtaccacggtggaggcgtagtatatcattgaccgtgtctcagtccgtggagcacgaccacccacatgccttggagttcttgagaaaggattg

SEQ ID NO: 52371 - DNA, 398 bp, Homo sapiens
  misc_feature (1)...(398): n = a,t,c or g
aaatcttgcgcaaattcctatgtaataggcctggggtgtcatgctctataaaacataaattctcattctatgagttttacttaaccctatatatcagacttaccttccagtctgactcgggtgtaacattacatgatgaagaaaaaaataaaattattttacccgaaaacatgtttatttggcatatttagaaatggccctgcaaagccatcctttgtggaagaaaatttgcatctgcagagaatctctgttaacaaaactagatcttccaggncctccctatcctaaagaggttaactgaggagtctagaaccttttaaaggtctgaatagggaatagtcatgtattgtctctaaaggcagccactatgatacttcaaacggaatcttggtctccac

SEQ ID NO: 52372 - DNA, 747 bp, Homo sapiens
ttttttttttttttttttaatgtgaaaatttaaatttaatgtagttcttccctatttaacagttttctgtaactcctatttagcctaccaattaccctgtgaaagttatcctccccccttttttacagatgagaaagcaggctgagagatcaaataactcaaggtgactcagaaaataattcaaggtgactcctccttttaaaactaaatatgtaatggataatatgcaactgatttcttgtgaaatataacatttatgtttttagattttctttgcctttaactcaaggtaagtccagtttaaacctgtactttttgtaattagccaaatcaaatgatcataattcaaagatgctaaaacagaatgctacatagtgatgctgagaaatactgtcaattagccagcaaacagtaatctgaatttgcgcaggatgatcattctaatttagatataatagaaagattttagataaaatagaaaactttttaaagaaattcaactatatcctaaaacttgacctggtcaaacttattccatattatattcagttgctctaatatacagcaggttgatactaaaataatgacagaatttggctggtctaaacatacaaatatattttcccccttttctttctttgggaaaataagaaaaaaaacattactctgtttactcagaaagcaaggagagcagcaccttctcctggactccgtgactgtcagccatcttgtcatcacaaaaaggtg

SEQ ID NO: 52373 - DNA, 474 bp, Homo sapiens
  misc_feature (1)...(474): n = a,t,c or g
ggtgnnnattggaaancgtatgactgattacgaatttaatacgactcactatagggaatttggccctcgaggccaagaattcggcacgagattcttcatagaaatagagaaaacaatcctaaaatttatatggaaccacaaaagacccagaatagccaaagctattctgagcaaaacaaacaaaactggaggaatcacattacctgacttcagattatactacaaagctatagtaaccaaaaacagcatggtactggcataaaaacagacacatagaccaatggaacagaatagagaacccagaagccatatatctacaatgaactcatttttgacagatgccaagaacatacattggggaaagaacagtctcttcaataaatggttctgggaagactggatattcatatgcagaagaatgaaactagactcctatctcacaaaaatcaaatcaaagtgctgggattacaggcg

SEQ ID NO: 52374 - DNA, 830 bp, Homo sapiens
  misc_feature (1)...(830): n = a,t,c or g
taatttgagtttgttgtgtagattctggatattagtagtcctttgtcagatgtacagattatgaagattttctcccactctgtggattgtctgtttactctgctgactgttccttttgttatgcaaaagctctttagtttaattaagtcccagctatttatctttgtttttattgcatttgcttttgggtccttagtcaagaaatccttgcctaagccaatgtcctggagagtttctccaacgctttcttctagaatttttataatttcaggtcttagatttaagtctttaatccatttttacttgatttttgtataaggtgagagatacgggtcttgtttcattcttctgcatacaggtatctagtttttccagcaccattttttgaagagactgtccttttcccaatgtatgttcttggcacctttgttgaaaatgagctcactgtaatatatggatttgtttctgggttctctattctgttccattggtctatgtgtctgtttttatgaaagtttcttgctgctttggttactacagctgtgtagtataatttgaagtcaaataatgtaattcttccagttttgttctttttgcttaggatagctttgtctattctgggtcttttgtggttccatataaattttaggattttttttctagttctgtgaagaatgatggtggtgttttgatgggaattgcattgaatttgtagattgcttttggcagtaaggtctttnnnnnnnnnnnnnnnnnnnnnnnnnnnnnnnnnnnnnnnnnnnnnnnnnnnnnnnnnnnnnnnnnnnnnnnnnnnnnnnnnnnnnacaacc

SEQ ID NO: 52375 - DNA, 683 bp, Homo sapiens
  misc_feature (1)...(683): n = a,t,c or g
gtgggccgttgaatgtggctgctcgcggtcggcgtgccccgacgtacagcgggccgggaaaagtggcactgaggctctggaacttctgcccagctctccttgtaaaatgaatgaaagtaaacctggtgactcacagaaccttgcttgtgttttctgtcgaaaacatgatgactgtcctaataaatacggagaaaagaaaactaaggagaaatggaatctcactgtacattactactgtttgttgatgtcaagtggaatttggcagagaggcaaagaagaagaaggagtttatggttttctaatagaagatatcaggaaggaagtgaatagagcttctaaactgaaatgctgtgtttgcaagaaaaatggtgcttcaattggatgtgttgcaccccgatgtaaacgaagttatcatttcccatgtggacttcagagagaatgtattttccagtttactggcaattttgcgtcattttgttgggaccatcgacctgttcaaataattacatctaataattatagagagtccttaccatgcaccatttgcttgggaatttatttgagcctattccaagttattaacatattacggagtccttgttgtaaggaacgcttggttttcataggagactgtttacaggtttcaagcattaatgcgggagtgtttttcnttagggtgtact

SEQ ID NO: 52376 - DNA, 133 bp, Homo sapiens
gtatagtgttttggaatcattgttttagaaaaacagattaaatattagattaaaaaataggttaaaacccccaaaacttaaatctaatcttagtgatgtttacatttatggccatctgcctcagtttcatgac

SEQ ID NO: 52377 - DNA, 459 bp, Homo sapiens
atttgagctgcgtccagcattggatatttgtcaggaatgcagataccctgaagggaacacaacaatggtccaagggggtttcccagaaaaaatcagacaaagatatgcagatctgcctggagaactgcacattattgaacttgaaaaagataagaatggacttggactcagccttgctggtaataaagaccgatcacgcatgagcatatttgtggtgggaattaacccggaaggacctgctgccgcagatggacgaatgcatattggagatgaactcttagagataaacaatcagattctgtatggaagaagtcaccaaaatgcatctgccattattaagactgccccatcaaaggtcaagctggttttcatcagaaacgaggatgcagtcaatcagatggccgttactccctttccagtgccatcaagttctccatcttctattgaggatcagagccg

SEQ ID NO: 52378 - DNA, 670 bp, Homo sapiens
gattacaggcataagcaccgtgcctggcctctttaataatttttaaaataccctaaaggcttgtgaatatacaagtctactgataaattatgtattgtctgggaatttgatagtcattgttttagataactggattttacgctgtggtagacaggctgtgacactagtgttgcacaggtgtaattggtcatcctatgccttcaccagaataacttgggagtggtgccagaaactagagtctacaattctcactgtttagagagtgttaatgacatactgtgtatgcataatagccgcatgtactataatagcccttaaaattaaactattgggattgctgtaaatattttaaagtactggaggtgccttttacctgtttattagattttgaaaaggtttaaattatttcatgagcaatcttttaaatttcatttaacataaagctgaaaattcaataacaggataaaaaagctttttaacaaggctgccatttaacttaaatgtgttcatcttagctttcacttgtataaaatttgattctttgaactgcagcaataaaaccctcagctcctaagaagtcttaagagggtattctatatattctgctttgttttattttctgtaaattttgtaggtaaatatgtgcattaaaaataaatactttatatat

SEQ ID NO: 52379 - DNA, 1317 bp, Homo sapiens
ttttttttttttttccagttgcctcgttttatagaaaaacaggcccagggaactactagggcttatccaaatgtacagtttgaggcagagttaggaatggaacccagggcctcctggcgctgtccagagtggagtttcttaggacccctgcaagccagccaagtccaaatctctgggccggggcctggagtccgccctcctcgttacctcctctcctctcggggtgactgaagctcgtggtgcagagctcccagctcctgtcaatgggggcccctgggcctttctcattctgcccctcacaacaggctcctcagctagggtagctgcagggagggtggctccctcctgctcctcagaaggtgtaggcccctacaaagacggtgagcctcagtacagagctggcccggtagctcatgagggaattcatggtgaccatctccaggtccagcacgtactcccgggggcccgtcaccggccgggcgaggaccagcatggcgctgacgttgttgatttgcctaatgtaaaagtccccctgcgagtttccagcacggatctgaaaggcattgtaggcaccggggtagacggaggtcgcctggatctggaacacgtcagcggggcacctccgctccgaggtgatggtcatgtagcggtgcacaatggatgaaggctgctctcgacatagagggttggaggccgggcagagacagcggttctcagagacctggatgtagggctccacgcagcggttggtgtccacgcagcggtagcccccatggaagttgacacaggtttgggcctcggagcactggtgcgcaccagactcacactcatcaatgtcttggcagaggcgtgtggccagcagctggtaaccctgtgggcagtggccaggagaaacggccctggctcgttgacgcagcggtactgacagaggtagctggagtagctacactcatcaatatcactgcaggagaagccatcccgatgcagctcatagccctggtggcagcgacacaggaaggtcccataggagttgaagcagcgctgctcgcatggggcccccatgtcacactcgttcacatcaacacaggagcggttgttaggccccagctggaagcccggctcgcactggcagcggaaggagccaggcaggttcacgcagcggtgctggcagtagcggtagcggcactcgtctatgtccacacactcgggcccgatcttgcggtaaccatcagggcaggtgcactgataggagccaggcaagttatggcagtcctggctggggcgacagtcgtgcagggcctgggcacactcgtccac

SEQ ID NO: 52380 - DNA, 3925 bp, Homo sapiens
ttcggcacatgcgtgaacaaatagctgaggggcggccgggccagaacggcttgtgtaactttgcaaacgtgccagaaagtttaaaatctctcctccttccttcactccagacactgcccgctctccgggactgccgcgccgctccccgttgccttccaggactgagaaaggggaaagggaagggtgccacgtccgagcagccgccttgactggggaagggtctgaatcccacccttggcattgcttggtggagactgagatacccgtgctccgctcggcctccttggttgaagatttctccttccctcacgtgatttgagccccgtttttattttctgtgagccacgtcctcctcgagcggggtcaatctggcaaaaggagtgatggcgcttcgcctggaccgtgctcctgctcgggcctttgcagctctgcgcgctagtgcactgcgcccctcccgccgccggccaacagcagccccccgcgcgagccgccggccggctccgggcgcctggcgccagcagatccaatgggagaacaacgggcaggtgttcagctttgctgagcctgggctcacagtaccagcctcagcgccgccgggacccgggcgccgccgtccctggtgcagccaacgcctccgcccagcagccccgcactccgatcctgctgatccgcgacaaccgcaccgccgcggcgcgaacgcggacggccggctcatctggagtcaccgctggccgccccaggcccaccgcccgtcactggttccaagctggctactcgacatctagagcccgcgaacgtggcgcctcgcgcgcggagaaccagacagcgccgggagaagttcctgcgctcagtaacctgcggccgcccagccgcgtggacggcatggtgggcgacgacccttacaacccctacaagtactctgacgacaacccttattacaactactacgatacttatgaaaggcccagacctgggggcaggtaccggcccggatacggcactggctacttccagtacggtctcccagacctggtggccgacccctactacatccaggcgtccacgtacgtgcagaagatgtccatgtacaacctgagatgcgcggcggaggaaaactgtctggccagtacagcatacagggcagatgtcagagattatgatcacagggtgctgctcagatttccccaaagagtgaaaaaccaagggacatcagatttcttacccagccgaccaagatattcctgggaatggcacagttgtcatcaacattaccacagtatggatgagtttagccactatgacctgcttgatgccaacacccagaggagagtggctgaaggccacaaagcaagtttctgtcttgaagacacatcctgtgactatggctaccacaggcgatttgcatgtactgcacacacacagggattgagtcctggctgttatgatacctatggtgcagacatagactgccagtggattgatattacagatgtaaaacctggaaactatatcctaaaggtcagtgtaaaccccagctacctggttcctgaatctgactataccaacaatgttgtgcgctgtgacattcgctacacaggacatcatgcgtatgcctcaggctgcacaatttcaccgtattagaaggcaaagcaaaactcccaatggataaatcagtgcctggtgttctgaagtgggaaaaaatagactaacttcagtaggatttatgtattttgaaaaagagaacagaaaacaacaaaagaatttttgtttggactgttttcaataacaaagcacataactggattttgaacgcttaagtcatcattacttgggaaatttttaatgtttattatttacatcactttgtgaattaacacagtgtttcaattctgtaattacatatttgactctttcaaagaaatccaaatttctcatgttccttttgaaattgtagtgcaaaatggtcagtattatctaaatgaatgagccaaaatgactttgaactgaaacttttctaaagtgctggaactttagtgaaacataataataatgggtttatatatgtcatagcatagatgaatttagaaacaatgctcctactgtttaaatacatatggacacatctggtgctgagaaagaaacaaacacattaccattggtgtcaagaaatattactatatagcagagaaatggcaatacatgtactcagatagttacatccctatataaaaagtatgtttacatttaaaaaattagtagataacttcctttctttcaagtgcacaatttcattttgacttgagtcaacttttgttttggaacaaattaagtaagggagctgcccaatcctgtctgatatttcttgaggctgccctctatcattttaatctttcccatgggcagagatgttgtaagtgggattcttaatatcaccattcttgggactggtatacataaggcagccgtgaaactggaaagtcattttgatgactgatgtgatacatccagaggtaaaatgcatttaaacatattaaagtatttgccaaagatacaattttcttgctgacataaaaatcacacaaacaagtcccccccaaaccacaactgtctctcaaatagcttaaaaaaattgaaaaacattttaggatttttcaagttttctagattttaaaaagatgttcagctattagaggaatgttaaaaattttatattatctagaacacaggaacatcatcctgggttattcaggaatcagtcacacatgtgtgtgtgtctgagatatagtctaaattaggcaaagcacatagtattacatacttgaggggttggtgaacaaaggaaaaatatactttctgcaaaaccaaggactgtgctgcgtaatgagacagctgtgatttcatttgaaactgtgaaaccatgtgccataatagaattttgagaattttgcttttacctaaattcaagaaaatgaaattacacttttaagttagtggtgcttaagcataatttttccctatattaaccagtattaaaatctcaagtaagattttccagtgccagaacatgttaggtggaattttaaaagtgcctcgggcatcctgtattacatgtcatagaattgtaaagtcaacatcaattactagtaatcattctgcactcactgggtgcatagcatggttagaggggctagagatggacagtcatcaactggcggatatagcggtacatatgatccttagccaccagggcacaagcttaccagtagacaatacagacagagcttttgttgagctgtaactgagctatggaatagcttctttgatgtacctctttgccttaaattgctttttagttctaagattgtagaatgatcctttcaaattgtaatcttttctaacagagatattttaatatacttgctttcttaaaaaacaaaaaaactactgtcagtattaatactgagccagactggcatctacagatttcagatctatcattttattgattcttaagcttgtattaaaaactaggcaatatcatcatggatacataggagaagacacatttacaatcattcattgggccttttatctgtctatccatccatcatcatttgaaggcctaatatatgccaagtactcacatggtatgcattgagacataaaaaagactgtctataacctcaataagtattaaaaatcccattattacccataaggttcatcttatttcgatttttagggaataaaattacatgtctatgaaatttcaattttaagcactattgtttttcatgaccataatttatttttaaaaataaattaaaggttaattatatgcatgtatgtatttctaataattaaaaatgtgttcaatccctgaaatgtctgccttttaaatataacacctactatttggttaaaa

SEQ ID NO: 52381 - DNA, 6418 bp, Homo sapiens
aatacaccccgggcaggtggagcgctcgcggctgctcgcggcgagcccgggagtgatggcgaggcccctgcgggcggccagcgcctgaggcgccccgccccgccccgccccgcgcggccctccccgcccggccctgccctgccctgctccctgccggcggctgcgggcgcttcctagtccgctcgggcggccgcccaggcgaggtgcggcctccgcacacggcgtgggggcgtaggcgcagcggggcccgccatggctgcgtcggagctctacacaaagtttgccagggtttggatacctgatccagaggaagtctggaagtcagcagagctgctcaaagattataagccaggagataaagtcctcctgcttcacctcgaggaaggaaaggatttggaataccatctagatccaaagaccaaggagctgcctcacttacgaaatcctgacatacttgttggtgaaaatgacctcacagccctcagctatcttcatgagcctgctgtgctccataatctcagagtccgctttattgattccaaacttatttatacgtattgtggtatagtcctagtagctataaatccctatgaacagctgcctatttatggagaagatattattaatgcatacagtggtcagaacatgggtgatatggatccacatatctttgcagtagctgaagaagcttacaagcaaatggccagagatgaacgaaatcagtccatcatcgtaagtggagagtctggggcaggaaaaacagtctcagctaagtatgccatgcgatactttgcaactgtgagtggttctgccagtgaggccaatgtggaggaaaaggtcttggcctccaaccccatcatggagtccattggaaatgctaaaacaaccaggaatgataatagcagccgttttgggaagtatattgagattggttttgataagagatatcgaatcattggtgccaatatgagaacttatcttttagagaaatccagagtggtattccaggcagaagaggagagaaactatcatatcttctatcagctttgtgcctcagcaaagttacctgaatttaaaatgctacgattaggaaatgcagataactttaattacacaaaacaaggaggcagtcctgtgattgaaggagtggatgatgcaaaggagatggcacatactaggcaggcctgcactttgctaggaattagtgaatctcatcaaatgggaattttccgaatacttgctggcatccttcacttaggcaatgttggatttacatcccgagatgcagacagctgcacaatacctcccaagcatgaacctctctgcatcttctgtgacctcatgggtgttggactatgaggagatgtgtcactggctctgccatcggaaactggctactgccacagagacatacatcaagcccatctccaagctgcaggccacgaatgcccgcgatgctttggccaaacacatctatgccaagctctttaactggattgtagataatgtcaatcaggctctccattctgctgtcaaacagcactcttttattggtgtgctagacatttacggatttgaaacatttgagataaatagttttgaacagttttgcataaattatgcaaatgaaaaactacagcaacaattcaatatgcatgtcttcaaattggagcaagaagaatatatgaaggaacaaattccatggacactcatagatttttatgataatcagccttgtattaatcttatagaatcaaaactaggcattctagatttactggatgaggaatgcaagatgcctaaaggcacagatgacacctgggcccaaaaattgtacaacacacatttgaacaaatgtgcactctttgaaaagcctcgtctatcaaacaaagctttcatcatccaacattttgctgacaaagtggaataccagtgtgaaggatttctcgaaaagaataaagacaccgtttttgaagaacaaattaaagttcttaaatcaagcaagtttaagatgctaccagaactatttcaagatgatgagaaggccatcagtccaacttcagccacctcctcagggcgcacacccctcacacgaactcctgcaaagcccaccaaaggcagaccaggccaaatggccaaagagcacaagaaaacagtggggcatccagttcagaaactccctgcacctgcttatggagacactcaatgccactacccctcactatgtgcgctgtatcaagcctaatgacttcaagttcccattcacgtttgatgagaagagggcagtgcagcagctgagagcatgtggtgtcctggaaaccatccgaatcagtgcggccggtttcccctcacggtggacttaccaagaatttttcagccgctaccgtgtcctaatgaagcagaaagatgtgctgagtgacagaaagcaaacatgcaagaatgtgttagagaaactgatactggacaaggacaaataccagtttggtaagacaaagatctttttccgtgccggtcaagtggcctatctagaaaaattgagagctgacaaactgagagctgcctgcatccggatccagaagaccatccgagggtggctgctgagaaagaagtacctacgcatgcggaaggcagccatcaccatgcagagatacgtgcggggctaccaggcccgatgctatgctaagtttctgcgcagaaccaaggcagcaaccatcattcaaaagtactggcgcatgtatgtggtccgcaggaggtacaagattagacgagctgccactattgttcttcagtcttacttgcgaggcttcttggccagaaataggtatcgcaagatactccgtgggcacaaagcagtcatcattcagaagcgagtccggggctggctggcccgcacacactacaagaggagcatgcatgccatcatctaccttcagtgctgcttcaggcggatgatggccaagcgtgagctaaagaagctcaaaatcgaggctcgctcagtggagcgctataagaagctgcgcatcggcatggagaacaagatcatgcagctgcagcgcaaagttgatgagcagaacaaagactacaaatgccttgtggagaaactaaccaatctggaaggaatatacaactctgagactgagaaactacgaagtgacttagaacgtcttcaactaagtgaagaggaagcgaaagttgccactgggcgggtccttagtctgcaggaggaaattgccaagctccggaaagacctggagcaaactcgttcagagaaaaaatgcattgaggaacatgcagatcgatacaaacaagaaacagagcagctggtatcaaatctgaaggaagaaaatactttgctgaagcaagaaaaagaagccctcaatcaccgcatcgtgcagcaggctaaggagatgacagaaactatggagaagaagttagtagaagaaacgaaacaactggaactcgaccttaatgatgaaaggctgagatatcagaaccttctgaatgagttcagtcgcctggaagaaagatatgatgacctcaaggaagagatgacccttatggtgcatgtgcctaagcctggacacaagagaacagactccacccacagcagcaacgagtctgaatatatctttagctctgaaattgcagaaatggaagacattccatcaaggacagaggaaccaagtgagaagaaggtacctctggacatgtcattgttccttaagctccagaagcgggtcacagagctggagcaggagaagcaggtgatgcaggatgagctggaccgcaaggaggagcaggtgctccgcagcaaggccaaggaagaagaaagaccacaaattagaggtgcagaactggaatatgagtcactcaagcgtcaagaactagaatcagaaaacaaaaaactgaagaatgagctaaatgagttgcgcaaggccctcagtgagaaaagtgccccagaggtgaccgccccaggtgcacctgcctaccgtgtcctcatggagcagctgacctctgtgagcgaggagcttgatgtccgcaaggaggaagtcctcatcttaaggtctcaactggtgagccagaaagaggccatccaacccaaggatgacaagaatacaatgacagattccacaatacttttggaagatgtacaaaaaatgaaagataaaggtgaaatagcacaagcatacattggtttgaaagaaacaaatagatcatctgctctggattaccatgagttgaatgaggatggagagctgtggctggtttatgaagggttaaaacaagccaataggctcctggaatcccagctgcagtcacagaagaggagccatgagaatgaggccgaggccctccgtggggagatccagagcctgaaggaggagaacaaccgacagcagcagctgctggcccagaacctgcagctgcccccagaggcccgcattgaggccagcctgcagcacgagatcacccggctgaccaacgaaaacttggatttgatggaacaacttgaaaaacaggataagacggtccgtaaactgaaaaaacaactgaaagtatttgccaaaaaaattggcgaactagaagtgggccagatggagaacatatccccaggacagatcattgatgaacccatccgaccagtcaacattcccaggaaagaaaaggatttccaagggatgctggaatacaagaaggaggatgagcaaaaacttgttaagaacctgattctggaactgaagccacgtggtgtagcagtcaatttgattccaggattaccggcatatatcctgttcatgtgtgttcgacatgctgactacctgaatgatgatcagaaagtaaggtcgttgctaacatcaacaattaacagcatcaaaaaagtattgaagaaaagaggtgatgattttgaaaccgtctccttctggctctctaacacatgccgatttttgcactgcttgaaacagtacagtggagaagagggctttatgaagcacaacacatctcgccagaatgaacactgcctcaccaattttgacctgggctgagtatcggcaggtgctgagtgacttggccattcagatctaccagcagctcgtgcgggtgttagagaacatccttcagccaatgattgtctcagggctgctgggaacatggaaacgatttcaggggcgtgtctgggggtgaaggccacagggtttgaggaaaggcgaacctccagtattcgccgatgaggggcacctacacactgggactccatcctccggcaggttcaactccttccactcggtcatgtgtcagcatggcatggaccctgaactgatcaagcaggtggtcaagcagatgttctacatcataggggccatcaccctgaacaaccttctcctgcggaaggacatgtgctcctggagtaaaggcatgcagatcaggtacaatgtcagtcaactggaagaatggctgcgtgacaagaatctgatgaatagtggggctaaagaaaccctggaacctctcattcaggctgctcaacttttgcaagtgaaaaagaaaacagatgatgatgcagaagccatttgttctatgtgcaatgctttaactactgcccagattgtgaaagtgttgaatttgtatactccagttaatgagtttgaagaaagagtctctgtgtcgttcattcgtactatacagatgcgtttacgagacaggaaagactctccccagctgctcatggatgctaaacacatctttcctgtcacctttcctttcaacccatcttccctcgcactagaaaccatccagattccagccagcctcggcctgggctttatttcacgggtctgaaagtgatgtccaggcaaaaattgacaatacatttcttgcccgaaataagaacccattatttccagtgagttactgaaaatacatttttaaagagaaagtactgattatctcccaaatgagaagtcattaactggaaatctccctagaatactttcatcactttggaaacaaagataggctctttcgtgctgtgttatctttatagcaacactcatccttaaccaactaggtaccgtgagtttacatacaggagaatgatggaaggaagggaggaaggaaaggaggagaaaaatgtgtcttcagctggcagcatttattttaaatccttagcactgagtttgaatggtataaaaagtataacttccatagatgagctgttgttaggaaggcaccaaagaacctcctctgcactaaacaggagaatggaaagaaaagtctccattgagtacatatcatgtcagtttagtaatcaattatgttgatattgttaaactggttcaaagaaataaactggcaatatgtaaagtaattcctcatttgtgtcactatgatatagagatattaaaggaatgttggtttgcta

SEQ ID NO: 52382 - DNA, 528 bp, Homo sapiens
gtgtgccacggaccacaatgtggacaacaccacagagatgctgcaggagtggctggcggctgtgggcgatgactatgctgctgtggtctggaggcctgagggcgagcccaggttctacccagatgaagagggtcccaagcactggaccaaagaaaggcaccagtttctgatggagctgaagcaggaagccctcacctttgccaggaactggggggccgactatatcctgtttgcagacacagacaacattctgaccaacaatcagactctgcggtttctcatggggcaggggcttccagtggtggccccaatgctggactcccagacctactactccaacttctggtgtgggatcaccccccagggctactaccgccgcacagccgagtacttccccaccaagaaccgccagcgccggggctgcttccgtgtccccatggtccactccaccttccttgcatccctgcggggctgaaggggcaagaccagcttgctttctacccgcacatcccaactacacttggcttt

SEQ ID NO: 52383 - DNA, 857 bp, Homo sapiens
ggcacgagcccaccatgaagggtttcacagccactctcttcctctggactctcatttttcccagctgcagtggaggcggcggtggggaaagcctggcccacacacgtggtctgtagcgacagcggcttggaagtgctctaccagagttgcgatccattacaagattttggcttttctgttgaaaagtgttccaagcaattaaaatcaaatatcaacattagatttggaattattctgagagaggacatcaaagagctttttcttgacctagctctcatgtctcaaggctcatctgttttgaatttctcctatcccatctgtgaggcggctctgcccaagttttctttctgtggaagaaggaaaggagagcagatttactatgctgggcctgtcaataatcctgaatttactattcctcagggagaataccaggttttgctggaactgtacactgaaaaacggtccaccgtgggcctgtgccaatgctactatcatgtgctcctgactgtggcctgtagcaaaaatcacagccagctgcatctcgtgggacctccaagctcctctgactgaacctactgtgggaggagaagcagctgatgacagagagaggctctacaaagaagcgcccccaaagagtgcagctgctaattttagtcccaggaccagacatccccagactccacagatgtaatgaagtccccgaatgtatctgtttctaaggagcctcttggcagtccttaagcagtcttgagggtccatcctttttctctaattggtcgcctcccaccagactcacctgcttttcaactttttaggagtgcttcctcacagttaccaataataaagaaagctggcca

SEQ ID NO: 52384 - DNA, 10997 bp, Homo sapiens
  misc_feature (1)...(10997): n = a,t,c or g
attattaaattatcaaaaagaaaatgatccacgctcttagttgaaatttcatgtaagattccatgcaataaataggagtgccataaatggaatgatgaaatatgactagaggaggagaaaggcttcctagatgagatggaattttagtcatccgtgtctcatgaagaatcagatgtgtacactaagcaaaacagttaaaaaaaaaacctccaagtgagtctcttatttatttttttcttataagacttctacaaattgaggtacctggtgtagttttatttcaggttttatgctgtcattttcctgtaatgctaaggacttaggacataactgaattttctattttccacttcttttctggtgtgtgtgtatatatatatgtatatatacacacacacatatacatatatatattttttagtatctcaccctcacatgctcctccctgagcactacccatgatagatgttaaacaaaagcaaagatgaaattccagctgtcaaaatctcccttccatctaattaattcctcatccaactatgttccaaaacgagaatagaaaattagccccaataagcccaggcaactgaaaagtaaatgctatgttgtactttgatccatggtcacaactcataatcttggaaaagtggacagaaaagacaaaagagtgaactttaaaactcgaatttattttaccagtatctcctatgaagggctagtaaccaaaataatccacgcatcagggagagaaatgccttaaggcatacgttttggacatttagcgtccctgcaaattctggccatcgccgcttcctttgtccatcagaaggcaggaaactttatattggtgacccgtggagctcacattaactatttacagggtaactgcttaggaccagtattatgaggagaatttacctttcccgcctctctttccaagaaacaaggagggggtgaaggtacggagaacagtatttcttctgttgaaagcaacttagctacaaagataaattacagctatgtacactgaaggtagctatttcattccacaaaataagagttttttaaaaagctatgtatgtatgtgctgcatatagagcagatatacagcctattaagcgtcgtcactaaaacataaaacatgtcagcctttcttaaccttactcgccccagtctgtcccgacgtgacttcctcgaccctctaaagacgtacagaccagacacggcggcggcggcgggagaggggattccctgcgcccccggacctcagggccgctcagattcctggagaggaagccaagtgtccttctgccctcccccggtatcccatccaaggcgatcagtccagaactggctctcggaagcgctcgggcaaagactgcgaagaagaaaagacatctggcggaaacctgtgcgcctggggcggtggaactcggggaggagagggagggatcagacaggagagtggggactaccccctctgctcccaaattggggcagcttcctgggtttccgattttctcatttccgtgggtaaaaaaccctgcccccaccgggcttacgcaatttttttaaggggagaggagggaaaaatttgtggggggtacgaaaaggcggaaagaaacagtcatttcgtcacatgggcttggttttcagtcttataaaaaggaaggttctctcggttagcgaccaattgtcatacgacttgcagtgagcgtcaggagcacgtccaggaactcctcagcagcgcctccttcagctccacagccagacgccctcagacagcaaagcctacccccgcgccgcgccctgcccgccgctgcgatgctcgcccgcgccctgctgctgtgcgcggtcctggcgctcagccatacaggtgagtacctggcgccgcgcaccggggactccggttccacgcacccgggcagagtttccgctctgacctcctgggtctatcccagtactccgacttctctccgaatagagaagctacgtgacttgggaaagagcttggaccgctagagtccgaaagaactccgtggatattccagctttcccacaagcactgatcattatgagccagttacttaaccgatctgagacactctcacctcctaaatagggatagatgatactaatttgcaggttgtcattatgataagacaggatctgatcaatatatgtgaattgtttatatttggaacctttttattgagtggaagaagttgttttaaatattctagtcagttctttcctgctcccaggaaagcccggattatgttttaagataagcaaaatgtcttaaaagtaagctgttttactttgaatttttccctaaatgttgattagtgtactagatccattttaatttggaaagtgaagtgctacttatttgaacttcttaaaaatgctaattttaacatctaaagagttaactaagaaaagcttagtaacatgatgtaccaagttgaatatgctgttatccttatttagaatagaaaattggtatttctacgttttatccattctaaggcaggttaaaaaattgtatttccatgactacctatatatttcttgaatttattattgtaaagttgattcatagtcaaacaattaaatgtttaaattaagattaagacactagagaatgatttatttgctgtcctttaattgcagcaaatccttgctgttcccacccatgtcaaaaccgaggtgtatgtatgagtgtgggatttgaccagtataagtgcgattgtacccggacaggattctatggagaaaactgctcaacacgtaagtttgtcctttggttgcctcattaggagtggggctggatacagttatcattgtatagatttgtgtcttataatgagtcccattaatttctccctccctttcttcgtcttcttgcagcggaatttttgacaagaataaaattatttctgaaacccactccaaacacagtgcactacatacttacccacttcaagggattttggaacgttgtgaataacattcccttccttcgaaatgcaattatgagttatgtgttgacatgtaagtacaagtgtctttctaaggtttttagccttctcaaagaaaaatatgctttataatactgtaagcctaatctaaaaacatatttccaagcttatcaaaaagactttaagatagcttttaagtttgccttccatcttaatcgccaaaaatattgacatttagtcccatccagtttatacagtctgctcacaactctgtatacctcttctaacctttactgtttggtcagtttgtggaggtagcatggtccagctgtttattgaatgcccatgggccacagaattgttctgaacatgtagcacccattaaaataaatttggatttggatcagcaagaaaataactttccatgattctaaagtgggtgccatactcagccattcctttcataggcctcttggatagtgagcagatggctacctgaaaaatcaatattgccagattataatgtgcagagtatatgtattttattaaagatgtatttcaagtggccattagactataaagtgtagttgtttaaaaatagattttttttattttggagttacattcaacctcaggtgccactttccacattttacaataaaaataatggttgatttacttaacaaatgagaataaataaaacatttttttctttgaaaatttcagccagatcacatttgattgacagtccaccaacttacaatgctgactatggctacaaaagctgggaagccttctctaacctctcctattatactagagcccttcctcctgtgcctgatgattgcccgactcccttgggtgtcaaaggtgagtaagaagaatccattagagatgtattaactataagacgggctgcattgctgccaaaaaaaaaaattgaccttagactaccatttatttattaacaaaagcagtttttacttttagcatggttatctatgggtattttttaaagtatgagtctatataaactattatgtaaaagcaaatgagcgtcttggtataatgtcttaatattttcaaattatttctttagaaatgaaataattctaattaaaatagataaaatcattcagtaagaagttgttccaccatatcttagaactgttgtttatattatgatcctattcacaattgtaattctcatatnnnnnnnnnnnnnnnnnnnnnnnnnnnnnnnnnnnnnnnnnnnnnnnnnnnnnnnnnnnnnnnnnnnnnnnnnnnnnnnnnnnnnnnnnnnnnnnnnnnnnnnnnnnnnnnnnnnnnnnnnnnnnnnnnnnnnnnnnnnnnnnnnnnnnnnnnnnnnnnnnnnnnnnnnnnnnnnnnnnnnnnnnnnnnnnnnnnnnnnnnnnnnnnnnnnnnnnnnnnnnnnnnnnnnnnnnnnnnnnnnnnnnnnnnnnnnnnnnnnnnnnnnnnnnnnnnnnnnnnnnnnnnnnnnnnnnnnnnnttggtagattgacagtcaccatctcctttcttgaatacatagatggattcttaccttagctttctcatttttcaggtaaaaagcagcttcctgattcaaatgagattgtggaaaaattgcttctaagaagaaagttcatccctgatccccagggctcaaacatgatgtttgcattctttgcccagcacttcacgcatcagtttttcaagacagatcataagcgagggccagctttcaccaacgggctgggccatggggtaagatagagttaatatcttagagttagtaaaattataccaaatcatagtcaagggctaacattaaaggagatatacagatagatagatccaaataacttatccactttttttaaaaagaagtcttatctataaaaaccttaaaggaattttccatttacttcactggtctagtaaaattatacacacacacagacatgcacacacatatataaacattcacacacatacatatgtacaggtattgttatttgtaatttgacccttgtattttttagtttaaaatgttagtactgcaaaatgttatgtcctcaaaaacacattgtaccatgattatgccgctttcaatattgtaaagtgaggtttttgccgcattattattttttggatttcaatagcatagcttcaagttattcgtaagaattttttataaataatacatttttatacttttttataattaccatatcatcatagtgaagtatataatatatatgatataagctcaatatagtatattaattccgttaaacacaaagacatatcagtttgtagctttggtggataaacaaattaatttagcaattcatggctatgaaaaatgtatattttatttaaaaattttaaagaaagctaaatgatcaaattatttaatgatgaattatatgatagacactttatataagaaaaacttcaacagcaacaaattaaaattttttcatcattttctaggtggacttaaatcatatttacggtgaaactctggctagacagcgtaaactgcgccttttcaaggatggaaaaatgaaatatcaggtatgcttcctttgactattaagacttagttattaccgcttatacccatattttaaaatccctaaaaatgtgttccttaactttttaactgatgtttatttatttatttatttttttagataattgatggagagatgtatcctcccacagtcaaagatactcaggcagagatgatctaccctcctcaagtccctgagcatctacggtttgctgtggggcaggaggtctttggtctggtgcctggtctgatgatgtatgccacaatctggctgcgggaacacaacagagtatgcgatgtgcttaaacaggagcatcctgaatggggtgatgagcagttgttccagacaagcaggctaatactgataggtaaacaagaaaatgatttatataaaaccctcttccccagggaaaattagtgtgctatctttgttatgttttgagtaatgacaagatgtggtaaatgaaaactcacacattctatatacattaaatatgtaagcatgactgataaaatagctatcttttgatactgacaaggaagaaaacagaaatgaaggaatagcaaattttaaaaattgcattccagttgcttgaaagcttgtgatcagatgcaataaatgtttttattatttattttgtgcaaataggagagactattaagattgtgattgaagattatgtgcaacacttgagtggctatcacttcaaactgaaatttgacccagaactacttttcaacaaacaattccagtaccaaaatcgtattgctgctgaatttaacaccctctatcactggcatccccttctgcctgacacctttcaaattcatgaccagaaatacaactatcaacagtttatctacaacaactctatattgctggaacatggaattacccagtttgttgaatcattcaccaggcaaattgctggcagggtaagcattattattgaaaaccaaaacaaaagactagtcagtaactttagaatttctgccacggaaattatttttcttaaacttactaaaagagtagttagttatattgctagtaaaattattttattgatataagaagcctaactttgtttgaaaagtctaaacttttagtctagtctacagttgtcagacaaatagcaaattgtacccctaccttaaaaatattttcaaaaagtatctataatcttataggaataaatattttaggcttgaatactagtgttatttttgaaatgtaaaaaggcaaattagttctaggctggtgtcccattgaattttaagcagagctcctgttgaaatgtaggtaagcatctttccagcaaataaaaattgtctccgctgggagtttcagttttacctgatttgtacctaaggcaagctgaatacaaacagtaaatatgcctaaaattctggttttacaactaattttactttccacaggttgctggtggtaggaatgttccacccgcagtacagaaagtatcacaggcttccattgaccagagcaggcagatgaaataccagtcttttaatgagtaccgcaaacgctttatgctgaagccctatgaatcatttgaagaacttacaggtaagaaacagtttctaaacttcttcgttttttgtttgtttgtttgnnnnnnnnnnnnnnnnnnnnnnnnnnnnnnnnnnnnnnnnnnnnnnnnnnnnnnnnnnnnnnnnnnnnnnnnnnnnnnnnnnnnnnnnnnnnnnnnnnnnnnnnnnnnnnnnnnnnnnnnnnnnnnnnnnnnnnnnnnnnnnnnnnnnnnnnnnnnnnnngnnnnnnnnnnnnnnnnnnnnnnnnnnnnnnnnnnnnnnnnnnnnnnnnnnnnnnnnnnnnnnnnnnnnnnnnnnnnnnnnnnnnnnnnnnnnnnnnnnnnnnnnnnnnnnnnnnnnnnnnnnnnnnnnnnnnnnnnnnnnnnnnnnnnaaacttcttaaaagaatcaggggtcaaatggaaacagagaagttggcagcaaattgagcaaaagaatcaaactgttttttattttgtgaagtttgacattggttgtatctctgtcttcatcgccttcacaggagaaaaggaaatgtctgcagagttggaagcactctatggtgacatcgatgctgtggagctgtatcctgcccttctggtagaaaagcctcggccagatgccatctttggtgaaaccatggtagaagttggagcaccattctccttgaaaggacttatgggtaatgttatatgttctcctgcctactggaagccaagcacttttggtggagaagtgggttttcaaatcatcaacactgcctcaattcagtctctcatctgcaataacgtgaagggctgtccctttacttcattcagtgttccagatccagagctcattaaaacagtcaccatcaatgcaagttcttcccgctccggactagatgatatcaatcccacagtactactaaaagaacgttcgactgaactgtagaagtctaatgatcatatttatttatttatatgaaccatgtctattaatttaattatttaataatatttatattaaactccttatgttacttaacatcttctgtaacagaagtcagtactcctgttgcggagaaaggagtcatacttgtgaagacttttatgtcactactctaaagattttgctgttgctgttaagtttggaaaacagtttttattctgttttataaaccagagagaaatgagttttgacgtctttttacttgaatttcaacttatattataagaacgaaagtaaagatgtttgaatacttaaacactgtcacaagatggcaaaatgctgaaagtttttacactgtcgatgtttccaatgcatcttccatgatgcattagaagtaactaatgtttgaaattttaaagtacttttggttatttttctgtcatcaaacaaaaacaggtatcagtgcattattaaatgaatatttaaattagacattaccagtaatttcatgtctactttttaaaatcagcaatgaaacaataatttgaaatttctaaattcatagggtagaatcacctgtaaaagcttgtttgatttcttaaagttattaaacttgtacatataccaaaaagaagctgtcttggatttaaatctgtaaaatcagtagaaattttactacaattgcttgttaaaatattttataagtgatgttcctttttcaccaagagtataaacctttttagtgtgactgttaaaacttccttttaaatcaaaatgccaaatttattaaggtggtggagccactgcagtgttatcttaaaataagaatattttgttgagatattccagaatttgtttatatggctggtaacatgtaaaatctatatcagcaaaagggtctacctttaaaataagcaataacaaagaagaaaaccaaattattgttcaaatttaggtttaaacttttgaagcaaacttttttttatccttgtgcactgcaggcctggtactcagattttgctatgaggttaatgaagtaccaagctgtgcttgaataacgatatgttttctcagattttctgttgtacagtttaatttagcagtccatatcacattgcaaaagtagcaatgacctcataaaatacctcttcaaaatgcttaaattcatttcacacattaattttatctcagtcttgaagccaattcagtaggtgcattggaatcaagcctggctacctgcatgctgttccttttcttttcttcttttagccattttgctaagagacacagtcttctcagctacttcgtttctcctattttgttttactagttttaagatcagagttcactttctttggactctgcctatattttcttacctgaacttttgcaagttttcaggtaaacctcagctcaggactgctatttagctcctcttaagaagattaaaagagaaaaaaaaaggcccttttaaaaatagtatacacttattttaagtgaaaagcagagaattttatttatagctaattttagctatctgtaaccaagatggatgcaaagaggctagtgcctcagagagaactgtacggggtttgtgactggaaaaagttacgttcccattctaattaatgccctttcttatttaaaaacaaaaccaaatgatatctaagtagttctcagcaataataataatgacgataatacttcttttccacatctcattgtcactgacatttaatggtactgtatattacttaatttattgaagattattatttatgtcttattaggacactatggttataaactgtgtttaagcctacaatcattgatttttttttgttatgtcacaatcagtatattttctttggggttacctctctgaatattatgtaaacaatccaaagaaatgattgtattaagatttgtgaataaatttttagaaatctgattggcatattgagatatttaaggttgaatgtttgtccttaggataggcctatgtgctagcccacaaagaatattgtctcattagcctgaatgtgccataagactgaccttttaaaatgttttgagggatctgtggatgcttcgttaatttgttcagccacaatttattgagaaaatattctgtgtcaagcactgtgggttttaatatttttaaatcaaacgctgattacagataatagtatttatataaataattgaaaaaaattttcttttgggaagagggagaaaatgaaataaatatcattaaagataactcaggagaatcttctttacaattttacgtttagaatgtttaaggttaagaaagaaatagtcaatatgcttgtataaaacactgttcactgttttttttaaaaaaaaaacttgatttgttattaacattgatctgctgacaaaacctgggaatttgggttgtgtatgcgaatgtttcagtgcctcagacaaatgtgtatttaacttatgtaaaagataagtctggaaataaatgtctgtttatttttgtactatttaaaaattgacagatcttttctgaagataaactttgattgtttctatacatctttgtcatatgacataagatttctctgaagcattactcttaaaccattatcttgcattctcctacctattcaaaactaggactggcccttcatgaaatggttttgccctcaattatatagaggcttcctagagtcactatttaaatctcataatccttattcactgcgacactgtgttggaaaatgtctagtttgtgtatctttacagaagatggcaaacaagcttattttcattgcctagtctagaagaagaagaaaaaaatacacaataaggcaaagaataagacatatattatgaagggggcacaaagttaagaagttcaaagaggaggaaattatacaaagttgggcaaatcattgatgcaaaagctcataggcttttgt

SEQ ID NO: 52385 - DNA, 1177 bp, Homo sapiens
  misc_feature (1)...(1177): n = a,t,c or g
tccttccctcccagaccactcgctggtgcacctgaatgaagttgagtctggttaccattctctgtgtcaccccatgaaccataatggcctgctaccatttcatccacaaaacatggacctccctgaaatcacagtctccaatatgctgggccaggatggaacactgctttctaattccatttctgtgatgccagatatacgaaacccagaaggaactcagtacagttcccatcctcagatggcagccatgagaccaaggggccagcctgcagacatcaggcagcagccaggaatgatgccacatggccagctgactaccattaaccagtcacagctaagtgctcaacttggtttgaatatgggaggaagcaatgttccccacaactcaccatctccacctggaagcaagtctgcaactccttcaccatccagttcagtgcatgaagatgaaggcgatgatacctctaagatcaatggtggagagaagcggcctgcctctgatatggggaaaaaaccaaaaactcccaaaaagaagaaggaagaaggatcccaatgagccccagaagcctgtgtctgcctatgcgttattctttcgtgatactcaggccgccatcaagggccaaaatccaaacgctacctttggcgaagtctctaaaattgtggcttcaatgtgggacggtttatgagaagagcaaaaacaggtctattaaaaagaaaaccgaggctgcgaagaaggagtacctgaaggcaactcgcagcatacagngcccagccttgttttccaaggagctacagtgaacctgtttgacgtgaagacatctcaacctcctcagctgatcaattcgaagccgtcggtgttccatgggcccagccaggcccactcggccctgtacctaagttcccactatcaccaacaaccgggaatgaatcctcacctaactgccatgcatcctagtctccccaggaacatagcccccaagccgaataaccaaatgccagtgactgtctctatagcaaacatggctgtgtcccctcctcctcccctccagatcagcccgcctcttcaccagcatctcaacatgcagcagcaccagccgcttcaccatgcaggcagccccttggggaaccagcttccccatggcaggtccagtctgccttacactcacccaccatgcag

SEQ ID NO: 52386 - DNA, 591 bp, Homo sapiens
ttttttttttttttgctgctaaatgaaaagcaggtttggctttattcatgttactgtaaaaactaaataataaagtattcacaccaagcgtgaatttttttttgccagcaaaagttaaaacatcaaagaaacctctttcaaatactaacaaatttacttacaaacacctatatttattatttcataaataggcgcaacaggttccataaaaaaagattaaatacagacacagtatgaagaaacaataagacagagccatatgtaaaagttgtaatttagctgtttccaatctgtttctgcatctaataaaataccaggtaagcatttggcagttttatacataaaaggacttaaatgacatttactaaccattacacaaaaagtgatacaaaaaagcaatttttctgcagtacaaaataaatgtgtttgcgcttcccttaatactagtttctttttgtctgatcaatgagacaaagccaatttgtttttaaattaaaatcacttgggaatactttttattttcaaatattttgaaaatatagaactatcagtcagttgttttaaaaatgaagtaaaaatatgaatgtttgc

SEQ ID NO: 52387 - DNA, 1277 bp, Homo sapiens
tttttttttttgtatttcagtaaatttatttttttcaatcttcagatataagaaggcttttccatgaaaaacactctatttatgtctcactatttaattatctaatgttatataaatagtcacatacagaatgaagaatcagagccaggcacattatagaaaagaatctgtgacttcctaatcttgccatgagtagcaagttattctaacagtttaatcatggaattattcaaatttgctctgttaacaaattgaagactttcaatcaaatatgtaacattgctgaaatgaagaaatatttccagtataaattggactgaactgataaatcaatgctttctcctcttcagattcagatttaaaatgatggttgtttttccgagcttcattaacaaaaaactctgctaaataaaatgcggttttcacagcattaggtgcatgggaaatgccatccaaattcttccactcataaggtgctttctctggatgccactggacaccatatactggatacttatatccttccattgttgaaataaactcaatcttgccatctgtatttgtagttaagacattgaaaaacttctttaacttttcattcattgtaaaattcttcacggagaggctccacttatggaaattggcagtcagaggttctactgctaatgacagcaacaactcagtaggaaaattctggaacattctgctgtgcaattgacctccagtgaagttcagcggcattgccacgtcaacagtatctgtggcagttaataagcactctccactaatcagcagtgaaagctcttcaaatccaaggcatgtgccccacacaggaaaatagtctccatcatcaaaactctgtatggacaagttataaaatattttggccactttagcataatctgagcgtctgaggtcaacacttcctccagggaaaaggattccattaatagatttgaaaagtatttcatagtctttctctgtaagatccagccttactggtacaactctcgcacctgcagactccaagtactttacataggacgcagcaatatagtatcttccatagtttttcatgactttattacggcatttttgcattaatattccgatgatgggcttcttggcggtgtcgccgtggggtctagacagctcgaggctcgccgccccgcagagtagcaggcccagcacgcacagcaggcagcccggactggccatggcgctcgccgcctcccgccgcctttcaaaagctctgcgggcgggcgggggctgcggca

SEQ ID NO: 52388 - DNA, 405 bp, Homo sapiens
cagggctcacactgctcacagcatcaggggtcagccatcttctcttgaaaccccgtgagttgcaggaggccctgttctgtgctcctcatttcaatcccgggatcagtcaagtctggagccaaggaggcggttcacacgggtcttccctggaaggagagggcgatccgcagcagttcctggcccagctcttgctgcctccctccagggccaaactcagccgacagctcccggaaagtgacgcagacgcggcgggcctcgatgtgtctgcggtggatggcatgcttccactggtgccgtgccgccccggtgaggaccagcagggagcgggcgggtaaggggatggccacctccacctcctggcatagcacccacccggtgggtgctatgccaggaggtggaggtgct

SEQ ID NO: 52389 - DNA, 1584 bp, Homo sapiens
aaggtgagcgactgcaggcaaacccggcgacagcgcagctcgcgtcgaccctggctcctctgcctgccccctcaggcccccgcctccttcaggatgacgctggacgtggggccggaggatgagctgcccgactgggccgccgccaaagagttttaccagaagtacgaccctaaggacgtcatcggcagaggagtgagctctgtggtccgccgttgtgttcatcgagctactggccacgagtttgcggtgaagattatggaagtgacagctgagcggctgagtcctgagcagctggaggaggtgcgggaagccacacggcgagagacacacatccttcgccaggtcgccggccacccccacatcatcaccctcatcgattcctacgagtcttctagcttcatgttcctggtgtttgacctgatgcggaagggagagctgtttgactatctcacagagaaggtggccctctctgaaaaggaaaccaggtccatcatgcggtctctgctggaagcagtgagctttctccatgccaacaacattgtgcatcgagatctgaagcccgagaatattctcctagatgacaatatgcagatccgactttcagatttcgggttctcctgccacttggaacctggcgagaagcttcgagagttgtgtgggaccccagggtatctagcgccagagatccttaaatgctccatggatgaaacccacccaggctatggcaaggaggtcgaccttctctttcccagctgggcctgtggggtgatcttgttcacactcctggctggctcgccacccttctggcaccggcggcagatcctgatgttacgcatgatcatggagggccagtaccagttcagttcccccgagtggggatgaccgttccagcactgtcaaagacctgatctccaggctgctgcaggtggatcctgaggcacgcctgacagctgagcaggccctacagcaccccttctttgagcgttgtgaaggcagccaaccctggaacctcaccccccgccagcggttccgggtggcagtgtggacagtgctggctgctggacgagtggccctaagcacccatcgtgtacggccactgaccaagaatgcactgttgagggacccttatgcgctgcggtcagtgcggcacctcatcgacaactgtgccttccggctctacgggcactgggtaaagaaaggggagcagcagaaccgggcggctctctttcagcaccggccccctgggccttttcccatcatgggccctgaagaggagggagactctgctgctataactgaggatgaggccgtgcttgtgctgggctaggacctcaaccccagggattcccaggaagcagaactctccagaagaagggttttgatcattccagctcctctgggctctggcctcaggcccactaatgatcctgctaccctcttgaagaccagcccggtacctctctccccactggccaggactctgagatcagagctggggtggaagggagccattctgaacgccacgcctggcccggtcagtgctgcatgcactgcatatgaaataaaatctgctacacgccaggg

SEQ ID NO: 52390 - DNA, 377 bp, Homo sapiens
ctcgcttcttacctcacataattcctgccttaaaatgtttaaaagtaggaaaagccctttgtttggggctcagactttctggacatatgtccagctgggccagtgatgaccttaatagactctcctgaaccttttttggtctctccagtctttgattgtcctgtaacatttctgggggcttatccgggattggagatggcagattttctgtcttctttgcctgtgggctagagccccaggatgtgggagatctggggtccttggcaccgctgggagagtttcagcctggaaggagaatggccctcccgcattccagagccttcccctgacagcaccaaaggaaccagtggaaagggttgcaggacagtcacaggagc

SEQ ID NO: 52391 - DNA, 769 bp, Homo sapiens
ccttcacacttctataatttaactctctcaactgcatgtgaaagatcttagctgaagatgactgacagtgttatttattccatgttagagttgcctacggcaacccaagcccagaatgactatggaccacagcaaaaatcttcctcttccaggccttcttgttcttgccttgtggcaatagctttggggcttctgactgcagttcttctgagtgtgctgctataccagtggatcctgtgccaggagcctgctccaagttttcctcagtgaggccttttgctggattggtctgaggaacaattctggctggaggtgggaagatggatcacctctaaacttctcaaggatttcttctaatagctttgtgcagacatgcggtgccatcaacaaaaatggtcttcaagcctcaagctgtgaagttcctttacactgggtgtgtaagaaggtcagactttgatagatgaccactctgtcctgaccctcagatctgtcatgtatccctaaaaggagggagctggccactggctgttgggaaagccatgagtatatagttagcaaatactgaactttctcagatatggcattagatgcaagacaacctcctagggattgatgcctaactgatggattctctttgagactatttagatattatgtgagcaatttaaagaccagatctaagcaaattttgaaatagatgtttgttttttgtatttctcagtatggaaactaatgctgccactctcatccccgtcccaaccatctctgt

SEQ ID NO: 52392 - DNA, 4519 bp, Homo sapiens
tccttctttttatttccactgccttggagcaggtttatcacgttagagcattaattctttccccttctagggcactgcatcagagcatgggggacagaacaaagaaccagccaagaagaaaaggaaaaaataaatgaaatgcctgagttaatgtgaactttggggcttctgcttcatttttacccaacaagcaacaatgccccttgtcctgtagaaataaatgaaatgcctgagttaatgtgaactttggggcttctgcttcatttttacccaacaagcaacaatgccccttgtcctgtagtccacaccgatgttggcatcttggttctgaacccactgaattcaactgcaccttcagttagaaggaatcttcttggcaggtcctgctactgaaaaatggctggccttaggcaagcccttttgcaaaaagcacagctgaaagcctgagtttggggagcctgcacccaccccgatgaagctccacgggagcaaatacagagcctccaggcagtgctatggtccaggctggcttcgtttttccaaggagcctttgggtgagttcaattatctggtaaatatccagcgcttcaccctggggaatcccgtatctcctttccatcccagttgggttggaaggggttttacaatccatggtcacttccttcctgaggcaccggtcaatatcgactgcactgaaaaaggcgactgactggggcaagtcattcagacccagcttgtaggcaaacatgcacctggtcaagaggttggtgatctgcaaggccagggcagcgcggtagcggtcctcctcccgcaccaggtagcgaacctcgtcatggatgctgatgcagaagcgcccatctatggcaaactcttcaaacagccacttcatggccacaagcatgaggtgtaagtagtcaacagcagagctctgtaccacccaattcacacggctggtcataaactcttcctggacagccgagggctccagggctcggctgatgcagcagcccagcaccggggtacgtggtatgtcagacgtagcaatgctctcaagcttattgaacatttctgactctgtgccccccttccatgcccgttcagcaaccacctcccacttcttccactgtgacttccttgcagtttctctctggaccttgcgcagatcctgccagggaaatccagccaccctcagtcctgtccactgggaggttcaactccctcaccagccactcgccctcatccgacagccgataccagcggaggcccttggtggcagcgtacatctgctgggccttctcagctgcctcctgctgtgtgagccggtggttaaactgcattagtaagcgctcagcaaagggctgcccagcaccatagatgcggccgtagttgaagattttggcatgctcacggctgatgcccacagtagtggctgtcttactgtgtagatcagtgcccctgctcttcctgccctgcagtgtcatccacccaaaggctgtgcagccatgcatgccggcaaagtgggcgtctccaagcacagctgcaatccacagctcttgggagtccacatcagcacccacaagggtgtagccaggtggggcctgcaccatggctttcaactcactgcctactcggtcaggccgggcattgctggcggtgagccatgtgggctccacagcccggcgagtgatggtgccggcagtcaccacttggggcaggatggccccatagaggccttcctcatcatagtcggggtgcctgatcacagcacggggcagagctgacctgggcagccacaccaccatctgggagctgatacgtttatgggcgttcctccagaaagaaatcattttgttgatttccagagcacggggcccactggcacctcctgggccagcctgcagggtgccatcctccatcttgggcaggaagtccttggcaaaggggcttcccacattacagctattaccatccttgtgaggcagcttgaaaaaccagcagccagggatgtccacgtcgttgtaaggtccattgccatggtgatagctgggctgggtgtccttggggccaccacgggcagtcagagctaggggttgacctggcactgcagctcgcaagttctccatcttggcctcagcctccacttctaagtaatccagttcttctaccgtttgccatatggcactattgtcagtgagcaggaactcctccgccaggccggcctcctggggcatcagctgctgcttcccctgttcgagacagtgcttcctgtacagggactcgatggctctgtaggggcagaccaccccagctgactccagggtggtacctgtcggcagcttggccaggttgtcccgccgcccaggcaccaagtagccccagccatgacgctctgagtagtgcagagggaagccatcccaggtaagtgccatgagtttaggtgtgacccgcatctgcaggctgaggaggctggggcccggggtccatgcagggtcgtctagccgggggcagagcttccggtaccatccagggtgtccaggaaggtgctggggccgcttgggcaggagctctgtggtccccttcagcttctgcaagcaggcgcgggccatgacatcttgttgaaactcctcctcctcactgcaggggccgaggtcttcctgatccatgggatcaccaggggccccagccccctcgatgggcaacttgctggctgtggctggttccttcttcaccttcttagctttcttctgcttaaattcttgcaggtcccactccaggtcccagagccaggggtcttctttgtacctctctcctgagagcagctggcaggcatcattggccagatccatcaacgacttcttcatctcccgctggagctcctcataagtgccctgtgcctctgccaggtaacgctcccagttctggttgacaggcaggtaggagacacccatctccagcatgccggccagagtcactgggtggggacacctctccaagaagagcggtagctgctgctggaaaacctcatgggtggcccacacgtcctgggcacagtactgcatcaggtcctggaagttctcacgaatgtccttcatggtgcccttcacaaacagttctcgaggctccttctctaagggaggcccccctacataaagtctgtgcacctctgccagactgttgacactgctgatgtccagccagtcccaggatgagatcgctgggccctcttctggctttcctctgggacttctggccttgcctttgtggggggctggaccttgtgtttgccctgcttggctgctatccacagactgcgctggaagctgcttagccctgagatggccatgtgcatgctcatggtgtccaggaaacgcatgcgggaaccctggatcaggtactgctccctgatatgagctcggtcaaaggaaacattgtgccccaccactaactgctcctgccagtctctctgggtggggctgctggcaccagtagggacctccagggggatgaggtcagccggcgacagctggctggtccaagagtaacgctcttccaccagccgctggctgcaccaggaataccaggccgagggggatatggccaccgccaatgtggggcaagttccctctgccaagcagacctccacgtcgaacaccagggcccgctcctcggggatggccacgggtacggcctccccctcggggccgtaccgggtccagccctccgcccaggcccaagccgggggcttcgggggcagctgggcctgcaacagcaagttggccgcctccaggtagggcaggctctgcttctgggccaggaggcggaagtgctggtccaggttgtccccgtagaggggcggcaggcgcagctccacgtcgggcaagggcacggctggctgcccccagagcccgtgcttctgcaggtgctcgacgctgcggcgcaccgcggcctcgccaggcatctcccctccttgcccgaagatttgctcgtgcagccctctcgagagcatctggatgtccaatgggttgtgccgcagctgcccgccctccgaggatagcacttgcggctgctgaggctgctgttgctgctgctgctgctgctgctgctgctgctgccgccgccgctgcccgtcgctggggtcggacgcggggacggagctggagacccagcgccccggagctggaaccggccctggcccgacggtggcgccggccaccttcctccagagcaggcggctcatggttggtgcagggacccccacgctgggagtcagaacacctggctttgggctccagcttggcttcttttactggctggaagacgtggagagagacacgtcctgtctctgctctcctgtcagtgaaatgggtttgaccatgcctgccttccaccccaaatcctcggtcctcacggtgcttcccggtctgctgctcccccgaccccaggcccacggcacggcgtcccccttcgcgcggcctacgcagcctcggggtagcgtgtggcctccacccggccggtccgc

SEQ ID NO: 52393 - DNA, 1787 bp, Homo sapiens
atagataccacagacacatgtgtttcatttttagttttgttaaaaaaaaaattctgacaaatcagaaatgggggttcaggagtggtggtgatgcaaaagatggaagccatggggtgggggctgtcaggggtgggggcagtagtgtctccttcacccccaccctggtgtcctctcctgaaggacagacggtcacattccaaaatgggcgagtcttctaccgtgtctgttcaatgtaggaggagatgtctatctcatcaggcagctcactaatattgacctcaaagcgatcctgcacatcattgaggatcttggcatcattctcatcggacacaaatgtgatagcccaagcccttggtgccaaaccggcctgctctgggccacccgatgcaggtaggtgtcagaatcctcagggcatgtcataattaaaagcaatgttcacccgctcgatgtccatgcctcggccaaataggttggtagccacaagaattcgtcgttgaaaatctttaaactgctgataccgagaaagcctctcctcctggggcatcccacggtggatggcaatggctgggaagttctgctccactagtagctgggccaaggcaatgcaccgctgcacagacttcacaaagatcaccacctggttgaactcaaggacatccagaaggtcaaagagcttccggttcttctcgttgtccttcagtttcacgtagtactgctgcaacccatgcagcgtcaacttcgtctcatcatccacgaagatctccattggatcttgcatgaacttgcggcagactggacggatctctttgctcaaggtagcactgaacatcatgacctgcttctcgtggggggtcatgcgaaaaatttcctggacatcccgacgcatgtcgagctgttcaagcatcttatcacattcatccaaaataaagtgtttaatgtgtttgaggttgaggctcttatttcgagccagggctaggatacggcctggagtccccacgacgatatgcggggcagttcttcttcagcacctcttcatccttcttgatagacagaccaccaaaaaaaacagcaaccttgacattgggcatgtatttagagaagcgctcatattccttgctgatctgaaaagccaactcccgagtgtgacacatcaccagtacagacacctgcccagtaactggctccagctgttgcagtgtggccaagacaaacactgctgtctttcccatgcccgacttggcctggcacaggacatccattcccagaatggcctgagggatgcactcatgctggacttctgacggatgctcaaagccacagtcgacaatggcccggagcaactctggcttgagcaggaagtcacgaaagccagagctgtggatggagacataggagcccttgacatccttcttggcaggggcctcagccccatctcccccagctgctgtctccacctcatcatcttcatagtccaagaaccatgatcacgaaggtggttttcccagggcgaggcttatccattgcactccggatgtgctgacccctgcgatttccccaaatgtgggaaacccaactgcacagtttgtagtagtgggtgactgtgttcatgcgctcccctgaaaacaacaacaacaacaaagaatcagaagagatactaggctgtctaattcctaaatccaaacctgatatttctaagtaagattataagaatttttattgcattttctgaatttggcttttgcataagttatgttatttttacagggtattgaagctcatggtgctag

SEQ ID NO: 52394 - DNA, 193 bp, Homo sapiens
ggtactttaggcagtaaacactgcttggtttatcattttgttattaaattagaacaagaacatcaaatggatttgctgcactagttattctttgtactgttgagcaacttggtgtgcttatatgttgtgttggttgaagaactcatccgttatattgtcttgaaatatgaagttagagcgcctttgtatattt

SEQ ID NO: 52395 - DNA, 1414 bp, Homo sapiens
  misc_feature (1)...(1414): n = a,t,c or g
gcagacaggacagcatggagcccagcgacctctgggatgatgtgtctaactgtcggtgtggggagaggctgaagaccctagagcagagggcgcggaagcagcaccagaggtgcctgggcacatttcactggtggggactccaaactacattcgcacccgaggtcttccttccgcaaagggtacactcaactctgtgactggtggagtgttggagtgattctcttcgagatgctggtggggcagccgccctttttggcacctactcccacagaaacccagctgaaggtgatcaactgggagaacacgctccacattccagcccaggtgaagctgagccctgaggccagggacctcatcaccaagctgtgctgctccgcagaccaccgcctggggnaaattggggccgatgacctgaaggcccaccccttcttcagcgccattgacttctccagtgacatccggaagcagccagccccctacgttcccaccatcagccaccccatgggacaccttcgaatttcgaccccgtaggattnaagtaaagcccttgggaacggttgccaggcgaaggttaggcaccaaggcctgggacacactcacctcgcccaataacaagcatcctgagcacgcattttacgaattcaccttccgaaggttctttgatgacaatggctacccctttcgatgcccaaagccttcaggagcagaagcttcacaggctgagagctcagatttagaaagctctgatctggtggatcagactgaaggctgccagcctgtgtacgtgtagatgggggccaggcacccccaccactcgctgcctcccaggtcagggtcccggagccggtgccctcacaggccaatagggaagccgagggctgttttgttttaaattagtccgtcgattacttcacttgaaattctgctcttcaccaagaaaacccaaacaggacacttttgaaaacaggactcagcatcgctttcaataggcttttcaggaccttcactgcattaaaacaatatttttgaaaatttagtacagtttagaaagagcacttattttgtttatatccattttttcttactaaattatagggattaactttgacaaatcatgctgctgttattttctacatttgtattttatccatagcacttattcacatttaggaaaagacataaaaactgaagaacattgatgagaaatctctgtgcaataatgtaaaaaaaaaaaaagataacactctgctcaatgtcacggagaccattttatccacacaatggtttttgttttttattttttcccatgtttcaaaattgtgatataatgatataatgttaaaagctgctttttttggctttttgcatatctagtataatagggaagtgtgagcaaggtgatgatgtggctgtg

SEQ ID NO: 52396 - DNA, 912 bp, Homo sapiens
ttttccggatttttctttaatacagttgccatcttacatgatgtactattaagtgccttcttaatagcatctaacctacccttctgttgcaccgtttggcctcctgggatggaactcttgttaccacccatgtttgtggagtactgttcttcagtacagtacacctaattcatattgtcaggccatataattcacgggtagtggtattaatttctaaagctgaattaaagcacacatccaaaccacatatattttttacttttcaacttaaagagttcatacaaagtctatttcctttctacagtagctatcactccagactgtggtttaaaaatccaagaagtgggaagaatgtctttgttttcaatgcttctttcttccatcctttttctatcctccttttttccttctttccattttctttcttctattcatctccttctttcctttctttcttagtgataagaggttaacagaaatgggctattaaggaaatcaaagtctagtaaacgtccaaaacagagatgagaatagtcacaaactcttctttttgtagtgatgttaaattactgacaaatgtttctttgaaaacaaaaaaatctaaaaaccagcacaagctagtggtgctgcatattatttaagcaactggcgttcttcaatgcttttgaggcgtttcttccggggctgtacaaagtcatcatctgaatcatcactaaatttattatcttctgattcattccctgaattcctggtttgggaaaccttttttctggatagaggttctttagaagttcttcaaaataattttcaagttttataccagcattggctacttctgaatcaggctcattgaattcagcacagttttgaaagatcaatctaaaatcagctacaaaatcttcaggttttgag

SEQ ID NO: 52397 - DNA, 1350 bp, Homo sapiens
gagcccttgcacgcctgctctcttgtagcttctctcagcctagcccagcatcactatggtggacgctttcctgggcacctggaagctagtggacagcaagaatttcgatgactacatgaagtcactcggtgtgggttttgctaccaggcaggtggccagcatgaccaagcctaccacaatcatcgaaaagaatggggacattctcaccctaaaaacacacagcaccttcaagaacacagagatcagctttaagttgggggtggagttcgatgagacaacagcagatgacaggaaggtcaagtccattgtgacactggatggagggaaacttgttcacctgcagaaatgggacgggcaagagaccacacttgtgcgggagctaattgatggaaaactcatcctgacactcacccacggcactgcagtttgcactcgcacttatgagaaagaggcatgacctgactgcactgttgctgactactactctgccaatcggctacccctcgactcagcaccacattgcctcatttcttcctctgcattttgtacaaatccacgaattcttctggggtcaggtgccactgaccgggatccagttccagttcccatggtgtatgtggttttttttttttttttttaactgcactcatagggtgctctgaggtcaataaagcagagccaaggccacccagttgcctttttgcctttggtaacataactctgggagtcttggtttatcctgtgtgtcagagagtgggcagaaataacggcctgaaggttactgaggaagaagcactggatgggagactgaaatggacagtctcggagcctgttaatcagctgatcaccttacacatttaataataaaagagctgtacctacacgttgcctttacactgccccccctccatggtcaaatgacctagttcagtcagtgatggggcttccccaggtttggctattgaactgtcacttcaggcccatcctacactgaaagctcttgggtctggctgttctctgtgaaatgctgtagtctctccctttccagaattcaggttcagggcacagaacccaggcttgtaccatggtggtgggagaaaatgaccactggccaagaggactgctgacctgtgcaccaggctagtacttatgactacaaattcttactgcttctctaatcaactctgagggaagagggcatctgatcattacaaaagggagggcttataagtgatctcccaagaaggcagtgatctgctagtgcctttggctctgtacctctgctgggcatctctccaaggtctaaggtaacatattaaaatgtttttgtcagctaatgcaggctcagtg

SEQ ID NO: 52398 - DNA, 362 bp, Homo sapiens
  misc_feature (1)...(362): n = a,t,c or g
gggttccttaagaaactaaaagtacaattactatatgatctagcaatctctacttaggtatatatccaaaggaattgaagcagtatgttgagatcttgcactcccttattttgaaattatttacaaagctaataaatggaaaagacttaagttttcataacagatgaatggacatagaagatgtgttgtatatacatattggaatattttttatccttggaaaagaaggaaaattgtcatttgtgacaacatggatgaatctgtagtatactatgctaagngntgangacaggcncagagaggctntactacnttatattngtangtggantctnanannggntnctcntccnnnnnaacgt

SEQ ID NO: 52399 - DNA, 503 bp, Homo sapiens
ggtttctagaagaccattttcctctgcctgatagaagtgttaaaaagaaaaagaaaaacattcaagaatcatctgtaaacctgataacactgcatgaaatgttagagattcttataaatagattatttgatgttccacatgatccatatgtcaaaattagtgattccttttggccaccttatgttgagctgctgctgcgtaatggaattgccttgagacatccagaagatccaacccgaataagattagaagctttccatcagtaaaaggatgttttcttttttcacacagtaaaaattcttatcattcaaggatattggaaccacaggactatttggataaaaaacattatttgcaaattaatgcgcataggccatcttacttttattgcaaaatggcatgtgctgccatctattattcatttttaaatggtcatttcttattcagtgagtgctttagtgttttaaactatatggataagaatgcaggtaggataatattct

SEQ ID NO: 52400 - DNA, 393 bp, Homo sapiens
ccagaaggggacttaggtcatcataggcactcaggaaaacttcctccccattttcctcctcaacttcaggcctggggccagcggagtccacggaacagcagctgggggccaagacaaactgtgcctcatccagagacaggtcatccaggggtggctccacagagaactcctccacctgaggcccaactcccaggagctcctccaggtagcccatcccagggtcgtcctccccaggggagaaggctgctcctgctgcttctgcctgggccacctccccatcctctgcccccacccactcaggttctgagctgcttgagtcctctaggaaggagaaggagtcctgcacctcctgggacagcgagtcctccagggcaggagccaagtcgtctgggc

SEQ ID NO: 52401 - DNA, 392 bp, Homo sapiens
cagatacatgctactgcacccagctaggttaaggttctgtatactctgtctttctaaagcaattccctggaaattttctcaacattggttataactgaatgcttgggaagggaggggcagcccttcaacaggaaaaggggactgcccaaatcttaaatgcacagtcaagattctcttggagctagcaatggttctcaggttagtgagcatttagcttgcctgctgcagaatttgacccagatgggggtgttttttaggtctctcacaaatgagacaagcgaaacaattgtctccttttattctctttggtgcattggtgctggggaaacatgaactagcggcagtgtaactgcagaacatagacccagttctaccaggccaggccagcgttg

SEQ ID NO: 52402 - DNA, 677 bp, Homo sapiens
  misc_feature (1)...(677): n = a,t,c or g
aattgtattaaaaataagtttattgatatcttgtcaccactgggagaaaggagggggttgagctctggaagtcagagacagcaatggtaggcagagaacccaacctgtacctctcccatcagaactcggcgcctcctctccctggggtatacacggctatatcctctttgtcatccgtattttgatttgtcttacaactcccacccgctccaaagtctgggttggggaggtggggagtcccccacgggtcaattctcttcaagtcaagaacaggaactgttagggaaggggagatgtgcagacccgagaggttccctccccaccccacatagggcaataataaataacatgaaattgatggcttagaagtcagggttaagggaggcagccaggcagacagcactgtaccagagaaaggggttgggggggcccattactgaggccccccccagagaatcaggcactaactagcacagggagtgggtgctcacatccctggagcagggagctagggtgcagctgggatgggcagagagcatcgcccccctcgactgcgccaagctggggagaggggttgcaggcaggatcatagatagtagatttcacggagatttccatcggccgcgccttttccgtgtagggaaaccttttctccgcttgtgtggggnggantcgtg

SEQ ID NO: 52403 - DNA, 422 bp, Homo sapiens
  misc_feature (1)...(422): n = a,t,c or g
ggtggggcagaggctgacgttttcatttgtgagctggtgtatcttcggaattatttttaattttaaaaccatgcaaaatgaataagcaaaaagactagtgcactccagccctaaccatattatcttcacaaaaactgcctcaactttattttctaactgaagctccctgactcatttcattctactgcagttttaacatctctaaaagtctccatccactctctcccccactttccacgcagctgttaatccattctggggaggagagaacttagccatctgctcacattctgactaaagttaatttggcacttcaaataaaaaaaaaaaaaaancacacaaaactgactttctagccacaaantaanctaggtngcaaatggtatctaccaaggantgtcccngtcataatcattggggga

SEQ ID NO: 52404 - DNA, 180 bp, Homo sapiens
  misc_feature (1)...(180): n = a,t,c or g
ctctcttaagagtaggttcattgtctgtcttagagtcacttctattgcaactcattttctttttccagggcacagatcgaccaagctgccgttccctattctgcaggacaggactattctagcatacctgcttccgtccacccaggccagggtttggggtgggtntcttctcgtngggtg

SEQ ID NO: 52405 - DNA, 417 bp, Homo sapiens
agcatattttaatacatgtttaggttaattcattattgaaaaataggagtcttcttttcattgcagcaaacaaaagtcctttcacaatattggtcatgggccgttcaaatccccaaatgctgaaactcctctgagggatgcgctggcgacaggatgccctgcgcggggcggcggagcgggtgcgtgcggcggcggttgcgagagagatgagccgcggcgatgagcccgggtaagagttggacggggcggggctcctaggggagccgcgggaacggagggcagcagaagggcattcagcaggcggctccccgctcgaaaacccgggacatcccgggtccgcccttctgcactcgccgcacatctcccgctcggccctagggctgagcacccgctgcggccccctgcgtccgctgtggc

SEQ ID NO: 52406 - DNA, 700 bp, Homo sapiens
ttttttttttttttttttctgcccaagtaactttattcgtgtcttctcaaacatttcagatcaaataatgccattttctaatcttgaaaccagcaagattagaaagagaatgaggccatcctttcactcagactttcccagttactcaagattgtattcaggaacgaagtcaaacccggcctcacttcttaattagaataaactagaatcaggtccattgcataactgctaattgttttgcaccagggagccacaaaggaagctaaaactagcctttctaagttatcctaagtttttactatctaaccagcacttctgatttttttttcccttaaaactctaaagtacaggtgttgtatgtctgccgcatctgaaaggctgccccggaaatcagagcctatctagcgggaatgtctgggcagtcacccccatcctgcgcgcagatagcaaagggctgctggcaggtgtcagacacacggtaccgcaacagcagtcccgaggtctgagattctgaatgtcagcaggtggctggagagtatcaccagagccactcaggaaccagccatgcggaatggctgggtttcttattgaacatgaaatgcttcctctttggcctggactgttttgctaaaattgttagtgggttttggggcaggccagtgtatgggaaactttttttgttgttgagggggggcgatgg

SEQ ID NO: 52407 - DNA, 122 bp, Homo sapiens
cttgcgtcctggctactgagggtttcacctcaggtcgacactactgggaggtggaggtgggcgacaagacccactgggcagtgggtgtatgccgggactccgtgagccgtaaaggccgagtt

SEQ ID NO: 52408 - DNA, 746 bp, Homo sapiens
ttttttttttttcacttcagtggatcctttgttccatattattttaaccaaccaaagtatcttgccacaaagaaccacagtcaaggcacaaaggtaagaggaggagagtctggacaaagtcctgttgaggtggtaggaggaactgaaatgccctcagtaaactgcagattcttctctcagtcatttctgtgaagattacccgaatagcagataatccaaattggtttagtttggtttggcatgcatcacttttaccttttatgacaacatatgtaccctataagttgtttattttggcctaacatgaaaatcatttacattctctgaaaagggaaatggcaaagggtgagggatggcaacaaacaagcaaaagcctggcttaacaccagttccaggccagatgcacacaagccaaatgaagttgcctatctggcccttccctatataccaccctcttccaccctgtccttagggtgagaaagactccataaccttttttcctttctggcttggacaccttggccaggtaagaaggctgacaatttgggagtagctactaagtaacattctttaaggccagggctttgtatacaaatacccttctctttcctctaatacctgactctcctttccaagttcccttgggaacactgtgaaaggatagatgtgtcttgcaggatctcttccactttgcctctggagaggagcaaggtgactgacttattggtatagaggcaggcaataag

SEQ ID NO: 52409 - DNA, 778 bp, Homo sapiens
  misc_feature (1)...(778): n = a,t,c or g
ttttttttttttttttatatatttcattttattgaaacattcagaaaatactgggagtgaagcctgacttgcaatacagttctctttgctggcaatgagcatctgaaataatgacacttttttctttagtgcatatgaactgtttgtctccagaacagaaaaccaaaagtttaaaaacaagatactcccgttgacatcaagtcttcagaattattcatctgatgcttcctagtttccaaagtttcgcttttttcgatttgcacaggcagctgttgaacgctgatgctacacaaacggttacaattgtttacttaagcaaaaaatgccaccagactgactccatcctcaaaatgcagtcatctggacggggggaggcatcacacttggggagccttgccaggggccagatcataaccctgaggtgacacagggtaggacgcgcaaaaccaccggcgccagggcgtttccgcagggtttcccaaaactcaaacgcagcggctcacggtttgccacgtcccccaggagaatggtagacacagagaggaaatgtggagagggcacaaaccgcaaggtgaagaaaacgaacaaacaccgagttgatacggatagtccccgttcccctgagggccgaccccgtgactcccgatgagcgtccagttgcgccgagcatccctgggcctcccagcgtctttcccggaggttcantctgccacggcggaaagcgctctcggttccgctttccgccccagctcccggcccctcgcgcggcggaacgctg

SEQ ID NO: 52410 - DNA, 653 bp, Homo sapiens
  misc_feature (1)...(653): n = a,t,c or g
cataactataggggctatagcttggtaccttgtgaagcaactcttggtgtaacataccttatttctcatactaaaatgcaagaacctttagagcaaggatcttgccattcatctttgtaacctctttactctggagcacttgcatttagcaggcatcataaagttttacgtaccaagaaaatgttgctgttttctgaatactatgcatcaaaaaatgttaccactaatttttaaagctctgctaaggaatattggggcaccctcagatgcaccttttaattgatgtcatattttcctaatccatactttattcatgagaatttgagtcaccccagcattagcttggaatttccttatttcccatttgctttgcaggtgccttggagtcagatctggttttgaatactatcttcctgttatgtgatcttgggcagttacttaattttctagtcaataaccccgtatctataaaatagagaaaataattctacacaccggggcctgttgtgggcnatggnncnnnngnnnagncncccgcanttcggagatatacngagtgtaaangacaagttaaattgggtgcagcacaccaacatgggctcatgnctacatatggtaacaaacctgnacgttgtgacatgtgccctagaacc

SEQ ID NO: 52411 - DNA, 1196 bp, Homo sapiens
cggcaacagccgcctccctcgcgtcccccactccccctctgtctctccaaggaaaactaggcccctgcgcggccaacgcccaggatccgcaagctgcgcgcccacgagctccaccagcccattggagaaaagttactgttcagtccctgaaggcttgtgccataaaagagtgggagacattcccagggagtttcagcacccatttggactttcacaatcagagatggcagcggtaaaggcatcaacatcgaaagcctaccaggccttggtattctcatccggtatatgcaagatactggcaacattatcatcaagcaatggcttggatgcaaagccatcacaatgcctacaggaaggccgtggaatcctgtttcaatcttccatggtacttaccttctgcgcttcttccccaaagctcttacgataatgaggctgcgtatcctcagtccttctatgaccatcatgtggcctggcaggactaccccctgcagttcttcacatttcagaagatctgggcagcatccacgttacagcagtaggatccaggcatccacaaaagaagaccaagctttgtccaaagaggaagagatggagactgagtcagatgcagaggtagaatgtgacctgagcaatatggaaatcactgaagagctccgccagtactttgcagagaccgagaggcatagagaagaacgacggcggcagcagcagctggatgcagagcgcctggacagctatgtgaacgctgaccacgacctgtactgcaacacccgccggtcggtagaagccccaactgagaggcctggtgagcggcgccaggccgagatgaagcgtttgtacggggacagtgctgccaagatccaagccatggaggccgcggtgcagctgagctttgacaagcactgtgaccgaaagcagcccaagtactggccggtcatccccctgaagttctgagctcagggcacagggtacccagcctctccttcttccttttgggtacacgctctttatctctccttctgtacatttcttagggaaaggggactttgtactggggtacaggcatgttcaccacagtcccagtgggcctgtcacggggtggatgtactatgccagccacttggaggtctgcaggacatgttctgttgccaacatgataaattttctcctgacataaaataattttgcatatacta

SEQ ID NO: 52412 - DNA, 668 bp, Homo sapiens
ctggcgcatttttattgcaagatcacaaatggcaagaaatatctggtactttgtggttagtctgtgttacaagtttttgtcatacttccgagcatccagcactatgagatactgaagaccaaggattcagcattagaacatctatacatatggtgatctaaatgtacaaaatgtaaaatgtataagtcatctcactttttgtcaagacattaaaccatcttagatcggagtgtgaagtaaattatggtatattttatgtaacattttaatgtttatgctcataaaacttagtgaacacactgtgttatgccagctcaaatctacagtagccaccaaaaccatgacttaatattttgagccctagaagaaaggggtgtgctgaggacaagagtggggaaataggaacactgaccagtataactgtgcaattctggaacatattaattaaaataatatgccttaacatatagtgaatttctaattctaatgttcagtgcaatggaagacatttatttggacagtaatactagcaaagttggtagatatttgattcttcattttttgtttttttcattagttgaagtgggttttagttttgtttaaaattataaccagcgtattttcacatcattctgtaagttaaatgatatcaaacatgaaagagatgt

SEQ ID NO: 52413 - DNA, 381 bp, Homo sapiens
  misc_feature (1)...(381): n = a,t,c or g
cttgttaattctacttttggaaaatgtcagtggctttccctttcctgtaattttccagcttgatgcatcccctggccataagatacttccagactgtatgatatattctatcactgtcagccttatgttccctgtggttgactatataagcacgctttatggtttgggattgtatttangattgtnnnctaannntantnagnntnnttatttnantagntnnnattnngggtttntttctctannctnnntttntattatgatananatnctntnatnctagtaanatgnnnnnttanatnttnnnnatatntannnttantntntttnttttttttttntttanntnatncnttnnnnntnanctttctnnnatntttt

SEQ ID NO: 52414 - DNA, 1652 bp, Homo sapiens
gcgaccgcctgcacctctgtgcggagaccaaggatgatgccctagcatgggaagacagcactgctggagggcaaactccaccccggccccagctggagccaccgtccctcccaggagccgccgggtttgctccaaggtcaggtgtgtgacccgctcgtggagcccctgtaaggttgagaggcggatctgggtgcgcgtctacagcccgtaccaagactactacgaggtggtgccccccaatgcacacgaggccacgtatgtccgcagctactacggaccgccctacgcaggccctggcgtgacgcacgtgatagtgcgggaggatccctgctacagcgccggcgcccctctggccatgggcatgcttgcgggagccgccactggggcggcgctgggctcgctcatgtgggtcgccctgctggttctgagccctgggactcggagcactgacccctgcgcttggattgctagactcctcttcctcctggaccccatcctctaccatccaagccctgtcccactttggccctatcctctccattagctccttccgggtttggaccattccccccactccctacccttaatccccacatgggaagaagctatcatcacaggtacaaacatcgcttgaagtcttcacatctaccactagacacccccaaaatctgttatagacatttatggatacatttcctctaaacacaacagggcacagcaaatacgacttcatttggcttcgagttccccaggcgctgtagacacaacatgaatcgggctctctgctctctccttagggagctcgagtcctggtggggagaacaggagtaaacaaggacttgacaaagctgaagagttatcagtcctttgacaaggacaggtggggcagggagcaagacaggtaggctggaagaacagttattggcaagtatgcagagccgtgaacgtcatggcatgtccaaggaattaaatgggagttcatttgggctggggtggaggctgggatcagaccgtggtgggccttcaagctaaggagcttcctaggtgaaaggggagatgtgagccttctctggagggaagtttcatgattgcatctataatgaatatattgcctgttttgtgaatactgacacatgtccatacctaaaacactcctgagttaagtcccatccttcccacaaacagcttcctggctggtacccatgataacaattgagctgaacctggggacccctggttggggaacaggtgagttctatttgagacttccagccctagaaagctgcctccgtccagaaatgcctctcacaccaggagctcggccctctctttgtagctgtgactgtcaccctctcagggctttgtctcatccttcattctgaataagatggcagtgttctcctctgggggcctgatccacctctacaccagcccaggaagccccatctgtgcctgccctcaggtggtccaccagtctccccctttggttcccttccagtctcttccccctttctatcccaatcaccaatagaaatgctaacatccctgcctggtagccagactagcccactaaagctcccctgtaaatgggggctccattagttctgctgccgagactaataaagatttggttggctctagcagtaaaaaaa

SEQ ID NO: 52415 - DNA, 426 bp, Homo sapiens
cgccaacgactcccagcacgaccccggtaaaatgtttatcggtggactgagctggcagacctcaccagatagccttagagactattttagcaaatttggagaaattagagaatgtatggtcatgagagatcccactacgaaacgctccagaggcttcggtttcgtcacgttcgcagacccagcaagtgtagataaagtattaggtcagccccaccatgagttagattccaagacgattgaccccaaagttgcatttcctcgtcgagcgcaacccaagatggtcacaagaacaaagaaaatatttgtaggcgggttatctgcgaacacagtagtggaagatgtaaagcaatatttcgagcagtttggcaaggtggaagatgcaatgctgatgtttgataaaactaccaacaggcacagagggtttgg

SEQ ID NO: 52416 - DNA, 512 bp, Homo sapiens
cttcttcatttgaaggataagctggtttgtgttaagcagtatagtattggttgggtcatttgcatcatatcgttagcatttatttggtggcagaatgtttgcctaggtacagaattaatagcccttagcaacgactgctgctggtgtgtatttttgtaaatgttatgcactctctgaaaggaaaaacacacacaaaagaaaaagacttttttttttttttttttttttgccaaggccagtgttgctgcctaaaaaaaaaaacaaaacaaaaaaaaaaaatgctataaaatggtgaaagcttccttctaaactgccccaagtgttgaagtcttcactttattttgtcctgttttgttttgttttcctgtttggtttgcaaaatggtaagggggtgtcgggggggatggggtgtattttgttgcaagtttgtgaggggaaaatgttttggtttgtttctactgacctgaatgtgttggatctacacgtgttgttttgtttttgctttattgatg

SEQ ID NO: 52417 - DNA, 389 bp, Homo sapiens
  misc_feature (1)...(389): n = a,t,c or g
gaactggacctttatgttctaggaatttccacttgatgccttcaggatagcgctcttcttcccacctttaaaagacaaagcacagcctcatttagtgatcgccttgtctaacatggggatcatcactgattaaatgccaaataattatccgctcaactgattagtgctctggaatgacttctgggcctcacattcaaggcctggatcaaaagaaccagtgtctctcattttgaaaaagccaacgctcacaagtaagatgaaatactgtggtgaataaaggaaaatacatttcancagctcagtttaagaatactggacagaagagatcancaatgaaggagctcagcaacaagttgagggacttgaanattgtaaacagttgtttntac

SEQ ID NO: 52418 - DNA, 278 bp, Homo sapiens
gcgtcgacgggtgtatgtttggtagtaaaagtataaagacggccaggcgcggtggctctcccaaagtgctgtgattacaggcgagcgactgtgcccggccgagtattatttttaaaactaaattatgctaggtacactcttaacaaggcaaggatttccattcacaaaaggaagcgtaaattatgcaggctaaatgaagcactgtcatacccaaaatattagatacaatattttcttatgatttaacttttacaaagggcctctttgtcagaagttgc

SEQ ID NO: 52419 - DNA, 602 bp, Homo sapiens
tttttttttgagatagagtctcactttgttgcccgagctggatacagtggtgcgatcaggtgcgtgccaccatgctcagctaattttttttaacttttaagttttttggagagataggggctcctgtgttgaccaagctggtctcgagctcctgggccaaggataaaaaaatctgccacccccccccctccccccccccccccccagccaaagagaccaaccatgtctataaattctttaagactcctcccactgagtaacagagtctgtttcttccccttgaatctgagccaaacttagtgactcagactacagtagaaatgattctatggtgacttgtgaggctgggtcataaaggcaatgtggcctgactcatgggagtcctgagctacagtgtaagaggtgtcaacactctcagctgccatgctgtgaggaagcccagctggctcatgcagagagacaacatggagaggccttgaggctatatgaagagagatgcttggccagctcccagctgctccagctccccagtgctccggcttccactgtaaccacaaaagagacaccaaggcagaaccacccagatgagcccttcccaaatc

SEQ ID NO: 52420 - DNA, 2051 bp, Homo sapiens
ttttttttttttaagtaataaatgtttaatcaaagaattttacatattattaacagcattcatttggccaaacatctacacgtttgtagaatcctactgtatataaagtgggaatgtatcaagtatagactatgaaagtgcaaataacaagtcaaggttagattaactttttttttttacattataaaattaacttgtttacaaaataggctttgccaaacttcattactgaattgtaaagtcaatgactgtgttgtttttaaaatatgtaccaaggaaatacaaattggataatgatcatttttcatgctcaggagagaacagcacagaaataaaggatactgcacaaggtgcaaggaaaccggaacccattgtgtacactgtcttcacacagagcattctttctcaccttaactgcagctgtgcaagatgcctcagtgtgatgcaaagactctatattggaaaaattacaacttggtctaaaaacttattggtgttgatatttttaatccaaaataaatttataaaaaaatcctttaatggactatttcagtttaatatacagtaatacactgtagataaagttaatattccccccactaatttaatagggattgatatcaatgtttctgatcactggagaaataaaaactaatgtggacctttgatatccatggcataggaggattcccacagtttatcctaagaggatctggggaatattaaatattctaatacagtgtcttagcaatatgaattttaagtacaaggatatttcaaaagcagggtttggaaaaaaaaaaagtaatcaaaacccataatcacatctcttgtggataacaatattaatataactttttacccagcccaggacttgcctgtacaaactcagaactgaaagtttggtatctgtagacttctggtaacaatctggcaaaacactaaatggagtgttgtacttatctattttgcttatgttatgctagttttgataatatttaagtaaaacagccattccaacagtttactctagttttaattacacactgtaccattgtatcctaattacaactaagaccagtattttcttcacagtaagacactgataactaggaagttgatttttttcaacactaaacagtaatcacacagcaaatgagtattgcgcagtagaacaaacacatgtcagcatttgctagttaggcaaacaaactgattgaacatttagttgttatagttagtgtaaaagcaaggccatgggtggttttatggaggtctttgcaattcatagcatagttacttcagaagagacattgaaatttgaattactcacttatttaactggcaactatccatttaggttaggcaaaggcacggtaacatgttgcgcaggatgttttattgaatttcttaataatcgtgggatttactataactcatgaaaactccactttttttctattttataaaacacgattaaaagtaattgcacccatcagtaattagaatgcactgtaaaattgtgaaaacaaataactatgattgcacttccaataaagtgtctcttaaaatacagcaccgctgttgctaatcaactgtattttaatattaaaataaactgtttttaacagcagcattaggtttagttaacttaagctacaggctacatttatataaatgcagtctccatggcaacaaaaacccatttaattctggaatatcattgctaccaagtggcaccttttactcccgagaacgctgacactgccctggagcactctaggatgctgcacacctaaatgccttgttagtcagcacacaagtaagagtttggcacaattggactgtaaatagacatgaaaggaaacctttgattcatgtgaaaattaaaactaattacactatggtagatgtggtactaaagagacttcaattcacattgctcagacaaaaaggaagtaagttatggaagagcacaaagagattgaggacatatatgttatcggatttatccaaaataaatttctagaatgaagaaaactttttttttc

SEQ ID NO: 52421 - DNA, 433 bp, Homo sapiens
  misc_feature (1)...(433): n = a,t,c or g
ggtttactgtgtcattgttgctgtcattgctactgaggagtactgaccagaatcatctgcaactcttagttggcagagaggaccactatggcgggtagctcttttctttcctgccattgtggggatgattccaggccaaagatgatggagaagtatggaaatcatctgaaaggttgaagcttggcacgtgaagccattcatgactttgtaaggcagttttgctgaaggccagttctgccctgggagggacggaggtgaatcctcctgagtacctgtggttttcttacttcctgctgaatttacctaagtgcctgttgttttgcttgctgtgggaggctttctggtatttccattttcaggtgcagatgcctttcactttcccacaaanaaaaaccccaacaangcctaagaccttaactngcaacttagtttt

SEQ ID NO: 52422 - DNA, 268 bp, Homo sapiens
cggacgcgtgggagacaagtttgaaagagtcctttaaattttataagcttgtagattccataaactacactgatttatacatttgaaagaatttagccatttaataaatttcttattctcaaattgcatttagattaaaattccttttaagagtgtctgaaatgtctgcctgcgaagaacatgtaaacattgccagataccagtcattattctttagtggctttttagtcctctgcttttttttttaaggcaaaagaaatatgcatct

SEQ ID NO: 52423 - DNA, 374 bp, Homo sapiens
gagtaagagctcagcctggtttgaatttaatcatctctttagatcttataaggccagcattaggaaacttgttcacttttcattttcaaaggagcctagttgaagtgctattatgagtgtgggctatggaaagacagcttttcctacactgataaagaaaaaaaatgaggaaattatttcatccccttgtgacatctgtgactttttggatttaataatcttgctgtttttcctctttatgacaaagaatataattgggaggatgaagtgtcttaaaaattgtagagaccagctcactggaatgtttttccatccctgtattcatggcttgactttgtgactgctctacactgcatgtctgacattgcagagtg

SEQ ID NO: 52424 - DNA, 958 bp, Homo sapiens
ttttttttttttttttggaaataaacaagctttattttcagtttcaacaggtaaggcgatacctgcttcatcgtgtgcttttatgtaaatgccaaatagcaaaataacagctagaaaataaacagtttgtcagtttggagatcaagtactttatctatcttgagtgttatctgtcttggaatttagccaggcctaaaagtagcggaagtatcaggaaatgctatagagagccaatctccagctgcaggttggtgggcctggcactgaccagatgcgggtagctcaaagcaccgagcgatgcaggcgccgtttctgcattgcctgcagcctcttctgcctctcggcaaagttgttcttcggggtctgcttcagtgcgggcaggatggcacgctccgccacaggtgggctcagaagcaggcatttcttggagaggctcttggtggagaccttggggaaatgcgtggcttcttggtccctgggaaagctagcttcctccggggctgcctggggcctctggctcccttccaggagggacttgaggtgccgcagctcttgggtctgcaggaggttggtattccacagctcgctggatgagcacttcgcactgcctaagtgtggtgggctttcgcaggggaaggggcaggatcattggggggtgtgcccccgcccccatctgcctgccctggtgctggctgttccccatacaggcagctcctgcattagaggcctctgctttctcctttctgaaacagtcattgcagcagccagaggtgacctgcccaggtgcgtctaaccacccacccagcatacctccccaggcagcgcccaggccaatgtggggaagagggcctggttcccctctcccactgagcaggtgctctgggcaccagctgggggtctctgggactggggcctgtcccgtcgagcggccgacaatttagtagtagtaggcggccgc

SEQ ID NO: 52425 - DNA, 2157 bp, Homo sapiens
  misc_feature (1)...(2157): n = a,t,c or g
tttttttttttttcatatttcatttggttctttttattagaaactgagaatacagcaagtagggaaatcccacatcaatggaaccatcacacagatgcctttctggaccccaaccttctatgatccccaaaaatgtgctttgtggctttagcataatttataaaggggaagagggaaaatactgaaaaaggccactatttaatggtgaaagaatgaagctgtagaggtcccaaccagcctagggccaaaaaagaaaattaaaaatctgcacagagcaagcaagcctctgactgctgagagtaaggcattcaggcgccaacctggtgagagttctcagcgagcactgtcaggtcaagtgcacatgaggctgttgggtagtgagctgcacgtagacacacacatagaaatgggcacatgcccacatacacacccgaaaaagggagattttactggattacacatcagtgatgttaatttcatttttcctaagggtttgtgctatgttgaaccagatccttccagctttggggtgtgggtgactgcacccagaggctgctacttctgttggtgttgtgacagggctgcacctatacgctgtatcccaaagtgcatgaccgaagagcaagtctggcttctgatacgtgctgttgctcccaagaaactaagtgggcttctgtccaaatggccactgtcctgctggactatgctttctcaaagggattaatactgttctttattctgtcaggcactgcaccagttcatccactgagtcttttgctcggtccacctagcacctaggacagtgaccttatccagaaccaaaacgttcaagttcttctcaacttctacactggattctttcttcctagatcccaccttttgctggagattgcaagggcaagggaggaaaataactgagaaaactctattgaataaataggagacccttcccatattcccaaacacctactgaggacaccagtccccatgctcaggacctccatatttagttctaatacccacaaccccaggatataatggagtcatcccaagtctttgatgacagtaacctaagactcgagcactattttggtggttcacctatgggccaagatcagaattccatgaaccagatcctttccccaccactttctctgacaccgtatcaggtaggcctgtgacatgagccatcgtcttgtacctcactccctggcaataacataccattgtatttaaaatgccacaccactcttatccctgtaaagtgaggttcagtgagtgctgacaactccgtactacaactggctttaagagttctgctggctttcttattcaaggagagccgaggtgtctgtcacatccaggcttaccaagacagtgtaccagaggtaaaactcatctttcctaatccaaaggaagggtctaccaatctatgtagatgagctcaggagaaacctggacacgtcagaatctcatttgtggctggctcccatgccaagaactatgtcagagaaaggtccatttctattccctcaaggaggaagtgtagttagggcagtgatttttaatagagggaaatttagagagtgttccagagctccacagcaaggatatggaaaactgtcccatccctctaataagacttcccataaaagtgagcgggatgccaggaagtaatcagatcagcccatgctaatgtttctagagctcctcccatggcctccagcacccctttaccagctgctaggagtgtgtcagtctctcaaatgacaatgacaccctaactaagagcctttatctaacatcctgtcacccactcatgtgctgcttccactgagaaaacacataccactcccctctacctcaggcctcccaaagggagtggtcatgtcaccactgggctagggctatactctctgccccattagggtccaaggtatgtcagcctttagaaggcatcttggtgcaccaagacactgtacattccggggctatcacctgatcctacagtcactttttgtgcaaaattcaaacagtgtgtggtacttgcatgtttcattctcgtgccgaattcttggcctcgagggccaaattccctatagtgagtcggtattaaattcgtaatcagtcatagggntttccaaatgannnnacacc

SEQ ID NO: 52426 - DNA, 415 bp, Homo sapiens
gggcggggatgtcagggctggagagtgcccgtgtccttctgtgtgcattgggctccttcctccttaattctctgctttccacttttaggctgaactccagtgcacccagttagacttggagcggaaactcaagttgaatgaaaatgccatctccaggctccaggctaaccaaaagtctgttctggtgtcggtgtcagaggtcaaagcggtggctgaaatgcagtttggggaactccttgctgctgtgaggaaggcccaggccaatgtgatgctcttcttagaggagaaggagcaagctgcgctgagccaggccaacggtatcaaggcccacctggagtacaggagtgccgagatggagaagagcaagcaggagctggagaggatggcggcatcagcaacactgtccagttcttgg

SEQ ID NO: 52427 - DNA, 684 bp, Homo sapiens
ttttttttttttttttgggcagaaaaaggactagaaagggagcactttaatgaacagaagtacagacgtgctggcaaggatggaaatctccactggttcctggcccccttcacctccatgcatcccccagcatggggtgttaatcattacccaagctctcgctgttccccctcaccccctgcagagtccagcaggtctagatacgtgctctttgaaatgtgttctgggattaaaaatggtgccctgaggctgtctaaccctcacaaaagacagacacatgcacacacgggccttggggagggctgtgtattagcagtcaggtgggccctcctgggagagcttgctcaagaactcttctcggaaggaaacccaccttaaggtagggttctgataggcagagctcccagaggggacagccagctgctagaagatggggttatccagggtttgtaaggtttaaacaacgggcagggaggcaaaccgagtcaaatggtttggaaacctactgtgtgcaggggcattctgagggaatcctgaactctgcctctttggcatgaccaaagctgaagccagggacatacatacaaaggccctttgagctggtggaagaataggcactgattggacccttagctggaagaatgatccattcttaacaaccctgggagccccagggattctgca

SEQ ID NO: 52428 - DNA, 150 bp, Homo sapiens
aaaaaaaaaaaaaagaatacaggagtggggtggggtagtggggctggagacttgaggtgtcctggctttggtagtcttgagtgggggcgccagaggcctgggatctgcagctgtgctcttcccaggccaggccctgccccgtcccactgg

SEQ ID NO: 52429 - DNA, 843 bp, Homo sapiens
  misc_feature (1)...(843): n = a,t,c or g
tttttttttttattaatatgaacatatgaacctttattaagtggctcacatttcagtataaatcacactaaaaagatatttaaaagctatttacactacagtgctgacacatttaaaatgaaaaaaaaggatataaataagctctatggaaaagctttaaattgttgaaaaagaattctggctcatattacnnnnnnnnnnnnnnnnnnnnnnnnnnnnnnnnngttaatgtcagctctattctaaaacctaaaattccaacgtaaatgatttttttttaaagactcctttatgtttaaacctgcaatgtttacagtgcatctggccctaagtgcttaatacttcacagttatggacaggcactgaggaatgttacaaagctacataaactatgttttgtaacagacataggagcaagtccttggcttgctttcagaattcatgaatctttattacattaaatttttttaaaaaaggattttagatggtatatgcaaatttagcacaaaatgtcatcgtcttttttatcttgatttgaatgtgctgaactgtgttgccttgtatcaactagacttagatttccagggcacaattcttcctttaaatctttgttgctattttcaaatttagaatccatgtcaatcttaaattctgcaaattgaacatgatccaattttgctttaacattcttgccatccatattattcagtgctgtagtcttttcaggaatattaacattcacaggttcttccttgattcttacagatgcaataggttcatgtttaatctgctgtaattcatatttagaatgaagtttatctgaaaaaacagaatccaaggagg

SEQ ID NO: 52430 - DNA, 461 bp, Homo sapiens
cagagtgcacctaaaaataaaaaagaggtgcagaggggacacgtggcctcactgtgatccctatagattggtgggaccactgtaatctggtttatcctctgcccagttcaaatcatccccaaaattcatatggttattgtgtattattatacatccttttttgggcaggtgctcaggttttttgactactctcctaggaatttaaaataacaggttatccaccttacaatcaggatccaggcccatgccaagggccaggcccctttgagacttaggctgggctggcaagagaagcacctatcacctattcactctgtgcagtccttggacacagtttgcttcctctaggagaaatctcagctgttgtagcctggcttgcctccctctccccagaatgtggactctggaactgccaggggacctgctgcttgtctgctgtcatggcacccaacttgccaagc

SEQ ID NO: 52431 - DNA, 809 bp, Homo sapiens
gctcgacgtcatgagttcttcccatctgatgctgactccctgcagggtggctcctccttacccccacctcttctcaagctgcagtccaccgggtatggttctggatggttcccccaagggagcaggtatgtaggaggtgaagaaaactgagatttcaagtatgggagagtttttactatctccattcctggattaaaagtgctgaaaaagtccacagttaaacattcctttattcaccctatggctcccaagaaaagcattcttcctctggagtactggtgtactaaggggacaatacaccaaatttgttgagtttacaatcaagtctactaaggttggacttccttatcagtttggcgagtcccaggggcagaataatcatccatctacaggtctctgtttcctctccctccacagcagtggagagcatcccagtgtttggggcactgtgttcctcttcgtccctgcaccagaccctggaagccttggccagagacctcaccaaactcgacttgcggcgctgggccagcttcatggatgctggagtggagcacgatgacgtagcagagctgctgcaggagctacaaagcctggcccagtgctaccagggtggtgacagcctcgtggactaaagttcccagtgtgggagaaaggagctagtttgcaataaaaacagctggatgcaggagcccagtgtcttcatgcagaggagctcaatgtcgcgggactagctacaccaacatatgcactttttacatttagaaacactgtgattagaccacagaacaataaatatgtgccatcagacc

SEQ ID NO: 52432 - DNA, 325 bp, Homo sapiens
gggattttgaacccagatctgagtgtctcttcagcctatccatttccctcaccacacctgtagttgcatcccaaggaagtgcccttcctagaattcttacccttggaccaagggccactgtttgagatgtggatatgctgtctccctctgtgaccctgggaaggtccctcctcattctagacctcagtttcctcatctttaaaccaaggagcacaaatgatatgagagtcaggctttccagacttaatattcattgcttctgattggcctttcaggttaaagctccgtatgtggcctgggaatggtagttggctttctgccttgg

SEQ ID NO: 52433 - DNA, 240 bp, Homo sapiens
  misc_feature (1)...(240): n = a,t,c or g
gcttctctaaatatcatggtgtcccttagcatatactactctcattgctggcagtgagacaggccattcatgatcttaagagttgccatttttaatgtatattattagttacaagcactttatatagcagaaaattgtttttgagaataagctagtgttgatattttaatatttttagcttactgctcgtgtttttgtttttgttttcgtttatagaggtgggtttcaactggtnccagg

SEQ ID NO: 52434 - DNA, 317 bp, Homo sapiens
gcccgtggctgccgtcactcctcccctgttcgctgcatctggactgcatgctaatgccaatcttagtgctgaccagtctccatctgcactgagcgctggtaaaactgcagttaatgtcccacggcagcccacagtcaccagcgtgtgttccgagacttctcaggagctagcagagggacagagaagaggatcccagggtgacagtaaacagcaaaatggcccaccaagaaaacacattgtggagcgctatacagagttttatcatgtacccactcacagtgatgccagcaagaagagactgattgaggatactgaag

SEQ ID NO: 52435 - DNA, 1018 bp, Homo sapiens
gtcagcccttgtctgaggcggaggcagccccgcgccgcgccggacccgagcatatttcattttctgtcattggactttgagccattagaaccatgagcaactacagtgtgtcactggttggcccagctccttggggtttccggctgcagggcggtaaggatttcaacatgcctctgacaatctctagtctaaaagatggcggcaaggcagcccaggcaaatgtaagaataggcgatgtggttctcagcattgatggaataaatgcacaaggaatgactcatcttgaagcccagaataagattaagggttgtacaggctctttgaatatgactctgcaaagagcatctgctgcacccaagcctgagcccggttcctgttcaaaagcccacagtcaccagcgtgtgttcccgagacttctcaggagctagcagagggacagagaagaggatcccagggtgacagtaaacagcaaaatgggaaaatcccacctaaacgcccaccaagaaaacacattgtggagcgctatacagagttttatcatgtacccactcacagtgatgccagcaagaagagactgattgaggatactgaagactggcgtccaaggactggaacaactcagtctcgctctttccgaatccttgcccagatcactgggactgaacatttgaaagaatctgaagccgataatacaaagaaggcaaaggaaaagataccccttcacgtctttagtcccaaatacacaaaattacgtgactggcaccatgaagtttcagcacgtgctcttaacgtacagtgatttatgagccttgccccccaagcagccagcacataccttttcatttactttttttttttcaacttcatagcaaaatctgtattaaatttgccttatgaaaaaatagaactttttctatacttttctaacaatttcctattgttgtgagaaaaggaagatgaacatgttttgtgctagttggtagctcacaaatgtaaaaccaaaaaaaaaaagtcgacc

SEQ ID NO: 52436 - DNA, 905 bp, Homo sapiens
atagttaaaataatcatgtgatgatttatttatattctgggaaaatatttattttcaaatactcatatgcaaagaaaggaatcagtttgagaaatcctgacctcaaacaattcgaaatcttgtttgaaagcggggggttcagggtgtcctccacacactcatgagcggggaatgacacagagtttgtaacgtggtgggatacagccaaacccaatatgtatagggctgaggtcgatatcctttgggtcaacgagaggcttcaaattaaaatgctgcaaaatggcacacaacaaaagaaacaactccatgcgagccaggccttctccagcacacactcgttttcctgtggaaaatggcttgaaatagtcactgtacttgaactttccattttcattcaggaagtgttctggcttaaacttttctggatcaggaaattcttggttgtcatacaaaacagagtccagagttggcactacgactgtgcccttggggatgaggtatcctctgaaaatggtgtctcgggttgcttcatggggcaggttggagggcacgagggtgatgaaccgctgaatctcatgcaccacagcatccatgtagggcatctcttgcctatccttgatggcagggattcggcttggcccaatcaccctgtcaatttccttcatggagcttctcttcgatctcagggtatttcatgagaatcaggagcccatatctcagagttgtgctggtggtctctgtccccgcaaagaacaggtcggccacagtcacggtgataccgtccattgtgtacaagcgctcgcactgtggctttgcctcctcatttccacgagcaggcagtcggtgaggtcccggggacagttggggtccagagattgatggtgctccttcaccctttcagacac

SEQ ID NO: 52437 - DNA, 473 bp, Homo sapiens
gtcgactttttttttttttttactttgaaattactttaatttagaaatagaaaacatcttgaaaggaaaaaaaaaaacccacaaaacatacaggcaaatttgtattctgtgagtttctcacaccctcacacttgttcaccaatctctaagatgaaaaactctcttccaaaatgtattcagccaccaacaatgatgttattaataggaatatggatcaatttcacaaagaagccaatgaatcccattatagcaaatcctattgctgttgccatggcaatcttctggaattcttttctatcaggtttagtgcatcttttaaccagccgaatggagtcctttacaaactgccgacttggctcaacaaactgcattacctgatccatgactgcctacccaaccgacacctaaaatgccagggacacgtagcactggagcttgctgatggaggcccaccggaaccggaatccgggtcc

SEQ ID NO: 52438 - DNA, 426 bp, Homo sapiens
cccacgcgtccgcccacgcgtccgccgaggctgacattcacgtttcattctgccacactcgggaacggtgatcggggaagcatggggatccgggagaagcacccacaaaactagcatcctcctggaggagctcgggaataggatgagtgataatccacccagaatggaagtgtgtccttactgtaagaagccatttaaacgattaaaatcccacttgccatactgtaagatgataggaccaaccatacctactgatcaaaaaggttatcaagtccaagccagctacacttccacgtgctaaaaagatgaaaggaccaatcaaagatttaattaaactaaagggaaagaatcagagacagagaatgaagaaagaaattctaagttgcgacggacaaaccagaacagacaatgaagcctttcaactgc

SEQ ID NO: 52439 - DNA, 613 bp, Homo sapiens
tttttttttttttttttttaacatttaaagcactcatatgcattttataagtggtctaaggtcatttagcataaaagcaaatagctccccgtgcccctactgttacaacttcagaagacactgctggagaaaagccattggtttctgtgaatgatcctcagttatgcagaaaattattatattgcagatatgctgaagacaagtgtaacattttagaatgacttccttccaaaatgagtatttttatttttttcagagggaggggtctcaccctattgctcggggctgggactgcagtgggtgcgatcatgggctcactggtaaccctcaacctccccgggttgtggcacttgcccgtatccaggctccctcaggaatgggaggtcccatggaatggtgggacaagggtgagatttggaacgaagccatgccggctctaaatccaccacttggtagagactgggccagtcttctgatttccctaaagctcctcctgagcttgcaaaatggggtttatgatgcgcatggcccagccctgttgtgtgggttcacttcaggtgatgaagaatctggcatcatcgggcactcacttttttttttgagatggagtctt

SEQ ID NO: 52440 - DNA, 423 bp, Homo sapiens
gtactttatttttttgatagtattatagatgagatttttttttaaatttccttttggattatacattattagtgtatagaaacactactgatttttgtatgtcaattttgtattctgcaactttactgaatttattatttataatgtttttcatggaatctttaggtttttccaaatataagatcatatcatctgcaaacaaggataatttgacttcttccttttatatttggatcccttttgtttctttctcttgtctgattgctctgctaagacttccagtactatgttgaatagaagtagtgagagtaggcatccttgttttgttcttaatggtatagaaaaagctttcagtctttcactaacgagaataaagttggttttcagttttttaatacataatttttattatgtagaggcagc

SEQ ID NO: 52441 - DNA, 304 bp, Homo sapiens
atgaactggtgttgtttaaatcccccagtcgtggtattttgtcatggtggccctagaagacaatatacaacccaaaggaatattctttccactttctccctcttccactttatagttttttctccttcgtttctttctttttctcttttactttccttttcttctcttctctttcctctggtttttaattttaattttaatttttggccttcctatacctccatttgcctctccaggaagctggaattccagacaattaatcattcatctcatcagttcaggcaaagcaaatggccctcaaggg

SEQ ID NO: 52442 - DNA, 321 bp, Homo sapiens
  misc_feature (1)...(321): n = a,t,c or g
ccatattttaaaaatatatattttaaaaaggaaagattttctctttttttagtgatctacaaacctttaaatttagataattttaatttattattttaagatataagtcatattaaaacttaggagctctaaaactttttccaattttcaaggagattatattaccatgaaaaaaatttaaaagttaattattacttctatcaaaattatgtcattaatgaaatattttggnagacaaaaaggatgaagtaagtaaagagaaaatacgntgaatatantattttactgtggtnaaaaacaggnagaaataanctttggatg

SEQ ID NO: 52443 - DNA, 736 bp, Homo sapiens
cagtttgcacttaaaaagaaaaaaaaaaaaacgggtggtgtgtctcaggacaaaaggaggctcttctcattcagctaaattcacatttgcccccccccgcgtgccccgcccccatatgctcctgctattattttggtaatgctctgatgcaacattgcaactttatgaaatatttgtatgaaaacaaaaagactgcaaaaaatacactttcaaaagaaaccattcattgcatgtttattatgcaagtttaaatgaacaaagaaaaccttcagaaacaagttgatcaacgtgagagaaatttcatgataattattcatagtaataaagtgtcgtgggcttaattgtatatctggagccagtgtcatccaccaacaatgtgatacaatatgaacttgacagtagttttgggttttgctcattctttcagccacctgtgatcagttttgttgattaaggacttcttgtcaggccattttttaatatcaaagctgaagcaatatccattcagggatttcatcagttgcatcacaaaacacggatgataatatacatcactccattttttccattttgagtccttttaaatgtaatgctaacctttacaattaaaaagtcagattcagaatggaaacaaggtcattttgcaaacattggagctcttttattacaagtctgcttgttaattttagaactgtaaaaccgctctgattaaactatttaactaacaaaaaaaaaa

SEQ ID NO: 52444 - DNA, 572 bp, Homo sapiens
ttcggcacaggctgtgcttgaggttgggggttgcgtcgctctctggtaaaggcgtgcaggtgttggccgcggcctctgagctgggatgagccgtgctcccggtggaagcaagggagcccagccggagccatggccagtacagtggtagcagttggactgaccattgctgctgcaggatttgcaggccgttacgttttgcaagccatgaagcatatggagcctcaagtaaaacaagtttttcaaagcctaccaaaatctgccttcagtggtggctattatagagccctactgccaataaagggaaaataagagatgctcatcgacgaattatgcttttaaatcatcctgacaaaggaggatctccttatatagcagccaaaatcaatgaagctaaagatttactagaaggtcaagctaaaaaatgaagtaaatgtatgatgaattttaagttcgtattagtttatgtatatgagtactaagtttttataataaaatgcctcagagctacaattttaaaaaatgatttagcacaagctaaatctcaaagccttggtataaaaaaaaaaaaaaaa

SEQ ID NO: 52445 - DNA, 433 bp, Homo sapiens
tcttgagctgcttgctgttgcgcccctgtgcgtttcatccctcctgctctcttcgtcgaccctacagcatgtggggtgtgaaatcacttgagaaactgtttccactggtttgctatgagaatttcatagtttgacccctgaaaatgaagggaattagaattgataggagggatgatttggtgcccaaagtggtgaattggtgccagaaggtcacctgagtaagaaatgcctttgcctggtggctacgtaagttagaaataagtgagctgaaaattaaagtaaaaaaggttaatttctatgagaatatcagttggacagacagcaattagataaggtacaatctaagaagtaaagcaggagagagagtttacttaataactaaatatttacttttatctctttcactcacttgtaaaccaagataagcctgttg

SEQ ID NO: 52446 - DNA, 1043 bp, Homo sapiens
ttttttttttaagtttagggcatttatatatctgcaacccaataaacccctggtaccatgcagctcccccaaattcagtgcaacccaaagctgctgaaacaagtccagccccagaaggtgtagtggcactgtggtgttaccttatttttatatgacccttcaaaaaggacactgaaaacccagtgcctgtttgcagagatcatgtgtggaaattgaaaccctgtctttaaggaatgaccaaattcatgctacttaacctgaaaacttgggggcaaagtggttgtgattatctgaagggctgctatgtagatgaagtattaaacatgtcgtaggcaaggtttagaggagaatgtggtacttaaccttctatagatcccacaatgaaatgacctgccttgtgaggtagtgagctccctgtcaagagagattttcaagcaatgggtagaagaccacttggcaggagtgttgcaaaaagtgggctaaaccagatttttccaacctagtatggaggaagaggcagagtaggggaaggtcctgcccctatgagattctcctgattgcatgcaagatgacaggtaatccctgtgtggacagactagaaaagcagacagcccctaaaatagatggggagaacttttagccctgatatccacacaaactattttaggatagggtagcttggaaaactttaagcaaatgacgtcacctctcctaatgggactgttccagacacgcacagggaggcagccagcgcattgcaagatacaaagttcagctctgtgcagcaggagacccgggtttagttctgactctgccctgtatgacctggggctcctccttcccttttctgggaccctccataaaatgaaatgaacgtaggcagtccttccccttctaatgggcgttgcccctctgactggagcccccgatagcagatctagggctacagtttggggccttggggctacacttgtggacagccagagaccacctctggcggaagcaccggccacactcgaggcaggggaaaggcttctcccctg

SEQ ID NO: 52447 - DNA, 1169 bp, Homo sapiens
ttttttccggtatccactggaattttatttctttagggttctatcccaaccagtcgcttaaaaaccaagtaacacagacctgaggggtgggggctggggactgcacctccctcctactcatggtggacagcagtggggactagggaggggcaggagaggtggctgaagcaaggcagcagtaatggggccacgacgccacagagccagctccgtcctctcccagaccctggtgggagcccctgtggcttggggtggggagtgggggacccaccccaggccctccctctcccttcctcagacagcctccctttcgggctcaacccatttcttccggcaggagactgaggcacacagagaggaggaagtgggagaggaggacgagggaggggcagggtggcagcacaaatgaaggcagaggtgagaggcgtgggcaaggccactccacccccacacccaccccagagaggggcgaggaagccacaccatcacgcagcatgtcggggggacaaggcggggtttaaggctgaggggcccggggcaggcggggcctcgggcctcagtcaaagccgtgccagtcgctgtgctctgagtcgtattccagctcggcgcccacacacttgacaccatccagcagcatgggcgtgccgtggtgccggtccattgacgcgggcctgcaccgtcacgcgcacacaggtgccagtgccaccttcgcaggctagcagtatctcctctttgaggacgccctctttgtgcgccgagtactcacacttgacactataaccttcagggacgggcacccacgctgaggagcttgaggtgcaggctggggacaggtgcctcgcggacatccttgctcagcctgtgcactgggggcagagtgaaggtaatctcatacctgtgcaggatcttcaggaagccaaccttgaccagaaagctgctgtcactctcctgggtgaccatgaccaccgagtcatgcagcttctcatcaaagtggacgtggctgtgggatccttctgcatcgtggcccctggccaaagcggatactccggactctgggcttgttgcccttgttggctgcagccatggacgccctccctgccacgcagctcctgccagacaccgccactcacgctcagcagcctcccatgctccagggacaccagcgggag

SEQ ID NO: 52448 - DNA, 1900 bp, Homo sapiens
ttgtgtttcaggctcgcgggattgatgtgcaacaagtgtctttggttataaattatgatctacctaccaatcgtgaaaactatattcacaggtgagaagccagcatcttggctgtattgaaaaaaattcataccgtttttctactgtgatttgtatgaaaggtaacatcaaatcaaggaatagattcagtaaagtcagtagtgttcagtaagatgatgtaattaaatttgtactagggaaggttgatgagaacaaagtgggaaaacttgtaaacattgcccagattgtggacatagggtttttttccacaattgttggtcttaccttatgcttgagcttttagtgatgttcttgtgtccatgtgtttttcttggtgattttttctatagttgggattttcttggtgtcgcctggtagcaatttgagtgaaccctggtttagttatagtggctttatccctaaataaattgaattgtactttgttatatgatgtaaaaaaagactttttaaaaaatacaggagtcgatagcagcagttggtgacgagatggcactcagaaacggcgttgacgtaatttaggacgtggaatcataagcgaaacagcacactgtttgaataaagagcgagtcggtatttatatttgtttttcttttgtcatgattatttgatttttaagttgctccagctaaggcatttttttgtattagtatttctattagggaacctttcttattaggtggtttgtattgtctggtttctaacatgcaggtagctgtttggcagttaaacacgtttagagtaatttgagttacaacgtgtgaaactgagcaaaaaagcagtgataagtttgggttaccataccaaatatttgttttcccactggaaaaaagtaagttttagaaaatagttaacctttgcagcatttgtttacagtttacagttccagaagtgcgtcgaaatggattacataactgctcttttattcctgggtgttcacatctgtcccaggctgacacctgctcttggctgggcccactttggtatgggctttaatttcactaccccaaacacgatactgtcatctgctttataataatgctcaagatgcctgataaaaatctcattttgcagccagacaagccttgaatccttttggcactaactgcaaaggaagatttttttctctagatatgcattagcagctagtgctccagttagaagcacgaactataaccttgataagtaaacagcagctggtggttaacaagtggatcgtcatgttcagtagtttatacattatgtgagaagtaacgttctgattctttttcttacacagaattggcagagggggtcgatttgggaggaaaggtgtggctataaactttgttactgaagaagacaagaggattcttcgtgacattgagactttctacaatactacagtggaggagatgcccatgaatgtggctgaccttatttaattcctgggatgagagttttggatgcagtgctcgctgttgctgaataggcgatcacaacgtgcattgtgcttctttctttgggaatatttgaatcttgtctcaatgctcataacggatcagaaatacagattttgatagcaaagcgacgttagtcgtgagctcttgtgaggaaagtcattggctttatcctctttagagctagactgttggggtgggtataaaagatggggtctgtaaaatctttctttcttagaaatttatttcctagttctgtagaaatggttgtattagatgttctctatcatttaataatatacttgtggactaaaagatataagtgctgtataaaatcagccaattatgttaaactagcatatcggcctttctactcaggctaatgacaaacacaataaaggcag

SEQ ID NO: 52449 - DNA, 1126 bp, Homo sapiens
gacgctctcttcctgtctttgtggctccggaaaggcgtttgggatgccaacgatgaggctgctgtcatttgtggtgttggctctatttgctgtcactcaagcagaggaaggagccaggcttttggcttccaaatcactgctgaacagatacgccgtggagggacgagacctgaccttgcagtacaacatctacaatgttggctcaagtgctgcattagacgtggaactatctgatgattccttccctccagaagactttggcattgtgtctggaatgctcaatgtcaaatgggaccggattgcccctgctagcaatgtctcccacacttgtggtcctgcgccctctcaaggctggttatttcaactttcacctcggcaacaattacttacctgggcccagggaggatgggcccgttgtgattggctctaccagtgcacctggacagggaggaatcctgggctcagcgggagtttgacaggcgattctcccctcattttctggactgggcagcctttgggggtcatgacccttccctccatcggcatccccctgctattgtggtactccagcaagaggaaatatgacactcccaaaacgaagaagaactgattggggcttccacagccctcctctcccaagaaatccaggctcctctcccaagaaatccaggtgctttccagactccaaagggtatcttaaatgcaatctcttctctcttagcccttggccactttctcctgggatcctgccctgctctcagccatagtgaaggaccagccctaggagtctgcgagagcctccttggttccatcgtgaagccataaacaggaatgcctttggcaatagccttgagcctagagggccctctgatgccccactgaggtgctgttggtttattgctggcaacgtgaattctctcaggggtctaggaggggcattttggagactgcctgacaccacccctatcccctgcctccccctctcagaagagggtggaagatgaaatgaaagctatgggactcttggaggatacccagtgtctattctgggttagagaagtgcttactaaggggttttctaataaaaacaaatgccacattgaaaaaagaaaaaaaaaaagtcgac

SEQ ID NO: 52450 - DNA, 421 bp, Homo sapiens
cttatgaaagcagacggctccatgggctggaggaggtggcacgctttggaaagaactcgggtgcgagtgggaaagaaaatcgagctgagcagcgggaagtcgaagtcgcgtgagtgaggaccagacactctcgatttaggcaaaggcggggtgcacttcccaacaacacatcctcctcactggcgagaccaggcctgcccttcaagttcctctcctgatttaatccccttggcgagggtttggcatgaaatcaatggccagcaagcttggtaaacgaagccgcctacaccgccctccccctccctgcacggccgcgccccgcctccgctcctgtctcaatctgggattgtcctcctgtagccccaccatccaccgtggggaacggtggagagactacaactcccagtatgcaccgcgatgc

SEQ ID NO: 52451 - DNA, 585 bp, Homo sapiens
ctttagagtttaacaggttaaaaaaaaaaataggaggaaaggcaaaaacaaatgtaagaatagtttttaatccattttctcacaagcagtgcacagtgggccggcaggtacttaagtaccttatcctaatcctggatgtgctcatacaggctgtcaatttgggtccgaaagtatttggaaagctctcctcgctttgctttcaatgttggtgtcaagagcccattttcaatggaaaatggctctggatgaagaaaaatggctttgacctgttcaaaagttttaaggccactttctttcccaattttctgcaagtcttctaaaatggcttcccttacaacttggttttggcacagttcctcaaaggagcccttcaccccaagcttggctgcaaatgagggaagtacatctgtgtcaggaaccaccactcctactaaggatgaccgtaagctctccccgtgtacaaaaatttgtaacactggttgactcctgttgtagatattttctatcttctctggtgcaatgtattctccttgggccagcttgaaaatgttctttttacggtcgatgatcttcagagttgccatt

SEQ ID NO: 52452 - DNA, 120 bp, Homo sapiens
gcaaagtggtctccttcagttttaataggatttccctggctgcgttgttgagagatccctgaggaaggcaaaggcagagcagaagaccagtcaagaggctgatgtcataattcaggcaag

SEQ ID NO: 52453 - DNA, 730 bp, Homo sapiens
ggaacaacaacgttcacaattgtccaaaaaagaaaaaaaggccacagaagatgctgaaggaggggatggccctcgtttacctcagagaagtaaatttgatagtgatgaggaagaagaagacactgaaaatgttgaggctgcaagtagtgggaaagtcaccagaagtccatccccagttcctcaagaagagcacagtgaccctgagatgactgaagaggagaaagagtatcaaatgatgttgctgacaaaaatgcttctaacagaaattctgctggatgtcacagatgaagaaatttattacgtagccaaagatgcacaccgcaaagcaacgaaagctcctgcaaaacagctggcacagtccagtgcactggcttccctcactggactcggtggactgggtggttatggatcaggagacagtgaagatgagaggagtgacagaggatctgagtcatctgacactgatgatgaagaattacggcatcgaatccggcaaaaacaggaagctttttggagaaaagaaaaagaacagcagctattacatgataaacagatggaagaagaaaagcagcaaacagaaagggttacaaaagagatgaatgaatttatccataaagagcaaaatagtttatcactactagaagcaagagaagcagacggtgatgtggttaatgaaaagaagagaactccaaatgaaaccacatcagttttagaaccaaaaaaagagcat

SEQ ID NO: 52454 - DNA, 1156 bp, Homo sapiens
tcgaccaagaagttctttaaagaagaaataagatctgacaactggctggcttcccaccttggactgcctcccgattccttgctttcttatcctgcaaattactcagatgattccaaaatctggcgccctgtggagatctttagactggtcagcaaatatcaaaacgagatctcagacaggagaatctgtgcctctgcatcagccccaaagacctgcagcattgagcgtgtcctgcggaaaacagagaggttccagaaatggctgcaggccaagcgcctcacgccggacctggtgcaggactgtcaccagggccagagagaactaaagttcctgtgtatgctgagataacaccagtgaaaaagcctggcatggagcccagcactgagaacttccagaaagtgttagccttctcccaactgtgttataccaaccacattttcaaatagtaatcattaaagaggcttctgcatcaaaccttcacatgcagctcccatgccaccctccagaattcaccaacacacaggcccaccagcaacaggctacctttgcacaatattctctgatgacaactccaaagccccggctctttccaccacactgtggtcccctagatggggctgttgctgagcccaccccaatgcagatgtgatccccctgtgatctacttctggcaagattctcagtctggacaggtcttccctatgagatagaacctgataaggagctagggcaattctgacaacattaccaaaggcccacataacttctaaattttggtctggtctgaaggaaaacctgttcttgccctagtgatggatgaactctcttatctctggcttctagagaaaaaaaaaagcatacctcttttactttttaagtacctccatcagagtcatgaaatcacctgtcaagactatctatcttttatgtttccattctggtaagaactctttaaatgaggacactgctgattgctggtgatgttttttgagcaaacactcgggggtatggatgaaagccaatcgcaggtcaaatgactccttggggaagctacttctcctctattcagatttcactaaaatcttccaaggtgaaagcaaatctaggatttcggtcttcattggctgtccatttttgtaatgaacgagtgtttttc

SEQ ID NO: 52455 - DNA, 712 bp, Homo sapiens
  misc_feature (1)...(712): n = a,t,c or g
cgtcgttctgcagctgcccaaatgcagccatgatgcatttgctttaaactagctttattttcagggggtgatgtttacctgaccttatccccaaattctttggcacctcacagtggaccccatgtgtacatccccatccctcccaggccactactgactttgtatcttgcgactcttcaaaggactggtgagaatggcactttgtacagaagacacacctgaaatgggagggggggtggacagaacttaaaaaaataaaagggccagccacagtggctcacacctgtaatcctaacattctgagaggttagaagcaagagggatggcttgagcccagggcatttgcagccagcctgagaaattagagccgagaccctgtctcaatcaatcaatcaaaaacgacagagatagatagatagatgatagattgatagatnnnnnnnnnnnnnnnnnnnnnnnnnnnnnnnnnnnnnnnnnnnnncaacatggtctaaatgagtctaggagtggagtgtccttgaacttggggagaccaccctccactgcatttgcattattgatactatggctggagagggccttttgcctaaaagcttggagtatgttgggtcccccgaggagcaggtnagggccagaggttccagatccagagggntgggaaaaaagggaggttggaggaacagggaaagaaaaacctttttaattaaggaac

SEQ ID NO: 52456 - DNA, 415 bp, Homo sapiens
atatgtgtatatatatatatacgtaaccactttcataggtaaaaatattaacttcatgtcacactatgatcagaagtatttccagttaaagttttcaactttgaacaactaaaaattaatttaaactcagtttgtttctttacattatccagctgctctcgttaatggtatcaattcattacattaacttattatcatttaagtcatattcaagttgagtatgtttaatgatactaacatgtgcaaatcaactacttcaaactcttctattccaatcctcctttttaaagacgaatgttaccttttttgtaactaagcacatcaaatacaaatactttaaaaagaaagttttattctagcctgctctctattttaagaaacacacaaagtgaaacctataaatatcaacattttg

SEQ ID NO: 52457 - DNA, 3578 bp, Homo sapiens
aatacctctagttccttccccggctcgccactgtgcacgatctcccgagacttggcccagaacattgcggatcgggtcggcgccattttgggactgagactggttgtgggggagggaaaagcggcaaaaggggattattcaaagtaccgaaaaccttctcccgggatcaggcgcggcggcacccccaggccaggggcacctctggtggggcagaaggtgattgaattactcagatatgaagatcatcatctaggttttgtgtaaaaggccctggatattttaagtggccattttggatttacagtgtttttggataattttgccccagaagtttattaaaattggcaagaatcgtctgtgaagtgaattgatagtagtgaacaattcagcaagctacttaaaaagagacccaggcagcatttcttcagtattttggttcaaacggattatataactggttacagtatttcagctggtggtaatttttgcctccccttcccccaccccgttgttggggttcttcagccgaaactgagagacgttgatttgtgtactgagtagtttcagcagtttcaaatgactgagtattgctgaagtttcatggcagtttatttttacctttattgaaagttttaggaatttttgacttcagctctttcatgtcacaatgggacactttttctgaatgaagagattgaaagaatacagagtttttttccttttatcttttatttacgtggaaatttaagatgttgcagttttccggcagcatggtagtattgagatagctatgtgtgtctctgtatatgctgatgtttaggaatgctcttcagatgtgaaattttctttttgtttttgctttttggctcgtaaattggatatttcatctggagtggacaagtacaacagtggcaagtacatggaataataaagaagactttgatcttaaatctaaagaacttggctaattcgggagatagccatatgaaaactttaaaacagaagtatgggtagctgacttgaagtaactctatgtcaaatagtcgtaggttaagtatcttcaaagaacttcgatattatttcagaggatacaaaataaaaatacaaactggaaaataaagattacagagaaaaaaccaacaccttcctgtgcagtcctgttggaatttggacttgccatgaggtgttgaagccttgtttcactgagttggagagactggacctaaatggcgcagcatgactttgctccagcctggcttaatttccctactccaccatcatcaacaaaggtcctgaccagcagtttgaaatcgtcattgaattttgagaagcattctgaaaactttgcatggacagagaatcgttatgatgtgaaccgtcgacgacacaactcttcagatggctttgattctgctattggacgtcctaatggaggtaactttggaaggaaagaaaaaaatggatggcgtacacatggaagaaatggtacagaaaacataaatcatcgaggtggataccatggtggaagttcccgttctcgtagcagtattttccatgcaggaaaaagccaaggactacatgaaaaccaacatacctgaccattgaaaaccggggaggaaaggaagacaagagagaacgcaaacagtttgaagctgaggattttccgtctttaaatcctgagtatgagagagaaccaaatcacaataagtctttagctgcaggtgtgtggggcctacacgcccagacacacacatacccaaccaaaaaaatctcccaagctcctctcttagaatatcctccgaatcctaaatctagagctccaaggatgctggtcattaagaaaggtaatacaaaagacttacagctatctggattcccagtagtaggaaatcttccgtcacagccagttaagaatggaactggtccaagtgtttataaaggtttagtccctaaacctgctgctccacctacaaaacctacacaatggaaaagccaaacaaaagaaaataaagttgggaacttctttccctcatgagtccacatttgggcgttgggcaacttttaatggctttttaaatcaactggccaaggagctttagttccatcttacaaatttcagtgaaagagtgtaatcgctcaaattcctcttctcctgttgacaaacttaatcagcagcctcgtctaaccaaactgacacgaatgcgcactgataagaagagtgaatttttgaaagcattgaaaagagacagagtagaagaggaacatgaagatgaaagccgtgctggctcagagaaggatgacgactcatttaatttacataacagcaatagtactcaccaagaaagggatataaaccgaaacttcgatgaaaatgaaattcctcaagagaatggcaatgcctcagtgatttcccagcagatcattcggtcttcaaccttcccacaaactgatgttctttcaagttcacttgaggcagaacacagattgttaaaggaaatgggctggcaggaagacagtgaaaatgatgaaacatgtgctcccttaactgaggatgaaatgagagaattccaagttattagtgaacagttacagaagaatggtctgaggaaaaaatggtattttgaaaaatggcttgatctgtgacttcaagtttggaccgtggaagaacagcactttcaaacccacaactgagaatgatgacacagagacaagtagcagtgatacatcagatgaccgacgatgtgtgaaggatttcctaacagctttagaaatcttagtgtgatacatctctcatacagtttggggtgaattgtaaaaatgaagaactataatttatgtagtgaaataccccattagaagaggattttttgggggacttcaatatgaagaaaaccaagaatgttttgttgggctgtgttgaacattatttctttgtaaatgaatgttgtaggaatgaggacttgggttggtccaacattgactttcttcatcactgcaacatttctctgactagcaatgtgacgatgtaacaaatgagattttctcatttaataataaaaaattgtgtaatgttttgcaaagcttctgtcttaaaatgtccaggtcttaagaaaaaaggcagcttacactgttttgcttgcagagtcatatctttttcgtacaatggaaatcctcaagtccactttgtgcggtctccctctccttcccccaaaaaacaacaacaacaaaacaaaaaccaaaaaggaaaatgtagcatgttggctaaaactggagcaaagtgcactaaaacaatttcctgaactcacctgttgtactattcaccttttaaaccataaattgctctttagccatttgtagtgcagtaaatgttacaggaaaagacttggcacattttcttccaaatttcaagaggtgattttcaaaagctttattggggtatgttgtcagaccagggttttcagagttgatggaaaagagtcttgtgagaaaacttattttgataaattattacacacgcagaaaaactgatcacactgactggatctgtccacgacatggaaaataaactggattttcag

SEQ ID NO: 52458 - DNA, 1252 bp, Homo sapiens
ccgaggtggagggccggtctgaagagtggcgggactggcttcacttcctccgcggttcctcggagccgcctcgctcctcttcagggactttgctgagaagggctctcgggcgtccagaccccaccgcaaaggtgtttggcgatccgccgagaagttgttggccccaggagcatccctcggggccgagatgcgcagtggacgatgccccttctgacccaacagatccaagacgaggatgatcagtacagccttgtggccagccttgacaacgttaggaatctctccactatcttgaaagctattcatttccgagaacatgccacgtgtttcgcaactaaaaatggtatcaaagtaacagtggaaaatgcaaagtgtgtgcaagcaaatgcttttattcagggactttaactgcacttcgaatgtgttaccaaggttatggttaccctttgatgctgttcctggaagaaggaggagtggtgacagtctgcaaaatcaatacacaggaacctgaggagaccctggactttgatttctgcagcaccaatgttattaataaaattattctgcagtcagaggggctccgtgaagcattttctgaattggatatgacgagtgaagtcctacaaattaccatgtctcctgacaagccttatttcaggttatctacttttggaaatgcaggaagttcccaccttgactatcccaaagattctgatttgatggaagcatttcattgtaatcagacccaagtcaacagatacaagatttccttactgaaaccctctacaaaggcattagtcctatcttgtaaggtatctattcggacagataacagaggcttcctttcattacagtatatgattagaaatgaagatggacaaatatgttttgtggaatattactgctgccctgatgaagaagttcctgaatctgagtcttgagtatgacaattcactgatatttatgtgtacatttatgatagatgaagttcttattctgagtacagtactctttgtcatttcatattggattttctatagagaagaagcacaatggggaagataggagcaaggtcatgtaccctaatagttactatgttttgtaaatccattttgtagagggcatgtaaataaatgttttcctgtagtcatagattattcaggactgtcctttagttctgtcttttgaactcatgggaataattgtgagtcagcgtaacatttcaagagtctaaaggtggccgggtgtggtg

SEQ ID NO: 52459 - DNA, 759 bp, Homo sapiens
  misc_feature (1)...(759): n = a,t,c or g
tcactctctacccgctgggcggtaccccgcatctcgctctggccgccccagaggttcgcggcttctggacctgctgtgcccctctccagcctggatcaggacggagaacacccccgaaacccacctcaccagcacagccggcggacccttccggaggtggccgcagagactagccaacttgcgcgcccgccgacccggaccacagctcccagcacacctcaagggcccacgcccgccaggactacaattcccggcgtcctccggaagctcaagtgtacccaggcgcggtgcctgctgggaattgtaattgacgttggtcaacacggaggccacaggatccaacccggcctttgtgggactgaggtggcgctgagtgggagagcagcaggcantgcgcgaaaggcgggacttggagataaatactgagcacccacaacaggcagccagcaccactgcagattggatactgcaatgatgataagcatggcctgcctttatggaggttctgnnnnnnnnnnnnnnnnnnnnnnnnnnnnnnnnnnnnnnnnnnnnnnnnnnnnnnnnnnnnnnnnnnnnnnnnnnncagagtnnnnnnnnnnnnnnnnnnnnnnnnnnnnnnnnnnnnnnnnnnnnnnnnnnnnnnnnnnnnnnnnnnnnnnnnnnnnnnnnnnnnnnnnnnncattccttcggcctccaacatctccccttttgtttttgcattaattgaataaaggtaatttcaggctgtgcagctttca

SEQ ID NO: 52460 - DNA, 314 bp, Homo sapiens
ggggaagaatgtgatgctagggagattatcaattgctggctctgaagatggagaggatctgggagcacccccagctggcagccagaaagagggcagaggcttcagccctgcagctgcaagaacctgaactctgccagtggtgtgagcttccagggaggatccccagctttgggatgagactgcagcccagccaacacctcgatttcttgccccgtgatgccctgagcagagaatccagcaaggtcatcccagactttctgacctgtagacctgttgagcttaagaactgtgtgtttgttttcaagtcactaagt

SEQ ID NO: 52461 - DNA, 1060 bp, Homo sapiens
tccacagggagctccagcccttctcacactcgacccgcagaaaccacccaccttcaccatgtctgacgaggaagttgaacaggtggaggagcagtacgaagaagaagaggaagcccaggaggaagctgcagaagtccatgaggaagttcatgaaccagaggaagttcaagaagaggagaaaccgagacccaaactcactgctcctaagatcccagaaggggagaaagtggacttcgatgacatccagaagaagcgtcagaacaaagacctaatggagctccaggccctcatcgacagccactttgaagcccggaagaaggaggaggaggagctggtcgctctcaaagagagaatcgagaagcgcccgtgcagagagagcggagcagcagaggattcgtgcagagaaggagagggagcgccagaacagactggcggaggaaaaggccagaagggaggaggaggatgccaagaggagggcagaggacgacctgaagaagaagaaagctctgtcttccatgggagccaactacagcagctacctggccaaggctgaccagaagagaggcaagaagcagacagcccgggaaatgaagaagaagattctggctgagagacgcaagccgctcaacatcgatcaccttggtgaagacaaactgagggacaaggccaaggagctctgggagaccctgcaccagcttggagattgacaagttcgagtttggggagaagctgaaacgccagaaatatgacatcaccacgctcaggagccgcattgaccaggcccagaagcacagcaagaaggctgggaccccagccaagggcaaagtcggcgggcgctggaagtagagaggccagaaaggcccctcgaggcagagaccctccgccctcttgcacaccagggccgctcgtgggactccacatcctccagcccccacaatcctgtcaggggctccctgacagtcctgggggtggagaggccatcccggggcgtcccccgcgtctgtgtccttgctgccttcatcccctggggcctgtgaataaagctgcagaacccccttca

SEQ ID NO: 52462 - DNA, 455 bp, Homo sapiens
  misc_feature (1)...(455): n = a,t,c or g
nncttganaccgntatgactgattacgaatttaatacgactcactatagggaatttggccctcgaggccaagaattcggcacgagagtagactaggaactgagcccaggaaagggggatgttttcctggtgtttggatggtcagctgggagtgtccatcatcaggggaagatcaaacacaggtgcactcagctgcccagggcctctgggacacttgccttgacttgcaacttgccttgaacatcacgatcaaagcagcaggtgctgtggtctctcaaaattgatttttatttgactctgtggctctaagactgccttgaaccgcctgaggcctatgcatctgaacaagtgggtctctcccttgagcaccaggagtgggtgccagccggccccgaggattcccagcaccccacctatggtcttgccagcataggcttgctagttccttcttggtca

SEQ ID NO: 52463 - DNA, 850 bp, Homo sapiens
ggaaaatatttgaatggtgtaagatggtggaaggaaagccatcccacacccctacaacatatgttctggcatttataaactgcttgattgtgtgcctcaaggggagaaaaagtcaagcaatgcttcaaaggccaggctttctaagcaaatgagtggttcaaagcagtgtttggctcaagggcagtctggttttatggatagggccgacccaagacatctgctcatgaagaaatgtggcatctgttgccatttcctaaactataaggtttagatagattgtcttgaattttgatagcaaatttttttaaatttatatttctgcctcctcgtacatccttatatatggaaaaaaaagtaagagttcctcagatcagagctcagtagctgtgtcaatttgaagttcaatcagtgtagttgtcctggggtgatcgctgactctgctctgtttcatatttcagttgcttgctccaaggagagaatttctgagaacaatgggtgttagcaactttaagttactccccaaacgtttgctggccacattctcatttctaaacatctggatctgggtaaaggtttgaatagatgtagggaacaaaattggtttttccatggtgtagtctaattttgccaaatcacccaagaaagaaagtatatgacgtgtggagtttgcatttcttggatgggacctatcgggtcacccagcccagtcttacagtcataaattcctacctcttagttcctgccaaagggccttcagcctctgtgtgcacacttattgaatgaatgctttgcctaaagtttggccttttgaagaaaaacagcatgtgataatataaaaatatgagagttt

SEQ ID NO: 52464 - DNA, 570 bp, Homo sapiens
ttttttttttttttttaaaaaaagtgttttcccctttattacagaactgatacatatacattattgaacattaaaaaatacaaagaagacattttaagaatgcaattaccaaacattttcccatccaaagataatcacttagttttttggtgtatccttctccccgccacccaactcttagtttgcaaaatttcaaacccacagcaaagccacattgatagtacaatgaacatctgtcgaccagtcacctagagtcaccaagtgttgtcattttgctacatttgacttgtctctttctttctttatattcatatgttttatatttttccacttagtcactggaaattcagtggcagacactgtggtaattaatatctaaaaacttcagtatgtttgctaagaacaagaatgttctcctacatagccacagtacaaatgtctcactctgaaaatgaagccgggcacagcggctcatgcctgtacacccagcatttatgggaggccagggcgggaggattgcttgagcgcagggagtttgagaccagcattgggtaacaaagtggagacccc

SEQ ID NO: 52465 - DNA, 522 bp, Homo sapiens
cgctgcgcaggcccgtgtccatgtggcacgctgtccggcgaaactagcaaccagggcgggccagttgggcaatggagctgctggagcccggtacccactcagctctgtctgatgccctctccatagcccagctggagccgtgaacactggggtcccctggcagagtcctcatgacccatcctggtctctctgtccagattgcagcaaaggagtgggcgtggctctgtgtccagggccccagggtctgctcctgctgaggaccagctgtggctgggccaggacagaggactcaaccctgctcctcccggtaggccagctgccgagccgggctatgttctggaacccagtgaatcttgggggccaggcactgtgctaggcaccagcaggggtaacacgaagaagacccggcccttagggcatcaggaagactagctcccctgccccggaggatctgctcagtgctgatggcagcccagctgtggtggactcaaggggctctgaggctaaggaaacaagaaggcc

SEQ ID NO: 52466 - DNA, 1598 bp, Homo sapiens
tgtgaccagccccggattcaggctgtactaataccaggtatattatggaatttagtataaaggccaatctgtcctgaagtccatctaatgtgatgaatcactgaaagtctcagaaagacctggttagtgtatgttctcatttaccacaggcctaccagccctgggcacagcagcttcatggcaagacataaaatgacactcaaaatccttcagatctggaaaccggctcagtattaaccctacctttggttgtcctgccctacctgctctgttagtttcttgttgcttgaactgtcttctgtcttatttcccttcctttctgtgttcctcttcacctcttcttgttcccctccccgctgctctgtaggtcatgttgggtccttttcagggcacctctgtggcatagctcccctttggtaagttttcttaattgtcatagattaactgagtttcctgggatgctaatttcacactttcggttggaggagatctccattgttcctacccctccgggccaaatgggccccaggtttccaaggaaggagcaatctgtgactcctaaaatgggttggggccctgccagagttaaagcagtgactggagggtggactggggggttgcagcatctttagacctagatctgtctaactctggggaggcacattgacatttccattacacacagcactgctgcggtgccagggacctagcgcagggcttttggtaatccataaaatggattctgagactgcgacggcaaggctgtcctgtcccccaggcacccaaggatcctgccagacagcacactttggaggaaggtctgcagggagcagctgagccatttgttcttgaactctgggaggcagaagtccccgcacccatcatgcgtggactgataggacatcttttcgtggtgtgcaccagtgctttccacacttgacagtggttggctttgatgaaccctcatgctgcaccttcagagccagtcctctagtttggaataaaaattgcagaggtggtttttgggtctttaccacctgcggctggtggacagcagccagtgtgtctggacacccaggggcattgagactgcatgttgtcacatgaccacttctcttcacacatctgctttcagtgcctggtgaaaaatagaccttggcctaacagtgtgactctctccaccgcctcagtgtagggaagggtccaggccagggaaggagcaccctctagtggaggcgggggtgaattcttaggtcgagctgatgcaagaaactccggtagcccagcctctgtgaccttgtacatgagtttggtgtgcctattgtgatttaaaacaggtgggttatcaagaggaacttgagatctctttattacatggacatttacttcagggggaccactgtaagaaaagccaaactccaagaccaagtaagttagaggagtcttgattttttagacttcactgcggagttctgtacaccctttgccctgatgaatttgaatgggtttgatttgcaaatttggatttacacccattgttttggaagcacatcagctgaataaagttgaggtttattttatttagaaaaaaaaaaaaa

SEQ ID NO: 52467 - DNA, 371 bp, Homo sapiens
cctggttccagaacctcagttatgaggcagctccaagtcatgaggtggtggtggtggtgcagagtgtggcgaagctggtggggccaggcccaggccctggagccaccgccacggtgactgtgctagtggagagagtgatgccaccccccaagttggaccaggagagctacgaggccagtgtccccatcagtgccccagccggctctttcctgctgaccatccagccctccgaccccatcagccgaaccctcaggttctccctagtcaatgactcagagggctggctctgcattgagaaattctccggggaggtgcacaccgcccagtccctgcagggcgcccagcctggggacacctacacggtgcttgtg

SEQ ID NO: 52468 - DNA, 385 bp, Homo sapiens
  misc_feature (1)...(385): n = a,t,c or g
cacccagaggtgctcagttgcttccacctgagaggcagggctgcacaggagcaagagtggaggccctgggtcaggcagatctagattcaaactcccgagaagggtggagggaagtgctccaagcagagcagagactgaaggcgggagagcctggtgcaccgcggacctgcagggggaaggcgtgagagctcggtgcactggggacctgcatggggaaggcgggagagctcggtgcactggggacctgcatggggaaggcgtgagagctcggtgcactggggacctgcatggggaaggcgggagagctcggtgcacctcggacctgcaaagggaaggtgggaagcttgtgcaccgcaacctgcanggggaangcgggaaactttgt

SEQ ID NO: 52469 - DNA, 1077 bp, Homo sapiens
cgaggaccccgcggacccctgtgccctgctccagcgaaggcaggcccaggctgtgacagccgccaggtatccagcagcacgcccaggtgctggcctcccctgagcagagtcctctgcacacagctctccttccttaatgcccagagataagggtggcttgagctctggttgcacagaaccgcatcgtactgtcacgtgagctggacccaccttgctcctggtctgcggcagtctctacagtgcgtagatggaggaatcctgttccctggaggttcggggcagccactggtagggtgccagcaacacccccttctcttccagcacctgctgttccccagatggcccctgcagaagctgctcttctcagctactctgacccagaaccctgaaaagctgcagcagctgggcctccaccagccccggcttttctccacagggctagcacacaggggcctggaagatacagatggggacggggattcggggaagtatgcctttcctgttggggctcacgcaccactacgtgccctgcagcctcagctctaagccgctggtcgtcctgcacctggtcctggagatgggcttctcgagggttctctgcttcactaactcccgagagaactcccacaggctcttcctgctggtgcaagcttttgggggtgtggacgtggctgagttctcctcgcgctacgggcctggccagaggaggatgatcctgaagcagtttgaacaggggaagatccagctgctcatcagcacggacgccaccgcgcgaggcatcgacgtgcagggtgtggagctggtggtgaactacgacgccccccagtacctgagaacctacgtgcaccgggttgggaggcacagctcgcgctgggaaaactggacaggccttcacactgctcctgaaagtgcaggagaggagattcctccgaatgctaactgaagctggggcacctgagttgcagcggcacgtctctccaggcaagctgctgcagccgctggttcctcggtacgaggaggccctgtcccagctggaggagtctgtcaaggaagagcgcaagcagagggcgcctaggc

SEQ ID NO: 52470 - DNA, 382 bp, Homo sapiens
  misc_feature (1)...(382): n = a,t,c or g
cgaactgcggcccggaacgcatgaggaagggcccgtcccgccttccccggcgcgccatggagccccgggcggttgcagaagccgtggagacgggtgaggaggatgtgattatggaagctctgcggtcatacaaccaggagcactcccagagcttcacgtttgatgatgcccaacaggaggaccggaagagactggcggagctgctggtctccgtcctggaacagggcttgccaccctcccaccgtgtcatctggctgcagagtgtccgaatcctgtcccgggaccgcaactgcctgggacccgttcaccagccgccagagcctgcaggcactacctgctattgctgacatttttgtcttttanggggttccttccagagtcc

SEQ ID NO: 52471 - DNA, 365 bp, Homo sapiens
atttcattaacacatatatatactaaccaatttgctaaatgaattgtcggttgtcctgcttaagtactagggccaagctttgaaatgacttaaagtgatctgaattttgattgagaaaaataatctgtcttctatcgaatgtttgaacttttagtgatgagcctcagcaaagtttcaccctgcatgaagcagaacaggtgggggaaaattacaagaggggtctgtaccaaaaatggccccaggatattccattgaacaaatattgaccattatcttcctaggtgctacaactccatactagtcattacagttagtctttggtttcacaaaaatgttactgcttcaaaggcttggcattaacagtg

SEQ ID NO: 52472 - DNA, 382 bp, Homo sapiens
cctgtgcatggcctggtgcacacggaggtggtggagctgatcctgaagagtggaaacaaggtggccatttcaacaactcccctggagaacacatccattagagtggggccagctcggaagggcagctacaaggccaagatggcccgaaggagcaagaggagccgcggcaaggatgggcaagaaagcagaaaaaggagctccctgttccgcaagatcaccaagcaagcatccctgctccacaccagccgcagcctttcttcccttaaccgctccttgtcatcaggggagagtgggccaggctctcccacacacagccacagcctttccccccgatctcccactcaaggctaccgggtgacccccgatgctgtgcattcagtgg

SEQ ID NO: 52473 - DNA, 1687 bp, Homo sapiens
ttttttttttttgtgttaccaagaagtgttttatttttcttgcagtagctttgttaattgcacaaaatcatgttttgtttttgccatttaaacattatcacacaatcctattctgaaagacaaatgttcattaaaaacaaagcaaaaataaaaattcacaaccttaattacctagatttgtcatttaaaggtttaaagaaaaaagggaggggctttcttacaagctttttcacaagtgtcacattttctccttaaaagggaaggatttcaaaagaaaggtgaaatagcttaaacagaaatattcataaaaaggaactttacagaattgtcaacaatattaagacaaaattgactaaccggtttcattaccgcatcttcccccgcccccacccccagtgtgttccgccaggactagaacaggctttgtgttcagacagaaatgcttcaaaatcccagtgaaatgaactgtgctaaaaacccgacaggcatcttccctgccctccccccactcgtcttctgcaatcctctaacccagtttctaatctctgaaaggggccaaagctgtgaggggggaaggaccccgccctagtgtggccaccgctatatataattacatattgcatcgtaaatgctggccttccttctgcaaattatgattttggaaaatccaacccatgcagagggataaaaaactgacatcccttgggtaacttttttttttgcaacattccaagccccccccggtcccctatccaaggacaaatgtagggcctctaggatgtcccagacccacctcggagggccagtcagttcaggtaggtcaggcccagttctcttccctcccgacagaccccgggcccgggaagcaccgaagaccatgatgctggctggagtgaagacactcgtttccgtatcaagagctgagcctaagaaatgctcatcgttggtcaggctgggtctgggccaaagggacagacagaaagaaatactgtctccacgggaggaagagggagaggagggaggatggagagcggtgggcatgcaggggacttggcagggcagggttggagaaggtgggaccactgggaggggaccgaggtaagagtggctcttcagagccaggtgaagagtctgtggcctaacggaaacagaaaggagcgcccccaacccccactcctcttggctcatcactagtggccctgaggactccctcccaagggatggaatgcaaatccaaatactaaaacagcctagggaggagcgagcgcccgctgtggcagtggcatctggggcatggcttcgaggcggtgagggccgggcctccatgctcacctgcaggccggctgcttgctgcactccctggaaagccagggccccatcttctcgggactctgccagtctcttttcagttcacaaaggcgtctatggagcgctgggtgcacactggacgcttagacgtgaacatctttctcagctcatcacctgaggttggagggccaagggcccctctgtctggagtctgtactggctcatcgtggccaaggcctctccttgtagggaatccagtgggggatggggacatgactacagcctcttcgctctgggggaagctgtgggaaggcttccaactctcgttgctgattctagttccttgactggaaggggtttgagataagacaagctcgga

SEQ ID NO: 52474 - DNA, 971 bp, Homo sapiens
ccccggtcctaaattggttatagtttttgactattatctgaattagtcttatccaaatttcatatgcagattgatttttcattttgtatgtatattacatgatataactattttcatagaatatatttctaatttacaaacactgaattattagcttgatagagtttctcccaaaccttataaaactttgaaatgtacttatgtttgagctttaaaaattataaaaacttcatttaaacaagttgctggcatcattactagcctttccacctataattatgatgcatttgatgccactgaacagtaatagcacaaagaacaggtcacacagtctagactggattgagttttaattaaacttcttcatccatagcctgataaggaatcaggctgggtctaggaagagttatcagactgtagggcctgtattaattttgcaagctaatgttaatgtttactgccagccttgcatagcaatgccagtttgcagttgtgactatgatgtgacttgtggtaaaaatggtttatatctaaagtagtttagattttatggaagtggctcttgattgtttggacaagcagggtaggtaaatttcaattacgtttgaagtgtaattaaatcctagaatagagcactctccagaaaaaaaaatgaaaaaagaatttggagaatatcctggcatgaaaacttttttgaataatacgtagaattttgacaaggttcatacagtgcatacagtgtgaccttttctgaggtgggcagggagggttgctacgttgtgttgatttaaaatttcaaggaggaacaaaaacattctagccaaggagaattgcattgttatttttttttctactaatttaaacgtgcatttttcacagttacacatttaagttttgctaccaaaaatggccatttttctagacagataacattttcctaaagtggaagagagatccactgttctaaaaaa

SEQ ID NO: 52475 - DNA, 985 bp, Homo sapiens
tttttttttttgaaatggcaatagctcgcttttaataacaacatacaaaagtctggagaaagccccaaagtagtcccctgttcccagagcccaaagaataaacagatgggagaacaagaccctcctcttccttttcccccacagagaagatccctaaacacatcaccggaacccctcaaatattcctgggaacttcaaacaaaaaaacatagcaacaaagagacccagcttccagtttattcccagttgggtaggggacaggcctgctctcggggagggtaccgtgcatccttgcagatggaaacgccttcatgctggaccaggccgagggcaggcctggggctgggcagctgctcacacgaaccaatgggggtgcccatgtgagcctctgagcaactcctctgcctcagtgagctggtctgagagatgggaccaacacacgccgtcaaaggaagtgagttctaggaaaccagggaagatgaaaagacacccccgcccccagaagacggggtcccacctagaaccttcctgggaggatgccagccccaccccacatcagacaccctttggcagatatcctgttctgcctggctaccgaggcctcccgactaccctcagaatccaaattctgcaggttcctccgtgcgaggcccagcgtgggatgtcccaggttggaggtgtgcgtgttggcggtgttctttggctggaagcaaaaggccgttctggcgggatcggggccgtctgctcagctggaggcctttctggaactgggcgtgggtgaggtattcccagcccagggcaaagccatcaaacttctcgtgttcccatctcctattagaacaaagtggtaaactggggaggatgagctgggactgactcgggcgctgaagttcatccgcacggcattccagaatcttccaccggctttcctcaagaacatgtggacagtccaatgcactgagtgccctggctgggtggttccgcc

SEQ ID NO: 52476 - DNA, 410 bp, Homo sapiens
atagcattatgttcactactctatttttaagaaaaaggtacatttgtatacaaattgaacttaagttccacttcctttctcccatataataaatatacaaattaggctatgaaggttttaggaaaggactcgattccttcagatggtctctcaaaatataacacctcaaatttatcttagaagaactgtgaaaaagaattgtggcatttttcagtcactacagctccgaagtctgagcaagaagtgggtgtgaagtctcctctctggtttgtaggaagttgaattagtgttattcctgcatttttttcttccacagtgtttatgaatgaattcagaaaaaaagttgccagttagcttaatttcttcagatgcattgatgtggaaatttaaaacttgtcctaaacagcagg

SEQ ID NO: 52477 - DNA, 806 bp, Homo sapiens
tttttttttttgtacgtaccattttagtttttattaataaaatagaaacttagactcggacaactgctttattcttgcatctaatctgaccatatattggagtagcaattctttataaaaggacttcggtgagaactgtcaatatatcagttccatcaaaaactctaggttggaatatcttaaaaacagcaaattaaatatgagaaagcacagaaatctctccctcaaacaagaagggcttcctttaatagactttaatatagctcatttacaatcgtatgaaaatccatcaagatcaatcatgttgcacaatccctaaaggataaaactgagggaagtcatggataattttcacagcttcattgtaaagtccaagatcaaaaggatggctatcttctttaaactggacataagatgtacacaagatggtggccttggcggttactcttccaaccacttccacaattccagagatttcttcatcaaggggttccatcaactcgatggttccattttttccttctccatctgaaagaataaacatttttccggtgggatgaatctttctgcgatcacaggattcccggcggtgacttgaccccggaagtggggtgtgaagctccggtgctggtgcggcgggggactgcggggccagcctcaggtacctcgtctcgcgggaggcgccgcaaccttactgtttccccattcttcccgcgaacagagtcaaaagagctaggcgggagtcggcactagctgctgccgcggtgctgtgggtgctgcgtaccagctgttcactgctgtctcgc

SEQ ID NO: 52478 - DNA, 408 bp, Homo sapiens
ggacatttgtagagagaggcaatttgcaacagcagagcgtagagtggcagctctccaagaaattgttcgactcctgagaccaggtgggaaggcactcatttatgtctgggcaatggaacaagaatataataagcagaagtccaagtatcttagaggaaacagaaatagccaaggaaagaaagaggagatgaacagtgatacctcagtgcagaggtcactttgtggagccaaatgcgtgacatgggcagtcgagactcggcatcttctgtcccccgcattaatgactctcaggaaggaggatgtaattcaaggcaagtttctaattccgaagctgcctgttcatgttaacaggacttctttttattcgtcaagatgtactggttccctggcaccttaagggaaatcctg

SEQ ID NO: 52479 - DNA, 1317 bp, Homo sapiens
  misc_feature (1)...(1317): n = a,t,c or g
cccctgtagagtcactgaccttcatccttcaccctggtcctccatggtgcagcagcatctcatgggccttgtggctgtcagagcccgtggttggaaccccgtccactggtcccaaacctggaggggcagctgcagatgaggtttagacctcctggtgtctccgtggattctgagtgcccacgaggggaggggagggggtggcatcctggcctctaggataaatgcctggagtatacggcagcgccacgggcacttggagaccctgtcctgcgcatctgccaagcctggcagtttttagagttttttgaaatgttttgatactttttgatacaatttgctaataactgttttgtagaatgcctgccggggttttccacctcatccctttcctccggccccttgatttgtgctggacaacaaatggcagcaccaggacctcgcctcatgtggctttgtcttggatcttgcccttctccatcgctgatgtgatacagctctagaatttcgtgaagttgcatgcaaagttgcatgcagcccgtgggtatgactgtctcaggcccccagctcatttgccaagaggaaaccttaacccccctgagagggtctgcgtttcttctagagctcctacctcagtggtgtgcacagagttggagacacctgagggctggtccacgtctcacctttgccatacgggtcatttcttgatcaaatatatgactggggtcctggtttactcccgcccaccgtttcntttaaagtattcttaacatgaaatccacaaaagcggaaacaatgaaccattcttgcactttacagaatcattgtccttagctttagaggttgttaatttcttgtttttaacatgaacagaatgtgtggttctgaaggtgtgtgggggtctcaagaaattgtcctttggggccgggctcagtggctcacgcctgtactcccancactctgggaggccaagggggacggatcacctgaggtcaagagtttgagaccaccctgaccaacatggtgaaaccccgtctctactaaaatacaaaaattaggcagtcgtggtcgcctgtaatctcagctcttccggaggctgangcagganaatcgcttgaacccaggaggcanaggttgcagtgagccgaggttgcgccactgcactccancctgggtgaccgagtaanactgtctcaaanaaaaaaaagngaaangaanannnnnaaacnaattgcccttgggtnctnagttacananttgangaangtaaanttccggnnantggggggaanncggnnnaccctccttgnnttttctttg

SEQ ID NO: 52480 - DNA, 504 bp, Homo sapiens
tatattgaaaaagtgataaatgtaggtatcctgagattctcaactataaaaagaacagtaatagcaatttgaataatacacataaaatccttaagagtgtctgctacataacaaaggcataacaaataatggctattattacagccaggatgaagaatactaataagagctttcaaactggaccaaccactacttccgtgtttcaagttcatttttagcacatgaacatgatcactgttagccagtgaagtagcttctgactagatcattgattaaatctcacaaaaaaacaaaaatagtatatggaaaccaagatgagagcaaaagaaaacgttacctgagtaggcagctaaaacatattttgacattatttttaagcagcattcataaggttcacggagcacagataataaaagaaaaagcaatgtagaagtcttaaaaaccaaaggaaattgctatgaaagaaaccctaatgaaaggtaagagatttccaaaggaaacaga

SEQ ID NO: 52481 - DNA, 917 bp, Homo sapiens
gagagacaaaagggcacaggctcgtcctttgacacgctacctgcctgtccggaaggaagactttgatttgcggaccatgtagagactgctggccacaatattgacacctgttaccatgtatcaatcacagagaagacctgccgaggattcctcatcaaaatgggtgggaaaattaaaacgtggaaaaaacgttggtttgtttttgatcggaacaagcgaacattctcttattatgcagacaagcatgaaactaaattgaaaggagtaatatactttcaagccattgaagaagtctattatgatcacctcaagaatgctaataagagtcctaatccgttactcacctttagcgtcaagactcatgacagaatctattatatggtagccccatcgccagaagccatgcggatctggatggatgttatagttacgggggcagaaggttacactcacttcttgttgtagtgaactgaggcaacagtccacttcagggcagacggcaataatctcttacaagaatgaagccatattcaaccccagatgagaaaacccaacagatccatcccttgagctgtaaacactcagaactcctttcatatcaagacaagttatttgtaaaaaataaagaaggggttttaatacaaaccttcataataaatagcaaaataattgaagcttccatgagaaagaaaacactattttgataaattggatcacttataggaacatttctaataaactgtttttaatcagttgtcggatttggtgaaataaactaaacaggttacagaatatctgtatgtacttggaaatacagaataactttatcacccaaatcactggcattgacattattggtaatcaactggctttttttaaaaaaggtagcattttgttgacagttattttgtaaacat

SEQ ID NO: 52482 - DNA, 373 bp, Homo sapiens
gcggcacgagatctgtcaggcgccgcccgggcggcagtatgcctgagggggtcctccgtgttcgcgcctcccgccgcctgcactgaaaggtctgtacctgagcctggatacttgaacagaggcagacactgcggctcaaaaccccaagggtaggtacctattgtgcggagtctcggaacgcctgcctggaagaagagttccggcggctccccgaacgcttggagaaagcgcttggatgcagttgcaggaatatcctagctctgagacaaaaattgggaacctcagcatgagtttgtcacctgaatgaaataaaaaaaatcacgttgaaggctggtgcagtaacatgtgcctgtagtcccagctactttggagg

SEQ ID NO: 52483 - DNA, 437 bp, Homo sapiens
  misc_feature (1)...(437): n = a,t,c or g
gggcgacgcccctcgggtggtcgaaggcggggtcaggatctgtgtgtctcgctttagatcaactgcgggacgtgattgagtctcaggaggaactaatccaccagctgaggaacgtgatggttctccaggacgaaaattttgtcagtaaagaagagttccaggcagtggagaagaagctggtggaagagaaagctgcccatgccaaaaccaaggtcctcctggccaaggaagaggagaagttacagtttgccctcggagaggtagaggtgctatccaagcagctggagaaagagaagctggcctttgaaaaagcgctctccagtgtcaagagcaaagtccttcaggagtccagcaagaaggaccagctcatcaccaagtgcaatggtaggcgggaggcccgtgctctcccccnggtatataaacggctctttctaacc

SEQ ID NO: 52484 - DNA, 697 bp, Homo sapiens
tgttgacttgatcttcagagaagattttctccaacgatgtagagacaatacaattcagggacaacaggtgtactatcccatcatctttagccagtatgacccaaaggtaacaaacgggggaaatcctcccactgatgattacttcatattctcaaaaaagactggattttggagagactatggatatggcatcacctgtatttacaaaagtgatcttctaggtgcaggtggatttgatacctcaatacaaggctggggactagaagatgtagatctctacaataaagtcattctatctggcttaaggccattcagaagccaagaagtaggagtgggcatattttccatccagttcattgtgatcctaacttggaccctaagcagtataagatgtgcttaggatccaaggcaagtactttcgcctcaaccatgcaactggctgaactctggcttgaaaaacatttaggtgtcaggtacaatcgaactctctcctgacagtccaggcaacacattttgccttttttaaggggagtttacctcattgttggttgttgttatttttattgtattattgttattttattattattattgttataattttattttgttgtcctggtcttaaactactcttggttgtcttcctaagggtgtttgttgacctcaagcaagaagagtctgcagttcactgatgttt

SEQ ID NO: 52485 - DNA, 437 bp, Homo sapiens
acccctccatttctcgccatggcccctgcactgctcctgatccctgctgccctcgcctctttcatcctggcctttggcaccggagtggagttcgtgcgctttacctcccttcggccacttcttggagggatcccggagtctggtggtccggatgcccgccagggatggctggctgccctgcaggaccgcagcatccttgcccccctggcatgggatctggggctcctgcttctatttgttgggcagcacagcctcatggcagctgaaagagtgaaggcatggacatcccggtactttggggtccttcagaggtcactgtatgtggcctgcactgccctggccttgcagctggtgatgcggtactgggagcccatacccaaaggccctgtgttgtgggaggctcgggctgagccatgggccacctgggtgccgtcctt

SEQ ID NO: 52486 - DNA, 703 bp, Homo sapiens
tttttttttttgtagaaaaaggctgacttttattttcctgcagagcatcttcctcgggagagcagggagccccaagtcatcgagttaagagcaggagaatccccttgactaggttggggtctgagcccagaggcagggcctaaggaggtgcagagactagggccgggagtggtgaggcaaggttggggcctggagggacagctatgaccgttgaacttgcagaccctggtccaccttcttggagtggaagccagcggtgcagaaggggacccctgaggcgcagaggcaagtaacagtgccaggggagtggtcagggcagatcctttccttctcaggaggctgttgagggggagagtgtcatgctctaaacagtgaagggacagatgacttccataccccactcttccttgctggtgagaagtggaccttggagttcagtggctgaaactcagaatttagggtatggagctggacccagagaataaagtctcaagtagtagaaggggcatctccttcagtccatggatttgggcctctggcatgaagcagccagggcctggatgttaaggatttagaattcagtgggagaggaagaacagggcttgtaaccagagtgagctcctcactctgcctccccatcctggggccgagagagcaggtggagttttctttgtagctgggccccggaggtagcggagtcttg

SEQ ID NO: 52487 - DNA, 310 bp, Homo sapiens
cagaaaccttcaataatgttaagcttcaaaggcttctggtacgtttgtctaccacagaaccaccacaatatatatgcttgttcttaggtttattgctttttattttaatggggtttggttgtttgggttttattttggttttggcttattttaaagtcaagtttagtttttactcaggtaaaggcctgaagtttcttgggcgtggaagaaaaagcttgggaagcctattaattcatggtgcagttcagaattgtttaaataagctctgtgccactgagcttaatctgaaagtatagtgacatgtgaagga

SEQ ID NO: 52488 - DNA, 728 bp, Homo sapiens
  misc_feature (1)...(728): n = a,t,c or g
tcctcaaagtaatctaacctaaacggtcatggtgttaaaactttttatggtgctaatcagaaaaattgatgttgcaagaaatgaggtctcaaaaatgggaatgtgcctcctcactctgcgtcacatgggaaataaatcctgaggccaggatcaccagtggggtagagtcatcttcatagtctcctgttatcctccccctgaacaaagaacaaagtgagactgggaagctagtgttggggaaacatttctgggataaactgtggagtggagaagacaatggagggcaaggcaaaaacccacagacttgtttacccatagaggccccactcacctccatgctgacagaattccagaaaaattccttccctatctcccaaacacctgaaattctgaaatattgccctactatttagcactttaagcttcagtgaggtgctgtaatggagagatagcttcatagtttagcctatagccaactttgcctcaagacctccagataagatgaagtggcttttacctcatgtgagtctcaaacgctggagagagagttccacaaccacccctgccctttctcccatattacgctcattagaaagtctactcagggctggggtgccgtggctcaatgcctggtaatcccaggcactttgggagggntgagggcgggtgggatccatctggagggtcagggagtttcggaggaccagcctggggccaacatgggggga

SEQ ID NO: 52489 - DNA, 1444 bp, Homo sapiens
  misc_feature (1)...(1444): n = a,t,c or g
ccacttccccatcccccccaatccctgcctttttttcccctttgcattttggcagcaggagcctactaattattgggtctagatctctgagtccaaatagaaataaaacataaatataaaattaattaagtaaatgcaaaatcttttttactcgccagtttctgcaactgaaataagcaaacatcaaattaactttttttttttttagtgatttccaagaacgatctaagacagtaaaacacaaacttttttcaaaatatcacccatttggtgtttagcttgaagtgtaagactatgtaacaactatagctactttgtaaaaaatgtactctcacctaaagcctaacatgattcattttttttttccaggaaacagaaaatgtctttggtctggtattaatatcaaaagaatttaactttaaaactgatcccaataagcatggccccttacacagttcatgaccaatatttagttatatgaaaatggttcattctcttctagaatctaatccagtgcagtcatctggtgaaagactggaagtcagaagacttttcaaaagcttctcactgaaatggtaatttggtaacacgggataaacagaattttgcataaatagcagaccttagtcactgaataccccattaaacagtactgctggaccatgatacttatatctgggagatgacttagttttaaattttttatgcagtttcttttcttgaaggaaaaacttccagacttcagaattttggaagctgaacgatgagcaggtttttcatattttgctgtctcagacatttttcctatttctcagactttgcagttcttttcttaggtgctttagagcacctaaaatatcagcttgctgtgggtcattcggtgctttctgagagtacagacggaaatgtctgatggtttccgataacagcacttcaggatctgcatctcttgcctgaagacgcagcatccgctcacaggcgatggcatagttcttgtgccaattcactgggtgctccttttgtaaatagacaatctccttataaaggtcatatgcttgagcgtagagttgagctttcacttttgaaggcatgtgagcagtttctgccaggttaaagatgaagaacggtgttttcatcctcgcttgccacatttcttcattggccacagattcccaagaagatggatcaaaccttccatattcttcggtccagttatagatattttttgtaagtttaatccattcctcagggttgaatacaatctccaaaggaactaatttgtcacaagacccccatggccaaagtgaatagttctttttccaggttgggtcgccttcatgaattcctcgtgccgaattcttggcctcgagggccaaattccctatagtgagtcgtattaaattcgtaatcatgtcatagcggtntcaaannccaaannnnctcc

SEQ ID NO: 52490 - DNA, 434 bp, Homo sapiens
gagaaaatttaaaggagcaaaaatttgcaagtcaaatagaaatgcacaaatcgagagaacatttacatttctatcacattgacatgaaaattgaaaatgtatagtcagagaaattttcatgaattattccatgaagtgttgtttcctttatttaaaaagaatgctaggtaatcttagtagaaaactaaaaagtatgataaacaacagatggaagaattcatggaaaatagacgagaaaaagtaaataaggctttctggagatgacggaaattttgtatgaataaaagccttataaacaatgaatacatttggataaacaactcattaaaatgcacattaatggaatacctgtcaaatagttttaatacttgtgtccagtggcactaaagagatatattaaaatagattctggttgagttgattataagattgca

SEQ ID NO: 52491 - DNA, 1295 bp, Homo sapiens
tttctagctggcaatccttttattcctccaagttgaaagcacttgtaactttacatacagataaaataaattatatagaaacagaaattccaaattaaataacaaaagtacaaggataaaaagcattagctaaaatttttttaatggtaaatactacctttatttaaaaaagttatacatgctagaaaaaagcataaatgatatatgtaaacaattgtttactcaatactttttttccttgaaaaaggtgcaaatgatctttaaatgtaaacacaaagttgccaaacatttttgtagttggggaaagggagaaggaggttattccttttaaatgcagttagtcttattcaaagatttttcttgcaaaatatattgaaaaaaatttgtctatgaatacaatgaggaaaaaaaactttaaccattgaaattattttttccttaaaaatttttaactttttaccagaaagtgcaatttgagagaagtagtaacaatgaccttatagaatgaagataatgatacattgtttgtataaaagaaccaagatattaataaaatgcctcaattgattttacactctttaatgtgtgctattacattaactgaataattcattcccttggaggctgttattaaaggtaagcctcagcttaaccaggcctgagcatcaagaataaattgcataacagaattcactgctgggagaagacatttctccctgctggtccttggtagcaataaggaaacaggaaggacagttgctttagtcagtaacatttttgagcaaaaactgttgcagagctgcatgtgattctcttggattctcaagacagcatatgagacttatatattgtttttataagaggcacctgagcagagctctagatctagcagaaactctatgagaatattatgaaaaaaagactaaataaacaagttcatatagaaagaaacaagacataaaattacactgatgaaaactgtagtgtctgagtcctggtttttattgatttagtatcccttctgaattgtactatttaaaatgagatgttgccttttcttgtttttttggtttttttttttaagattttcaagtcttctggtggttagtgcgagaataatgggtagctaatacattttgcatacctacctttattcctggtaatccttgttagtggaatcatgtggatggagtgtctagaaataatagccaaatcatatatagcccttctgcccttattaaatagtattttcaaacctaaatgaataccttacaaacaaagtaagtttgctgctt

SEQ ID NO: 52492 - DNA, 669 bp, Homo sapiens
gagcacacctaatactccccgaaaccttgctgcatggaaaattagcattccatatgtagacttttttgaggatccctcctctgaaaggaaggagaaaaaagaaagaattcctgtgttttgtattgatgttgaaagaaatgatagaagagcagttggacacgagcctgaacattggtctgtctatagaagatatcttgaattctatgtacttgaatcaaaactaacagaatttcatggtgcatttcctgatgcccagcttccttctaagaggatcattggccccaaaaattatgaattcttaaagtcaaagagggaagagttccaagaatatctacagaaacttctgcagcatccagaactgagtaatagtcaacttctggcagactttctttcccctaatggtggggaaacacaatttcttgataagatactaccagatgtaaatcttgggaaaattataaaatctgttcctggaaaactaatgaaagagaaaggtcagcatttggaaccttttatcatgaatttcattaattcttgtttagtctccaaaagcctaaaccaagtagaccagaactgaccattctcagccctacttcagaaaacaacaagaagcttttcaatgatctgtttaaaaataatgcaaaccgtgctgaaaatacagagagaaag

SEQ ID NO: 52493 - DNA, 364 bp, Homo sapiens
cagaaatcggtgctgctcccaacagcagatcaaggcagtcgtcaggaactcaggatccggggggtcttcacggcttctctgcccaggggccagaaccgaggaggccaggagggctgcctggggctaaggggtctaaggacctcgttgcacacgctaccaggagcaggggcatggagcacagtgagggggctcccggagacccaagccggtactgtggtaccccaaggaactgcttggaagagatgcttttggttttttccgttgttgaaagatgcatctccctggaatcattccatccttgccctggcagctgtggtggtcattataagcatggtcctcctgggaagaagcatccaggcaagca

SEQ ID NO: 52494 - DNA, 424 bp, Homo sapiens
ttttcagcttcaatgaatttttaattttgttcaatcttgcatttgttcaaccaaaaacaatttaaagaggaacacgacaatcagccttagattgagcaagttcagctcctcactagggagttcttgaatccaccatgaaaatcaacagtgtgcatctaacagttttcttttaatttgagaactgaaaagtgaatcatcacatcaaatattcttcagggtctctttggtttccagattaaacatgtaatgtgacggtcatcttgccacattctcacatttccattttaaataatcataaataagaaaaccttactattctttggcataacacagctgattgattccgctgagtttcaaagtcttagaaattgcactcattccttctttagagtcctgcttcatggcaaaagttttcagctgaaag

SEQ ID NO: 52495 - DNA, 244 bp, Homo sapiens
atacgaatctgaaatgagtttatttttttcaattaaagagataatattactaatcacaaaaccagaacctacccatgcccactgcctgcctctctgcccctcactctacaatgttctgttcttcccccacttcactacccatcctctaaaagtctctgattcatggttgttgattttgtccatactgaaagggagaaaattcttgtccaattagggttacattcaaatgatcagggagctagat

SEQ ID NO: 52496 - DNA, 334 bp, Homo sapiens
ctttgacccgagttgatggtcagcctcgaggagcagcaatagcctggccagaaaaaaaaaccaggcctgcgtcccagccaacaccttttgctctacatcacgctgcgagttgtgaagtggatcccagctctggcgacagcatcagcttggcccgctccatcagcaaagacagtttggcatccaacattgttaatctgaccccacagaaccagccacaccccacggccacgaagagccacgggaagagcctcctgagcaatgtcagtattgaggatgaggaagaggagcttgtggctattggtagagcagacgtggttccccagcatgctgaccc

SEQ ID NO: 52497 - DNA, 1062 bp, Homo sapiens
gaattgtgatacatgtcatctgtgtctattctggaaggttctttgttcatcactgtactcgcatcagcaaattttcagggtcctacctgtcactccaggctactgagctgaaccctcagaagctgaggtctccgagcatgctaagtaaccttttagcaaaagctggaggcaaactgtcgaatgctagcaggctttatgaaaggaaacataaggagtttgtgtagtcagaacttgcttaaatttgccttcggaattagggcaccataaactttagttggagaatgggacttaaattttcacatatatgtatacttaattttcagcaattatgacacaataaaaaggaatatgcaaatttattgttgtttcagaaggttttgcaggactgggaacgctttagtgtcatcaacagtaaacctcagatactgttctgcacagttcagaagtaccataccaggtattgtgagtggcaagaacgccaggggacagagatgcttctggtagatgagggccagagaaaccagctctcctccattttgacagcaatttctcactgtggccatttggcctccattatgttttgagaggaatttcttgagatcttgagaaatcaccatgattaggccaattgtcaatcagtattcagaaactagaaaggaacaatgagatacttgtttatggttctttagggcatatgtttgaaaaccctctcatctcagatctgtatagctggtgtgtgtttgtgtccataaatacacgtgcattgctgtcgtgcccattaagaaagggggagtaagtaaaagaggaatcgctcagatctttccttggatgaacagcagtggcgtggttggtgtgttgactgtgaacaggctgacttagctgttgatgtatactcagaacctccaatctcctcccagaccctgcacttttccttctctggcagtctggattctctaaatggactgttcactgggacaaaccccagtttttatgcttcgcttaggtaaaaataagtttaaaacattttcagggtgggttggacaggaactttgttcccccaaa

SEQ ID NO: 52498 - DNA, 665 bp, Homo sapiens
gagcacttactccagccctagccagaaggaagcgcccatcccagcagctggaacttgagttacagaaagccttgccaccacggactaaagtgctctggggtcctaaataaataaacttgaaaggctgtctagaccacaaggactgcaactcctgggccagttctgatgctgtgctgggctcagagccagaggactaggtggcacatgacctagggatacacccgctggggggcctaagggagtgcttccaccacccttccacaaaccccaggcagtgaagcttgcagcaacaaaagtcactccttccttctgcttaaggagaggaggagcaaagagtaaagaggactttttcttgcatcttggataccagcttaagccacagtaggacagggtaccgggcagagtagtgaggcccctattcgaggctctagctcacagatgacaaagacacaccctgggccagaagggaacctgctgccttgaaggaaaggacccagccctggcaggattcatcatctgctgacaaaagagcccttgggcttgaactttcagcagtggtagctgggcagtactcgctgtgggccttgggtgagactcaaagacatgctggctttcaggtgagacccagtacattcccagctgtgatggctatagggagagattcc

SEQ ID NO: 52499 - DNA, 471 bp, Homo sapiens
ctttctacttgccttcgtactggcatgtactccactgctccttcagcggaaattcatcagaagccattttaggaactactaaccagacactatttcttcctggaagtctcaaatcaatccatttgagagaaatgcctcaacttggtggactaaaactctgagatcaaatgttgaacaaagtgaattaacctgctgtaataagttttcctgaatttgctgcatcattaacaagacaaagatgtaataaaagcctggaaaattcaaaagttacactatgcagttttaaatattactacagttaagtcctcagtaccatggacaggttcttggaaactgtgactttaaacaaaacaacataaaacaaaaccaattccttttttcatcaacatcataatgaaatggatggtgaagaaaatggttactgggaggacctactatacagcctttcatttaaagttgcagtttcccaga

SEQ ID NO: 52500 - DNA, 103 bp, Homo sapiens
gttgtccatcatggtagaagtagatgaggtttatcagggcctggccacaggcctggcaggcaaagcaaggttggtgacaacagcgctgccggctcaagccggg

SEQ ID NO: 52501 - DNA, 174 bp, Homo sapiens
gacagacagagtcaaatctacagcatatctctcacctcaggaactggaagatgtatttaatcaatatgatgtaaagtctgaaatatacagctttggaatcgtcctctgggaaatcgccactggagatatcccgtttcaaggtgaagaatgtgaagactggctcagccagtggct

SEQ ID NO: 52502 - DNA, 432 bp, Homo sapiens
gggcatggggagggaaaattgcaaaaacatcctgaactgttttttaagcaataaacaactttaagtgaagcaattttgaagcttttaggtgcattataagattgggcaaatcagtgagtagacgttgttaggagtcagggctctcagtgtacaagaagaaacatacaaatataagatgggagaggacaagaaaaaaaaaacctgtaaattcactggaattgggggtactggtatgaacatatgatttctaaaatacgtgtgtgtacgcatgcttatatgtatgtatatgtaggcacatataaatgtacactttgtatatgtacatacatagatttcctagctttctccactgaaagggccaaactgcaaagatacctcagtagcgatgagcacatccagtgcccaaatcttggcctctaatacccctgccca

SEQ ID NO: 52503 - DNA, 376 bp, Homo sapiens
tttttttttttttttttaaagttttttgttttcctttatttttaaaaacttcataaaagtgcattgtatacattgttcatcctagaattgtgtttgtcaaacgtttgtagttttccccatccctcccaaaaaggtttttaattggtgattcagaatatttgtcatctaccaaattaaaaactgcaggtttgcaaacttggcactccaagaaagaaataggtgccataaaatgattaagtgttggcatgtgtaacacctgctgtcagggaaataaacttcccgtatgttgcattttggcagacatgcatcttaaaaatgtgttgaatgaaactgcacctgcactctttatctttttcaacagtacatcctatttgtg

SEQ ID NO: 52504 - DNA, 674 bp, Homo sapiens
attttcaccatgagattctctgcttattttctttggaatcctagttctgttgcatcagggaagcctaagggacttgttcccctcacctctgtgtgcctcttagggtctggtcacttttgaagtcctgggcatggttacatttcattcatactggtttttcaccaactgtcagggtttctgtgttccattagcacaaaatagctaaaagaagatattttcactgtctaattcactattttcatgttacatttctgaaataattgaactttaggggcaagatactacttactgaagcacaggtaattactgagaacccacagcccagcaaattctaagagacagtcatttcctcagcccctcccagtccaaatttatagacccaaacaatgaaatgaaaactgtttgctttgatcctcaccctgttctctagagcacaaacaaatagtaacaaacaattgaaagaaagtgcttcatagtaggagagagattggaattctctatagtgactgagttcttaaatttctttagttttagttttgccactttgttgagagatgggccttttagaaaggaagacatatttaaagtattgatttccttttcccccagtgttttattgtggaaaaaatttcagcaaacagcttaaaagaaatataaatatattgtaaaccaaa

SEQ ID NO: 52505 - DNA, 3807 bp, Homo sapiens
gacttgctgggggaagtcagccagctgcaggccttcctgcaggatctggatgacttccaggcctggctctccatcacccagaaggctgtggcctctgaggacatgcccgaatccctcccagaggctgagcagctcctgcagcagcatgcaggtatcaaggatgagattgacgggcaccaagacagctaccagcgtgttaaggagtctggggagaaagtgatccaaggccagacggacccagagtatctgcttctgggccagcggctggagggcctggatactggctgggatgccctgggcaggatgtgggagagccgcagccacaccctcgctcagtgccttggcttccaggagttccagaaagatgccaagcaggctgaagccatcctcagcaaccaggaatacactctggctcacttggagcccccagactccctggaagctgcagaggctgggatccggaagtttgaggatttcttggggtctatggagaacaaccgggataaggtcttgagtcctgtggactctggaaacaagctggtagctgagggaaacctatactcagacaagatcaaggagaaggtgcagctgattgaggacaggcacaggaagaacaacgagaaggcccaggaggcctctgtcctactgagagacaacctggagctacagaacttcctccagaactgccaggagctcactctctggatcaacgacaagctgctgacatctcaggatgtctcctatgatgaagcacgaaaccttcacaataaatggctaaagcaccaggcgtttgtggcagagctggcttcccatgaagggtggctagagaacatcgatgcggaaggaaagcagctgatggatgagaagccccagtttacagccctggtgtcccaaaagctggaagccctgcaccggctctgggacgagctgcaggccaccacaaaggagaagacccagcacctctcggctgccaggagctccgacctgcgcttgcagacccatgctgacctcaacaagtggatcagcgccatggaggaccagctgcgatcagacgacccgggcaaggacctgaccagtgtcaatcggatgttggctaagctgaagcgagtggaggaccaagtgaatgtgcggaaagaggagctgggggagctgtttgcccaggtgccttcaatgggagaggagggaggagatgcagacttgagcatcgagaagcggttcctggacctcctggaacccctaggaaggaggaagaagcagctggaatcatccagagccaagctgcagatcagccgggacttagaggatgagacgctttgggtggaggagaggctgcctctggcccagtcagccgactatggcactaatctgcaaactgtgcaactgttcatgaagaagaaccagacactgcagaatgagattctgggccatacgccgcgggttgaggatgtgctgcagagagggcagcagctggtggaggcggcggagatcgactgccaggaccttgaggagcgcctggggcacctgcagagctcctgggacaggctgcgggaggcagcggccgggaggctgcagcgactgagggacgccaatgaggcacagcagtactacctggatgcggacgaggctgaggcctggattggcgagcaggagctctatgtcatctccgatgagatccccaaggatgaagagggcgccatcgtgatgctgaagcgacatttgcggcagcagcgtgcggtggaggactacggccggaacatcaagcagctggccagccgggcccagggcctgctgtctgcaggccaccctgagggggaacagatcatcagacttcaggggcaagtggacaagcactacgcagggctgaaggacgtggcggaagagcgcaagcgcaagctggagaacatgtaccacctgttccagctcaagcgggagaccgacgacctggagcagtggatttcagaaaaggagctagtggcctcttccccggaaatggggcaagactttgaccacgtgactcttctgcgggacaagttccgggactttgcccgggagaccggggcgattgggcaggagcgggtggacaatgtgaatgccttcatcgagcgactcatcgacgcgggccacagcgaggcggccaccatcgccgagtggaaggacgggctgaacgagatgtgggcagacctcctggagctcattgacacgcgcatgcagctgctggccgcctcctatgacctgcaccgctacttctacacgggtgccgagatcctgggcctcatcgacgagaagcaccgcgagctgcccgaggacgtggggctggacgccagcacggccgagtccttccaccgggtgcacacagccttcgagcgggacgttcacctgctgggtgtccaggtgcagcagttccaggacgtggccacccgtctgcagacagcatatgctggggagaaggcagaggccatccagaacaaggagcaggaggtgtctgccgcgtggcaggcgctgctcgatgcctgtgccgggcgccggacccagctagtggacacggcggataaattccgcttcttcagcatggcccgtgacctcctctcctggatggagagcatcatccggcagatcgagacccaggagaggcccagggatgtctcctctgtggaactgctcatgaagtatcaccagggcatcaatgcagagattgaaacccggagcaagaacttcagtgcctgcctggagcttggcgagtccctgctgcagcggcagcaccaggcctcagaggagatccgcgagaaactgcagcaggtgatgtccaggaggaaagagatgaatgagaagtgggaagcccgctgggagcggctccgcatgttgctggaggtgtgccagttctcgagggatgcctctgtggctgaggcgtggctgattgcccaggagccctacctggccagcggggactttggacacacagtggacagtgtggagaagctcatcaagaggcatgaggcttttgagaagtccacggccagctgggcagagcgctttgctgccctggagaagcccaccacgcttgagctgaaagaacgccagattgcagagagacccgcagaggagactgggcctcaagaggaggaaggcgagacagcaggggaggctccagtttcccaccatgcggccaccgagagaacgtccccgggggaagaagagggaacgtggcctcagaacctgcagcagccaccaccgccgggtcagcacaaggatgggcagaaatccactggggatgagaggcccaccacggagcccctctttaaggtcctagatacgcctctgagcgagggtgatgagcccgcaacgctgccggccccgcgggaccatgggcagagtgtgcagatggaaggctacctgggccgcaagcatgacctggaggggcccaacaagaaggcttccaacaggtcctggaacaacctgtactgtgtgctcaggaacagtgagctaaccttctacaaggatgccaagaacctggccctggggatgccctaccatggggaggaacccctggccctgagacatgccatctgtgagattgctgccaactacaagaagaagaagcacgtctttaagctgaggtgaggccttcctggcctttgaaagctcgggttgatggcttgatttggcattagtggcagggcagaggccctctgtaggggaccagtgccaggcctgagctgctcctcaggggtttttcaaatcaaagaggctgatggtccagactttgacctctcagaaagtgctgggctgcctgagaggggtctggatgtt

SEQ ID NO: 52506 - DNA, 471 bp, Homo sapiens
ttttttttttcacagtgcttatgacattctttattcaattcacatagaaaagcatgcagtattaatgtaaaacagtacaatattaatgtaaaatgttcagtgcacattaaacagcatacaaacccatttttaaagacctatataggcataccaaatacgtttagaacaatacactttttcagagcctaaattaaaaattgtgcttacctcttacctatcttcaccccctcaacactcttcacagaaaagttttgtcctacataaaagatattctatcagccaactgaaacctctttttcttaagtatggaaaacacagcaagcaaaaatgctaccatgcataggtttccacaaagaacaggaacatgcaaacaagaaacatactactcaaaagaaaactcccctggaatgcaagtggatcaagaacttggcgatgagctctttcaaacctgttacatctggaacaatgaag

SEQ ID NO: 52507 - DNA, 634 bp, Homo sapiens
tttaaacatcgttttattattctaaaacacaaacaatataacttacgtgaggcatatttttaaatcatctatcatgattaaaggtatctttaatatctaactgtaatgtaacagacaaataaaaggaagcaacttacggtaatgtgtaattcaaactggagatggccaaaactcctgatgacacaatcattagatgcttgcacatgtacatataattaccattaatgtgcccactacaaatgcagactactgcagtagttttgacctggaactcaaatgccatgagcaatgttgccactagtgacagtttttaaaatgatagaaaactcttggttacgtactgaacaaagactacgaccttccctcacttaactggtaattgcatttttgagcaaatcaagtactgcagatctacaacaaaaatataaaatggagttataatctaagctcaaaaaattattgtcaatgtccacccgtcagagatcatgaggaacagatctggcagttgaatcgagttgggtttatcagcacacttttacacaagagagatcacacaccatggggaaccatggggtgcctcagtatgagggtgctgggaagggctttttaaaggatttggggttgtgttgggtgc

SEQ ID NO: 52508 - DNA, 2531 bp, Homo sapiens
agcagtgtctctggatggctactttcatctctggaaggctgaaaatacactatctaagctcctctccaccaaactgccatattgccgtgagaatgtgtgtctggcttatggtagtgaatggtcagtttatgcagtgggctcccaagctcatgtctccttcttggatccacggcagccatcatacaacgtcaagtctgtctgttccagggagcgaggcagtggaatccggtcagtgagtttctacgagcacatcatcactgtgggaacagggcagggctccctgctgttctatgacatccgagctcagagatttctggaagagaggctctcagcttgttatggggtccaagcccagactagcaggggagaatctgaaactaaccactggcaaaggctggctgaatcatgatgaaacctggaggaattacttttcagacattgacttcttccccaatgctgtttacacccactgctacgactcgtctggaacgaaactctttgtggcaggaggtcccctcccttcagggctccatggaaactatgctgggctctggagttaatgacaactccccaaatgcagagatttacactaacttccattctcagtttccttgtttcttttgattttttttttcctaattgtgtgaggctcttgtgttttagtgggaacaccaaagtttgcctatagtttaggcacttaataggaagaagctctgtacagaaatctgaaagttgttttgctttttgttttcccctttggtaatcaaaattttactatcttttattatttctggcttttcaaccaaacattgttgctaatccctatttttctttaagtgacacacattctcctgtctctggcttcttcaggctgaaatgacatagtctttctcacccttacttcactcttgagaggtagggctcctttataattacatggttgctctcagactttctgtgaaagtttgggagctgtgtgtgtctgtgtgtgtgtgagagagagatcttgtctgcgtgtgtgtgtgtgatcttgtgtgcctgtaggtactgtgtgtcactgaaattacctggagtgaggattacttgtaattaaaatatttataaaagaaacaactttattcacagagtccagctttgggactagtctgtatcttgttttttaagtctaacaacactgataataggaagtaaaaacagaaaggaaaagaaattaccactgggaaaatctttttagttagattgtaggcttcctggggcctcccatgccaggactgcaaagtgatccagccctacctgtcttcccacctgtgtgtcccccgtgtgggaagttggtgtcacttccccttcccaccctcacatctgcttagccagtagccacacccctaaaacatcagactcaccatccaggtgcagctccagaggctacaaaaggcttcatgggacttgaatccccatcctagcttctctctccttcccctcaagacctgatctgggttttaaggggcctggagctgggagtctcaagtctgctaagattcacatccatagcccccatggctttggaggagaatcctctctgccattcttccaatctccccagtggggttttgctattattttctaaattggggttaagtctaagaaggtgggggtgagcagggggtttatctgtgtgtagtgagtgcttcatgtgtggaatattcattttcttactgcagtgggacttggggttgaagccacccctcctactctgttggcttagccctgagatggtgacaggctggcctgcagtcagcatcattgtgcatgtgacagcatcaatgtgattagtaatttgtctgttcctcccttgaactgtctgtttagtctgaggtttttaaacttgcaggcagctgactgtgatgtccacttgttccctgatttttacacatcatgtcaaagataacagctgttcccacccaccagttcctctaagcacatactctgcttttctgtcaacatcccattttggggaaaggaaaagtcatatttattcctgcaccccagttttttaacttgttctcccagttgtccccctcttctctgggtgtaagaagggaaattggaaaaaaaattatatatatattctccttttaatggtggggggctactggagaggagagacagcaagtccaccctaacttgttacacagcacataccacaggttctggaattctcatcttcggaacctagagaaataggtgctataaacagggaattaagcaaaatgctggatgctatagatcttttaattgtcttaattttttttctattattaaactacaggctgtagatttcttagttctcacagaacttctatcattttaaactgacttgtatatttaaaaaaaaaatcttcagtaggatgttttgtactattgctagaccctcttctgtaatgggtaatgcgtttgattgtttgagattttctgtttttaaaaatgtagcacttgactttttgccaaggaaaaaaataaaaattattccagtg

SEQ ID NO: 52509 - DNA, 419 bp, Homo sapiens
  misc_feature (1)...(419): n = a,t,c or g
caggttctcatgctccagccacagtggctaccttcctgtcccgcgaatgtacccagtatatactacctcagacttttgctctggaacattcgttctcatttttgcatggctaaccctttctgaattagtcagggttctccatagaaagataatcaattggttttttatatttttaaggagattttattatggagaattagcatatgcaaatatggagannnnnnnnnnnnnnnnnnnnnnnnnnnnnnnnnnnnnnnnnnnnnnnnnnnnnnnnnnnnnnnnnnnnnntgagagccagaggaactgatggtgtgaatcccagtctgaaggcaagggaagatgaaatgagatttcccagctcaagtggtgagacaagaaacagagaaggggggacaaattcctctttcttccatgttttg

SEQ ID NO: 52510 - DNA, 999 bp, Homo sapiens
  misc_feature (1)...(999): n = a,t,c or g
gagagaactagtctcgagtttttnnntttttttttttttcaaaaacccatgaaccacaaactcaaatttctcctcaaatggggttaatctgacanatgaggcatggacccagccttgtggaaaaagcattccacgctanatgagatcttcgtctttcttgtgaggctacgtntatttatgtaaatatgtctgtgaggcaccttctctaagcttttagttttctatgatctattagtttagtgtttattaaagaatcaaatgtatagaattaccaggcattcgtggggaatgctgtgtagcaaatgtaaaactgacctgctcggaagaaacgtaggaacgcttcaaacccactgtaatgtttggtttgagattattttcattgctttgagagtgaactgcctaagagtaggccttataataaatgctatgtgcgtcttcagtagttccaagctaaagcaatttggcattctcccactgtgatttgtgacttttaaacccacaaaataaaagctttttggtattgattgtttttaattaaaaatacttccaagtataaattgaaacggatgccacccttgaagatttactggcgggaatgctcactcttgtcgttttcctcagtatcgttcatgtctttggcaacaagaacacctgatgaaagcaagcaatgctcagttcccatcaacatttctagttagggggattctcataaccccacagtttacctgagaaagttttctgtgttagaagaatggggtcgagagtattaccttttagctcagtgtggccgggccttttgttgcagtcaaatggcaaatacgcactccttgaaatggcttcttttatttggttttgttttcttagacttataaatttgaaaagaatgcaatttaaaaagtgatttctcacaaagagtaaatatgccttttgcaaatcaatttttgtaacaagttatttatatgatattacttaataaactggattttttctaaaaaaaaa

SEQ ID NO: 52511 - DNA, 755 bp, Homo sapiens
  misc_feature (1)...(755): n = a,t,c or g
attttcatagacaattgcaacagtttagatgccttttgaaaggaatgtaatgaagattcagcatctgactatatgtgtgtctatcctgaaataataatggagagtatactgtagattacatgtttacccatcaaatctgacttaaaaggttaaatggaaggttttataggtaaggtaatttgattgggaatggggtagggggaggngttgtgggggaataatgtgcatttcagtctcaacgcatagataaatttaggggaattggatgtattattcaactttgatttgggttgtaaaatgtgttaaatcctgttcattgaactcccatcaactcttataaaattcatgctgatcttcattaccgttgcatgattggaaatgtttaaaacattgtacagttttagtatagagaaatgtaatggtttttgtgaccagtttctgtctgcatgtaatttggatttctcaaatacattcattagtaatttatcagtaacattagttttatttttgttcatctccttatctataaaaaggggatattcttaggataaatacatgaaaaattatacttgatagcttaactataatcagctatttttgtatttttgtaatatttgtccactaagctggagaagcagcctcatacagttgattttgtgtatgtggctagtcttattgtcactatgtaagtaatccaatggttttagaaactaaactttctagagcaataaaatgactataatgttaagtaaaaa

SEQ ID NO: 52512 - DNA, 887 bp, Homo sapiens
gttggctctttagggcttcaccccgaagctccaccttcgctcccgtctttctggaaacaccgctttgatctcggcggtgcgggacaggtacctcccggctgctgcgggtgccctggatccagtcggctgcaccaggcgagcgagacccttccctggtggaggctcagagttccggcagggtgcatccggcctgtgtgtggcgcgaggcagggaagccggtacccgggtcctggccccagcgctgacgttttctctcccctttcttctctcttcgcggttgcggcgtcgcagacgctagtgtgagcccccatggcagatacgaccccgaacggcccccaaggggcgggcgctgtgcaattcatgatgaccaataaactggacacggcaatgtggctttctcgcttgttcacagtttactgctctgctctgtttgttctgcctcttcttgggttgcatgaagcagcaagcttttaccaacgtgctttgctggcaaatgctcttaccagtgctctgaggctgcatcaaagattaccacacttccagttaaggcagagcattcctgggcccaggctttgttagaggacagctgccactacctgttgtattcactcatctttgtaaattcctatccagttacaatgagtatcttcccagtcttgttattctctttgcttcatgctgccacatatacgaaaaaggtccttgacgcaagggggctcaaatagtttacctctgctgaggatctgtcttggacaaattaagtgctaatcaacaaaatattctgaaattcattgcttgcaatgaaatattcctgatgcctgcgacagtttttatgctttttagtggtcaaggaagtttgctccaaccttttatatactatagatttc

SEQ ID NO: 52513 - DNA, 678 bp, Homo sapiens
atgccatttggtgagtaccgttggaagctattttaatttctaggaaaagccccaaatatcactccaaatagattttgtttgcagatctcagttcagaatgcacacacacacacacacacacagagatgtatttatctttccaaattggattctggtttcagagatagagagttggtataaataattgaaaggataaatctaaaaccccctgacagtccgccaaattcaagaacagaagtggttgccaactctctaacaacaatgtttgggaagctgattccaaagtagctgaggatgaggtcataagcatactgtgaaaccccaagattcttcttccctggtagaattacaatagttactcttgataaatataagtattccatgtcttgccctctttcctcactctctgcttatccttttagacctaagtttcattggaaatagcctgaattagaagaaagcccatccgaatctttattagccccctctaatgattagtttccaggctgcgttcatacctttgacctctcagtgtcaaagtcctacctaggcctccccacaacagagagggccgtaacagcaatccctgcccctcctttacctcccagcctcttgcagaggagcccagtgataacacatgtgaagttctttggctgtcctcttgtagaagggtgctgc

SEQ ID NO: 52514 - DNA, 425 bp, Homo sapiens
  misc_feature (1)...(425): n = a,t,c or g
gtcgtggtttgtgcgcggccaggcgctgggngcctccgctgccgggagcaatcagaccttccagctgcctctcatgtacttgtctgttgggggcttgtgttgatcaggagtgaattcacagtctaccatgaattggaaggttcttgagcacgtgcccctgctgctgtatatcttggcagcaaaaacattaattctctgcctgacatttgctggggtgaaaatgtatcaaagaaaaaggttggaggcaaaacaacaaaaactggaggctgaaaggaagaagcaatcagagaaaaaagataactgaagattctgccatgtaaatgtcagcttgagtggactccagctgagaagaaagagaagaaagacttaattattgaataatttgtcagaggataaactcccaacctagacctttcacttaaaaa

SEQ ID NO: 52515 - DNA, 359 bp, Homo sapiens
gggctggggctgtccagaaaagcgaggatgcaggactggagctgctggcatgccccgtgcttcgatgtctaagcaacctgctaactgaggcagcagtggagactgtgggagggcaaatgcagctcagagatgagcgtgttgtggcagccttatttatccttctgcagttctttttccagaaacagcccagtctgctccctgagggcctttggctcctcaacaacctcactgcaaacagtcctagtttctgtacctccttgctctccctggatctgattgagcctctcttacagctgttgccagtatctaacgtggtgagccgtaatggtgctcacagttctgtgcaatgttgcagaaaa

SEQ ID NO: 52516 - DNA, 1114 bp, Homo sapiens
tgttacaacacccgggaactctgtgccgcctcctctgccacggtccaacagccttccacattcagcagtctcaaatgctggcagcaaaagcagtgtcatggacggggccattgcttctggggtcagcaaatttgcaacactttcactacatgaccggaagagaaggcaccacgagaaagatcacaagcgaaatcatagcatgggacacatttctagcaagagcagtgacaaactgaatctagttaccaaaaccaaaacggaccctgctaaaactctgggaacgcccctgtgtcctcgaatggaagatgttcccttgttagagccgctgatatgtaaaaagatagcacatgagagactgactgtactaatatttcttgaagactgtatagtcactgcttgtcaggagggatttatttgcacatggggaaggcctggtaaagtggtaagttttaatccttaatgctgcaccagatctagaacttgaataggtagtgacttttttctttttcgtgggaggggtggggtgtacaatgaatgtgaatgacacttcttattcttaatgtaaatctcaatgcatcagagccataattttggatactgcatgccatgtaattctgaatcatttgataatttaccttagagcatttaaaaaaatataatcaaactaattgccagccaagtcagtcatcctcctgggagtatatagagtcccaaggttagcgctcctgtattagactatttcaattttaggaaaatcatgaccatgtggggaaacaatgactttaaaatgctgaaattaaaatttatgctttaactggaatattttttgcttaactactcaattagaatattgtacacctgatcaatgtgtgttcagcacagatggccatgaattgtcatttatagtccaattttttatcttaatcataaaatgtttaggaatctatgaaatttaactttaggaacaaaacgtttagcagggttgattgatattatttttacattgttctggcaatccacagaaagagaagagccttaatttttaaaacccattttagtcattttatgacaattaaagttgtttaataaacatcttttttcaaagaaaaaaaaa

SEQ ID NO: 52517 - DNA, 203 bp, Homo sapiens
tcttcattgacttttctttagttaatgagtattaaatagtgcatattctgtagactatagggtttacattgtgttgcatcttataacttgtatagattgagctgattgaaataagattttgttccaagtattatctgatagaatacaagatgattcaaaattatatagatatttaaagcttttctgctgtttttttttttttt

SEQ ID NO: 52518 - DNA, 1293 bp, Homo sapiens
  misc_feature (1)...(1293): n = a,t,c or g
actattatattctcggccgtcgtacttttttttttttttttttactggtaaattcattttaataatgaggggaaaaaactttagttattaaaaacaaaagaatgaatacacatacacacactaaatgtggcagatgtttccaggagagattagcaacagagaggccacatgatcaaataaaatttacacttttgatgggattgtcccctcgcggccacccaagtgtttgtggaagaaagtctggagttgtttccaagcatccacctgagccatggcatgagccctgggctcccctccccagataataggactgcccaccaaggcatgcagggaagcccgacacagggggaagtaaggaggctcaatatagtgccctgtctctgggtaacagatgatctggggctttctcctcccatgggcctgcaagcgtttacaggcctcattagcatagaactcactcttccagttgtggtcatcctgacctaccaggaacaggaaggtgctctctgccctttccacaggaatgaagctcttctggtcaggtccttccaaagggctgttcaggacatccacaatgtctgcatagccatctttggtcaccttgatgcgatttctgttgacgccacagggggcagggtctcgcccttgtagcgtaaggttcccccaacattggccacagagccgttgatgacgacagcagccgtgatgcccttcaggaaagaggccatggaaaggcagagctcaccccctttggaaattccaagcagcccaactcctggaccttttacctcgggatgactgagcaagtagttcatggcttcttcaaagtactccagatggagcgtctccatggtcttggggaggtcttcatagttataataagccagagccatcacagcaaaacccttcccagccagcagactagcccgatactccagcaggccacctccagttccgaacatgtccacaatcccaggaaagggcccaggttctgcctcagctgtggagaccccaggaactgcgccgaactcttcaggctccattggtacagccgggacgctcgaaggacagcaggagatgaggccattttgaattcagacctgagaacaactgaatgggggtggggagaaagaagcttgttagacatcctctcgggctgccgtcgcatgctagagcnccactagggcagagctgtctgctaacgtgagcggggaaggccagagtccagccgatcagccagaccaaatatagacacactggaacttgcttaaagtctcctgtgttgaaacctcc

SEQ ID NO: 52519 - DNA, 470 bp, Homo sapiens
tggattggcagtgagggcccttcaggtccctttgtgctgtcttccccaaggaagacagcccaggatactctatatgtgcttcccagtcccacctctccatgtcctagcccagtcttggtcagaaagcgggcttttgtcaagtgggagaataaagactccctcataaaatcaaaggaggagctccgtcacctcagactgcctacctaccaagaactggaacaggaaataaatactctgaaagcagataatgatgccctaaagatccaactgaaatatgcacagaagaaaatagaatccctccagcttgaaaaaagcaatcatgtcttagctcaaatggagcagggtgactgttcttagcccagaaactaagtagcacaatctgtagatgagtatagtgatctcatttcctaaactgtaatgcacagacctgaggaactttacactgaccagctttaaaacagtactttaaa

SEQ ID NO: 52520 - DNA, 1166 bp, Homo sapiens
  misc_feature (1)...(1166): n = a,t,c or g
tttttttttcatatttcaagtgtttttattctgagcagtaggtacaaaaaataatgacatagttgtgtctaattctgtatagttcaggcaccctccacaggctgtcaatctctgatttgatctacttttaccagatttaacagatccttgaatttactttactgtctatacttcctttttgttcacattgggaatcaaactaatgctggaaacatgcatcttcagacttcattgaggaattccagattgagacacgctgggatgtggattgagtccatggttagagaagatggattaaatggaaacaaaacaggaaacatgtgcttggcatctaatagcagttgctgagggtcattccgctcttgtagttgtgcctggattgttcgtataaaggccactgttacccgttcttcaaattcattcaggggagtataaaggtttaaaattttgacaatctgctgggtgctgagggaggtacacagggagcagatagcctctgcgtcctcctgggttttcttctttaattgcaggagctgggctgcttggatcagaggttccatggtctgaactgctccactctggtgaaggtttcttccccgaagccactcctcaagctgacttatattgtacctgagttgcatgcctgtgctccaagagcagacgtccttccgcaagagcaggttgttaagagtcactgcgttgatcatgtagaagagctgtttgaatacctgcaggatgatctcagggtccaagccctggtcacacatgactgtatgaaaggcattcatctggcggatgatagcttccaggcagtatgagttatccccatctgccatgctggaggancgcttccggtagccggtgggcttcacnccagatagaccctgaatgctctcattttccaacatggcagaaactatcatcggctgtaacgcaccctcggcaattttaaagagctgctggtagatctgaatggaaaggtcgctcagtacctgacggtattcggtgaggtcaaagttcttaaggcagtgttcgttgtgctttgctgtattctgagtcatgaagccctcatccccgctgtaccgcttcagacagtgaagaaggtggcaggtgttggataacaggaatgacgtcatctcaaagtcatcactgtgcttcttcaggac

SEQ ID NO: 52521 - DNA, 1841 bp, Homo sapiens
agatgaggatgttggagagcctcgagcaccaaggggaggaaacaaggatctggtcagaggagaggatgctgtgagggacagtctccaagtcgactgttctgggagtgagaggcccacaggcaggaagcacagcctaccatggcctccagccttcactggctatggatgtgggacccgggaacaggaacaggcagtggctgtgaatggtttcatctctgccccctgtcctgagatgaatcctgtcccccactgggtggaagtcttcctgctggtgggttgggagggagagcatctggccagccaggggcacaacccctgccagggattcatagagtggggatcagtccagcctcccagcaggcccaacctgaatcctgggagaaagacgacaaagggacaaaggggtggatccagagaagggcccccagcctgactcggcagtcccaaaaccctccgtctctgacagctcccttgggcatgcctctgcctgctcctgtctcccgtgtggcccagccccggaagctgccatcattctagcgggtcctcccaccgccctcactgtcctgcccaaggggacaggcctcaagaagagcaaacgactgctcctggagtccctcatgcggaggaggattgcacacctgaagtggggtcttccccggcggatcctggagtcctatttcctgtttaacttcttaggatcttgctcattgacccttgctggggcgaggctctctggactgaacacaggccaggagctccaagcccagcaggaaaggtattgtgaggcccaaggctccccaccaggccttaagtccccagagaggttccagagggttcagcgcccagacagaaaaagctcgagacttcctatacaagccagagctctggagaggaacagaccgcacatgtcagagcccattaagcatttccatccagcctgaaaaggccaggagagtcaggccaccagggggcgccagagaaccacaggagatccaggaagcgcttgctaggaccaagctcccagctcccaggacccccaggccggcagcggagtccaggagctggtgtggcccacaaagggtcggagagcctcccagtgagaacagtaggggcaggaaaatgatcaggtcaagggtctcccagctggcagagagggctcccagcagagtgaggacttcattctctagggcagaccacgcccactggaggaaggaatgtacatcctgggaggcctctaagctccccagactcaaatgccagcagctcacatactggagaagaggaagcctggaatctacagggtgcagaggggctgggcagcagccttcctgccattctgcagaacctgtcagcttcaaagggaggctccactctgcggtggcaaagctgggcctgacccttctggccaagatgtcctggtccccacagctcgccaagcgcaaagcacttggccccctaacctgagcctgagggaaccctgattctactctgcctccccaaagtgggtgatccctccgtgcaggggaggacagcatcggagatcacactgcttcacagagggatcttcagctgcaaggtcactgctgtactggggccacccttccctaagacagagagtccccagggccaggaggcaccctgggaacccaaatggggctccacagaatacacgagcctccaaaaagtttagtattatgaagcatctgaatttttttctcttccagaatggctttaaaaagtagactcaggcccagagtcctcaggacatatcagaaaagctttgagagtgtcctgatctctgcaaagcctctaataaattggtcatttgggcaaaaaaaaaa

SEQ ID NO: 52522 - DNA, 114 bp, Homo sapiens
aagcaaaaggaggagagtgatattgtgtttcagggcatttaatttgaatatatcacttgatagagtgcagacttccctgagttctataacctgtagtgtaaacacacaataaac

SEQ ID NO: 52523 - DNA, 1527 bp, Homo sapiens
gttttttcaacgacagttttggtcttcagttaagctgttaggcaattttcttcagtggtatggcattttctcaaataaaactctgcaagagttatcaatagatggtttattaaatcgatatattctcatggcttttcagaattcagaatatggagatgacagcatcaaaaaagcccaaaatgtaatcaattggtttccccaaacaatggttcatgaatctgaaaggagaaaggactatttctcagttagaaaacttttgccgataccttgtacacttagcggatacaatttatagaaatagtatcgggtgttctgatgtggaaaaaagaaatgcaagggaaaacataaaacagatagtaaaactccttgcaagtgttcgagctttggatcatgctatgtctgttgcaagtgaccacaatgtgaaagaatttaagtctttgatcgaaggaaaatagatctatgagactgaaaaacctatttgcttgattaccattcccaatgtgtaaattttgtatatatgtaaagtttcttaaactgtaaaatagcaattcttgttttaatacaaaaaacattatattcaatactgtgtccttaaatgatatttcttcagaatgaaaggaattcagattatttctaggagtctatgaatgttttctttactgcctgtcatactttgtttactgaagtattttgtatggtcatttaaattaaccctctcagttaattgtcccctgtaaacgatgtgtgcagtgtaaattgtgtaattatgcatatatatatttataccaccatggacttactttcacactggaaatttgtggtgtttttccacagaggaagccttttaacagcagaaaattatccggtagcaaattgtcttagggaaattactacactgttgtaacaaaagggctggcaagtgactaaatgttcattaccttttggttagcgttgctatcactgtagctgtgctgccttaacattgagagttgagttgtggacttagtcattgagtgaatgttgaactttcttccttgaatcagcgttagagtcaaatgtgggtttaatgtgaatgctaaatgaatatgcaacatagtttcaaatggaacatagaaatttcacttttgaaaataataaacccacaacctaattgcatggttttgggctgaccgtcctgtctcattcatgattttactccctgccccagccttgcagatacatgcatttgaattttagtagtctgtcatatttaaaatcccacatatgtgagttaaatatgcaataaagaatacgccttgctgattagccacacccaggcaatttaatatccatggtcttctataatgtttataccacattgtaaatattcagagaacttgttttaaagtttatgctttctgattctgtgattttcaaaagaggaatttttttggaaattaaggactatcgtttgataattatatatgtaattaagatttagccaagcattaaattaatttttaaatataaaaaaaaaaaaaaaaaaaa

SEQ ID NO: 52524 - DNA, 661 bp, Homo sapiens
ggtgtggccagaggcctccaatctgtgtcagatatttatttatgctgcttattaaggggtctccaggcacccctgtgacagaagagactaatcagtcatcagccaggacccaggcatgtcctgggctcctgtgtccagcatgaggtctgtggctgatcttgcagctgaggcctgaagggtgagcgaacattgacctgtcccaactttgggcggcctctgccccataagggagactgagcagccagaggcctttgaggggatgaaggcctggcctgagcccatgtggccttagggtggaagcaccaggaccacagaacacgtgtctgaagacttgcctgcctctcacccctctgtcacccctcctggggccccggggcctgctgcctgcctctggagggcttgtcatccacccctccaggggccatgccctgacctctgtcctctctacttaccacccaaggtcaaagggaagtgtaccactgaccacatctcagctgctggcccctggctcaagttccgtgggcacttggataacatctccaacaacctgctcattggtgccatcaacattgaaaacggcaaggccaactccgtgcgcaatgccgtcactcaggagtttggccccgtccctgacactgcccgctactacaaggtgggtcag

SEQ ID NO: 52525 - DNA, 3769 bp, Homo sapiens
  misc_feature (1)...(3769): n = a,t,c or g
acggcagcaaggacagcatcaccactttgtcagtgcacaaaatggcgccctacagcctactggtgactcggctgcagaaagctctgggtgtgcggcagtaccatgtggcctcagtcctgtgccaacgggccaaggtggcgatgagccactttgagcccaacgagtacatccattatgacctgctagagaagaacattaacattgttcgcaaacgactgaaccggccgctgacactctcggagaagattgtgtatggacacctggatgaccccgccagccaggaaattgagcgaggcaagtcgtacctgcggctgcggccggaccgtgtggccatgcaggatgcgacggcccagatggccatgctccagttcatcagcagcgggctgtccaaggtggctgtgccatccaccatccactgtgaccatctgattgaagcccaggttgggggcgagaaagacctgcgccgggccaaggacatcaaccaggaagtttataatttcctggcaactgcaggtgccaaatatgggcgtgggcttctggagccctggatctggaatcattcaccagattattctcgaaaactatgcgtaccctggagttcttctgattggaactgactcccacacccccaatggtggtggcctaggaggcatctgcattggagtagggggtgcagatgctgtggatgtcatggctgggatcccctgggagctgaagtgccccaaggtgattggcgtgaagctgacgggctctctctccggttggacctcacccaaagatgtgatcctgaaggtggcaggcatcctcacggtgaaaggtggcacaggtgcaatcgtggaataccacgggcctggtgtagactccatctcctgcactggcatggcgacaatctgcaacatgggtgcagaaattggggccaccacttccgtgttcccttacaaccacaggatgaagaagtacctgagcaagaccggccgggaagacattgccaatctagctgatgaattcaaggatcacttggtgcctgaccctggctgccattatgaccaactaattgaaattaacctcagtgagctgaagccacacatcaatgggcccttcacccctgacctggctcaccctgtggcagaagtgggcaaggtggcagagaaggaaggatggcctctggacatccgagtgggtctaattggtagctgcaccaattcaagctatgaagatatggggcgctcagcagctgtggccaagcaggcactggcccatggcttcaaagtgcaagtcccagtttcaccatcactccaggttccgagcagatccgcgccaccattgagcgggacggctatgcacagatcttgagggatctgggtggcattgtcctgggccaatgcttgtggcccctgcattggccagtgggacaggaaggacatcaagaagggggagaagaacacaatcgtcacctcctacaacaggaacttcacgggccgcaacgacgcaaaccccgagacccatgcctttgtcacgtccccagagattgtcacagccctggccattgcgggaaccctcaagttcaacccagagaccgactacctgacgggcacggatgggcaagaagttcaggctggaggctccggatgcagatgagcttcccaaaggggagtttgacccaggggcaggacacctaccagcacccacccaaggacagcagcgggcagcatgtggacgtgagccccaccagccagcgcctgcagctcctggagccttttgacaagtgggatggcaaggacctggaggacctgcagatcctcatcaaggtcaaagggaagtgtaccactgaccacatctcagctgctggcccctggctcaagttccgtgggcacttggataacatctccaacaacctgctcattggtgccatcaacattgaaaacggcaaggccaactccgtgcgcaatgccgtcactcaggagtttggccccgtccctgacactgcccgctactacaagaaacatggcatcaggtgggtggtgatcggagacgagaactacggcgagggctcgagccgggagcatgcagctctggagcctcgccaccttgggggccgggccatcatcaccaagagctttgccaggatccacgagaccaacctgaagaaacagggcctgctgcctctgaccttcgctgacccggctgactacaacaagattcaccctgtggacaagctgaccattcagggcctgaaggacttcacccctggcaagcccctgaagtgcatcatcaagcaccccaacgggacccaggagaccatcctcctgaaccacaccttcaacgagacgcagattgagtggttccgcgctggcagtgccctcaacagaatgaaggaactgcaacagtgagggcagtgcctccccgccccgccgctggcgtcaagttcagctccacgtgtgccatcagtggatccgatccgtccagccatggcttcctattccaagatggtgtgaccagacatgcttcctgctccccgcttagcccacggagtgactgtggttgtggtgggggggttcttaaaataactttttagcccccgtcttcctattttgagtttggttcagatcttaagcagctccatgcaactgtatttatttttgatgacaagactcccatctaaagtttttctcctgcctgatcatttcattggtggctgaaggattctagagaaccttttgttcttgcaaggaaaacaagaatccaaaaccagtgactgttctgtgagtgattggtgtctgtgccgtttgttgtcaagtccagggtccaggaagggtcttttcagtcaaggtcagtggaggcccaacagccacagccacagatggatccatcactgcagtgaaggaggagcagggcctagatggtggaggagcggggcaagctggtgggcactcctgggccttgcctcactgtccagctcgagacactatctccttagcatcggcctcagctgctgttgtcttcacagccggccataccacctttcccgcaggctggtagggtccactgtccagcccagggctagttgctggtccaccaggagatgagagcccaggcctggctcactgatggatcccacaagcgtgtaacggagcctccttctttggcagctcctcactggaagtggtggcatctgctgagctgggccctgtgggggacgtgtcaacaaagctctcgtccaccacccggaagcggatctcctcgccggtgtccatgtagaggtcgtgtgctccttcctccgtctcgtactcccacacccacaccctctccgcttcgtcgaacttggctggctgctgcagtgactctggggggatgagaatgtcatcgaagaagcctgaaagaacacttgttggccaacttcttgttcagctcctcggcaatggagtcgttgagcttcctctcaaactgccaaggggggatccggacggtgtccaccatttccaccaggacgaacatcccggcctgcgctgggggctctgggaacaggagggtcagtcacgcaccagggccgggggcagggagaatccccgagccccttggtcccgtcccagtcgctgaggcccccaggctggcggtgaggttgcacggggcggtctcggagcgcggtccgggccaatgccgctactacaacatgaggaaactgaggccagagggaggcactctccgtccacagctccggcgctgngtcccgccgcgagaccccgccacgccacgccactccacgccacgc

SEQ ID NO: 52526 - DNA, 1108 bp, Homo sapiens
  misc_feature (1)...(1108): n = a,t,c or g
aaattaatacccttggaaaatgaaaatattcttaatttccattttgactcttatactggccctatagctctgcagtctttgtttcaatatagaatatgttatccatttaaattattttttcttttatttaatgttatcccaagactgttctcataaagaaagggaagaaataactatccacccttaacatccttcatttattttgaatatattggtgtttttatgataaggaatataaattatatttaatgtggtttcctgtatactttggttattaagttttgcttgaaatagtagttttcccgtttgacagctttctttgctgccaaagttttcaagaatttaagacttctttgaagtaaatatttaagttctgccattattgactcttaagattgtgtgtgttgtgttgtgcattacataattacaaaaaggcttcattcaggtgatacgttaaaaatggaactgtgctcaccctaaataggcattggtatttttctcttttggtgagagtaggcatttatttcttgagttgttttggagccgatcaaaattttgttcatggagaacttgatgcnttttgatacagtggagaggttttttcggttgttttaacatcaccagcatagttttagaatgtgactctgctgagcatttaaggtgagctgggaaggaaggccttgaaaatggtagttatgcaagcagactttcaggtgttncattcctgttttcaacacatttctttaaatctacataatggcagacttttctaccaggttataagcagtttttagataagtgatactcagccagcataacttattgacttaccatttacgtatagtcatcactctcttactgtgaaattccaaatgcctaccagagttaccttgttctatcataatatgacaaacatctcaacagttttgggatttccccactttgggttcaggaaggttatttaaattttctatctgggggcatttaatgggaggaaaataaggtaggccctgtgtgctggnttcaggattggaaacaggggagggntatggaggatattctttctggcaattccaggttttccccattttncaaagtgaggcacatg

SEQ ID NO: 52527 - DNA, 601 bp, Homo sapiens
cctgtagaaatctgagttatgttgttttactacaaaagaatataaaacacattaaattacagtgtgaaggaattttaaaaatgaacagtgtatcctcattaaatgtttgcaaagtttcttcctaagcacttacaactagttacagctcttttaaaaattcagatttctacactcagtcaaccggatcggtgactgtggagggcgagctgagccctggccgccgccacaatgggccgcgagtttgggaatctgacgcggatgcggcatgtgatcagctacagcttgtcaccgttcgagcagcgcgcctatccgcacgtcttcactaaaggaatccccaatgttctgcgccgcattcgggagtctttctttcgcgtggtgccgcagtttgtagtgttttatcttatctacacatgggggactgaagagttcgagagatccaagaggaagaatccagctgcctatgaaaatgacaaatgagcaacgcatccggatgacggttccctgtctctgaaagacctttctctggaagaggagtctgcattgtagtgtctcaaagacacaataaacttcctatggtctgcaaaaaaaaaaaaaacaaaaa

SEQ ID NO: 52528 - DNA, 675 bp, Homo sapiens
ttttttttttttttcattaaaaaatttattttcatataaaagtgccaaaatatccaccaatgtcataatctatctcaataaccagtttacactagtaatcaaaacacaagcctctttattcacattgtttaaaaatccaattattttcacacattcccacagtaactcgagtctctagacagtgggaaatttgcattcctattcgctgtggtagtccatatgtccaggttcatataggcgcgaaacgggttgaaccccgggtagtattccttgcacacgaccgcttggttttccatgtgggtcgaatgttccgtggtggggttgatggggcagcaattttcatacacatcgctttgcggggcccagatggaaccaaaaagtccagacattggagacaagcttcgggtgcttgtgaggtagggcggagagctgatgaaactggcatgtccccaggcagcaggcatgttgggtggggtgttccaggtagactgagagttgtgatcaataaagtctgtctgaacatctgcaggacaggggaagccattggcatagttcatgttttcttctggaaaggcattgtaatcgttcaattccaatggacagtatgcgctggaaaactggccttcgcatgttgcactccaatcaatgaaactattatgaaccggggccgactcc

SEQ ID NO: 52529 - DNA, 196 bp, Homo sapiens
tgaagtgcaatctgagattcaagcaactttgaaatcattttaaacatttggtgggggaatgacttatccatctgttgatttatctagtcatttctaaatctaatgcctatactctgtttccagagttcactttcaaaaatacagcattaatcatgtcaccccatgttttaaatttcccatggacatacaccatcag

SEQ ID NO: 52530 - DNA, 878 bp, Homo sapiens
ttttttttttttttttttaaatatattcagagcacagaatttattgaacataatatggagacagctagtacaaaagtttatgccttggcagggcaggtttcatcaggctgataatggaacatgggagaacatgctgtaaatggctcttttggtctggaccctgcagaaatacatctccttctctctgggaaacatcatgtcagctgccaagccatgaatttattacatatcagaaaaccaaaatgtgcaacagtaaagagtcctttcctgcaccaactttttaaattacttccatgtcaaaacagcaaatacaatgaaaaatacataaaggacaaattatgaaaactaaagcattctaagacatctcttaagatactcagttcctaacatgttaacatacattgaagactataaacacacacatcagaaactgtgggaatcttttttcaacatagggagaaagacgtagaatagggagagaacagcatgggttactgaaaccatttattcagaaagcagaggaaaggcgaaaggaacactgaaatagatcatttttagtttcttataggaagttccaaatggcagcagttgataaatccgtctttaaaaaggaaacgacagcaacagaaatgagaaccaaatatattttgcatttttctctcggtgtatcatcttgagtcaccttacttaggctacacacgaatgaaaaatataaaaagccacgcccactaatttcgcagcacctcatatagtagcaaacagacagagggtacttacgaaacgtttgctaaggagtgaatgatgaaaagcaaaaagtagttcttgtacacatggtctcaatatcacagacaataaattctgacctttgaattcacata

SEQ ID NO: 52531 - DNA, 4621 bp, Homo sapiens
ttttttttgaataataagcatccttttatttgctgacgccattacaaaaaccgattacattagcaacaaaaaagtgttttcttgagttgaagtcagaggcagttacttcccaaaatgttaagtaaaacagtgtacaacatcagtattaaaatgttaaattttacattgtctttaccactttgatcttctgaacaattttattgagcaaaataagataaaagattacatgtttatcttcaggaatgtaaaggtctaattattcaaacagtttttattataaaactaaactctgaaggtgtctacagagttggcttttttttttccttctttaaatcagtagtctaacaaggattagaaaagacaaaactctgttcagtgtttctgacaaagtagaaagggtgaaaacataaataaggctttaatttggcaaaatataatacaatgccttttttatcctcaaatgaacagtttcccaattacttcactctaacacctggtagtgctctttctcctttgtgagctgttggtttaccgcctgaagcaactgctgtaactgtgttacagtctgatttagacttacagacattgtctccttctcagaagactccgtttctggggaaacatcactattttcaataacagtagtgtctccagcagcttttactatttttgactggataagctccagtgactgttgagccttatgcaaatcaccagctaccttctgtctttcattttgttcagttctaagttttgtgagtgtttcatttaactgtgccttcaacaaatttagctcttcattctgtcttactgcttcagaatatgaatcatcaagttttttctgcaattcagtcaacagatctttcagctctctgacttctgtaacataggtagatcgttccatctctgccttttctagttccatttccaaatgttctcgttctcttctcagattttcaatatccttattttcgcttcttaatcgctctagctcttgttctgaagatgtaaatgatgactgcatctgtttaatagtcttgtgtgattcatcgaccttaactttccatttattttcttcttgctcaacacttctctgtagcttctgtaaaattccttctgtttctgcaaggacggatttgtatttttcacactctagctgtaacaatgtgtgcatttcatcagcttctttcaacttgtgctctagaaccttaacctcctctgaccctgaagttccagccatacattcttttgcctttttttcaaatccatgcaaccattcaccataactcaaattagaagggacagacacctttggaaataattttttgagaacttctttagcctccaactcaacagcttccacctgttgctgcctttccttggaagtcttgttcactttgtcctgcagcattttttcagttgatgccaatgcttccattgcttcccagtttttctcccgaaggtcattgtttttcttcctctggtgttcaactgcatccttcaaagaatctaactcattccagagaccacttatttctttctctctttctgaaattacttttaataattcttcatgagggggaaaagaagatgcctgttggtagttttgttgtttaagctgctcaatttgggacttaaacaatttgttttcatcttgtacatcctgtaacagctgtgttttgctagaaagatcactctccctctcttttagcatggcttctaacctcttcaattcattttccttttctttcaacacaatctcaagttcttcaaactgtgatgcagaagaggcctctttcaagttatgttgtgctacttcctgaacatgtgcttttaaagattcattttcttcttgaagatcctgtaaccacttccctgtattggctaggtctttctctttctcttccaaaacagccttcatggtattcatctgttcctcttttccttttaataagttctgaagctcctgaactttggaagtgatagataactgttgagccttttcaagctggacatttcctatttcttcttttagagcctttatttcctgtttcaaatcctgaacagttttctccttgttagcaactttgagaagttctgcctccagaagctcttctacagacttgatctttccatctttctcatggatcactttcttaagttcttcaactagagaggcaaaagaaacctgatcattttgcttagcttttaagtcttgaacttcttttgtcagagatgaattttctgttcttattgcattcagctcctcttctttagttgccacctgaataagtccagtttcaagtaattcttccacagtctttaacttctcatctttttcttgaatgcatttttccatttgttccacaacatccttattaggctgttcagaaacaagagtctgtagcttctgaacttctgattttaatgctttgttttggtcatttagaatcttaaattcttccattttgtttgaaatttcatgttgtagttgctcttccagcaatcttattttatcatctttaacataaacactttgttgcatcttctccaattcatgtgcagcagcagcctgctcatttgccagggcctgtaatttctgcacttcagcttttaataagaaattcatattctgtatatccttaagttcctcttctttacttgttaaacgatcacgttcacttgctaaagaatcttcagtctgttttatctgcttatccttttctgcaatcactttatgtaattcttctgctagaactgaagcggaggtctgggctgctatctgggaatggaactgctgaatttgagctttcaaagcctcattctgctccaaaatatcctgaacctgcatttgtagagactcttctttgttcacccttttctgctctgattccattaactgcattagtctttgctccaactgttgttttgataccaaggtatctgtaagcttactatgcagactctgtacttcattttctttggccacaaatttactctgtaaatcttgctgtgctgcctcatgttccgctgttctcttcctgatgtagctctgaacttcttcccaccttctctcagcttcttgtagttgaaccttcaactgagtagctgcttgctcagcattcttcttttggacttcctcttgctgtagctttcctgttttctcagtcagctcattcaccaacctagcataatcctggcgtagtttatttagttctgcagactgcttgctttccagttgatttgtagtgttgctgactgcatctctcagtataccattttcctgcttcaagtgagctatctctgcctccatctgctcacgaacttgctgaaacttcatctgcatctgttgagtctcttgataactgacatgtattttgttttgaaatacattatgttccttttctaatgttccaatccgatctttcatccttgtcataaccacattgcttctttctttctctgtcatcatttcctgggttaactgcttacaccgatcctttgtagcagcagcatcttccttcacagcagcgagtaacttgtccttttcttgaagctgatgtataagcgtagtcaattctcccttacttgacttctttaaagcatcttgtattacaccagacttctcctttagcaagtctacaacacaaagagcctcatcttcagaaaacatcatagtcttcaaggacagaagaaaatctttaaacttcacttcagcattttctttgtcagtttcggtcttcagttttttagtcccagatttctggatcccttctacttggtcaggtttaagcaaatcaataacctctctcttatctaccacaggacttgagtcagcattatccatcaaaggaatataagtagttgcatgaataaggggttcatctacgaagacattttctgtcttttgtttctttgatgaagctttcttccctgatccactttcttgtttagtctcttggtggaggggcaatgcttcttgcctttttgatggtaccatgagagtttccacctttttatcctggtcatcgcttccatttttagacttcttctgccctggtttcttcttcgaggcagctgcttcagagggaggggtgggctgtttagtaactgggacaggttctacttttttgccaggaatctttgatgcgtcactttctttgatgacctgctcttcaagcacaggcttttgtttcttttccttcttttttctttccctaacactacttgaagtttcaacgacattcaatggaacaggtgcaacttgatcatcttctactgccaaagcatctgataatttaaagtctcgaggtacactctcagagtcggattcatggaggtttccattctggatttctttctttttattctttttcttttctgctttctttttatctgttttggtaggaataagcttttgttctcttttctgttttgcaagaacttcatcatataatgtttctttcatgaaaagccagaagaagaggaaaattactgtaataactattgaaggaataagaacaataaaatatgctgactcataaaactccatggtacttttgtcaatgtgatcctataaaaccctgtgcggccgggaaaggagaccgggaagacgcggcgc

SEQ ID NO: 52532 - DNA, 281 bp, Homo sapiens
cacggccttcgccagcgtggtggacatcaagctgctcctgcgcatctgggacctgtttttctacgagggctcccgggtgctgttccagctcacgctgggcatgctgcacctcaaggaggaagagctgatccagtcagagaactcggcctccatcttcaacacgctatcggatatcccgtcgcagatggaggacgcggagctgcttctgggggtggccatgcggctggccggctccctcaccgatgtggccgtggagactcagcgccgcaagcacctggcct

SEQ ID NO: 52533 - DNA, 404 bp, Homo sapiens
acaatgactgcaaaaattttataaattcaggtttctaataatatattttcttaaatcagagtacttctttaggattcaccatttgaaaatcccaaatcaagaccttcaagatatcttgcacatgaaatgatgaaataaagctttctaattttaaaagtctacaagtattcatatattcatatgtgtgcatatgtaggtatatgtgtatatttacatgtatatatgttatctgggcattccaaaccctagtttccaaattgtaagggaaaaaatatatgtgtcaaaaataatttgaggaaaaaatttttaatgcaaaatgaaaatacccttggcaagtcctctacaatcaaatccaacacagttctcataatcagaagtgcagttggtgaggccccacgcgtccg

SEQ ID NO: 52534 - DNA, 607 bp, Homo sapiens
  misc_feature (1)...(607): n = a,t,c or g
gagcaattgcaaaatggttactttcccctctccctgcctaaaatacgaggggatttttttctttgatgttcttgtaagaacctgttcaggctcctggaggtaaaagctatataggtccctcttaagtctggacctccagaagttttaactctcaagctagtccacactcagtcttctgcagttcgtcaaaattaccgttcaggtattgattactgtattgcttactggttcatgtagcttttgcttctggtaatctgatcttttctgtgattctctgtattttcttgtgatttttttccttcaaattttgtggtagctgtttgctctgtgaccccagttctctaatggatctaagaaaggccattgatttcagtttgtttagctgttttcttgctgtgaggatgggaatgatgacttctgaactgaaaatgaagcctggcacccaacaccccttgctttaacaaatccctccaggtgattctgaggcatgtgaatggttgagaaccactcatgcagcgttagtccttcagttcacagataaagtacaaaggggaaactggctggtcactgnggctcacacctgtaatcttaaccctttgggagcctg

SEQ ID NO: 52535 - DNA, 238 bp, Homo sapiens
ttctagacgaactctacaaatgaaagcatgtgctacaaaacctgaagaacttagtgttcacaataatgtttcgacccaaagtaatggctcccaacaggcttgggggatgagatctgctctgcctgtgagtccttccatttcctctgctcctgtgccagtggagatagagaatcttccacagagtcctggaacagaccagcatgacaggaaatggctctctgctgccagcgactgctgt

SEQ ID NO: 52536 - DNA, 817 bp, Homo sapiens
attatcctgactcatatccaccaaacaaggagtgtatctacattttggaagctgctccacgtcaaagaatagagttgacctttgatgaacattattatatagaaccatcatttgagtgtcggtttgatcacttggaagttcgagatgggccatttggtttctctcctcttatagatcgttactgtggcgtgaaaagccctccattaattagatcaacagggagattcatgtggattaagtttagttctgatgaagagcttgaaggactgggatttcgagcaaaatattcatttattccagatccagactttacttacctaggaggtattttaaatcccattccagattgtcagttcgagctctcgggagctgatggaatagtgcgctctagtcaggtagaacaagaggagaaaacaaaaccaggccaagccgttgattgcatctggaccattaaagccactccaaaagcttaagatttatttgaggttcctagattatcaaatggagcactcaaatgaatgcaagagaaacttcgttgcagtctatgatggaagcagttctattgaaaacctgaaggccaagttttgcagcactgtggccaatgatgtaatgcttaaaacaggaattggagtgattcgaatgtgggcagatgaaggtagtcggcttagcaggtttcgaatgctctttacttcctttggtggagcctcccctgcacaagcagcactttccttttgccatagcaacatgtgcatcaataattctttagtctgtaatggtgtccaaaattgtgcatacccttgggatgaaaatcattgta

SEQ ID NO: 52537 - DNA, 539 bp, Homo sapiens
ctcagaatcttgataaacacttaatatttgggcctgaagcattaaactttctttttattgtatatacttaaaaaatagaactcactgccctatcatacattgtagccctcttattctttggtctttcatatgcattagttaaatcccttaaagtaggacattcataaaaacttacattgtttattggagtataaaatattacccaaaattcttcatgagttgacatgagctgttttaaatactggtgtattttcagaacagtaaaattactgaatatcagaaaaaatgttaattgatgatgaagcttattcccaaaatgccttttgtgcatatgatacttggaaagtcactaatgtgcctcagttaatacatcagtaaaatgttgtgtttcttttccagtgtagtgtttttggaatataaattccccatgctagtatagtatctcagcaaagagaatttccccccagggaggctcagtaaaggaataccgtgtcttacccatcgttatgatgggaaggctgctttgaaaatggctgttt

SEQ ID NO: 52538 - DNA, 502 bp, Homo sapiens
  misc_feature (1)...(502): n = a,t,c or g
ttttttttttttttatttagtaaacccagtttatttacataatacatattttgtcatgcagcttactgaattgcagttagtgtaataacaaaaaaagacaagcactgtcttgctatttgaaaatggcttaatatagaaagataattgtttcttaaatgagttaaccacaaccatataaattgctagacaatttaaaacagccatagataattttaaaatgtaaaatctgtaggcaaaaagcttttatagttcacacattggtaaaattaaaaccagtcttttttagtaataaaactggatagtataatcttactttaatctataaaaacaaaaataacttaaatatacatcattacaaggctcagatttgtagacaactttaaaatattttttaatgttaacaatgtcttccaaattttaccagtagtgcctgtgccaacaggtagggtgggcattaaatgctgactgacattccggaagtgtttcnagttaaccagcaatc

SEQ ID NO: 52539 - DNA, 681 bp, Homo sapiens
tttttttttcttattctttcttgaggcttcattttgttcaaggtcactaccttgtgatgctttagacttttgggtaggatgaataatgtgtttttctttgttgtaggaaggatccgaagataaagcttcagaagatggtatactaacatttttaggatctgctgatgaagcaatggtctttaagtttatcatagaagtaacatttttaggggctgctgacagttctgtagataatgtctgtcgaacaacataacccattggtgtccaagataactctcttgtacatgaaggagaattggtagcggcattagcagttacagattcatttgggttatttttcaccactatttcaccctttgataacactgcagctggttttactacttctcttagaagagaaatgtcggtagagacagagtggacaggtccccacttgggttgcttctgtatctctgacatattgttctctgcaccttgcagttcaggaaagtccagtgtggtaaattcaaactcaggtttggaggtagatacattttttgcaatgattctggatttcctgtctgttcgcttatggtaaccatctgatttcaaactattctcagcgtaaatggacaaatgatgtgaacctctagctgattttatctcagatgatatagttccatcagccctttcactgtcaaa

SEQ ID NO: 52540 - DNA, 372 bp, Homo sapiens
atgacaaaggtcatcataagggacagcctgtgagtttatgcactgcatactgcaaatgacccactccagcaatgggaagacacccctaacattgcttctctccttataacgaaaatattattcatcatcagctttaaaatggatcttctcactctgtgcagtctccgtggtaacgtcccataagcccagggttttaagacctttctcctgtgctctaagcctacatatctaactgcctaatggcctttccacttgaatgacacatcattcagtttcagtgtcctaaactgaagtttcaactccaagtctgtttttttctcttgtagtcttcatgtcagtcaatcagtcttttatcctaaccagaaatatgtg

SEQ ID NO: 52541 - DNA, 642 bp, Homo sapiens
tttttttttctctttacaacagcctttatttccggcccttgatcctgctcggatgctggtggaggcccttagctccgcccgccaggctctgtgccgcctccccgcaggcgcagattcatgaacacggtgctcaggggcttgaggccgtactcccccagcgggagctggtcctccaggggcttcccctcgaaggtcagccagaacaggtcgtcctgcacaccctccagcccgctcacttgctgcttcaggtgggccacggtctgcgtcagccgcacctcgtaggtgctgctgcggcccttgttattcctcaccaggatgctcagaggttcgtcgcatttgtccaccaccagcaggaccgtgcttgccggggcccaggccctggctggcaagggggaccctgtcctgcagcgccacaccgctcgggtggacagccagacgctgctggaaggcgtgcacgccgatcttctgggtgatctgcgccttcagctctgacaccgacatggagctgctcagggacacctggaattcgttgcccgccagcatcttcaccgtcaggtcccagcccatggctgtgggctgtgggctgtgggccacggcacgagctcctgtactggcaaagatgagttcgctgcctctcagccg

SEQ ID NO: 52542 - DNA, 204 bp, Homo sapiens
ggtccatgttttaaaagccagataaaactacagctctctccacattcagacgggactgccagccctgatggagctggggtgaaatgcccccttcagactgaccaggtgctcagtacagaaaggccaggtgccactccagggaatctaaggtgcctcaagaaaatgccaggtcagattttcctcaagaaagaccagccaggcaca

SEQ ID NO: 52543 - DNA, 664 bp, Homo sapiens
gtttcgtgtaggtcttctgaggtggtggcgccagcggctacctcctgcctgtgaggagctggctgagaggggactgggcgccggcggggaaggaggagcgctaggtcggtgtacgaccgagattagggtgcgtgccagctccgggaggccgcggtgaggggccgggcccaagctgccgacccgagccgatcgtcagggtcgccagcgcctcagctctgtggaggagcagcagtagtcggagggtgcaggatattagaaatggctactccccagtcaattttcatctttgcaatctgcattttaatgataacagaattaattctggcctcaaaaagctactatgatatcttaggtgtgccaaaatcggcatcagagcgccaaatcaagaaggcctttcacaagttggccatgaagtaccaccctgacaaaaataagagcccggatgctgaagcaaaattcagagagattgcagaaggagcaagtgttcctgctgccagttctttcctctttaggcgtggttgagaaaaagcagaaactttacataaagctgtatttcttaatcatctttaatttgaaacttaagaaaatgaatttaatctgttatatttatgtaacttatttcctggaagttatatctactagttttgtttgataataataaaat

SEQ ID NO: 52544 - DNA, 177 bp, Homo sapiens
  misc_feature (1)...(177): n = a,t,c or g
ggagtgctgatcatatgcagccatatcaccaactctgctgggctccacttggctcccaactgtctttccaggactagtagtgagcgggcagccactctctgtatcatgcatggcagagggcanaggctcagggatggggagaaagctagaccacaangacacatttaaaacttctgc

SEQ ID NO: 52545 - DNA, 1107 bp, Homo sapiens
ctttttttttttttataaagaaatgagatttattgccttgtggggggaagggatgtggttgtgataggcaggccactctgggatccctgggatgcaagcccagggacagcagagtccccaggtgggaaatctacacacacaccccagggatgtcccagagacttcttctaccctaagaggagatcctgggcaggatgtgagaaatctgagcatcctctgtttggatggccgaagctgctggcatcaaactctggtctggaagaatcagtcacctgagcaaggcttccggaagtagatgatgagaacaatgcccacgatgatgcccagcacacccaggccaaaggcacggccacacagcacattctccagcagatctgagggcagtgcgttccggggtacccaataggcaattgctgtgtagcggtcaatttcgtgagtcacaatgcaggagaaaatgtcagaaggttctggtgtgaagtttaagtaagaaaaggcctggaagctgagtccatcgacagctgagacaaaagtaggcccaaatccttccacagggacggaatgatgctgccagttcactgtcagcatgggtgggaagagattactgacaaaacagaccaaagtgttgggcttgccaaactccaggggcttcagcgtgaaacacttcagcgataggaaaccctctggacaccgggattttccccatcaagttttggccctatttgctggatcatcccactcgcagaactctttgtcaaataaaatggcaggagcatctccctgttcctgagcccagtcaagcaaattcgggcaggcgaggcacccgagtgttctgggaaaagtcgaagaagaaaagctggtcctcgtcgtaggcctcagaagagtcccacactgggactcccatcctggcagtacactgtgtgcaggaatgtgtggttttgcaggtcatctggccacattggagtaggagcttcagggacggcccaggagtggggtagcagccacagaagtggtaacatctgtagcagcgcagctccttggttctgttcatgacccataccttcttgccacacagtaggtaggagctaccaacccagccaacccagcttc

SEQ ID NO: 52546 - DNA, 254 bp, Homo sapiens
tgggggcggaggtggtggtggcgcccccggcggaagctgcccctgattcattcttggagcatggggttgggggggtagcggtacacatacatacccttgtgtgtctggtccacgcacacgctgtctggagggggtattcaggcatacccacatgcattggctggccggggtgtcctgatgcagcctggggcctgctttgctccccagcccaggggcccgccctctccctcatgcctccagctgctaggagcttg

SEQ ID NO: 52547 - DNA, 597 bp, Homo sapiens
aaaaaaaaaaaaagttcaacagcgtttatttagactctgcactgtgtcagcactgtcctatgcactgaagatacaaggggacaagacaaagggccctgctctcatggagcttccattctgatgagacaggtggtaactgactggaaaacataccaccgctggggcaggtgctaggaagaaaaaggcagcttgctgaggggacagagtggcatcatggatggtcacggaggcctctggaccaggaggcgtgtgcacagagccctgctctccagagctcagtcaggctgcggagctccttcgtaataactccggatgaggcaagagtaggtcactttattctatttcatttttagtaacattcggttcaaattaatttggggttttgagaacagttaattcactaatagaactgtcttaaagccagacatggggctggcaggatgggaaagctctccctacgaattctgccagctttcattccaatgtgtcagccctcatggctccagctctgtggatccctcttctttgctgcgcccatgaacaagtgtgtggtgagagccaaggtaatgcaggtcaggggatcaaaggtgaagggtc

SEQ ID NO: 52548 - DNA, 1798 bp, Homo sapiens
tttttttttttttttatgtaaagatctaattggcttttattagcgattcatgaactgggtagcatccagcctacaaaataaaacagaagccccgccaggtatgatagaatggtctgcatttgtaaagcagcactagcaggaacaaggaaacagcatagtagacacagcagattggttaacatcaggttacttcaggttacgttccttgtgtggattaaagcagagggggcttcctcatcataatcacgcttgctcacgttgactggactccctttgatcagttgctgtgaatctcctgacttgttgaaactgtcctatttttaagttcactttgattacatggactccattcctggatggagaggtgagatcttggagttccattcaacataaatgtattgtaaaagtttttgttagagggcttgttaatgttggccttgggctagtcctttcccatctctgatcctctgcttcctaacttgtaaaatacagattaaatgctcctaacattatgaatctaagaaatgtcaggattagctaaattgcttaatggcacaacaatattagagtggaagctgagaagcaaaattgttacactgagcaagtatttttaactgattgaaatgaaagataagagctttttaaaagtttatcttcccctcaaccctcccagcctctcaaaccactgtattagcttgctagggctgccataataaaataccacagattggggggctttttaaattaatttattaggggggtagagatagggtcttactatgttgtccaggctggccttgaactcctggcctcaagcaatcctcctgcgtcggcctcccacagtggacggcttaacaacagaaatttatttctcactattctggagattagaagtcaaagatcaaggtgctggtgattttgtttcttctgaagcctctctctttgcttgcagataactgccttctcactgtgtcctctcctggtctttgttctgtgcacacattgctggtatctcttatgtccaaaggacaccatgttggattagactaacagcctcctttgaacttaagtcacctctttaaaggcctcatctccgaacagtcacattcaaaagaaatgggagttaggacctcaacaaatgaattgggggatacacagttcagcccataccaatgacctattctaaggtttctgtttcaaaacactgtagccaaatgcatactcctagggagaaaattattttgttttaggacaatttaaacatatttttaaatggaatacatgcagcaatttgttaaattacattagtaatattttcctatggctaagtccacctggaaagctagttatcaaaatgaaaaattattgtttcatttagtcctcgccagtactaattcattttttataatttttgtaaaatgtactatataagattttctttaaaataagtatataaaaatcaaaaacatcattaagattttcattagtatacaatcccaaaactaaaaattttaaaacagactagcttcattttacatgacaagaagatttgaaagagctaattttactgcttgatctgactgtccgcccaaaatacttttcttggagaaagacagtgaatgagatgtaaggctcaaagggttaaacccttgaaatataaaaacacagactgtcttagaatcccacttaatgaagcttatgtttgattagcttgccattttaattacaatttcaagtcttttagagacaaattctatcttttccagaacaaacgtgcatatccttataatataacagg

SEQ ID NO: 52549 - DNA, 430 bp, Homo sapiens
ttcacttgactttgcaatcacttattgaacttttattatgtacataacttgaagcctaggtatttactattgcttatgggcttcaaaaagtgccccaaattatctaattcaacccaactttatttatcatccagtactttaaagacattgttatcatacatttgactggtcaaaaaaaaaatcaagctctatttcctgtgacttctttcctttcatgtatttctgggttttctataatcttgtgccctattcttagacaaaaatcccatattaatttttaatcttaagttttccttcattaattatacttatttgcctcttttccttacttggatacaagtcaaggtttgcttcggagaatatcaagtgaacaaattagaattaatgagtgtggagaccataaagaacactagaaagtagaaatcctgag

SEQ ID NO: 52550 - DNA, 405 bp, Homo sapiens
gaattttaaaatttcttttacaaaattttgttccatatatatttagtacatataatagttttttttttatcattgccagctaagcaacagatagctaatatataagttaaaatgccagagattttacttttatgagcaactgcaatgattaatataaaaacctaattttaattcctctttcactttagggcaataagaaaaaaaaattatatatatagtttccatagtaatacttgtaaatttgcgattccataatgatgttataaatttgcttgggatattttggggagctgtaagttccatgctctcactggaagagttcaagtggattggcagcaaatctgagatctatttggggggcctggggagatctaaatatggagtcagcacatgatttttttaaga

SEQ ID NO: 52551 - DNA, 1700 bp, Homo sapiens
ttttttaattttttagtagtatttatgtatatataagtacattttcaaaattctgaaaacagtattaaggaaaaacaggaactgtttcacttaggtcttacctagtatagtagtgaatcaacttcacaattagtaagattatcaacatgaatacaaaagcaagactacaaactgattattttcttttggagatgttttatgatcaattccaaacatacagtacagggaaggtgaaatgagtaagaaaaaaaaatcatatttaagtccccgttaacactaagccatattattcaaaatgtgtttcaaaatactcagccagatcaccaaatctcagtcactaccttagtataaatattcactaagaaaatagtcaagcaacagaaatccattgtgagacaccatctagagagaacagctacactgctatatataatttattaacttagtagtttagtttctcaatatttagcaagtttaaaaattaccattaccattggtttatagtgccattaatataaatccataatttcaaagtcatcattcctttcactgtgaactaagacttcttaaaagatagttgtgggttggggaacagtaatgactgtagctgatgggcagtgttcaaagccaaaaagactggcaagcttggaaaggcatacactatacatacacacactctcagtatactactgttccccttatttttgctgtacattcttgtctgaaaagatggtataaattattcccttaaatttgaaaaaacaattaagatgaatacattttcatcttcatttcaaaattatccttctaaataaaaaagttcctcatgtttgttaaatctgttcaaaagttggatttaaatactttcttcacaacatgtacaatgttttcacccttactgcctcattacaatcagtttggcaataagacctccagtgctttatcaaaaatggcattcaatagattataagattgttaaatctgcatttcaatcattcttaccacaatgaattataacaaagtccaaaaaaatgtatgactattcatcaacacccttggaacctatgaattattgcaaataatctcacacgtgcatgtaatccaaacataaacttcgtgggagagggggtgtaaaataaatactatggtatttcttcaattctatttaatgctgcctagctggttaaatgaaagattaatatattactaacaggaagagtcaaactattttaaggactgttttctaagtagaacaattttgcaaaacaaagataagcaagagccctatgccaaatacattttcttgtagtgtaatgtaattgctaatatgaggtataatctgtaagcaattaatacaaatataaataggtataagccaccactaactcagtctggtgaaaagcttctcagctaaagtagtttgaagataaggttaagggaaatgagaaggggtggacagggcaggtttccagtgggaaaataatttatgtgccttaccattgtgatcatcctgtatgtaccagtccgttgttgcagaacggtaaatcctttccaagtatgttatactttatgtagcacagtaaaattatttaagtattactaatgcttcatttgcatttgtatttagatatacacataattatatatgcatatcaaaaactataaacagaattttaaaacacttttatctcaattgggga

SEQ ID NO: 52552 - DNA, 334 bp, Homo sapiens
ggctgcttcagccgagagggccattcggtgtcctgcccacagagagagaaacagtgagagaccaagagagcaaaccagagagatagggagggggaatgcaaggggtccctgggggactcaggagtcccagtggagaatgagaggcaggccccccgtggtggccggggccctggctgccataggaccgggctggtgaggaggcgaggatgtggactttcgtcacccagctgttggtcacgctggtgctgctgagcttcttcctggtcagactgtcagaacgtgatgcacattgtcagggggtccctgtgctttgtgctaaagcacatccaccagg

SEQ ID NO: 52553 - DNA, 395 bp, Homo sapiens
gaaactgcaaactgaacaatgctgcagtcagatacacacacatatttcaactgcataacttcctttaataatacttttatttttccaaatttgaagactgtccctaagtcatttcttctaaaagttagtaataatcccaccaactcacatttacatagaagttacagtttaaagtttgcatctcgtaataacttggtgagatagggcaagcattatttctaatttgcatatgagaaaaaactaaggctcggatgagttatgtgacttccctgagtcatgttagagtaactaactcctgatttgtaaactgaaggtcccaaatcctgggaactccctcagctctgggcaagccaggacaggtaggtcaccctgcacctacacaaggactgagctgg

SEQ ID NO: 52554 - DNA, 530 bp, Homo sapiens
ttttacaaagtgttcatagttttattacttatcacctctatgtattttaacaacttcaaaagtgcagttggattatatgggaaaagatttttcttttgcaaacggcagatggcatcttgtagttcctggaagcattttactattctgtaaaatattcccacttcagagacgacatcatttggggctacttcacaatcaaaggagaaggcagtatcaaattctttcagaaccagaggccttgatggaggctcaaggctaaattcttttttatccctgcttgtcccagctgcatcctgaatctccttagttgcttgctggtgtaaagatgtctgtttactgttagctaaacactgctctgtggattccacgtcagaatcgtcagagctgtcgtaatctaccagactttgagaggcccggggggaagacagactagaagcacacatggtgtgagcccccttggacatcacagctttcagtggttcagagggagcatcggaagcccaggagtgccgagcacacacatatctgtg

SEQ ID NO: 52555 - DNA, 710 bp, Homo sapiens
tctggtagtgatttatatatatttattatagatttataataaaataaaaaatgctattggaattctatatttacacatgctccatttatatacacgcaaacaaatgtcaatatcaatggtaaaattttaggattttaaagaggcacatttcctcctacctacccacttccacatattcattactctaagatgagttttcataagcaacatttagatttgtgaaggaaaaaaatgaatatttctagtacttatcctctttcctttcatgcttttgtttgagaaaggaagcagcacataaaatctaaaacagaaactaaggctgtaagaccttctgtaatacatgttcacactcatgcatgagttgactgtaataggtcagaagatatttgagcaaagtaatgcacttacatgtatatgcactgcatataagtgatactcttcagacacacacacacagacacacacactcatgtttcttgaaaataacatgttaactatactatgtaaccccaagaatttatcaccaagaatacttccatggtgcaactgctgattataatttaccaataaatgcctctatatagccaacaacacaccatgaaaaggaaaacaaaagccagttattgtgaaacaaaggcaaattaaagatacacaaacatcttgagtgttaatatactaagaagacagttattataaaagggtatctgaac

SEQ ID NO: 52556 - DNA, 349 bp, Homo sapiens
ggaatttgaaatgaaaaaaatacaaacaacacaattttaatcacagcacccccaaaatgaagttcttacatcatttgttaaatctaacaaaatatgtcaggatttataggctgaaaactacaaaacattgatgaaataaatgaaaaaagatctggataaataggaaatactaggttcatgaatcaggagactcagtgaggtacaaatgctctccaatttcatctaatagattcaataacataccaaccaaaatttcagcaacgtcttcttgtagctattgccaaatttattcaaaattttaagtttaaaaaggcaaaggaattaggcggaaaacatgcatggagaatta

SEQ ID NO: 52557 - DNA, 426 bp, Homo sapiens
gtggggacttcgagcagcagctagccaacaggattttgtccacagctgggaagtatctatctgattcctgcagcccccggagcctggctggttttcaggagagcatcttgacagacaagaagaactctgccaagaacccatggcaagaatataattacctccagaaagataaccctgctgaatatgccagtttaatggaaatactttatacccttaaggaaaaagggtcaagcaaccacaacctgctgggctgcacctcgagcagcgctgactcggcttaaccagcagggcccaccagctgggctttcgattccgtgttcctgcggcatcaaacaacagctgttgcttatttcgaagatgggacagctggaatacggctgggcatcggagaaacccttcacaggatggaacttgccccgcctttta

SEQ ID NO: 52558 - DNA, 145 bp, Homo sapiens
aattttttaagtttaagttcatttttgtccccgctgatgaaagttagagctgcttcctcccaggcagccctgggagtaggggcacagacttgtgcctcgcttcccagcagcttcccagtgcctttgtccacaaccacctccctgg

SEQ ID NO: 52559 - DNA, 5354 bp, Homo sapiens
  misc_feature (1)...(5354): n = a,t,c or g
attttagacacaagcgagaggatcatggcggatggccccaggtgtaagcgcagaaagcaggcgaacccgcggcgcaataacgttacaaattataatactgtggtagaaacaaattcagattcagatgatgaagacaaactgcatattgtggaagaagaaagtgttacagatgcagctgactgtgaaggtgtaccagaggatgacctgccaacagaccagacagtgttaccagggaggagcagtgaaagagaagggaatgctaagaactgctgggaggatgacagaaaggaagggcaagaaatcctggggcctgaagctcaggcagatgaagcaggatgtacagtaaaagatgatgaatgcgagtcagatgcagaaaatgagcaaaaccatgatcctaatgttgaagagtttctacaacaacaagacactgctgtcatttttcctgaggcacctgaagaggaccagaggcagggcacaccagaagccagtggtcatgatgaaaatggaacaccagatgcattttcacaattactcacctgtccatattgtgatagaggctataaacgctttacctctctgaaagaacacattaaatatcgtcatgaaaagaatgaagataactttagttgctccctgtgcagttacacctttgcatacagaacccaacttgaacgtcacatgacatcacataaatcaggaagagatcaaagacatgtgacgcagtctgcggtgtaatcgtaaattcaaatgcactgagtgtggaaaagctttcaaatacaaacatcacctaaaagagcacttaagaattcacagtggagagaagccatatgaatggcccaaactgcaagaaacgcttttcccattctgggctcctatagctcacacataagcagtaagaaatgtatcagcttgatacctgtgaatgggcgaccaagaacaggactcaagacatctcagtgttcttcaccgtctctttcagcatcaccaggcagtcccacacgaccacagatacggcaaaagatagagaataaaccccttcaagaacaactttctgttaaccaaattaaaactgaacctgtggattatgaattcaaacccatagtggttgcttcaggaatcaactgttcaacccctttacaaaatggggttttcactggtggtggcccattacaggcaaccagttctcctcagggcatggtgcaagctgttgttctgccaacagttggtttggtgtctcccataagtatcaatttaagtgatattcagaatgtacttaaagtggcggtagatggtaatgtaataaggcaagtgttggagaataatcaagccaatcttgcatccaaagaacaagaaacaatcaatgcttcacccatacaacaaggtggccattctgttatttcagccatcagtcttcctttggttgatcaagatggaacaaccaaaattatcatcaactacagtcttgagcagcctagccaacttcaagttgttcctcaaaatttaaaaaaagaaaatccagtcgctacaaacagttgtaaaagtgaaaagttaccagaagatcttactgttaagtctgagaaggacaaaagctttgaagggggggtgaatgatagcacttgtcttctgtgtgatgattgtccaggagatattaatgcacttccagaattaaagcactatgacctaaagcagcctactcagcctcctccactccctgcagcagaagctgagaagcctgagtcctctgtttcatcagctactggagatggcaatttgtctcctagtcagccacctttaaagaacctcttgtctctcctaaaagcatattatgctttgaatgcacaaccaagtgcagaagagctctcaaaaattgctgattcagtaaacctaccactggatgtagtaaaaaagtggtttgaaaagatgcaagctggacagatttcagtgcagtcttctgaaccatcttctcctgaaccaggcaaagtaaatatccctgccaagaacaatgatcagcctcaatctgcaaatgcaaatgaaccccaggacagcacagtaaatctacaaagtcctttgaagatgactaactccccagttttaccagtgggatcaaccaccaatggttccagaagtagtacaccatccccatcacctctaaacctttcctcatccagaaatacacagggttacttgtacacagctgagggtgcacaagaagagccacaagtagaacctcttgatctttcactaccaaagcaacagggagaattattagaaaggtcaactatcactagtgtttaccagaacagtgtttattctgtccaggaagaacccttgaacttgtcttgcgcaaaaaaggagccacaaaaggacagttgtgttacagactcagaaccagttgtaaatgtaatcccaccaagtggccaaccccataaatatcgctatacctacagtcactgcccagttacccacaatcgtggccattgctgaccagaacagtgttccatgcttaagagcgctagctgccaataagcaaacgattctgattccccaggtggcatacacctactcaactacggtcagccctgcagtccaagaaccacccttgaaagtgatccagccaaatggaaatcaggatgaaagacaagatactagctcagaaggagtatcaaatgtagaggatcagaatgactctgattctacaccgcccaaaaagaaaatgcggaagacagaaaatggaatgtatgcttgtgatttgtgtgacaagatattccaaaagagtagttcattattgagacataaatatgaacacacaggtaaaagacctcatgagtgtggaatctgtaaaaaggcatttaaacacaaacatcatttgattgaacacatgcgattacattctggagaaaagccctatcaatgtgacaaatgtggaaagcgcttctcacactctgggtcttattctcaacacatgaatcatcgctactcctactgtaagagagaagcggaagaacgtgacagcacagagcaggaagaggcagggcctgaaatcctctcgaatgagcacgtgggtgccagggcgtctccctcacagggcgactcggacgagagagagagtttgacaagggaagaggatgaagacagtgaaaaagaggaagaggaggaggataaagagatggaagaattgcaggaagaaaaagaatgtgaaaaaccacaaggggatgaggaagaggaggaggaggaggaagaagtggaagaagaagaggtagaagaggcagagaatgagggagaagaagcaaaaactgaaggtctgatgaaggatgacagggctgaaagtcaagcaagcagcttaggacaaaaagtaggcgagagtagtgagcaagtgtctgaagaaaagacaaatgaagcctaatcgtttttctagaaggaaaataaattctaattgataatgaatttcgttcaatattatccttgcttttcatggaaacacagtaacctgtatgctgtgattcctgttcactactgtgtaaagtaaaaactannnnnnnnnnnnnnnnnnnnnnnnnnnnnnnnnnnnnnnnnnnnnnnnnnnnnnnnnnnnnnaaatccgggcccgggtgtgcctgaacctcagacctagtaatttttcatgcagttttcaaagttaggaacaagtttgtaacatgcagcagattagaaaaccttaatgactcagagagcaacaatacaagaggttaaaggaagctgattaattagatatgcatctggcattgttttatcttatcagtattatcactcttatgttggtttattcttaagctgtacaattgggagaaattttataattttttattggtaaacatatgctaaatccgcttcagtattttattatgttttttaaaatgtgagaacttctgcactacaaaattcccttcacagagaagtataatgtagttccaacccgtgctaactaccttttataaattcagtctagaaggtagtaatttctaatatttagatgtcttagtagagcgtattatcatttaaagtgtattgttagccttaagaaagcagctgatagaagaactgaagtttcttactcacgtggtttaaaatggagttcaaaagattgccattgagttctgattgcagggactaacaatgttaatctgataaggacagcaaaatcatcagaatcagtgtttgtgattgtgtttgaatatgtggtaacatatgaaggatatgacatgaagctttgtatctcctttggccttaagcaagacctgtgtgctgtaagtgccatttctcagtattttcaaggctctaacccgccttcatccaatgtgtggcctacaataactagcatttgttgatttgtctcttgtatcaaaattcccaaataaaacttaaaaccactgactctgtcagagaaactgaaacactgggacatttcatccttcaattcctcggtattgattttatgttgattgattttcagaatttctctacagaaacgaaagggaaattttctaatctgctttatccatgtacttgcatttcagacatggacatgctattgttatttggctcataactgtttccaaatgttagttattatggacccaatttattaacaacattagctgatttttacctatcagtattattttatttcttttagtttatagatctgtgcaacatttttgtactgtatgtcttcaaacctggcagtattaatacccttcttactgacatatgtacttttagttttagaaaacttttatatttatgtgtcttatttttatatttctttatttattacacagtgtagtgtataatactgtagtttgtattaatacaataatatattttagtatgaaaatttggaaagttgataagatttaaagtagagatgcaattggttctcctgcattgagatttgatttaacagtgttatgttaacatttatacttgccttggactgtagaacagaacttaaatgggaatgtattagttttacaactacaatcaagtcattttacctttacccagtttttaatataaaacttaaattttgaaattcactgtgtgactaatagcatgatgctctgcagttttattaagaaatcagcctaaccatacaactctcatttccttagtaagccaaattaggattaacttctataaacagtgttgggaacaatgtttaacattttgtgccaatttgttcctgtattcatgtatgtaagttacagatctgactcttcatttttaagttccttgttacatcatggtcattttctagttttttaccagactcccatctcacaataaaatgcatcaacaagcctgaaaaaaaaaaa

SEQ ID NO: 52560 - DNA, 1628 bp, Homo sapiens
ctgaaactgtggggcttacagaaatgactgccggtcatttgaatgagacctggaacaaatcgtttctcagaagtacttttctgttcatcaccagtctgtaaaatacatgtacctatagaaatagaacactgcctctgagttttgatgctgtatttgctgccagacactgagcttctgagacatccctgattctctctccatttggaattacaaccattgtattttgtttgtggcataaattacagtcatctgtctttcactggaatgaagaccatgcctaggaacattttttaaggactcagctgtggcttttagggcttggttcataccatgggggaaaaaaaagtcctaggagaaagcgacgtggctcattagtgttgcctcttcagtgctcaagccgcctggtggattcctatgacacagggggcctggaaagaaagggaaagtggatttaaaatatatatatacgtaacccaagccccataacccctaactggacaaatgaggtctgtttctttgggcctgaggctgatgcatataaagtcttattttgggactttacaaacttgtcctaactatcttgtggatagtgggctgtgacaatctggaatagagaacgttcacacttcgctcctttaaagaaggcgaccccagatctgcaagggagtaggattctgctatcttgggccttcacagcccttcctgttgattacaaagcccgtgggaagaaaacagaacacaccctcctcagttccgtctaaatgtgtttcttctgcttcaattacacccagttctggggcaaagacactgatgaaacaacacccatacctgaaaagaataaatgtgtgactttcaaatcccctttcgcagtgaaagaaacagcaaacacttaagattcagcatctgttctccagttgcactgaggaatgcactgtctcgcagcaccagctctgcagagcccttgccccagactctttgcggttttatttatatgtatttccatatttcattcctgtgtgtcactgctgcattggtgtggcagcaagtgaccaaatgctacaggtcttactatggacaccaggtcaggtgcaaccacacaaaacaaagccagttccatgagctgcctatgatatgcattgcggaagtaacattttacccagggtgtgccattgcagtgatataaatatatttttttcttagactaaatatgagctgactatctcttttgatgtgtgtacataggtgtgagtgtgtgtgtatgccgtgcctgtctgtgtgcgggtgtgtgtatgtgcatagcctcatgcttaggactacccatgaatgttgtggaatgctacacctggagagttctggttttccaccagtttcaagatgaagaactacatgatacagtggacctggagaccatccccttggaaagacaacccagagatgttcagcatcctgtatctacacgcatcctgtatctacacgtgtattttgtagctgtcacactaaccttaataagaattctacagctttggacagaggcattttcaccttaatggtgaagtaatttaaaatataaatccattcaggtgacaacccatcatcaaaattacaaattttctgattgaactcatctg

SEQ ID NO: 52561 - DNA, 506 bp, Homo sapiens
taccaatctgaagttcttggtacagtctttttaactccaccgccgctggtcccgtcaatttgccattgtaagactggaacccattcagttttcctttctttaaatcttccaattgctgactaagctgatcaacccttaaaattgcagtctgtacttcctgcttcttttcctggaacatggcactgaacctttctatttcagcagacagattgccgttcatgattttgctgtagtcgacttgtcctctcattgcacgaattttcttcagcttgttctcctgggcttcaactcgttctttcaatttctgaagcttttcattttcagaaatagactgctgctgacggcgctcctgttgctttagaaaatgtaaacgctgttccttgggcaaccaacatctgctgctgattttcaatctgctgctgtttgcctaggctggccatatcttggagctctgagagggtaagttcaacacgtggattcccaaccccattttcagtacgtttttc

SEQ ID NO: 52562 - DNA, 902 bp, Homo sapiens
ctttgtgctggggcaggccgagggaatactcatcatgctggcaatgacggcactgactgtgcgacgctcggagccgtccttgtccacctgccagcagggggaggatccacttgactggacagtgtctctgctgctgatggccggcctgtgcaccttcttcagctgcatcctggcggtcttcttccacaccccataccggcgcctgcaggccgagtctggggagcccccctccacccgtaacgccgtggggtcgcagactcagggccgggtgtggaccgagggggaagcaaggaaagggctggggtcctggggcccagcacggcgactccggagttgcacggcgaggggggcctcgctagaggaccccagagggcccgggagcccccacccagcctgccaccgagcgactccccgtgcgcaaggcccagcagccaccgacgcgccctcccgccccggcagactcgcaggcagggtccaagcgtccaggtttattgacccggctgggtctcactcctccttctcctccccgtgggtgatcacgtagctgagcgccttgtagtccaggttgcccgccacatcgatggaggcgaactggaacatctggtccacctcttccgccgtcatcttgtcagcctgggacatcagcagacgcttgatgtactccttgttgattttccctttcccgtccgggtccagcatcttgaaggcgttaagaatggtctcctcggcgtcggtaccgctcagcttctccccaaacaggttcagaaacatggtgaaagttgatgggccccgaggctccttttgagcatggcgtcccagttcgtccgtccttgacgtttgggtcttgcccagggaggcataggtgtcctttcaggtcctccttgtcaaatgaagccatctcg

SEQ ID NO: 52563 - DNA, 1943 bp, Homo sapiens
  misc_feature (1)...(1943): n = a,t,c or g
tttgcaccccaggcaaagcagagagcagaggttcttcagtccacgcaacggttcttctctgaacagcaacagagcaaacagataggaggaggcaaagcccagaaagtggacagtgattcaagtaaacctcctgaaacactgaccgaccctcctggggtctgtcaggaaaaagtagaagaaaagccaccccctgcaccctccatagccaccaaacctgttagaactggaccaatcaaacctcaggcgatcaaaaccgaagaaacaaaatcttaaaggctatggtttattgcaggggattgggtggggggcgggaaaacatggagaattaagtcagataatgctggcagccaaaggggcaaaatggcctgtgacattatcctgttcagagcttggagatgtacaagggacataggagcaatttacactgacacacagctgctgtaccagtgaaaacgaggctttgcaagcttgtacctactatataacatgtgcttggttgatggccatgcattttcagtcagaatttatatataaatatatgcacccatttttttgagtgcatataatttagacctaaaaatccttatgattagggtgaaacacccaaaaatataaggaaaataacacagcagaggaataggctcagcctgaacagtgtgatggtcccagctactacatcagatgcggtttttttgctcccttatgttcttcggatatggttatggcatttgtaggcttgggaggtaaagaactgaagataactggtgctggatagaggagccttattttttattatggcagcttgctatttttataacatggtgattgagttgaacacaatcaaagtacagtagtaactgatgtccccttcttcctggatgaatgagcagataaatattggatgtcagcatccttgaaccatatcaaagtgagcagtgtttggctactgcttctatttgaaatggtgctgtgttttggttgtggtctgaagctttgaagcgctacttagcatctcctttcttccatggagctctcacgattcaaacatgacagatttggtaaaatgctggttaggttgagtcttccttgcccccactcagtcatctttgtatgaatcccatgatttgggggtttttttcttttttttttataccagtttttagctggtgtttatgaagaacagtgagtacctagaactgtgccactaattaaaggaaatcctaagaaggtgcatttctttacagagctgtgtcatgccatcctttgggccctctgctggaaaagtagaatcaagtctcaaataatgcctttttaattgtatcctctagtattatagatataggacagtactgtatcatacctctgtgaatgtaaaatatcttgtacctgctttatgatacgtagtagtgaccgtgctttatcagagctgtttttaatgatgttattctagaatgttttctttccagatgatgattcagaagctaattttaaaaaacggtgccaggtaccacaacagtaacagaactttgcaattttctggggttttgttttttacctttttccccccttttttttaaatgggagtgtgctggatgtctctataattttattcagatgactgcagaacctggaaaagctgttgctgctattgatgcataacatactgctattggtcgggttatanaaatatatatatatatatacatatatatatataatttgaatttttggaaactttagctgtgctgtcaactttggaaaaagtatcccggtttactgtgttgagttggcattgtacagaaattaacagccatattggtctagaaacgttaaacttaatttttttccatttgtacaggggtaacgcactgtattaaatatgtaaggtcttatctacatgggtttgattacagaaactaataaagtattctctaaataatgaa

SEQ ID NO: 52564 - DNA, 555 bp, Homo sapiens
tttttttgttttttttttgaatgaaaagggcttttactttctttttaaaacaagtgatttttaagggtttgtagaaaaagcaaagaaaagcataattctcctcttacttcaagctagtgtctgatgagaaagtaccaggctaacctctgaagaatcctaccccaacaccttcttctttcttctgctgggatgaacatctaggggtaagatatgactgctctctaccatctggggacttctcttctttatattgttgcattcctcaatctttgcataaggaagagaatggctaattcctctaggtgccaaggaagagcttccctcttcctacagcctcgcatgtttcttttcccactggttgccaggaagcttggagatatggtgacgactattcaggcacacatctcttccttgggtcctaccacagtcatctcctccaatatgcagtgatgttgacaggcttggagatggtgactagggagttctgaactaggtacctcaaatctatcaagtccacagtaaccaggagctatgatcatttcttaggttttctga

SEQ ID NO: 52565 - DNA, 668 bp, Homo sapiens
aaaagcctctatgatatagaaggactactcagtaagaatgcagaactgtgtggcatgtagtggaaagaggaaggaatgaggagacctggtgctagcccttgcttcactataggcttggcatatatcttgggcaagttggttaacctctgaacctccactgacctgtttataaatgattactctctgccccacctactaaaaggatagtttaagaattagcagagaaaatatatattaagtcagtttgcaaggcagagatagagagcctcactgccttttatcaaccaaccctttgcttattggctgcagagaaaatgatttgagattacaccaagaataagataacatggagtttctcatttcccttccacctcctgaatgtctactaaaaaggtattctattggcactagagtaccaaccagtcttttacctttccttttagttccttcaggaggaaagatacaggttgtccatgcaagtttccacttgtggttgtcagtggagtgttgatatcagtgtgagcatccacccagatgactccaagatcagggtggaccctggcatggccagagatgcttccaattgccaaacttttggggaaaaaattttgtgtgaacatcaggtttgcagtgtcactacatacatcatattattcactcaatgctcc

SEQ ID NO: 52566 - DNA, 1449 bp, Homo sapiens
tcactgagggttgactgactggagagctcaagtgcagcaaagagaagtgtcagagcatgagcgccaagtccagaaccatagggattattggagctcctttctcaaagggacagccacgaggaggggtggaagaaggccctacagtattgagaaaggctggtctgcttgagaaacttaaagaacaagagtgtgatgtgaaggattatggggacctgccctttgctgacatccctaatgacagtccctttcaaattgtgaagaatccaaggtctgtgggaaaagcaagcgagcagctggctggcaaggtggcagaagtcaagaagaacggaagaatcagcctggtgctgggcggagaccacagtttggcaattggaagcatctctggccatgccagggtccaccctgatcttggagtcatctgggtggatgctcacactgatatcaacactccactgacaaccacaagtggaaacttgcatggacaacctgtatctttcctcctgaaggaactaaaagggaaagattcccgatgtgccaggattctcctgggtgactccctgtatatctgccaaggatattgtgtatattggcttgagagacgtggaccctggggaacactacattttgaaaactctaggcattaaatacttttcaatgactgaagtggacagactaggaattggcaaggtgatggaagaaacactcagctatctactaggaagaaagaaaaggccaattcatctaagttttgatgttgacggactggacccatctttcacaccagctactggcacaccagtcgtgggaggtctgacatacagagaaggtctctacatcacagaagaaatctacaaaacagggctactctcaggattagatataatggaagtgaacccatccctggggaagacaccagaagaagtaactcgaacagtgaacacagcagttgcaataaccttggcttgtttcggacttgctcgggagggtaatcacaagcctattgactaccttaacccacctaagtaaatgtggaaacatccgatataaatctcatagttaatggcataattagaaagctaatcattttcttaagcatagagttatccttctaaagacttgttctttcagaaaaatgtttttccaattagtataaactctacaaattccctcttggtgtaaaattcaagatgtggaaattctaacttttttgaaatttaaaagcttatattttctaacttggcaaaagacttatccttagaaagagaagtgtacattgatttccaattaaaaatttgctggcattaaaaataagcacacttacataagcccccatacatagagtgggactcttggaatcaggagacaaagctaccacatgtggaaaggtactatgtgtccatgtcattcaaaaaatgtgattttttataataaactctttataacaagatt

SEQ ID NO: 52567 - DNA, 607 bp, Homo sapiens
ctataccaggaccagagtgaagacaagagagagaagaaagaggccaaggagaaagaagagaagaggaagaaggagaaaaagacagcaaaggaaggagagagcaacttgggactggatctggaggaaaaagagcccggagaccatgagagagcaaagagcacagtcatgtgaagattcctggctgcctcttccaggcagtcccccagagatgcctcttctgccccctaaaagcagtgccctggacttgaagcccgtgaaatgactccatctgggattcagaatacagtgttctcaagtgaagaaggcttggaacccaccccacctccctcattgggggctctctgggcaaacatggttttcatgcacccctcttcctgagcttggtccctgcctggtgattcttcttatactcggagagcatccctggttgaggagacacccgcaatcctccacgatctcatggctccacctgcttctccccactgcctgatttcttttctctctgcctgatgtctactgaacagaacttcccctctcccatgcacccactgccagctgagagctgcttcccaatggcctgcattaaagcattcgtaacagccctttg

SEQ ID NO: 52568 - DNA, 598 bp, Homo sapiens
cctacctgtccatacatcaggtctatggcaaagaggcttgtattccatgcgggcctgggagtaaaaacaatcaggaccattcggtttgctatagtgactgctttttctaccatgaaaaagaaaatcagagtttgcactatgactttagcaacctcagcagtgtgggctcattaatgaatggccccagcttcacctccaaaggaacaaaatacttccatttcttcaatatcagtttatgtgggcatgaggggaagaagatggctctctgtaccaacaatataacagactttacagtaaaagaaatagtggcagggtcagatgattacacaaatttggtaggggcatttgtatgccagtcaacaattattccttctgaaagtaagggtttccgagcagccttatcatcacaatccatcattctggcagatacattcataggagtcacagttgaaaccacattgaaaaatattaatataaaagaagatatgttcccagttccaacaagccaaataccagatgtgcatttcttttataagtcttctacagcaacaacatcttgtattaatggccgatcaactgctgtgaaaatgaggtgtaa

SEQ ID NO: 52569 - DNA, 745 bp, Homo sapiens
  misc_feature (1)...(745): n = a,t,c or g
cagcaacagccatttccaaagcagccaggaacatcaggtgcttatcctcttacttcaccccctacatcttatcatagcacagtcaatcagtctccctcaatgatgcacacacagtctccaggaaatctgcatgctgccagctcccccagtggggctttgagagcccatcaccagcgtcatttgttccaactcctcccccatcctcgcatggaatctcaataggaccaggggccagttttgctagtccacatggaactcttgaccctagttccccatacactatggtgtcaccaagtggacgagcagggaactggccaggatctcctcaagtgtctggcccctcaccagcagcacgcatgcctggaatgtcaccagccaacccctcactacattctccggttccagatgcttctcattcccctcgagctggaacaagttctcaaacaatgccaacaaacatgcctccacctcgtaaactacctcagcgctcttgggcggcatccatacctaccatcctcactcacagtgccttgaacattttactgctgccctctccaactccaggccttgtgcccggcctgggcaggtagttacctttgttctccacttgagagattccttggatgcagtcatcatgaggacggacatcttcaaagaattattcaacaagaaacgctgcagctgataaattctaatgaacccggagtgatcatgtttaagactgatgcactgaaatncagagtaa

SEQ ID NO: 52570 - DNA, 799 bp, Homo sapiens
ttttttttttttgacctagttttattaaatattgcttccttggggtgtgtttataacaactcccagaacatttcatgtaaggattcaaagcggtcatattaaaatacagcttcaatataaagtttatcacagttttacagtattcaaaaatgacagacctgccttaaaaaacaaaacaaaaaccaaaaaaggactattacacccaaaacataagaaaacaattaaataaacaagtttggcattttcataactttatagtataaaacagaatattaaatttattactggcaaacggacactgatttatttcctttgaaatgtgtcccatttaaacacactatacaagttcattatacaaaagatggatgatcattttgatgaaagaagtgcaccctgaaaatttttgccagtttagaatatttagctcttaaagtttaaaaaaaaagtccttttccttttttaaactgaaggctgaattcagattttttttgttgtctcatctgtcagccttcctggtttaaaaacaatagtgtctatggacgcccaccagggggcagtgtaagattagccattaaatcacggaacagctgcaaatattgtgcattcaccttgtcgtggtggattcatctctgcaaacctcttcagaatgttgctgaccatcatgggagcagcaacagaagagttctgctgtctgggaatgtctgcctgctgggttgtacctgaagccatgtcataaatgattggaactataatactaacaggttcttggggagggaccgatgttttctgagttagttga

SEQ ID NO: 52571 - DNA, 1253 bp, Homo sapiens
ccccaatccacggagagagagacccgccgggaggtgcggccgcgctatggacccctgaccccgtggggtcgctcggactcttaacgtgtggactgaccgctactgactgcaccgccaatccccccgtctctgccggccccttagcatgagcgagggggacccagccgggtgacattgtgcccgttggcggattctcgatttcccctcttccccgtcctcgtcctcctcctcccccatgaagtgattctgagtatcggggggtctctggattattgttctgacgaacccctgcttgtggttggggggtatttaatctgaggccttagggtccttcggtgtctttgagtgttttgtgtgtacatattttgctcttaaagtttataaatatacgtatattgagagtgtccacgtctcctcgctgaaccttaggaatcccttgggcaccatgtcctgtgtgcattataaattttcctctaaactcaactatgataccgtcacctttgatgggctccacatctccctctgcgacttaaagaagcagattatggggagagagaagctgaaagctgccgactgcgacctgcagatcaccaatgcgcagacgaaagaagaatatactgatgataatgctctgattcctaagaattcttctgtaattgttagaagaattcctattggaggtgttaaatctacaagcaagacatatgttataagtcgaactgaaccagcgatggcaactacaaaagcagtatgtaaaaacacaatctcacactttttctacacattgcttttacctttataatgtagcagtgaagtaaatcattttagaacttaatatccaactgatcatagtacatattgtaaataaaatgtattttgatgacagctcagttgaatatggataatatgtggcatcacttgcacacttattttgtagaaatgggtaatttgtgcccgtaacactgtttcatattaaatatgatagcattatccctgtatgacactgtgttgtacagttaatgtatgatcctttttagatcgtttaggttttacactaaggaacatgatgacatgttctacatttgtctgtctatagttagtgtatgatcctttttagatcgtttaggttttacactaaggaacatgatgacatgttctacatttgtctgtctatagttagtattttgtatgtatgtacaggctgttgtgtgctttttgtttcttgcaataaaaaatgtttggagtgtaaaaaa

SEQ ID NO: 52572 - DNA, 900 bp, Homo sapiens
cggacgcgtgggttttaatgaatatttaaaagttcaagagccacggaaatcacttccagagataagagttccctttctaaatagaacacatttttaaaaaataagttatgtttgctactaaaacatttacactgttagactattatgtgcatgttgccaagactcttaagtaacttggatatcaactgtgaagggcctacctctaaaaagtaacaggtcatacaaatacaaatgtaactgtaaaaattccactggattcttgcatatttgcaagattagattattcaaaagaaatttcagtgctaaaattaaccagcaacataagttctatgggctttgaaaattgttctcatctttttaaagttgatgcattttcaatcctgcttacacaggctgttcatttggataagtaaataaaatgtctaaggtgaacttggcattatgtggagatgttggaccgttatagagcaatacaaattcctatgctgtcattctgttttctgcaaatgcaaacgtgcttatatggtcaacagtgcaaaaatagggtagttggctgcatatttagggtattacctaagcatttgttctctaacgttgctctactagaatgatttttttcttgcatcttttcacattaatgatgttctttatataactttcatgcgattatttagttttttaaattaataaagtgaatttaagaaatattgaaataaacatctaagtaattgccattttaaacccttgtttcttactgtgggagagggggaaatacagcactcatttcttgtttttaatttgcagaagtaagtgaaaatctatgtaaaatcaaaccaaaagagttggactgagtgtgtattgtcttgagattaagtgacaaatagtaaaaaaattactgag

SEQ ID NO: 52573 - DNA, 441 bp, Homo sapiens
  misc_feature (1)...(441): n = a,t,c or g
gaaacccctcaatgcattagatgtcatgaagcaccaaccgtatcanctcaatgcatccttgtttactttccaacctccagatgcaaaggatggcctcccccaaaagtcatcagtcaaggtcaattcagccctggccatgaagcaagctcttcctccccggccagtgaatgctgcctcacctacgaatgtgcaggcttcgtcagtgtactcggtaccaagcctatacctctcctccttccttctttgcagaggcctcctcaccagtcagtgcatccccagtgcctgtgggcattcccacctcgccaaagcaagaatcagcctcatcatcttattttgtggcaccaaggccaaagttctcagccaagaaaaagtggtgtcacaattcaggtgtggaaaccatctgttgtggaagagtaatcttgtagctgaagctgagtgccg

SEQ ID NO: 52574 - DNA, 524 bp, Homo sapiens
tttttttgcttgtcccactgagttttattgtagggatacacacaaaggatgtgccctcaattccatagtttcttgatggacatgtttttcctcactgtcctttggcatgagataggactttggactacctcaaagtccttctgagtgacatggactcgctactcagggcatacatgccggtttctgtgcacatgcccttcacttcagcctgatgctcctggcataagctcagcaatttttctcaggttgatcccctgggtcaggttcatttctgagaatgaatcttcaaagtgaccagccaggcctactcattgcaggttgggaattcaatttttctgtcaatggtgccctgggcaaagcagtgccgagtccaggatatcaatcgtattagcagccgtgataaaccgtgataactcttggtggcctcaaagcaccttcgaaggcatcatctgctgcacttcactgttccctccagcatccccctccagctctgaggagccaaaagagtcaatttcatccatgaa

SEQ ID NO: 52575 - DNA, 475 bp, Homo sapiens
cagcttcagatgctctggagagaaactctctatcctctcaagacccacagcagcccaccagtactgtctcagtaacggaagattctagtacatcggagattgacaaggaagagaaagaacaaaccactcaagatcctgacttgaccaccgaagcaaatcctcagtatttaggactggcaagaaagaaaagtggcatcctgctgctcacgctggtgtccttcctcattttcatactcttcatcatagtccagctcttcatcatgaagctgaggaaagcacatgtgatatggaagagagaaaacgaagtttcagaacacacactagaaagttacagatcaaggtcaaataatgaagaaacatcatctgaagagaaaaatggccaatcttcccaccctatgcgttgcatgaactacatcacaaagttgtactcagaagcaaaaacaaagaggaaggaaaatgtacaacattcaaaatt

SEQ ID NO: 52576 - DNA, 821 bp, Homo sapiens; identical to SEQ ID NO: 12761
  misc_feature (1)...(821): n = a,t,c or g

SEQ ID NO: 52577 - DNA, 2066 bp, Homo sapiens
  misc_feature (1)...(2066): n = a,t,c or g
tttttttttttgctgtttctccaaaattttattttaatttaaattacagggccagccagatattctgataagaaattcacttttccttaggagaaagaaaatgctttcatggcattgttaacaaatgtatacatctccacttttttaagggttaaaaatcacattaagtaactgccttatgtaaaattaaacctttataacacaaaaaccacttccagtataatagtcttggtaatatgaatatattaaatgatcataacttcaaatgcaacatttcaaacttaaatgttttcacattgttttgcttaaaaacaaaacccacgaagtctgaactaccttcagattccaatgtaagagtaacatgaatgttgtgtctgacacgctgcaccctcacttcttccacctaaaaggctacgacctcactgccaaagtggaagctgttctagatgtgtaagttctaagaatgagcttggcaagaagacgtttcttccacttggtgtaatccatgtttttacactaactccatacacacagcactacaccacaaagccaggacaccacatcacggccaagtcttccttcctaaacatccaagagatttttttttcaaggagactagattgccttatttcacacagattctggtaaagacagtcttgagaaatgccaattatgatgtagactgccattttaataaaaataaaatatatctatattttctggagctattttcctaactggtgttcctgaaggtttaaaacctgctgaaacagcaattgggaggcccattttactggccagtatataattccattagtaagagaggctagcaaagaataatcatatcaatttcttaatcagctgcagccatgctgaatttgaactggcaaactctgatttgtcagttgttagttgtgatcttcatatcactaaaatgaacagataccattctaataactttacatagatatagtctagaagacattgttctgccgtggtcacagtaacaaaaaagtggtgcaaaatcagttactttataaatactgataatttgcagcattaaggaacaggacattaaaaaaaataaatttccccataggacacctatgactaggaagtcgtcttttcctaagagaagccaaagttttaattattcagttcacaactattgtactgggttacttagtctaagaaagaaaaggtgctctacagagatttcccacacacacaaagaatcagcattaatttagcataatctctatcattcacagatctggcagattcattaactcatttaaaatgaataaggccaataggatgcaggaaggtgtggctgactgaagctccagggctgtatcgcagcttattgatggcaccccattaggtaactgaatacaaaggactggtttactttctttttcttttaatgctgtgatacttaaatgttaaatcagcattttcatgtgatctgaagtatttcaattacatatgagcattcattgttttttgcaaaaactcagtattaggtaatagttacatactactacaataacattcctctgctgtacaaattaaaccatttaaaagaaatgagcattctaagaattatatacaaaagaaaccttgaagcagtgttgaaatgaaatgcaaggtgtcattgctagctctactgttttaaagtatctttgaaaagtaaaattaacaaatacccttcaacatatccaggtttacaagtctcaagaaaatcaaatgtcaaaaaattctagaaagctgtgaaaagcatatatacattttccttatgatcttatgaggcttctttacacttttaagaagttgctaagtttcagtatcaatttattcgcatgtcaactttagctgcccccaaactcccattttggatagctcccctctgatttcagataaagctctgcgtcatcttccttcagcgaaggtgcgcgacctgaaggtgcgcgatctgacgcagggatgccaggtgtgcacttgccacactgcactcagatcgccaacaaagatgggtgcaaanacataggtctaatctgatatcg

SEQ ID NO: 52578 - DNA, 1516 bp, Homo sapiens
tttttttttttttttagctgagtcaacaagctttattgtcatcaggcaaggaagcatggggaagggactgaagcagggggctgaggctggagaggccggagactgtggggcagatggggcggctgcctccctgcctcctgggtggccggccggggtagctgagtcctcagcgggtggtctggtggacctgctcgcgggaggagatgaccttgccatcctggacctcttccacaatggtacgcacctgacgggtggtcaccggttctttcttgtactgagtcaggtgggcatcctctccctccagcaggcggcggtaggtggcaatctcctgctccagccgcgtcttcacatccagcaggattttgtattcctggttctgctgctccatctcgcagccgaagctgggccagctgctcctccacgctgccaatcagcccctggatctgggacagctgcacgcagtagcggttctctgtctccgccaggttgccctccagggatgctttcatgctgagctgggactgcagctctatctccaaggcctgcatggtgcgccggagctccgagatctcactcttgccactctgcaccagctcactgttggtggccacctcgcggttcagttcctctgtcttgctgaagaaccaatcctcggcatccttgcggttcttctctgccatcttctcatactggtcacgcatctcgttgaggatgcggctcaggtccacgcctggggcagcgtccatctccacattgatctcaccacccacctggcctcgcagggcgttcatctcctcctcgtggttcttcttcaggtaggccagctcctccttgaggttctcaatctgcatctccaggtcggctctggccagggtcagctcatccagcaccctgcgcaggccattgatgtcggcctccacacctcaggcgcagggcctgctctgtctcaaacttggtgcggaagtcatcagcagccagacgggcattgtcaatctgtagcaggatgttggcattgtccacggtggctgtgaggatcttgttctgcagctcctcaattgtcctgtagtactggctgtagtcacgggcgggccccggggcctgcctctggtaccagtcacggatcttcacctccagctcagtgttggcctcctccagggcacggcaccttgtccaggtaggaggccaggcggtcattgaggttctgcatggtggccttctcacctccagccagcagcccatcaacacccccaaagctgctgccatagccaccaccagagccaaagctgtagcagctggagtagctgctacccccgagggtgctgcccaggccgccagcagatcccagcctgcaggagccggcacccaggccgccagacagccggcaggaggtgcgggacgagccgccccccaggccggaggagcccttgatggagctggaggaggtgaactggcggatggaggtggtcatggtggcggcggcaggaggcaggcacacaggagaagggctggagaggag

SEQ ID NO: 52579 - DNA, 476 bp, Homo sapiens
ggtccccatgtggacaggacggtcctaaattccgacctcagatggtctatccacctggccctcccaaagtgctgggatctacggcttgagcccactgtgcctggccaaattaatttcttttgcatggttgctttcaccagtaagtggtccagaatacaaaatatggtaacagagaactgttttcatacttattccttggtacagttattaaaaataaaaactcgcattttaggattagggaagtctggaaaaaaatttttttaaacttggagatcacatattgaatagctgtcaaaattcaaactgactagttttgaagaacttcaaaaacgtgttcaaatgaataaagaacaaaaatgatcaaaagaaacccatagctgcctaagagtcttaaaaattattaatgtgacactctcatctctcatcaagtgtatccaaaccacttctcatttgctctttccatttaaaggtcgacc

SEQ ID NO: 52580 - DNA, 861 bp, Homo sapiens
  misc_feature (1)...(861): n = a,t,c or g
ggaacagacttctccctctccatctggtcaactgcgggagaaaaattttcgagaatttccagcaggcaaggcagtggccgctttgactgcttgcttcggagatccgagacgacggagaaggcactcttatttaccgaccaagaaagctcctcccccgtcctccgttagctaattaaaacatttttcagggacgtagccatccagagggatttgcttcctaaggagaagaacttggaaactctgttgaccttggcttttctagaaatagataaagccttttcgagtcatgcccgcctgtctgctgatgcaactcttctgacctctgggactactgcaacagtagccctattgcgagatggtattgaactggttgtagccagtgttggggacagccgggctattttgtgtagaaaaggaaaacccatgaagctgaccattgaccatactccagaaagaaaagatgaaaaagaaaggatcaagaaatgtggtggttttgtagcttggaatagtttggggcagcctcacgtaaatggcaggcttgcaatgacaagaagtattggagatttggaccttaagaccagtggtgtcatagcagaacctgaaactaagaggattaagttacatcatgctgatgacagcttcctggtcctcaccacagatggaattaacttcatggtgaatagtcaagagatttgtgactttgtcaatcagtgccatgatcccaacgaagcagcccatgcggtgactgaacaggcaatacagtacggtactgaggataacagtactgcagtagtagtgccttttggtgcctggggaaaatataaganctctgaaatcaacttctcattcagcagaagcttt

SEQ ID NO: 52581 - DNA, 324 bp, Homo sapiens
gcatgcatccttattctgttcttgaaaggaatgcttttagtatttaaacattaagtaaacttactgtagaactctgctgatatttcagccatttaagaaagttcccttctattcccagtttgctaaaaatttttgtcataaatggctattggattttacctactactttttctgtatccaatgagatgatcacattttttccccttaagctgtcaatggggtcaattaatgttaagacaatcttgcacaaatccaatgcagtcctgatatattatctttttttacttactgctagattcaaatactaaaagataagaaacaacc

SEQ ID NO: 52582 - DNA, 1477 bp, Homo sapiens
cgcacgctgaggaggatcggcggccggtgagggggaagcaagtctggtctctgtgattgaagaagtcggctctgggctccagtgcgggaatcacacacatacctcagaatgccgggtctaagttgtagattttatcaacacaaatttcctgaggtggaagatgtagtgatggtgaatgtcagatccattgctgaaatgggggcttatgtcagcttgctggaatacaacaacattgaaggcatgattcttcttagtgaattatccagaaggcgtatccgttctatcaacaaactcatccgaattggcaggaatgagtgtgtggttgtcattagggtggacaaagaaaaaggatatattgatttgtcaaaaagaaggagtttcttccagaggaagcaatcaaatgtgaagacaaattcacaaaatccaaaactgtttatagcattcttcgtcatgttgctgaggtgttagaatacaccaaggatgagcagctggaaagcctattccagaggactgcctgggtctttgatgacaagtacaagagacctggatatggtgcctatgatgcatttaagcatgcagtctcagacccatctattttggatagtttagatttgaatgaagatgaacgggaagtactcattaataatattaataggcgcttgaccccacaggctgtcaaaattcgagcagatattgaagtggcttgttatggttatgaaggcattgatgctgtaaaagaagccctaagagcaggtttgaattgttctacagaaaacatgcccattaagattaatctaatagctcctcctcggtatgtaatgactacgacaaccctggagagaacagaaggcctttctgtcctcagtcaagctatggctgttatcaaagagaagattgaggaaaagaggggtgtgttcaatgttcaaatggagcccaaagtggtcacagatacagatgagactgaacttgcgaggcagatggagaggcttgaaagagaaaatgccgaagtggatggagatgatgatgcagaagaaatggaagccaaagctgaagattaactttgtgggaaacagagtccaatttaaggaacacagagcagcgcttcctggctgtaaatcctagacttgaaagttttccagtattgaaaacttcaaagctgaatattttttatttctaagtatttaaatgttctaacagatcagaacatgaaatgccctcctaaatgtcagctgttgtcacacagtagctccaacactttgagcatttttaagggagtggcctcatttcactagagacaaatctttaagaatagttctaaaattgggcttgtgatttccatttctgatgtctccagattggcacccctttctagttcaatgcctcacgagatttgccaggggcatccaaggcaaacaatcccaatctttctatataaaatgtattcaagcaaacatcaaataaatttctgggatattta

SEQ ID NO: 52583 - DNA, 412 bp, Homo sapiens
ctctttggcactagttcagaatggtgatgtgtcggccccctctgccatactcagaacaccagaaagcacaaaaccgggtcctgtttgtcagccaccagtgagtcagagccgctccctgttttcttctgtcccgtccaagccaccaatgtctctggagcctcaaaatgggacgtatgcaggaccagcgccagcattccagccatttttcttcactggagcatttccatttaatatgcaagagctggtactcaaggtgagaattcagaacccatctcttcgagaaaatgatttcattgaaattgaactggaccgacaggagctcacctaccaagagttgctcagagtgtgttgctgtgagctgggtgttaatccagatcaagtggagaagatcagaaaggtacccaatactctg

SEQ ID NO: 52584 - DNA, 4695 bp, Homo sapiens
  misc_feature (1)...(4695): n = a,t,c or g
cttgcgagctcgtcgtactgaccgagcggggaggctgtcttgaggcggcaccgctcaccgacaccgaggcggactggcagccctgagcgtcgcagtcatgccggccggacccgtgcaggcggtgcccccgccgccgcccgtgcccacggagcccaaacagcccacagaagaagaagcatcttcaaaggaggattctgcaccttctaagccagttgtggggattatttaccctcctccagaggtcagaaatattgttgacaagactgccagctttgtggccagaaacgggcctgaatttgaagctaggatccgacagaacgagatcaacaaccccaagttcaactttctgaaccccaatgacccttaccatgcctactaccgccacaaggtcagcgagttcaaggaagggaaggctcaggagccgtccgccgccatccccaaggtcatgcagcagcagcagcagaccacccagcagcagctgccccagaaggtccaagcccaagtaatccaagagaccatcgtgcccaaagagcctcctcctgagtttgagttcattgctgatcctccctctatctcagccttcgacttggatgtggtgaagctgacggctcagtttgtggccaggaatgggcgccagtttctgacccagctgatgcagaaagagcagcgcaactaccagtttgactttctccgcccacagcacagcctcttcaactacttcacgaagctagtggaacagtacaccaagatcttgattccacccaaaggtttattttcaaagctcaagaaagaggctgaaaacccccgagaagttttggatcaggtgtgttaccgagtggaatgggccaaattccaggaacgtgagaggaagaaggaagaagaggagaaggagaaggagcgggtggcctatgctcagatcgactggcatgattttgtggtggtggaaacagtggacttccaacccaatgagcaagggaacttccctccccccaccacgccagaggagctgggggcccgaatcctcattcaggagcgctatgaaaagtttggggagagtgaggaagttgagatggaggtcgagtctgatgaggaggatgacaaacaggagaaggcggaggagcctccttcccagctggaccaggacacccaagtacaagatatggatgagggttcagatgatgaagaagaagggcagaaagtgcccccacccccagagacacccatgcctccacctctgcccccaactccagaccaagtcattgtccgcaaggattatgatcccaaagcctccaagcccttgcctccagcccctgctccagatgagtatcttgtgtcccccattactggggagaagatccccgccagcaaaatgcaggaacacatgcgcattggacttcttgaccctcgctggctggagcagcgggatcgctccatccgtgagaagcagagcgatgatgaggtgtacgcaccaggtctggatattgagagcagcttgaagcagttggctgagcggcgtactgacatcttcggtgtagaggaaacagccattggtaagaagatcggtgaggaggagatccagaagccagaggaaaaggtgacctgggatggccactcaggcagcatgggcccggacccagcaggctgcccaggccaacatcaccctccaggagcagattgaggccattcacaaggccaaaggcctggtgccagaggatgacactaaagagaagattggccccagcaagcccaatgaaatccctcaacagccaccgccaccatcttcagccaccaacatccccagctcggctccacccatcacttcagtgccccgaccacccacaatgccacctccagttcgtactacagttgtctccgcagtacccgtcatgccccggcccccaatggcatctgtggtccggctgcccccagggttcagtgatcgcccccatgccgcccatcatccacgcgcccagaatcaacgtggtgcccatgcctccctcggcccctcctattatggccccccgcccaccccccatgattgtgccaacagcctttgtgcctgctccacctgtggcacctgtcccagctccagccccaatgccccctgtgcatcccccacctcccatggaagatgagcccacctccaaaaaactgaagacagaggacagcctcatgccagaggaggagttcctgcgcagaaacaagggtccagtgtccatcaaagtccaggtgcccaacatgcaggataagacggaatggaaactgaatgggcaggtgctggtcttcaccctcccactcacggaccaggtctctgtcattaaggtgaagattcatgaagccacaggcatgcctgcagggaaacagaagctacagtatgagggtatcttcatcaaagattccaactcactggcttactacaacatggccaatggcgcagtcatccacctggccctcaaggagagaggcgggaggaagaagtagacaagaggaacctgctgtcaagtccctgccattttgcctctcctgtctcccaccccctgccccagacccaggagcccccctgaggctttgccttgcctgcatatttgtttcgctcttactcagtttgggaattcaaattgtcctgcagaggttcattcccctgaccctttccccacattggtaagagtagctgggttttctaagccactctctggaatctctttgtgttagggtctcgatttgaggacattcatttcttcagcagcccattagcaactgagagcccagggatgtcctacaggatagtttcatagtgacaggtggcacttggctaatagaatatggctgatattgtcattaatcattttgtaccttgacatgggttgtctaataaaactcggacccttcttgtgaaatcagttaaataagacttgtctcggtcacctgtgccctgtccagactcgaggcagtggtaacactgcacagtgctatgtggcttctctttgaggatttttgggttttgtaactaaattcttgctgccctcatactttttatgtattagaatcatattcgtattgcccttttaaaacattgggatcctccaaaggcctgccccatgtatttaacagtaatacaggaagcatggcaggcaccatgcaaaccaaggatggatggtgcagtccctgtgtcagtgggcggtggtttcctgctggcctggaatcactcatcacctgattgattggctctgtggtcctgggcaggtgcctcataggtgtgtggatatgatgacgtttctttaaaatgtatgtatttaacaaatacttaattgtattaaggtcatgtaccaaggatttgataaagtttaaataatttactctctacttttatccattttatcccattttaactcatgtaatcctcatgtgagtattcctgtttaacacttgagtaaactgaggcacagagaacataagttgcatgccatagtcacacactgtgaaagtgaaaagagaatgtgtgcaaaacacgtcacagtcctggtttctgagtaaaggcaggctgttatctttagaatcaagctatcacagggagatagggcaatgctgtgggtgttggaggaaggtgagagcctgttgctaacaatttcctggttttaaagctaaggctgattttattgggaagatctcacatgtgtgtggcccctgagagttcccagtgccttttatttgcagtccttccatttgggacctcctaagctggccccatcaggtcatctccagggctcagaggggtgagaccatttcccaaggtcacagaaccagctctctagtcaccaccctgcctctccctctcacccagagtcagtaccagttttatggctttattacaaactgctgggtccctcccattttcaacttgattgatgggatgtcatcccttatcctgtctgacatttgcctctggcctggttgctagaagtttgccccaggggcaagagttgaaatttggcttcctgaggtgggctttgtggtttgcgtccctaaagtgagcccactactggttgcttgtccatggccaacaccagaaatcccctgagcactacctgggtctcattccaagaaggaagagggtcaggagacctggggagtctcatattccaagttcttctttctttctgggagcagtgggcagttcatggtgttagggcactcacccccacagactggcaaaccctgcaggacttccgtggctgaggctgtgaccggaggccaggaatgccgttgggtggattgtgagtgaatgggccctttgagctgccctctagagagcaaatccagtttcctggagctcctgaatgaatatctgtactggctcgctcagatgcagaagctccattgaccatgaggccttgtgaacatcagtggccacaggccagttgtgctgcttggcactgcactagtttaggacctgcagcatgtaggtagcgtcctagtgtttataatacaaagctgctttgnacagcttttcttgattcttctttgcaatctcctgagggattatcttgcccccattttttaaaacgaaggttgggattacccaaggtcatgttaggccagtgagtgttttnggaaaggccaaagcagttcatccntttccgggggggaccacattgtttttgtttncaccagaccacatttttggantagggttaa

SEQ ID NO: 52585 - DNA, 225 bp, Homo sapiens
gaacttactcttgcctgtaaaaatacagctctgaagtgaagaaatcccaggcgccacatcaaggaggcgaaactagagtccgcaggaggccagccccgcacgaggagtttcaaacactaaggatcctgacaggaaaaagttatatgaagcaagaaaggcaatttaaagcgatagtttatcatatgaatgtttcgttcttaaaaatgaacaagctctatttataac

SEQ ID NO: 52586 - DNA, 346 bp, Homo sapiens
gaaatgcctgtgttcacagggctatacatttctgggctcaacaatgtcagaggcgtgagtcaaggacaggaaagtgtgaggagaagatggaggaggcaaggatcagggaaggcttcttggaggaggtggcatttcagctggcccttaaaagatcattttggtggaaaaattaaatacattaattcatttgattgtttattcaacaaatgttgtgggtctgccatgcaacaggcatcatgctggaggccaaagacgtatctgtgaacagaacaggcaaattatctgaagtagaccttttagtaagagcaacacatgatcaacaaatgaatgtttaaaatgagaagga

SEQ ID NO: 52587 - DNA, 656 bp, Homo sapiens
attcggcacagggacaccagctgcggaatttgcggctttggcagctgtttgttcccaccgagctgtgctttaggaagctggccagccgggcttcctttaggtgcgctgcagcctttttcaaagcgagtgaatgtggcccggcccctacagttcgccaggcccgctgtaaaagggttagatttcagtctatagacgatcagtgggaaggcctttcctaggaggtaaccagaacagagagctgtaaactccgtgaatgcaagaggctgcttctgttacctgagtggttctcactcatctttgccttccttacctcgtgatctcaccattccagattgaaatcatggcaggtccagaaagtgatgcgcaataccagttcactggtattaaaaaatatttcaactcttatactctcacaggtagaatgaactgtgtactggccacatatggaagcattgcattgattgtcttatatttcaagttaaggtccaaaaaaactccagctgtgaaagcaacataaatggattttaaactgtctacggttcttaacctcatctgttaagttcccatgcctggagaagctaatgccaactcatcatgtgataattcaatttgtacaataaattatgaacctggaaaaaaaaaaaaaaaaaaagtcg

SEQ ID NO: 52588 - DNA, 108 bp, Homo sapiens
gcagaagatacttttatttctcggcccgtattaacactcagctctacaaaataacctataggttttaacttccttctctttcattgaaaaaggttccttgaaaaatcc

SEQ ID NO: 52589 - DNA, 204 bp, Homo sapiens
cctggtatatgttaaacttcctatgttaaattggttgaaacctagcacagaaccaccagagattttgctgaggccagcaaaacctgcaaattttttttcttggctctgcatagtgccttgcagatcataagaaaatcccagcatctttgccttattttcccttttgtaaaacagagacagtcttgcttccttggggaatactgc

SEQ ID NO: 52590 - DNA, 772 bp, Homo sapiens
ctcaggagctggggcatgggcacttggaacggggattgctctcccgcccccactattgtacggacgacaacgcggaggcctagcattctctcccagcctagaaactgatccctagtcagccttctaccatctgttgaatgggaagcttagaccgtgatcgggccgcgacgccccgcttccattagtgcgccgaaatagagggtcacttcgtcagctgagacctcccttttctccaggccacggggacagaccaggtggtgggactcggcctcgtcgccgttagcctgatcatcttcacctactacaccgcctgggtgattctcttggtatgtcattctccccgtccgctgctcaccttccccgagccctggcaccgccagaggcaactactatataggctctaggcacggcgctggcttcattgcctgcctcatctcttgaactctccagaacaactctatgaggaagatgccagtggtaccgcattttatagatgagatagctgaggctaggggagaaggatctggcccaagattgcatccttagccgctacacttataactctgtttccggcttgctttgacttttgggggagttctgttccttctgggttagcctgctgactcttaggcatggcaaacggcagtgaatattttgttgaaggccttttaggatatttttttcttgtgggaaaacttgttggttattgcttaagaagtgcagtgtgtctggaagtgcagaacttcttaagcaataaccaacaagttttccc

SEQ ID NO: 52591 - DNA, 534 bp, Homo sapiens
agaaatatgatgcttattttaggcctttttgtatatttgtcctagctcctagcccagtgtcatggaaacggtaggtaaccagtaaacgtaaaactaggtccttcatacaatggataagtgtcttggcaacgttgatggggaaaattgttggagagagcgcggagaggtcatctttaaggaagatgaagggatatctaggttttttttcggttttgtttaaagtactgtcaatttctgaatacatagagctttaaatttttcgatagtgcatttcaacgctcttcataaaattttaaaagcccactgaatactactttgtagcaaatgagataatgttaagacctacccctctgatgggaggtggggcgaggaccggaatattaaggatctttaaaggaatcgacttcagctctgcagaaagattagcaatcagtaaagatttggggatgaatgggcacctagagaagtttattcttgctctctgttatttctgctactggcttttagatcttgttaatatggtaattcaggttt

SEQ ID NO: 52592 - DNA, 945 bp, Homo sapiens
  misc_feature (1)...(945): n = a,t,c or g
ttttttttttactgccataaagaatattatttaatccatgagacatcgtccgtacaaagttagcgttacttttaaaaatgaagaccgtgatataaactggtaaaaaacgggcctgatgcgcctcgagcactccctgggagcaggccctggggtggctccgccccagtgtcgttctacctgaggtctacttgtgtctccccccttgttctctgcccccagaccatggccaaagcctttcccacaatgtcccatctgagagccttatggatgggctcacagggcagaggtaggaggagaaagaggaaggggcatggtgggcacccagccctgggggcaactgagggcacagccacgtccccagcaagggcacgctccagtagtagtgggggagaaggcaccagcagaggcagcgctgaggacctgggaagaaaaggaccctgccccaggagatggtctcagcaaggagcgggatattaggaacttgagacccaagacttcagagaggcaggtgccttgggtgtgcctgagnttgggtcaggatntcacagcctcacgccccagaaaaaccccgccttaaccaaccatctcaacgccggaatcaaccctccccctggcaagggggcacccccaggtcccagagcccgggcccctgtcttgggtctctggctctctggcacacagagagcgctctgcagagggcagccctcgcaggcagaccctgttcccagcagggctgaggggcagccgtgtggcccagcggtcagtgcagcacctggtccagctcatacttctcgcagaagcggctggtgaaggggaagcaggtgaggtgctcgatccagggccagttaatggggtagatgtacagccacagcacgagggcggcgaagaggccggcaaaggccagcagtgacaccaggatgagtgcccgcttgcggtacttgtcgc

SEQ ID NO: 52593 - DNA, 446 bp, Homo sapiens
tagaaaaaagcaaaaaactcagtaccaaatcaaattaatgatattacagatgaaaagactacattctgtctcctgggactgggcatgtacaccaaaacctcgatgacaaaacagaacctaatacataaatgtctatggggattaacagtaatttacttattaatattctcatggggtatcttttatgagctctcagaggcaagacaattaaaaattgtggtcagtgacaccaaagatcacggacagcaaattcagacctagctgcttttccataatgaataataatgaatatgttgttggtgaaagtcctagaacttgaggatttaaagacatcaatgaaattaaggcttggtttgactattataatagtcaatcaagtctaacttacacatttctcctgggtaaagaacagaaataggggctcacgcctggcctcgttccgaatt

SEQ ID NO: 52594 - DNA, 1455 bp, Homo sapiens
tttcttgctgtatggcaaatctcaaactacagagttctttttccaattcaagtgtttcatgctttaactgcgattttatttcttctttttcagatagtctcttttgtagtacactagccttatttttcagttttcgaatttttactctaagttgctcacagtgattatctttaagttctgttaatcttttacataaacaaaatgtctttttaattttcaataggtgaacacaatctttacacttcatttcatgttgatcaatgagtaatatgacattcttacaattacagcaaagcgagtcaccgtcctctgagactgtttgagatgactgaattatgtcatcaaggtcatccctagaatgtatttggtttttcacctgtggctggttattttcatattcttcaagcctcttttgctctccctctgatgccatttctaagtcttgttctgctggtgtggatgtttgtacatccttcattttggtggctgtattcagaacagaatttttattttcaattgtagccttcaaggtgggcagattctcaggatactctgttccagatttccaaccgcccgttattcttgtggcaatattcaaaagagaaactttctttttaaatataaccttctgggccgattgtttctgaggagacactgtcccagatttttctccatcctttatttctgtggctatattcgaaacagaatctttctcatcacttgtagccttcaaggctggttgtctctgagaagacactgttccagatttttctccatcctttatttctctggctatattcaaaacagaatcttccttgacacttgtagccttcaaggctggttgtttctgagaagacactgttccagatttttctccatcctttttttctctggctatattcaaaacagaatctttctcatcacttgtagccttcaaggctggttgtttctgagaagacactgtcccagatttttctccatcctttatttctgtggccatattcggaacagaattttccttgtcacttgtagccttcaaggctggttgtttctgagaagacactgtcccacattgtagtccatcctttatttctgtggctatattcaaaacagaatctttctcgtcacttgtagccttctcagctggttgtttctgagaagacacttctcagctggttgtttctgaggagacaactctattctcagcctcactggcataatcttctgcaagctttccatacacatctcgagaaaacacatcaatattgtgctgcagaagaagaatgactatatctttttctccaagagtaacagcaagtatgagggctgatctgccaagataatcaatggcatttacatttgcttttttctttaataaaaattccaccattttcacttttcttcgactcacagcaagtaacagtggctgatattcattcttgctgcattcttcaa

SEQ ID NO: 52595 - DNA, 365 bp, Homo sapiens
acaggccaggaccccattatctctcaggccccttgccccctggtacctactcgggccccacccagttgatacagcccagggccccagggccccatgcaatgcccgtagcacctgggcctgccctctacccagcccctgcctacacaccggagctgggccttgtgccccgatcctccccacagcatggcgtggtgagcagtccctatgtgggggtagggccggccccaccagttgcaggtctcccctcggccccacctcctcaattctcaggccccgagttggccatggcggttcggccagccaccaccacagtagatagcatccaggcgcccatccccagccacacagccccacggccaaacccc

SEQ ID NO: 52596 - DNA, 371 bp, Homo sapiens
actccgctgacaccttccctttcggccttgaggttcccagcctggtggccccaggacgttccggtcgcatggcagagtgctacggacgacgcctatgaagcccttagtccttctagttgcgcttttgctatggccttcgtctgtgccggcttatccgagcataactgtgacacctgatgaagagcaaaacttgaatcattatatacaagttttaaagaacctaagacgaagtgttccctctggggagccaggtcgtgagaaaaaatctaactctccaaaacatgtttattctatagcatcaaagggatcaaaatttaaggagctagttacacatggagacgcttcaactgagaatgatgttttaaccaatc

SEQ ID NO: 52597 - DNA, 309 bp, Homo sapiens
acagcatcgcgcgcgtcagtgtccctaacccccccactgttcaagggttagctgtactatatgatgagatgtgcaacatggttttgataagaggcagcaagggtttaggacattctgtggcatactggccacatagcgatttgcatcaggtcagatattctaagtctagaaagcctgtgggatagttctagaggaggagcagagatgaagcaacgcaagatgcccttgttcgtctgcaaaatttagggtcctcgagtgagacacagctcaaaggggggactgtgagcatttagggaagggggttctgtc

SEQ ID NO: 52598 - DNA, 281 bp, Homo sapiens
caaatctctatcagaccttaagtgtgacttcagagttgccaaaagattggttttctaacatttggaccattcgtttctgggtttattatgtgtttaaggctttgtttaaatctaattcatgaggccaaggtggcaaaattatagcttagaattaggcagctttaaggatttcatttattgtattagctgaataacatacaagtagttcttggaagatggtattttaagcagcagcatacaaaactgatatttacattgactttttcagtttcagaatccaa

SEQ ID NO: 52599 - DNA, 422 bp, Homo sapiens
cagggagacgcccccaggctgcctgggcggggcgtggcatccgagggagcccagcggacattccgctctccgcttccgtcccgcggggcccatcggcgttttggggccgcagccgggaccctcacggaagatgaccttgtacagaagctctccctcacctatctcccaacgccacggccaaggcaggccccccaccccgctgtcttccgtgtcagccgtgcttgatcctgggacccacgagccccacagggaccctcgaggccccatcccgttatccgagacccttcctaccccccattcctcggcgctgggagctatttttgcccaaggggggggggatgggggggctggcgccaccgaacctgcacatctcaacttgtaactcaataaacagaagtgactatcggaaaaaaaagtcgacg

SEQ ID NO: 52600 - DNA, 837 bp, Homo sapiens
ctgggattacaggcgttacacgcatgcagcccctttcaagccttttaacatcatgtcaccttcacaatgagcagttgctcccattacccagtgaactcaccttctgatgggacagttaccctagttggggcttctcagccttgagagatgtgcagagcagggacctgtccaggggcagagcagccagacagcgtggaaataatccaaacagagaaagcattcaagaacttgggcctctggttgacttaacacactacttcaagtatatgggcaggtctgtataataaactcctgcctgtctagtctttcagcctcatagaaagcaagaaagcaggtggcgtatgttgcagaacaattcttgggtagaacaaggggacatttgatggtttgggtttttcagtaagaaagatgaagtcctggagtatagggtagagtggtacagtggaaaatatttcagcttgggggttagaaaataaacatgccgattcttgctttgccataaatgatgtcacctaacttgtgtgaccctgttttctcatccctaaaatgatttgataagtttaagattaggctatttttaaatgtatggaagaaattgggtgttacccttcttgaaagacattttccctgcaagtatggcaggctgtatctttcagtgtaacaaagttctattaaaggtcataactgctgccctgtaacttttgccttattctagaaacttctactccttgaatgacatgtgttggtacatgtttcttctctttcagatagaatggttaattttgacttgttgcttctgcacacgtgtcctggaaataaaagtttcttcccactaaa

SEQ ID NO: 52601 - DNA, 355 bp, Homo sapiens
aaacagataaggggggactactgtataagcttaaattttgctcacataatgttcaactgggaaagacacagaagaggagaattttgctgcgtgtattcattcaggcacagacttctttatcttgtaccatgccacattaaagcacggcaccaagcttgtcctagaaatgatatccattttgttgtgacagggccctggtaatttattagggaagtctcttatgtttcagactgggatgtgatatacatcatggacatccacatcttagtagccagtcacaaagaccaacctggatgaaaaggagattgggaaatctggactatgtgcctggagtaaaatgaaattggtgctggtg

SEQ ID NO: 52602 - DNA, 441 bp, Homo sapiens
cggacgcgtgggttcaattccagttatctccgacgaggtgaaagtcattggtggatgaagggctcaacccctacccagatctcagagatcatcattaaacttatcaaggatatggcagcaggtcatctgtcagaagcttggtcccgagtgacaaaaaatgctattgcagaaaccatcattgccttgaccaagatggaagaagaatttaggtctccagtgagatgtattgcaacaactagactctggcttgctctcgcatccctatgtgttcttgatcaggaccacgtagatcgtctctcctcggggagatggatgggaaaggatggacaacaaaaacaaatgcctatgtgtgataaccatgatgatggtgaaactgcagcaatcattttatgcaatgtctgtggaaatttatgtacagactgtgacagattccttcacctt

SEQ ID NO: 52603 - DNA, 1564 bp, Homo sapiens
cactgtctgccctgtctacacggctgtgacaaaagtgccacaagcctgaagcaagacgccgatgacatgtgcatgatatgtttcaccgaagcgctctcggcagcaccagccattcagctggattgtagtcacatattccacttacagtgctgtcggcgagtattagaaaatcgatggcttggcccaaggataacatttggatttatatcttgtcccatttgcaagaacaaaattaatcacatagtactaaaagacctacttgatccaataaaagaactctatgaggatgtcagaagaaaagccttaatgagattggaatatgaaggtctgcataagagtgaagctatcacaactcctggtgtgaggttttataatgacccagctggctatgcaatgaatagatatgcatattatgtgtgctacaaatgcagaaaggcatattttggtggtgaagctcgctgcgatgctgaggctggacggggagatgattatgatcccagagagctcatttgtggtgcctgttctgatgtttccagggctcagatgtgtcccaaacatggcacagactttttggaatataaatgtcgctactgctgttcagtggctgtttttttctgttttggaacaacacatttttgtaatgcttgtcatgatgattttcaaagaatgactagcattcctaaggaagaactaccacactgtcctgcaggtcccaaaggcaagcagttagaaggaactgaatgtccactccatgttgttcatccacccactggggaagagtttgctctgggatgtggagtgtgcagaaatgcccacactttttagaacacgcagatcctttgtctacagagagaaaaattgccttcatcccccaagaggatgcggtgaagtttaaactctgctcaggataaggacgggaccatttttacatccatgaaaatgaaccattcacagtgcaagaaggataccaaataccatgtacataattcttgctatgaaaagtttcccccattattttggtttatcttcttttgaacaaatgacatcaaacttgtgaggtgtttgcatgtggccattaccgtcattggcctgtgaagcattggacatttatagataattgatataaaagaatcgccatgcccatggactaagaacgatgctggctttcaagcaaaaaagaaaaataatcattgtttattgtatactgcctttttgtaatcctgtacaattgcatcacgggtggggataaaaagaggaatattctggtttatttcctagactgttatttaaaaaaaaaaaaaacattgtgttaggacagcatataaatgtaataagtatcacactgtatataaacatatcaatgtttgtcctgtataagaattactaaattacaaatgcaatttcatttaaacttctaggttaagtttgagcctgaaattttaatgaagtgcaatactgagtgtgcctcattatcttgcagctgtaaacatattggaatgtacatgtcaataaaaccactgtacatttttatacagtgaaaaaaaaacaaaaaaaaaaaaaaaaa

SEQ ID NO: 52604 - DNA, 418 bp, Homo sapiens
  misc_feature (1)...(418): n = a,t,c or g
cagccactacacggcctcttttgcctacacaccggcagtgtccttcccgcactcagagggcctgtctggagccagttccaggccacccatgggccttggccccgccccctactcatggctggcagattcctggccccacccatctcgaagcccctcggcccaggaacccaggggaagctgctgccctagcaatcctgacccggacgacagatattacaacggggaggagttctcattccctcacctggcttcagcgcacttctcccgacctactggggcaaaccgaagggcgcccgggagcccgggctctctgaggttgggcagtccctggggaggatgtgagctggggaagcctctcagacctacctccaccctggtttaggatnggaaggcttgtgtggaggaagaagnngatccc

SEQ ID NO: 52605 - DNA, 458 bp, Homo sapiens
tgaacagatgggtgatcataaaatggccatggatggttataggcgtattttaaaccttttgtctccatctgatggcgaacgttttatgcagctggctagagatatggcaaagagttactatgaagccaatgatgttacttctgctattaacataattgatgaagctttctcaaaacaccagggcctagtctccatggaagatgttaacatagcagctgaactatatatttctaacaaacagtatgacaaagctttggagataattacagatttttctggaattgtgctggaaaaaaaaacttcagaagaaggcacctcagaagagaataaagctcctgagaatgttacctgcactatacctgatggcgtgccaatagatatcacagtgaagttgatggtctgccttgtacatctcaacattcttgaaccacttaatcctctcttgacaacactagtag

SEQ ID NO: 52606 - DNA, 817 bp, Homo sapiens
tttttgaaaggttacctgattcttttatttaagaaaagtgaaatacatggacctgaagtgagacagcagagggagggagtaagagcggccagggcaaggcagcttggctggccagcccccaaccctctgactgaaaagccagcagcaggctgcatctctgagggccatacctgctttgtacccaccttggggcctcagagctagctactctagaggaccacagggtgcagagagggtgtcctgagggtccttcctaagagggattcctgaggagggagctgagaccctaagggcagcagcaatcttctggttaaactgctccccttcactgtcccacctaggggtggggaagagccaggagcaatggggaatgctgtgagggctgtgggggtggggggacccagcagacctgggggccgggttgaatgtcagctgctttcgtctggctgatagggtcagtgccctgtctccgggaccgcaggctacattcctccagggtctcagcagcctccagctttccctggcgcctatacagagctcccaggtttctcagagtagtgttcactgtggggctgctcactttgcaggccttgtaccagcctccatactcagcatagggtgtcccaccctcatggtgccgggcttttgctcatttcctcccgctcctctgcatgcatccagatgggcttgtggtcatcatccacagacccaaactcctgtacatgggcacgggtcaggatctctttgtatagtgtctcagcctcagcatatttgccctgtttcaggtaacaggaagccaggttgttcttggtccggg

SEQ ID NO: 52607 - DNA, 442 bp, Homo sapiens
gatccaagcttaattttcaaacagcttcccaaaaagctgtatcctgaatatcataaagtctatcatatgatgtgtactcagtcatattctgtagactcaaatcttttatctgattataccagctttcccgagcaccgtgtgctttcctttaagtcggacatgaaatgtgttctccaaagcgtttctggattgaagaaaatatttaagctgtctgcagcagtagtattgataggttctcatcctaatctgtcttttctgaaggatcaagggtgttacctaggccataagtcaagccagccaatcacatgtaagggtaatcctgtggaaatagatacatatacctatgagtgtattaaagaagccaacctttttgcattgggtcctttggttggagacaattttgttcgatttttaaagggaggggcgctgggtgttacacgct

SEQ ID NO: 52608 - DNA, 373 bp, Homo sapiens
gaattctccttgacttcggaactggccctccacgccccaggatccacctgccaggagacccccagtgtgctctcaaacccccacccatctgagtggcctggaaaggctggtctgaagacctctcttcccatgtctgccgaccaggctttgctctccagggactttctgggagggggagagcccacctcctgccaacggccctgctggcactccgaggacagcagagggaaggaagccaggggctggggagccggccacacaactgcccagtgcctatccttctcctgtgcccacagatgctgagctgcctggagcacatgtaccacgacctcgggctggtcagggacttcagcatcaaccctgtcaccctcag

SEQ ID NO: 52609 - DNA, 2451 bp, Homo sapiens
tgtgctgcaaggagctaaggccttcagtgtccccttccttacccaggtttctcacagaatggattcccagcggaaccttgcagaggaactgcggctttaccaatccacccttcttcaggatggtctaaaagatctcctggatgagaaaaaattcatcgattgcaccctaaaagcaggtgacaaaagtcttccttgccacagattgattttgtcagcttgtagtccttacttccgtgagtactttttatctgaaattgatgaggcgaaaaaaaaggaggtagtgctagacaatgtggatcctgctatacttgatttaatcatcaaatacctgtactctgccagtattgatctcaatgacggaaatgtgcaagatatttttgcattggccagccgctttcagatcccctcagtgtttactgtctgcgtttcttatcttcagaaaagacttgctcctggtaactgtctagccatcctaagattaggacttcttcttgactgcccgagactcgccatttctgcccgtgaatttgtgtctgatcgctttgtacagatttgtaaggaagaggactttatgcaactgtctccacaggaactgatctcagtcatttcaaatgacagcctaaatgtagaaaaagaagaagcagtatttgaggcagtgatgaaatgggtgcgaacagacaaggaaaacagggttaaaaaccttagtgaagtgtttgattgtatccgttttcgccttatgacagaaaaatattttaaggatcatgttgagaaagatgatataattaaaagcaacccagacctccagaaaaaaatcaaagttctaaaagatgctttcgcaggcaaactcccagaacctagcaaaaatgccgcgaagactggggctggtgaggtgaatggtgatgttggtgatgaagatttacttcctggttacctgaatgacattcccaggcatggaatgtttgtaaaagacctcatcctcttggttaatgacacagcagcagtggcttatgaccccacggaaaatgaatgctaccttactgcactggctgagcagattcccagaaatcattccagcattgttacccagcaaaatcagatatatgtggtaggaggactatatgtggatgaagaaaataaggatcaacctctacagtcatacttcttccagctcgatagcatagcatctgaatgggttggacttccacctctgccttcagccaggtgtctcttcggtctgggagaggtggatgataaaatctatgtagttgcaggcaaagaccttcaaacagaggcttcgctggattcagtattatgctatgatcctgtggctgcaaaatggaacgaagtaaaaaaactccctatcaaagtctatggccataatgtgatttcacataaagggatgatatattgtctaggaggaaagacagatgacaaaaaatgtacaaacagggtgtttatcttcaaccccaaaaaaggagattggaaagatctggctccaatgaaaattcctcgttccatgtttggagtagcagtccataaaggcaaaattgtgattgcaggaggtgtcactgaagatggtctttcagcttcagttgaagcttttgaccttacaacaaataaatgggatgtaatgaccgaatttccccaagaaagaagctccatcagtttggtcagcctggctggatctctgtatgcaattggtggttttgctatgattcaactggagtctaaagaatttgcacccactgaagtcaatgacatatggaagtatgaagatgataaaaaagaatgggctgggatgttgaaggaaatacgttatgcttcaggagctagttgcctagcaacacgtttaaatctcttcaaactgtctaaactgtgaacaaggtgacaaaacataatagattgggaggtggtttgtttggtgaatggggctttaatttattctgttttttaaaagcttgtacagacactcatgtagaaattattcaagaagttattgtctaagagatgagccagtaggtaagaaaacctcagtcattgactcttcaatgtaatgatcagagtttaaaaccattttctaataataaattaaatcttcagttgaacaaattattttgtgaatctgtttcactcaatggattgtaaagaaggctcctaaatttgagttgtttgctaatcatttcatttgcatcattagggtatccttaaactgattttctattacaattggaagtggagaatatgtgcatctacactaaaaaaatgtttaagatatcaaaaacctctcctcgtgcttcaaaatgacaggaatcctgtgcattatactaagaattacatgccataagatgacttcagaaatcctacttcagaagtgtaataaatggatggggaaatcgtttgatggggaaaagtctcttgtaagtaaaagtagtcaaattcaaaaaaaaaaaa

SEQ ID NO: 52610 - DNA, 456 bp, Homo sapiens
aacttttccctattctctttattgtcatagcgttgttaatatcttaagatttggaggtaaacggaaatggagaatcagcaactatacttcaaccttattgtaaacagacaaaacactaacaataaaaagttttgaagttaaaaggacgtaagttccaccttctatcctttgtagagatataaaaacaaaacaaaacaaactctgactagacaggctacccgctacacactcaaatcgacctccgcgacccgagggggaagcgcaactggttatggcaacccccctgccaccccggcccataacgcttcaccacgttctgtgccacggccggaagtgacgcataacctgcgacgccagtgcctgccgcccacggccgcaggagtcgggcttcggtcgcaccagagacagcggactttcctccgatggttgcagcagagggatcatgacggggaaaaa

SEQ ID NO: 52611 - DNA, 889 bp, Homo sapiens
tacaaagaaaatccagactcttagcagactgtgatcatttttcctttcccctaatagatatgagagaaaattactgcttgattttactgtgagaatttggatcccagaccctactgtcctcattaggaatcagaaatcagagaatcagaaatcagaatgaaatatcaaaatgatgccctaatggctattgcaaaaggaatatgtgggtagttggagagtggaatacgtgactctgtttttggagcagtattcacattttttatttcgaggtgtaaaatatacgtggccaacattgttactttcatccacagatggaatagctgggaagtataaaaacctgtacatgacctttagtgaagattatttgtcatcaaattacccatatccaagtttccatgggcctggaatttcctttccacttgatagaagtatatattaggaagtccagttaataatatttttatttaaaaaaaaaaaaaaggaaaaaagaatcagcagagtcaagttgtcttagtcttaaggctttctggatttcttccttggaggaggtcaggatcttcccaaggcctgggtcctcgaatattcttccagtcatcaaacttggagtctttgattttctcatattccgactctaaagatattttattctctttcagttttttttcaagctcaggatccattttactcttcacagcatcatatcggatttgagaaaactcacgaagaccaaaagaacctccaacaatcagcaacaacatggggactccatagccgagagtcttgttcttgcgaaaagcacgcatcaccgcgggtgcaaacatgagtgaactcttccatcggctcagaactccaagcgggcctagcgcagactcccaaatctcagcagctc

SEQ ID NO: 52612 - DNA, 264 bp, Homo sapiens
aaacaacaacaacaacaaaacccaaaggaaccctttgcagaagattcccttgtaaatggccctgtggcatgcccagtatctgcaatgttctagaatagaagttggcaaacctctctgtttgccaagcctgcagagttgaacatgtccataaatgtatacaatctgaccctgttttttggccctgtttctggacactgtagctgaccaagaaaaaatttaattgatcgcaacatttaaatttttttgttgtaaaaaaaaaaaaaa

SEQ ID NO: 52613 - DNA, 370 bp, Homo sapiens
attttaagttgtgattagggaatggggatgtttttaagctgaattgtcttgctgcggaactttcctttttttaataagaccatattatgactctgaatgctcaagggtaagtctaaggcctcattgctgttaccaggagatttttctagttacagtaataaagatgttaattcacatgcatgcagacaactgaaactcaagtggagaatttgtttgtgaacaagtcatactacttctgttatttgcatgaatggaatctgcaatatctttttccatgggagaccctaaaagaaaaccctggatcagaatgatctgcagtttcagataataaaggcttttaagagacatttttagaattaaaaatatgcta

SEQ ID NO: 52614 - DNA, 792 bp, Homo sapiens
cagggtttcagggcaaggctatgataataattattattttttaaaatgttaacggcatttcaatactaatgttccttcctccaattaatgaataatcagtattatcagttctactctttaattactggaaggaaagtaagtcccaagtttgtctgagtcaactttatatattccctagatattatacaaatcaagctagctgcttgctctgtcataaaattatagtaactattaactaaaatgactgataattagacactttattatcacagcccatgaaggaattcaacctgtctgaagtcacattttacattttgaggaagggtacaggtaagggaaaagggcgggggagaaggattaatcttgtcagaaaactaaggtcagtagaataaaatacaagaaattaagttgacaaaatgaaacataatgagaaaaatttttttggacaaaaacaattcaaaatcagacttggctaataataccagtctgacagattctgagaactaaggagagccaattgatgttattttgcccagagctaaatatacttttcttaaaagtatgacagtatctggttcctctgaccagccattataataatctttgcaatacactgaacatacacatggaatacagaagtctctatttaaggtcaccagttaactaacttaataggcaataacgctagctaacagtaagacataaaggcaaatgtttggaggccagatcaaaatcacttgcctagtcttctgacaagataaagcagcgcagatagttcttttccattggaag

SEQ ID NO: 52615 - DNA, 3832 bp, Homo sapiens
gaattcgggtggagtcctgaaggagggcctgatgtcttcatcattctcaaattcttgtaagctctgcgtcgggtgaaaccagacaaagccgcgagcccagggatgggagcacgcgggggacggcctgccggcggggacgacagcattgcgcctgggtgcagcagtgtgcgtctcggggaagggaagatattttaaggcgtgtctgagcagacggggaggcttttccaaacccaggcagcttcgtggcgtgtgcggtttcgacccggtcacacaaagcttcagcatgtcatgtgaggacggtcgggccctggaaggaacgctctcggaattggccgcggaaaccgatctgcccgttgtgtttgtgaaacagagaaagataggcggccatggtccaaccttgaaggcttatcaggagggcagacttcaaaagctactaaaaatgaacggccctgaagatcttcccaagtcctatgactatgaccttatcatcattggaggtggctcaggaggtctggcagctgctaaggaggcagcccaatatggcaagaaggtgatggtcctggactttgtcactcccacccctcttggaactagatggggtcttggaggaacatgtgtgaatgtgggttgcatacctaaaaaactgatgcatcaagcagctttgttaggacaagccctgcaagactctcgaaattatggatggaaagtcgaggagacagttaagcatgattgggacagaatgatagaagctgtacagaatcacattggctctttgaattggggctaccgagtagctctgcgggagaaaaaagtcgtctatgagaatgcttatgggcaatttattggtcctcacaggattaaggcaacaaataataaaggcaaagaaaaaatttattcagcagagagatttctcattgccactggtgaaagaccacgttacttgggcatccctggtgacaaagaatactgcatcagcagtgatgatcttttctccttgccttactgcccgggtaagaccctggttgttggagcatcctatgtcgctttggagtgcgctggatttcttgctggtattggtttagacgtcactgttatggttaggtccattcttcttagaggatttgaccaggacatggccaacaaaattggtgaacacatggaagaacatggcatcaagtttataagacagttcgtaccaattaaagttgaacaaattgaagcagggacaccaggccgactcagagtagtagctcagtccaccaatagtgaggaaatcattgaaggagaatataatacggtgatgctggcaataggaagagatgcttgcacaagaaaaattggcttagaaaccgtaggggtgaagataaatgaaaagactggaaaaatacctgtcacagatgaagaacagaccaatgtgccttacatctatgccattggcgatatattggaggataaggtggagctcaccccagttgcaatccaggcaggaagattgctggctcagaggctctatgcaggttccactgtcaagtgtgactatgaaaatgttccaaccactgtatttactcctttggaatatggtgcttgtggcctttctgaggagaaagctgtggagaagtttggggaagaaaatattgaggtttaccatagttacttttggccattggaatggacgattccgtcaagagataacaacaaatgttatgcaaaaataatctgtaatactaaagacaatgaacgtgttgtgggctttcacgtactgggtccaaatgctggagaagttacacaaggctttgcagctgcgctcaaatgtggactgaccaaaaagcagctggacagcacaattggaatccaccctgtctgtgcagaggtattcacaacattgtctgtgaccaagcgctctggggcaagcatcctccaggctggctgctgaggttaagccccagtgtggatgctgttgccaagactgcaaaccactggctcgtttccgtgcccaaatccaaggcgaagttttctagagggttcttgggctcttggcacctgcgtgtcctgtgcttaccaccgcccaaggcccccttggatctcttggataggagttggtgaatagaaggcaggcagcatcacactggggtcactgacagacttgaagctgacatttggcagggcatcgaagggatgcatccatgaagtcaccagtctcaagcccatgtggtaggcggtgatggaacaactgtcaaatcagttttagcatgacctttccttgtggattttcttattctcgttgtcaagttttctagggttgaatttttttcttttttctccatggtgttaatgatattagagatgaaaaacgttagcagttggatttttgtccaaaagcaagtcatggctagagtatccatgcaaggtgtcttgttgcatggaagggatagtttgggctcccttggaggctatgtaggcttgtcccgggaaagagaactgtcctgcagctgaaatggactgttctttactgacctgctcagcagtttcttctctcatatattcccaaaacaagtacatctgcgatcaactctagccaaatttgcccctgtgtgctacatgatggatgattattattttaaggtctgtttaggaagggaaatggctacttggccagccattgcctggcatttggtagtatagtatgattctcaccattatttgtcatggaggcagacatacaccagaaatgggggagaaacagtacatatctttctgtctttagtttattgtgtgctggtctaagcaagctgagatcatttgcaatggaaaacaccgtaacttgtttaaaagtttttctggtagctttagctttatgctaaaaaaaaataatgacattggggtatctatttctttctaagactacattagtaggaaaataagtcttttcatgcttatgatttagctgttttgtggtaattgctttttaaaggaagttattaatatcataagttattattaatattttgaacacaggtggatgtgaaggattttcatttaaaaaccaagtggttttgactttttctgttgaatgaacaactgtgccttgtggaatttttgcagaagtgtttatgctttgttagcatttcaacttgcattattataaagaggtattaatgcctcagttatgtgtttgtcaatgtactggctgaggattctatctcagctgtcttttctaactgtgtaggttgagttttgaacacgtgcttgtggacatcaggcctcctgccagcagttcttgaagcttctttttcattcctgctactctacctgtatttctcagttgcagcactgagtggtcaaaatacatttctgggccacctcagggaacccatgcatctgcctggcatttaggcagcagagcccctgaccgtcccccacagggctctgcctcacgtcctcatctcatttggctgtgtaaagaaatgggaaaagggaaaaggagagagcaattgaggcagttgaccatattcagttttatttatttatttttaatttgtttttttctccaagtccaccagtctctgaaattagaacagtaggcggtatgagataatcaggcctaatcatgttgtgattctcttttcttagtggagtggaatgttctatccccacaagaaggattatatcttatagacttgtcttgttcagattctgtatttacccattttattgaaacatatactaagttccatgtatttttgttacaaatcttctgaaaaaaaacaaaacaatgtgaaacattaaaattaaaaggcattaataataaaaaaaaaaaaaaaaacccgaattc

SEQ ID NO: 52616 - DNA, 1861 bp, Homo sapiens
ttttttttttttttttttgattgtataaataatttatttctgttcacagcatcatatatgcattataaaaggctatggaaacaaaagagaaggatgatgagacagagaattacagcagtagaaaggaaaacagaaaccagggcacacagttccaacaccagaacagagaatttgggaagataattgctctgaaacagaactggcctccctgtgtctattagaaaacatttccaaagctcacggagggaggccaacttcccctatgggaaacccattcactcgccaaagggcagaaggcatcataaatcaccccattgatacattggtggggggctccctgtccccctggtgaccactccaaggtgatttgatctgtgcttcctctgttgggtcagagacgaaacgggctattattaggtcaaacattacagaaatcaactgagactcttaactagtagttgatacaccacagggctttactttactgcacaattactaacagttgattgcacccttaagtattgattatgcaaaaaacaaaatcatctcgcatcagttttaaagcatgacagggtttgaacagtgatcttgaacctaagtattgttatcatgagaaggttacagtatttggcatttgccaatgtcacaaaataaatatattattctctcaatagtgtggaactaccaaaatgtcaaagtgcttaagaaattgtcgcatgtgaagaaaataaagaaagatggattttttttttaataattctatacagaatcttcagatgatgggaccagcccatttagaaatcagtggatatgctgtcgatatgtaaactgaaatcttgcaggcttttcaacactgcttagctagactttctctactgagtttctacaaaaagaccagcattggaggggtaccaaatacaccgacaaaagagaaaaagcagatgggctgctaggtttctgcttttaaaaaatttcatataagaattgggtttcaagcaggaagccagaacttctgcctctggttcttaaattaacattcggtgtgtaatggacaataggcagggactcataatttgactaactcacatgctcaagcatgatcgtgtccaatttctacaggcctcctttgtaaagaaatgtgtaacaatggggggaaagtcataattctacctgaaaacatggattgtaagaggaaataaaaaaatcaaacagtatgttttaagtttcccttttgatactgtgtttcagggtaagtgacagcttctgcaaaccaagactcagtcctgattataaaggatttttaaaattacattattaaaaatatgtatttattcttctttcactttatctattttccaaagcctctttcaagtaaactgtgaagtgcctgagtaccagtgaccatgacgtcacactttcttttatctcaagcactcattgttgtttgcatttgcccaaagtgctggctggctccgaaggccagttcccacaagaatgaattcggaaagacttcatccttgtgtttttccttctcttttaattccatgcaacgaggtcagcttttgcaacaaggtggggttttatttttttggtgcatgacatcaaatactctaacgagacatttttaatgaaagacttaaaccagataggccacaatgaaccaaattagaaatctgaacatgtcaccacttgcagcataaaggaatataaaagggcagagcaaagtcttttttcctaaggtgaatatttctaaggtaagtattcatttgtaaaagttttttttttttttcatcatgtctgaaaacccattatcacgcggttagtattacaagagacatcccttggttaaaaaaaaaaatac

SEQ ID NO: 52617 - DNA, 1181 bp, Homo sapiens
gtcggctccgggccgcagagcctgggcgagccaggccagggcaccggcaggcaggcagctgcgcgcggctggagtcatgctatactgaaaagacacttcatcaagataactctgggagaagcagaaaaccctgtgccagggacaggaaagataggagaaagaaagtttatcagaattttttaaacctgtctcagaaataacaacatattttaatcagagatttatgttgctatgaggacagattcatcaaaaatgactgacgtggagtctggggtcgccaattttggcatcttcagcaagggcaggccgccggaatgccttaccagacatccagagttcagctgccacagacgggaacctcagatttgcccctcaaactggaggctctctccgtgaaggaagatgcaaaagagaaagatgaaaaaacaacacaagaccaattggaaaagcctcaaaatgaagaaaaatgaaggctcataatctatcaagagtgctgaatttctgcatgttgaaagacttagtggttctgttttcttgagacatttaatctggtggtaactgtggtaacattgcagccctaagcagcatgtgtatattagataattgtgttgtgatgctactcactttgattgcaatgatgatgtccaaggtaagctattaaaaggcaggttacttccaaatcgcactgaaggaaaaggttaagaataatacatgatcacagaaatgcataccactgtctgtaaacccaacaaaattcactgttctcttttggatttatttagcctgatgtatttttaattcaatttttatggtgatgggcaaatcattcttggtaaatgtaaatcaaacatgattgatttaaaacttcatggaatttgtagaaaattatggacatttttgggtgagaaagaacaatagtcaaaactcacatggatagagtgtgtttgttttttgcccaaaaatgccccagactttttcccaaacctcaaaaacgtcttggaaaaattgtaaaagtttgataacagaaacatctttaggatatttttgtctgacgtattttgcttctagtatgtgcctactgtgatttttttcatgtgggaaaatgcaaaatttgtaacaaaatgggttatatggaacatgcctattaaatgaattttactatcttccctaaaaaaaaaaaa

SEQ ID NO: 52618 - DNA, 431 bp, Homo sapiens
  misc_feature (1)...(431): n = a,t,c or g
aaaatgaagcagtagaaacaaaacctttattagtatggtattccagcagcacctttaaagcaatctgtaccttacttttttgagggngttttacctttcatcccaatctagaanagntttaataaatgctgagcgccttgttatntgcttgnctgnggcttgnttntaaggtgantnatntggccttatncagannngnctttttntgccaaccntgtcnaccatanngagntatgtnntacgnatnantataactntcgccgggcatggtaccnngnngnaactacagggcntcttttatgcctcgacntttnntccgttcctttttccntgcctgncttttagatccanctccntggnttncccaagtatttttntaagtgcgaaaggcttggaaagnancttgtctcttttancttnnnaatgnctcg

SEQ ID NO: 52619 - DNA, 2426 bp, Homo sapiens
tttttttttttttttttttaccttgtaaaaaactggctttatttgtcacttattcaccttatctcagttatgccattttggcgtccacagtgacagtcccctggaagctggggtcagcccccacccacccaccgtgaccatcacccacagggcgtgagtgtcgggccttgcagggcccagccgatggttacaggctgcaggcgggactatggggctcctcctgaggcctggtgccttccagccccctgcccaccagcttgggtacagctgcctgcctgccagaggccaagcattcctaagcgtgggctgggggaggccctgcccctctgtagcagcagagcagacagggcagtgggagaaccatgtgggtaggagggcatcaggtctcaagagcctctcccctgctcaggactgggtctagacaaggccacgtgtgatagggtggtaagccctgggccatatggaggagcctggggcccatcttggttctgctgctgagttgctgggtggctttaggcaagtcccttcttgtcccttggtcactctgtttcctggctagcactgccagcaaggtctccagagtgtgcccctctgccgggctgtggcggtggccctgtgctttgcaggctgccgtgtgcccactgtcagagtggggtctccccgacaggctgcacgcacccccaggcccccttcttaggatcagggcatcctgcaaaacatccttggtcccaccaatgtctaaagccagctcgaaacctcgagctcctcaggatcttagcacccaactctgctgcccttgctgctgggcagtgcctgtcctaagaggggactccctaaaggccagagagagggtgctcatctccaggacctaggccacctgtcagcacaaacagaacttattccagacataaacatgagtcttcttatttcaaacactggagcaactgatcaacaccaccacagcccatgcaccccgaacctgacttcactaccaaccttgagcctgtgctgtcctctctctgctgacgacactggtgacgcagaaaggaagtcggtggtgtctgctcacttgcgtgcagtcctaagcacagtaagaaaattctgaacacagctgggtgatcttcagcccagaaggtgtaggggcttgtgagcactaagtcagtttctgtccatgtctgatagctaccacaatgtctccccttgctagggcagctgcgaggagacgtgtccagtgatgactggcagaatctggacaaacggacatcactgcaagggtctgtccacctagcttggccaggctcagcttggcagagctgatgacccaagtggactaaacacggagctagcagaaacaggcagactctaagcccaaccagaagagtcagctagaagagccaataggtgcacagacaaatccacagatggccaggagtgtcttctgggaaagccatccctctcttttggaagaagttctgtccttaaaaaaatcacttttaaaataagggaaaacaatggtgtcttagagagaaacagtcctaagccagatattcccacggcctgattgtgaaggagacatgccaggcaaggtccccacgtctccgggaaatacatgatctgctcccagcttcacaccttactgccaaaatgaaacgtagacatttcagtgtttgtgcttccaaccagagtgagaaattccctttgtggggaaacaggtgagacggctgcagccgcatacagcactgagaaggtgcaaaggttaaaacaaaagttacatggacacttggggacaatcctataccattcccacttctctggcagtcggctgaataaaatttcactttcacagttctttttgccagtgccaggataaaaagcaaaattttaaattggaaaatgtctagcactttacacagtggaatgaaagaatacgaaattcaaaaacattattaaaagtccatatgccgcagcagcacgcgccatgatgagagctccccttccgaggcgcttctggagcagcttcctcaacctgtccgggagacgggctcagaagagcagggcccccatgctgccaacctcgctttgctccttaacgaagatctcaaagtactggtagatgattgtgactgcgagcaggatcccggttccagacccaatggcgcctaggaagtcagccaggaccgagagggccccgatgcacagcccaccaaaggccgcggctgtggggatgtaccggttgagttcatggaccatggaggtctctcggtggcctctcatcaccatctgctgctccttcagctgctttgcaacatctttggcagaggaacctgagacctcaatccacgttttggagaagaatgcacaggagcccagcatgaacactatgtatacaactgcatggaccgggtcttctaaccggccgcgtcgac

SEQ ID NO: 52620 - DNA, 895 bp, Homo sapiens
cggacgcgtgggcggacgcgtgggcggacgcgtgggctttaggggcgggtaggggaagagggtggctggacttaaggtaggagccgaaagtgggcatgggagcccatccccgtgggtgtgaggccggggtaggaccaggcttcccggctaggcacgcctggctggctgcctctgcctctactaacttcctttgtctctttatcctcctgcttaggccgtgtcttcctctctctctgccattttctctatcagaaaacattaaagctgagtagaaacttcaagatgatcattctggcccagcccttttatctctttatctccaatggtgtgcgttttaagtttctctgacttggtttttctgtccctgtctcccacagttgttcccgctctgcacctgtgtttcagttactctctctctctgcttagatctttttgtttctgcctagtctctgtgccctgtctttgtgtgtttctttctctgcctgaaaccctccctcttttcccttcaggcatatgtctctaaaccaatgttatgtatcaaagactgttgaaagagacagggctactctaggaatggatgggtggggatattttccccatggatcaagatccagtttagggttgggaaataaaggatagggataaaagaggcaccccattcagtcagcagatacttattcagcacctactatgtgtttgatactgtatacaaaagacatgaatgggctgggtcctgaacagagaataaagggtttgactccattctggaaattcttttgtttgcaaacaggtgttgttaatttgttcaaaggcaggcaaacaatctctctggcaacacaattttcttctgtatttaattaaaaaatattaaagctttttttctatgatgaatgat

SEQ ID NO: 52621 - DNA, 1111 bp, Homo sapiens
tttttttttttttttgtgatcaaagatgtttatttaaatgcagattttacaacctcaacttgtccctttacaacaggtcttcccagagcttttaatgtgcagacaggcatgtgaacctctgataaagagagggaaaatggagaggcatcttcctctgacttaatacaaccctttttacttttggtagaaaatcataaggcatgagtgtttaaggagcacactttgggaaatgtggttctactagccttactaggcaaatatgcttctaatatgtataactaacacatgtaaagcactaattatattaataatgccatgagtccttttttctttttctgtctacttctatgatagtttaataccatgctttcttttattatcactaaaaagatggacatgttgaattattttataattttcttttacagttctgtgagttaagctgtatatagcatatgggtgtatcattctttagtaaattacatctacttgtgaactaaacattgatttcattttgactttgtgccattgtctaactttgcaaaaaatcaaaatcaaggaatcaaggtgcttcacaaaaggaacatctatttttttaaaaaaatccattctggtcttggtgttcagtgaactttttttcaccaagctaaagcaaaaacaaacaaaacccccaaataccagacatagaaatggagacctcccttcttcctcaggctagattcctgttagattccaaagaaaattgtgctggaactcagaattttcctggcggctctgcatctccttgcctatgccatagtatttctcatatgatttgaagaaagcactgtggttgtacgtttcttgagtgccttatcagaattatccttccaaaaagctcaagaaagacaagcagaaaatcccccagagaatgtctaagtgacagtgctccatctgaatatccttacaaattgctacaatgcaggtttacctggggtgcaagcacagcaaacacgtgcttgtagtccatttgattttttctccgatacatttagaaagaagtgcttaggccgagagccataaaataaaaacatacaataagtccaagtcttttctgtatatgctgtgattt

SEQ ID NO: 52622 - DNA, 1536 bp, Homo sapiens
  misc_feature (1)...(1536): n = a,t,c or g
ttttttttttttttttgatttaattcattcattttttattctttttttggcaaacatcacataatataagcaaaactatgcgttcactatagttacacacattcttttttgctttatacaagttgtaaacaaatttaagtgaataaaattcttggctaaagacatattccagaactctgacatatacttttcagagttaggacaaaagaaagcatatgtaacttccattagaccatcatcatatgaaaaagtaaattaggcatatgctgcttttaaattaacatctgtcattttatttaaacacttttttaggttatagctaaaatgatatttatctgaagttttaggaaagaacagaagctgaccatacaaatcttgttcataaccacattggccacttaaattaaaaatataacaaaattgaaaaatagacatataaccaaaaagattctaaatcttgtaaggaaaaaaagaataaagctgccaataagttattttaaaatactttagatgtagataacatttataatactgggtttcataatatcttgttttatggcttcctaatgttgacattttaaagtaacagattacttcaaaataaacccaaagcatttagtgttttacaatttcaatttcattcttttgtaaatttcagacaccaaaaaattcacatcaagggttacaaaacaggcatcttcagaatataatttgtttggcaggcagaatggcttgtaatcttttgaactggaaagccttcaggaagtacttacttgctatcaatgaccctgccagcttcccacattgttacctgctgggcgtgtgaaaagactgacaccccatttttcatataaacccaatatttacttataaaaattagttgtactcatggagcaaaaattcaaatgttataaacgatactaaatcttactagttttatctctagtttgggaaacacacatcaaactaaaaaagtctcattttcataatattcccttacataaattatgagagacatttgtatatancctcttagaaagaatactgttgtgagtaacctgaaatctgagctagaacaaccattcatatacaaaactactctatacaagtcttagcttccaaacagtagctttcaacttcattcatatatgtaacataaaatttctcaaatatttgagttgaaggaaaggtgacattaataaggctaataaaataagtggcaaaggttttattcaaatcctagagaatgaggcaagaagggaaatatctggtaagacaaatcagaaaagaggaagaatttcaagtaaatgtggtcttggaccttttacactgctactccctaaaattgcacaaggtaaaggccacaaaatgcttgttccttcaaggaaagcaaagtagaaaacacaaaaggaaatataaaaatgtgtagttatgaaagactcaacagatgatggtactaactccagtccgatgcttaaaaaatacgaaagaataacaaatgcattaaaaagacagtaacctattaggtctttttta

SEQ ID NO: 52623 - DNA, 717 bp, Homo sapiens
gttaggaggcgtcctgtctgtaaaggaaattcatctcttgtgacagcctggggctacctagctcccaaacccagaagttggagacatcaggctgtttaaatgatcatagcctagcaggattggattaaaaccacaggcttttgcagctggaatggggttcagtgaacatctcccccattcctctcttgctacaaataaggaaacaggcccaggagattaagtgacttggctaaagtcacatagcaaattagtagcagagccgggactatcccttatccctgtgggtttgggcaacactatttagtcctgaaaccgaatgggcagataaaccccatgagggttcaggctgatgtgccctccagcagtatctgagaagctgctaccttcaggggtgtgtcagggatgaggacgggtgcctgagcttaggttgtgggagtggctgagagggcccagggaggcttcggggacagctgtgtgctgcatggggttgggtgtctgcctggctcgcacttggtacccatgggccacctccccattttctgtgccttatctcactgtttcagctgagtccaagttgtttactctgttcctctccagaggggctctctgtcccagttgggcagctcacctttgggacataagcctttgccccacaagctgtggagagggccaaaaccaagctgcttgagcccactctcttgctgagagtccaggcct

SEQ ID NO: 52624 - DNA, 713 bp, Homo sapiens
ttttttttttttgctcatggatgtgtattttaataaaaataattctgtcaaaatacaacagagttttttttttgtctctcaagtacaattttaataagatgttttgtgttagagttctctctccatcctcccacacccacaagtttcatgctaatgccaagtatcaactcttgaggacaaaggcaaaaccagtgtgcacaatgtggaggatgtctgttgcagctgtagttactaatgcaggaaaacccaatgcaaagaggaaaatgcctgaggcagccagaggccacaatctggccacaggtctgggtgcatgagactggcagtctagtagggctccgctgcctggctgccacatgggtgcatacctgagttgtgagcaaccaaaggaactttcagctctgacaattctctgcctcatcttctttgtgcttgcttaaggagtgggaaggcgctaggtggccaggcagtccccacttctgtctcgtggtgtccattttgatggcctgcacccagccacagacccatgaggatgggaatgggggttctggcttgctatgagtgccagtttttgctctggaaggagtgaccatttggtgccgcaaggggaaagtgagtagggaaggctgctccccagggccggacaaaccaagaaagccaggtcttcctcctgcctccatgggtcaggtccagcccttcaccagggctcccccagg

SEQ ID NO: 52625 - DNA, 591 bp, Homo sapiens
gcgggccagtctcaacccgcgcgccgaacatctggaatcgcctcagctggggggcaaagtgagtttccctgagacccccaagtccgacagccagacccccagccccaatgaaatcaagacggagcagagcctggcgggccctaaagggagcccctcggagagcgaaaaggagagggccaaagctgccgactccagcccagacacctcggataacgaagcgaaagaggagataaaggcagaaaacaccacaggaaattggctgacagcaaagagcggaaggaagaagaggtgcccctatactaaacaccagacgctggaattggagaaagaatttctgttcaatatgtatttgacgcgagagcctgccgtggagattagcaagaccattaaccttacagacagacaagtcaaaatctggtttcaaaatcgcagaatgaaactcaagaaaatgaaccgagagaatcggatccgggaactgacctccaattttaatttcacctgagagcgcggcctctcctcctcccttccccgctccttcctctccccgcccctcctccctttggtgcctggtgatatatttttttttcctcc

SEQ ID NO: 52626 - DNA, 501 bp, Homo sapiens
tggcacgaggctgatgtactacagaagagagcgccggttcttgccctgagtctgcttctggcagttgggtccctcatcgggtatagtcgttctccaaatgataagtccatcaatgcccttctgatgactgttacaggattttttattggtggaccttctaatatgattagttctgctatttctgcggacttgggtcgccaggagctcatccaaaggagcagtgaagctttggccactgtcacaggaattgtggatggttcggggagcattggagctgcagtgggccagtatttagtgtctctgatccgggacaagctaggatggatgtgggttttctactttttcattctcatgacaggctcacatattgagggagtgaccggtgcccgcgagacagaaagaacaatgtcagccacatcaggaccgctggggcttcgagtctgccctaatttgggtttgtctaggagctccagcctgatcttggattgtcaggcgtctctc

SEQ ID NO: 52627 - DNA, 1856 bp, Homo sapiens
tgcattgcaccaggatgtctgtgaaatggacttcagtaattttgctaatacaactgagcttttgctttagctctgggaattgtggaaaggtgctggtgtgggcagcagaatacagccattggatgaatataaagacaatcctggatgagcttattcagagaggtcatgaggtgactgtactggcatcttcagcttccattctttttgatcccaacaactcatccgctcttaaaattgaaatttatcccacatctttaactaaaactgagttggagaatttcatcatgcaacagattaagagatggtcagaccttccaaaagatacattttggttatatttttcacaagtacaggaaatcatgtcaatatttggtgacataactagaaagttctgtaaagatgtagtttcaaataagaaatttatgaaaaaagtacaagagtcaagatttgacgtcatttttgcagatgctatttttccctgtagtgagctgctggctgagctatttaacataccctttgtgtacagtctcagcttctctcctggctacacttttgaaaagcatagtggaggatttattttccctccttcctacgtacctgttgttatgtcagaattaactgatcaaatgactttcatggagagggtaaaaaatatgatctatgtgctttactttgacttttggttcgaaatatttgacatgaagaagtgggatcagttttatagtgaagttctaggaagacccactacgttatctgagacaatggggaaagctgacgtatggcttattcgaaactcctggaattttcagtttcctcatccactcttaccaaatgttgattttgttggaggactccactgcaaacctgccaaacccctgcctaaggaaatggaagactttgtacagagctctggagaaaatggtgttgtggtgttttctctggggtcaatggtcagtaacatgacagaagaaagggccaacgtaattgcatcagccctggcccagatcccacaaaaggttctgtggagatttgatgggaataaaccagataccttaggtctcaatactcggctgtataagtggataccccagaatgaccttctaggtcatccaaagaccagagcttttataactcatggtggagccaatggcatctacgaggcaatctaccatgggatccctatggtggggattccattgtttgccgatcaacctgataacattgctcacatgaaggccaggggagcagctgttagagtggacttcaacacaatgtcgagtacagacttgctgaatgcattgaagagagtaattaatgatccttcatataaagagaatgttatgaaattatcaagaattcaacatgatcaaccagtgaagcccctggatcgagcagtcttctggattgaatttgtcatgcgccacaaaggagctaaacacccttcgggttgcagcccacgacctcacctggttccagtaccactctttggatgtgattgggttcctgctggtctgtgtggcaactgtgatatttatcgtcacaaaatgttgtctgttttgtttctggaagtttgctagaaaagcaaagaagggaaaaaatgattagttatatctgagatttgaagctggaaaacctgataggtgagactacttcagtttattccagcaagaaagattgtgatgcaagatttctttcttcctgagacaaaaaaaaaaaaaagaaaaaaaaatcttttcaaaatttactttgtcaaataaaaatttgtttttcagagatttaccacccagttcatggttagaaatattttgtggcaatgaagaaaacactacggaaaataaaaaataagataaagcctt

SEQ ID NO: 52628 - DNA, 370 bp, Homo sapiens
accaccctggaaaatggtaatacagagcagatcaacttttcttcaaagtaggtctgaaagatcaagaaaaagttttataagtaactgaaaaatgaaatgatttttaaggattttaaaatcagttataatgggctatcagtaattattttaaggattttaaaattggttataatgggctatcagtaattattttaaggattttaaaattggttataatgggctatcagtaattatgttgtgaaacagactacatttgtaggtaggttccttattaatacttctttaaccaaaaaagatcaaagtgtagataatacagattaaagataaatatgtaaattatacatattgcccaattgctcggacgcgtggg

SEQ ID NO: 52629 - DNA, 2791 bp, Homo sapiens
tacttgttggctcttcatgttagctctgctaggcagatgtcatttcagagaagaggaagcaagttcagaacggcttggaatcttgctcaggaaatcgggctggttaatgaataacaagagatccagtttcacaaacccaaggcattttgcccccagaatctgggcttcttcacccatttaggctgtcactactttttttcacttttttatccctgtttaagtcagtctgacccacagttgtcctctgctgacttcagaaataataatctggccagtagacatttggtttcggtcctttaggcccttcgccccaggcatcgttctctatggtggacaaagttcagaatggaagatgggagaaaggtgattctgattctagaagcacccatccctcctaccccattccccacccgcattacctgccatcctgtcagcacagtcttctctgaagtgctccaagttttctctaagggcccatttggactcccactctcaagactcctcacttgcccagaaagctccttgctgaccttctctgtgtcttcctctcacccattcccttaggcctccctaatatcccctcccagggtctccctatcttgatcccagaatcttccttctacaggtctgctacaatgctgctgctgcacagagctgtggtcctcaggctccaacaggcctgcagactcaagtcaatcccctcaaggatctgcattcaggcctgctccacaaatgattcatttcagccccagcgccccagcctcaccttctctggtgataactccagcacccagggatggagagtcatggggaccctattaggtctcggtgcagtgttggcctatcaggaccatcggtgtagggctgctcaggagtcaacacacatatacactaaggaggaagtgagttcccacaccagccctgagactgggatctgggtgactctgggctctgaggtctttgatgtcacagaatttgtggacctacatccaggggggccttcaaagctgatgctagcagctgggggtcccctagagcccttctgggccctctatgctgttcacaaccagtcccatgtgcgtgagttactggctcagtacaagattggggagctgaatcctgaagacaaggtagcccccaccgtgggagacctctgacccttatgctgatgatcctgtacgtcacccagccctgaaggtcaacagccagcggccctttaatggcagagcctccccctgagctgctgacagaaaactacatcacacccaaccctatcttcttcacccggaaccatctgcctgtacctaacctgggatccagacacctattcgctttacacgtagtagggagcacctgggggtcagtcactgtctctttccctggatgacttgcacaactttcccaggtacgagatcacagtcactctgcagtgtgccggcaaccgacgctctgagatgactcaggtcaaagaagtaaaaggtctggagtggagaacaggagccatcagcactgcacgctgggctggggcacggctctgtgatgtgttagcccaggctggccaccaactctgtgaaactgaggcccacgtctgctttgagggactggactcagaccctactgggactgcctatggagcatccatccctctggctcgggccatggaccctgaagctgaggtcctgctgggcatatgagatgaatgggcagcctctgccaccgtgaccacggcttccctgtgcgtgtggtggttcctggagtggtgggtgcccgccatgtcaaatggctgggcagagtgagtgtgcagccagaggaaagttacagccactggcaacggcgggattacaaaggcttctctccatctgtggactgggagactgtagattttgactctgctccatccattcaggaacttcctgtccagtccgccatcacagagccccgggatggagagactgtagaatcaggggaggtgaccatcaagggctatgcatggagtggtggtggcagggctgtgatccgggtggatgtgtctctggatgggggcctaacctggcaggtggcctaagctggatggagaggaacagcgccccaggaaggcctgggcatggccgtctgtggcagttgaaagcccctgtgccagctggacaaaaggaactgaacattgtttgtaaggctgtggatgatggttacaatgtgcagccagacaccgtggccccaatctggaacctgcgaggtgttctcagcaatgcctggcatcgtgtccatgtctatgtctccccatgagcatggaaaggagccacctccacccctttccccacccattagcctcactgcttcagaaaaatctttcccacctttcaacttcttggatcacaactctggccttcctaagccatacccaagtacacatatagcacatttcacccaaggaccttccctctttggacactatgttacatacccctcttggcctttgaacctgtgccaggaagtgtgagctgttacagcaaggggctagaagtgaaaaaagtaattctggagacaagcactattttctcttcctaccccacctccatttctaatgcctactgccatcaaggccttgttttgcttttctttttggattgttcagagaaatgtgtgtggcatgtgtaagaaaagtgtatatactatcttatactacctctccaggttgccagagagttgcgaggagagcaaggggcacaaccgtctccctttatagttctacttttctaataaatagtctgtttaagatcataaaaaaaaaaaa

SEQ ID NO: 52630 - DNA, 1990 bp, Homo sapiens
gttttgtgttgtgttttttcacggaagtagctagtttataaaaggtcagaagttgtgtcattgtagagaggttgatctcaaccaggttgtaacaaaatttccacagcttattccaaaagaaaattttaatacaagagatcttaaaaaattaaacacatttgtttaaaaatcctattatgtaaaccttaacataagagggtagttaagataatactacaggtttcagggcgtttccacagacttctagaccttatgtacacacagactatcagactctagatatgtggcctgcttacccttaagggggtgcactgggagccgatcatggggcgccccctagtggggttaccatcgctcctccattcaaaaaagactcgcttctctaagaagtcggtgtcaggtgagtaagcgttctacctgacggctaagccagggatgaagagaggccaacattcttcttaggatgagtcctggataataaaaattccaattagctctacccccatccccttcactccgggaaattaatggtctctggggtcactgagcgtttagtagctctgggtgcaaatgtacgatccaccattccgtgtgctactgtcctcagtcccaatttttgcaagggcatcctctgtcttacctacactgacagtgaatgagtggtggttccccttgccgttcatggagaccagcggcagagctgagaaaatttgaggggaagtgggggaagcctgggtgagtggttttccggttagcatgggaaaacacttatgcaccagtaagaactaaatccctgggtctcttaaaccaccagtgaatctagaatcttccgcccagcagcgctgctcccttaatgtcataggctcaactatcttattaaggaagccagatttctttttcacttctctatagaaactagctataaggaaggatacgcaacttggttgcctgggatttagaagtaactgtctactcccatgacataattccagagtacccaaatcgggccccataagatggcaatggctcatggccagagtgaggaataccagagatgactgatcgaggtacatttcaacaaccatgggatgaaccgcgggatccggtctgcctagagccgggagaccctggatggctacacccttacttctattgaccaaggagctgaagctttattttggaaacatgatcaagattgtgtattagaaaaacataaagatgaactttcttggcacagaaatgagataaaatatacagtgctacaactgcagaattagcacggacgccaatctaaaaacagcaaatatttaacagtagctttaatgaattaatgcacaatattttgaaaaatctttgaccttgctcataagcagatgcctgccttgaagaaacactccaagtctgccgtgattccgagcgaaatgccaaggcagagtcaagacaatcattacctttagggctgaaacctgggcatgaggctgccccttctgggatgcctcctaaccagtctgatgtactggggaaggaggagtgaggtggggtcttcctcgggtcccagaagctgaaaacccagcccttcctttgccatcagttctgtgccaaggctggaagatgctgctggagtgcagggcttcccccgtgtgggcgctgcagctcacacaggagcttggtggaggaatgaaggatggattctgggggtagctggagggcagggggctcactggggagcccagagaacatggctggacctccctgtaaggagccagatggtgtcgcagccccatgtgggggcttgagcacgtggagcaggaaggccgaggcctggaaccccaagaactggtcctcagggttggcaaaatgtaccatgcagaaccaagagaggcagccactgccggcctgggccacagagccctgcctcaggctgttgggatataagccgcctccagaagcagagcctgctgtccatcaaccaggcaggctggtgggcttc

SEQ ID NO: 52631 - DNA, 4479 bp, Homo sapiens
ctagggtgcgaagtaccacattactgtcatctccctgtaagagggattggcaccccggctgcagctccaggagcaagtactccaggaagcacagagctgtaccagtacacggcccacgttgccaggccccaggcatggaagagctgatatgggaacagtacactgtgaccctacaaaaggattccaaaagaggatttggaattgcagtgtccggagcagagacaacccccactttgaaaatggagaaacgtcaattgtcatttctgatgtgctcccgggtgggcctgctgatgggctgctccaagaaaatgacagagtggtcatggtcaatggcacccccatggaggatgtgcttcattcgtttgcagttcagcagctcagaaaaagtgggaaggtcgctgctattgtggtcaagaggccccggaaggtccaggtggccgcacttcaggccagccctcccctggatcaggatgaccgggcttttgaggtgatggacgagtttgatggcagaagtttccggagtggctacagcgagaggagccggctgaacagccatggggggcgcagccgcagctgggaggacagcccggaaagggggcgtccccatgagcgggcccggagccgggagcgggacctcagccgggaccggagccgtggccggagcctggagcggggcctggaccaagaccatgcgcgcacccgagaccgcagccgtggccggagcctggagcggggcctggaccacgactttgggccatcccgggaccgggaccgtgaccgcagccgcggccggagcattgaccaggactacgagcgagcctatcaccgggcctacgacccagactacgagcgggcctacagcccggagtacaggcgcggggcccgccacgatgcccgctctcggggaccccgaagccgcagccgcgagcacccgcactcacggagccccagccccgagcctagggggcggccggggcccatcggggtcctcctgatgaaaagcagagcgaacgaagagtatggtctccggcttgggagtcagatcttcgtaaaggaaatgacccgaacgggtctggcaactaaagatggcaaccttcacgaaggagacataattctcaagatcaatgggactgtaactgagaacatgtctttaacggatgctcgaaaattgatagaaaagtcaagaggaaaactacagctagtggtgttgagagacagccagcagaccctcatcaacatcccgtcattaaatgacagtgactcagaaatagaagatatttcagaaatagagtcaacccgatcattttctccagaggagagacgtcatcagtattctgattatgattatcattcctcaagtgagaagctgaaggaaaggccaagttccagagaggacacgccgagcagattgtccaggatgggtgcgacacccactccctttaagtccacaggggatattgcaggcacagttgtcccagagaccaacaaggaacccagataccaagaggaacccccagctcctcaaccaaaagcagccccgagaacttttcttcgtcctagtcctgaagatgaagcaatatatggccctaataccaaaatggtaaggttcaagaagggagacagcgtgggcctccggttggctggtggcaatgatgtcgggatatttgttgctggcattcaagaagggacctcggcggagcaggagggccttcaagaaggagaccagattctgaaggtgaacacacaggatttcagaggattagtgcgggaggatgccgttctctacctgttagaaatccctaaaggtgaaatggtgaccattttagctcagagccgagccgatgtgtatagagacatcctggcttgtggcagaggggattcgttttttataagaagccactttgaatgtgagaaggaaactccacagagcctggccttcaccagaggggaggtcttccgagtggtagacacactgtatgacggcaagctgggcaactggctggctgtgaggattgggaacgagttggagaaaggcttaatccccaacaagagcagagctgaacaaatggccagtgttcaaaatgcccagagagacaacgctggggaccgggcagatttctggagaatgcgtggccagaggtctggggtgaagaagaacctgaggaaaagtcgggaagacctcacagctgttgtgtctgtcagcaccaagttcccagcttatgagagggttttgctgcgagaagctggtttcaagagacctgtggtcttattcggccccatagctgatatagcaatggaaaaattggctaatgagttacctgactggtttcaaactgctaaaacggaaccaaaagatgcaggatctgagaaatccactggagtggtccggttaaataccgtgaggcaagttattgaacaggataagcatgcactactggatgtgactccgaaagctgtggacctgttgaattacacccagtggttctcaattgtgatttctttcacgccagactccagacaaggtgtcaacaccatgagacaaaggttaaatccaacgtccaacaaaagttctcgaaagttatttgatcaagccaacaagcttaaaaaaacgtgtgcacacctttttacagctacaatcaacctaaattcagccaatgatagctggtttggcagcttaaaggacactattcagcatcagcaaggagaagcggtttgggtctctgaaggaaagatggaagggatggatgatgaccccgaagaccgcatgtcctacttaactgccatgggcgcagactatctgagttgcgacagccgcctcatcagtgactttgaagacacggacggtgaaggaggcgcctacactgacaatgagctggatgagccagccgaggagccgctggtgtcgtccatcacccgctcctcggagccggtgcagcacgaggagagcataaggaaacccagcccagagccacgagctcagatgaggagggctgctagcagcgatcaacttagggacaatagcccgcccccagcattcaagccagagccgtccaaggccaaaacccagaacaaagaagaatcctatgacttctccaaatcctatgaatataagtcaaacccctctgccgttgctggtaatgaaactcctggggcatctaccaaaggttatcctcctcctgttgcagcaaaacctacctttgggcggtctatactgaagccctccactcccatccctcctcaagagggtgaggaggtgggagagagcagtgaggagcaagataatgctcccaaatcagtcctgggcaaagtcaaaatatttgagaagatggatcacaaggccaggttacagagaatgcaggagctccaggaagcacagaatgcaaggatcgaaattgcccagaagcatcctgatatctatgcagttccaatcaaaacgcacaagccagaccctggcacgccccagcacacgagttccagaccccctgagccacagaaagctccttccagaccttatcaggataccagaggaagttatggcagtgatgccgaggaggaggagtaccgccagcagctgtcagaacactccaagcgcggttactatggccagtctgcccgataccgggacacagaattatagatgtctgagcacggactctcccaggcctgcctgcatggcatcagactagccactcctgccaggccgccgggatggttcttctccagttagaatgcaccatggagacgtggtgggactccagctcgtgtgtcctcatggagaacccagggggacagctggtgcaaattcagaactgagggctctgtttgtgggactgggttagaggagtctgtggctttttgttcagaattaagcagaacactgcagtcagatcctgttacttgcttcagtggaccgaaatctgtattctgtttgcgtacttgtaatatgtatattaagaagcaataactatttttcctcattaatagctgccttcaaggactgtttcagtgtgagtcagaatgtgaaaaaggaataaaaaatactgttgggctcaaactaaattcaaagaagtactttattgcaactcttttaagtgccttggatgagaagtgtcttaaattttcttcctttgaagctttaggcagagccataatggactaaaacattttgactaagtttttatacccagcttaatagctgtagttttccctgcactgtgtcatcttttcaaggcatttgtctttgtaatattttccataaatttggactgtctatatcataactatacttgatagtttggctataagtgctcaatagcttgaagcccaagaagttggtatcgaaatttgttgtttgtttaaacccaagtgctgcacaaaagcagatacttgaggaaaacactatttccaaaagcacatgtattgacaacagttttataatttaataaaaaggaatacattgcaatccgtaaaaaaaaaaaa

SEQ ID NO: 52632 - DNA, 358 bp, Homo sapiens
ggagagtgcaccgacttcaagatccccattctgggtgtgcatctcaaggacctcatctccctgtatgaagccatgcctgactatctggaggacgggaaagtgaacgtccataagctactggccctatacaatcatatcagtgaattggtccagctgcaagaggtggccccacccttggaggctaacaaggacttggtacacttgctgacgttatccctggatctttactacactgaggatgaaatctatgagctttcctatgcccgggaaccaaggaaccacagagctccaccactaacaccttcaaagccaccagtagtagtggactgggcttctggagtgtctcccaaacctgatc

SEQ ID NO: 52633 - DNA, 246 bp, Homo sapiens
ggaaaacatatttgaaaattttaacatctactcacgataaaaactcttagcaaactaggaatagacttgatctttcctaaccatgtgaagttagaatctagaaggagaaaaagacgtggactatttacacttcatctcaaatatttcaaattttgccagtgaataaaaagtaaaggaagaaacaaactgataactgttctatacagaccccctaattgacacagaaatcattaaaattattaagaa

SEQ ID NO: 52634 - DNA, 3442 bp, Homo sapiens
cttggcacgaggattaggctagcgctcgctctactctctctaacgggaaagcagcggaatacaagagactgaactgtatctgcctctatttccaaaagactcacgttcaactttcgctcacacaaagccgggaaaattttattagtcctttttttaaaaaaagttaatataaaattatagcaaaaaaaaaaaaggaacctgaactttagtaacacagctggaacaatcgcagcggcggcggcagcggcgggagaagaggtttaatttagttgattttctgtggttgttggttgttcgctagtctcacggtgatggaagctgcacattttttcgaagggaccgagaagctgctggaaggtatggttctcccggcagcagcccgacgcaaaccaaggatctggggatcttcgcactatcccaagatctgagtgggacatacttttgaaggatgtgcaatgttcaatcataagtgtgacaaaaactgacaagcaggaagcttatgtactcagtgagagtagcatgtttgtctccaagagacgtttcattttgaagacatgtggtaccaccctcttgctgaaagcactggttcccctgttgaagcttgctagggattacagtgggtttgactcaattcaaagcttcttttattccccttaagaatttcatggaagctttctcaccaggggttcccacaccggaatttccaggaagaaatggagtttcttatgccaatttccccaaatggcgcagcatttggtatgggccgttggaattctgactgttggtacttatatactctggatttcccagagagtcggggtaatcagtcagccagatcaaaccttggaaattctgatgagtgagcttgacccagcagttatggaccagttctacatgaaagatggtgttactgcaaaggatgtcactcgtgagagtggaattcgtgacctgataccaggttctgtcattgatgccacaatgttcaatccttgtgggtattcgatgaatggaatgaaatcggatggaacttattggactattcacatcactccagaaccagaattttcttatgttagctttgaaacaaacttaagtcagacctcctatgatgacctgatcaggaaagttgtagaagtcttcaagccaggaaaatttgtgaccaccttgtttgttaatcagagttctaaatgtcgcacagtgcttgcttcgccccagaagattgaaggttttaagcgtcttgattgccagagtgctatgttcaatgattacaattttgtttttaccagttttgctaagaagcagcaacaacagcagagttgattaagaaaaatgaagaaaaaacgcaaaaagagaacacatgtagaaggtggtggatgctttctagatgtcgatgctgggggcagtgctttccataaccaccactgtgtagttgcagaaagccctagatgtaatgatagtgtaatcattttgaattgtatgcattattatatcaaggagttagatatcttgcatgaatgctctcttctgtgtttaggtattctctgccactcttgctgtgaaattgaagtgcatgtagaaaaaaccttttactatatgaaactttacaacacttgtgaaagcaactcaatttggtttatgcacagtgtaatatttctccaagtatcatccaaaattccccacagacaaggctttcgtcctcattaggtgttggcctcagcctaaccctctaggactgttctattaaattgctgccagaattttacatccagttacctccactttctagaacatattctttactaatgttattgaaaccaatttctacttcatactgatgtttttggaaacagcaattaaagtttttcttccatgagttgagtccttaagaaaatgattccagttactcattttgcatatttgctattttaacattattggaccctgcatttatagtcctttgatttcttccctctccctggtgtctcccccaagaccccaaataaagcaatacactgttaacactgtgggtttatatactaattctataccccagatggggaatgggggagatggtccctgggcttaatattctttaaagggcatgggaatttagcctctcttttattgtaatgtgctcttttggaaaatagttggttagcagggaagacccagagttgtagattgagattagggtgtactggctgaactgtggaaaacatacaattctgtgttcctcagtaaatgagattagcgtctaatgagtagcacccctttactaacttagtagtagtataaaatcatttttatttagttaattaccagagagatttagcataattttgttctggattcagtaaatcaagtcagcttggatcattcaccttaacttttcctttagcagccatttccactagtttccattaagtagtgttctataaactttgaatccaaagcaggaatcaatgtcttttccatctcgtgacttaaagttctgtgactgtgatgcatgtgagtgttccgacttcatctgttcctcttaactacggtgtttcccttaccatgggcattcataggatgaaatgaatgactgcccagaatgagaatttgtccagattattcagataaacatcataaagcagaatacattataaataagtagaatatgaataaatagaataataaaattccaaaatactcaatgggaaatgactagtaatataggctttcaagagttggtaccttttagctatatttgcagattctctgggattttaaggaactgagaaaacagcaaagttgactaaattttatatttcttgtcctctaaatattttgataatttctggattgatgcagtgatgtttttgttccttccgtatttataaatgaaacacctttttttagtgtttctaaacctaaaatctacttggtttgaaatcaagtggttggaacactgtttgacttttatttgaagcatgttgttgattgaaaatttcattgaggaagttttcaatcagtgtgatcagtttgattctgtaatgagcacagcacctaatattttgaggagctctgttttgaggaccaatgcttaaggtggactttgttcgtaaacaatatcccaatagatttgttgacttgaggtctggtttggttttgtttttgttttgttttgttttgttttgtttccaatagaattaagaattctaatgttgaaaaactgcacaaatttttatgggacaaagcctagaaaagagaaatgtagtttgaatcataatctaaatcatcgtatgatagaagagggaaagttttggtgccataatttctcctttcactggtgttggacttaaatcagttgaaatgtatttctgtaccacaatttacgcttcaataaaagtttaattgtctagtgacattcaaaaaaaaaagaaaaaaaagtcgacgc

SEQ ID NO: 52635 - DNA, 351 bp, Homo sapiens
gggggagaacaggagtaaacaaggacttgacaaagctgaagagttatcagtcctttgacaaggacaggtggggcagggagcaagacaggtaggctggaagaacagttattggcaagtatgcagagccgtgaacgtcatggcatgtccaaggaattcctgcaggagcactttaacccccagagacggtacaacccaagctcccacgtcctctctggagcttgcgcaggagctgtagctgccgcagccacaaccccactggacgtttgcaaaacactgctcaacacccaggagtccttggctttgaactccacattacaggacatatcacaggcatggctagtgccttcagga

SEQ ID NO: 52636 - DNA, 1160 bp, Homo sapiens
aatttaaaggctttttattaggaaccaggggaatgagctgcttatccctctataacagtctagagcaggtcatcaggcccaggatggagagaggttatcaaaggtgctgtggtgtgctttgctgcacgtgcttagggcctggaaggaaaggtggtggcaacagaggttggcaggaactggtgttagtcaaaacaccaaaatcctgggggagagcccctctaccttccttctaactccacttgaggtgggagcattccaggagacagagaatgtgaccaggatgcagcagtgtcatctgaacccctggcttcgttcagtgctacttcacttgccagccctccactcttcttgccttttagtgattaggtatttgaagaactcatacacagaccatgcgatggctgtggaggggatctggtaaattactctggcctgcacccctcggaaataggcggtcaccccacctacttgatataccgtcctgaaggcactagccatgcctgtgatatgtcctgtaatgtgtgagttcaaagccaaggactcctgggtgttgagcagtgttttgcaaacgtccagtggggttgtggctgcggcagctacagctcctgcgcaagctccagagaggacgtgggagcttgggttgtaccgtctctgggggttaaagtgctcctgcaggaattcataggtcatgaagtgaatggcttggaaaggaacgttcatggtcagctgggtggtgtagctgcggtaaaaggccccggccccttcattttgccacactgcccgtacacagtctgtcacccggtggtatggtgagttgtacatctgcatcctctgcttgaccactagtagtgccatcaacgaggaaggaaatggtgacagcagccaaccggtgatggagagtatccagattcagagccccaagtcagcagatcagcccaatggaatagagagagaaaaaagtatgagtgagctgctggctaacctgagaagtcagcttcccttttttgaggggaaggagtaagcagagggttggtaacgagtcaaaaaacaataaacccacttccatcaggacttctgtaaagccagccagttcgcacacaggacatatctacagtttgggagcttcagagagtcttcttgaactaagtacctatctctga

SEQ ID NO: 52637 - DNA, 451 bp, Homo sapiens
ttttttttttgcctgacaaaactggacatctggatgtcctccagtctacttatatactcacagagagaataagtttaaatattaaagagaaaacacaaagatacttggaataaatgtgcatttaaaaccctgactaaaatatcaacataatgatcataattacaatggtaataaaaataattagtacaataatattatctttatgagcagcatggaaatttcattcctgatctggaagaataaaaggaaagaaaatgtcaggtgaaagagtaagtagcctccaacttaagcagacagaataattttctttaaaatgaaaagaacattttaagctgtctttccccctaaaagatcagatctagaaagggctggaaatgaactgtgcccaggaatctggggggtgctctccagtaaggcgaactgaggctcatttggcagcccagacttggga

SEQ ID NO: 52638 - DNA, 605 bp, Homo sapiens
cacttttttttttttttttttcattaaaaaatagtgctctttattataaattactgaaatgtttcttttctgaatataaatataaatatgtgcaaagtttgacttggattgggattttgttgagttcttcaagcatctcctaatagcctcaagggcctgagtaggggggaggagagaggactggaggtggaatctttataaaagacagagtgattgaggcagattgtaaacattattaaaaaacaagaaacaaacaaaaaaatagagaaaaaaaccaccccaacacacaactgccctgtccagcccaatacctgacacagaatactttgtgtttgtttagttgcccccccccacaaaaacaaaaacaaaaacaaaaacaaaaaactgttccaggtaattccatcgctgctacattcctgtaaattgtcactgatcagtgctatggcagagcgggagcacccggggtggcagcagtccagcctctccaatgacctccagcctcccccacccaggcaggagggagggctgtgcagggctcggggcagtgggacctggtggctctgctctgaccacgaggcgcctgactggccaatacttactgggct

SEQ ID NO: 52639 - DNA, 360 bp, Homo sapiens
  misc_feature (1)...(360): n = a,t,c or g
ctagttctagaaaaatttatgagagagaatttataggcatttgattggtatggagagacaagaagaaagccagggattttgtccaggattctggcttgggcacttgagtgaatggtgtaaaactgaggggacgcataggatttacttaccatttcatttgcttgtttttttgtgtgtgttttgtttttctgggagggatgacagatatagctggtgtattagtccattttcacactgctgatagagacataccagagactgggcnntttacaannnanngagggttaattanacttncagtccncngtggctgnnganggnctnacantnntcatggcnnangnttatngacnnttcttc

SEQ ID NO: 52640 - DNA, 7855 bp, Homo sapiens
cgcaccctccttccgcccctccttctccggggtcagccaggaagatgtcccgagctgctatccccggctcggcccgggcagccgccttctgagcccccgacccgaggcgccgagccgccgccgcccgatgggctgggccgtggagcgtctccgcagtcgtagctccagccgccgcgctcccagccccggcagcctcagcatcagcggcggcggcggcggcggcggcgtcttccgcatcgttcgccgcagcgtaacccggagccctttgctctttgcagaatggcccgcttcggagacgagatgccggcccgctacgggggaggaggctccggggcagccgccggggtggtcgtgggcagcggaggcgggcgaggagccgggggcagccggcagggcgggcagcccggggcgcaaaggatgtacaagcagtcaatggcgcagagagcgcggaccatggcactctacaaccccatccccgtccgacagaactgcctcacggttaaccggtctctcttcctcttcagcgaagacaacgtggtgagaaaatacgccaaaaagatcaccgaatggcctccctttgaatatatgattttagccaccatcatagcgaattgcatcgtcctcgcactggagcagcatctgcctgatgatgacaagaccccgatgtctgaacggctggatgacacagaaccatacttcattggaattttttgtttcgaggctggaattaaaatcattgcccttgggtttgccttccacaaaggctcctacttgaggaatggctggaatgtcatggactttgtggtggtgctaacgggcatcttggcgacagttgggacggagtttgacctacggacgctgagggcagttcgagtgctgcggccgctcaagctggtgtctggaatcccaagtttacaagtcgtcctgaagtcgatcatgaaggcgatgatccctttgctgcagatcggcctcctcctattttttgcaatccttatttttgcaatcatagggttagaattttatatgggaaaatttcataccacctgctttgaagaggggacagatgacattcagggtgagtctccggctccatgtgggacagaagagcccgcccgcacctgccccaatgggaccaaatgtcagccctactgggaagggcccaacaacgggatcactcagttcgacaacatcctgtttgcagtgctgactgttttccagtgcataaccatggaagggtggactgatctcctctacaatagcaacgatgcctcagggaacacttggaactggttgtacttcatccccctcatcatcatcggctccttttttatgctgaaccttgtgctgggtgtgctgtcaggggagtttgccaaagaaagggaacgggtggagaaccggcgggcttttctgaagctgaggcggcaacaacagattgaacgtgagctcaatgggtacatggaatggatctcaaaagcagaagaggtgatcctcgccgaggatgaaactgacggggagcagaggcatccctttgatggagctctgcggagaaccaccataaagaaaagcaagacagatttgctcaaccccgaagaggctgaggatcagctggctgatatagcctctgtgggttctcccttcgcccgagccagcattaaaagtgccaagctggagaactcgaccttttttcacaaaaaggagaggaggatgcgtttctacatccgccgcatggtcaaaactcaggccttctactggactgtactcagtttggtagctctcaacacgctgtgtgttgctattgttcactacaaccagcccgagtggctctccgacttcctttactatgcagaattcattttcttaggactctttatgtccgaaatgtttataaaaatgtacgggcttgggacgcggccttacttccactcttccttcaactgctttgactgtggggttatcattgggagcatcttcgaggtcatctgggctgtcataaaacctggcacatcctttggaatcagcgtgttacgagccctcaggttattgcgtattttcaaagtcacaaagtactgggcatctctcagaaacctggtcgtctctctcctcaactccatgaagtccatcatcagcctgttgtttctccttttcctgttcattgtcgtcttcgcccttttgggaatgcaactcttcggcggccagtttaatttcgatgaagggactcctcccaccaacttcgatacttttccagcagcaataatgacggtgtttcagatcctgacgggcgaagactggaacgaggtcatgtacgacgggatcaagtctcaggggggcgtgcagggcggcatggtgttctccatctatttcattgtactgacgctctttgggaactacaccctcctgaatgtgttcttggccatcgctgtggacaatctggccaacgcccaggagctcaccaaggtggaggcggacgagcaagaggaagaagaagcagcgaaccagaaacttgccctacagaaagccaaggaggtggcagaagtgagtcctctgtccgcggccaacatgtctatagctgtgaaagagcaacagaagaatcaaaagccagccaagtccgtgtgggagcagcggaccagtgagatgcgaaagcagaacttgctggccagccgggaggccctgtataacgaaatggacccggacgagcgctggaaggctgcctacacgcggcacctgcggccagacatgaagacgcacttggaccggccgctggtggtggacccgcaggagaaccgcaacaacaacaccaacaagagccgggcggccgagcccaccgtggaccagcgcctcggccagcagcgcgccgaggacttcctcaggaaacaggcccgctaccacgatcgggcccgggaccccagcggctcggcgggcctggacgcacggaggccctgggcgggaagccaggaggccgagctgagccgggagggaccctacggccgcgagtcggaccaccacgcccgggagggcagcctggagcaacccgggttctgggagggcgaggccgagcgaggcaaggccggggacccccaccggaggcacgtgcaccggcaggggggcagcagggagagccgcagcgggtccccgcgcacgggcgcggacggggagcatcgacgtcatcgcgcgcaccgcaggcccggggaggagggtccggaggacaaggcggagcggagggcgcggcaccgcgagggcagccggccggcccggggcggcgagggcgagggcgagggccccgacgggggcgagcgcaggagaaggcaccggcatggcgctccagccacgtacgagggggacgcgcggagggaggacaaggagcggaggcatcggaggaggaaagagaaccagggctccggggtccctgtgtcgggccccaacctgtcaaccacccggccaatccagcaggacctgggccgccaagacccacccctggcagaggatattgacaacatgaagaacaacaagctggccaccgcggagtcggccgctccccacggcagccttggccacgccggcctgccccagagcccagccaagatgggaaacagcaccgaccccggccccatgctggccatccctgccatggccaccaacccccagaacgccgccagccgccggacgcccaacaacccggggaacccatccaatcccggcccccccaagacccccgagaatagccttatcgtcaccaaccccagcggcacccagaccaattcagctaagactgccaggaaacccgaccacaccacagtggacatccccccagcctgcccaccccccctcaaccacaccgtcgtacaagtgaacaaaaacgccaacccagacccactgccaaaaaaagaggaagagaagaaggaggaggaggaagacgaccgtggggaagacggccctaagccaatgcctccctatagctccatgttcatcctgtccacgaccaacccccttcgccgcctgtgccattacatcctgaacctgcgctactttgagatgtgcatcctcatggtcattgccatgagcagcatcgccctggccgccgaggaccctgtgcagcccaacgcacctcggaacaacgtgctgcgatactttgactacgtttttacaggcgtcttcacctttgagatggtgatcaagatgattgacctggggctcgtcctgcatcagggtgcctacttccgtgacctctggaatattctcgacttcatagtggtcagtggggccctggtagcctttgccttcactggcaatagcaaaggaaaagacatcaacacgattaaatccctccgagtcctccgggtgctacgacctcttaaaaccatcaagcggctgccaaagctcaaggctgtgtttgactgtgtggtgaactcacttaaaaacgtcttcaacatcctcatcgtctacatgctattcatgttcatcttcgccgtggtggctgtgcagctcttcaaggggaaattcttccactgcactgacgagtccaaagagtttgagaaagattgtcgaggcaaatacctcctctacgagaagaatgaggtgaaggcgcgagaccgggagtggaagaagtatgaattccattacgacaatgtgctgtgggctctgctgaccctcttcaccgtgtccacgggagaaggctggccacaggtcctcaagcattcggtggacgccacctttgagaaccagggccccagccccgggtaccgcatggagatgtccattttctacgtcgtctactttgtggtgttccccttcttctttgtcaatatctttgtggccttgatcatcatcaccttccaggagcaaggggacaagatgatggaggaatacagcctggagaaaaatgagagggcctgcattgatttcgccatcagcgccaagccgctgacccgacacatgccgcagaacaagcagagcttccagtaccgcatgtggcagttcgtggtgtctccgcctttcgagtacacgatcatggccatgatcgccctcaacaccatcgtgcttatgatgaagttctatggggcttctgttgcttatgaaaatgccctgcgggtgttcaacatcgtcttcacctccctcttctctctggaatgtgtgctgaaagtcatggcttttgggattctgaattatttccgcgatgcctggaacatcttcgactttgtgactgttctgggcagcatcaccgatatcctcgtgactgagtttgggaatccgaataacttcatcaacctgagctttctccgcctcttccgagctgcccggctcatcaaacttctccgtcagggttacaccatccgcattcttctctggacctttgtgcagtccttcaaggccctgccttatgtctgtctgctgatcgccatgctcttcttcatctatgccatcattgggatgcaggtgtttggtaacattggcatcgacgtggaggacgaggacagtgatgaagatgagttccaaatcactgagcacaataacttccggaccttcttccaggccctcatgcttctcttccggagtgccaccggggaagcttggcacaacatcatgctttcctgcctcagcgggaaaccgtgtgataagaactctggcatcctgactcgagagtgtggcaatgaatttgcttatttttactttgtttccttcatcttcctctgctcgtttctgatgctgaatctctttgtcgccgtcatcatggacaactttgagtacctcacccgagactcctccatcctgggcccccaccacctggatgagtacgtgcgtgtctgggccgagtatgaccccgcagcttggggccgcatgccttacctggacatgtatcagatgctgagacacatgtctccgcccctgggtctggggaagaagtgtccggccagagtggcttacaagcggcttctgcggatggacctgcccgtcgcagatgacaacaccgtccacttcaattccaccctcatggctctgatccgcacagccctggacatcaagattgccaagggaggagccgacaaacagcagatggacgctgagctgcggaaggagatgatggcgatttggcccaatctgtcccagaagacgctagacctgctggtcacacctcacaagtccacggacctcaccgtggggaagatctacgcagccatgatgatcatggagtactaccggcagagcaaggccaagaagctgcaggccatgcgcgaggagcaggaccggacacccctcatgttccagcgcatggagcccccgtccccaacgcaggaagggggacctggccagaacgccctcccctccacccagctggacccaggaggagccctgatggctcacgaaagcggcctcaaggagagcccgtcctgggtgacccagcgtgcccaggagatgttccagaagacgggcacatggagtccggaacaaggcccccctaccgacatgcccaacagccagcctaactctcagtccgtggagatgcgagagatgggcagagatggctactccgacagcgagcactacctccccatggaaggccagggccgggctgcctccatgccccgcctccctgcagagaaccagaggagaaggggccggccacgtgggaataacctcagtaccatctcagacaccagccccatgaagcgttcagcctccgtgctgggccccaaggcccgacgcctggacgattactcgctggagcgggtcccgcccgaggagaaccagcggcaccaccagcggcgccgcgaccgcagccaccgcgcctctgagcgctccctgggccgctacaccgatgtggacacaggcttggggacagacctgagcatgaccacccaatccggggacctgccgtcgaaggagcgggaccaggagcggggccggcccaaggatcggaagcatcgacagcaccaccaccaccaccaccaccaccaccatcccccgccccccgacaaggaccgctatgcccaggaacggccggaccacggccgggcacgggctcgggaccagcgctggtcccgctcgcccagcgagggccgagagcacatggcgcaccggcagggcagtagttccgtaagtggaagcccagccccctcaacatctggtaccagcactccgcggcggggccgccgccagctcccccagaccccctccaccccccggccacacgtgtcctattcccctgtgatccgtaaggccggcggctcggggcccccgcagcagcagcagcagcagcagcagcagcagcagcaggcggtggccaggccgggccgggcggccaccagcggccctcggaggtacccaggccccacggccgagcctctggccggagatcggccgcccacggggggccacagcagcggccgctcgcccaggatggagaggcgggtcccaggcccggcccggagcgagtcccccagggcctggtcgacacggcggggcccggtggccggcatctggcccgcacgtgtccgaggggcccccgggtccccggcaccatggctactaccggggctccgactacgacgaggccgatggcccgggcagcgggggcggcgaggaggccatggccggggcctacgacgcgccaccccccgtacgacacgcgtcctcgggcgccaccgggcgctcgcccaggactccccgggcctcgggcccggcctgcgcctcgccttctcggcacggccggcgactccccaacggctactacccggcgcacggactggccaggccccgcgggccgggctccaggaagggcctgcacgaaccctacagcgagagtgacgatgattggtgctaagcccgggcgaggtggcgcccgcccggccccccacgcacc

SEQ ID NO: 52641 - DNA, 411 bp, Homo sapiens
gctgctgttgctggttttgagggaagatgtaaactctgggatggttgtgtttgtgctgcctgattatgaggcttatgttgcaaaaggtgtgagtttgaaaatggctcagtctctgaagcctgttgattcaagtgctgtttcaacactggggacataagtttttcagtttgggaatctgctctttgttgaaaatgaaatctagtgccacacagtgactgcacatgagcttttggtaaatggtctgttttggagaagtgcacctggtgtgagggtttttggaactggagatgttggtccactgtaccttgggactgcccttgattcatttcaacttggtacatttgtgacttgtgctccagctgtgttgttttctgggtgtaagcttgccttgggagccccccaggcatgttg

SEQ ID NO: 52642 - DNA, 1593 bp, Homo sapiens
  misc_feature (1)...(1593): n = a,t,c or g
tttttttttttaacgatccttttctaaatcaatacaatttctcaaatttatttttttcttaaagaagtacttctaatctctgtcaaaagggaggtgaggaaaggtccttcctcccttgtaaacactgaaatacagatctgggaaaccaggatcaacacacacaaaaagtgcattttacaaaatatcaactaaaatatattttacatggattatgcttccattgaaattctaccagctgcattttcaggttcgaaaaaatatttccacatctaagagatttcaaaagcatttaagttcggggcagccaagaccctacctcctgggaggagggccttcatctcctttcctgctaggtgaggctgggctccttggcagcaagggcccagaatgagcaggctccaaggctggctctgcagagcccccactgccactctgccaacctcatttactgccccatcctcccagacagacaccttcctccaaacagcttattcaatataaggagatccaagtcccttcccttcaggtttgggatcaggcttcccaagcataaattcacctctgaagcctccaggcctcacccaaacccaatgaccaatcaggagcaactcatctactaagggacagggcatggcaagttgggggagccctcagggttcatttccacctccctctgcagcccctgcccagctgtcctcacccagtgccacctcctaagcctgctgggttcatctgcccttcctccctaagggaagacccagggctgcagttctcagccccagcccctgcccccaggggtatgcccttgtggaagtgctcagctagcaggttcccagcaccaggcccaagccacactgcactccactccctctcccaccatactcctctttggtaaagataggaaataaccaggctgctccagccccctcacagagtctcagggccagggccaaggcctagtctcccacaaggacaaacaaggggactgaagcctgtaagtctactctggggagcagcatgaggtgagaacagggcctctgggcaacaggaacaaactgaaaatgcaaagtccttagctcctagagcaagtggctgcagctcagcaggtccgtggactgatacagtgttgattcttgctaggatgtaaattagtgcaatctacaaaagactagggaaagggtggcagggcaaggggagccacagcactcctttggtttgatttcaggtgggtgtggcttgaagaatcacgtgtgaagttctgcaagaggtttcctggaacctccatgtgtaaggcaagaggaaaaatcttcaacaaatcaggtagcaattttccttgccccctgcccccaaccctctcccagcacccatcttccctcccagatatgacaaaccccacaatcatcagttaactttctgggaagccaagaccgctgggtggccgtctctgggaggtggacaggagactcccacaagtgggccacacccatgactgtgagaggtgggtcctcgtgccgaattcttggcctcgagggccaaattccctatagtgagtcgtattaaattcgtaatcatgtcaaaggnaatgaattcaaa

SEQ ID NO: 52643 - DNA, 1506 bp, Homo sapiens
tttaaatcatagtagtactagagtcaaagtttataattgctttggaacaatgggtttacttgaggtgaattcacaatgccttcacttaaaagtaagattctggacttcattatgagctatctgtataccatgtatgaacacagaaaacctttagagaactcttctctaatgatcttcacccaaaaatacatgccacaattttcaaaaacagaacatgtacaattgttggggtttttacattacccttataagattggtttgtgtgatacactaaacgtatatattttaatgacaatagaggaagcagattattactggcattaaagtacaaccatttctagacggttttaaatgccacagagtcccctggttaaaatgtaaagctgcacagcttgcctatgtcatctttatgataaagttaaaacagcaagaggatttaactttcactctacattttactgccaggtttttatatagatcaagtatcgctgcagcattctgaccagcccagatttagcagcaaatggcaggaatcatataaaatgcaatttttttttaacaaagtgcttttctaagatatacatacatatataaataggtacaaaataaagtgtcaacattaaaaagctcaactatttaaaagcttttaactatttaacttaagtagtacatataaaacactgaaactcaaagatatggaatctactaaacagattcaaagtctttttttttttgaaatgcaagaccaaaaaatcaaattctggtttgcagacaggaaaaaagtatcaaaaaccagaattcctaacagagcagctagaaaggggcaattttataaaccttatcagctgaatatcatgaggtgattttcacctgattgcaaaactgccatagtttgaaacacttttcaatttaccagacacactctgtcaagacttcatatacttccaacttgcaagcctgtgttttgccttctccaacctaaaaaggaaaagctttaaacgatgaacttacattctattaaaccatcagacttgaggcttatcatctgtttagcgtgaatgtacaaaccaggtacatttccaccaaacacatagaaaaatcttgtgcatcacagttcagctaaggtggtaagacaatccttacaatcctccttggatttcttttttaagatgtcaaagaagcaggtaagcaacattgttcatttgttactgggtgttctagatcaaaccttcacaagctatatatatagcttcatatgctatagcttacaaatggggtaacaaagtaaaagaaaagaacaaattatactttgacactttatagtcaaagtataattaaaaaagaaatcctacagtgggtaatggagaaatagataatttttccagcagctatgcctgaaatttttggtatttttttccttgctaaatatgctttttttctttttttagtttttaagccaccagttttcagagttcaaagcacaagatttgagaataaaacagtaag

SEQ ID NO: 52644 - DNA, 561 bp, Homo sapiens
  misc_feature (1)...(561): n = a,t,c or g
tgggagaacagaagacttcacaatttaatgcctcagtttttaaaaaaggatccttacacttcatgtctcctagccatcagaagaggaatgagacagcaaaagttcaaatggcctgtttcaagtttctgatataaaacgatgacattttcaggaaaatcctgcatttccagagagagactggctggttaaatttctgaaagaggacaccagctaaaagaagggtcattccggctgcttttttgagaagtccctgaagagatcaataacagcaagagggaacctggcaaggaagctattcctataatccaggaaagagatgaggaaggcttggaccaggtggtagtggtgtcagctctgcttcctcatagctgctttccagaacgtgactcttgcaaattatcaagaaaggggaactaatctaagggatccagatcaaacagcctcatgaagacttattttatgtttctaatataaagatagaagttttcagaaaagccctgctacacagaggatcagagcaggggtgggcctgctggnctgcacctggggattctgagcatc

SEQ ID NO: 52645 - DNA, 388 bp, Homo sapiens
  misc_feature (1)...(388): n = a,t,c or g
caagattatttggctagcctgtataccttaaatttccatcagaattttaagataagcctgtcaatttctgtgtaaaagccagctgggattttgataaagatatctgaagtattgccatcttaacaatattaagtcttgcagtccatgaacatgagatgtcttcccatttatttaggtcttctttaactttttcaacaatgttttatagttttcagagtatgagtttctgcacttttttcttaatttcttcctaagcattttattctttttgattccattatacatgattttttatagtttgttttcagatcgcccactgatagtgatagaaatacaatttgttttttttatattganctnatatcctggtacctcactgacctcactt

SEQ ID NO: 52646 - DNA, 1358 bp, Homo sapiens
gcaagatttaacttgttttaatgcagtctgctataaaaatgaagacttctgcatggtatatttggctttacaaacgttaatgcctagttaatgcttgtgttatatggtacacatcattacaatctgttggccagtaacagcttttgcaacatgggttaatactaaaattgtgaatcatggaacttttacttagcacacacacacacaatctacagcaaacttaaatactaatctataatacctaactgggttattggatccattgcaagattgtgcttatttatctcagaaggtaggcaactagcaaaaatacacatttctttcgcatatccccacccccatattacactgtaaaagaaatacattattcagtgcacttcctaagaaataaacttccttatagtatctctctctatatatatctatcccaaaacaaaggaagagcacaatgcaacttttaagattaccatttaaagcaaaagagacaataactctctggcactgtagcctcctctccagtttagaaagtttagctattttatcacactattcggttttggctctgcataggaataaagttcaatgcatgattgccttggacagtttaagataccccctacatcattttgatagacaccttggggcattagtagcatttttatttttcatgtatttgcctttatcaaactataagctgtggagttgccccaatatactcccattgtgattaatacactgatttccatcacctgcctttttactatcaactcttattagattaaaaggaaatagacttaaattatagcaggaggtcagggctgctggatagatgttggctcagagaatgtatgtgaagacaccaaggcctctcctgtatggacacaaaatcatataaccactgtgtctgagctgggttgtggatagtcttatttggcagagggggatagccattatattctatgaaccttgccagctgtactggcctacacagttggaaagtttggaggcttttgtccgcatagacttgctatgatgaaaatgacagaagtttctagaatgaaagaggttgcaacttggcagcttgcaagctaaatccagctgcagacgtgtttgtttaaccagcaccatttaaacattttaaaatcacttcttgatatttaaaaatgagaatgtttctcatgaaaatttggatttcaaaaaatgtgaagaactggtaatcctggtttagcattcttgcaccgcagcaagcagatggagctgaacagatgccctttttaaatgcggcttgggcactttagtttgccacagctcccactgctcccagctgttttacatcgcttgtgtgagaggcctgtttc

SEQ ID NO: 52647 - DNA, 72 bp, Homo sapiens
gctctacagaaaaaccgaccagccctcctgaaaacttcccaagtcatcaaaaccaaggaaagtgggctgggc

SEQ ID NO: 52648 - DNA, 374 bp, Homo sapiens
aaatcagaaggtgtagaataaagaacaaatgaaactagaaacgcctagaaagatgggtggcttctacatagccctttattctccctctgcttgtgctgcccgcctgcctgttggcttcgctgtggagctgatgtcccctgtacaaaggatgccctcctccccggctgtggcccattgttcttttaggcttctggactcctcctgggtcttcgctggttggcaagctctctcccctaattggcttttctcctggtgctccccaccttcctgtgggtcgaagcccttctgccccagaagctcagagaagacaaggccaatatgagagcccataagtagtgagcacttgcaccgggcctgcagtgtgaatgatgaaa

SEQ ID NO: 52649 - DNA, 523 bp, Homo sapiens
ttttttagcaggaaaacatttaaaatttattgacaacagaaatattttatagcccaacctggtatgcaaaaatgctggctatgtcccactgagttgatttcatggctcactaatgaaatgtgagccacagagggacaattacattgcagggtattaaatggcctggagaatcaccagaaaagaacactcttgcctgtgcttccacaaactgggtggtcaagtgggctgatagttccagaagcactccatgtgtataacccacatcctcaaaacgatgcctggtgtctcacagaatctgatggacaaaacctaagtgacacccaaaaccctgatacaaaggaatctgagaaacatagtaaagaaaggaaagcacactagcaaaacttccaaaagatgttaatcaaggtaagccacagaatcagtcccatatctgcaatgaaatgctgcttatgtatgtgagacagaaaaacctggtggctgaagtattatttcatttatcttatctctataaatggcatatatt

SEQ ID NO: 52650 - DNA, 1516 bp, Homo sapiens
  misc_feature (1)...(1516): n = a,t,c or g
cgggctgaggagctcaaggccatcgtctcctcttccaatcaggccctgctgaggcaggggacctctgcccgagacctgctcagagagatggcccgggacaagccacgcctcctagctgccctggaagtggcttcagctgccatggccaaggaggaggccgccggcggggagcaggatgccctgggacctgtaccagcacagcctgggggagctactgctgttgctgggcagcggagccccgggccggangggcagcttgctttcacactgaggttcagaacctcatggcccgagctgaatacttgaaggagcaggtcaagatgagggaatctcgctgggaagctgacaccctggacaaagagggactgtcggaatctgttcgtagctcttgcacccttcagtgaccctagaagaatgattggacagatgtgagccatctggagcagaggggcactaacccaggctgacgccaagaatgaagtggcccactgcagccctggcgagcaggcttcttggatggacagtgctgagacccccatatcccagagtccccagcctccctcaggttactctgcaccccacagatggtttgatggctgtgctgtatactggaggggagggcaggactctgggagaacagcacttctttcatgagacctttgttactcggtggttactgggtcctgttgcctgtccgttttggggcatgcagcctctattcattttttgggttccgagaagagggcaaggggccccgcaggtacttctgtgcttgccctcgccctgccagcaggagctagtgcccctggcctggccttcccgggaccccttattccaactcagctcctctttgcactggaatggggcactccaacacccctcagggaccaccctccccacagtatgcactcagccccacagaacccaccagtctttctgggaactcacacctgcccgccatcttggtactttaggttaatccctcaagcatgaaagctggatcttttggggtttaagaagcccaagccttgttcctgccctggcctagggagcactcaggagggttccttggtcctcatctctcccacctccgttccctctgggccccacactagccacagcgcgggccttgtgctggagtttgagcctgggacagggagagggaggcttggagacagtctgacccagtgccctctaggccacccacttctaggcctgccctgcccgccgtggagccctgggcaagctctttcccctttctgggcctgggtctccccatctcttcaatggggctgataccttcacagcccacagcatgggcacttatgaggacaaagtgaatttaacctggaaaagaatgtatttgagagtttcttttaaataatcagcgggtgttggtgatttgtagcccttctgcccttaaatgcttccttgggcaagagctgtctgtcctccctgcaggaggctgagtgtaaagagtatcattcattgtttctctattaaattattttctcta

SEQ ID NO: 52651 - DNA, 1357 bp, Homo sapiens
cccgcttccgctgccgcagccggtcgtaaccaagttgtgtcctgtcagccgctgtccccttagccgcgatgccgctggagaacctggaggaggagggtctgcccaagaaccccgacttgcgtatcgcgcagctgcgcttcctgctcagcctgcccgagcaccgcggagacgctgccgtgcgcgacgagctgatggcggccgtccgcgataacaacatggctccttactatgaagccttgtgcaaatccctcgactggcagatagacgtggacctactcaataaaatgaagaaggcaaatgaagatgagttgaagcgtttggatgaggagctggaagatgcagagaagaatctaggagagagcgaaattcgcgatgcaatgatggcaaaggccgagtacctctgccggataggtgacaaagagggagctctgacagcctttcgcaagacatatgacaaaactgtggccctgggtcaccgattggatattgtattctatctccttaggattggcttattttatatggataatgatctcatcacacgaaacacagaaaaggccaaaagcttaatagaagaaggaggagactgggacaggagaaaccgcctaaaagtgtatcagggtctttattgtgtggctattcgtgatttcaaacaggcagctgaactcttccttgacactgtttcaacatttacatcctatgaactcatggattataaaacatttgtgacttatactgtctatgtcagtatgattgccttagaaagaccagatctcagggaaaaggtcattaaaggagcagagattcttgaagtgttgcacagtcttccagcagttcggcagtatctgttttcactctatgaatgccgttactctgttttcttccaatcattagcggttgtggaacaggaaatgaaaaaggactggctttttgcccctcattatcgatactatgtaagagaaatgagaattcatgcatacagtcagctgctggaatcatataggtcattaacccttggctatatggcagaagcgtttggtgttggtgtggaattcattgatcaggaactgtccaggtttattgctgccgggagactacactgcaaaatagataaagtgaatgaaatagtagaaaccaacagacctgatagcaagaactggcagtaccaagaaactatcaagaaaggagatctgctactaaacagagttcaaaaactttccagagtaattaatatgtaaagccatgtaactaacaaaggatttgctttagagataattatttggaatttttatagcttacttcacaatgtgcccaggtcagctgtataaaataaatactgcattgttgtttaaaaaaa

SEQ ID NO: 52652 - DNA, 1200 bp, Homo sapiens
gttttttttgttgtttttaagttcaaaagtacatttatttaaaatgtgggcaagatatcaatataaaagaaaacagagtataagaaataaaaataatcaaagtacaaaacatttcaaatctttaacatccataatttagagatagcaaggtctttatttacaccattttatttctagttgaagtcccgtaacagttttgtgaaaacatttaaaaacctggcaaatgaatcataaaacctaatgtgggctcttaaagtcatataatacaaaacataatttatgtttcctcagaataaaattgcacatcttaaaaagatgcagtatatttattatatctgtcttcctgcttcacagtctgatcccccaggaaagcagctggaaaacaagagcatgtgaaggaagcgccgagctcctcgccagccagacagccagccccgcaccgcaggagtcgacatgcacggcagcctagacgccatcagttaaacttatatgattcatagtccagcgtttgagtgagcactccagtcagaacgaactctgcattgtgaacatctgaacagggtggaaacagacactttagttagagatccactgcctgtgcgtgcacacatactcacacaggtaagcggggaaacgtacctatgcctctggcaaaatattctcggcataaatgaaggtcattttcacaggatattaaaattatttccgacaaactctaaggaaaagaaaatgagtttctcagtgaccgaacgctgaatgtgatacagggcaatgacggactcgctggcggactccactctacccaccgagttctgcttgtgctccatgagcttccggaaagatggctgcttggataacacctttcctcctgcacactctacgattgccttcatagtggaaagacttgggcagattccaggtgtgatgtaaaaatattttgccttaaagagtggagaaacgtgtgcccgttttaaggattcttccaagctgaaagagaaaagtacttctgcctcagcatctcggagaatgtagttctgctcatcaatgaacttctgacacctgaagcattcttccagccactctggcgtcactatgtgcttcaccgacagaaatcgccgtcaggaacttcacggtgcgagtcactttgctggcaatgaggtgtgtgcacttctgtgcagactccgcaacctctccaccaag

SEQ ID NO: 52653 - DNA, 371 bp, Homo sapiens
tctgtgaggttaaaaggctgtgtgtgtgaaaatatcttggaaattgtaaagaactacacaaatataaggttttcctgtgattattaccgtcatcaagattaacctacagatagtgcaaaatttaagcttcccaaaaaatgttcgctaacctttttcatacttttagaccattacaagatataaatagcaaagtcaactggaattgtaattagagctttgatttttcttgggctagaggttttttctgccattctgatgaaccctggaggaagggagcaaggtcggcgggatttggccgaggggcggggtgaggactgcgcaggctcagcttctcagctggaagaggaagtccccagtgcaggcgtctgcgg

SEQ ID NO: 52654 - DNA, 1451 bp, Homo sapiens
ggagcacattaatttgatgtgaatgtccccatggccgtatccacactgaatctggactttttaaagtgtctgtgatttgtttacatgtttagaggattttgatgactggtccagtgccaatgactcaaaggcttaggcccatctgtgggtttggtttacgaacattgttatctttggtgggatccgctcagctctgatttgtttgcaagacagaccaaagaagcccacacatccacctttattcttctccgtcaccagaaaagaaaccattttccatcttacaagcataacactctcaagtggtgaaatattaaaaaagcagtgttcatgaatacatcgttaatgtttttaccagagcaacatcgagcttggctcagatctgccatggagcacagctagtctaagagctagaggcctggtgctttcaaaagacttcatgtgagatttttgtgtactttactcaggaaagtgtgaatctctaaaaaataataataataagcacatgttttcatgattcattaattctcctttttgttccattaaccatttcttggttgtgctcccaagctttcctggagcctccacaaaggagagtagccaggagtaatgagaggacggtcaggtgggcacttccaaaagctggagagacccttctgaggaccctccaccatcagcgggggcctcaggggaccctggtcctaacactgggtgtggctgctgggccagacgctcacctgcacagaacttccttccctgcttccactctgaagggcgtttcagaattgactcatttccactgcagtctgccagaacccctgtaataaggagctgtgttatattacatctggggctgtgtgcatctttacaaatggagacacactattcaaagggaagatctctaaagtagggagcgtggtacttattctttgtttgaaacattccgatttgttgtcaggccttatttgttttttgtaagtgattgtatcggaggcttaagttgtgtggaatcagtcccacagtgttgaaagacaagtacctcttttctgacacttcttactacttttacaggtagtaacagctacaaatactctcccagaagtggagggacacccatttgtgggtggggagaaagagggagaggttctatgtccacttgcttcattaagaatgttaaggtttaagaaagttgattctgcttggagaatttctcaagctttacatttttttttcactgaagaaaataaacaaactctaagaggtgtgcatatataacatttctttagatctttacctaaaaggaattttaatatattattggttgatgtaaattttgtttctgtggagttttgtttgttttgctttttgtagactgccatgtgcaagtaaaattcctgcttctgccatgttaaaattttaatatattttaaatgataataaacagagaaaacaaa

SEQ ID NO: 52655 - DNA, 342 bp, Homo sapiens
  misc_feature (1)...(342): n = a,t,c or g
aaaaaacaaaaactaactttcgatgtgatcataccaggaaagttttgcgtggtcaccatgccaagaaaatgactttggttgcccagcagatccacagcgactctttctcaagggctactgtggattctagattgaggaaaggggccacttaggactcagtgctggtatcctccacagtcctttctcccagactctgggccctccctttgggaacccagggaaatcccctcttagggttgacgcttgctgggntagggaaggacttnaggtctggttgcgccaaggggccttcaagtttaggaaggggccntgccttcagtgggntgattttgagcgttgatt

SEQ ID NO: 52656 - DNA, 371 bp, Homo sapiens
cattcttttagttacttaaaaatgtacaattaacttgctttgactatagtcactcccgaccagagaaaaaccctgtagacattagtcactcctcattctgtctcaaaccctctccctgaccctcagccctaggtagcaactacctagtgcgatcaatcccatatgcatagattaccatattgtggacatttcctataagcggaattgcacaataggggagctgttatgactgacataacacgtaggcacaatattttcaagattcgtccacattgtagggcttacccacagggggaaaccattttattggggggcttttagttaacaccggtgttttctccttccttacgtccttctttccttccttcctt

SEQ ID NO: 52657 - DNA, 334 bp, Homo sapiens
gcccaagcaattcaagacccagcaatactacaacgtcctgaagcagatctgtccagaagtggagaatgcccagccaggggccttgaagagtcagaggctcccagatctgaccacagtcatctcggtggatgcccctttgccggggaccctgctcctggatgaagtggtggcggctggcagcacacggcagcatctggaccagctccaatacaaccagcagttcctgtcctgccatgaccccatcaacatccagttcacctcggggacaacaggcagccccaagggggccacccctctcccactacaacattgtcaacaactccaacattttagg

SEQ ID NO: 52658 - DNA, 1812 bp, Homo sapiens
ttttttttttttttttaatgggaaactattggtgcctttttaataagttgtggtgaggagagttcaaattacagcataacagaattcgtttcgtgaattaatgcagtctgtagtaagcatatcatatagcagtattatccagttaaagaaagatacagttgaaaaacattacgttttaattctccatgagtaaagtgataagtaactataaaatcattattgggagaacatggaaacagtcaagcataacgaacttacagaaagataattatctccaaatttaggaagtacatgtacctgcctacccacctcttcaagcctatgcttaccacacgtgcaaaaatacaatacaatacaactactgcaattattactatcattttcttttgcccttaggtgaaaaacacctgacagctacatgctgagccatgctaacaaaactaaacctttcactttctttaatagtaaaattaccattactgaatcattgtcataaaaagtgcattcaagtacattaccacttattttaaataaacaccaattttgaaacaatcaactttgaaaagctgcataagttttttttttaatccctgattacatttctatttattcactgtggtagcctgaaacattgtatttttagagactaactactgcttaatttcttttttaaaaaaaacaacaacaaacctgtgtaatatagaacagcagtgaagcaagaaaaatgtgtgcttgtcacttatcttcaccatactgtacataagaactctgataaaatatggtacttgtgccacattagtatttgggaaaacataattaactcatagcacagagcacatggtttaccaacttactactgtaaaattcaaggtttggactttcacctcagttctgtattcaggctaccagagcatccccacggaggtcctcgggaggctttggacacaatcaatagcatgtatttttcatccaatagttaacaatgtgtgtaattaacactgactatgggactacgagtttgatgccagctcctgagttttcagtttatctcagtctactgtagaaaataacttgtatgccacagtacccaacaatttccatgctgctgcagtttctccatcaagaggatcagacccaaaacagaagcttctttgggggcttttaaaatcacattgggttgatcagttttgtttatccgattatatacaagcacctcaaactttcagcattccatttgatgagtggtatgcacatttcctaaaaaggtatcaacatctgaatttttttgtaaccttctaaaagaagtcatacttaatacagtaactaggaaaaaaacctcatctttataaagatcaaaaaaccaaaacctactaggaatgtgtgttttgctaaacagcttacttatgtttatagttgctacttacaaaagtgacaccagaaaagaacctgtattctgaatacagtgaccagagcagaatgtctacagcccttgccaatataacaacactaatcatgtgcttattgaaaaggacttccaaacatgtcaggcttctggtttatggatcagcagttggagctgtctgtctctctcacgttttcaatgctgtcttctttgttttctggttgaatttcgccttcatcctccttgtgttgagttggatctttttcagcaacctggtctttggtttggggttcatgtgtagaaacaggatctaaaactacaactggttcggcttgtttttcaccgtcaatgtattttttcctgcatccaatgctactgggaggctgaaacgtaaccttggaacttgtgca

SEQ ID NO: 52659 - DNA, 443 bp, Homo sapiens
ccttggcagagtctggggtccctggactgagccatcagctgggtcactgagacccatggcaaggaaacaaaataggaattccaaggaactgggcctagttcccctcacagatgacaccagccacgccgggcctccagggccagggagggcactgctggagtgtgaccacctgaggagtggggtgccaggtggaaggagaagaaaggactggtcctgcttcgctcctcgtgggcctccctcgcgggcgcctttcggttcctccttcctctaacgggctacaacctgttcggtggttgaattgcccccaccccggaagcacactttgctgggccaataatgggtttgcaatttctgctgcattgctgatggcctgctcgctccaggcaggagcctttgaaatgctcatcgtgggacgcttcatcatgggcatagatggaggcgtc

SEQ ID NO: 52660 - DNA, 1526 bp, Homo sapiens
gatggcggaggcttcgagtgacccgggtgccgaggagcggaagagttgctggggcccactgctcagtggagcgtggaggacgaggaggaggccgtccacgagcaatgccagcatgagagagacaggcagcttcaggcccaggacgaggagggaggcggccatgtccccgagcggccgaagcaggagatgctcctcagcctgaagccctcggaggcccctgaactggatgaggacgagggctttggcgactggtcccagaggccagagcagcggcagcagcacgagggggcgcagggcgtggaacagcggagagcccccccagtgcaggagtcctgagggggagcaagaggacaggcccggcctgcatgcctacgaaaaggaggacagtgatgaagtccacctggaggagttgagtctgagcaaggaggggccaggcccagaggacactgtccaggacaacctgggggccgcaggggctgaggaggaacaggaggagcaccagaaatgtcagcagcccaggacacccagccccttggtcttggaggggaccatcgaacagagctcgcctcccctgagccctaccaccaaactcatcgacaggaccgagtccctaaaccgctccatagagaagagtaacagtgtgaagaaatcccagccagacttgcccatctccaagattgatcagtggctggaacaatacacccaggccatcgagactgctggccagacccccaagctagcccgccaggcctccatagagctgcccagcatggctgcatccagtaccaagagttggtgggagacgggtgaggtacaggctcagtctgcggccaagactccgtcctgcaaggatattgtggctggagacatgagcaagaaaagcctctgggagcagaagggaggctccaagacctcatcaacaattaagagcaccccatctgggaagaggtataagtttgtggccaccgggcatgggaagtatgagaaggtgcttgtggaagggggcccggctccctaggcgtcccatctcgcttcctgggtctgcaggtccagccggctggcaccctccatgtacccaggggagattccagccagacacccgccccccggccctggctaagaagttgcttcctgttgccagcatgacctaccctcgcctctttgatgccatccgctgccacctccttttgctcctggaccctttagcctctctgcccttccactctctgaccaccgcccccgccctccccacccagctccgcttcttgttacttgggggaggaaagaaactcctgatcattggccaaagggacttacccctggagaggccaagtgccttctaggaagttaggaggttgagggcacagcctgtgcagagagggtgggtcacccccccagatccaaggggaaactgcaggtcaagggctgataacggccatgcaggatgcttgatgctgcgtcccccgctgcttgccgccccccaccccgccattttgtataataaagctccctgtgtattctcaaaa

SEQ ID NO: 52661 - DNA, 307 bp, Homo sapiens
gcggctgcctactactactactactactaaattcgcggccgctcgacctcttcttctgttggtccttgcttacagggaaactgtagcatattgctacacccaacacctagcttatgtgattcttcttttaggtttgccttcagggaacattgtgacatattgctgggccctgcactgataatttgtgactcttctgcctgtgatttgcccacttggggcattgtgacatattgctgggtttaacactcaggtgatgtaacttttatgcctaggccttgcttacaggaggcattttgaaatgtctttg

SEQ ID NO: 52662 - DNA, 4486 bp, Homo sapiens
atgagtggccccctagaaggggctgatgggggaggggaccccaggcctggggaatcattttgtcctgggggcgtcccatcccctgggcccccacagcaccggccttgcccaggccccagcctggccgatgacaccgatgccaacagcaatggttcaagtggcaatgagtccaacgggcatgagtctagaggcgcatctcagcggagctcacacagctcctcctcaggcaacggcaaggactcagccctgctggagaccactgagagcagcaagagcacaaactctcagagcccatccccacccagcagttccattgcctacagcctcctgagtgccagctcagagcaggacaacccgtccaccagtggctgcagcagtgaacagtcagcccgggcaaggactcagaaggaactcatgacagcacttcgagagctcaagcttcgactgccgccagagcgccggggcaagggccgctctggggaccctgggccacggttgcagtacgcactggcctgtgtcaaggcaggtgcaggccaaccaggaatactaccagcagtggagcctggaggagggcgagccttgctccatggacatgtccacctataccctggaggagctggagcacatcacgtctgagtacacacttcagaaccaggataccttctcagtggctgtctccttcctgacgggccgaatcgtctacatttcggagcaggcagccgtcctgctgcgttgcaagcgggacgtgttccggggtacccgcttctctgagctcctggctccccaggatgtgggagtcttctatggttccactgctccatctcgcctgcccacctggggcacaggggcctcagcaggttcaggcctcagggactttacccaggagaagtccgtcttctgccgtatcagaggaggtcctgaccgggatccagggcctcggtaccagccattccgcctaaccccgtatgtgaccaagatccgggtctcagatgggggcccctgcacagccgtgctgccctgctgattgcagagcgcatccattcgggttacgaagctccccggataccccctgacaagaggattttcactacgcggcacacacccagctgcctcttccaggatgtggatgaaagggctgcccccctgctgggctacctgccccaggacctcctgggggccccagtgctcctgttcctgcatcctgaggaccgacccctcatgctggctatccacaagaagattctgcagttggcgggccagccctttgaccactcccctatccgcttctgtgcccgcaacggggagtatgtcaccatggacaccagctgggctggctttgtgcacccctggagccgcaaggtagccttcgtgttgggccgccacaaagtacgcacggcccccctgaatgaggacgtgttcactcccccggcccccagcccagctccctccctggacactgatatccaggagctgtcagagcagatccaccggctgctgctgcagcccgtccacagccccagccccacgggactctgtggagtcggcgccgtgacatccccaggccctctccacagccctgggtcctccagtgatagcaacgggggtgatgcagaggggcctgggcctcctgcgccagtgactttccagcagatctgtaaggatgtgcatctggtgaagcaccagggccagcagctttttattgagtctcgggcccggcctcagtcccggccccgcctccctgctacaggcacgttcaaggccaaggcccttccctgccaatccccagacccagagctggaggcgggttctgctcccgtccaggccccactagccttggtccctgaggaggccgagaggaaagaagcctccagctgctcctaccagcagatcaactgcctggacagcatcctcaggtacctggagagctgcaacctccccagcaccactaagcgtaaatgtgcctcctcctcctcctataccacctcctcagcctctgacgacgacaggcagaggacaggtccagtctctgtggggaccaagaaagatccgccgtcagcagcgctgtctggggagggggccaccccacggaaggagccagtggtgggaggcaccctgagcccgctcgccctggccaataaggcggagagtgtggtgtccgtcaccagtcagtgtagcttcagctccaccatcgtccatgtgggagacaagaagcccccggagtcggacatcatcatgatggaggacctgcctggcctagccccaggcccagcccccagcccagcccccagccccacagtagcccctgacccagccccagacgcctaccgtccagtggggctgaccaaggccgtgctgtccctgcacacgcagaaggaagagcaagccttcctcagccgcttccgagacctgggcaggctgcgtggactcgacagctcttccacagctccctcagcccttggcgagcgaggctgccaccacggccccgcacccccaagccgccgacaccactgccgatccaaagccaagcgctcacgccaccaccagaaccctcgggctgaagcgccctgctatgtctcacacccctcacccgtgccaccctccaccccctggcccaccccaccagccactacccccttcccagcggttgtccagccctaccctctcccagtgttctctcctcgaggaggcccccagcctcttccccctgctcccacatctgtgcccccagctgctttccccgcccctttggtgaccccaatggtggccttggtgctccctaactatctgttcccaaccccatccagctatccttatggggcactccagacccctgctgaagggcctcccactcctgcctcgcactccccttctccatccttgcccgccctccccccgagtcctcctcaccgcccggactctccactgttcaactcgagatgcagctctccactccagctcaatctgctgcagctggaggagctcccccgtgctgagggggctgctgttgcaggaggccctgggagcagtgccgggcccccacctcccagtgcggaggctgctgagccagaggccagactggcggaggtcactgagtcctccaatcaggacgcactttccggctccagtgacctgctcgaacttctgctgcaagaggactcgcgctccggcacaggctccgcagcctcgggctccttgggctctggcttgggctctgggtctggttcaggctcccatgaagggggcagcacctcagccagcatcactcgcagcagccagagcagccacacaagcaaatactttggcagcatcgactcttccgaggctgaggctggggctgctcggggcggggctgagcctggggaccaggtgattaagtacgtgctccaggatcccatttggctgctcatggccaatgctgaccagcgcgtcatgatgacctaccaggtgccctccagggacatgacctctgtgctgaagcaggatcgggagcggctccgagccatgcagaagcagcagcctcggttttctgaggaccagcggcgggaactgggtgctgtgcactcctgggtccggaagggccaactgcctcgggctcttgatgtgatggcctgtgtggactgtgggagcagcacccaagatcctggtcaccctgatgacccactcttctcagagctggatggactggggctggagcccatggaagagggtggaggcgagcagggcagcagcggtggcggcagtggtgagggagagggctgcgaggaggcccaaggcggggccaaggcttcaagctctcaggacttggctatggaggaggaggaagaaggcaggagctcatccagtccagccttacctacagcaggaaactgcaccagctagactccattctgggaccatctccaggagtccatgagaggctttcttctcctatgtcccaattctcagaactcagatgtggctagaccaaccagtgggaaactgccccagcttctcccaccatagggggccggacccccatcaccagcctaggatccaggggctgcctctggcctcttagggagcagagagcagaactccgcagcccagcccagaggagtgtcacctcccacctttggagaggaatccttccctcccctggacaaagttgctgacaagctgctgaagtggcctctccatattccagctgagcctgaatctgactcttgagggttggggctgcacttatttattgcggggagacagctctctctcccacctcctccccagatgggaggagagcctgaggcccaagcaggacccgggggttccagcccctagctgctctggagtgggggaggttggtggaccatggagtccctggtgctgcccctcaggtgggacccaggcgttctcagctgtaccctctgccgatggcatttgtgtttttgatatttgtgtctgttactacttttttaatacaaaaagataaaaacgccaaaaaaaaaaa

SEQ ID NO: 52663 - DNA, 660 bp, Homo sapiens
  misc_feature (1)...(660): n = a,t,c or g
gggaaacttgaagagcaactttgttagaaaactgacaatgtcgcaagatgtactcagttttgtttctgtgtgacatgcaatggcaactcatgtggacactattgaagggatgtgacattacctcctgtagatatgctaacagtgttattctttcatttccaagggttctctgtggctttgtgtatatgtttcccagaggtcatttgattacctaatttactgaactgatttagcagggaatggaatccattccaactattgcacgtggatttcccagctgcccctaaatatatatacttgtgagtggcaaagtggcactaatgaagcttttgccttttgtacatttgagatttttgtatatagtgtttgctgcaaggcctgtggaattaattcgttgcatatagaggtatcaactgctgcatgttcaggcatattataaaactttagtctatggaaaggattaattataataaatgtccngggtgccaatactctgtaagtctattgggttcaagttacccgaggagatagggtgtgttccccttnggggggggntgggggggggtgtgtttgggggnattcntttgtaattgttttatnttccattttngggtttattttttaaaaggtgntaaaccccatatttaggcccntaattta

SEQ ID NO: 52664 - DNA, 715 bp, Homo sapiens
gcctgatctcggatggattccacatgctttttgactgctctgctttagtcatgggactttttgctgccctgatgagtaggtggaaagccactcggattttctcctatgggtacggccgaatagaaattctgtctggatttattaatggactttttctaatagtaatagcgttttttgtgtttatgggagtcagtggctagattgattgatcctccagaattaggacactcacatgttaacaccagtctcagttggagggctgatagtaaaccttattggtatctgtgcctttagccatgcccataggccatgcccatggagcttctcaaggaagctgtcactcatctgatcacagccattcacatcatatgcatggacacagtgaccatgggcatggtcacagccacggatctgcgggtggaggcatgaatgctaacatgagggggtgtattctacatgttttggcagatacacttggcagcaattggtgtgatcgtatccacaagttcttaatagagcagtttggatggttcatcgctgaccccactcctggttctctttttaattgctaataattaataatttcccaagtggttggttccactgattaaaagatgcctgccaaggttctactccctgaagattggccaccagaatatgaaaaaagaactacatattgctttagaaaagatacagaaaattgaaggattaatat

SEQ ID NO: 52665 - DNA, 414 bp, Homo sapiens
cccgggcccagatcttccggcggaaccagtcactggtacaagacatggactccatggtcaggctgatgaggtacaatgacttcctccatgaccctctgtcactgtgcaaagcctgcaacccccagcccaatgggggaggaatgctatctccgcccgctccgacctcaacccggccaatggctcctaccccttccaggggcctgcgtcagcgctcccatggggggtatcgatgtgaaggtgaccagcatgtcactggccaggatcctgagcctgctggcggccagcggtcccacgtgggaccaggtgcccccgttccagtggagcacctcgcccttcagcggcctgctgcacatgggccagccagacctctggaagttcgcgcctgtcaaggtttcatgggactgaagttctgtc

SEQ ID NO: 52666 - DNA, 434 bp, Homo sapiens
ggaagccagtgctacaatactttagcttcccaatacttaaaaacttttctgatgagattactagtgatattaacaatgtgattgatattgaataatgaaatgttttagcatttggaagatctgtttaattcagtaaatcagtattttccaaatgaccaatgcatgacatttcaacatcacgcacaggaaaataggcattcgaggtacagtcaaaaataatgagttttaatgtaacaagtacaaaatgtccattgaagtggtttcaaattccaaatagtaattggaaaatccaccactcgtgttttggggtagtagtatcgaaaaagaataaccaagataatttgaaaaggctattaaaaaatacttctcaattttcaaactgcatacagcaggtgctcattcatttctttgtaacattgatgagaaaaagactc

SEQ ID NO: 52667 - DNA, 409 bp, Homo sapiens
gatgtccccaagcaggaaaaaggcaaggaaaaacaacaggagggggcagtgctcgagccaggctgcagcccccagaccggccctgcccagctggagaccagtagtgaggtccagagcgagccagcagtccccaagccggaggatgacacttctgtccaggacactaaaatgtgaagaacagctcattgtgccccagtgatgaagttgctggacacatctttttgcaggtagcagcaacagttgtagcagcagcagacgaagccattgcagaggcagaatatgctgagtgtctggagtcagcctgaagacacagggtggattatttcctggcctccacaccaaacgttcccttgcagatggagactggatctgagggcagcagacttttatcagcttgagtttatgtcat

SEQ ID NO: 52668 - DNA, 392 bp, Homo sapiens
gaatttttcttattcttaatcacataaataattctaagtaatgatagcaacagcgtattcagttacatacacgtgtgtgtatgcttacgtataagtgaaatgagtggcagcaatgatgcaagggacaagagggaagaatgagggatattttgttattataaggtacttgtactactcatgatgtggtataatgttatttggaagtggatttggatagtataatacaaactccagagcaaccactagaaaaaataagagagaaatataaatgacatgctaagaaaggagagaaaattgacattatataaagtcctcaattaaagccacaaaaggcagtgaaagagtagaagacaaacataggaacaaacaacaagggcagcaaatagaaaaca

SEQ ID NO: 52669 - DNA, 657 bp, Homo sapiens
  misc_feature (1)...(657): n = a,t,c or g
tatcacctccccctcctcacacctggtccagcttacagtttcgttctgcgactggccctcccccacctgcccagcaatttcctcttaaaaaggtggctggagctaaaggcatagtcagggtacatgtgcctatcagacctttcccaaatcagccagcatttaggctctttcttgtcagaccctactaaatatatacaggaattcaaatatctaactctgtcctataatttaacctggagtgacttaaatgtcatcctgacttccaccctctccccagatgaacgggaaagagttttttctctagcccaatctcacgctgataactgccggcttcatgagccaggcctccaggtaaggcattagagcagttccctgagaggatccccagtggaactatcaggcagattccccagggtatagctcagtgagattacacgatttcttgcctagttgaagggctttaaaaggcagcataggaaatctgttaattatggacggaacctgaagaaaccacccaagggaaaggttggaaaacggcagccagtttcatgggttcattttaggcagcattcctggagacggttttacagccttngggacccagagggcaggnaaggccgtntttgtttttcattatgcgtttttattcantcagat

SEQ ID NO: 52670 - DNA, 590 bp, Homo sapiens
gcatttccaaacctgtgataaataacctataatttgttcattctggaaccattagtgctttataaatgtaaatttgttttacaatgatagttgaatttatttaaattatttctaaaacccaagcaataaattctcctgtcttgctcaaatgaataacatgacaatatatataaccactttcaataacaatataatgaaatctttgcttgtgtttttgataaactataagttttcttaagtgttatggaaatgtttacaagataccgaataaccaacatcagatatagtataaaggttttaaaagttttaaaatggacatagtttgctaaaaatatcataatatggttgtttttcaagctattaatgggtttttattaagattatatttaggagcagattaatgaatctgaaaacggaagatcagaataaaacaaaagaagggatcaagagaaaaatggaaaaagaactaaactatttcaacgctgtcgtagagagatctagtgccggctttactctctatttccctaacacaccccttgtaaaagaagctgaccactgtgtactgcatcaccaattctcttctttgatgc

SEQ ID NO: 52671 - DNA, 862 bp, Homo sapiens
ttttttttttccagttactttgctttatttgcagactgaagtgggctacataaatccattacagagtcaacacatgtagacttggcaaaaaggacaatacaaaaatacaactcttgacagtaaatgagactgccctcagctcatcccagtctgtatcagtgggaagccagtgtttaaggtcaacataggaggaagtgctgtggaatgaggaggcatgaaggcttccaccaatgtcactgacccagtaaaatcctggactgagttgcatgggctcttcttggctgtgtggccatttctgccgccttcaaacttggtcacttcctcctctaggaaggggaagagaacctccccaagtcatcggacaccctccacaaggatctgagcaggggcttgtgcagttcaaagccaagtgtagccctgggaccactgttgagcacctttccttggggcacctcccaccctgggctgttgcctctgggcatccccgatgaaagggctaagagacacagcacaaaggatcaacctcttcaaggctggggggaagaggggaagggagactgaggaaggggttctgcctgggcctccctttggtagattccagaaatgtttgctgatgccaacttctgcttctagcccctggtcccttcttggaggaagcccagttagcctcttggttctgaagaactcgagtcccaggccatggaaggcatccttagtcagagctggtcccagttcactgaccagaaggtctgaagggctagcatttctgtggaggtgggcaggtcttctggagcagcaggcggctctcccagttcttatggctggagctaggatcctcctctgcctataactccctcaattc

SEQ ID NO: 52672 - DNA, 424 bp, Homo sapiens
  misc_feature (1)...(424): n = a,t,c or g
tggcctcgtcccgcttcgctcggtcggtctcgcgcgcccccatagccttgctagagggttagcgttagccttaagtgtgcgaatccgaggagcagcgacagactcgagaccacgctccttcctcgggaaggaggcggcacctcgcgtttgaggcccgcctgcgtttgaggcccgcctgcgcttgcggcccgcctgcgcttgaggcctgtctgcgtttgagatctcattgggcgtgattgangaatttggggaggtttttgggcggtattgaggacgagggggtccgttagtcagcatagaatcctggagcgggaatccctcaccgtctaaatggcgtcgggggcgggacctccgggatctggcttccgcgggccgccgccggcccttgaaacgtgagggatagctgagatgaggcagctactgg

SEQ ID NO: 52673 - DNA, 2145 bp, Homo sapiens
attgtcgtcttctgtccaagttggtcgcttccctgcgccaaagtgagcagtagccaacatgtcagggtgggagtcatattacaaaaccgagggcgatgaagaagcagaggaagaacaagaagagaaccttgaagcaagtggagactataaatattcaggaagagatagtttgatttttttggttgatgcctccaaggctatgtttgaatctcagagtgaagatgagttgacaccttttgacatgagcatccagtgtatccaaagtgtgtacatcagtaagatcataagcagtgatcgagatctcttggctgtggtgttctatggtaccgagaaagacaaaaattcagtgaattttaaaaatatttacgtcttacaggagctggataatccaggtgcaaaacgaattctagagcttgaccagtttaaggggcagcagggacaaaaacgtttccaagacatgatgggccacggatctgactactcactcagtgaagtgctgtgggtctgtgccaacctctttagtgatgtccaattcaagatgagtcataagaggatcatgctgttcaccaatgaagacaacccccatgggcaatgacagtgccaaagccagccgggccaggaccaaagccggtgatctccgagatacaggcatcttccttgacttgatgcacctgaagaaacctggggggctttgacatatccttgttctacagagatatcatcagcatagcagaggatgaggacctcagggttcactttgaggaatccagcaagctagaagacctgttgcggaaggttcgcgccaaggagaccaggaagccgagcactcagcaggttaaagctgaagctcaacaaagatatagtgatctctgtgggcatttataatctggtccagaaggctctcaagcctcctccaataaagctctatcgggaaacaaatgaaccagtgaaaaccaagacccggacctttaatacaagtacaggcggtttgcttctgccctaggcgataccaagaggtctcagatctatgggagtcgtcagattatactggagaaagaggaaacagaagagctaaaacggtttgatgatccaggtttgatgctcatgggtttcaagccgttggtactgctgaagaaacaccattacctgaggccctccctgttcgtgtacccagaggagtcgctggtgattgggagctcaaccctgttcagtgctctgctcatcaagtgtctggagaaggaggttgcagcattgtgcagatacacaccccgcaggaacatccctccttattttgtggctttggtgccacaggaagaagagttggatgaccagaaaattcaggtgactcctccaggcttccagctggtctttttaccctttgctgatgataaaaggaagatgccctttactgaaaaaatcatggcaactccagagcaggtgggcaagatgaaggctatcgttgagaagcttcgcttcacatacagaagtgacagctttgagaaccccgtgctgcagcagcacttcaggaacctggaggccttggccttggatttgatggagccggaacaagcagtggacctgacattgcccaaggttgaagcaatgaataaaagactgggctccttggtggatgagtttaaggagcttgtttacccaccagattacaatcctgaagggaaagttaccaagagaaaacacgataatgaaggttctggaagcaaaaggcccaaggtgggagtattcagaagaggagctgaaagacccacatcagcaagggtacgctgggcaagttcactgtgcccatgctgaaagaggcctgccgggcttacgggcttgaagagtgggctgaagaagcaggagctgctggaagccctcaccaagcacttccaggacttgaccagaggccgcgcgtccagctgcccttccgcagtgtggccaggctgcctggccttgtcctcagccagttaaaatgtgtttctcctgagctaggaagagtctacccgacataagtcgagggactttatgtttttgaggctttctgttgccatggtgatggtgtagccctcccactttgctgttccttactttactgcctgaataaagagccctaagtttgtactaaaaaaaaaaaaaaaaaaaaaaacc

SEQ ID NO: 52674 - DNA, 377 bp, Homo sapiens
cataaatgatgctcaatttctatgacaagcacagggcttgtcataggaattcaataagtatacaaaacatgacattttaaaacttggaaacatgtgcctgataaaggactgttatccaaagtatatagagaacacttaaagctcaacaatatggaaataggcaacctgattaaaaatgagccaaagactttaatggacacctcaccaaaaatgatagatggcaaataagcatatgaaaagatgctccacatcatctgtcatcaaggaaagtgcaaattaaaaccataagataccactgtacacctatttgaatgcccaaaatccagaacactgggcaccaccaaatgccgatgatgatgtggagcaacaggagctct

SEQ ID NO: 52675 - DNA, 339 bp, Homo sapiens
gactcttccaagattcacaatgatatggtgaatccaaagactggaaccaaaaagatttactcagtgctttagttttaacaacagtaaattgtctaccaacacccatcatggctaaaagtgcggaggtcaaactggcaatatttgggagagcaggcgtgggcaagtcagctcttgtagtgagatttctgaccaaacggttcatctgggaatatgatcccaccctcgaatcaacctaccgacaccaagcaaccatcgatgatggaagttgtttccatggagatactagacactgctggtcaggaagataccattcagagggaggggcacatgcgaaggggg

SEQ ID NO: 52676 - DNA, 945 bp, Homo sapiens
tttttttttttttttatgagaaaattatgctttttattatagtcacataaaataaagtcagttacatcaagttgtccaaatgcattggtgaattaatgccgctaacgcttacaaatttttatacatatatctatgcatttataaatacatacatatgtaaaagatatatattttctactaaaataaagtacccaaatcttgatatatataggggcataatgggggagaaaagaatcataaggttttatcagttgtagactgtactttcagaatacaagagtctgttttagacacatttattcagctgtaatgaactttaatcacccattcttttctgaattctcctaagtgagttaatgtatccaaaatatcaaaataagtcatgtggcaaacttaatgaatcagaggctaatttttcttactgtacctggctcaaagtctagacttcccaatggaggcatggttaagctccattcttaatttgcttgtcttttggactgtggtttttctgctaaggtgataaacaaatcagatgtctctaattctacatcttctactagcattcaataaagtcagggtttggtgaaaagacttccaatgtttttatatcaccctgacttgatgaaaaaaggcccagcaggatgtgaattttgtgtcctattgcctttgttatagggaaaatattgtttgagccaaggaaggagagttagggtgtaatgatcaatagatcattgagagaaccaactcaaattgaaatgaattctctgttatagtgaaaaacattagtgagaagatgcttgaactgaagaacaaaataaaattttaaagaaaacctagatgatattagataattcagaaaatcctcacttcaaacagaaactagagttccttctatttcctgttccaatagctcagcttcttctcctgtgtttttactgtattttc

SEQ ID NO: 52677 - DNA, 2193 bp, Homo sapiens
  misc_feature (1)...(2193): n = a,t,c or g
ttttttttttttttagtgtgattgcatttattcttataaatgtacagagctgtagaagtgcaagccaagagttctatagagtagtacataaacaccatatggtaccactcctgctgggaggtaagcctggatacacccctctcctcaggaaactgtcacctgcagaacacacagcactcagaattaaggcagtttggccctgggcacattggtggtattttggtatgtggccactggccctaaacaactgaccatttctaccctgcctcactgcactgtcccaccaggtccctcccagctttttctacaaggtaacaccctcctacatggggtcagccagctcagaaacctcttcttcagggacagttgcagctgaatatgccagagctgattattacaacaacgatgcagagggccttggttttggggtcctgccaccctcacccctagaagctgctaaacacccaggccattctgccctgaccacctccccaacagagatgtaggtctatacttaccttccacagccacctcccagcacacactgggtccctctacctgtgttgctgtctttctttacactgtgctacatttgatcccgtttccacatgtgcacttcacctctgcagacacaagaaaggcctggacatggtctctgcagatggggaaggggttctggatggagatgttcttgagctctacaagcatttgcacaaagtgctcagaatgttggccactgcatagagctgcagagtcccattccagaacagagtaaccatctgcctctcttcccaagaccccaagctggcatgactctggtctctgtcctatctctctgctgtgatgctcctagctagtagagtaagtcagcccccagatactgtatattcctctcaaccttccatggtttgagaaaaacacaaagatagatgtccatcaggcactcacaggattaccatcgtaaggatggttgtcagacaaataacaaataaggccgtatctttttattagacttgctcatcttctagtcaccccttgtggtagagcgaaaagagtgtgttgtccctctcatgcctctggtggtcacaggacactgagtaaagcaagagactggatactttcccatgtagaacctataccccaatcccgactattgggctgggaaccctgtctatgcccattcaaagctcaccatnnnnnnnnnnnnnnnnnnnnnnnnnnnnnnnnnnnnnnnnnnnnnnnnnnnnnnnnnnnnnnnnnnnnnnnnnnnnnnnnnnnccctgtctccaacaaaacaaagcagaacgctcaccatggttctgagttaagccaaaaaacaaaacaaaacctgttggaaaaattctagaaagaggcttggtatagagtatagcaagatatactctccaatttgtgggtagggggtgtcacagcagaaattatgcctatttctgctgtttgggctgggggctgaaagaggctgtgtcacacccagaggtctgcttaaagcccaatcctgagtatccagtaaggcccatgctgtgaccagaagaatctggcaatagaatggtccatgctggagtgaagggaggccctctacactggtggactgatttcctcaggcaagggtctaggagctgggcttaggtctctcttacccttcctgtctgtaagcctcagtctaggacaaagcccacacagctgtatacccactctcacgagtccattgctacttctcaaaagtttaaaaagtaaacaataggaaggcaccggactgctccctgtagctccctctgctggtaataataaaaactgcaggcttctggggccagccccagtaccttcgacctaatctttagctcaaagactgggtgaagaaactcacccagaccaaggaaatacaaataaataaatatgaacatgtcagagcagtttttctctaactagggaagggcaaaccagaatcactaaactcacccggacggttggaccagttggggatgccccaggtccagggattctggaagccaggatcctgctgtatcattaagcaacctgctatgatccctgtcatagttagacaggtgcaaccttggagggtaatgtctactggagggtacaggaagaagagtccccaagacagcaccagcagcaggagcatgttgaagaggccatgggcttaggggggatgaggtc

SEQ ID NO: 52678 - DNA, 1249 bp, Homo sapiens
tttttttttttttttttacaatctggaatatataattttaattagttctcagcagtgcagtaaatgaacaacacttattaataattaatttgggagagaatagcaggaggaaaaatataaacagtagctttttgtgaccatttttaagtagctgacatctcagtatgtttctggaatgaacaaattaagggtgtattgtatatagtgatttaaataatcagctttcttatagtcttatcaactgagattataaaattgtaaacacaatttttccatgtttacatctactagctttcatttggacacgttaaaccatacttttccattatgtagttaattcatttcttgagtgcctgcctgccattagatgccaggtgcttatctaattttccagttagttactgttcagcttaagtcactctacttggttgtcaacagtagttaaagcagtatcttaaaccagaggtcaaaattaaatcaatattttgattcgaaatgattacaaacatatccaaaggtcataaaatgctactgagaagagttgtgtttaaaatgcattttcttcttacagataagctgtaatatatacatgcgtatgtagctatatacctttgattgtggtagctacacctgaaaaatcttttctcctcagatgaacttacaaaattcaagagaccaccactgatacaagaccgtctaaagttaaaataaaactgagtgacttgttacacagtgagacagaaaaactgatatacattattaactttttcaagtaatgttatgtacagttttattgccagtatatgcacaacagtaagcatagaactataaatacacaatgtaattaacagtagaaaacaaaattgttacaggtagagggagaggatatagagaaacttttcctgctgctagaacagaaagaaaggggaaagcctatgacaaatcatccattcagtactcttgtcttaaattctttacatatatttctacatttttttcagttaaacaaagtacagataactctgcaacaatggcaaactgcttccctaatagctatttgccttttcaatcaaattcactttatattaggattaaaaaaaagtaaagatgagaaatcattagtatcctggttccaaattatctaatttagcctttcaccaaaactggtaatttttgagtcggctgcacatgaaaagaatgggtgtagcaagaggtgattaaaaaaatttgctaaaaagtaacagaaaat

SEQ ID NO: 52679 - DNA, 156 bp, Homo sapiens
ccctttggggacctgcacacccacctctccgggggacttgacaaggggccctgaggccaagggaggtcactcctccctccaggcccctgacttttactttgtggttctctaaaaaccatgtacacactttcactctattgtaaccacacagggcag

SEQ ID NO: 52680 - DNA, 397 bp, Homo sapiens
tgaagataaattatcaaattgcctctttaatgctccattgcctacagatatcatatccactccaatttgtgggaaccagttggtggaaatgggagaggactgtgattgtggtacatctgaggaatgtaccactatttgctgtgatgctaagacatgtaaaatcaaagcaacttttcaatgtgcattaggagaatgttgtgaaaaatgccaatttaaaaaggctgggatggtgtgcagaccagcaaaagatgagtgcgacctgcctgaaatgtgtaatggtaactctggtacttgtcctgatgatagattccaagtcaatggcttcccttgccatcacgggaagggccactgcttgatgggcacatgccccacactgcgaggacagtgcacagagctg

SEQ ID NO: 52681 - DNA, 243 bp, Homo sapiens
ggaaagaatattcatttgagtgtttcaggaagtttggattttttttttaccaacatattatttgtaaaaggagggaaatcagctgcctcaggaggttcttaacatataggaatgtaattatcagattcaaagctgaacagtagtgcgttgccctgtaacctaagtcttggctgttagcaaagaaaagccagtgtctggggtattggttccaggaccttccctaataacaaaatcccaggatgt

SEQ ID NO: 52682 - DNA, 235 bp, Homo sapiens
agctgtttccctgaagtgacaggctcacttcatttatttttgagaaaatgtttgccagatactcaaaagtttgtctgtcgctcattctttgaagtaaaaatggtgttcatgaaaaaagcagctagttcaacttacaactcaggatcatgtattttagtctgcactaaagagcttctcatcttactatacacactattaaaaagatgtatcttcaagggtttgagatttagtaaaa

SEQ ID NO: 52683 - DNA, 682 bp, Homo sapiens
tttttttttttttttttttctcaatatacctttgtgatttttatttttccttccaagtgagttggtatttttaacattttctacagacagaggcaagtttgaaacatccttgtgtcagtcttggaacagttcacctgctaaaagtctttgtggatatgacatgcacagctaaaacagtactttgccatttttcctttttgtttcatttttgaaagtagaaagccactttctttttcccctctctttctctcagcttcttatgaagattcccagtataaatgcaacagctggagttacctacaaatatacaaacttgtatctatccattgggtcttcctgttgcagctgactctctcgcattgtctgatattctttctcatatttcttcagcttcttggttggtactttaatattgcaagcctgctccatcagtcttcttgcattttcctctgccctgtatctctttggaagctgaactctaaagaactttaaagcaccttcaaaatcagcctgcagaaggtcttcctttgaggtcgccagaagccgaggcacaaacagacgatgccccatccccagaagttccagcactcgacacgcatactcattcaccagcttgctcctctcgtcgtgcatgtcctgggactttttgacaggaggtgtgagcttagcagctggggctggg

SEQ ID NO: 52684 - DNA, 968 bp, Homo sapiens
ataaccatcattttgtgaaggaagaagctctgatttgtagtgtattttcatgatataaatactctgatcatggcctatcaatgggatgctactgaataggaggtagggaagaaatgtcacacttggctctcttgagctggtaggagccagctccagcttaccactgattaaacacttaaaaccatatttgaagtcactggccagttgatatcacataaaatgtaaagtataggtgtttattcattttgaaatgccttggtatttcaggtgctaaaatgatgtattttctggacaagtcaaggcaggagaaagcaattgctatagccactagactagatgaaactataaaagataaagatgtaaagacattaataaaggtttctgaagcactgcttgatggcagctttgggaactgtagttcccaatatgaagaatataggatggcctgtcataacctgcttccttttacatctgccttcttgcctgctgtgaatgaagtcgacaatcctaatgtggcactgaaccatacagctaattatgatgtcttggcaaatgaaatttgaaatcttctagaaagtagactcctatagactcaaagctgaattgagatcagggtttcttttccaggttgcattttaatatacggtatgaaatgaaatatttggttaggatttttaaatggcatattctgtaagcttattttgttctttacccgacctgccaatttacataaccatctgttaaaattacctgtttattcttacacagttttgtggtagctccgatcgcttctgtataattataatttcttactaagctaagttgtatacaaccccactgtattattttctttagattctgatttcaggatctgtgctttgattccttgtctgttttatcgtatatttgcttgctttttaattaaagcacatcagttttaaagtgttaactatatgttaacaatatgg

SEQ ID NO: 52685 - DNA, 656 bp, Homo sapiens
gtgatggatgtcgtcaattatttccgaaccgtgggatttgaggagcaagctagtgcttttcaggaacaggaaattgatggaaaatccctgctattgatgacaagaaatgatgtgttgacaggacttcagttaaaattggggcctgctctgaaaatctacgaatatcatgtaaaacctctgcagacaaagcatttaaagaacaactcttcatagtacagtcaaattggggtcttcgacctcaaaaaaatacataatgacataatttagtttcatgtaatgaaactttgtaaacagaatacatacatgtgtatatgtaaagaatttcaatcaaatgaaacgttatcctattggatagactaggcaattcatcagctcacctgaaatcagccaggaggagcaaggacaagatgcgcacagggtggttttcctcatggattttgtcaaatagatgatctttgacacgattagacactcctccccacaaaggctttgaaatcataaggattttcctcatctctttatagctttcccaaaatcttttaaaaaagaatttaattaaatgacagtcttttggttacagacttaggatgagtaaaaacaagaaaatttggggagggggagaaagaagaaagggattgctgtctcccttgaattcc

SEQ ID NO: 52686 - DNA, 441 bp, Homo sapiens
taaagataatccatttttgataaattagaatggaaacagtgtctctataatatacatacaaaagtgtccagttttcaactgtgagcaacacaggtgcacagaccaggtgtcagcgcaggaacccgacggcaggcatgctgatgccccccatttcccgccactcccgacagctccccgggcatggccccgattcccgccactcccgacagctccccgggcatggccccgattcccgccactcccgacagctccccgggcatagcccgtgattgcctggcctcagccctcggccccctgcgtgggcggctcctccccggcctctggtttcttgtgcctgcgcatgtgcctgtacttgtccacgtacgccttcaccaggttggccaccttcacggggttgatctctccactcttgctgtggcagatcttctgcacggccttgcg

SEQ ID NO: 52687 - DNA, 340 bp, Homo sapiens
  misc_feature (1)...(340): n = a,t,c or g
ctcgtgcacattggactcatttgggcagttttaaaagcttcacactaaatccaaagcctcgtcctttgggtcgtatgtagtcgtttgtaaaatcaatttctggcttctgagtcatcctgggtcatatctctaggcaatgtttttcttgaaattctgaaaaatgattcacatatgtgtgtacatttaattcacttagatgatctgtaaacttggatggtatttattctaaatggggaaaacaattttatatggaaaaatctatgtaatttataatgggtttgttttatatattatattttcatatctctagggcacatctatcctcatctttttgnatacc

SEQ ID NO: 52688 - DNA, 321 bp, Homo sapiens
tttgtaggtataatgagttcatattatttattttataacatttgaaatttttttttaaattcatgtttcttggtctttttcagtgactcaaagcagcagaagctttttaggatgttcagcatcaatgaggtaagccttctaacaatattatcttctatgagatcgacgattcacaggaatgggcctccagaagccagctgctgatccataggaatgggcccccagaagccatatttattccaaatgtctcctcactcttcagccatagttgattgaaacaggagcgaacacttgaatggagtcaattattctccccctggt

SEQ ID NO: 52689 - DNA, 344 bp, Homo sapiens
  misc_feature (1)...(344): n = a,t,c or g
ggctggtggccaantgcagccgctccagggcccgggcaggcgagctgtggctgccgcatgggacagtggccactcctgtgttcatgccagtgggcacgcaggccaccatgaagggcatcacgaccgaacagctggacgctctgggttgccgcatctgcctggggcaatacctaccatctgggtctaaggccgggacccgagctgatccagaaagccaacggtctccacggcttcatgaattggcctcataatctgctaacggacagcggcggtttccagatggtgtcgctggtgtctctgtccgaggtgacggaggagggcgtccgcttccgctccccctacga

SEQ ID NO: 52690 - DNA, 1148 bp, Homo sapiens
tttgaagcttttatcaactttaattgatataattataattggtatgcaatatgtcttacaacaaatgtggatacaatgacatcaaatatcaaagaattttcccacctttccatctttaaatgacttcagctaacttaccccaagagaaaaatctggcattgatctcttggttagcattattaccaatatcaactagcactattaaaatcaaagttgaaatggtacattcatttgccaaaaaaaaaaaaaagaaaaaaaaggcttaaaggcaagaaggtgaatcaacgtgcaaattagcatctggcccaattgcaaaattcatttcctggatgtgagggattgaaccatgcacacttgcaagcaagatgaagggcaaacagatgacatcaaatcaaaattaaccccacaaagaatccagaagacctcagatggtaaaggacagaggtctacgtctactgctgttagtgctcaggtatccatcctgttttccctaatctcctgattctgatccaagagtctttgagacctatgtcctaggccatcctttcatctagaaatggaaaccatggctgtggcaccaggcatggtcaaccctgcagtgattcagctgcacaaaggggtagtccagagcttagatagctgtctgatgtggctaggacacaactgtcattttatggaataagttaaaacaacacattagtatcacagcaaacaagaaactgagatcacttatatatctatgtaatagttaaactgtctataagtatttttctccagaaactgaaaataccatagacataattttattaatcctcacaacacatctgtgaggtagtatggggtgaggtccaatatgaaaagcatcaaccccccatttttagaaatgaaagaacacagacgtgccagggagggcaggaggtttcactggggccacaggaaaagaaaacaaagttgaatcccgctctttcatcatctgcagtcgatggccgagaagaggcggcttgcctccctcctgctctgacattctctctaaagtgttatgactagacctatccatggataggatgtggttgtttagacccactggagccatttcctttaggcagacctggacaggtgctctccctgaggtcaaagacgtcaatttt

SEQ ID NO: 52691 - DNA, 204 bp, Homo sapiens
  misc_feature (1)...(204): n = a,t,c or g
ttgacatgtgtcatctacgtttgaaggtatgacaggtcattttttacttactgtccactatggacatatttagtatgtgccctgattattctaaaatcttaaagaaagatgcatatagtgaaattttttaaatggatatacttttattaatgttttataactcactgactgcacatatttcantngtatatgagnatnnnnttt

SEQ ID NO: 52692 - DNA, 915 bp, Homo sapiens
atcaagtaatagatcacatattgtgaaactgccagttaacaggcaattgaagtttatgcatactccacatcagttccttcttctcagcagtccaccagccaaagaatccaattttagagctgctaaaaaactctttggaagcacctttgcatttcatggctcacacattgaaaactggcactccatcctgaggaatggtctggttgttgcttctaatacacgattgcagctccatggtgcaatgtatggaagtggaatctatcttagtccaatgtcaagcatatcatttggttactcagggatgaacaagaaacagaaggtgtcagccaaggacgagccagcttcaagcagtaaaagcagcaatacatcacagtcacagaaaaaaggacagcaatcccaattcctgcaaagccgtaacttaaaatgccatagccttatgtgaagtgatcacctcatctgacctgcacaaacatggagagatatgggttgtccccaatactgaccatgtctgcacacgattctttttcgtctatgaagacggccaagtgggagatgcaaatattaatacacaagaaggaggcattcacaaagagatcctccgagtaattggtaatcaaactgctactggttaaaggaccaccatttaattaacatgattcgaaagccttcctcgggttcaaagctggattttgaactgaagaagattataaaattatttattgttattataaacaaaattaaccctttgaatactgattttttttcttagtatttctaagtatctcattaaatacctaaaatggtataagatttatcaattgtagggttatggaatctagtaataaaatttcaacagcacttaaactgaagtttgggttgctcatacaataaacagattgaaaaaacaaaaaaaaa

SEQ ID NO: 52693 - DNA, 2193 bp, Homo sapiens
cctttttttttttttttaacttataaccactttgaagtttattttacagcactttaattgaaacattatttaactactgaccaggactgtttacaaatgcaatgcttggccttcgagataattaaaaacctttaagtactaaaattttacatcatgatttaacttaagtgttatgatggtgaaaacagaagaaaatctaaagcaaacatataatgatttccacaaaaaccatgtatttctcccttatattaaagggaggaaagaaggaaggaaaaagaaaaggaggggaaaagcgggcgagaagaaaaggaaagagtgcatgataagcaagaaaaatacactttccccccaattcgcaaaaagaagggaaacgctgaggtctcagcaaattaggtattcaactgagtcagtttatattaaggcattttctttacatattattgaatcccatcatgcctttcatgttgccagcagcaccctgttgaaactgcctcatcattgactgaagtcctgccataccacccatgtgatgaagaaccctaggatccatcattttggccatttgttggttcaattttgccatctgtgactggctcacattcttagacatgtcgccacctttgaaaagtcctttgatacctcccatcttttttaccatctgtgcaaacttggtatattgtgtcaaaagttcttgaacatctcttgttgatacacccgatcctcttgctactctttggaatcttcctggttgtttactaaaaactttggcaccatccgtactgtctagttcttgatcattcatactatccattattgtcattaatttctttagccttgccattgactcctgttcatttcctttgctcataaaatctgtcccaaaaccagggatcatccccaagatctgactgaaggggcccattttcatgatattttgaaattgctcatacatgtctcgcaacgtaaactgaccatgtttcaacttctctataagtgcttcattgtcatccaacttcaactcgttgactttatctatcagtccttcaatgtcgcccataccaagaagtttgctaataaaaggctgtgttttgaaaggttcaaagtcatctatatgttcccctgtaccaatgaaaataatcggactttttgtggcagcgactgcactgagtgcaccacctccttttgcatggccatcaagttttgtcactattactgaggctacatctactttatctttaaaagccttagcctgggcttcacaagcctgcccaatggaggcatccatcacataaacaatgttatcaggttgtatagcattagcaacttgaagcatttcttcaaacaaagagtcttcttgtttgtggcggccacttgtatcaacaataataatttcaaaattttcatttttaaatttctctactccttcagaagcaatgatgacaggatccatttctgtatagcttccataaaatggaattcttgctttggtagcattctgttttagttggtcaaaagcccctgctctgaatgtgtctgcacatattaaacaggtcttccaacctttcctctggtaataatatgctagctttgaacatgttgttgttttaccactcccttgcaatccaacaaacataatcacattttgttttcctttagtgggtgtccatgccttaactccagggtctacaagcttcacaagttctttaaatacagcatgctgaatcatttttcttttgttaagaccagatgccatctcttcaagatcaatagcagacttaacattttctcttagttgcttcactagtttaatattaacatctgcttccaacaaagcggtacagacttcttttagcatagcattcaatacctcttcattgataatggtggcattgctcaacgagcgtaatgctgatgttatttttcttccaaggtctgctagaaccatcttgacagctttaagatgtacttacgaagaactcgcaaaagacaccgctaaagccgtggccctgaggggccgggaattccttagcgaggccccacgccgtcggaagaaacccaagaaagctgggagcagacagacaggtatgaccccacaacccaacttcccgaactagataaagtagggtcccaacgcccagcaccgcgtcgtcaactcccaccagctggaagaccaacggagtgccagctcgtgcc

SEQ ID NO: 52694 - DNA, 788 bp, Homo sapiens
ttttttttttagtaattcttatggtattgctgggtctctcaggaatatgtatcatttgattttgagcatgtggggttaaggtattagattactaccacaaaccgtagacccctgcatggcaccacatttattttcaggagtagatgttacatggcaggtatcaaaatgtgatgatcaattctgtgttttctgttgattaaacctcctcatttggttaaatagccagtgtataccagagagttctacacaggtcaaaattatatcacttttagagcagcaatacgtgatccaaggttttcttgaaggtagtgcaaaagatgcagttcataatgttctcccgattcaggaactcttatgctgtgtctctcctgaggatagatctgtaaatcatatggctttccagccctcactaaaaaactcagtaatatactggtatgtgcaaaatggacattctcatccaggaaaccatgtaagagcagtaaacgatttggttcagaggggaacttttctgcttgcatggccacagatcctaagtaatagccctgttcattctggtcagggtgacccatataacgttccgtgtatcctgtatcatagaagatccacagagtgactggggccccagcaatagcaaccctgaagatatctgacctctgcattaatgccatcagggagaggtatcctccataggaccagccgtggatgcccacacgatctaagtcaatgaaatcatatcgagaagctagatattggatgtccttccacctgatcgtcaatttctatttgac

SEQ ID NO: 52695 - DNA, 731 bp, Homo sapiens
ggagaggtgtatgtttcgggaagcaacaagcatgggcaactggctaatgaggctgctttccttcctgtgccccagaaaatagaagcacattgtttccagaatgaaaaggtcactgccatctggagtggatggacacacctggttgctcagacagaaactggcaagatgtttacctggggccgagcagactatggtcagctagggaggaagttggagacttatgaaggctggaaactagaaaagcaagattcatttctcccctgttcaagaccaccgaacagcatgccttgcgtctccgcattgcttaactggagcaactgaggtctcttgtggctcagagcataatttggcaataattggtggagtgtgttactcttggggctggaatgagcatggcatgtgcggagatggcactgaagccaacgtctgggccccaaagccggtgcaggctctgctgtcatcgtcaggactccttgtgggctgtggggctggccactccttggccctctgccagctgccagctcaccctgcattggtccaggaccccaaggtcacctacctttccccagatgccatcgaggacactgaatctcagaaagccatggacaaagagagaaactggaaggaaagacaatcagaaacttcaacccaaagccaatctgactggtccagaaatgggggactgtgatagagaatctttaataaagtggcttttttttaccaaaaaaaaa

SEQ ID NO: 52696 - DNA, 721 bp, Homo sapiens
tattgacactgagtttataactctttaagacaaaattagaagtggaccaataacaaaatgttcatccaaacaaaggaaaaaatgcctgccaaaattgtatatttattattacagttaagcctatttaggtagttcaaatcaaatacaagagaacacatcaggtcatcatattttttttcactgttaaaatgaggtattctggctttacaatgttgtaagttgaagtaagcagtttaatcaaagttacaagaaagaagacgagatatatacttgggacaattatttcctaggggtaaaaagccaagtgaaatgtgtatgaataagataattaagccacagaatacatttccagaatatccaagaagcatatgtgcaaaattttaattcctaaccttaaaattgggtatactttattattattatcattttacttagcaaacaacatgcaccatactgtaaaacaagcaatacaggacaaaatagcatatctattagagcatttatcaggttcacgtatcatctgaattgaccaagacttattttcactatgacaatttgtgtatttttctaattgctcatcagtgaggttaagtagtacagttggcatatacacacaaagaatgcatacacaatctgtatttaatacttattattatattggggtataagttactaagtataatagcagcaaggtaccactatttctagaacatgttctaag

SEQ ID NO: 52697 - DNA, 322 bp, Homo sapiens
ctcacgcttgctgagacagaagtcacagcaggattatgcccctcagggcaagaggaagagttcagaaactgccgccgtaacccaagaacaaagttgcatgcagagccaacctaagagcttcaaaatcgggattccttactgagaaagatgtataacataaaacagtcaacagataccaaggaagcagcagccatcgaggctagaagaaatcgagaaaaagagcgacaaaaccgattcttcaatgtgcggaaccgagtcatgggggtggatgtccaggccctgaacaaccaggtgggagaccgaaagcttcggggaagcagca

SEQ ID NO: 52698 - DNA, 602 bp, Homo sapiens
tggggacaaagcttctttgaagggtcttttcagaaaatccccgctaaacgaattggtgttcctgaggaggtctcctctgtggtctgcttcctactgtctcctgcagcttccttcatcactggacagtcggtggatgtggatgggggccggagtctctatactcactcgtatgaggtaccagatcatgacaactggcccaagggagcaggggacctttctgttgtcaaaaagatgaaggagacctttaaggagaaagctaagctctgagctgaggaaacaaggtgtcctccatcccccagtgccttcacatcttgaggatatgcttctgtactttttaaaagcttatagttggtatggaaaacatttttcttatttttaagtgttattaattatatctatggaaaaactattcctgaaatatatacagtcttatgtcccaatcagagtcttttaacctatgatttaaaaatgtataagtaacagaaattaacatattttaatgactttactttttatttctaagaaaagtatttgaaaaatggaataattttaaatcaatgataattctagggatcatgaactcccagaagattttattattt

SEQ ID NO: 52699 - DNA, 989 bp, Homo sapiens
  misc_feature (1)...(989): n = a,t,c or g
gaagactgggctctcttgtgtgccaggcacagtatggaaggcttcatataagttaagctgaaattagccctgttttacatacagcttcattttacatatgaggaaactgaggctttgaaaaaaatgagatgtcttgtccaagatgaaaagtagtagattcaaccaagtcctcttactctaagcccaacgcttttacccaaaaccccagagtcctcatcagggatgccaaatggttctagacccagtggaggttctggagctgccactggggatttaatttcttttgatttgctaaagatttgacctgactgaatggagaggtagagtgtagtgtggccaggacaaggtgagggaggctgtagagacttaggactttaggccaaccacctccaggaaatcctgggaaatgcaatgtgacagctcgggctctgcactccagggggctgtctggtgtccacatggaccttctccatgtgggacacagctggaacaagggggcaggggcctgcaagcttgggatgcccaggtgaatatgggcagctggacaaacaacactgggattgagtcagatagaaggggcccaaggactccagggctgggaggaccagaggctgggagagagggctcttacctccttaggcctccccaaagagcggttagggatgctgcccatggatggcatggcagggggaaccctcctggaagaaaatccatctcttctgaagggatctgagatgcggctggtttttcaatggcagaacttccctctgcggcgcgactccgaatccatgacatctgagagtcttcctgaccacaaacctctgggatcccgagggctccctacccaagaatcactttgagcacagcatcccaaggagcccatagagcgatcccttgcattcacagccacnagccctctggggacactctgtacccccggcagaccctttccaactcacaaccaataaaggggcttgggctgtgctttg

SEQ ID NO: 52700 - DNA, 560 bp, Homo sapiens
  misc_feature (1)...(560): n = a,t,c or g
gtgggaatcacaccccaagtaatgaaagacttgattgttcatttccaagataaaaaattaatggaaaatgtggaagcgctcattgtacatatggatatcaccagcctagatattcagcaggtagttctcatgtgttgggaaaatcgtttatatgatgctatgatctatgtctacaacagaggcatgaatgaatttattagtccaatggagaaacttttcagagtcattgctcctcctctgaatgcaggaaaaacactaacagatgaacaagttgttatgggcaataagctccttgtatatattagctgttgtctagcaggtcgtgcctatccccttggtgacatccctgaagatctggttcccttggttaaaaaccaggtttttgaatttctaattcgcctgcattcagcagaggcttctcctgaggaagaaatctatccttacattcggactttgctacattttgacacaagagaatttctcaatgtattggcactgacttttgaagattttaaaaatgacaagcangctgtgggaatatcaacaagcggaaattgtgg

SEQ ID NO: 52701 - DNA, 545 bp, Homo sapiens
gaattgtcttggttattaaagtatggtatgtattcaacttgtacagactggatgtaatttgtaatcaggtatagtccatgttttactttaagcagtacatcacttaataaccattgttaagccattgctttcaagaatgttaactgccaatttaaaagcatgtgtcctaggttcatgctttggtaaagctctcatttcaagtgtattcatagctaagctttctgggagcagaattgtctctttggtgaaaaggaagtacagcctttcctgtttctgaggttgcttaccatacatgtatgtcactgtttcattggccctgttacatccatttggtaaaatttatttgtcctgattaaccagctctcattttatggaaatgatgataaatctcactacttaaatttaatttatgcttttatttttaaactctcttacatctccacatttttgatgggtacatgccagttagggctgtagaactgttacttcagtaaacttcagatattaactcttgctgctgtggccctaatcccctagtcatatgg

SEQ ID NO: 52702 - DNA, 310 bp, Homo sapiens
tccctttcctgtgctcacgttcagctccatgtgtcagggaggcggtccaccacagaagaacctagatcctacccttgggctcttgagctgagagataagaggggatgggaaaatggtgaacaagtggagctgatgataagggaaatgggttgagagtgttggagctctgagctgtggggaagcttggtggtggtggtggagcctgtttctctggccatagatgtaaggaggtatgtaaaggagaagacagtgaggaattggagaaatatggaggtactagagggcatgattcccaacagagttgcgttcc

SEQ ID NO: 52703 - DNA, 542 bp, Homo sapiens
ctcaggaagagtgagattttatatttgacaataaagtgttagactccatttctaaataccagacttcaaaagataaggttcaaaagtgttataagaagatattcctttttttgtcctagagaacttattttcctgtgaaaatgcctaccacaaagaagacattgatgttcttatcaagctttttcaccagccttgggtccttcattgtaatttgctctattcttgggacacaagcatggatcaccagtacaattgctgttagagactctgcttcaaatgggagcattttcatcacttacggactttttcgtggggagagtagtgaagaattgagtcacggacttgcagaaccaaagaaaaagtttgcagttttagagatactgaataattcttcccaaaaaactctgcattcggtgactatcctgttcctggtcctgagtttgatcacgtcgctgctgagctctgggtttaccttctacaacagcatcagcaacccttaccagacattcctggggccgacgggggtgtacacctggaacggc

SEQ ID NO: 52704 - DNA, 494 bp, Homo sapiens
gcagtctcctctttattcccctcagaacaacatgcctggaattcaaggagccacatcttcgcctcaaccacaggctactttatttcacaacacagcaggaggcacaatgaaccaactgcagaattctcctggctcatctcagcagacatcaggaatgttcttatttggcattcaaaataactgtagtcagcttttaacctctggaccagctacattgcctgatcagttgatggccataagtcagccaggccaaccacaaaacgagggccagccacctgtgacaacacttctttctcagcaaatgccagagaattctccactggcatcctctataaacaccaaccagaacatcgaaaagattgatttgcttgtttcattgcaaaaccaagggaacaacttgactggctccttttaactggatataaattccacgaagaaaatcctgattccaagatgtcctgagatcttgtggttccatgagaattattacttta

SEQ ID NO: 52705 - DNA, 404 bp, Homo sapiens
  misc_feature (1)...(404): n = a,t,c or g
aaaatatcagtcggggagtaggactgaatgaaatgaaattattttaaagttttacagtgtaaaattcagtctaacaatagctgagagattgatttcagaaatactaaaacttactacaaagctgctgcaattaaaaaacaaaaaaagtgataattagcacagtaatgaaacagtggaaccagaatagagagtctagcaaaagatctcagtatatttcagacttagtaatttgttaaagttagtacagatattttatctgaaaccttagggccagaagcctcagaattaatttttcagcttcagaaaaccaatatgcaaggctgggggcagtggctcacacctgccnnnnnnnnnnnnnnnnnnnnnnnnnnnnnnattgcttgagcccaggagttcctgaccat

SEQ ID NO: 52706 - DNA, 341 bp, Homo sapiens
  misc_feature (1)...(341): n = a,t,c or g
gcttcattatattccttggttctttacatatggtcaaatgtattatgtatagagtcactaaacttgcctctcacaagcagtgaatcaggagtatcaaatgcatttattttacctaactctttaaacagttcatgccaaggactatcagtgttctccatacttttagaagtagagtccttaacatttttgggtctaatcatattaagcagccaattccagaaaccccaaaaccaacttaaaaactccatctttaaagttctattcctctagaaccactcctggtaccaaaatctgtattagtcaggacaggactaataggatagatgatatatganagggag

SEQ ID NO: 52707 - DNA, 330 bp, Homo sapiens
  misc_feature (1)...(330): n = a,t,c or g
gctgctggagcagcagcggcccccgctcccgggaaccgttcccgggccgttgatcttcggccccacacgaacagcagagaggggcagcaggatgaatgtgggcacagcgcacagcgaggtgaaccccaacacgcgggtgatgaacagccgtggcatctggctctcctacgtgctggccatcggtctcctccacatcgtgctgctgagcatcccgtttggcatgtatatcttcctgcacacggtgaaggggacaccctttgagaccccggaccagggcaaggcgaggctgctaacccactgggagcagatggattatggggtccagntcac

SEQ ID NO: 52708 - DNA, 1145 bp, Homo sapiens; identical to SEQ ID NO: 12771

SEQ ID NO: 52709 - DNA, 494 bp, Homo sapiens
tttaaatttaaaggagtttaattgagcaatgaatgattcacaaatcaggcaacccccagaatcacagcagattgagtgagactccagggatgtctggtggtcagaacaaatttatagacaaaaaaggtcaagtgacatacaggaattggaagtgaggtacagaaacagctggattggttacaggttggcatttgccttctttgaacacagtttgaacactcagcagtctatgagtggttgaagtatggccactgggattggccaagactcagctattgttacaggcacatactcctaagttaggttttcaatcttgtctgcctattaagctaggttacagttcatccgcaataactcaaatatagaagtatggagtccttctcaggccatatttagtttgctttaacagaagggacagagaggaagtgtgttgcaggactcaaagagacttggcaatcaatagattcttgatctaacttgctaagtaggttggt

SEQ ID NO: 52710 - DNA, 757 bp, Homo sapiens
  misc_feature (1)...(757): n = a,t,c or g
ttttttttttttcctggtgtccagttctctcaattaagaatttcatttcgtagtgtggaagcataacaagtgcctctgggtccccagtcttggtgctgtgaatggggttagtggctgtgcatgactgtatgacctggccatcacaggtgaacttacaacatagtccctagcctcaaaggcatacgtgggtttccctatcgtcctcttcatgagttctttgtgaaaacagaaagactgagtcatgttggtcacggaagctgtcagccatgccatggatgtcccatgcaagatccatgttgagactgcttaaaaatgaaatctatttctccaaactttagatttgctttttgagcttgtgcttcctctttttttgcactgctatgtcctagaggaaggaacattaattctgaccctaagaacagaatgaccaaaagtgagggaagcaaaactatttctctatttctttacgattgcttctagtgggtatatgtatgtggtttaacctcaggaaaataaacacatcatttgggaaattttttttaacaaagatttgctgagcacacgtttgaggagtaagaaataaaattcatactgctgattatggtaaaacagagattttcctttgaatcatctaaaagaaccagtttccgattcccatttcactgttttaagtgttaatcnnnnnnnnnnnnnnnnnnnnnnnnnnnnnnnnnnnnnnnnnnnnnnnnnntgaacaatagagcggactcccgtctca

SEQ ID NO: 52711 - DNA, 364 bp, Homo sapiens
ccttattcagccttctcctggggaccacttcattatgggacagctagatataacctacttgactcaccccacagacccccatactccgcatgaaccatgtgaatatatcagtgaccacctctcagtcacagcagacactcacggctgcttgcattaaaccaaagtggacctccctgtaggaaacctgctcagatagcaccttacatcccaataaaggcttccactcccaggtccctccctctctctcgctattgctccccaaccatcagtcaagcacaggtcttcttgatggctctcccttccagttagccctgcaaagtgtgctgccctcttctctctggaattaataaaaaaactgcttcgg

SEQ ID NO: 52712 - DNA, 448 bp, Homo sapiens
ggcggcgactgcgggcgcgaggctgaggggcgcgaggtgaggggcgcgaggttcccagcaggatgccccggctctgcaggaagctgaagtgagaggcccggagagcgcagcccgcccggggcaggatgaccaaggcccggctgttccggctgtggctggtgctggggtcggtgttcatgatcctgctgatcatcgtgtactgggacagcgcaggcgccgcgcaacttctacttgcacacgtccttctctaggccgcacacggggccgccgctgcccacgcccgggcccggacagggacagggagctcacggccgactccgatgtcgacgagtttctggacaagtttctcagtgctggcgtgaagcagagcgaccttcccagaaaggagacggagcagccgcctgcgccgggggagcatggaggagagcgtgagaggtacgacttgtcc

SEQ ID NO: 52713 - DNA, 388 bp, Homo sapiens
gattaccagaatgggttttacaaggttttctttactttgctatggccaggcaaagttaaagtatccgtatctctggtccaccccagtgaagggatcagagttcttcagcgcttacaggaagataaaccagacagggtctatttcaagagtctcttccgttcaggaagaatttctgaaactactgagtgcaacgtgtgtcttcctgggaatctgcccctgtgtaactttacagacctctacactggggagccctggttctgcttcaaaccaaagcagctcccttgcagcagcagaattacccatttcaaaggtggatacctgaaaggtctcctaaccgctgcagagagtgctttcttccagagtggtgtcaatatcaaaatgccagcca

SEQ ID NO: 52714 - DNA, 518 bp, Homo sapiens
  misc_feature (1)...(518): n = a,t,c or g
cctactgacataaagactttctttagatgaagagatcactgaagggacactttcattagggacattgtttcccaggttaaccctatgcatcattacactcctggaaaagctaaataaacagaatataatcactattttttttttctcaaaccaattttactcagtttttctttgagaatagcctcttacaaaaaaaaaaaaaacctttcctgaagtgtaacacatttttagaaatgcacacaaatcgttaagtgcatagccaaaggtaaatacatctatgtaactggcaaccagatcaagaaaaagaacctctgaatccccctcatgcccagttccaggcactggctctgtccccagtcgaacctgggttaacctttatcttggacttctaaaaccatagttgagttttgattgtttgaattttatataaatngaattatnaattatggtcncctttggccaggcctctttcacccaatattaaantttgagggtcatcctttttttgggggggggga

SEQ ID NO: 52715 - DNA, 363 bp, Homo sapiens
ttttttttttttttcaggtcagatgggtaatgtgctgatgtcgtaacaaggttcaagggtggcacatctcacaaacatggatgaatacccaatcatcatgctcataaactacaaaaggatcacaagctttaaaatattgttaagtctcaaaaaagaaatagtttcaagaaatgtatatacagttctactaaatacatgtatttttggaattacgtagcattcattctaatggtatttgatttgggaagtgttttgccctctcagccaccacatactctcatacaaatgctttatgtatgaagtatatagcctcagtggcaaaacacttcatacataaagcatttgtatgagagtatgtggtgg

SEQ ID NO: 52716 - DNA, 295 bp, Homo sapiens
cacccttgaggtgggtttttagacaacaatagagagctgacacactactctgtggcaggaattgtgccaggtgaagaaaataccctggatactaagacatagcccctgttctgcagatgcttagagtctacttaggcaaacagacatgtaacaggggaatttcaaagtaaatgtcatcagtgctctaatggggcatagggaggacttaaggatccatgtaaatttagagaagaggcatcaatcctagaactggggagctggtgaaggcttctcagaggagataatttctaaaggg

SEQ ID NO: 52717 - DNA, 3361 bp, Homo sapiens
tgataacccaaggtattcacagcaagatacagtgagtcttaaagttaagcaccgtgcaattagctttgcttccttgggtttttgaaacatgcatctgtataaacctgcctgtgcagacatcccgagccccaagctgggtctgccaaaatccagtgaatcggctctaaaatgtagatggcacctagcagtgaccaagactcagcctcaggcggcctgcaaacctgtgaggcccagtggagcagccgaacagaaatatgtggaaaagtttctacgtgttcatggaatttcgttgcaggaaaccaccagagcagagacgggcatggcatacaggaatcttggaaaatcaggactcagagtttcttgcttgggtcttggaacatgggtgacatttggaggtcaaatttcagatgaggttgctgaacggctgatgaccatcgcctatgaaagtggtgttaacctctttgatactgccgaagtctatgctgctggaaaggctgaagtgattctggggagcatcatcaagaagaaaggctggaggaggtccagtctggtcataacaaccaaactctactggggtggaaaagctgaaacagaaagagggctgtcaagaaagcatattattgaaggattgaagggctccctccagaggctgcagctcgagtatgtggatgtggtctttgcaaatcgaccggacagtaacactcccatggaagaaattgtccgagccatgacacatgtgataaaccaaggcatggcgatgtactggggcacctcgagatggagtgctatggagatcatggaagcctattctgtagcaagacagttcaatatgatcccaccggtctgtgaacaagctgagtaccatcttttccagagagagaaagtggaggtccagctgccagagctctaccacaaaataggtgttggcgcaatgacatggtctccacttgcctgtggaatcatctcaggaaaatacggaaacggggtgcctgaaagttccagggcttcactgaagtgctaccagtggttgaaagaaagaattgtaagtgaagaagggagaaaacagcaaaacaagctaaaagacctttccccaattgcggagcgtctgggatgcacactacctcagctagctgttgcgtggtgcctgagaaatgaaggtgtgagttctgtgctcctgggatcatccactcctgaacaactcattgaaaaccttggtgccattcaggttctcccaaagatgacatcacatgtggtaaatgagattgataacatactgcgcaacaagccctacagcaagaaggactatagatcataaggcaatgcatgaaccacagaagctgcatggttaaaatagcggcctgtgcccagtacagaaaggtgttactaaccagtcttttgaatcacttagcagcttgctcgtcaacctctagtgtccctccctggattctttgaggtgtctgctgtcgcctaccactgtgcacatctgaaaactcacaaccaagaaaatccattctattttcttatcttggactggagtcacctattcttgcattgctgtatacacctcatgcttatgcaatgggaagaatatgggggccagggggtgtggtactaccttcaggcatttggtaactcaaagaaggctgtacagatatattttttcaaaagaacaaaatccacagatgcaatgtgagttgcgtaagaaacagagtagatagactaaattcagtgaaggaaaggaattgagagatttttcttagtaaatagattattgttaagtaaatagttattaaaaatatatctcactgcaaaaaaaaaaaaagcagtatcttcactcaaaagtcttgcttggaagaataagcagaaagaattttatatattttttttctattttcacattcatactaacaagttttgttccatttgttattcaataaaacaaaaatttctaggtatttgctttattacctttcaaatatttactgttgcttggccccaagaatggccttgtacaacttatccagaatgtctattaggattctaatgttatgtccacttacaagtagagacagtaaaaggatgaatacccaatctttagtgacaatgcagctgatttatgaaagagagggctacactgctatggaaacttagcttcaaagaaaatgcaatgtatctgcaattaggtgttcattttttactacattttattaaaacctgctttatactttcaactgcttgtaggcacaacttctgcaagtttaaatatttgagctttacaaataaacatacacatgctgttttttaagtaaacctgtaaaatacccaggaaggcaaatgttcattgtttaattagcactgggattttataatataatgtttggtatttttgaggcattgttaacatgaaagtcaaccactggctttgtgaaaaatgctatgtcactattcagaatatgctgggtaaattaacttgcctagtgaaaagcaaaatgttaaagaaagaacttctggttctataatcatattatatgcactaaactatatgcatgaaagttctttgcatggattaatggggcttacccttgttgcactcgaaatctgaggtgtatctagccctgccactattggctacttaccctcattaatatcccacttgagaaaaattgtgagactatactgtgtcaatatctgtaaaaagagagaaaacatgtttttttttttttgaagggggtggtgtgggagtggccctttaactctatttggctatctgaggatgtacaaaattctcatttaattttctggtcagcaagttccccacacagaaatcactctgaggtttacagaagaactgtaatattattttaaaatgcgattttctgtcattagttctagatatgtacttcatggttaaattctaaatctgaaaatgctagtgggagatatcaagaaattttctttttgattactagtacctgtattctaacagagagtttgaattttttgcccgtgttatcagaatgatggaaattgatcattttcagttgttcattgtgtattcaatccagcgaactgctgtatgtatagaggagctgaggtgctgtctaatgggaaatgtgatttgattgatttatttgcttagagtaataaaagcattttgtgcattcaatcttacaatagattttatctgatctttcactgtaaggcttatgtgtattttccatatatgtaaaacatacatatgtaaaatatatgtggccataaattaggcaataatcatctaaataaaaattatattggcagctaagctgcactgaatactcaacagaaatagtagtgatcaaaagtctgacccacgcgtccg

SEQ ID NO: 52718 - DNA, 298 bp, Homo sapiens
  misc_feature (1)...(298): n = a,t,c or g
gtctgttgaaccacggttctaatagaaggatatgccttatttggctaaatggcctttggattgagnctcagcagncacctactatagtantacaagctgcgtnagcttanaattgattanccttggngttcactgccttngctcagnntnttcnnccccttccattnnangancctgnncattanngaatgaagtaactgantttgcnnnancatgngntgctgntganncanctgaatnttgngacnnnnncttcntccctttttggagaccnatntnccngnngnnctctncgtgt

SEQ ID NO: 52719 - DNA, 560 bp, Homo sapiens
ttttttttcactgtaagaaatgtcacaatgtaatacatgattaactgccaaataaatagcactacagacaatacatattataatagtttggaggaatttggtgcagagagccatcatatggtcagatacatgtatgtgaccatgtattattgaagatattcatctactaaaatcttcctttagcgatctttgttagagggtgttattgtataggactagattctctcggctttcctttctggaggatttagttactgaagaacttaaaggaactcatttcgaaaggattttagctttgtttcttgtgtagacttggtttatatgtgttggtctcagtgaaaccgttcttttaaatcatctccacatagatttcattctacgaacttcaggccttcacaaatcctggtacgctggagaccattttaagctttagaagaggtaggtttgtcccaatagttttaaacgacaatttgttctctgaaccttcctttctgagcagggcgctgtgctctgcatgtatccgaacagctgcctcaggaaggtcttttgggtgagaaaac

SEQ ID NO: 52720 - DNA, 1379 bp, Homo sapiens
gctcgacttttttttttttttaaagtctgttaatgttttacagctttattttagacagatagtttaagaaccaaagacatacctctgtaatgataaaggaaagaaaacaagctttccttttaagaaaccaaagagcacaaaataagactgtttcattatacataatcaccacaggatattaggcactctgacagggttaggcaagattcttggtgtgaggtgaagcacaggcactttatttgtacagtgctgctgattctaattttgaaggtaggtattataaaagtctttacttgtcaccttatttctggccccaacacagcagcctatagttttaaaagttctgtttctccctggtctttgttcgtatacacatcgaaagtaacttaaaaacaaggatccaagggggccatacttcatatgttatctaaatgttaatatgagaactcaaaagtaggcagattatatgaatacatattcttacctctgctacaaataaaaacaccccaagcccttcatcatacttttataaaaatacagatattaaactgtagccttttatataccatttctgaaaagtatttagttgcataaatagatgccaggatcttttttttttaagtattaattacttaaaaaaaggcttaagtctttcaggtatttagagagctctggaaggctttacccagttgacatacggtggtagtagaaatattaaatatgcaacacacaaagcctgcaacttgacattggtcactgaaacaagaattgaattcctaaatccaagcaatcaaaagatgtttattttttatagaaagatctgtaaaaaaataataatttttcaaacagctttactttcatagagaaaactttctacagaagttgactaagattttaaattgtaccatcattaaataaggtgggacaccatatgaatttcattgcactggaagaaatgcaaagcattttttaatataaagtatacagagcattctagtcaactacagctgtgttacagctatgtgttcttttggatttggtccaaagaaacctgagtctgtttccagagagaatgaaaaatgttatagacacctgatcagttactcctcactgtaggatgcacaaaaatgacattccttgtagatcccactgaatccagtttcccaacacttgatactttcctttttcccttcccccaccccagttcactttgggtttcaggttcaattctcgaatcacaggcatccagattttcttcataacaaacacatcccatggtcagatgaactacccagttttccaggatgacatcacctcttctgctcccaaatttcggccatatttaggtccaaatctttaaggccttttaaggcttgaac

SEQ ID NO: 52721 - DNA, 371 bp, Homo sapiens
  misc_feature (1)...(371): n = a,t,c or g
aatttaaaaaaatacatacacatatatattctaccagtgtaatcaagaaatagaagaaaacacaacattagataataaatgatttatcctacccaaattctgcaaataaatttgaaaattggatggaatagatgattttcttggaaaatgtgctagtagattgactctaggaataggaaagaaaactcaaaaagtctctcaaaagtggaaaaaaaaaaaaggacaactgttatttgtgaccagttgctactgttcttccngggggtccctttggccattgctgttttgccaagtgttaggaggtgatttctggtgagggacctcggagtttgaggccgggtgagccttcctgcttgggtgagctctctggc

SEQ ID NO: 52722 - DNA, 474 bp, Homo sapiens
ctgttgtgctggctgacttttcctgggataagctgtgcaggtagtgggcagcgacagtccagaagtgcagctccgattcatcaccatagagccttgaaacaagcaggcacctctgcaagagagtgaattctggatcaagcaacagtttctttatgtcattagacaatgaattcaactgttcttggaggagattctttatttcttcattttctggatagtcaacatgagaaatgtccaaagaatactgtccattccaaggctggtgtaataagaaggctttcaaggcaagagaggcccttggaacaaggagataggggcaccacacaggctcggttaactcttgttcatccattctaaagcacgcagacttcatagacatctctaggactctgatgcacccatcatctgaggccaagatcactttatctgacgtacaccagtccacatccaatatacgaaaggtcacatttctgc

SEQ ID NO: 52723 - DNA, 1359 bp, Homo sapiens
tcagccctggacagacctctgcccagggaactgctccatggggtctgggagagcagccatcccctgctggcaccatagacccacacaaggagcctgcacagcaagccagcggtgacacacctgcaggtgtcaggcatggcactgggcacaacagggacctggcaggagaaacagaccacagagaggtctggagttgaggctgttgtcagcaaagcccctggtcccacacagctctgccctagagccacctctttgaccctttacccaccctgagaccagaacttgcagcccctctgcagatctcctctggccactgcagcccctccaatgggctttttctctcatgcattccctggcctggaggcgtcagggaccccacatcctccctgctcctcagactcacagcccctccatgttacctcccgcacctcctccctggggcagctgctccctgggcctctgaggatgtcagctcctggctccctgcctctctcccactccactcctggctcagtcttagagatttctatgccctcatggattctacccctgccttcctggcctcttgattcttggcttgcctctcctccaattccaaacttagtgaaatggccttaagcattttaaactgtatgtatacattagcgcattcatgcctttctaaacgcatttcaaatgtcaaccaggaaggcacaccactgtattagttttatactgccgctgtaaaatttaccacaaacttagtgacttaacacaaatttattgcaattctgtaggctggaagtctgactatgggtctcactggactagaatcaaggctggcaggctgccttccttcctggaggttctaggggagactctgtctcctgctccttcaggctgctggcagaatccacatcctttcggtggcaggggttggggggtgggtgtgggggagccgttaggcctcccaggtccttaggatcagggttgcccccagaaccccttcccatatcctccattctccgccctgagttcctacccaggctgcctggccggggccactgcctcctcagcatgcaggaggctgccctgtagggaaccccagctctggggcttgggggtgagggtcagccctggacagacctctgcccagggaactgctccatggggtctgggagagcagccatcccctgctggcaccatagacccacacaaggagcctgcacagcaagccagcggtgacacacctgcaggtgtcaggcatggcactgggcacaacagggacctggcaggagaaacagaccacagcactccaaccaaaagccaaaaaccaaagcaagacttactaacgcatatcaaataaattaaaggtacaaa

SEQ ID NO: 52724 - DNA, 859 bp, Homo sapiens
  misc_feature (1)...(859): n = a,t,c or g
aaaggtgtgagccatcgtgcctggcctaaaaaatttttttttcttcatctgggtttttgctttgaaaacaagtttctccaaatttacagatttcctgatgatgttgggtctgaactcaccaacttgattaggtctttaggggccgagggactagccagctgcacaggtgactggatgggggaggggcaggtgaggtgggtctacagaggtggcttcgcctttgaccttcatgctggtctcggctgaggtgacacgctagtgacagcccaatagggggttacccttattgagtaaaatacttcagattgacggctcaatcttagtttgcctccagttaatcttttatgcttagggattaagtgtgtggttttttttttgtttttttttttggagacggatctgcntcnnnnnnnnnnnnnnnnnnnnnnnnnnnnnnnnnnnnnnnnnnnnnnnnnnnnnnnnnnnnnnnnnnnnnnnnnnnnnnnnnnnnnnnnnnnnnnnnnnnnnnnnnnnnnnnnnnnnnnnnnnnnnnnnnnnnnnnnnnnnnnnnnnnnnnnnnnnnnnnnnnnnnnnnnnnnnnnnnnnnnnnnnnnnnnnnnnnnnnnnnnnnnnnnnnnnnnnnnnnnnnnnnnnnnnnnnnnnnnnnnnnnnnnnnnnnnnnnnnnatggattaaaatattcaaacatgttgtgtgtacccagatatgctgttaatttaggaaaaacagtacaatttctatgaagtggttgtgactattttctgtagtcaatacagttgggatatctgatctatttctctgtctactttggaaatgattgcataataaataaaattttactgtttttttaaaaaaaaaac

SEQ ID NO: 52725 - DNA, 343 bp, Homo sapiens
ggggttttccagatttcatcctgctattgatttctggtttcatcccattgtgattggaagatacttggtagaatgtcaatgtttttatattttaagtcttgttttgtggcccaacatgtcgtctatctggagaaaattccatgtacacttgagaagaatgtgggttctgctgttgttgggtggaatgttctgtgtatgtctatggttaagtggcctatagtattgttcgagtgctctgtttccttattgattttctgtctggttattttatccattattaaaagtggggtattgaagtctcctactattattgtgctatcatcctcagcaaactaacacagga

SEQ ID NO: 52726 - DNA, 1129 bp, Homo sapiens
ttttccgactgcttatccgacgctcctccctctgtctctgtagctggagaaggtagtttccaggaaagttttccggtttgcaggccgcgcacatcgggcaggggccatcctcggtccccttgctcgttgctcgcagccccgttcggctacaagtgagtttcagggcgtcatggccaggggccaccgcggccagccgggtgtgaggctgcctttcgctgcccgcgcgctccagtggtctctgggtccgccggcgtccgtttcggcctgaacgcagcccctccgcggcgacgagcagtctcgcgccggagctcatggcctcggaggcgccgtccccgccgcggtcgccgccgccgcccacctcccccgagcctgagctggcccagctaaggcggaaggtggagaagttggaacgtgaactgcggagctgcaagcggcaggtgcgggagatcgagaagctgctgcatcacacagaacggctgtaccagaacgcagaaagcaacaaccaggagctccgcacgtggcatggaagaactcagtaaaatactccaacgtgggagaaatgaagataataaaaagtctgatgtagaagtacaaacagagaaccatgctccttggtcaatctcagattatttttatcagacgtactacaatgacgttagtcttccaaataaagtgactgaactgtcagatcaacaagatcaagctatcgaaacttctattttgaattctaaagaccatttacaagtagaaaatgatgcttaccctggtaccgatagaacagaaaatgttaaatatagacaagtggaccattttgcctcaaattcacaggagccagcatctgcattagcaacagaagatacctccttagaaggctcatcattagctgaaagtttgagagctgcagcagaagcggctgtatcacagactggatttagttatgatgaaaatactggactgtattttgaccacagcactggtttctattatgattctgaaaatcaactctattatgatccttccactggaatttattactattgtgatgtggaaagtggtcgttatcagtttcattctcgagtagatttgcaaccttatccgacttctagcacaaaacaaagtaaagataaaa

SEQ ID NO: 52727 - DNA, 388 bp, Homo sapiens
agcctttactctgaggtaaaggtttgcctgtttcggttatgagattgcaaaaactagaaacttggtaaatttgacaattcttgtgctattgattatttgaatatttgtgaaaatatacaggtgaggaagaatgtcttcaacgtttcgagaatggaggccgtctagtttggtgtgcaaggatgatgtttggagcaataagaacgtcgctttgtttttttccttttatagaaagagcaaggttcagggtaggcattagggcgggtgtaggtgtagaaggaactggattattggtttattgcatttagaatgtcagtctggtccttgcggtgtcaagatgaactcacgtgggatgttaattcacttgtaaaactgagggttatacatatgt

SEQ ID NO: 52728 - DNA, 743 bp, Homo sapiens
ttttttttttttttttttaaatgaccaataaatattttaatcactgttaaaaaaaataaaaaccttgtactcctacgacttactccctccttgtctccacccactcctccatgagaaccgagttgggaatttccacgggaagtcgggggtggcggggagagacagggtagaaataaagagcgcatccttgagagggggtaggttctaggacaagggtggggctcaaaggccttgtctccacgacaacacaaacacagacttcaggcacagactacaaccacctgacccctgaccctgtgactgcaggatgttcaacacgccccctctccctccctccatgtgcaatctactctgtggagcaggggcttcagtgtacccatcagagggaaaggaagggtttagttctggaaataccttgggggggaggggttgagtagtagaatgggcgggtgatggtgaaactgtggttccccttccagaatatatacaagtccacagagataaaggaagacagtaagtgtggtgggagatcacccgggggccacagcgcccttgcatcgtgctccttattccctttcccgaaagctaccccaccccagtagcctgccccttcagtttgctcctccacctccaccgaagcccatctccaccttgtggactttgggtggggaccagacacgtctgctggacgggggcgtggccgcactcgtttcgtcgccgctgcccccgcccactccgggagc

SEQ ID NO: 52729 - DNA, 339 bp, Homo sapiens
ggcacaacggggttacctaagggtgtgattaggcccactgggggatacgctgtcatgctacactggtcaatgtcttccatatacggacttcaacccggagaggtgtggtgggcagcttctgacttaggctgggttgttggacattcctatatctgctatggacctcttcttcatgggaacacaacagttttatatgaggggaagcctgtgggaacaccagatgctggcgcttatttccgtgtgcttgcagagcatggagtagctgccttgtttacagcaccaactgcaattagagcaatccgtcaacaggaccctggggcagctttggggaagcagtac

SEQ ID NO: 52730 - DNA, 655 bp, Homo sapiens
  misc_feature (1)...(655): n = a,t,c or g
ttacaattcacatctccattttggcaagtaatttctactgaaatatttatttctgagaaacaactcaaataatttaatttcaattaagaaattaaatcaactcaaaataggaataagacaaactcattatgcttgcttcagcatttcttctacgtggccaaaaatgctggggtcttcaattgtagaagttatcttgtatggcttgccattgacaatggcagataaagctgatcgggggatcttgccagatctggttttgggtagctgtttgacaaacactgcatttcgaaaagcagccacagggccaatgttctgtctaacgtgtttcacaatttcttccaaaacttgctcctctgttgcatttatatcttttctcaatacacagagtgctaagggggacatggaccttttaggggatctttccttgcccaaccaacaggcacaggtctgccacggtaccatgggaaaggattgactcttcaatggcgcctggcagaaattctgtgacctgcaacatttattacatcatccactcgagacataacatacaaatagccttcttcatccatgctcgtgccnnnnnnnnnnnnnnnnnnnnnnnnnnnnnnnnnnnnnnnnnnnnnnnnnnnnnnnncgggtcttaagggtnttcaaa

SEQ ID NO: 52731 - DNA, 608 bp, Homo sapiens
tgacaatggcaccttagtaattaaagaagcaacagcttatgacagaggaaactatatctgtaaggctcaaaatagtgttggtcatacactgattactgttccagtaatgattgtagcctaccctccccgaattacaaatcgtccacccaggagtattgtcaccaggacaggggcagcctttcagctccactgtgtgtccttgggagttcccaagccagaaatcacgtgggagatgcctgaccactcccttctctcaacggcaagtaaagagaggacacatggaagtgagcagcttcacttacaaggtaccctagtcattcagaatccccaaacctccgattctgggatatacaaatgcacagcaaagaacccacttggtagtgattatgcagcaacgtatattcaagtaatctgacatgaaataataaagtcaacaacatctgggcagaatttattttttggaagaagtttaatcaaaggcaaccataggcatgtaaatgaatttgaatacatttacagtattaaatttacaatgaacatgcaaaataaaaggacttgtaaataaatgcattatgaactgatgatactgatttatttaatggatctca

SEQ ID NO: 52732 - DNA, 1543 bp, Homo sapiens
cttaatcagatagcttgagaatgatttaatgttacgaaatctgttaattgcattatctcaataatagatcggtgaataactttattattctctcaacaaatcctgtatttgatttacaaaatggatgggaggtttcagggagagcagttggaagcctgtgtgctcacctgttaggaacgagagtggcaacagcagtggggaggagtgctcggctcctgcacctgtctcgatggcagagcccacaggcttggctgacagacgtgggatgaaggaaagagaagcctctcactcttcccacagcattgtagtgcgatttcatgcagaagtccaagcaggttccaggacaattgtgtaagaagctatggacaagaacgtctaagaaaacggaaaatgacatagaggatttgcactgtagctaagacttcacgcaaggctgtggcagctgaaagcatgttctggtgctggggctgcgtggcagagccaggagcccaggatccagcgcactgggcactgacctgggacctggtcatctttgcgtgtggaaaagatggcatttccagttattgacaggtgaatgctggccttttagggaaaaaaaaatattagaattccatacagaataaagaatgaagatgagaggttaaaggtttttctaaggcatgaagagctgtgggggcagcctgcctttgttctttttgtcgtgtgtccttcacatgcagtaactctgttcacgcctcacaaaaaccctatgaggtggagacctgccatcaacccttcctgcccgggtgccactgaggccccaaggttaaatcatttcccagagtgtatcagcagaggcacagccacagagacacgtccgcacagagagctttccagatcaccagtaacagcgtgagatcatggtgcagaaggtcatgaggaggatggcaacgagcgagacacagccggttggtgctcacaaggacattggtagatctgactgagggccaggtcggctagggcccttcccaggtgacaggagcccagtgccggccttggtgcacacagcgcgtccttgtgctttctcaggagagcttcactggggacactctgtgatgtttttggagggtcatttggtaatgtgttcaggagccaaaaaatatgcataatattcagtcttacaattacattttttgaatttatctcaaggaaatcccagggatctgtgtgaagctgcacatgctgctgctgctcagtgcgggactgtttataatatttgtaactcaaatgtccagaagaactgtacactctgtgcatgttttcagtaagttcatatttgtaagaaaaagtgggtgtgttgagagacaaatttttgtgtacatttacctggaaacaagcagtagtacacatatgcatgcatgaagtggtgttttcctgagtgttaagattgtgaatgttttattatgatcatttctactttttctattggaaaatactttgtgtaattaaaacatgaagatggagctaccatccaaaatggtgaaaaaaaaaaaaaaaaaaaaaa

SEQ ID NO: 52733 - DNA, 397 bp, Homo sapiens
tggctctgactttcccataggcttaatattacatttggacatcgtggccaactctatcaagaccacaaataccacttacaattaattttaaattattcatctgtacatagttttctaaaatgtatataattcaaacagagcatcttgtaactgaagacacaccatatctatgatatcgcattagtccatgtggggaaaagagagatcagattgttactgtctatgtagaaaaggaggacgtaagaaactccattttgatctgtaccccgagcgattgtttctgctttgagatgttgttagcctataactttagccccaactctgtgctcacagaaacatgcgctgtaatgaatcaaagtttaatggatttagggctgtgcaggatgtgccttgttaa

SEQ ID NO: 52734 - DNA, 378 bp, Homo sapiens
aagaatttggaggaaattatgactgcaaccatgtctttaagcagctaaccctggagagagaatggaccaagctaaacattaaccattgctgctggaggcaattcagatggaagatgtggagtgtgtgaggcctcagaagatgaattcgtcccagaaatggtatatatagattcacagtctctttcagaggctgcaccctctgaagttggggtcctgctaaagagacggagagagaacatgacgcggaggggatgaaaacagtgacacccctttagtactaggttcttttcaaatgtttgattacatgcacttaagagtatttgcaagaatctgaggagtaatttctccctcactctacttttcatagatttgttttga

SEQ ID NO: 52735 - DNA, 483 bp, Homo sapiens
gaattcttactatagatgtttttaaagttccaaagtcattgagtttcaatgttacataaactccattacccgcatgttggggcttgatctcctggttattatctgtgcttgaggaaacacccacagcagtctctacccagaacagtttcctaaagaggcataccctcttcctccactggaaaatagtgcgttcccttcctaccctgcacacccatcgcccccacattgatggttttcaaacagcaaacttttcagctaaagcttcaaaccatgattggaatcagcctgtgttgggatttgtggattcagggtcatgggtgaccctgatccagtttgggtggaaatccttcctaagtatcataagaagcatcttggcagagatgctttggtggcagccatgagctttgctggaggccttgcttcccatagccttggctgtggggcaaggaactcttgccaggcgagggggatgctgcctggatc

SEQ ID NO: 52736 - DNA, 341 bp, Homo sapiens
ttttaacaacatataaaactgtttcaagccctcctccccagagctggcgctcagcagccctagcgccttccttcaggcgaagggtggtttgcagatgtggggagggtgtctggggacgttgctgagctggctgcagaagggtcgggatatcagggcacagtctccatgtgtgtgccaagccctggcccccacagcgctcgatggacctcagcaagctgcccagccctggcccaggtgccccgactgtgggactcagttgttctgagcacatttgactccacttttcccttaaaaatgaatgtcttggtcctgtgcattggtggcatcacagaccccagctg

SEQ ID NO: 52737 - DNA, 405 bp, Homo sapiens
catttttgttaatatattaatgattcttcttaaatactgtaccataattagtctagattaacaaatgggctatcaaagccactatcttgttggctagatagcggaacaattaattttcttgaaggctggctgacacactgaagatggtaatgtactggctcagttttttgaaatctgactttaatctatcagccttatgacgagatgggtgtccacaattcacactgatctttcctggctccaaatacgtggtttcttctgacaggtatggagtttgataacgctgacatttcattgtttgacaaatcatattactttcctctgtatctgaaagataaccggatggtgaaaactgtttggatttaacagattcacttggtatttccaaagttccttgtggcctac

SEQ ID NO: 52738 - DNA, 640 bp, Homo sapiens
attttacattatttggagcctcatctgtgtcaggctataacattctatcctcatctgtaaaacttccccgtccattattccttgcactataacaactgtcaacacaccaactattaggaagttagtattttgctattgatcactgaataaacatcagagtattttaaaaaacagttctctagaaagaactgttataattaaaatgagtctgaaagatgaactctagtattaatgccctatatttgatggcactttatagttcataaaattaatttcaccccattctcattggacccatttcccaagtatttattgaggccctggtaacaaacatgtcaggaactcttctgggtgcttgagacacatccatgaataaaatagggggagaagctgttgacctcgtagagcttatgtctcgtggatgtacctgatcttcagaacccgtggatattcctgcaaatcctctgggcctgtattcattgctttgtcagcatcttgccctgaaatgcatttgtcacctacctcttgttactaaatggtctctgccctccagacccttgtcatccaaggcactaggggtcctggacacccactggggatgatgagctggtagcgacctgttttgcatgagtgccaagtc

SEQ ID NO: 52739 - DNA, 756 bp, Homo sapiens
ttttcaagattgattatgagtttataataaagtcaaatgataaatacataaggatttatttatataggtttgaaattatctattataaaaaaatttctaaagaatagaaaaatacagaaaacaaaatatttcttaacatttgaatagatatgaaaaatcagactaccacaatcccatgggaaaaaccccctacttagaggcttttctgagacactgtcctaagctcttggccccacaggagatagggaagaggccagataggaaagtcagcaaggcccagctccttctgaagcttaagatatgccaacttgctgaaacccagaggaatgctggctgtgtatgacaaaagagcatctgtgattcaggtaatgacaagcagccccccgaggcctccccagtccccacctgcctttggaaaaccaccctctggggaaggccacactcaggccagaagcctcccactgagtctggccctggctgtcagccctgcctagctgctctgataattacgggggaaaaaaagctgattttgcatgtggacctcagtattacagaggagcagcagcagccccgtgtggacatctcagatacatttacgacccagtcagtgcagcctcgtgggcacagctaatgagccaggaagaccaaggagcgtcatttgctaagccaaaattagacaccatgctgcctaacaagaacaggtgataaaaccacgtttcaaagtgggctgagtaatacagctttgtgttagtcatt

SEQ ID NO: 52740 - DNA, 340 bp, Homo sapiens
gaattttttagacaacttccctagcagtgacaccctgtccttcattgcaaggatattcctgctgttccagatgatgactgtatacccactcttaggctacctggctcgtgtccagcttttgggccatatcttcggtgacatttatcctagcattttccatgtgctgattcttaatctaattattgtgggagctggagtgatcatggcctgtttctacccaaacataggagggatcataagatattcaggagcagcatgtggactggcctttgtattcatatacccatctctcatctatataatttcccccccaccaagaagagcgtctggacatgggcgg

SEQ ID NO: 52741 - DNA, 398 bp, Homo sapiens
  misc_feature (1)...(398): n = a,t,c or g
gaaagagccgcgnccaccagcgcgcgangctggaccggcataaggaacatcgtcttgagcaatcccaagaagaggaacacgttgtcacttgcaatgctgaaatctctccaaagtgacattcttcatgacgctgacagcaacgatctgaaagtcattatcatctcggctgaggggcctgtgttttcttctgggcatgacttaaaggagctgacagaggagcaaggccgtgattaccatgccgaagtatttcagacctgttccaaggtcatgatgcacatccggaaccaccccgtccccgtcattgccatggttcaatggcctgggccacggcttgccggctgttcaattggttgccagctgcggacatttgccgtggcgaggcgacaagttcctctttt

SEQ ID NO: 52742 - DNA, 1752 bp, Homo sapiens
ggagggaaccattagcagcctgaggagctggctggctgggagcctcggggaccgcccagccttgctcccagctcacccacaagatgtggacagctcttgtgctcatttggattttctccttgtccttatctgaaagccatgcggcatccaacgatccacgcaactttgtccctaacaaaatgtggaagggattagtcaagaggaatgcatctgtggaaacagttgataataaaacgtctgagggatgtaaccatggcagcagcttctcctgtcacattgaccaaagggacttcggcagcccacctcaactctatggaagtcacaacagaggacacaagcaggacagatgtgagtgaaccagcaacttcaggaggtgcagctgatggtgtgacctccattgctcccacggctgtggcctcgtagtacgactgcggcctccattacgactgcggcctccagtatgactgtggcctccagtgctcccacgactgcagcctccagtacaactgtggcctccattgctcccacgactgcagcctccagtatgactgcggcctccagcactcccatgacacttgcactccccgcgcccacgtccacttccacagggcggaccccgtccactaccgccactgggcatccatctctcagcacagccctcgcacaagtgccaaagagcagcgcgttgccaagaacagcaaccctggccacattggccacacgtgctcagactgtagcgaccacagcaaacacaagcagccccatgagcactcgtccaagtccttccaagcacatgcccagtgacaccgcggcaagccctgtaccccctatgcgtccccaagcacaaggtcccattagccaggtgtcagtggaccagcctgtggttaacacaacaaataaatccacacccatgccctcaaacacaaccccagagcccgcccccacccccacagtggtgaccaccaccaaggcacaagccagggagccaactgccagcccagtgccagtacctcacaccagcccaatccctgagatggaggccatgtcccccacgacacagccaagccccatgccatatacccagagggccgctgggccaggcacatcccaggcaccggagcaggtagagactgaagccacaccaggtactgattccactgggccaacacccaggagctcagggggcactaagatgccagccacggactcgtgccagcccagcacccaaggccagtacatggtggtcaccactgagcccctcacccaggccgtggtagacaaaactctccttctggtggtgctgttactcggggtgacccttttcatcacagtcttggttttgtttgccctgcaggcctatgagagctacaagaagaaggactacacccaggtggactacttaatcaacgggatgtatgcggactcagaaatgtgaggggggcgggggcctggcgggaggcctggccccttcctcgtcctttccttttgcctttgagaccaaaccaagtgcttccaaattcttttggtgcaattgaggagatatgccagatgcttaaacacatttaattgctgtcagattaattccatgatcactaaagagttgctgcttttttcatatttatttttgtaaatgattctgtgcccaggagcagctgggggttccacctcagggtggggcgggcaggaccccgtctccccaggtgtcggagcctgacctgaattaaagtactgactgctcgccacaaaaaaaaa

SEQ ID NO: 52743 - DNA, 488 bp, Homo sapiens
taggtgttctgaagataaatgccaaaaatttcagctcttattttaatggagtgttaaaattctgattcatgtagtcttaaattatcaactccttaaatgtgcttttgaaccaatttgcagaagctcacatagcaagttcataaggttccaaaaaggaagcccatacataacagtggaggtgttttgtctaaccatcaaaatgtttgagacttttttttaaacatttctgagttcgaaggtaatactgacagatttcttccctcttccctccccatcacccacctcagtgataacacattactgatagaggaagtcattagaatcatttttaagtttcagatataggagacttcatgcaatttggagataagactaattattgggggttttccttggattttttttttaataactgggggctattttatcagcttgcctattaaaggactatggtaagtatagaatcttaatggttgccagttagtaat

SEQ ID NO: 52744 - DNA, 409 bp, Homo sapiens
tcccacaatgtcttcaaactcctccaacatggtctcacactggtcaagtagaagggccagaagagtatctgctctggagggatttgggatcccgcctgtcttctctccctgctcaacctgactgattttggagaggcaggtagccaggaagctaagtttggcctactagatgtgcaatcctcattcattcaacaaacatttaccagcacctattctgccaagtagattattaaactcttgagtctcagctccttgcctgtaaaatatgtatggtaattgcacctaccacatcaggctgttaagggtaaaatgaggctacagatgcaaagtatctggtccagagtctgggacacagtaggtgctcaataagtgatggtggatatcattagcaaccattgttacttttttt

SEQ ID NO: 52745 - DNA, 975 bp, Homo sapiens
gttggaactcaaccaggtcctccaaaggaaaccaaggcaggcacaggatgggggcaggctggcttggcaggcagctgtgcggatccacccagagtgccttgggaggcagtggggttggctgtggctgctgtgagctgcagccaggcctctcccgcgtccccagggtctggaaggagggcctctgcacattttataagccacagactgcgaaggcctggagccccaccttccacccataacaaagaaagggatagtttcagaactgcttttatttggataactgactgaaggagtctcatttgtaaccaagatggaattcacagtatgttgttacattcacacttaaaaaatatatctctatgtacaggaatttgcaaagagatgtaaacatacattaatttccaagtacatttctccccttctccctggaggaaaaaaaaaaagccatccaatgaggcaaccccttcaaaataattttaatacaaaggatgcaaacatctataaatgaaaaatgtggttcttctgccccttctgggtgtcatgggagagaatgtcaccgaatgaaaatgacaacagcttggcttcagatggaattggactatttaaaattgagtttccaggaaaaataggcactgatttctagaaggaaattaactccttaccgaagctatttattgagccaatatggctggttaacgtcctcactagtataaagtaacccagtgcaggactctcagacattagctgaaccaagtgtacacagtcagactgcaagggcactgatgaggctactctgaaagctggttgtccccgtcctctaggtgtgaggaccactctgattttatcccaggggcccggtccattcttcccatactgcaactgtcgtgcattatacaaggtaccctgctgcttacccacttcaactactctgcaagtcgattagaaaatcttgttaaaaaaacaaagagggaaaaa

SEQ ID NO: 52746 - DNA, 747 bp, Homo sapiens
ccctgtgctagtttgtaaatataaataaattacttgttttgtaaacttttgtaaagaatattttggtagaaatacttcaaacatattctttgggttatatttatacatatgtgaaataaatatactatcaaaaggttatattttatacaaaaagtaaattgctaccttttgtatgctaatatgcaaagttttgtataatatgatggtttatttttagctctacacttaaaccataggtggttgagtgggaacttttgaaaactatcaagaggcttgttagacaaatttatattctgaaacctcaataaggaaagcattccaggtttccaatccttgttttttgtcctgctcccaaattcttttttaaacccatagttcttgtgtcttatttgattcttctgctgtgcacattgtattggtccttgttgcatgtagtctactgtgtgttttccgattttataaggcagcatttctccatacaaaaagaaaaaaaatgatgtacatataaacgcttttattgtatggctcctccatgttactgtatatatctgccagcacttcccagttacactcctgtgagtcagcttatttttaccctaacataaatagtatgttttgtagtagttatcaaatttaagagataaagcaatcagaatgtttggattttcttctatcttaatgtgaatttcataattaatgtctatttattcagctattcattaaaatacaggattctttgggaaaaaa

SEQ ID NO: 52747 - DNA, 576 bp, Homo sapiens
  misc_feature (1)...(576): n = a,t,c or g
gtgaaaaaggtgatgcaccagatttagttgatgatggagaagatgaaagtgcagagcatgatgaatatattgatggtgatgaaaagaacctgatgagagaaagaattgccaaaaaattaaaaaaggacacaagtgcgaatgttaaatcagctggagaaggagaagtggagaagaaatcagtcagccgcaggaaattactctgcctaaccttggagcccagcctacaagcccggcccaactgcagatctcaaatagcagaattgcccatccagggaatacaacttgcaactggcctgatgagaagccatcacagtttctagccattaactctgcctaatagcagagcccagccactgatctcaccagacagtggagtctatccagcagccccatgtaacatcagaggaaaggcatctgcccagcaaattagagaactcccaacaagctctgactcccctgggatcatcaccagctggcccttcccaggctaaactaaatagtgaacctctatccatgccaaagaacacctattgtaaaggctagaagagggggctttctcctcaaatgcatanaccg

SEQ ID NO: 52748 - DNA, 823 bp, Homo sapiens
  misc_feature (1)...(823): n = a,t,c or g
ttcttattccaacaacaaaagtgaattatgggtttccctcatagaaaaagcatacatgaaagtcatgggaggatatgattttccaggatccaactccaatattgatcttcatgcactgactggcatggataccagaaagaattgctatgcattcagatagccaaactttcagtaaggataattctttcagaatgctttatcaaagatttcacaaaggagatgtcctcatcactgcgtcaactggaatgatgacagaagctgaaggagagaagtggggtctggttcccacacacgcatatgctgttttggatattagagagttcaaggggctgcgatttatccagttgaaaaatccttggagtcatttacgttggaaaggaagatacagtgaaaatgatgtaaaanactggactccagagttgcaaaagtatttaaactttgatccccgaacagctcagaaaatagacaacggaatattttggatttcctgggatgatctctgccagtattatgatgtgatttatttgagttggaatccaggtctttttaaagaatcaacatgtattcacagtacttgggatgctaagcaaggacctgtgaaagatgcctatagcctggccaacaacccccagtacaaactggaggtgcagtgtccacaggggggtgctgcagtttgggttttgcttagtagacacataacagacaaggatgattttgcgaataatcgagaatttatcacaatggttgtatacaagactgatgggaaaaaagatantacccanctgaagnaccgncangantgannannaagnnnnnnnnnggg

SEQ ID NO: 52749 - DNA, 342 bp, Homo sapiens
gcctgctcatcggcagatccccctttccaacctgtaactctgatgtgctctggatcagcttttaacttttaatcatatattactgtcttctaaatcccttctcctcctctactgctgccctatggttctggctcctaccccctgcggcacacttatcttcaaataccatagaattctaatctctggaggctggcagcttgacttggcactttagggccccttagcagggtgagctgttaaaacagcacacatctctcatcccctcttcctttattcccccctgggtttcagaaaggaaggatatatggggaccacctcccccttctttgatcccagcatctc

SEQ ID NO: 52750 - DNA, 1512 bp, Homo sapiens
agggaaagttgaaaagaactttgaaaagtagaatttccattgagacaattgatttgaataggcctgcatttgattcttcatatcaatagaaactaaaatgatttgggagattcatttgaaaaatgattgtatacttgttcacaaagcgaaaagtgatacatgaaggtaatggttatcatttaaagcccacattttacactatcaggtcacaggagtctaatttttttttcagttagataaactgaccaaacgtctattcaagaatatatgtcaatatcatcctaatgtggaaggtccgaagaaccagaaaagtgagaagggccgtttacctccctctgtagctatcacctgttggtccacagagtttcttgagaaatgagcaaacattttatgattagggtaaccctttcacatggaacggggaaggatggggaaaggtggaatgaccataagagttggcctgagaccagtttgttttctggggatttggtaagataggcagttcccatgggaaattgcttaaattgctttgttgcctatgatttgattctaaacaagtggtgctatcttctccctcaatatggctgtcttgagtttgtcttgcagtatcacaccattataccaattctttgggttgcttctgacacattcaaagtgaactctggctgatgttgctgtttcaggtataccatctggagttaatttcctagcagaaggtgaaacgtccaggagaattgtcctctttcattgaacatgattgaaaatgtaactggctctgaacttcaagaagatagatgcccaagtgatgcattaaagtaagggaaataaagtcaagtttttcaactgccatccatattctcattggcagaattctgatttttttccaagcactgtttggtgagcctggaagcaccgtatcctgtcccagggagtacagtgaaatttccaagcaagagctgaggtgccaataccaaaagaccatggggagtctgcacggtttctggttagatcaatagaaaatccatgtgtacaactgttaattcctcatcctccactagcactaaatttgtcactttaaattttgaaaccagggaaacaccacctgtcattctgtccccattctccatagctcttcaatctttacatgccgcaagacttttttgatagctcgtactcatcccagtgtctcctgaaaccccatcatgtaatgtactgggcaccttcttttaaacaaatgtttactctgtgggtttggttcatttcaatttctgcgttctgacacatatttttttaataaagatgagaaagagaaaatgactgttgcagtacctttctagacctactttaactttacctcagatgacagtttgttaacatatatggacacattatttttaactttatgtacaatgcattcaacagaacagcaaaatttttagaaattttccattaatttctgtaacacaccatgtaaaactgttacaaataaacatgtttgagaaaaaaaaaaaa

SEQ ID NO: 52751 - DNA, 414 bp, Homo sapiens
gctagcatgggaggggtgagctgtgagtggggctgagccatgggagcagcaagctggtggagtgggctgggcggagctgtgggggctgctggcagggcctaggaaagtagacaactcccgggggagacgaagtagagagtgagtccccaagaaagggactcctgccccagcgtcaagtgccaaagcaggccccatctaccacttcagggtcgacgttggtggcaggtgttgttcacggtgtactgattgtcactgcaacacctccacatcaccttgaacttcaagaacagcagcaaagctgttattctgctatcagaggctgttaggtagtccagctttaaaataacacactctttctctatcccatgcccttttaaacaagcagccacaggagatgtcagtctccagggcctg

SEQ ID NO: 52752 - DNA, 564 bp, Homo sapiens
cggcacgagagctaaagaacttgaaactgaaattattaaaattggtcgagtaatgggaccaagatgggcggcatgtagtttacaagctgctactgctgtatggcatgcatatcctatattatatatgcatttttctcattcttactctggtttggcgaagagattagctaacattaatttcttacaagaccttgctttaatgattgacattcttgaagaattttcagtactttcaactgcattacagtcaagatcaactaatattaagaaagcacaaaaattgatcaaacgtaccataagagctttggaaaatttaaaaattggtactggaaagtatgaatctcaaattgaagatttgatcaagtcagataagtttaaagatattccatttaataaaaacaataaatttaatgctcttcctaggagtatattactagacaatataattcagcacatgaacctacgccttttatctgacagaaaccatgaagatatttttaattactttgatttgctggaaccttccacatggccttatgaagaaataacttcaccatggatagc

SEQ ID NO: 52753 - DNA, 506 bp, Homo sapiens
aatacatttgaactgggaatttacatgtgtgtcaggggcaggggtgagagtttttaaattaccaatttattgtcttcactttgttcttgaatgagttgtggtagtcagtgtctttctaggaatttgtcttacttccacaaagatatttgtcaaaatactaatcccttgtatggaataaggtcattaggaacatcacgttttacatttctcattttaataaagctttattttatgaataagtcaacgaagtgctgtgtttctcaattatttttaattctctatttccacactaaactttatatcctttctgctttgattttaatttgttctttttttactgtattttctaaagttggaaagttaggttagtaatttgaagtacttctcatttcattacaatgttcatagctattaatttcactgtaagcgttgctttcacacatctcacagaatttgatatgttgtttctgtattttcattcacctcaaagtattttctgatttcct

SEQ ID NO: 52754 - DNA, 525 bp, Homo sapiens
tggacgcgtgggctgttctgatgctgcgggggctcctgcctacagcttctccatcagttccagcatggccaccaccaccggtgagtccccggcccctgtcctggctcccttctcagctcccccgtgcagcgtgactgagggttcaggggaccctccctcttctgcaggcgtagacccggtggccaagtggtgggcctctctgacagctgtggtgatccactggctgcggcgggatgaggaggcggctgagcggctgtgcccgctggtggagcacctgccccgggtgctgcaggagtctgagagacccctgcccagggcagctctgcactccttcaaggctgcccgggccctgctgggctgtgtcatggtatagtctggtccagccagcctgaccatctgtgagaaggccagtgggtacctgcaggacagcctggctaccacaccagccagcagctccattgacaaggccgtgctgctgttcctgtgtgaacctgcttcttgtggtgcgcatcagcctgttggggc

SEQ ID NO: 52755 - DNA, 454 bp, Homo sapiens
cgtatcgagattcagccatttctcttgaataaatactccaccattgacattctgagcattcacatggttcaagctcaattattctataaactgcagtaactgagagaggcaaccaaattggataaagtatgagtttttagccacactccaaatgaatgttgccataatttttcagaggcctggatttcattatgtatctattttaaaaatcttggatcatttagactcaaaaatcacaataagaaacaaaacctgatattctttaacacaggtagcaaagataatccacacttgagtggaaaaaagtctggctaacccttgaaagtctcttaattacatacagaaataatctccgaatgctacaccttctgcccatccaccacactcgctgccagtaccttctgtctccaaagtacaaggggaccacacatacagtcatacttcaaaggctgtg

SEQ ID NO: 52756 - DNA, 393 bp, Homo sapiens
ctcccggagcctggcgtggggttcttctgcgggaagagagagtgcgcgcggagatagcagtgtggaaacacgcgaggagtcggagggcacgggcggccagcgctcagcctgcgccatgggtggtcccgggaccaagagcggggagcctttgtgtcctccgttactgtgtaatcaggacaaagaaaccttgactctgctcattcaggtgcctcggatccagccgcaaagtcttcaaggagatttgaatcccctctggtacaaattacgcttctccgcacaagacttagtttattccttctttttgcaatttgctccagagaataaattgagtaccacagaacctgtgattagcatttcttcaaacaatgcagtgatagaactggcaaaatctca

SEQ ID NO: 52757 - DNA, 2050 bp, Homo sapiens
ggccgccttttttttttttttttttacagtcaataaatacatgtttattgattaaactgaattataaaaaacaaaaccaaaaaaaaatttccttctactactaagccatgcaggcagagtccacaaagacaacttcctggccaaaacccagctgatccactgttggtataatcttaaaaaaaattacccatcaagaaagtcaatcgtgtgcagaagacaggaaccccagctctgctaaggctgtggctgctgcagagactaccaaagagtaggattaggttgtagatagacgtgaccaaccatagttcttgaactttctcaaaggcaaaggctgacttcaaagtccattgtctgtcaataaaatggcatcaggcaaaaagctggggaagagaagcccagatggatccttggttgttttcagatgtcaaaggttcacaaagctggccaagctgtttctggaagggacttttccagttcactatattatagtgtgctgggggatgaaaaaacaaacaaacaaaaaagcagggtggggtgggagaaatgggtggtaacaaatgtcacacctgtaccaccaggcccatcacatcttgagcattccccagtctgtgaaagcctattaaacagggtcacctagaaaaaaaacaagtttataaatccatttcccctcattttattaaatgttccacttatgtacattttaaagacgaaccatttacaagcttgtgcagtttgcctccttggctcacaggaggggaacattgtggaaagcctcaggataaacagaagacttggttttttgctccttttctctgtacggtacagtacgttttggtttacaaccatgagtacatacaattaaaaaaatccctcatgcaaattgtagaaaaaattttctttccttgaagctggcagtgaaaaataaagattcatgtcattttctttgtgcacacccctgtgcgcttcttcctgtcagattcttccctaagtattaagagaaataggggaaagccacagagcacgctggatttcaacaagtggtcttgtctttttaaagttcaacacttcttgaacaattagctcctggctgtaggacccagtaatccccttaaacaggcatgctctcccatctaacaggatgaagttcagtaaagcagggactgcccctgggggcttacaggatgaagactcaaactgggaatggcttccaccctaaaactgtttgatcgcttcagtatctcttgcttgctaataacacctgtatgatcctttgtccagagggatggatggtgttgagaatggggaaaggggccaaggatcacaagtgcaaaaaatattgtttatgtcatgttttggagggaaggtggtgaggaaaagacaaatctattcattctggataattaaaggtggtttcatgcatttttaaagccacaattttatatctagggttgctgtagaaaccaacatctctggagagggaaggaaagaaaaggagaaggaagagagagttcagtgggactttttttccattttcatttttatataaaagtgttaagaccacaatgaaaaaagttttttatccatatatataataaaccagtttgtgagctacataatttgtctttcccatcttcagaaatgttctcacattaacaatgattagatagcatcatgcccaaagacattggccacacaataaaacaaacaaaaaaacccagtactatgatacaattgaggtaaaaggggaaacaaaaaaatttaacatttgcccacaaataattttttttctttttcttaattttgtcagaaaaataccaaacacagtgatttaaatttaaaaaaaaaaaaagtcacaaaaacctgtttttagcagaagtgaatgaccaatgggccagctccttggctcagacgtgattactattggttttcctaattaatccacaaatccacagggaagtgtaagtcaacttcaggggggagtggtggtataaaattaaaaaatagaaaccaaataccccacctggtatgcccccttttccctaagcccctt

SEQ ID NO: 52758 - DNA, 336 bp, Homo sapiens
ggcatctgcgacaggactgcgggctctacccgccctgatgtgggagctcctggagtgggggtgagcagtgagccagggtctgcagggctgtcctctctccacagccaacagccaggccttacagtggggcaggcttagtgactgtgcctcagttatgctgtacctgggagtgggcaggccctctcccatgtcaccatcaaaacccactgatgaaggctggtgggagtctgagggctgcacccgggtatggtgagttcccctcagggattgtgctgagcgccttggcctggcttcttgggctccgcccaccttgctctccctgccaacaagttgtct

SEQ ID NO: 52759 - DNA, 147 bp, Homo sapiens
attggtcttttttgtaaaatttaagtacaggcatttagagtttcctgaaatctcaaatgcggtgttaggtgcctcactggtagacattcttttatcattccttaacaaaaagaatatttcctcgctacagcaataatccctcttgcc

SEQ ID NO: 52760 - DNA, 665 bp, Homo sapiens
  misc_feature (1)...(665): n = a,t,c or g
acaggtgtacccatatatatctctttctggagtattttatctgtctgatgttgcagtattctacaagtttccagaaagagaatagccatataaattattttcctttctgctattatttctctatatgttttatttattcagatttagagtaaaaaataagcatataaacttttattatgtgctcttaacagttttaagataaactataggatagatagaatggttattttatgcaagaaatattgtaccgcaagggtggtttggatgaagtctgactactttttttcaaacaaactattatattaaaactgtcatattttggctaagtttggacctataactacactttcattgtttgcatctctctatgaagatacgtctgtccaaacttttaaaaggcataactgtattttatgtgtttattctttatatagatagtattttatattttattctcacccgaagtattcacacaatctttttaaaaaaaatttgaaatggcattttgtattgccacagaggtagggatgagccatatattaggtggaaatgttttattttgtaaaatataaatggggttatttgccntgcattaggtacccgctcaacttactttttagggggccagggaaccaatctgtaggatcgggntcccntacaggggg

SEQ ID NO: 52761 - DNA, 362 bp, Homo sapiens
ttttttttatatttctcgtggtttataagtttctgaatttccaaatttgccactggtattttaacctacctacaatgttgactctacgtaaaattgatttttacatgtcaggaataagatgaggatcaacgaacaaatgcacagtctgtcttttctatagttcaatagtccatctttgaatagcacataatggaatgtcagaagtggttttttaataatgtatgtttacacttcattgatttataacaatcatggctatggttcttgggtagaggagaatgttttatactggaatgacatacatatgtaggtaaaatatgatagatctatatattttagcacatctacatttaacacaaaag

SEQ ID NO: 52762 - DNA, 837 bp, Homo sapiens
  misc_feature (1)...(837): n = a,t,c or g
acaaccagagaaattcaaagagtaatcagtgcttacatctcaacaatgattcctctaccaccattattatagactccagtgatgaaaccacggaatccccaactgttggtactgcacagcctaagcaatcctggaatccttttcctgactttactccccaaaagtttaaagagaaaactgcagagcnctntcgtgtccttcaggcaagttttctcaacagctctgtacttacagatgaagaattaaataggttaagggcacaaaccaaacttaccagaagagaaatcgatgcttggtttacagaggaaggaaggaaatcaaaagctttaaaagggaaggaggaaaatgggaaatagatgaaagtaatgcaggtagttccaaagaagaagctggagaaacttctcctgcagatgaatctggtgcacctaagtcagggagtacaggcaagatatgtaaaaaaacacctgagcagctgcacatgcttaagagtgcatttgtccggacacagtggccatcaccagaagagtatgacaagttggccaaagaaagcgggcttgctagaacagacatagttagttggtttggggacacccgttatgcttggaagaatggaaacttgaaatggtactactactatcagagcgccaattcaagtagtatgaatggtctgtcttcccttaggaaaagagggagagggagacccaaaggacggggaagaggaagaccgcgtgggcggcctagaggaagcaaaagaattaacaacctgggacaggggaccatcactcataaaatttaaaactggaactgcaatacttaaggattattacctgaagcaca

SEQ ID NO: 52763 - DNA, 1200 bp, Homo sapiens
  misc_feature (1)...(1200): n = a,t,c or g
tttttttttttttttttttccgtgaaatcacttttatttttatttttttccacatagatgacttcatgtcaactacaaaaatcatgaaatgaagaactgattgtgaaactgcaaactcaaaatcactggagtgataaacaggttttcccccagatgacttaaaaaaaataaccaggataccatgaattcatgtttaagtagtaaacatgtcatatatttaaaaataataaatatagaatagcagtacagaaactaatagcataaacagcatgaagtatattttacttttaagacagatgaaatttctaggcacagctttaggcattaaagaggacacagaggcataggttagagtgcactgctctgtacaaaaatacagtctgaataaattacattgctagccatacaattagacgtcacttaccagtcagttcattgcatgtttaataatatacaggtacatgctaatccatatatatcatttatattcaaacacataagtctctctatatttatgtctttaaaatttacatgttgaacttacaaaaagctaaataattgtgcaagaaatcggaataactagccctgctgagtattttatgctatatgtgtgtgagtatatatatgtgtgtatatctatatctatagatgtagatctatatccatagatatctatctaacaatgggtttgtggctaaaaattatgcttaagaacacatctaacaaacctaaagctgcaaagacataatgttaatgtaggtgaaaatttcacttgtgtttattctgatagacaaaattgtattttagatgagaagcaacaattttcatgttgtactgagattgttagtaatgaaatacttccaaatattagtgatggtagaaatctagtgtagggctctttgctgagaagggaaaaaagtcacataagaaatctacttttcagtaaactgcaaatatgtgtgcttcaacctataacatattctgtcactttgagcttgtcatattgacagagaatgaaaacttgataagactcgagatgtgatgatattggtttaacagtacactgcatcctctactaggaccaagagaagtgcctcattggtgtcagcaccaaagtactattctttcattattcaggaataaagagatctcagaacagngaatgtttagttgctgaaatccctatccaaatatcatatt

SEQ ID NO: 52764 - DNA, 1306 bp, Homo sapiens
ttttattttatagaaaataggaaatatttaatatatataaatttatttgccttggacattatttatttacaattgatgattgatatcaacaattgaggtaaaaatatacatgaggtataaatataatatttaaatgcaatatcatactttatttccattggcaagataacaatgaataaaatactgtggtatttgacaaacaagcttgatgcatcgttttttctcctttttttcccttttccttgttttaaaaagatgcactgtgttgttatgcagcggtgatatgattactatgtgcacaaaaacaaaaaagtcagataattcgaagagagggagaatcagaaatacaatcacatttgttcttattctgttttagggatcttctaggtcctcgtttctgagtgtggttttaggccagcagcataggcatccctgagactccttagaaatgcagaatctcaggcccagcccagattacttggagcagagtctgcagtttcacaagatccccaggcaattcatgtgcatgtgaaatctggacaagcacctctctgggcgatacaaagccactcatcctcgtgtgcctatcacgttttccaaacacataggatcccatctcaggagcaggaccagtgtttagctagattaaacttcactggtgatcttgttgatgcatataaagtaatctggcatatatggttaaattcaagatgttatggcagaagtgactttgttttgctcacaaagcattgcccaaaaggtaaattatggatttactgcttccttcttaggtagacatgggaatgaaaaatttctaggtcataattcaaactgtaagattttcctcgcaccataccaaactcatagaaagcttttttattcctctcaataaaataattgcacattgctgataacagaaacattacataaatgcatataatgcaaaaaaacctgaaaacactcatttgcttttctttttttctccaacaccagttgctaaatcttatcaatctctattatggatgaccaaagaaaatctctctccctgaaatcaaacacacaataagttatctttctctctatagctgttgaattacaataaaaagcacattcgatccattagcagttggctaaagggagtcaattcgcttcatctgtacaataataaataaggttgggtcaaatgcataggtagcttggactggctagtgaagaaacacagaagaattaataaactcgattatactatctaaaactaatcaaagaacatagttttggtctcatgttagttaaaaaccctgtcttc

SEQ ID NO: 52765 - DNA, 346 bp, Homo sapiens
ggatctcaggatgtatggaaaaataatctttgtattactattgtcagttgtcccagcaccatttgttgaagagactatcctttgcccattgaatggtcttgacacccttcttgaaagttaattggccatggatatatgagtttatttctggagtctcaattctatccgaagaatatgtctgttcttggggcaaaatcacacagattttattgctgttacttggttataagttttgcattcatgaagtatgattcaccaaactgtgttcttcttcaagattgttttgggctatttagatccctaataaatttcacagaaattttaggattaggttttccattcttgc

SEQ ID NO: 52766 - DNA, 635 bp, Homo sapiens
atggcacttcatatgagccctttcccccggacccgccaccccagagtcaagctgagggcatcggcatgccccagggaagacgatcaggactgtttttaatcgggcagtcgcgcggatggccttttccctctcgcctccttccgccccgcccccactctcagcccggccgcgctgattgtcctgggtcacataatgccagctgagcgtaaaaagccagcaagtatggaagaaaaagactctttaccaaacaacaaggaaaaagactgcagtgaaaggcggacagtgagcagcaaggagaggccaaaagacgatatcaagctcactgccaagaaggaggtcagcaaggcccctgaagacaagaagaagagactggaagatgataagagaaaaaaggaagacaaggaacgcaagaaaaaagacgaagaaaaggtgaaggcagaggaagaatcaaagaaaaaagaagaggaagaaaaaaagaaacatcaagaggaagagagaaagaagcaagaagagcaggccaaacgtcagcaagaagaagaagcagctgctcagatgaaagaaaaagaagaatccattcagcttcatcaggaagcttgggaacgacatcatttaagaaaggaacttcgtagcaaaat

SEQ ID NO: 52767 - DNA, 397 bp, Homo sapiens
cggacgcgtgggcagaagagtactacagccattactaccactactatagcaggcgcttggcccctaaggtggatgttagagtagtgattttggtcagcgtgtgtgctatttcggtgtttcagtttttcagctggtggaatagctacaataaggcaatcagctacctagccacagtgcccaagtaccgtatccaagctacagagattgccaagcagcagggactgctcaaaaaagccaaagaaaaaggcaaaaacaaaaagtccaaagaagaaattcgtgacgaggaggagaacatcatagagaacattataaaaagtaaaatagatataaaggggggctatcagaaaccccaaatctgtgatcttctcctgtttcaaattatcttaagctccttttt

SEQ ID NO: 52768 - DNA, 368 bp, Homo sapiens
gggatgcctcttcatgagaggcctccttttcttcaccttttatgctgcactcctcccctagtttacacatcttgatgctgtggctcagtttgccttcctgaatttttattgggtccctgttttctctcctaacatgctgagattctgcatccccacagcctaaactgagccagtggccaaacaaccgtgctcagcctgtttctctctgccctctagagcaaggcccaccaggtccatccaggaggctctcctgacctcaagtccaacaacagtgtccacactagtcaagggtcagcccagaaaacagaaagcactctaggaatcttaggcagaaagggattttatctaaatcactggaaaggctggag

SEQ ID NO: 52769 - DNA, 677 bp, Homo sapiens
gacagacccagagccagaggaaaatgaaacaaagaaagaatcaagtgttcccatgtgccaaggggaactgaggcattggaagaccggtcactacactttaattcatgaccatagcaaggctgaatttgccctagacttaattctgtactgtggctgtgaaggctgggagccagaatatggcggttttacttcttacattgccaaaggtgaagatgaagagctgctaacagtgaatccagaaagcaattctttggcattggtctacagagacagagagactctgaaatttgtcaagcatattaaccaccgaagcctggaacaaaagaaaaccttcccaaacagaacaggtttctgggacttttcattcatctattatgaatgacagcactgggcaaagctgaacaaaaatgtgacccttcgtaattactgggaagtctgaaagagctaagcatggagtcaaggagaactacatggtagcttgcctgacagtgttcttaaaactggttgtcttttactaggactcataatgattgtcctcaaccgagaccttgagcttgcagctacgtacttatctcttgattaaaaaaaaaaagttggcttttttttttttaacatttagtcctttttccatattggcttcttcagtgaatttttaagttcaatttgtttttattgag

SEQ ID NO: 52770 - DNA, 1999 bp, Homo sapiens
  misc_feature (1)...(1999): n = a,t,c or g
cgacaggtcagagctgcggcctgagcagcaagcgtccggcatgaaggtctggggtctggctgctgctgcttcttgctccagcaccatggaatgcctgcgcagtttacccatgcctcctgccccgcgcgatgagacttccccggcggacnatgtgtgccctggccttggacgtgacctctgtgggtcctcccgttgctgcctgcggcgccgagccaacctgattggaaggagccgagcgcgcacgtttgcgggcccgaccggctccgcgtggcaggtgaagtgcaccggtttagaacctctgacgtctctcaagccactttagccagtgtagccccagtatttactgtgacaaaatttgacaaacagggaaacttagcattttgcagccactgatccttgagaccttcgatgctttggtggaccccaaacattcttctgtagacagaagcaaactgcacattttactacagaatggcaaaagtctatcagagttagaaacagatattaaaattttcaaagagtcaattttggagatcttggatgaggaagagttgctagaagagctctgtgtatcaaaatggagtgacccacaagtctttgaaaagagcagtgctgggattgaccatgcagaagagatggagttgctgttggaaaactactaccgattggctgacgatctctccaatgcagctcgtgagcttagggtgctgattgatgattcacaaagtattattttcattaatctggacagccaccgaaacgtgatgatgaggttgaatctacagctgaccatgggaaccttctctctttcgctctttggactaatgggagttgcttttggaatgaatttggaatcttcccttgaagaggaccatagaattttttggctgattacaggaattatgttcatgggaagtggcctcatctggaggcgcctgctttcattccttggacgacagctagaagctccattgcctcctatgatggcttctttacctaaaaagactcttctggcagatagaagcatggaattgaaaaatagcctcagactggatggacttggatcaggaaggagcatcctaacaaaccgttaggaacagccccgtggatactgaagttttttttatggtagttacaggaaacttctgatactctttttattattttcttgtatagaggcagacacttgaaaaaaactaatgtttgaaggccaaaaatattttggcagtcacaataccagaactggattgcatttccagaattctgagttaaagaaacaaagtatttgctttgtaaaaggccaaaattctatttcctacaaactttaaatgctgtttttatagatgtgatatgaggcaacacaagcacagacagttgcatagattttaatttatacatatcaagaaaagtgcaatttcatgctgaatgaagcgtaggaacttgacaagcccataggtagctatagttctttgtcagtatagggaattatgttcatgtgaatttcctgattctcaggtgactaaaaagctagcattctatgtattaaccttacaacagactctgtaagtttgagctttaaaaaccaaactttgacataaccttatttcttgtatttgccccctttttttttataaaaggtgaataaaaagaaataatttaatatcaccattgtatggattcctaatcaagatttcacgttctcagcccctgagactagttttctttgctctctgtaattagagcctttggaagcaaagttgaaaggaagtatttccattctgttactgttttgtagcactttgtccatttattgatttttaaagtagatatttagataccacccctgccctgccctgccccaaaaaggaaaaatgtttattgtcctgcttaatctatatgcctacacctcaggaaggctggacaggatggaggcttcctaaaaacatgnggggatggaattaaatgtttagggaactgtggattattcttctccatttct

SEQ ID NO: 52771 - DNA, 527 bp, Homo sapiens
ctcccggaaagaacatcagggggtccagaggcagccgacttctctgaccagctgtcgttaggaagcagcagggtccctcggtgtgggcaagggactctgctggctcaggcctgccaggacctccccagcatccgcaactgctacctgactcattgctcgccagcccgagccagtctgctggcctcccaggctctgcaccgaggggagctacagcgagtcccaaccctgctactgcccatgcctacggagccgctgctgcccaccgactggcccttcctgccactgattcgcctctaccaccgggcttcagacaccccctcggggactctctcccacagacaccatggggcacagccatggcgggtcctgcagtgggtgctagttttggagagctggcgcccccaggctctctgggctgtgccccctgctgcccgcctggcacggctcatgtgtgtgttcctggtggacaagtgagctgttccgggagtccccagtacaagcatctggtggcagccctctcgccactt

SEQ ID NO: 52772 - DNA, 514 bp, Homo sapiens
gaagatttaaatgattctttatttcaataaactttaacaaacaatatataatatttcttccttaaaaagctcattcaaagatcataggcagacttcttccccattgtattttagttggggagataaaggcaaaaagaggaaatgtaagctatcttacagtcattctgagaacctctggtttcatgctatactttcccagctaaaagttactaatttacgaagttcagatactgaaacttaaaaatcaagatccatatattaggatgtcctgctgtcacactggtggtggcccattgtgtcggagtctggtaaatggccacaagatatgttctagagacgtccatgagtcctcttgctgtgtgggagcggcatccacagacttctggaataattggcctgtgaggaagctcatcaaagctgcaaacagtacaatgaatggaagagagagccagagggccttattagcgcttctgatggaggacttgagatttgttggcccagaaggcattgtgtt

SEQ ID NO: 52773 - DNA, 1276 bp, Homo sapiens
  misc_feature (1)...(1276): n = a,t,c or g
tttttttttttttttaagttataaaaatgactttatttttctgtttctatgtactacatatccaaataacattaagacattttatcatgaatttgcactatgacaaatcaactttcaagcattttcttgacagttttagaggttttgccagcttttgacatacatacagacagagtaaacaaggggaaaaaagaaaacttaggtgagcacgtaagtcatgggagtttgagctccaataaaaatattcattaaagaggaagaataaggtggggggtggagagaggtattctgaagaaagaaacaaatttacctcacattaaaaaccatgcataggaactgttatcaaacacagccaagaaattaagttttccaaatttatatacccccctttcaaggtattctgataaaaaaattcctttgggcagggggagatcctcctccacctttcaaaaatgaacttaaggatgctacctttatcggtgagtgactttgggaagatggaatgagtggatgcttagtttggatggctggcaggaaactttccaggagcatgtcactgaggcctaaatcttataaaatcatggcaggtctggtgaagactgtccaaggtttcttgcaatgtttctaagtagaaagaaaagatgagaaaattttcttgatcttttaagcagtctgctaagaaccaagctgtttaactaatttgttttgctaacttgaggttagtatggaatgctatcctgagttactaagagcttaataaaatttgactgtttgaatcacattatcacattcagaantcataggataatgttaaatgaatcttaatttagtctctaaaaacaaagtggaattatattcaaattgactttatctgttcactactaagtatgctgacacttttcataatgatggattaggaatctttgctgcttaaatatatcatttctattgatcaggtatttggtatgaaattagattagaggtaaaagaaactacttaaagaatgaacttttcttataatagaaaataaataacagcacaacccttcttgggggaagtgttaataagagatataaagattttgttttttcttttttaatatcagaaatcctgaaatagcatactgtaagaatttggacttcacttaacccaagtaaatacaaggaagatttttgtctaagaccctctccacaaagacaacttgagagccaggtaaatggctacatctgaacaaaatattcatagcaggtatgttttccaggtctttctgaaaaag

SEQ ID NO: 52774 - DNA, 390 bp, Homo sapiens
  misc_feature (1)...(390): n = a,t,c or g
ggactggtgggggctccagcatgtggtgacgtaatgaaattacagattcaagtggatgaaaaggggaagattgtggatgctaggnnnnnnnnnnnnnnnnnnnnnnnnnnnnnnnnnnnnnnnnnnnnnnnnnnnnnnnnnnnnnnnnnaaggacgtgctggctgaagatgcaatcaaggccgccctggctgattacaaattgaaacaagaacccaaaaaaggagaggcagagaagaaatgagccctccctcggcgaagcctccagcaggccacaccagctgtttcccacctgctgtgcagtcaccttagatgttcagaagccgcttcctctccactgaagagctatgagatacgcacaataccttgctggtcacgttatgactctcatg

SEQ ID NO: 52775 - DNA, 486 bp, Homo sapiens
  misc_feature (1)...(486): n = a,t,c or g
ttttttttttgtatttccaaaaagtactttattggtaaagatattaaaattatccagcaaccatcctttggtataaaaagttactatggtcactaatagtatgacagcctttccaccgagagtctgaggactgcatgcctcaatgaagcagagctattttgattaatgtatgccaacaaaaaagtaacaaaaactggatggatgtatgactaggaaatgatactgatcccatttgagaaggaaaattgatttccatcacatgaagagagcagtaaaatgatgaccaaatcctctcaatattttctctttttcatttatttatttatttattttttgaggacagagtctcggctctgtagcccgggctgggagtgcagtgggcgcgatctcagctcactggcaacctccgcctccnggggtccccggtttcaagcattctcccgccntcaggtttcccagtagctgggggttacagggctgtgncac

SEQ ID NO: 52776 - DNA, 652 bp, Homo sapiens
tttttttagcattatgtttcatttattaatcttttatttttcattacattttagtacagcaaagcaaatacaggtaaacatcagtattcttcatacaatagcagacagaaagggaagccagccacaatttagagtgccttttcagttgttgttatatttgtttgttagtttatcactttaagctagattattttactggcgaatttttttcaagctttcaaggaaaagcctatatctatagctatatgctatattcttttctagataatgcaacaagatggaaagatttccaaaacattttatagagctatcaaaactcataccaaaatacaacagagacagcaagtggtcaatcacatttacccaatcagacaatatattaaaacagttgaaacatttccagacaccacaccagaactaaatatgaaaagacataaatataactggaacacaaataccaaatacaatatgtacccacccccaccccccaatacatgagaactgaggctcaaaggcccctccttgcaaggcccctctgactgccatgcattcctctacctgaagttgtgaacaaagatttgcctgtgcccaacatcagctctattggcctcatcttccattgcctccctgtactgctgtggccagtcctgtg

SEQ ID NO: 52777 - DNA, 1092 bp, Homo sapiens
tttttttttttagaagacaaaatgttttattttaaaacattgaaaaaacattaaaagacaaatgtccattatgtaaccaggaatgttaaatatatggaaacggtaaatctctaaaatgtggtaggtacttccagagctaaatgttgcaagttatcctacttttttctctaatatcaacaatacctgatacgatgaaaaataacaaaaagaccttactaattatccaatcaaagtcatcatctttgggtaaatttatatcaacacaacttaaagttttgtccaagatgttcctgacacatgaagcttccagttgaatttcagaaatgttaacaaaagtatcttccttttttgcctgtgaatgtttgagtattgctgtattgttggcttatatccactacagatactggttctaggccagcccaaggatcttcaagcattgaaggcttgaaataattttccaactcattagacattcttttttctctaacacgccctgatccaaatggtgtagatgtccttggagaaccctgggggtgggtctgctgctgccctggggagtagccgaattgctgctgggaccccgcgggggacctggagtaggagccagggtagccgccaggggacggagacccgaaccggccccccgggaaagctgccgccgtgtcgcggagagtgactgctcccgtacggcctagaccgggggcccgtacggcggcgtgtggtgcggactcccgtacccgtctcgaggggagggcggccgtggtccgcccccgcccggggttccccggaagctgcttccgctaccccaacctcctccacccggaccagggtaaggaggagttgggggccgaaaattctgtcgctgcatatcaggagccaaagccgaaaaccgtgcagccgcgttctcccaccggaactgtatcaaccggccctccgcagagaactgctagtcctttaccaaaacagtcctccgaccgcagccacctacggcacatcagttccggcgtcacaaatggattccaggggcggcgggattacctaaatcactgacttggcgagagactcagtggatttaagtgaaaagaggaagaa

SEQ ID NO: 52778 - DNA, 389 bp, Homo sapiens
ctttaagtggaaacaaagattccatttatagcctggccatgaatcaactgggaacaatcattgtatcagggtccactgaaaaggtgttacgggtatgggatccaagaacatgtgcaaaactaatgaagcttaaagggcacacggataatgtgaaggcattgctattaaacagagatggcacgcaatgcctgtcaggcagttctgatgggacaattcgcctttggtcccttggccagcagagatgtatagcaacataccgagtccatgatgaaggtgtttgggcgctgcaagtcaatgatgccttcacacatgtgtattctggtggaagggacaggaagatttattgtcagacctaagaaaccctgacattcgggtgctaatttgtgaaa

SEQ ID NO: 52779 - DNA, 707 bp, Homo sapiens
cctgcactactctgtcaaattaaaaaatataatagctatctttattctcattttaaagcatgataatcatcaaaatgttgaagtttatcacagttctacattaaaaataagtcatttttgtaggtgagttatccaatacagcaaaggccatcaaagagaaagccaatacttttcatggagagctcagagccttaatagatcccagcagcaatgcttcaaccattcccaactccatgttccttgctagatgctcctcaccccaaactcctgcaaatttcaagaatttctgtgtatgtgtgtgttaagggaggagttttaaagtatctctgtattcaacaagatacgtcagcttgtaagcagcagaaacctacttaaactagcttacatgagaaaataacattataaagacataggagtgtttctacaccaagaactggaggtattgtttggtttcatgaaggattaaaatctgtaattcaaaagtagactcagggcagctgccacatcaatctgtgtcttttctctggtactgtggactctatcctgtctgacttgctttgttcctgggcatcattcttgctctggaaaacacactttccctgctcatttttttattttaatgcttaggttcaatctgctcatttttccctacagcagaagacagcttactgtgttccagcaaacaacagagcctgaccagcctcttc

SEQ ID NO: 52780 - DNA, 1406 bp, Homo sapiens
aacgtgttgtgcaagccacacatgtcaacaggcttgtaagcagctccatttatttgagtaaatatcttgtaaataaatcattggtaaacaatacaaaattaaatacattttcaaaagcttgccagtatacgcaaaattcacaaacatagtttttttaaaaaataaaatatgttcagagcacccttgatataaaatgcctgacccccatccttggacaaggccacctgaagacatcttatggtaggtgggtttctgtgggaggcagcgggggcctcctggagggaagggtttctactctcacctattacccatcccacattccatctgaattttgatccttctccaaagagctggtaactgagagggctagagcacgccaccaggcctagctccaagcacggggatcagggtgcacaattagggccaggagcacccagagtcctcaacacaagccattgagagaagccagaaatgcaatctccacacttccaaaccagcaactcagctcctagagcaactgtcttgagagaatgtgaggctttctcaccttgacacttaacactcggtttactcccactggtctgatactacccaggcacagaagctaccagaacctatttctaaggaagaagacactcgatctgctaactttcttttgatctgctttccctggagagagaataaacacagtactcggtggaaagcagacaattcactgctacacagtgcttcctttttccaatgcaaaataccactgagatagtgtggatatttctctagaaatcaagttagttcttcaaattaagggttcatacaactttaaaagactacaaaatgagacaataagcacatgacctggcaaagcatcccaaccaatgaaataatagaaattccataaattaagcccttgaccaacttaacatttctgtggtgtagtgcattaaaataacggatacactgaattctttcactttggtgcataaagtgaacgttgaagtcagcagcactcagtgaagaatgcctagtggcctcttgaaaacacatgtgctgggacctccagttaaaggacaaccacaagtttattccatccatgtgaaataaaactcacatcaacattttaacttagttgtgtgtagatatatacaagtgtgagaaatttgacagctgagtcaaatgtacaacttaagaaaaaaaatattaccaaactacttgtaagaaaactatcttccctgtatcataaggtactgaacatctgagtccttgcaggaaacgcagcctggcgtggcccttccttgagtgtccacctcctttgataatccttggttaggctgtggctagagtcatgatatctttgctattaaaatattacattaacaaaaacctttaaaaccaaaaaaagaacgctc

SEQ ID NO: 52781 - DNA, 447 bp, Homo sapiens
ttttattagaaacatttttatttaaattcagacaatagaaaggtatacagaaaaaaattacagaaacttgcaacaacagtatgcaacttggaaaatttattagtaaagaaggaggggaaaagttattcctaattttgccaagtactgggttagtccttaatagaataatttatcagttcagcaaagtatacccccttgctggtgtcttttgagcagacagattaacaacgtcattaatctactaaactgatatctagtaaaaccttccaaagtaaaatagtcaaggcagcatttccccaacatttgagatacaacttcggggaactgaaataattacagtagaaagttaaaaaaaaaaaaagtcatagtgaataggtataacctggatttcagcccacagatattgcttgtggatctgatggaaaacaaacaatcttaaacctggac

SEQ ID NO: 52782 - DNA, 1281 bp, Homo sapiens
atattgctattataaacaaccctgtgattaacatctttctatcaagatctgcctctactttgaacagtttccttattgccaatagttattttaaaataaatagttattttaaagggaaattgacacatacatataacacactcacgcaaaactggcaagtagcagataagtgctcttctaatttcagtttcctagctttcatgtagaatgaacaattatagtaataaaggctgaaggaaaacaaagatattattgagatacaacagggacagtctaaaacagcatcagaaagcaagttcatgctgttcaacattagcaggcaagggaaatagggaaagaaatacgcaaacgtggctatcacagaaaagccagcttattactttaggttctgtgggagactacaggtcacataaaagcagtctcaacaataatgtgaccacatgtgcaatcaacatttacaaaatgaaattatatatcatgtataacacaaatgttttgcctatactttaatttacaaagccacataccgaatgactgaaatgtacataaacattcttttatgatagaccagaacatctatattatcatgacttagaaaaagaaaacagatgcaaaatagtgttgagaatttctggcctgaaattacaagactaagtgtgtgtgtgcatgcgtgtgtacatatatttaaatcgttttattctcatttgatccttttggctgaactttattcatatattatctgcccttcttcttataatctctctcatgaaagatatcattatccagtcattgaagccaaacccccttcaccagcccccaatctctagacatcaagggttaacaagacatcttcctaaatttctccggaattaagctcttctctgttagaatttcctttccaagtccatttcttcataaatctggcatgtgaaatttgaattgctctgccgcagttttctcttctttagtcagtggtgacagctccaggtctgtttgcttctgtagtttttgtatcatattcatagtctttttcacagtagcacaaatgcggctcttactctctttctgctcaacagcaactggtttaaagcgggcatacaaagtttgatatcgagactttatcactgacaattcctttaagagtgtaactggatttttctcacttgctgaatcaggatgattagtcttgatttcatattccagcctgtattgaatgtaatccagatcagactcagctttctggaacatcagttccagcttatcgacctccgcctccatgtt

SEQ ID NO: 52783 - DNA, 458 bp, Homo sapiens
caggacgcgtgggaccggaaaactctgaggacatgaatagtcgccaggcttggcggctcttgctctcccaaggcagaggagatcgttgggtttcaaggccccgcgggcatttctcgccggccctgcggagagagttcttcactaccacaaccaaggagggatatgataggcggccagtggatataactcctttagaacaaaggaaattaacttttgatacccatgcattggttcaggacttggaaactcatggatttgacaaaacacaagcagaaacaattgtatcagcgttaactgctttatcaaatgtcagcctggatactatctataaagagatggtcactcaagctcaacaggaaataacagtacaacagctaatggctcatttggatgctatcaggaaagacatggtcatcctagagaaaagtgaatttgcaaatctgagagcagagaatgag

SEQ ID NO: 52784 - DNA, 501 bp, Homo sapiens
tttttttttttaatgattcctttattgcatttaatttttgtgtgtgtgttgttccttcgtccattagggaaaaaaaagattctggaacagttctttttatagcatggtcttttgccccctcccccgtttactgacaggtggtgaaaggtgttctttgacattatttccaaaagagacagttttcttttaccccatccttgtcaccccaactttagctccgtagtcattaccacccaaaggttttgtttacaaacttaatagttccagtaacactgctgcgagtatgtcatacccaggaatccaacagtggcaaggcggtgtccatccaggcgcagggaattttcagatggggccttgctgagtaggatcgaaccttctcttcttgacatttcttccagagtgagtcaaaagaagatgcaagcagagggggaaaatccacaatattaatcagatgatgatgacagaatggtgatgataatgacaataatgctagttccagag

SEQ ID NO: 52785 - DNA, 730 bp, Homo sapiens
tgaaaggtttcttctacttttcctctatctcttcacctcctctactttaagtggagatgggaaaaattgtgtaggatgcagccccacgccagcagagcccagcaataactttagatctaccagtcaaatcttgtcggctattgctctgtgcctctgttacagaagcattaatgttaattgccttccccagggatacaaagaagtagaagtaccaaaggaaagggtagatatttaacagatgcctcagtgataaggaaagatgcctccttgtgtctcactgttttctagcactgaaacatgatacactttgtatccacctgcagaataaagcaatccagacaggcgctctgtaacttaggacatcacttgattaaaattatagtctccaaatatagtgttttaggaaaagggcactggcacatttttagaggcacgtgaatgtcattcccacctctaacccatctaacatcggtgagatgttaagaaaatgtgccgatgttactgtgaaataaagatgcctgtaattaattgtaggcatcacacacatgcgtgaacatccagagttaggtctcaaggctcttctggttctaagtcctaacaaacaatgatcttttcagtgaactgtagaattctggaaagaataagcgtaccttcaggctgcttacatcaatagcttacacgtgcttctgatgcctgccttaacaaccaaaaattcgtgccataggtgagg

SEQ ID NO: 52786 - DNA, 907 bp, Homo sapiens
  misc_feature (1)...(907): n = a,t,c or g
tttataactttaacaaatgttattaaaagcagcaattaaaaaccatgaatctttttgaaggtgcagagggttataaggtcagttggcagtaatgcagctattatctggtatgaatgaaatgctggggtggggagtcagggtgacctcattaggccttgtgctatcttcccaggtggtgcagacaccccctccctccttttccctctccaggcccacagcctccccagagcccaggtagggaaggtccagatgtactgtaacaggattgctcatcccaggctatctcagaagtctggaaagcaggcctagaaggttgctgggctctctgaagccaggcaggaagctacaaattggatcccagttcccacagcacccctgggctaggggttggcttctcagctccccttccacctggccctagttggcccctgtggcagcagctgtggggctgaaaagggggaagaactgggtccaacgccagctcgtctatgcctgggctgtgccagggaagcagaggaaagtgggtgggctgtgcacaggaggtgaggtcccccttaaaaggcactgtgggagctgaggtctaagatgggggggcatctaaactatctcagggaccccctgaacgctcacaggtagagaggggtcaggcctagcaatggaaaaacagctcctgcaggcctgctgccccgccagtgcctcttgctgtactaccaccttcgccttcctgctggcggcctgcaaaaccagccaagctggaggccacagcagcagttggcaaggctggtccccatctggtgcccaccctccacgtcaaggcacttttgtccattttccaatcaagtgagtcagtttctaatatctctggaagcagcaaaacatcaggggtcctcttccctcntgccgaatc

SEQ ID NO: 52787 - DNA, 406 bp, Homo sapiens
cccacgcgtccgatcagaaagagataaagattgagcctgctcaggctgtggatgaagtggaacctctacctgaagactattatacaagaccagtaaatttaacagaggtaacaacccttcagcagcgtctgttacagcctgacttccagccagtctgtgcttcacagctctatcctcgccacaaacatcttctgatcaaacggtccctgcgctgccgtaaatgtgaacataatttgagcaagccagaatttaacccaacgtcaatcaaattcaaaatccagctggtcgctgtcaattatattccagaagtgagaatcatgtcaattcccaaccttcgctacatgaaggagagccaggtcctcctgactcttacaaatccagttgagaacctcacccatgtgactct

SEQ ID NO: 52788 - DNA, 651 bp, Homo sapiens
ccatgttacccactctgcctctgctcttctggaactagaacactcatccttgaaggctgggcttctgtatgaaggttggtcctgcctccttacttgaggtgaagctttgtacatgcctgtattacggacatcctcttatttaagtgcttgtctctttcgtcattgggaccccagcacccagcatagtccctagtatactagttggtgccgaataaatagtagctattattagaaaaggaagggtgaaattgacatgggagttagtaaaatgtatatggaaatgatttttaaagggaaaggtaatgattttctggcaggaaaagcagcaatgacaagattacttaagtcttgtgaaataacacttctcttccttgacctgctgcttcccttttttaccacacacacacgcacacataccacagccctttgagactgaaagcagctctattgagaatagtagtgtcaactgtattatgtagaaattctaaagtttttgggattatttcatagccctgaccttgctacttctctccactttatgtggcaggtttaatctcaggtctccctcatacacttctcagcctcagcacctaaccctcacacaacactccagtattgatgcagtcaatcttgtataacattttttgaatg

SEQ ID NO: 52789 - DNA, 113 bp, Homo sapiens
  misc_feature (1)...(113): n = a,t,c or g
tctcgtgagcttatgtctcctctctaaccaaacttgtgtgtcctttgaccaacatctttgccaatcctgtccccctcctcccaaccccatcctctgggtaacttgcntggttc

SEQ ID NO: 52790 - DNA, 193 bp, Homo sapiens
gttttgtcagaatatattgttaggtgaatagagggttctgtggccaagtaagtttgggaaatagtgggttagacaaagttgagttactgttggcctttcagacctttgatacgctaatgtgcattttaaatctccaagaagcacctctattttatacatcatttccctaatttattttaatatggatttcttg

SEQ ID NO: 52791 - DNA, 640 bp, Homo sapiens
tacagcaatatgcagtcctttatttttaacctttacttctttgtggtaggtatgactcttatgtactgcacagggttaaattctgcttcattagcaagcctgaaaattgtctgcttttatgaattaacttttgatataactgaaattgttctcagttctgttcttaccatcctgtcttatttattcaagcttttaacataaataaaccagtggcagattatattttccaaagatgcctacatcccacatgctcttgtacactgtgaccttgcaatttccccatcgacagggtggaatctaaatcccctctccctggaatctgggctagtgctttgggtcatttgtatgccaaaaaatgtgaaagtaatcccgtatgactttcaaggtcagattagaagaggccatgaagcttttgcctggttcttcagtaatgcttgttcagtggaagccagataccatgtaacaagactgttctaaaaccaccatactgcagaggtcacatgatggtgctctgagcccaaacttctagccagtaccaccaacacataagacaaggagagcaaagccaaactgggccctccaaagcagctcatttgccacctaagtcccactaagtgacctcagttgatgccagaaggaa

SEQ ID NO: 52792 - DNA, 447 bp, Homo sapiens
aggcacagataaagataagttttactgtcatgctgcttttaacataacagagcaacatcacctaggaaaaaagtttgtaggaggatttttaatccatatatttgtcttatggctagataaagatttctccgaaaaaaagaagcatgtcaggaatctctgggtgcccctttttcctctggggacttctagcattgttgggcttggctttggttatatcactgatcttcaatatttcccactatgtggaaaagcaacgacaagataaaatgtacagctactccagtgaccacaccagggttgatgagtattatattgaagacacaccaatttatggtaacttagatgatatgatttcagaaccaatggatgaaaattgctatgaacaaatgaaagcccgaccagagaaatctgtaaataagatgcaggaagccaccccatctgcacagg

SEQ ID NO: 52793 - DNA, 789 bp, Homo sapiens
tttttttttttttttttttcacagacaggaagtaactttaattaaatattgtgaaagttgaaaagtttttacagcttgaatttttgcaaaaaaaaaaaaaaaaatttaacaatctctacagtagttaggttctctaacaattgaactgtacagtgtgtgtctattcaaaaagttttgataagaaggtgaaaggttagtagatttagagatgacttcatttaagctgcatcctagtacaatgtgaggccagggcaatgttatgcaatccagtcatccagaagctgtattttttcccccaacactgaaatcttaatttaattcttcatttcattttcttcttaaagccatattctgtatttaggggaacatcttttatttgtaaaacttttgtggagaagaaagaggatcagagggccagaatgtcttttcatctaatcaatagaaatagaagcaacaaaacacaaattatacacattttaaaggctctttggactttcaagaagagttctaaccactgcacatggctgacagatgggtagtgtctgttgtcaaggtctaagccggacaccttcccggctgaccgttcattccttcagaaacagttaaggggctcaccagataaaatatggctttaacttgtgtacatcttcaggccagcgcttaccacgcaaattcagataacctttctgagtaccgagaagcaatgcgtccaccttgcttacattttccagttttttttattattattagtcatcattattatttctcaccatgaaaaacagctttcct

SEQ ID NO: 52794 - DNA, 1597 bp, Homo sapiens
gatgtttttaaagattgaaactttattctgaaacatcaggctctaaaaaattccatcattaagatgaataaatgggaaatggtttatttgttacttccgtaagcataaatgggaaatgttggctgttagaaaatgtgcccagttctttaaaggtggatgttctagtaacactggattaacaagcaaacaaaactgcatgaagtgaacgaatatttcattggataaagttagcataggttttatctgctgggtttaattctcaatcccagaaaaaaatattcttcaaggggtatcagttatagtttcaaagaacaaaatatgaaaatattgtccagcaaagcaaatcattgatcttttttcaaaattacttatattttggaaagtctatatagaatatccacaaatttcttcagccctcttgttgatttcatattttcatgaaactttttcccctaataatttgtcttcgctctttaatcagtgctttactacattactcagcctgaaaaaatatcttttccttcatctgacaatgtggaaataaagaactccatttctgtcattctggttctcttcagtgtccattgagaaagtttctcaactgtttgtaaaatacggggggaaaaaaacacgcatttctaaacctggtacttaaggttatactggattgtttgctacctaattagaagttattggggaaggggcattgtgtctttttatatgatttttagccaaatccagatgttctgatacacatttctgaatacctgtctgactgtaaatacagcctgtggaggttcaggttgataaacctttcacctgactgctccacagccatgctccttgccagcttctggcacattgtacatagatttgttgaatgtttaaatgatgttgtttttctaaatgctgttctctaaaacaattttttgaatttcttttgctttccattgttttggactttgtgtgttcgttttttaaaaaaaaaaatgtttcctaaatatttaacaccaggaaaaatatttttaaatacactggtgctaattgaaacagaaggaaattttcagatcgaagatgtacaatgttaaatgttcataccagttaaactgcactttcccaaggggacagctggcatctacttgaaatgggcatcaagagaccaccaaatgtttacagtttctgtggccccgtttaagtgtaaaatgcagaagtggctctgtccccccagagttaaggatttgctacactggtcctctggaagcatttaagtagaagaaaaggcttatagtcagaatcactttagtaatcgtcttctggtccttggacttttctgttctgtaatgcttgtaacaatgaatatggtgttgccaatctagtctgatatcattgttgacctgtacttactttgtggatggttctacctggggttgcactggcacaaacagagccagaacactggactttcaaaagaccattttgacttctacagtgtccacacacatgaatttaaatgcacttgtaactggttaattaccatgaagtaagtctaacttccacttaataaaagtttttgtgtatctgcttctaaaaaaaaaaa

SEQ ID NO: 52795 - DNA, 835 bp, Homo sapiens
gaggccacaaaagaagctaaggagagcaagaagccagagagcaggaggtcctctttgctgtctctgatgacggggaagaaggatgtggctaagggcagtgaaggtgaaaaccctctcacggtcccagggagggagaaggaaggcatgctgatgggggttaagccgggggaggacgcatcggggcctgctgaagaccttgtgagaagatctgagaaagatactgcagctgttgtctccagacagggcagctccctgaacctctttgaagatgtgcagatcacagaaccagaagcgtagccagagtcaagtctgaaccgagacctccaatttcctctccgagggctccccagaccagagctgtcaagccccgacttcatcctgtgaagccaatgaatgcaatggcccaccaaggttgctaactgcagcttgggaactgccaccatcatcagtgagaacttgaacaatgaggtcatgatgaaagaaatacagcccctcggaccctgcatttgcatatgcgcagctgaccccacgatgagctgattcagctggtcctcaaacagaaggaaacgataagcaagaaggagttcccaggtcccgcgagctggaagactacattgacaacctgcttgtcagggtcatggaagaaacccccaatatcctccgcatcccgactcaggttggcaaaaaagcaggaaagatgtaaatcagcagaaaaaaaacaccgagacgtttctgtgacttcactttcacctgctccaggggtcaaggacttgccttgcctgataaccagccagcaggctccgaatcaccatctccctcacatgttatccgccgc

SEQ ID NO: 52796 - DNA, 317 bp, Homo sapiens
attttgcaacatgacttgggagtacattaaagtaagtcagcatgtatttgacgaagaagatatttgaacttttgcagtttattgtacagtgcatggtaattttttcacctttaaaattcagtttacaggaaaattctaaaatcatgttgccattgtgatgtccaataaatttgtttttagcaccagcattattcatacaggggttaaagtattatttgtagaaggtcttaggttttgtttgttttttaatcatttaaagcaatttctttagccagtttccatttactatgtgaatagaagcactgctaaaaattggg

SEQ ID NO: 52797 - DNA, 317 bp, Homo sapiens
tcaggcatgagccactgtgcctggcccatgtaatagagacttttaatataggagggtgtaccagaagcaccagtttcctgtggcaaacagaattattcctgctgtatttgtaatctggtgccacgaggtagcccagatcccttcagctctgatggaagagcattgcttcagctgtaaatggacacctgcagaaaccttgcaccgatggatagtctccctcagctccgtgccatcgctgcagaggctgttatggacatcactgcagcccagtggctctctctcctggtctccaccatatgagttggcttctgtttctc

SEQ ID NO: 52798 - DNA, 852 bp, Homo sapiens
tttttaatacaaaattatttattagtaaaaaaggagacagcatttgttcgttatacaaaaagtaaaacaattgaaagtttcctacaaaaatttaaactatgagcatacaaagtaggagtggcgctgtgaccgggtctgaggacttcatatgaatgcttagcatcagaaaattggaaatagtgacatgtaaactgtgcttgggatattgtgttaccaagttgcatattttgcagtgtcatctagacgtggtagaaaaatagatatacccatgccatgttctgaattactgtaatttctattaactatagcagatgtcacagtttgtttccctcttatagaaatcactggtggcggctgcctgagggggcaaaagtcccacacagtctgtgcctcgggtaagaagtactctgccgccctggagagcatcccaagtcctctgcctcacacgatgcgcagtagcagatggaggtggtggccgaggagaagcagctgtactgggcgtgtgaggacaagtgttggtaggaatggtcttctggggggtagccacaggttctggtgtccagagaagcaggggaattgtaattctctggagcatatgaaggcagctgcactggcgagtaactgtagtctaaggagccagagagaatggaggaatttgaaggtgatcctgggatcaggctctggttaaagcagaaaggggtggcctggaagctgtctgggaaatggtgtggagcactttgtgtggaattgagcaaaggctccgggtgcatctctgtctgaaggtaggaatcaaagatctggtcgaggcagcttgagttttcttcacatgaaacacaactggaaaattctccc

SEQ ID NO: 52799 - DNA, 5416 bp, Homo sapiens
  misc_feature (1)...(5416): n = a,t,c or g
caaatttatcggctcagggccccagggctataacactcagccagttcctgtctctgggcagtgtccacctccttcaacacggggaggcatggattatgcctacattccaccaccaggacttcagccggagcctgggtatgggtatgcccccaaccagggacgctattatgaaggctactatgcagcagggccaggctatgggggcagaaatgactctgaccctacctatggtcaacaaggtcacccaaatacctggaaacgggaaccagggtacactcctcctggagcagggaaccagaaccctcctgggatgtatccaagtcactggtcccaagaagacctatatcacagatcctgtttcagccccctgtgcgccaccattgcagccaaaagggttggccattcaggtcaactggggccttcgtcagttgccccttcattccgcccagaggatgagcttgagcacctgaccaaaaagatgctgtatgacatggaaaatccacctgctgacgaatactttggccgctgtgctcgctgtggagaaaacgtagttggggaaggtacaggatgcactgccatggatcaggtcttccacgtggattgttttacctgcatcatctgcaacaacaagctccgagggcagccattctatgctgtggaaaagaaagcatactgcgagccctgctacattaatactctggagcagtgcaatgtgtgttccaagcccatcatggagcggattctccgagccaccgggaaggcctatcatcctcactgtttcacctgcgtgatgtgccaccgcagcctggatgggatcccattcactgtggatgctggcgggctcattcactgcattgaggacttccacaagaaatttgccccgcgatgttctgtgtgcaaggagcctattatgccagccccgggccaggaggagactgtccgtattgtggctttggatcgagatttccatgttcactgctaccgatgcgaggattgcggtggtctcctgtctgaaggagataaccaaggctgctaccccttggatgggcacatcctctgcaagacctgcaactctgcccgcatcagggtgttgacgcccaaggcgagcactgacctttagattcagtcacctgttcagccggcactgagaagaacgaacacaagaaaaagataagaaatactagagtaaaggccatcaaactacgcgatagtctctgttcttcatctgctattaaccttgccttagaaacacataaattatgagatttttttttaaaagttgttaccaaatacacatttcacattgaatcatgtaggatcttgatgggcctttgttcccaaggacttccacatttttgcacagattatgctccatcccttcacttctgcattcctgtaacttttaatccctatgtttgtctcacttttcatctggttgaatggcttttcttagtgtggtatttgctgtcacatagttttttcctgggtgagtctgccaactcacaggtgcttttaggcttgaaatctccatcctatcatttccgttttgcctgtgactgtaaagagtagccattcttttcccatgtattgaagaggatattcttctcttgctttatactactcacgtccttggggagggaaatgcacaatttttttttgttaggctgtaaagaatttaagctgtaaattacataagttagaacaagcccaaatttaatttgcaaccatcagaattcagaatctatagtgaccagtgatcaaggctaattggaaaagagttatcggcccatagctaataagtagtgacagacaaccaagcttcaatatttttctaaagaaattacaggtgggatatgctagaaaaggcattttggggttatgtttaaaaaaacattattgtcccacaatattaccttaagatttttcttttccgcactacctgaacattgtaatacagacaaacttgatttcttctagaagataacattttcaatactgtcccacttctcatcttaaaaatattgtcatgtttattctaatatccaacgcaactatcaaaattgcctttttctctagaggatgaaggctgtgaaaaaaccgttcaaattctcttctttttcttttttattaccaggtccattttgcctgacaattgcaaatcagagcatacaaaataaaactgtgcagttttgtttggtttactttcaaaagagtagaaagcttgaaaagattctgaaaccacagtttcattattctcataatccttctgcaactgaaattacatattgcaggagacattttcatatcatcaatgtgacatttacaccacactttcaaagacaatcactgaaacaaaaattgtctttatgagctaaaaatatgcagaatctctgcctagaatctttattcaaacttttattagccagtgaaacacttgcttgccaactgccaagccatacttattaagttcgaacatgtttcacttaaggagagacacctagcttagtcatggcaagttgccattttgtaaactaaggattttggactgagatttcttaaatctttcttcaaatctcccacaagtatatacttttaaattatggagtattttaagtctacaaaaaggtataaataataatataatgaattcctatatacctaatacccagtttaagacaccaaatataacaagtataattacatcctccaatgtaccgtttccttattccacagatatctttttcattattgtgaagtgatgttcagatttctagtttttttttctagtttttaattttaacatcagaactgaaataaaaaattatggatacgtgttttgaattgcaaactattcctcaggaattccaattaaatttattttacttgaataggaatgatcataaaagtgattctttttttgtgactagaaattcttaagccgatggtcactatagctcatccttaatgtatggctcatttgcttttgtcactaaacggttttgtgttagaaccaccaaaattatagcttttaagagcttcctttgaccactgtctttttcttaccctacttctcttatctttgatcgtatatttctcataatgtgaaatatgatgagattcacttaggggcagcatgttagttttgggaggcaatgtcaactgtgtctctgaattcctgtcttccaaattgaagccagaccatgctgatgacctcaagtagcactgactatttgacaatagggctgataatgtaatcggcttgaattttgacttagtaactttttatgtaatactttcggagaaattctctttaggacaaagcagagagtccaatttattgagggatagattgtatctcttaaagtggtcatattattattaattttgcaaaaagaagaagaatttattgaatatttatactataaaatgcagtaacattctacttgcttattacatttaaacccttgtgtaaccgaatgtttacatgtcaagaggaaaagctgtaagaaaatgctgtcacagacccatccctgtggcatcgtcagcaggatactgcttgcttacaatcttttattatgcattcttataacataacctcagagtatctttaccaaaggtttttaaagtaaatctctttttaagatagacttattcttttataataatgaatgtgcactcatacatatgtagaaacatttagatttagagttttttttttctttcacaaggtataataaggaaaggatcctacaatattttattctagggtttcttaaatatatgatttatattactgtcttttctattaatcatttgatttaaacaatgccaagtcactcttttttagttgcatgaaattttgcctgcaacagagagaaaaagattgtattactttaatgattataatcatactgtctgctgatataatatcataattgttgtggtttaaatacataaatagtagaaaaatcagagtctataacagaaagtttgtaaaaatatactgattttgaaaagtatcaggaatataaatatttggtaattctgtgtaacaagagagacatggaaaaggaaaaaaatccactatatcatgggctctgcagaacatatcaaaataggatttcttaaatttttcaacccccagaccatactgactcaacatggagtctcactggccaagaaaattgcctttaaaactcgannnnnnnnnnnnnnnnnnnnnnnnnnnnnnnnnnnnnnnnnnnnnnnnnnnnnnnnnnnnnnnnnnnnnnnnnnnnnnnnnnnnnnnnnnnnnnnnnnnnnnnnnnnnnnnnnnnnnnnnnnnnnnnnnnnnnnnnnnnnnnnnnnnccaaattagccagacatggtggcatgcgcttgtttaaaaaaacaaataaataaataatcgactcaaaaataagtcatgtgtcccagcataaggcatcaggttgttagatgctggcatctctgcagctcaaagatgtgggttctttttcttgtcattaacacattgttatttctgtaggaccaacttctctgatcaaaattacttttctgggtatgtgctgattaagggggtggacttatcaacactataattgttccctatgaaagattccacagagatgtttatggtgaggtttaaaggatatgaaactctacatttaaaacaagtattttatatttgggtacagaggaagaaagagagggctttttccatggggctatagtagagagttagtggaatatagacaggactctgaaaacacaacttccagccatttttttagttagtaaaaatcctattaatgtgaaccagccaggaataacagtgttatttctattggatatggtttgggcttctcttgtcaaatctgtgtcggctgccccctgatccttccattatcaagttttgaagggtgttggggaaattatggcagctgctagggagatcagggaaacactgatgtaacctcaaagcctctcaccattcctcttggcttggaaaggctttattttttcatatacatttctagaaatattgctattctaccttagtatttcacatttgtagttcaaacaagcgattgtccatctgttgcctagagctatagtacatgtgtgttatgaatgaaatatgacagcatgttccatacccctgctttagccatctgtgggaaaccagcaaactgaaaaagacacctctgcaaaatgtgcctcaagtccatttcttgggatcgctcgtttggtgcactctcgtgggagacaatcagagaacaacatatacttgtgccttattttcaaagaatctatttacactactatgaatattccactgaagagtcaatgatgtaaatgataaccaccaaatctcaaaaatatactcaccaaaaagtaaaaaagtaaaaaaaaaaaa

SEQ ID NO: 52800 - DNA, 574 bp, Homo sapiens
cggtgttaaaaacagtgttaaatgaaaaaggccattactcgaggaccccactgtattctggtgaggatactgacctacagatgttactggtaaaggaacccagctggagggtaccccaggtggtgtattgctcccttacaaatgcatgggaatcaataattatatcaatcacgtcaattaataaacaggattttagaaaagcacaatcattgctcaaaaacagtaactaaaaaccaagtagatggagttgacaggaacagaacccccctagggagccctgggaagtcagctgctcaccccagaaatgggctgacgagctgcaggagctcagagccagacaccagctcctggttgaagagtgcgatgcagcggaggaagttttcatacacctcctggctcttcagcacccggcggaccttgtcaaagaaagaaaattcctgcagagtcccgtacttccccactgcagcgatggacaggtctttggtaccacgaagtttcatttttttcttggcgggtgcagacacggggcggaggagcgagggccgggagcgcttcctgctgtgctccggggtct

SEQ ID NO: 52801 - DNA, 994 bp, Homo sapiens
cccggctgcattgtgggagtttgacctccgccgccgccaaccgccgcctcagcttgcgccgccgccgccgccgccgccgccgcgcacgccatgggagccgtgactgacgacgaagttatacggaagcgtctcctcattgatggagatggtgctggagatgatcggagaattaatctgctagtgaagagtttcattaaatggtgcaactctggggtcccagggaagagggatatagccagtaccaacgtatgcctgagcacgctgtctcaatgtgaattttcaatgggcaaaactttactagtatatgatatgaatctcagagaaatggaaaattatgaaaaaatttacaaggaaatagaatgtagcatagctgggagcacatgaaaaaattgctgagtgcaaaaagcaaattcttcaagcaaaacgaatacgaaaaaatcgccaagaatatgatgctttggcaaaagtgattcagcaccatccagacaggcatgagacattaaaggaactagaggctctgggaaaagaattagagcatctttcacacattaaagaaagtgttgaagataagctggaattgagacggaaacagtttcatgttcttcttagtaccatccatgaacttcagcaaacattggaaaatgatgaaaaactctcagaggtagaagaagctcaggaagcaagcatggaaacagatcctaagccatagacaggctaattgcccaccactcccaggaatattgaaatagctacatgaccataatgtgtttaaaatgtggtatgctcttgagatatttaaagttttggcagtaaaatactctgtttttaagtatgaatgtatttcattcatatttcctctcacaaaggaaaatgacttcagtatagatttgtttttattaaaatgcattttttattcttaagtggtaggaagcaacatccaaaaatgcttaataaaatgcttttaagctgcaaaaaaaaaaaaaaaaagtcgagc

SEQ ID NO: 52802 - DNA, 586 bp, Homo sapiens
cttcaggaaagagaggacttttattcctttgcagatatatagttctataggttttattttatgaaagcataaatacagggagttttttcttattagcatcttaactcctgagacctcttaaaaaagagcattgatttcttagctgtactgggtaggtaatacgctgagagtcttttagcagcgagaagggcaggtgggtaggatgagatctttagttaaaggatccaggaaaactggctggttttccttctaaatttgttgagtcaatactaggtaagctttaaatatggatcatcaatgttcttctacatgagtcagaaagaaagactgtgtttcatcacgcctgtgatcttcccaggctcttccaaagctggtaaaccagttaacttgaagggacagaagctgatagaaaaaccatgccaggagaattaaactaaattataaataaaacaactcctataatttcctaattctaaaaacagagtctcatttagcttagtgtaaggaactttgtcataaccaggcctcttaaaaccaaaataatcatccattttgtagagttacaaaattataaagtaaacagtta

SEQ ID NO: 52803 - DNA, 1138 bp, Homo sapiens
aggctgtaccagtgcaggtcctcactttaatcctctatccagaaaacacggtgggccaaaggatgaagagaggtaacaaagatgcttaactcttgtaaataatggcggatagctttctggagttcatatggtatactacttgtaaatatgtgctaagataattccgtgtttcccccacctttgcttttgaacttgctgactcatctaaacccctgctcccaaatgctggaatgcttttacttcctgggcttaaaggaattgacaaatggggacacttaaaacgatttggttttgtagcatttattgaatatagaactaatacaagtgccaaaggggaactaatacaggaaatgtcatgaacagtactgtcaaccactagcaaaatcaatcatcattgtgaaacataggaagcttctgtagataaaaaaaaaaattgatactgaaaactagtcgagactccatttatatgtgtatgttttctgaaagcctttcagaaaaatattaaatttaaggacaagatttttatatcagaggccttgggacatagctttgttagctatgccagtaattaacaggcataactcagtaactgagagtttaccctttggtacttctgaaatcaggtgcagccccatctttcttcccagagcattagtgtgtagacgtgaagccttgtttgaagagctgtatttagaatgcctagctacttgtttgcaaatttgtgtctactcagtcaagttttaatttagctcatgaactaccttgatgtttagtggcatcagcccctaatccatctgatgctttttcattattaggcatgttggagacttgggcaatgtgactgcttgacaaagatggtgtggccgatgtgtctattgaagattctgtgatctcactctcaggagaccattgcatcattggccgcacactggtggtccatgaaaaagcagatgacttgggcaaaggtggaaatgaagaaagtacaaagacaggaaacgctggaagtcgtttggcttgtggtgtaattgggatcgcccaataaacattcccttggatgtagtctgaggccccttaactcatctgttatcctgctagctgtagaaatgtatcctgataaacattaaacactgtaatctta

SEQ ID NO: 52804 - DNA, 974 bp, Homo sapiens
atgcttttttttttttttttttgcagttatcagccacagtgatttattgagtgctttaataatacaagtgtacatcaactgatccacagtcaaaagtggcaggtccctaagaaatttacaagcactttaagtaaatcaaaatacatattattttgttcaatccaacagtcttctgcgggagggacagaaggctagtgataaacagagtctcagtaatgcacagtgattctgattgaagcttttgtacaaaaacttgttcccagtagcatgcacccaccaataaagacttcagtacaaaaaattaaccctaagcactacatttaagtagaaacgagatataattctgaatgtgttttcccaaagatcacataaaagaaaaaaaaatcaaaatcaaataaacaacaacaaaaaaaacaaaaccacacagtaatacaaagctttgtaagaaagctcttactattacagctccaacattgtttgcactgaaaacaaaagttcccatctatgatgaggtgggaaaaaatcccaaatctttcaagttaacagaaatcaacaagggaataaaatgagagataaaagagagcgtgggagagaggaaggggggcaggaagaactgggatgggaagatggacaacataccatcacaaaatggttccaaatttaataaaaataggaaaataagaaccgaggtctggaggggtgggcagggctacccgatgcacttggtgaatgtgccttgcacaggtcccggggcggcaggcagcaggcccctatgtgcgtaccgcttggtccactgtctggccatccggtcatgctctgctctgttggtcatgtactgtgtggcgatgctgcccaccagagggtcagcagggttgcaatctgtaagaagtgagcagatggagaggagaactttagaaatagttaaagccggactccagttgtcctttaagatgtccagacagatcacaccttgg

SEQ ID NO: 52805 - DNA, 1336 bp, Homo sapiens
  misc_feature (1)...(1336): n = a,t,c or g
tttttttttttttttttgccttcaggagcatgtttattgtgtttgagatgatacatcaggtgctctctgagctacaaagggtaaaaggaaatcctctcattacaaactgacaaaggtaaaaggtaaaacatttttcacaacagcatgaaccacatactcagaaatagatctgggtttaatacaaatgacataattcctagccatctacagctacttttataacttcatacagataatgaattaggctaaaatgcactataatatttggtagacttcaggaccagtatccttagtacatcacaaaatacattttgatatcccaaagaagcaagacttgcaagtaggcgttttaaacataactaatctacagctacaaagttctactcttgatagcatttacctttttggggagtctcccaggctccaaaggataaaagcagagtagaatcagtataacatatacacagaagtccgtattgtaaaggctataaagatttgcagcacagtgagaagatgccttctgctccttcacactgcatacaaattatgtgaattatgttgcgtatctcttggtccactgtctggctatcctgtcgtgttctgctctgttggtcaaatactgagtgggctatgcttccaaccagaggatccgcagggttgcagtctgtcaaaagggaacaaatagacagcaaaacctttgaaatagtcaaagcgggactcccagttgtctttaaggatgtccagacagatgactccctgactgttgatgttgcagtgatagattctggtgcggaaagtaacctttggtggcttaaatggataatctgatgaaaatgtgatatcccagaaaaaacacaccaccttcatatacagaacccggtggaccaagtatagttgatctccattcataaatgttatctcctttagggcccagcactgcaattaggaggaggatcaagggttatttcagctagctccttctgaattcttttagcactagtggataacttagcagtggttttgctagagagtttggtgtttttcttctgctgggtggcagaaggttttctttcctcttgttcttcaggctctggagcggctgggtctcgctggtccgcatctgaactgccactgctggtgctggggctctcatcatcggacctttgcctatcactggacatcttggtgaagttatctcttggaaaactcggccgcccgcgccggcccgctcgcgcgccgctacggtgtgggggagggagagagaaaaaaacccttccttaaggaaatggaggcagctgtgggggcaacnanggggggnagggaaaaaaagaagccg

SEQ ID NO: 52806 - DNA, 1123 bp, Homo sapiens
cggacgcgtgggcagggctgcatctgttaccgccctgaggagcaccaggtctgcttcctccgcctgatggaggacagtgatcgggagaccctgcggctgctggtggatacctccaaggtccaagaggcttgggtccccagccaggacacccaccacacccaggagctgctggcagtgcaggggagcctcgtaagtggctaccgcccaggcgggggctttggtgcagcgcctgtgcatgaggacccccatctactgggcccggcgagcagaggggccccggagacagcggctgatttatctctgcatcgacatctgcttcccgagcaacatctgcgtgtcggtctgcttttattacctcccagactgagcccccgacctggcccagcctggcccgtccccaatccagtgggctggccaggccacctgcaccagggaggacagctgctggcagggactaataaacccttccacctggccatggtggtggtgttctctatggaccgaggccctgaaacgcgggcagggaggggcagagaacacactagcttgggggtgggcaccagcctcagacccctcagcagctttgggccctcggccgagctttcccaggcagtgcaggctagcccagtccaggagtgtgcagcctggcttgggtcgagctctgtcacatctggataagcaactgggggctgagagtcccagggcagcctggcccagcaggtcaaggcgccacagggggccatcaggtccagctggcgcaggccgggcaggaggagggtctgctctgacctgggtgctgcatgggtccctccagctgccaccacctgcaccaggcagtcccgaggggtcacaggctagcccagcacactgtcattgaaggccaggcagacaacagccttctggtggccgccatactctctcttgatctctccagtctccacacaccagagccgggccaggttgtccgaggaagcagtgacgatgttactgggagtccccccagaaagggcacgccacatccagccgcgggaggactccccggggttgccgctcttgatgctcagctccgtcatcagggagaagttggacgtcctccagatcttgcacgtctgatcagccgagc

SEQ ID NO: 52807 - DNA, 355 bp, Homo sapiens
  misc_feature (1)...(355): n = a,t,c or g
aaaatgtatagatttatgatatgaataagaaaaaatcgtccaactctatgttgcctacaagaaactcaccttacttgtaagacacatatagactgaaagtgaagagatgaacaaagatattctatgcaaatgaaacccaaaagtgagcaggaatagctatacttagataaatcagactttaagtcaaaactataaagagagacaaagaaggtcattatataatgataaagtgatcaatttaagcaagatggtaaagcaattcttaatatatatgcatccacactggggcacccagatatataagtaatgttattagtctaaagggggnggtagattcgatacggtaatagttagg

SEQ ID NO: 52808 - DNA, 1792 bp, Homo sapiens
tttttttttttttaacaggaacttaggttaatttaatagaaaaaataaaatatggaataacattgattttggccagtatcagttacaaccgttctactatattttacaaaaaaacaactgaacattttacacatgtacagtatttttcagtaaaagtggatttggatttaacaatgggtcactaattgaaaataaaaagacaaaagaaaacagaaataggacttttgtctctagaaggttagagcatttgttgagtctccaaactttgtactatccattacatatatctcattatgaatatatatatttatacataatatataacattaacttaaactttgaaagcattatgttctagttaataatgttatgtagataaatgaggcagtaacacactagtagttaaaccagtatttccgcgacgtgcacctgcatggtcagtgggaaatggaatgcacgctggtagaccccaatgaattttgttgtcatgttgatggttattcgtctacaaaaacagacatcatttttatctttcctatcaatcacagtaacctcgtgcctcaaatattatgggctgattcagttaaatagatttctttgcaggcaaattcggttttgccatctgcttgaccttgctttaggcttgtgcttgcatttgtccacgtaagactgtgcgtttaaatgtaaaactgtatgctgtacccaggattaactttcatttttttgtgtgtcagaagggcctgtggtgttataaggggaagactgcttagcaaaatcagttggttccctagttacttatgaatcattatgtgattcaatacaattgcaatgctattaagagggtcatcagactatttacttattattcactttgggttgtaagttatctttgatgtctagaaatattttcaaggcaggctttttcctagcttgctgtttggatggggacctcagcatctacttcctagctctttcccaggatagtccatgttgacagtattcctctcctcagctgtgactccagcagcatcttctaagtaaggctctcagaagcatgaagcctgcaagatggctggtcacttgtaaagcaaatgaggtcaccaatgaagctttgatatgaagaaacttgatatcagtctaggctcccctaaacagagaaactgtcaaaagatctataagatttcatcgtttctggccactaatcccaaatagtttccctcataattcagtcttcctagtttcgatgaagtgtttagagagtcacagaaaaccagtgaaaatatttcttaaaaaaaaaaaaccccaaaaaacagatcatctcagcattcagtggaccagcatataatagtatggcatagttatagagggacagaggagtagaaaaataagagaactaaaagggtacaatcatgccacccatattcaatttccagttttattttcttaaaatgacaagatgaaaaaacttcttctaataagcaccattgaaaaaagttgcccggccaacatgggcacaagcttaaatattatttaaataaattccatttcttaaaaatacaggacctcttgggaacttttgactccaggaagagatttcctgcatcatatccaaaatgcttcccaccatgacaaatggaatttcagatggcctttaaaaaaaaaatgggggtaatggctagatagcaccaagagattgtgcagggtctacaaagttaacactctgaatttcaggggagctggatcagcctcagctcatctatgtacctctgcattctgtccatctgtccatcac

SEQ ID NO: 52809 - DNA, 405 bp, Homo sapiens
tacttttctattactgtttcatatattttgctacctaagtatttcagtgaaactttaagcccatacctgtgtctgattgtttattattggctttccacaattcttacatcagactacattatattagagaccattattgctagaatagcatgggatttaaaattttctaatactgggggtattatttagttaattataaatttttcttttcacattttactgtgttttaactggaaataaaattatggctgctacaatatattttttgaaatcaacttctgtagttctaaaatacaactttatcatacaatcaaaccaggtagttcatataaaacagtgtaatacaagttttctataaagtcattactgttgcttaaacatatttcatgcctattaagatatatt

SEQ ID NO: 52810 - DNA, 435 bp, Homo sapiens
tgatagccccaccaggtcacacctggcctcacactttgagctgagacttgaaaacgatgctgtggcggaagagcatgtggggcttggtggaggggccccaggatttgttgggggcaaagggggtggcgggaccgttcccaggaggtaccagcacctgcctcgatctcctctgagcctcttctgccccctgtcggccaggtgaggtcagcagcctgggagagtgcccccaagagatgagggcaccccgtgttccttggcaatcttggctcaccttggtaacaaaaggccatagaagtctgtttttctgggtcagttttttttgcctgagaataacaaattgctgctgtctacctttagcacacccaataattctatttggggcagtgaatgcatagaagatataaaaatacgcagcttaactataaaaaaaaaaaa

SEQ ID NO: 52811 - DNA, 439 bp, Homo sapiens
tttccccccaagtctcaaatattgaagaatctctaaccatgctcgaaacgccggtctcagtggctattgagttacccaccaagttaccccggttagagctgtttggggtggctcacgttattgcggcaaactttggagatgacggctgagtcctccgggcgaacatgtcaagccgattgtaaatgctgttatttccacatccttcagggacaccagtccctacgaagaccttgggcgattttgaagtgcgggcacctcgattccccgaatctgtagtgtggctggtatcggtgttcccctggtttaactagcctgtttgaaggcacagatcattcatggggaagtataaccgaaaccagtcctctccaccgcctggggatcttcactttcgcagtctacgactgcctggtgactccagaaagacaaactgcagattggc

SEQ ID NO: 52812 - DNA, 5598 bp, Homo sapiens
tggaagagagagaataggtcatttacttcagtagctacaccttctgtccccaatcacagggacgaaatgacccgagggtgggtgaagctatgcagtaatacagccttcaaaagataatcacatttgcattctcaatagcacagacacaaccatttaatttaacttgacaatcatttgaatgtatcataataaataaatatttctctactaagacatgagagaagcaattctgaagacagtgtctgtggctcacaaacactagtcagctgggaaatacttccctaactgaggtaatctttctagggaaaaaagaaatcactggaatttcatttcaaaggttagggtctctaaaaactgggggaaaaagcagtacagagaatcattttactttataattttattctaaaatacaacaaaactccttagaattatgtcagcataactccttgatgtatttttgtctttaaattccaaatgtgaaagtcataaatattaggcttaaagctgctgacatttgaatcaatactaacagcacacaaagaaaacattttaaaattatcagttatgtaaaacaagcacttactaaatacaaggatttctgaattacaaagcttatgaaacaggtctacaattaccaaaacctcaaaggccaaaaaagacactaggaatttcttaaaaagaaagatgttggaagcagaacacttactaaatcaatgaaacaacttggacaagattctgatacaaaaatcactattgagatgaagttgaaagaatatttgaattcagtccagttaagccactatgccacctaaaacctatttccttttctaattgaaacaaaacttatctcaaaacttttaggcatttaaacaatctgaatttcctttatttttccacagaatataaaaagaatattctgacagcaacacacattgtgctagcaaagaaaagcaaatctgtgctggatactattagtacctcttatcacagaatacatcaaatacattaaggctctttctagaattctagaacttcgaagtgtttcattcaaactaagacactgcaaaggaggaaaaaaatagattttccacctttaatggaaatttccaaaaatgtctgaaaatgtctataaagtacacagcttttcagaccaaaacattagtgccttgatcattttaagtggtctagttattgtaagaatgtaagctcatgttttattactccagttatatggtactgtgccatccttaaaaagtattttgaattttgaaaaaagttctcttttcctagagaacaattacgatggatgtaaggtagtcttctggcaaaggatgagaaacatcagaatatgcccatgtgtaatagttagagaataatgagagttttgggaattacagcgggatacagaaaaataatgtttaggtccaaaatttgctaccataattaaccttaaacaaattcaccaaaagccgtgattaataaaatctgttcactttatagaagtaactctaacatgattatggaatggttaaatctgggggcacacaccctacctaagtaccatggcaaaggctcccagctgtaaggctggtgtgcaacatctactttaacagactctgcagcatggctgttgcataggtgggccgagcctgtctgctctcaatcgcattctgaaggtactggatgcctccacagcgttcccagatttcttcaaactgtcttggcaagatctcagcaccacgcttccgagtcaggccagtctcctcaagattcagctcacacatctccatgtcgtccttaccagccacaagtaggatgggtggcttgtcaggatggagttccatttgccgggcaatccatggtccatcaaaatgggcataccaccagccttttttcttactctgagggtctttgtactggtcggcagggcggatgaatgggatgcggaagaagcgttgctgtcggttcatttcaatctcccgctgcctggcaggaatctgagctgctgggttttgctgaggtgaattgttcaaaaatggtgcaaaatcataatcagtaacagactttggagcacgttgctctgtttcagtatttctcttcttgttcttagatttccaagcatgatacacttttagtctcctatgaaattcttctctgcaagctgccaggagctcaatatcacaagaagtattgatggtatcacgtagttctgcatatttccatttactaagatcatatttcttagtaccagcagctgctttggtggctagtacagcaggacctctactcaaaaattctgacatttctttggccatttgttccggtgtcattttgggtcttgttccatcatttctccgcagcgccaggtcggcctgggcctcatcactgatgagctcggcttcactctgggcaatcctcagggccagctcccggtccctgcgctcctgctccagaactgcttgctgttgggattcctcctccttctgtcgggccagctgtgcctccacttcagcttgaatgcgtttttcatcatcttcccttttctttctctcttcttcttcttgttttctctttgcttccatctcaagtttcatccgcctttcctcctcttcctttcttcgacgtttttcgtcttcttcacgtctttttctttccttttccatttcttcttgaatacgcctcagcctttctgcttcctcttcctgctgtttttttttctgtaatgcactgaggagttcctctgagcttttaaccagtgcatcatattctttctggatttgttcctgcgtcatcatagtggacttaattttggccatcaaagtatcaatagaaatttccagattcttgatctgtttattcatctcgggttttccatctttcaacacactgactacctcattaaatttatcaagtcgttttttcagtgtgcccaccttaaccagaccatcaatgcgaggtttgtgtctcctcttgcaaagccacattcgaatagttttttgcattttaatgcaggcttcagctcgatattttattttgtttttcaatttgatgactgagagtgagcaccactgaactttcttccagcgactgcatgtgagccagtgattgactcttttaaccaactctgctaagtggtcagggtcagacttcatgatctgatcaaattctgcaaacttgccaggtctaaaaaatactttggttaacccaaacttgtagtcattttcatttaagcccaaagctttaaacaaagccttacaaaatagtcttggatccaatcttgcaagtttatctggcatatactttttgtacatgttgtagagttcatgaaatgaagctcgtgatgggtaaccaccctgcatcaagtccaaaacagacaccatccctgaacactgaagctgagacagaatttgagcaccttcaaagtggtggcttgtcatctttaagttaggtttgatgcaacgaataaagcttgctccagtacttcgaagtttatccagaagcaaatttaactgtgtcttaaacttgtttcccacgctgatgaagctaagttttcctgctttttgtttagtatctttgttgttatttgtggatgattcaaataattcccgtataaacttatctctggattcacatattaaggattcaagagacatatgtaaagcatcattatttttctccacaaactgggttgtttcatagcacactgcccccgcaaaatgcctgataatgaagccttcgtcgtctctgatattcctatgaactgccagcttagattttctgggaatagtgagtcgaaaatgatccttgtgcttttggtgaactgcagatgtaaagtgttgatcacttggctggggaaggcgattttcttcatccaaaatatccagtattcccactaatttggcttcaattaaatctatacagtcctgattatccacataatgcacttcattaacacctaaaccttctttttgatagagttcttgttcctccttcagaatcctttcattaaaaaattgttgaagtttttcattgcaatagttgatgcaaaattgttcaaaactgttatgctcaaagtactcaaaaccagcaatatctaggactccaataaaataggatgatgtttcaaaaggaaaacactgatttactctgtttaccacatgatcaaaaagatggctatacactgtctttgccagggcatcacgagcattgtttgcttgctccactttcagaggtacctttataactgttcctttggtgccccctgctgttgttagcatgactcttgtggtcaaacttactcgaagatcatcttggtccaaacccagtaattcagcacaatattccaaagactgagcagatttattcttcagattacaaccacctgaagtgctgccagcttcctcaaaatcaatatttccaaggtgcaggacgccagctactacccggaagagatcaagcttttcttcatcatccaaaccaatttttttcatagccgtgcacattctaataaaatcaccatggtcatctagcagaggatctttcatagaacctgccttaaggtactcaggacttttgcggttctgtaaaatctgtttgtcagtttctttgttagcaaagtatctagtgcagcctcggtttaaataccgaaaattatctggtgaactcaaatgaagtttttctctaatatcttcagaagcaccagcacacaacctataaaagatatgataatttctttcctctttgccttgaacacagatcctagatttctctaggagataatgtgaaacaaatcctccaacaactgagctcttttcattaaaatgtatttctacaaatttcccaaatcgactgctattattgttgcgaacagtcttcgcatttccaaaggcttctaggagtgggttagcttcaacaattctgtcatcaatatcttgacctgttccataggattcagtcaggtatcttagaacaaattttgtattttctgttttgccggctcctgattctccagatacaatgatagactgactcatcttgagcaccttcatgtctcgaaaagctttatcagcaattgcaaagacatgaggtggtcttgtcccaagagattttccttgatatgactttattgcttctgaagaatatattttaggtatgtcaaagtatggattcactgcaatcagaatgttggcgacatatgtataaattctgtctttactatatcgaactttgatattatggagcagtgtggcttcatttaaatacattagtgaacagttatcttccacatcttttttactgtcctcttctgcaggaaacacttggtttatgagagccaaaaatgtcttgcctttctgattcaagggttcaattgttaagctgtcggggccaatatccacaatattgcccatctgaaatccatctgtagggtgtggcgcccaaacgggctttccatcctccatttttgaaggaggatccacgatctcctgtttccactatccactgtcaccggtgcgggagcgaaggcaggtgcgcggcggcggggctacctgtacgggtgaagctggagggcgcggtgagaagtgatgagggccagtgaag

SEQ ID NO: 52813 - DNA, 319 bp, Homo sapiens
tttataaataaaaggcatagaattcagaaagccaattaataatagcaataactccaataataaaatattaaatatatagtgagcaaagactgaatggctcattcttgtgaagcaccatttgacgccattgcctcaatgggtttcctgactctaacacttgggctgagtgaaagctccagcaaacacacagtaagctgcctttagcccactactgacattcaaggaactaactgcctgatggaatggccacagatgaacaggtcatttgtttcaaaagatacttaaatactcaataaagacataacaaaccccaccctgc

SEQ ID NO: 52814 - DNA, 2484 bp, Homo sapiens
  misc_feature (1)...(2484): n = a,t,c or g
cggcccgaacccgctccaggcccgccccgacagcgtcnccgcgtcgcgtgtgtacccccgcgcactgaaggaggtccaccagccctcaccagcccccgcggaccgtgcaatggcccagcgtaagaatgccaagagcagcggcaacagcagcagcagcggctccggcagcggtagcacgagtgcgggcagcagcagccccggggcccggagagagacaaagcatggaggacacaagaatgggaggaaaggcggactctcaggaacttcattcttcacgtggtttatggtgattgcattgctgggcgtctggacatctgtagctgtcgtttggtttgatcttgttgactatgaggaagttctaggaaaactaggaatctatgatgctgatggtgatggagattttgatgtggatgatgccaaagttttattaggacttaaagagagatctacttcagagccagcagtcccgccagaagaggctgagccacacactgagcccgaggagcaggttcctgtggaggcagaaccccagaatatcgaagatgaagcaaaagaacaaattcagtcccttctccatgaaatggtacacgcagaacatgttgagggagaagacttgcaacaagaagatggacccacaggagaaccacaacaagaggatgatgagtttcttatggcgactgatgtagatgatagatttgagaccctggaacctgaagtatctcatgaagaaaccgagcatagttaccacgtggaagagacagtttcacaagactgtaatcaggatatggaagagatgatgtctgagcaggaaaatccagattccagtgaaccagtagtagaagatgaaagattgcaccatgatacagatgatgtaacataccaagtctatgaggaacaagcagtatatgaacctctagaaaatgaagggatagaaatcacagaagtaactgctccccctgaggataatcctgtagaagattcacaggtaattgtagaagaagtaagcatttttcctgtggaagaacagcaggaagtaccaccagaaacaaatagaaaaacagatgatccagaacaaaaagcaaaagttaagaaaaagaagcctaaacttttaaataaatttgataagactattaaagctgaacttgatgctgcagaaaaactccgtaaaaggggaaaaattgaggaagcagtgaatgaatttaaagaactagtacgcaaataccctcagagtccacgagcaagatatgggaaggcgcagtgtgaggatgatttggctgagaagaggagaagtaatgaggtgctacgtggagccatcgagacctaccaagaggtggccagcctacctgatgtccctgcagacctgctgaagctgagtttgaagcgtcgctcagacaggcaacaatttctaggtcatatgagaggttccctgcttaccctgcagagattagttcaactatttcccaatgatacttccttaaaaaatgaccttggcgtgggatacctcttgataggagataatgacaatgcaaagaaagtttatgaagaggtgctgagtgtgacacctaatgatggctttgctaaagtccattatggcttcatcctgaaggcacagaacaaaattgctgagagcatcccatatttaaaggaaggaatagaatccggagatcctggcactgatgatgggagattttatttccacctgggggatgccatgcagagggttgggaacaaagaggcatataagtggtatgagcttgggcacaagagaggacactttgcatctgtctggcaacgctcactcatcaatgtgaatggactgaaagcacagccttggtggaccccaaaagaaacgggctacacagagttagtaaagtctttagaaagaaactggaagttaatccgagatgaaggccttgcagtgatggataaagccaaaggtctcttcctgcctgaggatgaaaacctgagggaaaaaggggactggagccagttcacgctgtggcagcaaggaagaagaaatgaaaatgcctgcaaaggagctcctaaaacctgtaccttactagaaaagttccccgagacaacaggatgcagaagaggacagatcaaatattccatcatgcaccccgggactcacgtgtggccgcacacagggcccacaaactgcaggctccgaatgcacctgggcttggtgattcccaaggaaggctgcaagattcgatgtgccaacgagaccaagacctgggaggaaggcaaggtgctcatctttgatgactcctttgagcacgaggtatggcaggatgcctcatctttccggctgatattcatcgtggatgtgtggcatccggaactgacaccacagcagagacgcagccttccagcaatttagcatgaattcatgcaagcttgggaaactctggagagaggctgcctttctggttccatctccttgggtgtgaggatagaatttcgaacaccaagagtcaa

SEQ ID NO: 52815 - DNA, 1730 bp, Homo sapiens
attatatcactcccaatagcactgacctggtgatcaaaaacacttgagaagacatctattggccatctctggccaattacactaagaaacatatcaaggtgcttttggcacaggtgcccacaaatacggatgcagtgctgagatagtttatgagacttgtaccatttcacaaactctgaaattgggttccatattggcaaggctgccacagttgttaagaataatcctctatgtttcttcctcacaaaaccatatctcatttatatccagaccattacttcactataattacaaggacaaattattagcaagaaataagaatagtattagaagaattgatcctattttgaacccctctccagtatcttcacactcttgtcaactctccaggcctctctcttgccctgagttatcagcctgtgtggtgttaactaccttagaaggtacaagctaagaaatgtaacagtatcaaccctcccagttgcttaattatacccataggtaatacaaaaagctctgaagacccaaagatgacattactaatgatgtgatttcaggagccacagaagaaccttaccagcttccctcaaatcagtccttatcctctttctatcttcactcccatcatcatctattttcacactatccagctaagcaaagattcctgggaggctgacttgtatcttcagactcacagagtgaattcagctcttctgaatcaagacccacccagtctctttcattcagacctgttgctaacaaatttatatttgccaagggatattagggcaaaagagggctacttgattgggtgggccaacctcgtgcccacatgggaaggtatctttaatagggtcttttcaaaccttagtggaggagggtcagctcaatttggggcaatgcatttgttcccagtttcattttcttcctggggaattaactcgtcatttcattccttcagtcatcttctgtgtagggtgaccggagcactgagaggcagctctgatgcactattgtgtgtcagcagctcaaaggccctataaacactgaaggttctgcatctgaagtattaggattgttagcagcaaaatatgaaagatgaggtggacagtcctctaagccctatttaggggaagcttttccaagccacaatcttaactacctacccaaaggatttgcattacccccagattctgtgccaacaaccttttaaggaaatacagtccttgggaaatgagttttgatggtgaattggggtgttaaggaagggaaagattgtcatagatggtagggctttgaaaatgcagggtatcagctgccactcctggcttcaacacattgagtcactgcctagacggttctcttggtcttattcccatcctggccaatgcttaaatactatttgttgaaaataattctttgagacagatttcagctacctcccttccaggttcgatttaacttggttgtaattgtcaatttgttgttataggtcttacctgtgtgaaagaaagaaaaagaaagaaagaaagaaagagaaaggaaattataaggtcaagttaacagttttgaggttttgtgtttttttctggaactacttcaagtgagaaaataaaaaaaaatggtgacaaagctgtacagatagagataatagaagacaaagagattaaaaggaaataaaaatgcatgattaaaaactaagaataaaaaacctatttttatgtttccta

SEQ ID NO: 52816 - DNA, 418 bp, Homo sapiens
atgaaccagacgtggtttaaatagttgattttcctattttaacagtaccaactagttaattgggaaatgtaagttctgaatgttcacattgctttaccagtttggcactggaaccaagagcacatgtcgtggctggctacaaggttgtaaagcagaaaatcgaagtttaccatgtctgtaatgtgtacatgaagtgtcaatttagaacagttactaggataaactccattattgccatggctgtcatggtacccaagtgacttgggaagatgcatttaaattactcagctgaaatcacttgatcatcttgtgccaagatatgctgttggtgcctgatagggattagtcttttagggtgccctgttctcctaccataattgtggaatgatttgtgagaaggtgcaagccatgtttatcc

SEQ ID NO: 52817 - DNA, 864 bp, Homo sapiens
ttttttttttttttatcacactaagtatattttattgtgcattaattagatgaaagttagtaatatgcattgaccaaaacatttgattgacaagaccataaaggataactgagagttttctttaatataattgttgtacagcaaggattcctgctgtatagagtatatagaagatgacatactctaggaattagaacaatatatattcaatacaataacaaaactatatagtactttaagaactctttcacatatatgaacactcttacttaggaacttcagctgtttaaagtaaggcaatatgcaagcctataaagtacacaccaaaaaaatctaacctacaaaacacccaaagcaaatgttagcatatctctattatcaagaatatcttctcaccatcgtttctttcaaaaatatgtgaaaaagttctttctttccttatgagtggcaatttttaaaagtcccctcttctgaaattcagatatgtttcaaatcacactatcatcttcttaaagaaaaatgaaaaccactcctggcttttagatgctgggaacatagtttaccacatattccctttgtcctattgcaaggtagtgtgatatagtagagtaagcatagggtttggagttagagagacttgggaagcctctggcttctgtcatttgctatgtgattctaggttggttgtctacttaaatgctttgagcttaaattgcctcatctgtaaaaagggaataatatagagtggctgttaagtgttaaatcaatacatgtaaagtgcctggcacatagcttggcacccagtaactagttagtaaatggtaggaaacttcctatttgtcttgatttgatttatatacaatc

SEQ ID NO: 52818 - DNA, 1977 bp, Homo sapiens
tagtgcttgaggaaactttaacaaaaccaaggaaaaatgtggtacaagaacaatgcagaaggattctgttccaggcagtttagccttgtacaagtagaagaaggtcattgagtccgttctaaagctggatgcaatttcaggcactactccaatctcttcactttataagcaataaatctgaagcccagaggttaaaggacttgttcaaggtcacattggaagcaaagctgcagctagaactttggtgtccaaactcccaggccaaatctccttctactatgctatatcatactaccattaggagatttgaaaaagaaaagcaaagtctgatgggtgatttttccataaattaaatcagctttaaatctaggcatatttggagaatcacaaacttctaacactgttagagaaaagagagatttaaaagctggttaaatctaaacaataaaaaaatccatatgtacaatattataaaaaaagagaaggaagaagatggcattcacaattactggggaggcagggcagggggcagttgcatgctgggggtgggctgcatgggctgccagctctcctgggtttgaaggatgcggtacagctgcttcagctgagcaacgatgttatccttgatgtctggggttgagatctgcaggcggacactgccactatcaaaggatcgtgtgaaatcaccagaaaacatctcgtagatcatccgagccactactggaatgacctgaaccaagatgagtttcctttccaatggtttcccatctggccattcttccccaaagcataagtagatctcaaacggtggctgcttctctatctgtcctttctggtgggcaatgagatcgctaaggaatgtttccagacaaaatagcttgaccttcttttgtctctcaatcaggttgggagcaacaagtgatggggcacatggcccagaccagtacaccttgcactggcacagcctgatggcataaatggcatgaccgctgacctccaggatcagtcctctgtccatgacgtccagcagcttgctagtgaacagcttctgcttctcattggtaatatgctcaggacctgggaatttgacctgctccaggctgacgggaccaaagagctcctcctggtcaggcatgggacccaggtccccatagaagagtcggcagccctgagggttgctcacggtcatggtctgcccgtactccttcccacggtactgaaacttgatgtccaggtcagtcattgggagagagctgatccacagttctggagagctatagaagggctgtataggtgcctggggtacttccatctccaggggttcagttttgggccacactgcctccgggctgcagttgcccacactgcaattgcccacactggctggcgccatgggagaaccattgatgttcaggaaggggaaggtgtcctggatgggaacatggtgctgcgactgatccagctcatcttcctcatcttcttcatccacatcattatccttctcatcccagggagcagaccctgtggatcctgggttaatgatcgagccctggggctgagggatgtcacacacttgatatatcttcactgggttcatgggcacctccttggtgccatcatacatcaggttgaattctctgctcttattgagagcacagcgcagctgggccttccatttagctgggtcagggtcatccaccccttcctggtacttccctgtctctacagcccaggccttaaaaatggtattttcctcttcttgttgagggctatgccgggtggcatgtttccagggaatctggaagcgtttagagtccctgtgtagccagatgagcccagggtagaggccactatccacctgggccaccagccagggctttagccggactctgcgggggtggagggccatgatatggaagagcaggcagtgtgtccacagggatctgaagagtcggcttgtctttcccttgaccgctc

SEQ ID NO: 52819 - DNA, 130 bp, Homo sapiens
gacttgactgagcctcagcggatcgtggcactgttgcacgtgtgtctaaatgggtgtttggtacctttgttttccttaacctggatgaacaaggacactgactctcatggctgatggggagctaaagtag

SEQ ID NO: 52820 - DNA, 613 bp, Homo sapiens
aacaatggaacaaagaaagagtttatcaaatgctttggaatccctgagagtagaaggctcagcatcgccaaagcttgggttgtaacttttttgctgtgtaactggattgaaatccagccagcccaggtgacctccctgcagagccaggcccctccatattaagattccgcctttgtctggctgaagtttaagtcaagtctccacattaggttagcagcagtctcccaggtttttcttcctctgctggtatctgcaaagttgcaaactgcagtagcctctgtatctgctggaagaggataggccacggccaggtaacaaattaaccctgaaatctcatgggcgtaacacatcgcagtccaaatgcatcgggcggctcttcttaatgaggacttgctccagttgctctgtcttgcgatcctgccatcttaagcacaggctctgtgcagttgcttttgacaggctctccccatgatcatgtaaactgggaaggctgggtggccgtccacgctttgtgggctctctccagactttctcctggttgtttggcatttctttgctcacatgctgcacacacacacatacattcaccctctccatgtatgtcctagagtcc

SEQ ID NO: 52821 - DNA, 335 bp, Homo sapiens
tttgtagttcacagaaggatgtagtccctggcattttggttttgcactgtagaatccatagccttgtcactttgttatgctctggaaatgtactgatttcttacttgggaggaaacttgtgtaaggagatgtggcaaaccaccctgaaagccatgtgcatcctcacctcttccattaccccctccatgagctcgaagcgacattaagtagagggaaatgcttttaacaaatgctgctcatgtggatctgtcagctattgcttgcctagatttgggcacccatgaagcagggttggaatggatcattttgaattgcttctttgcagacaccccctt

SEQ ID NO: 52822 - DNA, 601 bp, Homo sapiens
aatttattaaaagatttttgttcaatacattttagattaggattgacaagtaaagatactgctatggaatgatacattgtattttctgcattgtgtgaaatagtttttattgaaagtcaagtgacatttcaaaagaagttctataacaattatgtttcatgcttaaagtaaaaattcccagagtttagtttagaaaatgtaatcttttaaatttcagactgatatattcccagtattttcataatgccatgttttgataaagtactgaatcaccactttatatccacaaaggcaaataactaatgtatgataatagaataatttgcactaattattgtaaatatgtctactcttcaaatgagtaaaaggtccaattttgtgaaagattgaaaatgaattgaatgcctagtagagtataggagaagttgaccaaggaaggatttaacctggtgccaaggttaaaataacatttctctactgcctattgtttatgttaaaccttaattttttttctgtaatcacttttaacactgctaatagaaattatgttttcatgtgtttcacatgaaaaagtatatatatacaaagttaatatagtggg

SEQ ID NO: 52823 - DNA, 695 bp, Homo sapiens
tgctgtacctttctgacaataaataatattcgaccatgaataaaaaaaaaaaaaagtgggttcccgggaactaagcagtgtagaagatgattttgactacaccctccttagagagccataagacacattagcacatattagcacattcaaggctctgagagaatgtggttaactttgtttaactcagcattcctcactttttttttttaatcatcagaaattctctctctctctctctttttctctcgctctctttttttttttttttttttttacaggaaatgcctttaaacatcgttgggaactaccagagtcaccttaaaggagatcaattctctaggactggataaaaatttcatgggcctcctttaaaatgttgcccaaatatatggaattctaggatttttccttaggaaaggtttttctctttcagggaagatctattaactccccatgggtgctgaaaataaacttgatggtgaaaaactctgtataaattaatttaaaaattatttggtttctctttttaattattctggggcatagtcatttctaaaagtcactagtagaaagtataatttcaagacagaatattctagacatgctagcagtttatatgtattcatgagtaatgtgatatatattgggcgctggtgaggaaggaaggaggaatgagtgactataaggatggttac

SEQ ID NO: 52824 - DNA, 698 bp, Homo sapiens
aatattctctaacatgtacccagtgaattcacacatcttgctgagcttctgaaaacaataggttctttccaaaggggatcaagtggccctgggagacccggcaacaaaccaaaaagaagggctgttgctgtgtctgtttacaacttttccagatgctggcagtacctgtggacttaaaagtgttttttagaggatcgccatggttattgatcactactttatgaactaaacagcattttccagaaaaagggggtttaacttgttacagaattggagaagtctttgcaaaggactgatttaagcccttctacccaacaccttcccctgtgtagatttgcatacagctaaatctaaaatattctgctaaagactattggatgtatggttgatgggatgaaacctttgattaaatttccttttggtggagacatcctgtggtaggtacagataatccaacaagagtccccatttctttgagcttaaaaaggacactgtcgagtaggtaggaggaaacctggcagagccccttatttttggcctaaaaggactgagcaccaagatgtcttttgaagttttaagctaagaggtttccagtgcaatacaatatatacaagtgaagtttttacctcagttttgcaatggactgcaaactatacttattacaccactacaccttctctcaaggcctgccagggcca

SEQ ID NO: 52825 - DNA, 426 bp, Homo sapiens
ccttgaaatatcttctgttgtttattttttttaattttttttttatggcactctgaacactttcatcttccattggataagcaaagcctgcactagagtcagtgtctattcctatcaagaattcctattccatttgtagtcccccagggctgccagcatcagtctcacttgccagctatgttcagggccttcccaccaggaaatctttcccatagccagtttctgtctctcttactgagaaacagaacagttcttcctagcattttgtgccttggaattgccatccataaaccaagaagctcttgtttggtcagttgaaagttgtttatttggcactgtagaatccagcagtttctcacacagttccagagtcagtcctaggggaaaagaaattctctgcatgccttgagtagcatgatcctctat

SEQ ID NO: 52826 - DNA, 707 bp, Homo sapiens
  misc_feature (1)...(707): n = a,t,c or g
cagggaacatggcggcgctggtgagacccgcgaggtttgtcgtgcgaccgttgctgcaggtggtccaggcttgggaccttgacgcgaggcgctgggtccgggcgctgcggcggagcccagtgaaagtggtgtttccttccggagaggtggtggaacagaagcgcgctcctgggaagcagccccgcaaggcaccatctgaggccagtgcccaggagcaacgagagaaacaaccgctcgaggagtccgcatcccgcgctcccagcacctgggaagagtctgggcttcgctacgataaagcttatcccggggacaggaggctgagcaagtgtaatgacaatagtaaagtccaggccatttcgggaaaaacaagggaagatcctgctggaaggtcgcaggctcatttcagacgctctcaaggctggagctgtgccaaaaatgttcttctttagccgtctagaatacctaaaggagttgccagtcgataagctgaaaggtgtcagcctcattaaggtgaaatttgaggatatcaaggattggtccgacctcgtaacgccacaaggaataatgggttagtgattacccagtgtatcttttttttttttttgtcttgttctgtcacccaggttgcagtgannnnnnnnnnnnnnnnnnnnnnnnnnnnnnnnnnnnnnnnnnnnnnnnnnnnnnnnnnnnnnnnncctcaaaaa

SEQ ID NO: 52827 - DNA, 610 bp, Homo sapiens
gttgaagcagtctgaattgactaaaacagtcacttggagtagttataaaccactttcctgttgaaagcagaacatgctgattcaactgttttgttcaatagcaatgatagattttgtttaagtcccctacactttcttatttctaaatgatcaagagtacacttcctggcagtgattaaggagtgtgtatctaacagaaaaaatatatataccctgtgaacccgaatatggaattcagattgtttctgccctcagtatcatacttaaaaaacaagcatacaaacaaacataagggaacaaacagcaaccataacaaaaacaaacctttaaaggtgggtttttgctgtgataaatgaatacggtactctgaaggagaaaaaagtttctcaaatgagcttaaactgcaagtgatttaaaaattagagaatataattcttaaagctattgaaagtttcaaccagaaaacctcaagtgaattttgtatgtaaatgaaatcttgaatgtaagttctgtgattctttaagcaaacaattagctgaaaacttggtattgttgtagtttatgtagtaagtgacttggcacccatcagaaaataaagggcattaaattg

SEQ ID NO: 52828 - DNA, 180 bp, Homo sapiens
caaaattgctcatccctaatcctgaaaaacaggccagaatgggtaaagacttgtcaaagcttgcaacatagctacatggtgcacccggacctgtaccccctccccccaacacaaaaccagtgtctgggaggttcattttcctttaaactgatccagctggccctgaaccaattggttttg

SEQ ID NO: 52829 - DNA, 196 bp, Homo sapiens
gagccactgtgtccagccagccaccgcgcccagcccacccagcctctttcaccaatgtttgatagtttaatatgtacagatctttgacctctttgattaaatttattccgaagtattttgtgttctattaaaaaatagaaatgggatagttttgttcattatctttttcagacagtttgctgttggtatatagaaa

SEQ ID NO: 52830 - DNA, 449 bp, Homo sapiens
gtggaaacttaccggctgagccatggatacaccgttaaggcgcagccgacggctgggaggcctaaggcccgaatcccccgagagcctcacctcagtttcgcggacgagacgggcccttgtggagttcgagtcgaacccagaagaaacgagggagcccgggtctcctccgagtgtgcagcgggctggcctggggtcccccgaaaggccgccgaagacaagcccaggatcaccccgtctgcagcagggtgcaggcttggagtcaccccaagggcagccagagccaggcgcagcgtccccccaagcgtcagcaacgacctacacctgggagtcgcctcaaaagacagccagagtacagtcctgaatccccacgatgtcagccgaagccaagttgaggaggcaccaaagtgttctcagggaccagggagttacttggcctcggagttgggccc

SEQ ID NO: 52831 - DNA, 84 bp, Homo sapiens
ggcctttggacggcagctcatgcacagcagcaacttcagcagcagcaatggcagcaccgaagacctgttccgggacagcattga

SEQ ID NO: 52832 - DNA, 319 bp, Homo sapiens
  misc_feature (1)...(319): n = a,t,c or g
ggagatggaagaggtcaaaccagccagctggtgggtgctggtcagctacggagtcctcttggtcaccctgggagccttcatcttcggccagaccacagccaacgccatctttgtggatctcttggcataaccactgcctcccagggaacacaaggcctttgccattggtcgcaggaacccatctcttagagctatggggccattcttagtccacgatcattccaactggtgggatgacattcggacntnctcttccagggactggggcaaactcaggccccacacctntggacagctcaaatccagtccccttcctgct

SEQ ID NO: 52833 - DNA, 1471 bp, Homo sapiens
gctgcgggagcgtttccggtgacggtgccgccatgagattgaccccgcgcgcgctgtgcaggcgccgcccaggccgcctggcgggagaacttccccctgtgcggtcgcgacgtggcgcgcgtggttcccgggccacatggccaaggggctgaagaagatgcagagcagcctgaagctggtggactgtatcatcgaggtccacgatgcccggttcccactttcaggccgcaaccctctgtttcaggaaacccttgggcttaagcctcacttgctggtgctcaacaagatggacttggcggatcttacagagcagcagaaaattatgcaacacttagaaggagaaggcctaaaaaatgtcatttttaccaactgtgtaaaggatgaaaatgttcaagcagatcatcccgatggtcactgaacttgattggggagaagccaccgctaccaccgaaaagagaacctgggagttattgttatcctgggtcattgggggttccccaacgttgggcaagttcctccctcatcaactccctccggaggcagcacctcaggaaagggaaagccaccagggtgggtggcgagcctgggatcaccagagctgtgatgtccaaaattcaggtggagtcctcaggggccaggccagcactctgtcaagagctctgcaggcgtctggcacctgccgacctctgtgtggcttccggctgctgaccacgcttccctcccctccactcagtgtccccgctgagcacccccggggcaggcactgccccgcccttattccacagtcgtcatagtctttgcgccaaacctttggggaaggcacgctgttttccccatttccagatgaggaggccactgtccagggccatgcagtggtcaggacagacctgagtgtggcgccccccgccccaccctccactcccttccttgtgttctccttgggagcagaagacaagctgttgggacctgacgcttttatttattctccaaattaagtgggaattagatcctctggggaaccctggagcttggtgagagtgacgctgccatggggttgggtccctgaggccttcctcggagcattgggtgccaggggctgcccaggcttcctgagtggcccacctgggtgggaggctgccaccgcggcctgatcatgccctctgtgcccacacaggtctctgagcggcccctgatgttcctgttggacactcctggcgtgctggctcctcggattgaaagtgtggagacaggcctgaagctggccctgtgtggaacggtgctggaccacctggtcggggaggagaccatggctgactacctgctgtacaccctcaacaaacaccagcgctttgggtgagtgcagtgaatgcagggcagctggggcccctcctcctagtcacctcatttaaaaaaaaaaaaacaaacaaaaaaacccccagcattataaaggtattataaacacggtaacctg

SEQ ID NO: 52834 - DNA, 360 bp, Homo sapiens
  misc_feature (1)...(360): n = a,t,c or g
gtcaagagccaggaggggatgacagaccagaggggaaccctcgtcccacgtgctgagcacaccgtagggggtgtgggcacttgctctgtgagctntaattggtgtccctgttccccgccggaagctgcaccaggcagtttcttggtggaggacagtggccgccctctagctttactcccttccccgtgatgggtcgctgtcagatgtgtgtccaggaaaggcaaacaccaaanggcaagatggactaggtcccctacaccgaatactccggtgggccttgcttggggggctggggttttgacgttgctgggaggctgtcctagacttagagattaaaaacagggaagaaccattgctgaa

SEQ ID NO: 52835 - DNA, 256 bp, Homo sapiens
ctaaaatgcatgtgtttatcagatattaacttatataataattggacctattaaaggaaaaattttaagtaaatgttggtagttacattgtcatttcttgctagcaatcaaggccaagttagatcatttgaattcatatttaatcattacacactgaagattaaaagtgaacaaattaatgtcatgaataacttttttccctttattgtagtatagctgagacatttatacattacattttatatatattttaaaa

SEQ ID NO: 52836 - DNA, 683 bp, Homo sapiens
acacacaaatctaaagcatatttatatatcactttaattctaattgaggatgcacgttacagtcatgtctgattgaaactcttagattacagtcttcaatcccaacaaaaatcccatttcatccctctatcactcacagccaaatgaggaagtatatactgcccactttgcctctccttcaccaggtgggtcagtatgagccttttggcccacacactgctgagaaggaagctcaaaagattaaccccttaaaaacaaaacgggagcgcggcctgatgacaaactgaaattcaatccatttatttacacgtacattgtacataagtttacaaattctcacttctgccactcagctagaacttttcggggaaagcctccatctcttccttgatcctgttttctacaagtaatgcgaagttactgtctgtgttctgaaggttatagctgacaaacacctgtttgttggtcttcctggctaggcgctgggcaaggccagtagaggtcgtgtcggaagtgtctccaaggagggaggtagacacggggatggagtcgtagcggctgcacatggccacggcgaggttgcgcaggtgcggcgtggccccccacccacaggaacagcgagtccgtcagccgcatgacgtggaagtggaccagctgctcccacagcctcgcgctgaagttgt

SEQ ID NO: 52837 - DNA, 457 bp, Homo sapiens
ggcatgatgaagaaattatatttcatcacgccttgatcaaatataagatcacttcatagagtttgtttctcttagatgcccaccattttttcatatatatatgatttgattttatatacacatatgtatacatattatatataaatatatatgtgtatacatatatgtgtggatatctatgaatcaaacatactgtttctgttggagatggttcagaattataaagattatctgaatctttatctgtgagcagtctccaaggaagaagttgcgaggtgaagcctttgactgctgtcatgtctgaggtcattccaaggacatgggagactgctgtccatggttggatcctcttaacatcagcagagttctgtcaagttacttagctttcactggggcagctctagcattccattaattcaaaatggtgtccttaatataagcctctaccatttaaaat

SEQ ID NO: 52838 - DNA, 95 bp, Homo sapiens
atattttaaaaataataataaaaaagataaccttttatcccatcatacacataaaaccactgttaatattctaccaatatttttttctggctgag

SEQ ID NO: 52839 - DNA, 2068 bp, Homo sapiens
aggagaatagaggagctgctggctgagaaaatggctgttgatggtgggtgtggggacactggagactgggaaggtcgctggaaccatgtaaagaagttcctcgagcgatctggacccttcacacaccctgatttcgaaccgagcactgaatctctccagttcttgttagatacatgtaaagttctagtcattggagctggcggcttaggatgtgagctcctgaaaaatctggccttgtctggttttagacagattcatgttatagatatggacactatagatgtttccaatctaaataggcagtttttatttaggcctaaagatattggaagacctaaggctgaagttgctgcagaatttctaaatgacagagttcctaattgcaatgtagttccacatttcaacaagattcaagattttaacgacactttctatcgacaatttcatattattgtatgtggactggactctatcatcgccagaagatggataaatggcatgctgatatctcttctaaattatgaagatggtgtcttagatccaagctccattgtccctttgatagatggggggacagaagggttttaaagaaaatgcccgggtgattcttgcctggaatgactgcttgtatcgaatgcacgctggaacttattcccccacaggttaattttcccatgtgcaccattgcatctatgcccaggctaccagaacactgtattgagtatgtaaggatgttgcagtggcctaaggagcagccttttggagaaggggttccattagatggagatgatcctgaacatatacaatggattttccaaaaatccctagagagagcatcacaatataatattaggggtgttacgtataggctcactcaaggggtagtaaaaagaatcattcctgcagtagcttccacaaatgcagtcattgcagctgtgtgtgccactgaggtttttaaaatagccacaagtgcatacattcccttgaataattacttggtgtttaatgatgtagatgggctgtatacatacacatttgaagcagaaagaaaggaaaactgcccagcttgtagccagcttcctcaaaatattcagttttctccatcagctaaactacaggaggttttggattatctaaccaatagtgcttctctgcaaatgaaatctccagccatcacagccaccctagagggaaaaaatagaacactttacttacagtcggtaacctctattgaagaacgaacaaggccaaatctctccaaaacattgaaagaattggggcttgttgatggacaagaactggcggttgctgatgtcaccaccccacagactgtactattcaaacttcattttacttcttaaggaaaatctccacataatagaaaactcatggaaataatatactttgtggatgctaagaagttgaatcgatgtcatttttagcaatagtgttgccacgatttgtctttttttatataatgaaccactcttttttaactttgtaaccttcccttgaagacagaattttggtgttggtgcttgtaagcattttcattaataatatgagaaatgatacctggagagagagattatgagcaaatgtattgcttcttttagaggaggaagcatacaacctcttttgtgtgaattttgttattatggtcaaagaatgcattcctaagttttcatttgagtacccaaatacacaaaaggtgtccctttaaggaaaataaagaattaagttttaaataacattacattttacaatctgacatctggagtatattgaacataggctatttcttgatataacactcatttaattgtggccatccaaatgaatattattgcagaatttatcttgttcataatgatttgtaaatggtgttatagctgaatacctgtgcatgaaaatgggcaatattttcatctgtttacttgtagtgccatagaggccaatatgcacaatattaactaatgccaagacatggctgtttaaaaaatttaatgttcaaacagttatcactgatgcttttgcactatttattaataaaatcatatattgtgta

SEQ ID NO: 52840 - DNA, 426 bp, Homo sapiens
tttttttttttgtcctcctagtaagtgggtgggtgtaatgactaggccatcttgcaaccatgaggaaaaaggcaagaaattttagaatcctcaccactgacaactagccagcaaccacctactattgacttattatgtgacagaaaaaaaaaattaccaacagggtcaaggtctaaaagccagttgataactggtgattctgttacatgcagctcttctgttacattcattactgatgcattgctcctcaacacatatgtgaaataatacaaaacaaggacaaaatacacaggcaaccggcccaagaggctgactcataatgcactacacacacacacccacaaccactcacacacacccacaccccaccttctttcgtgatagtccagcttctaaaagagccaaatagaaaaatatcacctacac

SEQ ID NO: 52841 - DNA, 335 bp, Homo sapiens
aatttccctggaaggacacagcccatggcaaagacatgcttcgagaagggatgagttggacaatgccagtaagaagccaggctgtccagaaaagctggtgcccaagttgctacaaagtggtgcctgcccttgccaaggaggctgtctcttagtcgccttgggtgtcctacaagtttcctccgaaaatgccaagaggaaacctccactttctggggtgaaacgaggaacacgaagagacccatggaggtcgaggcaggggcagcgttgagctttggtgagttattgctttctttcaatttgtcttgatgcctttcgagaggctggaggtcatttgg

SEQ ID NO: 52842 - DNA, 397 bp, Homo sapiens
  misc_feature (1)...(397): n = a,t,c or g
ggagttgcagagatctttccagtagaaattatgtcaggaaggagggggtccacatcttgactggccttcccagcaagagcccctctggtccttgcacggctaattccaaaacacccgtgacttcagagataaggtcagcctgggactgtgcgtctgtgcgtcctcccaacttgaagcttcagttactgtttgactgctcagggcttcttcctgtgtgccattcagacctacagccacttgagtgaaacccttcttcttgcttttgtactgctttgggaggcagctgcctccccacagatggaacagtgtgacctcgcagggccattcgggactgttgagctcctgtggttgttgttcccagccagaatcctgttccttngaaagggaggggttcctt

SEQ ID NO: 52843 - DNA, 516 bp, Homo sapiens
aggccgtgggctgattggggctgggtttcaccgccgcacatgtgtcagcgcgcggtgagctgaggcccctggaggctctgggcgccgaatctcacccgctgccatggccaaagccggggggtgattttcaaccaatgccgggtggtttcttttttgatctaatggttaagagtgtgttaatttctatgatttttaaattttccagttttctttttgtttttgatttctaagttcatcccattgtggtcagggaagatattttgctgtcttttaaaatcaattcagacttaatttatgacctatcttggaatttatcctatgtatacttgagaagaatgtgtatttcattgttgggtagagtgttctgtatatggttgttagatctagttggtttattgtgttgtgaaagtcctatatttccttgcttagattttgatggttctatccactactgagattgggatattaaagtctccaactattaatgtagaattgtacttctcccttcaattacgt

SEQ ID NO: 52844 - DNA, 1060 bp, Homo sapiens
tttacttcttatagtaatagtatactttaaaaagcctcagggtatattatcttctaaacagctacaattcagtgcagctacattaaccaactatgttctctagttgagaacaactaggcctatttcactgctgtgtagcctcagtgcctaacatgggtgccaaataaatattcgtagaattacactgaattgtaaaaaccattcgtttttgtttacaattgccaaaaatctcaaaaggccctgtatttatgtaattctttgaaattattattttattttgatttctcagttattgactggctgggtgtgacttagtacataagtactcaatattataaaaacctcaaataattgacttgattttacacaacatccttcccttttctacaagttaatttttttacaaatcatttgggttatctcctaaataggttatattttattgcttctagaaacaatgtttcaaaatatatgtgcattatcagtaataatttgtataaatatttcccacaacaattttcataattttcaaagactaatttcttgactgaagatattttgctagggaagtgaaactttaaaattttgtagattttaaaaaatattgttgaatggtgtcatgcaaaggatttatatagtgtgctcccactaactgtgtacagatcaggacacatatttttagacatctaagtctgtagcttaaatggaggttactcttccatcatctagaattgtttacttagtaattgttgtttcttttattattatagacttactatcagttttattttgccaagtatgcaacaggcatatcactagtatatgaaaatgtaaatatcacttgtgtactcaaacaaaagttggtcttaagcttccaccttgagcagccttggaaacctaacctgcctcttttagcataatcacattttctaaatgattttctttgttcctgaaaaagtgatttgtattagttttacatttgttttttggaagattatatttgtatatgtatcatcataaaatatttaaataaaaagtatctttagagtgaaaaaaaaaa

SEQ ID NO: 52845 - DNA, 481 bp, Homo sapiens
agtttttgcattcttgagatcagagaatagactatgaaggctggtattcagaactgctgcccactcaaaagtctcaacaagacacaagcaaaaatccagcaatgctcaaatccaaaagcactcggcaggacatttcttaaccatggggctgtgatgggaggagaggagaggctgggaaagccgggtctctggggacgtgcttcctatgggtttcagctggcccaagcccctcccgaatctctctgctagtggtgggtggaagagggtgaggtggggtataggagaagaatgacagcttcctgagaggtttcacccaagttccaagtgagaagcaggtgtagtccctggcattctgtctgtatccaaaccagagcccagccatccctccggtatcggggtgggtcagaaaaagtctcacctcaatttgccgacagtgtcacctgcttgccttaggaatggtcatcttaacctgcgtgcagat

SEQ ID NO: 52846 - DNA, 123 bp, Homo sapiens
ataaaatgcatgagactattaaatcttttcatatactctacaaataaaatgaaatctgtgtgtggtcctggttgactgggcatctaaagagactattaagctatctagggattttttttcaaa

SEQ ID NO: 52847 - DNA, 486 bp, Homo sapiens
cacatttaggttccttatcgattacatgccgttttagttcacgaaggccaagctaatgctgggcactactgggcatatatttttgatcatcgtgaaagcagatggatgaagtacaatgatattgctgtgacaaaatcatcatgggaagagctagtgagggactcttttggtggttatagaaatgccagtgcatactgtttaatgtacataaatgataaggcacagttcctaatacaagaggagtttaataaagaaactgggcagccccttgttggtatagaaacattaccaccggatttgagagattttgttgaggaagacaaccaacgatttgaaaaagaactagaagaatgggatgcacaacttgcccaagaaagctttgcaaggaaaagctttttagcgtctcagaaattgagagagtcagagacttctgtggacaacagcacaagcagcaggagacccagaatatctagagcagccatcaag

SEQ ID NO: 52848 - DNA, 277 bp, Homo sapiens
caaatttaaaaatggtgctcgatatatcggagaatatgttagaaataaaaagcacggtcaaggcacttttatatatccagatggatccagatatgaaggagagtgggcaaatgacctgcggcacggccatggcgtatactactacatcaataatgacacctacactggagagtggtttgctcatcaaaggcatgggcaaggcacctatttatacgcggagacgggcagtaagtatgttggcacctgggtgaacggacagcaggagggcacggccgag

SEQ ID NO: 52849 - DNA, 368 bp, Homo sapiens
tgaaattaaaaaaaatactatttgcattagaacccccaaaagtggaatacttgggtagtaatctaacaaaacatgcacaagatttatatgagaaaaattgtaaaactttaattaaagaaatcaaagaactaaataaatggagagagattttatgtggatagaaatattctgttttcaagatgtcatttcttcccaactgatctatagattcaatgcagtcccaatccaaatcccagtaagttgttttgtgggtattgacaaacattttaaagtttatatggagaggcaaaaagacccagaatagccaactcaatattgattgagaacaacaaagtcacaggattgacactacctttcttcaaggcata

SEQ ID NO: 52850 - DNA, 405 bp, Homo sapiens
gttccttcagctttacatatgcataaaacacaccgtagtggaactgtctgttgaatgccagcacattcatttgtacctcacgctcgtaaaacacgtcctccaatgtctttcccccactgccacctacagcttcaaataaaggtttgtatactccgtaatgatccgctacgttcttcatctggtcaaagtcttctgcttgagccaacagccgcaacccctcaggatagagtttgccgaaggttggatagagggtctctcggtcttctttgctcaattcagtgccaaaggagttaagagtgatgataaaagcacgtctgtcggcctcaaactcaagaatgggacacataacttctgctgtgacatcaccatgattcttacagaatttatagaatgcctcaaggtaag

SEQ ID NO: 52851 - DNA, 610 bp, Homo sapiens
cttgagactggctttttttcactcagcataattcccttgagatccatccaaggctttggatgtatcactagtttgttcctttttattgatgagcatatagtgcagatatatcacttagttttaacagctaaggtatctatttaaagatatcatcttaaaactaaatgttacacaaatttcatgcaactttcatataagcattaaaccatacagctgcatctacgtaagtataattagcaaaatcactgaacatgccacttcctgcctccgtctgcggtgttgacatatgaggtacagcaatccgagagtcaactgttatcacggtggccactgagggcagtgaaatcactttgatagcaccagtacccagatgtttgaaacttaagaaagtatttctttaatttttcataaacccatcataaaaaaaaaaatcccgacttgaaacttaactgtatctggatgttcatatttttattagttgttgaagttgtacatttaaaaagatatttcttgcaaattttgtaaatttctatatgcttttaaaatagaaacatttgtataacaaggaaggatgaaaataaaacaaattcaaatatgtgaaaaaaaaaaa

SEQ ID NO: 52852 - DNA, 410 bp, Homo sapiens
gcactatgtaaaatggctttagctctttggaattggaagttgtatcttctaacatggcctaggagcagcccctgccttccagcatagagttcagcttccaacacacgcctcaagaaccatgggtttttttggaacatgaggccagctcttagctacctgcaattcggaacgtactatttggtttcagcagtttcttgacccttcatggggtcatcttcaagttctgtattgttgcatatgtgttttttctctttgcctttggatagttttctggctttcagattttgatctttcagattttgacaaatcagaaaaagaccaaacccagccaaaacctgtctttcattacagtttgttctggttgaaatgttaaaccttctcacatccgtggtattgaagcaaattatgat

SEQ ID NO: 52853 - DNA, 92 bp, Homo sapiens
attcatggaatttttgaactccttgtcttaactactctgccagctcttgttgaacaaagaccaatccgctcttcatgatttgctcctcatgt

SEQ ID NO: 52854 - DNA, 420 bp, Homo sapiens
caatcaacactgcctcatgagctactgctctcctgctctttgaaaagacaaatccttatttctttgtagtgatccagaaggcagtgggaagaatgacaggtgcttggttatcttcaatttaatctctacctttcaatggggctagtgcaagctagggccattttactgcacccaaaggaatttaagacatttctattatctctaaagaatccagattaacatgccttcttggtgggcagggagaccagctatgaattctaggatctcaattcaaatgcttttgaattcttcctgcttgttcagttaattacatatatgtcaccacaatcttgcttttttttttctatgcttctaattttctctgaaactataacattattttaggggttaataaatttgtaattggaaaaaaaaaaaaaa

SEQ ID NO: 52855 - DNA, 119 bp, Homo sapiens
cattgcaagagcacatcttaagttattgtgtacttctatcagggggcacatagtgtatgcttgtctcattttattgggatatcagccattggtataatagattcataataataataata

SEQ ID NO: 52856 - DNA, 1701 bp, Homo sapiens
  misc_feature (1)...(1701): n = a,t,c or g
tttttttttttttttttttaactgcgccccagtttctttttattgatttcttttcttttctttttttaagtatggaggctcaagtataagatgtagatttttttcttaagctttacaaaaaaacaaaataaaacaaaaacctccttttgcattccatagaaattgacagaaaagcacctggccggaagagcggaacggtcggcggcaccccccccagcccccaccccgcggcctccgtgggacgggagagtctgcgcaggacggcaccgagggccacctctgctcccagagctgtcccctgtccccacgacccccaaccccaagcaactcccaaacacacacggaataagatttccagtttttcttctctctttcacacaccacagttagttcataaaatttttttgttttacattttttacaccaatgtaccaaaaaggtgggagggaagggaggctggcagacagtggattttatgcctataaatggggggacagggaggaagacggggggcccgggtgaacaaaaaccacacggtctctatggaaatgtggagagaactgagagcgaggtgtggcagaagcaggctcggagccggaggagggtggctatcggctttattctcagggagagatggcgctgtgcggtcaatgatgcagctgttatgtgacctgtcggggagggaagggacgagggaagggagcagaaaacgagttttctaagaaaggaatctaacgagtgcacggcgtgtctggttagcatgaaacagaggtttagcattgctgctttctcttcaaagcctccaccaggtcattcttcagagcttcttgttttgatttgtctgcaaaagtctgcacagacctcagcccattgacgatatcctttgtttttccaaagtagatctcgttcagcgtacttctgattttattttccatgtcctctaccaggcgcccgatgttggctatgtgtggggagcagtcactcacagtttcatccttctccatctgtctggtaaggctgcctccgaggttcatggtgccagagccagatttgttggtctgcagccacagcatcaccgtggaggtcaacttgtaatgggcggtgcgaccgctggatttctcctgcacttctaccacgtggatggaatcccagcagcctttgatcttctttgatccatctccagccttctttatgaggatcactccagcaaagccatgatccagatcccagaggtagacagatgagacgccaccttcaaaatacaggtctcgatactggtcaaaggcattgttggcttccacctccagctttctcagccgagctgacggcatggccccatcctccaagggagggtcatacttgttactccatggtgacctataggagtccccatctctgttgtagtcacacaaaaggtaatcctttcccaccaccttgtctctggcaattttcagtggctggtcaacagaagacaggagatcctcacatagactggggaccaggtcgatcaggtcgctgaggtttttctcgatttgctggggaggcaggcgcctcattaggtccaaggcacagtccagctgctgatcactcatggtggcggcggcggcggcggtcccggtcccggcgtcagtggctctcccccccgcagcagggcccggcgcttccacttccccgggtgaaaaattggnacgatacanagcg

SEQ ID NO: 52857 - DNA, 435 bp, Homo sapiens
  misc_feature (1)...(435): n = a,t,c or g
tgtgctccatcctggatgacagtgagaccctgtcttaaagcaacaacaaaggaacaaactacacagcaacctggatgggcctccagagaattatgttgagtgaaaaaagccgttcctaaaggtttcacactgtatgttcctttctgtaacatctttgaaatgacacagttgctgaggtgggagaacagattagggtttgctaggggtggagagaagtaggtgtgccctataaaggggcaacagggagggggtcctcacagtgatgggtgctctggctgtgtttaccatccatgtccctggtgtgatgtgctgtagttctgcaagatgtcactgctgggggcaatagggtaaagggagcgatgggatctccccgtattcatttcttataattagagaattttccaatttaccntaaaattaaaagtttaattttta

SEQ ID NO: 52858 - DNA, 617 bp, Homo sapiens
gaagaaatcaaaatccaaaatttgtttgtcactgccaaagtatttttttcactgtttcacttgctcttgggtttgtttggatgtgggtctttttctcttctgttctgattttgtttgtgggtgtcgggatatttgggtgcagagggtttgtgcccagttagaagcgacttttgttctcttctgcgtaggcgttggtgcgtccgccgcgtggtgcgtggtccgtgtgccgttgctccggcctgcgtctccatatgtgtaggaaaggacacgccgtctgtcctcacgccccctgtgacttttcatatttccgttttccacttgtggaaaaaaagtgctaaagttttcttcccagagagagcataattccgaaacaaaactttgacaatcttttgggttgattctcgactgcttttcgagcatgcggagccagcaggcctccctgaaacactgcttctcggccagcccgtcctcctctacctctctcctctccgcgccctccgacctctctcggccccctcaccccagctccgacctctctcagccccatcgccccaactccaacctctcggccccatcgccccaccgcagctactcccctttcttccaaacttttgcag

SEQ ID NO: 52859 - DNA, 959 bp, Homo sapiens
attataggtatgagccactgtccccggccagatttttttaaaagtaggtatcttgtgggatttatgttctgagagatacacctaaggaaatgctgccctacagtgtttttgctagttcatactcattacaaaggtttcttgttgttgggtgcccctctagccagtggtagtaaaatgggaagagacaggtcaagactcccttggaccatggcattgagagagggatggctgtcggcatagatatgttggttatttaggcatttgtgagggaggcccctggctcttccagcctgtttccttaggatcccagttggccgggaacagctgtacaagggtctgctgaactggtggtttcagcagactacccagttcctaagcatccatgagacagagggaaccaacttgtatttccagaacaattttccaaaccttttctggctgtactttaaaagtgccaaaaaggcaatgggtgtttatgacactaaagtcacatacaagctagtatgatacatacatcatagaaagcttatagttgctcagtgacaaagcaaaggaagtttaatattttccagttttgttcattaccgaagacagtctacggttcatagttttcactaaattctaagcagattctatatcctaaaacatttaaacctcactaggcctgcaattttgagagggttagctaaatatgtttggtatcacttcagagtctaaaaccagattactaatcgtgtgtaaggaggcattttgtgtgtctttgcaatgtatacaattggattatttggaacaccattttgaatgtgtatttgagagaaagctcgcctgtgggtttagagttgtggtgtaatggtgaacatgtagccacgtgaaaggccgttggatctttgttctgattcttcagtcgtcttcttgcaaattcagagaaatgtcttttaatcatttcgtttacatatccc

SEQ ID NO: 52860 - DNA, 341 bp, Homo sapiens
  misc_feature (1)...(341): n = a,t,c or g
ttaatacctaatcgtttaacatgtataacccaatgatttatggagaatgacacattgataatcatattaggtggcattaaaccatagaaataaaaatgttctggtatataacacaaatgaacacaggaaagttaaataacttgattaaaaagtgtgacttcaatagcaaagacatggattcaacctaaattcccaccaacagtgaagtggataaatgcccatcaacagtgaagtggataaagaaaatgtggtacatttctttnnnnnnnnnnnnnnnnnnnnnnnnnnnnnntgaggtctccctatgtgtcctaggcactggagtgcagtagctattcaca

SEQ ID NO: 52861 - DNA, 768 bp, Homo sapiens
aaattaaatatttattagtacctggcttgaagcctagtgttttcataatgtaattcaatgaaaactgttggagaaatatttaaacacctcaatgtaggtacattacactcttgttgcggggaggggatttaccagaatacagtttatttcgtgaattctaaaaaacaaaaagatgaatctgtcagtgatatgtgtgtattataacttattaatcttgctgttgagctgtatacatggtttaaaaaatagtactgtttaatgctaagtaaggcagcagtcatttgtgtattcaggctttttaaataaaattagagctgtaaggaaaatgaaaagccacaaatgcaagactgttcttaaatggaaggcatagtcagcgagggtaaatcctataccactttaggaagtattaaaaatatttttaagatttgaaatatatttcatagaagtcctctattcaaaatcatattccacagatgttccccttcaaagggaaaacatttggggttctaaacagttatgaaagtaagtgatttttacatgattccagaataacacttgtattgaccaatttagacagataccagaccaattttgcatttaagaaattgttctgattatttacgtcaactcattagaattcagtgaaaagtaacagtcttttgtcacagagaatctgaaagtagcagcaaagacagagggctcatgacaggtttttgcttttgctttgcttttgtttttgaaagagtaaaagtactgatgcttctgata

SEQ ID NO: 52862 - DNA, 780 bp, Homo sapiens
  misc_feature (1)...(780): n = a,t,c or g
gagaaggagaggctgggggaatgtggaaaggttgcagaagacaaagaggaaagtgaggaagagcttatctttactgaaagtaacagtgaggtttctgaggaagtgtatacagaggaggaggaggaggagtcccaggaggaagaggaggaagaagacagtgacgaagaggaaagaacaattgaaactgcaaaagggattaatggaactgtaaattatgatagtgtcaattctgacaactctaagccaaagatatttaaaagtcaaatagagaacataaatttgaccaatggcagcaatgggaggaacacagagtccccagctgccattcacccttgtggaaatcctacagtgattgaggacgctttggacaatgattaaaagcaatgaccctgacaccacagaagtcaatttgaacaacattgagaacatcacaacacagacccttacccgctttgctgaagccctcaaggacaacactgtggagaagacgttcagtctggccaacacgcatgccgaccgacagtgcagccatggccattgcagagatgctcaaagtcaatgagcacatcaccaacgtaaacgtcgagtccaacttcataacggggaaaggggatcctggccatcatgagagctctccagcacaacacgggtgctcacggagctgcgtttccataaccagaggaacatcatgggcagccaggtggaaatggagattgtcaagctgctgaaggagaacacgacgctgctgaggctgggataccattttnaactcccaggacc

SEQ ID NO: 52863 - DNA, 370 bp, Homo sapiens
gacacatctgtaccaattccagtagtgccactacggggtgtggacgactcctacccgccccagaagaagtccttcatgatgctcaagtacatgcacgaccactacttggacaagtatgaatggtttatgagagcagatgatgacgtgtacatcaaaggagaccgtctggagaacttcctgaggagtttgaacagcagcgagcccctctttcttgggcagacaggcctgggcaccacggaagaaatgggaaaactggccctggagcctggtgagaacttctgcatgggggggcctggcgtgatcatgagccgggaggtgcttcggagaatggtgccgcacattggcaagtgtctccgggagatgtacacca

SEQ ID NO: 52864 - DNA, 2233 bp, Homo sapiens
tttattgttgtgtagtctcatttattatgaagattcttccagtatgtacatacgaaccaaaagtatcagtttatcagtcccactcacatcccacccccacaggcataccaacagggtcaatcttccttcatggtacctagaaaaactgtctttttccttaggtaaatgggctaaaaatgtattcatgactgctgcagtaagagcatccacctatgtatctttacatactttgagacagtgtgataaagctctttcagcacagcagtctattcattcaaagtcatctaaccaaataccttcccccacagctaagaaagaatcccagtgtttccctagtttagagatgaagatactgaaattgcaaaagcaaaaaggctaggactaagatccaggtcagtagttcagctataccagcagtacacattagaattacgaagagttttaaaatatacctgtaggggcctattctgactcagaacagcctgggctgtgtgtccttaaagagtacttgagatgactcagttgtgtgactaaggctgcaaaggaagtagagtgttcagataacacagacaaaaggttacatcattcttagtttttagttttatataaacacccccatttttagttttatataaccagataaatatggttcacttttatttaaattcaaatgggtgctatactgtcacgtgcctaatccccactttacaacttcatgctggatgctggtagcaaactaagatatttttctcttttatgtattaaattccacttgtgcttcatgaaacagactataagaacaacaattcaccataatccccctttgccatgaggaaggtaattctggtcagtttgccaggtattgataaagtaaagtaagagaagacagggcagcaaatcagcagaccaaaaacttatggtagaaatgccaggctgaatcaccacacccacagcgcacaggaacaccagcccatatgaatctacagttctacttagaccagcagggacagcaccaagtcacgtgttacaactgaaagcatcacttgacgacatcctgaaaggtcataatcagttgggaatgaaagtcatttttcctttaaaatacaaaaatggcagtgtgtaacaacccctccttcactaaggctaaattgaggaaacctgaatatcaaaaacgacagatttaagccattgatcgggtgccacagagacaggaatgatagctattcttccacattactagacattattctccctacacaaaaatggatttagagcttgacagaatttgtcaaaggtctacttttctttgacagctcagccaactcttccctgatgtgttgtacagaaatttcatcttttttcagctttgcttgcttcagtgcttcctggtagatctcttttgcttgtgtatatcgttctctgtgcatcaaaactgcagctagattactgagtaccatgtgtagctcaggatgatttatctgtcttgccagatctgatgccctttgcatataaatataggcctcatcaaagcggccctgtgcatccagggtagtagcccaggtcactcatcagcacaatggtctgtgggtgtctttctccttgtatttcttcagaaatctgcagagctttttcatacatcctttgtgcctgtgacggctgcttggagaacagaaggtagcgagcacaggcgtctaagcacatgcccaagaggaggtgggtattggctttctcttccactgacataatgtcttctgctaattccttttctctttcaattttttcctctagagttgaaatgcagaattcatagccagcaacagcaaattcctgtctgttctgcgcagcatagatactggccagctttagggaaatttcaattattgcattgtcctcctgcttcatgccccctccaaggaggtaactcattgttgctttaaaaagttgttcagcattttcaagctgaccccgtataaatgctaagttggccatcaaatcataagtgtaagtgatggccttcttgttatcagtctgataggcgagacgaagagcgtcatgcaaaattaactcagcctcttctggctcatctttcataatgctcaacttggctcgcttcagcagctggatgatctctgcctcggcctcgtccgccccgtcctcggcagcggccccgtcggctccctgctgctcctcctcctctgccgcagcgggcctcgagaaccaggcgagcgctgcc

SEQ ID NO: 52865 - DNA, 428 bp, Homo sapiens
ggctaacaagagttacagctcaggctacagtgttaatgtacatcttaaggatggcaaatgaaactgattccttcttatttcttgggatgatttttgggacctcatttgcaatcttataattagtgggtgcgattctacactaactgtactgggcatgagtgctgtaatttcctcagtagcccattatttggggcttggaatattggcctttattggatcaactgaggaagatgacaggcgtcttggctttgttgcacctgttttattttttattttggctcttcagactgggttaagtgggctaagaccagaagagagacttattcgcttaagtaggaaacatgtgccttttattaactgcagtcctgcattttatccatggaatgacagaccctgtattaaatgtctctcagtgcctctccatgtga

SEQ ID NO: 52866 - DNA, 1715 bp, Homo sapiens
tttattcctccgcgcgctgggacaggctgcttcttcgccagaaccaaccggttgcttgctgtcccagcggcgccccctcatcaccgtcgccatgcccggaggtctgcttctcggggacgtggctcccaactttgaggccaataccaccgtcggccgcatccgtttccacgactttctgggagactcatggggcattctcttctcccaccctcgggactttaccccagtgtgcaaccacagagcttggcagagctgcaaagctgggcaccagaatttgccaagaggaatgttaagttgattgccctctcaatagacagtgttgaggaccatcttgcctggagcaaggatatcaatgcttacaattgtgaagagcccacagaaaagttaccttttcccatcatcgatgataggaatcgggagcttgccatcctgttgggcatgctggatccagcagagaaggatgaaaagggcatgcctgtgacagctcgtgtggtgtttgtttttggtcctgataagaagctgaagctgtctatcctctacccagctaccactggcaggaactttgatgagattctcagggtagtcatctctctccagctgacagcagaaaaaagggttgccaccccagttgattggaaggatggggatagtgtgatggtccttccaaccatccctgaagaagaagccaaaaaacttttcccgaaaggagtcttcaccaaagagctcccatctggcaagaaatacctccgctacacaccccagccttaagtctcttggagaagctggtgctgtgagccagaggatgtcagctgccaattgtgttttcctgcagcaattccataaacacatcctggtgtcatcacagccaaggtttttaggttgctataccaatggcttattaaatgaaaatggcactaaaagtttcttgagattctttatactctctgccttcagcaatcaattccattcatacatcagcactctgctggttctgtttgaaatatgttctgtatttaaaactcaaatcttgttggatctctgcagggcttgtgaccaatgaagtcatatttgttgatggttgacaaagcttgcttcactccatcagagaatgactatcaatttttttttaactgtcctatcacgtcctctcctgtcacccattttgaagagtggcagaacttgaagttcaacttcctctgtaaatatccaagtataaagcccaggaacttctagaataacccagatgcgctttaattttttttaatatgttttgatcacagaacttctagaataacccagatgctctttcatattcttttaatacatcttgatcacagctgggggaaaaaaagctttttaattctgtaccttcctagtagataagtgaagagcagggaaagagacctttaaatattttgctataaaaaaatttgtgataagtttctatcaaaatggggagattgcagaaaaggcttcccttggcctcccaaggaggtgtagcaggtgtgagcaatattagtgccatgtgcctttcacacagggtttgcatttatcagtctgttttccgatgatgtgtacatgaaagagtacaccatgtgaagagaagagagaatgattgaaaatgttttagtatagaactcttcttgcagtgggttgctattttctagattttactttttagggaacaaaataaaatcctttgttaaaactgggtc

SEQ ID NO: 52867 - DNA, 462 bp, Homo sapiens
aaaaaaaaaaaaagaccagctttgcagccagaagccagaggatacccagggacagtagggctcccaggtggctggttctcagcacaccttccatgaatctgcttgctgctgcttcagtgtggtggccatcgtgctgtgtgacaaaccagggctgttcacagcttcctcagccccccagaagggacgtgtcaggaagagacatttagttcatttgcctgcaaattttcttctcctgcaaggatctcggtggactcagtcacaaaacaaaggctaaaccaggatttataagagagggcttataaatccctctgccgacgcagggagcagagacttgccggcatgttttgggggtaatgatcgtgggcagggagcagaggtccgctgaggcagtctgtccttgagactaacaaagtcatctgctgtttggggaaatctctggtgttgggaacaggcccccaaatt

SEQ ID NO: 52868 - DNA, 364 bp, Homo sapiens
ttggccaactgcatcttgagctctgcgatctgcgcctggaggtcagcgatctgctcgtggaagtcgctggcatcaccctccagcttccgtttcagcttctccagctcctgtcggctcttctcttccttctttagccggcacttccagttctgaaatcatagattcatgcttgtttttcagcttggtaagattcttggccttttcttcctcttctgcaagatttgtcgttaagtcactaatcctctcctcaaggagttttcgttcttttgatagtctattgttctgatcatccatgaccaggatctcatcctccagtttaatgatcttggcctcagccgtgaccttctcaagttgcagcttctgc

SEQ ID NO: 52869 - DNA, 1293 bp, Homo sapiens
ttacaactaagtggattgattgaaatgctttgattcttcatttgaaatgtttctattccatatacccattatcttttatcctcacaaaagcccttaacattgtttcctttaatctttggggttcttaagcatcatttccaccaacagagatgtacctacccacagttgtctcagagcatggaggctgaaagtctgtgagggcaagagtgaaatggagcagaggataggctgtggtttggaagcggctctggaatacgctgggggtggcggtggggctgaaggttggttatgggatgcttcctgggctccggaacatctgtgccaaaaactgggagggacccatcctcggctccagccagacgcttggggtgctatgtattctgaaccatagcactaggttggaaaatttggctcctaatctatactctgccatgtacagatcacaaaatatcatacaaggagccttaaaaggtcatctaacctaaatccagtttcccaaggagaacactggggcacaaagaagtgagaggtaactcgcccaaagttatatagctagtcagggacttcctcttcggagacaaaggaaatcagaatagtgattcttctgattcaccgtccctcgacaaacagtccacaaagtgcttggaggttattaaaaggcaccccagaaaagtaaggctggcattttcctggaagcccctgagtgtacaacccctgaggctcagtatttggctataaaaacaggtctggagttgctttggcctccgttttaatccctaaagctgcctggaggctggagctctgatagctacctgtcatcactccccagccagtccgggacaccgcagccaggaactgtcagaggtgacaagggaatcccgtcataatgccaaggaccaaggagcagtggccaggttcctgggattaagcaaggcaattatggctgagttaaagctaggatgggtaggacagggggatctgaggtggaaaaggccggtaagaagagggaatgcgccagcaatgtaaatgccttcgactgggtgggctacttcacatcatacctcctccatctccaaaaggttcttaaccttcttcaaccgcctaggcctgatggacctcctccctttctcccagagcccactcactgaagggaaggccaccatcatccccattcttttcctttttttatatatccctccggtgccgtttcgggtctccttcctcctatattctgagttccttccactcacatccaaccagcttttaacacccggatctcccggagcttctttg

SEQ ID NO: 52870 - DNA, 93 bp, Homo sapiens
cttgagaaacttataatgcataccaatttccaaaatctgaacaaaatgcataatttaacccatatcaaatttcctgcttattactttgtatac

SEQ ID NO: 52871 - DNA, 309 bp, Homo sapiens
attttattgatcttttcaaaatacctacttttgttttcagtgacattctttattctgttttctgtttcattgatttctgctcttattttaatattttcatccttttgtttaccttgagtttaagctcttttgatagttttttttactggaagcgagattattcattagagaccacagatgcaatttgctattaccacattacatcttttccttactaccttttcagttttttcaataagcaaaataacataagacacctttaaattagctaaagatgtttccctttgatgctcttgcttgggtttgtag

SEQ ID NO: 52872 - DNA, 796 bp, Homo sapiens
  misc_feature (1)...(796): n = a,t,c or g
tgtcttgaaggtggtctgagctttctcactccaagccagtcgtgtgggaagggacactctctgagcctcagtttcctcagctgtcaacctctcagggcttgttctagtggctccgaaagccagtgggagcaagcgcgctttgcaaagccttgggcgccgggccttggcgcgcctttgccggatccttccggccacgggcggggcgagcccagaggagaagagccgaggggcggtgcccgggccagggggcggaggcaggcggctctggctccctctcgggacgctttttccttctttcctgttgttcctcctcctgcctctcttcgctttcgcctgcaaacgcggtgggggctgctcggcggtcaggagcagcaagagacagagcgacatgagagattggaccgcgggctgcactggagaatttactggtaggataattcatccctaaagagattgaagtgagcttcagaatggcaaaagaggagccccagagtatctcaagggacttgcaggaactnagaagaagctgtctctgctgatagactccttccagaataactcaaaggtggtggcctttatgaagtctccagtgggtcagtacttggacagccatccgtttctggccttcaccttgctggtgttcattgtcatgtcggccgttcctgttggattcttcctgctcatccgtggtgcttaccaccctgggctgctctgctgggggtcataatattggaaggattggtcatctctgtgggtggcttctcactgctctgatcctctgtggtttgggcttcgt

SEQ ID NO: 52873 - DNA, 1089 bp, Homo sapiens
gttttgattcctctaacttctcagaatgattctttagaattctataattcatagcaatttttgacaagtaagattgcaaaatagaaatatctataaagattccacagtttgacattatggcttgctatgcagatgtgaaaataggttaaataatatgaaagatatggcagaatgtaaagtggaaaagatgacctaaaattttgagttgtattaatagttaaaaacatttgtgtcagatgacagggtgggcttttactgtcaagacatgaataagaactgatctggctgcctgatgagtgtttccacgcagccctgcatatttagtgaccaaggcatcaaggacatcccgaaactgggaaattcatatccatctggtatgaatatataactcaggctgggccaaatggaatgtgtttgttgagatattacagtaataaaacacttaaggaacagggaaggttacatttgttggccatacggaaaccttagtgggctacagaagaaagtttgaccttgtgtcacctatttattttatgccctgatcagactagcaacttagataagtgaaagtttttctaacatgccttaaaaatattatggtttgatccaaagacccactttttctttagctcttgtgataagattttcttttttttacttttatacaaaggcagcatctttgaatttttttttcttttgatgttgcaacttttgggttcttttaaactgtgatagtgatggtaactgatgcctttcattttgttcaacttatacaaaacaagccagcatctgatcaaaagtattacataaaatattttcttaaactattgaaaggtgctttgatgattttctcctttggtttgtagaattaggactgaacttttgactcaaattgctacagttgccatcacctttctgtggtaatactactgatatttgcttttctatataaagaaatgttgcctaaggctgtctggtatttcttttcaagggttttccagtatgaatgttaatgttgtcagtgtatgtatgaatatgaaagtgctttgttttgtttgtagctgttttttgtttatgtgtgtggtttta

SEQ ID NO: 52874 - DNA, 1633 bp, Homo sapiens
  misc_feature (1)...(1633): n = a,t,c or g
aagcttggcacgagggtgcagctgggctcagctccccgtgccctacctttctgttctcttccttggtttcccctactctcctcctgccccaagcagtgcctgcgtgccgagttccgtctctcgggtcttttcctggtcccaggcaaagcggagcggagatcctcaaacggcctagtgcttcgcgcttccggaggaaaatcagcggtctaattaattcctctggtttgttgaagcagttaccaagaatcttcaaccctttcccacaaaagctaattgagtacacgttcctgttgagtacacgttcctgttgatttacaaaaggtgcaggtatgaggcaggtctgaagactaacattttgtgaagttgtaaaacaggaaaacctgttaggaatgtgggtgggttttcaggcaagggcctcagtttccttccttcagcccttgtaatttgggacatctggctggcttttcatatttttcatacatttactggcagtaaacactccaccatataggacccggctttaccttatatccagtgacactggtacagtagctccagaaaaatgcttatttggggcaatgcctaaatattgcggcagttttatggcattggctaccattatggttcgttataagccagttcatgctctgagtcctgaagagaacgttatcatcaaattaaacaaggctgggccttggtacttggaatactgagttgtttaggactttctattgtggcaaacttccagaaaacaaccctttttgctgcacatgtaagtggagctgtgcttacctttggtatgggctcattatatatgtttgttcagaccatcctttcctaccaaatgcagcccaaaatccatggcaaacaagtcttctggatcagactgttgttggttatctggtgtggagtaagtgcacttagcatgctgacttgctcatcagttttgcacagtggcaattttgggactgatttagaacagaaactccattggaaccccgaggacaaaggttatgtgcttcacatgatcactactgcagcagaatggtctatgtcattttccttctttggttttttcctgacttacattcgtgattttcagaaaatttctttacgggtggaagccaatttacatggattaaccctctatgacactgcaccttgccctattaacaatgaacgaacacggctactttccagagatatttgatgaaaggataaaatatttctgtaatgattatgattctcagggattggggaaaggttcacagaagttgcttattcttctctgaaattttcaaccacttaatcaaggctgacagtaacactgatgaatgctgataatcaggaaacatgaaagaagccatttgatagattattctaaaggatatcatcaagaagactattaaaaacacctatgcctatacttttttatctcagaaaataaagtcaaaagactatgatatcatagttttttattaccttatttaaggaggaaacaacctgacgtggcaccattcagttctggcacatccccaacccttcacattttataaattattgtagatcatgttttgttaggagcccttttatggagaggacattttcccatgncttaagtaatccagccttt

SEQ ID NO: 52875 - DNA, 1471 bp, Homo sapiens
ttccggagccaccggaagcagcttgcaaatggcgtctccctcgctggagcggccagaaaaaggcgctggaaaaagtgaatttcgtaaccagaagccgaagccggagaaccaagatgaatcagaactccttacggttcctgatggttggaaggaaccagctttttccaaagaggacaatcccagaggacttttggaggagagcagtttcgcaactttgttcccaaaatacagggaagcttacttgaaagagtgttggccattggtgcagaaagccttaaatgaacatcatgttaatgcaaccctggacctgatcgaaggcagcatgactgtttgtactacaaagaagacttttgatccatatatcatcattagggccagagatctgataaaactgttagcaaggagtgtttcatttgaacaggcagtacgaattcttcaggatgatgttgcatgtgacatcattaaaataggttctttagtaaggaataaagagagatttgtaaaacgaagacaacggcttattggtcccaaaggatctacattgaaggcattggaactcttaactaattgttacattatggttcagggaaacacagtttcagccattggaccttttagtggccttaaaagaggttagaaaagtagtccttgatactatgaagaatattcatccaatttataacattaaaagcttaatgattaagagagagttggcaaaagattctgaattacgatcacaaagttgggagagatttttgccacagttcaaacacaaaaatgtgaataaacgcaaggaaccaaagaaaaaaactgttaagaaagatatacgccattcccaccaccacaaccagaaagtcagatcgataaagaattggctagtggtgaatactttttgaaggcaaatcagaagaagcggcagaaaatggaagcaataaaggctaaacaagcagaagccatcagtaagagacaagaggaaagaaacaaagcatttattccacctaaggaaaaaccaattgtgaaacctaaggaagcttctactgaaactaaaattgatgtggccagcatcaaggaaaaggttaagaaagcaaagaataagaaactgggagctcttacagctgaagaaattgcacttaagatggaggcagatgaaaagaaaaagaagaaaaaaaagtaacatacccaaaactccttgactagaactatctccttttgtaaaggattttgagatatcaggcattagttgccttatttgtgagaaattttctgagggctttttttttttttggtggtggtggttgttcatagaagagtgttctttataaattatattattattgtattttttgaaaaatttatactagaacgtggtatatatgtctttgtatacattacgaccattgtgttatccattaaatccagtgtctgatgctattggttagtaatgatgtcccagcatttgatgttccctctc

SEQ ID NO: 52876 - DNA, 763 bp, Homo sapiens
  misc_feature (1)...(763): n = a,t,c or g
ccgcaacctcaagctgggcagcgccttccctcggggtgaccgtggcgcaaatggagcagagccgtggggcgcctgcgtccatgcactccaagatgctgatgaacattgagaaggtgcagatccacttcgggggctccaccaaggccagcagccagataatccgcgagctgctgcacgcccagtccctgggttccccctgctacaaacgggtgacagatatggctgattacacctactcaactgtgccccggcgctgcggggagctcagcaccctcacctacccctaccaccgcagccgcctgcagcaccttccccggggcctgtatcctactgaagagatccagattgccatgaagcatgatgaggtggacatcttgggcctggatggccacatttacaagggacggatggacacaaggctgccagggattnctccgaaaagacagctcagggacctcaaagcgcaagtcccagcannccaggccccacgtgcacaggccgccatccctcagcagcaatggccagctgcctctcggccacagagcgcccagatttcggctggcaacacctcagaaagatagaccttcctccgagggccgtctctcccagccgaacacagcccactcgcccantccgccgcggtggcaaacagggggctggagaggcacgtggacatgcctcctgggganggntcgaggagccccacgggggcccggtccaggccacctcagtgagcggaggtgtaaataaacattcaggagga

SEQ ID NO: 52877 - DNA, 1074 bp, Homo sapiens
gaattttctccagatatttaatgcaagatgcaatgtagccatattccatgaaatgtggttagcagtaggggagttgtagccctatcgaatcaaagtattacaatacagctgaaagctttatatagacgtatttcggttcttaattgcactaatgcagacagtttgatagataagcttctctcttgtgctttttctactttgggaggttatatactttagatgagagacaaagaaactctactggtttaagagttctcagttttacttttactatagaccttttttcccaccagtttagatgggaagacccagcctttggtataaataacttacttccacaaaaatatttaaagggtatctttagtgttcactgtcagttgtgtagtcttttggtaagggggtggctagagcctctttactctcagtaagtgctctgggctgatggataaacacactaaatttaacaccctggttgtttgcagctctgacaaaaccactattagcagtcattgtgatggcttttagggtgtctcccgtcccaaaaattgttaatgagcggctattaatttttgaactggccactagtctcaaggcacgctcagaaggctggtctggtaccacattaattcgcttaattaacacagtggccctctctctctccccaggtcctcctaaggtatctaaaatagactgaaagtccttgacagcagattcacaagcaaacaactccttgtccttcataacagggctccagctgaggtagaacctgctctttcctctcttgctctgcttgttctgtgagcactttctctttgaaaataaagtggcagcctccatagctgagggcagatacatatgtgattaaagtagtaatgtccagatttactcttttgcacacatcgaccttaatttctgttggaaacgcaacacttgctagtatattttctcggtcaactctggtcacctgcaaaagttcagggccctcatcatctgattcactctcacttggttgaagctcttcagggtgatctaacagagcgttgactgctactatgtctcctctcacagatatgc

SEQ ID NO: 52878 - DNA, 473 bp, Homo sapiens
tttttttttttttttttattcttgcttttcttaataaacactatatcataagcttttccttatttcagtcttcaaagttataattttaatgtcttcacgtgatgttgtccagcgcacttatcataatttactagttggtttcctgattattttaatgcttttatcctaggaagtcaggaaaaactctgcatacctatcctaaggcacttcctcattagctgaatggcaagtatttttagcctagtgaaaaccagcggagaagaaagcattagggacttacgttaacagccagcatatcattttcaaaggcctcacgcagcttcttcataatctctatctcagcactgggcacaggcctcaactgtgcccttcacagtgatggttctttccgggttgtatatgctcaaatcctgcaaagatgagattgttatcttggtccctgtttcatgttcaattttcttcaaatttctgcc

SEQ ID NO: 52879 - DNA, 1776 bp, Homo sapiens
ggaattccgcttaggacagttggctgttaagtgacactgattctccccgccccgcctgacccccgagaaggaggcttgtcccccgctgcgtgagggggtggggaagtgggtagtgaattcggatctacctgggaggggggagtggaagttcccgccccggagagcggcgaggcggcagccacagttgattatggaagattcccacaagagtaccacgtcagagacagcacctcaacctggttcagcagttcagggagctcacatttctcatattgctcaacaggtatcatctttatcagaaagtgaggagtcccaggactcatccgacagcataggctcctcacagaaagcccacgggatcctagcacggcgcccatcttacagaaaaattttgaaagacttatcttctgaagatacacggggcagaaaaggagacggagaaaattctggagtttctgctgctgtcacttctatgtctgttccaactcccatctatcagactagcagcggacagtacattgccattgccccaaatggagccttacagttggcaagtccaggcacagatggagtacagggacttcagacattaaccatgacaaattcaggcagtactcagcaaggtacaactattcttcagtatgcacagacctctgatggacagcagatacttgtgcccagcaatcaggtggtcgtacaaactgcatcaggagatatgcaaacatatcagatccgaactacaccttcagctacttctctgccacaaactgtggtgatgacatctcctgtgactctcacctctcagacaactaagacagatgacccccaattgaaaagagaaataaggttaatgaaaaacagagaagctgctcgagaatgtcgcagaaagaagaaagaatatgtgaaatgcctggaaaaccgagttgcagtcctggaaaatcaaaataaaactctaatagaagagttaaaaactttgaaggatctttattccaataaaagtgtttgattcctaagaaagaaaatatttttgtggacatgcataaaaattaaatggatttcctagtggagttttataaattaaaaggtcaaaactgaagctttttatttaggcttttccaaatcaaggataaatatcttacgcacgatatctagtgacagaggagaaagtggaaaatgacctcaaggaagctacgggcacaactggaagctttgtagaaattaaacatattcaaggagcaagaaatgaactttcagcagtctaaattttctaaataaccaatagttgccaatctaaaatggcagagaagatgaaatttgataaactgaattttttttaaaaatccatttaccctacaggtttgcatttgtttgctgaaatttacctttttttagttatatatatgtgtgtgtgtgtgtgtaatttctgccaataaattctaaattacaaaggtaagagaaaacctagtacattactaaatatataaagtatatgttctgattatgtataccttgttcctagtgtcaagtctttttaagtgggtttttaaaagtttgttattggacttgaatggatttttgagactaggttaattatttttgaggtcttatcctaaaaggcatctaaggtacatgaatggagtatggtgattttataacattttttatcagaatggaaaaagaactgtttaaaagtttgatacttttaaatagttggtttttttgcttactctggtaatgattttctacaaatacataataaattgtttttttgagtct

SEQ ID NO: 52880 - DNA, 417 bp, Homo sapiens
gggactgcgtggagagggacgggctccacagcgtggtggatgacgacctggacactgagcacagagccgcctcggcgaggtagtgtccgccggccggttgcgctgcccgggacggagacagaggcgccggacctcccagcaagcgcatgcgcccgtcgtgaattcagtgaattcagaggcaggacgggatcatccggagtcgggagctgctgccacaggaggcgaggctccccaggtctcataggacacattttgtcagtgtttgaccagaaaagcttgggaaggaagcgcgtgtctgtgctcacggacagaggcggccggcgccggaggcattccatcctttctgtagggaaaggagcctttatttactattttgtatttatatttgatgaataagtatataaacagagacgtgta

SEQ ID NO: 52881 - DNA, 1558 bp, Homo sapiens
  misc_feature (1)...(1558): n = a,t,c or g
gaagttgcagtcactctgccgaggcccggacgaggactgctgacttgtaagcacatgctgcagatatggaaatcctgctacaacctcaccaaccccagtgattctggacgtgggagcagcctcttagatagaaccattgctgacagacgacagcttaatacaattactttgccagacttcagcgatcccgagacaggctccgtccatgccacatcggtagcagcctcaagagtggagcaggcactgtcggaagtggcttcgtctctgcagagcagtggcccctaaggcagggccccgctgcacccctgggatgacgctggcacagatctggctccatgcagctgaagtctatatcggcatcgggaagcctgcagaagccacagcctgttacccaagaagcttgccaacctcttcccaatgttcccacaatgtcctctacatggcgnggccagattgctgaggttccggggaagcatggacgaggcgcggcggtggtatgaagaggccttagcaatcagccccacccacgtgaagagatgcagcgacctggccctgatccttcaccagctaggccgctacagtctggcggagaagatcctccgggacgcggtgcaggtgaactcgacagcccacgaggtctggaacgggctgggcgaggtcctccaagctcagggcaacgatgcggcggctacggagtgcttcctgacagccttggagctggaggccagcagccccgccgtgcccttcaccatcatcccccgcgtgctctgagcaggcgcctgccagcctcacctgccgctcaggcctcagaggccctgccggcaaccagggcttgtgccatcgccccaaggggatgaatctgccgcactgaggccagggacgagtgttcagtgggccacagtgaaccaaccaaaccaaccccgaatcatcgctctcgccatgtgcgtttctcttgttttttttgccagcccaatggtagtttctgaacctattgacattgttcaaaatggatcatgtgccatattttgttagttgacatctgagttttcagtaaaatgattatggaattaatcagcaaatgtagaagaatatattcaaagttaaaattcagtggcagcacagattatttttatcagagctgtaaagaaaacaactgtccttttctccccaccacccctcctgccccactttggcccagaaaccaaatgtgaacttcctgtctcccacctcagcactagtccatgccaggacaccagctgacaatttcttggttttactgtcaataattgtaccatgtgatcaattactgtcctcacttagaacaaagcctgagtccgagaatatttatattttaccaatatatgcctgttacaagagaaggaaatatgagttatttaagtttaacttttttatgtgaattcagagtttatttatcgagggaaatatgtacaaagaagcttcaaatggaatatttaccgacattccttatacatgacagacacttggctacatgggaagatgatgttaataataaaatgatttttaaatggaaaaaaaa

SEQ ID NO: 52882 - DNA, 425 bp, Homo sapiens
ggctactgttccctgtagacaaagacgtcttcgaaaaacactcaacttcaagatgggtaacagacacaaattcacagggaagaaagtgactgaagagcttctgaccgataatagatacttgcttctggttctgatggatgctgaaagagcctggagctacgccatgcagctgaaacaggaagccaacactgaaccccgaaaacggtttcacttgttatctcgcctacgcaaagccgtgaagcatgcagaggaattggaacgcttgtgtgagagcaatcgcgtggatgccaagaccaaattagaggctcaggcttacacagcttacctctcaggaatgctacgttttgaacatcaagaatggaaagctgccattgaggcttttaacaaatgcaaaactatctatgagaagctagccagtgctttcc

SEQ ID NO: 52883 - DNA, 1901 bp, Homo sapiens
  misc_feature (1)...(1901): n = a,t,c or g
tttttttttttttttacatgtttaaatcacttttattccttgctttcttacattgtttttgtgacttctattattgatgttataatagaagtgaaaagggatgactaaggaaaaacggggggtaacgaaggggattaaaatataatggcatctaaaaattacacattgggaagtcctgaaaaatagtgcctctaacatgtgtatctggcatcagcctcacctagttgccggtaagtcaggttacacttgacctcaccggcttcacgcaactaggctcccgaggagagaacggggactggacatgagggagggcatataagaaatgggcacagtctccgtcatctttgccttttaatataagatttggtttcatcatttctgagtgtaacatatttcttctaaaaatagagctctctgcttgtctgaaacttcttagcgttcactgggaggtgaaggggaataaggctgaccgtaattctggggtgacgttgccagtttcatagtcatagataaacttctcaagggctcctggatgctcacagcaaggatgagttcatttcaaatccatggtactgaagaagcatgacaaagcgtttcaaggccccatctgtgcctggtgtggactcctgaacgcattactgaccaaaggcaatcaatcacagctcacagggcaccagacagcagcggcccctttcccaggaggtacaggagacaggatgaccctgcacacatttaccagaagacaacagggtgctctcctgacacgctgcttaagaacgtgtacagacacaagatgtaggaatgcagggccgaagatgttaaactcttgccccgggccaatgcagacctggatttaatatcatggaacttgctgggattttctcacaatacagattaagagtcagaatctcccccgcccccgaggaagagcctggttagctcctgaatccaaagatgcccttgatgtatccagtgaggccactcttggtcttctgttccaacttgtcctcaaggggtgggaaagccacatggttgagggccaggtcaaagaacaaaggcttgcagggaatgggctggaagcctggtgggaagtgcacaaggttggcttgcttggtgacaagggaagggtccaggcagaatgtctcaaaccgttcaaccagaggcttattgtccttgacttgggaggaggaggtctctgtttgatgagcgtcgtttgcatcaaggatggctgcggcctgcagggagcacttctctgaccgcacttgagtgatgagctcttgcacatcaggcaggtcctttaggctgttcttgaaggcgccagcatcagaatttacttcatttgcatatttcaggactctgtcatacaggacaaaggcttcgctccacttcttcaccagcacataggactgagcaatgaaaaaacacctgtaagctttgaacaccagagtcttgaggcctatctctttctggaaggctttgtcttcctctaaaccaggaagctggagcaattccaccagattctgtaagatgatgtcatagagtcggatcaggtcctggggccggggtgagcgcttgctgtcatcctctggctgctgctgcagcagagccctctgcagacctttggccatgttctcattacgcttgattgccgttgatagcttgatgtaagtcaggtagctatgcaagtattgaagattagacaccttccctggctctccttcaaggatataatctctctgtttctgatctggcttgagctcctcccgaaccacctggatggcgtcccgacactcgctgagcattgantcaaacaggcgctccttagtttcttcgctttcagcctggacaatagctgcttcgttatcagccagtcctaataagaaaatgcgcactttgtcaat

SEQ ID NO: 52884 - DNA, 245 bp, Homo sapiens
  misc_feature (1)...(245): n = a,t,c or g
cttagctgataaagtagcagcagagtttaaggggattgagtccaattgtaaaaacaatcnnnnnnnnnnnnnnnnnnnnnnnnnnnnnnnnnnnnnnnnnnnnnnnnnnnnnnnnnnnnnnnnnntcaacagatgcagcaaacttcattgtcttattttaagaaattgccagtcactccagccttcagctatcaccctgatcagtgagtagccatccgatattgggacaaggcattctatcagcc

SEQ ID NO: 52885 - DNA, 6715 bp, Homo sapiens
  misc_feature (1)...(6715): n = a,t,c or g
gagagagtaagttggagggaaaggcggctcaggacatcaaagatgaggagcctggagacttgggccgaccgaagcctgaatgtgagggttacgaccccaacgccctgtattgcatttgccgccagcctcacaacaacaggtttatgatttgctgtgaccgctgtgaagaatggtttcatggcgattgtgtgggcatttctgaggctcgagggaggcttttggaaaggaatggggaagactatatctgcccaaactgcaccattctgcaagtgcaggatgagactcattcagaaacggcagatcagcaggaagctaaatggagacctggagatgctgatggcaccgattgtacaagtataggaacaatagagcagaagtctagcgaagaccaagggataaagggtagaattgagaaagctgcaaatccaagtggcaagaagaaactcaagatcttccagcctggtcccgggcctgtccccacccagctgcctgtcctctggcaggtattggaaattgctgtgtctagaagcatctctgccttcacactcttgcactgcattagctgcaaggtgatagaggcgcctggtgcctcaaaatgtattggccccgggtgctgtcacgtggcgcagcccgactcggtgtactgcagtaatgactgtatcctcaaacacgccgcagcgacaatgaagtttctaagctcaggtaaagaacagaagccaaagcctaaagaaaagatgaagatgaagccagagaagcccagtcttccgaaatgcggtgctcaggcaggtattaaaatctcttctgtgcacaagagaccagctccagaaaaaaaagagaccacagtgaagaaggcagtggtggtccctgcgcggagtgaagcactcgggaaggaagcagcttgtgagagcagcacgccgtcgtgggcgagcgatcacaattacaatgcagtaaagccagaaaagactgctgctccctcgccgtcactgttgtataaatccacgaaggaagacaggaggtccgaggagaaagcggcagccacggcagcctcaaagaaaacagcccctccaggctccacggtgggcaagcagcctgcacctagaaacctcgtgccaaagaagtcttcttttgctagatggcagcagccacaccagccattaaaaagccaccctcaggtttcaagggcaccatccccaagaggccatggctctccgctaccccatcgagtggtgcttcagctgccaggcaggccggaccggcacctgcagcggcgacggctgcctccaagaagttccctggctccgctgctttggtgggagccgtaaggaagccagtggtaccttctgttccaatggcctcgccaaccccagggacccttggggctatgagtcgtgcaccatcgcagccaaattcacaaattcggcaaaatatcagacgctccttaaaagagattttgtggaaaagagtcaatgacagcgatgacttaatcatgacagaaaacgaagtaggaaaaattgccctccatattgagaaggagatgtttaacttgtttcaagttacagataatcgctacaagagtaaatatcgcagcatcatgttcaacctgaaggaccctaaaaatcagggactcttccatcgtgttctgcgtgaggaaatctctttggcgaaacttgtgagactgaagccagaagaacttgtatctaaagagctttccacgtggaaagagaggccagcgagatctgtgatggagtccagaactaaactgcacaatgaaagcaagaagacggccccaggaggaggccatccccgatctggaggactctccgccagtgtcggattcagaggaacagcaagagtcagcacgtgctgtccctgagaagagcacagcgccgcttctcgacgtcttcagcagcatgttgaaagacaccaccagtcagcaccgcgcacacctcttcgatctcaactgtaaaatttgcacaggccaggttccctccgcagaagatgagccagctccgaaaaaacaaaaattgtcagcttctgttaagaaagaagacttaaaatcaaagcatgacagctctgcacctgacccagctccggattcagctgatgaggtgatgccggaggctgtgcctgaagttgcctctgagccaggcctagaaagtgcttctcatccaaatgtggacagaacgtatttccctgggcctccaggagatggccatcccgagccctccccgctggaagacctgtccccctgcccagcctcctgtgggagcggggtggtcaccaccgtcacagtgtccggccgggaccccaggaccgctccaagcagttcatgcacagccgtggcctccgcagcatcccgcccagacagcacccacatggtggaagccagacaggatgtgccgaagcctgtcttgacttctgtgatggtgcccaagtccatactagctaagccatcctcatctcctgacccaagatacctgtcagttcctccgtcaccaaatatcagcacttcagaatcacgttcccctccagagggagacacgaccctctttttgtctcgactcagcaccatttggaaaggatttattaacatgcagagtgtggcaaaatttgtcactaaggcgtatcctgtctctgggtgttttgattacctcagtgaggatttgcctgacacaattcacattggtgggaggatcgcaccgaagacagtttgggattatgttggcaaactcaagtcttctgtgtctaaggagctctgtctgatccgcttccaccccgccacagaggaagaggaggtcgcctatatctctctctactcctatttcagcagccgtggccgctttggtgttgtagctaataacaacaggcacgtcaaggacctctacctgatcccgctgagcgcccaggaccctgttccatccaaactcttgccctttgagggaccaggtaagcgccggctttctgggtggaggtgaggcccacctgcacctgcacccctcctcccactgacatgccctgctgagtcctgaccagcccagggctctctgggagcaggagttaggagcacagacgcagcggttagcaataggattcatctttgagggcgtaggactgtggcacgagaagtacccctgattcacagcataaattgtcttaggagagttttttagagagggaaaaacccacagcctgcaaccagctcatcttggcctcaggtcagagaagactcagtgcccaggagcccaaggctcagccagaaagggaggtgacactcccagcggccctgctctttcctctagacagactcgggagccagcacacaccgggaagtggctccatcagggatcacttctctaacagggatggatttccaggagacttaacaataatgacatagaaaactatttctagaaataattattttaaaatctgcagctcaaattgtaatagttcattcatctttggcaagctattttgtgtttgcacgttccttggaaagtactgtatttaaacgattatttacaaatagcctaaaatacatctttgtcaagggttgagggtgattccaggggccacgtgctctgttagtgaccagctctttcatagccccttagaagaagctgatgtgacttcagttaggggttagtatctgatgcccaactgaagtgtctccgtggccatgcagtccccagaggattggtgttctctcaaagcgggtgtgtggatcacacagtgtcctctaaagtgcttcgtcataaaggcaggtgctgtctggaccctgtgcctcagtgccctctgtccctgtcaccaggcctcggcgggtgttcctgccatagctgtgcagggtgttcccacccacacccctcatgccgcaccctagctagctggggtcctgtaggggccactccacatcttgggcgggacttctgtcgccccaggcacagcccacgttcctactggagcccattcttcacagctggagtgggctcagcctatgcctgtgttgtggaattatatgtccataaagggattggttggtatcagtaatttcagggttaaatatttgctggcgtagtgcattaaattattttagtgccagataaatttttaaaagcaaagtgctttagtgtgtcccctcaaatcctacttgggataaagagatgccacctaatgggtggcagaaaggaccctggtagaggttcttggtgttgcttgtgaagagctctggccagctccacgtgaccagggagaggaaaagcccggccctcctggaggtgaagaccgagaagctggcctctccgcacctgtgaagacccactggtcagttgcaagtgcgacagtgtgtgcactcagtgcagacactgcagcacctcagcacctccctaccggggtggaaagagcactttttctttacagaaacatgattcttagatagcgagcctcccctttttaaaacaattgaagcgatatttcatcctttcttgagcttctctccctgctcatctccaaacttggagctgtcaggtgagcacaggttgtagggtgttgagcgagcccccggcgcatgccgggcaccgggttccccacactgggcagtgacggggcccagggaggccaccagaggagcggcgcctccattctccccacagcaagggcttgctttnccaggtgccaccccgggccanaggggaaaggacaggttccccagcaccttcccggatggcaccgggacaagggagggcctgggctggggtcactcaccttgtctgctgagtgcgatggcaccaaccacccacactgtccagtccgggacccagctggggggaacgtcacattcgcccaccaaggcacttgctgaggccacgacgccgcctgacggggacacacaaaagccccagggactttgatccacgataaagagcagaggcgtctgggtaaagtaacacagggcaagggactttagaaaagtaacagctagtgaaacctttccatacacttcagaaatgttttaacttaagacttcagtataatgttaacttctcctgatgtccttgttgacatgaatgcgtgtgcgtgaaatctcacacacttccatggtcactaaacagccttcaccccgggccaggccatcgggtactcggcccgcttcacgtactgattacttgacttggcgttttctagatataaacatgtacatgtgtgtcctggctttgtggtgtaaatgtgtagtgcgtgtgcatgtgcgcgcgtgtgtgtgtgtaaggctaggtcctgggcacgtttcccctgtctcagcgggaccctgtcctcacgggagatagccccagaagcccttggacagcacaggccacacctgagggtgctggatggtggtgactccacagagctgtggtcaggggtgagcgtgtgctgcgcagcttggagtcacgcccccagaagtgctgggtgagggtctgcaggacccagctccattccacagcctcagttctctgcggcacatgcagcacaggcctgaaggagacctggcgccccagccttgagctgcccgtctgcatcagggcactgatgtgggagcatcttcccctggggatgttaaggagaaggtcctgttgggggtagagattcacgcagaaaagagtgactgactcgtccatgtgcctcagtttataccacacaattgcaggtgtccatgccttccacacatggggacctagtgggttttgacagcgtggtgtccagtcctagccccctcagtgcttgctgttcacacttaagcaagtgaaggcctgaaggtgcccagctgtgccctcaggggaaacttaagtcacccgccctgtcagcacttggcccttgtcgggcagtgagagtggagctgcccccgcagcaccctcaggagccatgcagttcacagcagtagctggatctccctgaggacatttgtccttgcatatcttaatgatttgtccacagaaacaccgggttgtcttcctctgcccctctgccccgcagtgggggcactctctgtaactcagcatcacagtggggggcagctgggaggcctggttccaggtgaccttctccacctagatgttcaccccactcagttccagctttaccaacagggccccccgcagggacttggggtcgcagagtcccggcctgtctcagggccttgttcatggaagggagatgagtcaggttgaaagctcatcgtgtagggttctgtgcggggcccttacaggactggacccgcagccaagatgccctgcctgttaaccatgccccagccccccgtcatttccgcgtgaagccgcaggccctcggagccttggtctgaaatgcctgtggagtaacctcggtccataaacatgggtgcacagtctgttctccccaagtacagggcaggaggaaacaccgccctctgtagctgctcgaatggaaagggctcttttctctgaggtctttatacattagaaagctcttctgggaagaatgtttgaatccatagtgtctttctgtattcacttttaattgctttctaaattagctgagaaattctgacttgaaatattgtcaggtaagcatttcttcagttttcatgtgtgtatgtaacagtagctttgcatggaaattgtaatcagagtcaaatacagtattgaatggaatgtactgccttctcctcctaaatcaataaacatctttcatggataaaaaa

SEQ ID NO: 52886 - DNA, 409 bp, Homo sapiens
  misc_feature (1)...(409): n = a,t,c or g
gggcccagaaaggggcttctataccttcactggtcctcagtagctcctgtgacctactgcccagactgatgcccacagacccagagacaaacttggattttacggagcccaaggccatgaagggttaaggccaacactgagtattatagtgtgaacctataaactgaaatccttatttgggcctgcacagctttctttttgggcttgggtgtccggggatgctggggagtgggccatgtctttatttgctcaacccttccttgtatgggagggcagggaggctgggaagttgccaacttttctttttccatcatggggggatacttgagggcatatgggttacatcttcaggacactaggntcccaaagctagtttccaggggnaggggatttcccagccttgccagcc

SEQ ID NO: 52887 - DNA, 285 bp, Homo sapiens
aaaaaggaggactagaaatttattggcttgtttggattcgggagacattatattcaccacttgggtaacattttacaacctctgcatgcagtcactagaaaatgctgtgactttcactggggagagaaagagagcatggcttttgaacaagctaaacaagcagtgcaactggccctggacctatggcccatatgagatgggccagtagaactgcaaataactgtcctaaatcaacatgctaattggagtcttaggcagaaacaaggtgggaagagggtacctttg

SEQ ID NO: 52888 - DNA, 521 bp, Homo sapiens
ttgtttaaaggcaatctaacagattggaaccctgataagatcatgcctgtgcagccctgcacaggcacgaggagactgtgatcaagtctgttactcgttacagtactgtgaacgtcaacaagaagaattgctgcatggaaaacactgaatataggcagaacaatctctcgcttacgatactgtgtgttgcaaataatgcctagaccagagcaatgcaggcgctatgattcatcacaggcaagatcaacaaaggaattgttaggacaaagaagaggctgcatgcagacctcccctgtcaaaacacctcgcagctcattggcttcatacagcctgccaaatgcaagggaagcagagagagggatggtgggtaggaagagaaaacttttttgcctgacaagcaacagccctcttccccacaaagcaggacagttccttataactaagagtaagttcacttaaacatgattaaaaaggaagagagaaatattaaaaaggagagaggaggcggagtttttcaaagc

SEQ ID NO: 52889 - DNA, 463 bp, Homo sapiens
gaactggacgacatatcaggctttaaaaaactgagatgaccatctgacttcagaggcgatggtactgttaaagagactgctagatcttcaagaagtatggaagaaacgcagggcttgctcttttctacactacacacattatctttacttaaaggtaggttagtagacacttcaaacatacaactttcatccaacacatcaggatgaaccggcaatgaaagccctgaagacagagatggacctttttcagatgataataatgaccaattatcatcactaatcattttaggacatggagaagccacccctgaaactagctcttctgttgtacaagctggtatagactcgcacttaagagtctctagcagcttgcttctctgggagttctttaactcccactcactttttttcagtacagtttaacactgctggtctaaaagatcagaaccttggcaacaaactt

SEQ ID NO: 52890 - DNA, 439 bp, Homo sapiens
tccgagaactcctttattgtgcacgtcccccgcagagcagcctcaggcgtcctggtagtagttgttgaagttgatgcgcagcagaaagtcctccaggtggggctggtagccgcggttcaccagcttggtcaccactttgaagagaaagtgggagtagtacttgaaggtgttgtaggactgctgcatgagtgcaaagttggggtgctctgcaccccgcgggcccccagggggcccccagggcctgggcagatgagctggctgcggaacttgagcacgaggctgaagatgctgtggatgacgttcatgacggggcgccgccttctccgtgagcaggcccctgaagacggccttgtgcaggtactctgcgtgcgcacgctggatctcctccaggtcgcccacggtggccaacctggccctgaactcgcaccaggtgacgtgc

SEQ ID NO: 52891 - DNA, 378 bp, Homo sapiens
aattgcaaccaattttattttaattttacttggatgcaacagccagagaactttcctaaattctgaacagtaaagatcacccataacttcaccatacaatttcagaaagatacactgtgtatgtaaataccatgaccatccagaaattttcttctggttcattgaagaactgtctgttcttctgtgtatgtaaagattttgcaggttttgatgggctaaatgtccttgtaaactgtacaatagcttcacacaatccgacatttctaatcttctcattcttttctacctcatttggatgataaaataaaatcttattttcctcctgtccttcgcgcggcccgaagcgcggttgtagatgaagaaactcagcagcgccgg

SEQ ID NO: 52892 - DNA, 209 bp, Homo sapiens
cccgcatgtgttttgaattttgctgcccggaattcactgcgaggactgggatcacccgtcaccccgccctggtctacggaaaatgaaatgtgtttactgatatagaaacggaataacggcgctgtgggctggggagggccgagctgccttcaggttctggtctccagctgcagggcactcacacctgcccgttatgaaaatgcagaccc

SEQ ID NO: 52893 - DNA, 961 bp, Homo sapiens
gaccaactattagaaataatacagaagctaaagcatttccttttctgtaaaactgaaaagcaatgaaccagttgaattaaaacatcagaagtcatcaattgtgtccttttccccaacagaaatccagatggagacgtgagcccctggtgctatgtggcagagcacgaggatggtgtctactggaagtactgtgagatacctgcttgccagatgcctggaaaccttggctgctacaaggatcatggaaacccacctcctctaactggcaccagtaaaacgtccaacaaactcaccatacaaacttgcatcagtttttgtcggagtcagaggttcaagtttgctgggatggagtcaggctatgcttgcttctgtggaaacaatcctgattactggaagtacggggaggcagccagtaccgaatgcaacagcgtctgcttcggggatcacacccaaccctgtggtggcgatggcaggatcatcctctttgatactctcgtgggcgctgcggtgggaactactcagccatgtcttctgtggtctattcccctgacttccccgacacctatgccacggggagggtctgctactggaccatccgggttccgggggcctcccacatccacttcagcttccccctatttgacatcagggactcggcggacatggtggagcttctggatggctacacccaccgtgtcctagcccgcttccacgggaggagccgcccacctctgtccttcaacgtctctctggacttcgtcatcttgtatttcttctctgatcgcatcaatcaggcccagggatttgctgttttataccaagccgtcaaggaagaactgccacaggagaggcccgctgtcaaccagacggtggccgaggtgatcacggagcaggccaacctcagtgtcagcgctgcccggtcctccaaagtcctctatgtcatcaccaccacccgtcgagc

SEQ ID NO: 52894 - DNA, 445 bp, Homo sapiens
  misc_feature (1)...(445): n = a,t,c or g
tttgataccgnttgacatgattacgaatttaatacgactcactatagggaatttggccctcgaggccaagaattcggcacgaggtctgttgttttatgaagtttatttctcaagaaaatgggaataaatttgggatttgttcagcttttttactaaagatgcctaaagccacaggttttattgcctaacttaagccatgacttttagatatgagatgacgggaagcaggacgaaatatcggcgtgtggctggagccttcccactggaggctgaaagtggcttgtggnannataangnnntnannnnangaggtngnntncangnactcnntntgnttgnnntntgnnnnnanatngnggnannnnttntgntgttttntatnnatgtnncntnntnnattncantnnttntttttcntntntgntntnnngnncttnctnntttg

SEQ ID NO: 52895 - DNA, 1167 bp, Homo sapiens
  misc_feature (1)...(1167): n = a,t,c or g
ttttttttttttgagcagacaaatctttattcctgaggctaaaatatgcaccagttccctccctgtaccgcgccactgccagcctgactgcatgcaggccctgtcccagacctggagcgctgaacttggagtcccaggacctccttccctgagttgtgtgtgtgtacatggaggggactcctgggtagcacctggaggcggcctaggggtgaggggcttctcaagggtgccctgcacatccagaggtgcagtcttgggcaggatgtagcatgttcagagtctggtgaccgaaacagggctgtcggggacaggcctcgggtgttggagggcaaaggtgacagcatcatggacagaggcaaagagatgcttcttggtgatggatgcatcgaagaagtgcccagcctcaagctgggctgaccacagggctgtggcaggccgccatgtacacctccacctcaatctcccggaagtcatggaaaatattcttcaggctcttgaggcacacagtgtccacaaaggagagggcacccaggtccaggatgaggctgtggaagtcttgctgaagcaagcccangcttttcagtgtggaccatctgggccttggagtcttcttgaccattggctgttgcatcttccatcttatctcctgagctcacctgctggggagccagacatgctgccagggccacccatgagagagtgaaggcaggactggccgcacacagacacgcgagaacacgcaaggtcagatggggagcatgcatgggacacataaggacacaaacatgcgggagtcacataggtgtgcaaagacaggaatgacagatgtgtggggacatgcaggagggcacacccagatgtgcatatactgctctgctacctcctgggccgacgctgcacagggacacgagaagggagtccctgtcccattctcatcagccagggctgagtggggagggggcccaggagcaggccagaatagacacgggcatccacatgaaacgcatgcagacacctcggcaccctgccctgtctcagtctctaattaagtttggcatcctctttgacccctcaatnnnnnnnnnnnnnnnnnnnnnnnnnnnnnnnnnnnnnnnnnnatgcagtggttattcacaggcaccattagagcgcactgcagccccgagc

SEQ ID NO: 52896 - DNA, 111 bp, Homo sapiens
acctctaccagtatatgcaggtagcactgcaggagccccagcgcatgtccccactatctcttcttgctggatgcatcaactaaaaatgtccccagtactgccatatgtttg

SEQ ID NO: 52897 - DNA, 569 bp, Homo sapiens
tttttttttttttttaaaattttttttttatttccagaagtttcttcaggacataactgatgctgagaagtattttattggcttaatttaccatcgtgaagagaaaaggtggcgttggatcaacaactctgtgttcaatggcaagtacgtgaacatgccacagtttcctggggatcttggtttgcttcaaaagaccaaacctgagattgctgggttcaccctggaatagctcaaacgctgacacttgactctgttctgctcttctcctttcttccaacccatctattccctatctgtctaccagtagcggtccttgcccatttgggaaactgagcttctttcttctgcactgggggactggatgctagccatctccaggagacaggatcagttttacggaaacaactcagttagtatagagatgaggtccgcttctgtagtactgagcatttctgactgatcaaaaaggcctagtctgttgacagggtttgttttattttagcctcagagtataccatactactagggagtaaccacacagcctcctgcaagaagtgggtgggaagttt

SEQ ID NO: 52898 - DNA, 281 bp, Homo sapiens
cccacatagctatcaattctattcctacatacgtgcttacaagaatgtccataaaaccctgtttataatagccaaaagaacagggaacaaccataatgcacatcaaaagaagaatggattaaaaaaattatattcacacacaggagtactatatagtattgaaaacaattgaagtacagctaaatgtaataacgtaacacaatacaactctcagaaacataatgttaagcgaacaaagcaggttttcagaaaatatatgcagaataattccatttatctaa

SEQ ID NO: 52899 - DNA, 564 bp, Homo sapiens
gtcagtatcggtcagacttcatcaatataggtgggtttgatctggacatcaaaggctggggcggagaggatgtgcacctttatcgcaagtatctccacagcaacctcatagtggtacggacgcctgtgcgaggactctaccacctctggcatgagaagcgctgcatggacgagcttgacccccgagcagtacaagatgtgcatgcagtcccaaggccatgaacgaggcatcccacggccagctgggcatgctggtgttcaggcacgagatagaggctcaccttcgcaaacagaaacagaagacaagtagcaaaaaaacatgaactcccagagaaggattgtgggagacactttttctttccttttgcaattactgaaagtggctgcaacagagaaaagacttccataaaggacgacaaaagaattggactgatgggtcagagatgagaaagcctccgatttctctctgttgggctttttacaacagaaatcaaaatctccgctttgcctgcaaaagtaacccagttgcaccctgtgaagtgtctgacaaaggcagaatgcttgt

SEQ ID NO: 52900 - DNA, 449 bp, Homo sapiens
gcttgcttttcggcgtattctgatttagctttgggagagctaactttattggtcttaggtgttcagtgctacctggcccactgcttgtctgtttgtgacttttaagtcagaaactggagatggtaagatccgataatttccctaacttaatacatcgcggtccctctcactagcaactcctaggtatgtgacaaagttgggatgtttatcaacggtccgcctcctggctagggaaagagctctggggcggagaatgcactttctgttttttgaaaacaacctcattttgtgcccttaaaagccactggggatgacggatccaggattgtgggtggaggtagtggggtttttcatcccctgactatggggccaacttctgccagccattgttttttctaataaagattgtgtgttctttttaaaaatttcccctgcgcttagattcttct

SEQ ID NO: 52901 - DNA, 278 bp, Homo sapiens
  misc_feature (1)...(278): n = a,t,c or g
ggcttgggaaaacagaatggccctagacatgatattagccaaaaaaggtggagtttgtgttatgatcaaaactcaatgttgtaccttcatcccaaacaatactgcccctagtgggagcataacaagggccttacaaggccttactgctttatccaatgaattagctaaaaattctggagtcaatgaccctttttnaggatggctagaaaggtggtttggtaaatgggaaaggatcatagcctcaattcttacttctcttgcagccgtaataggtgtag

SEQ ID NO: 52902 - DNA, 1427 bp, Homo sapiens
ctctagagtaacatttgaagtaattcactgtagtgtatgccagtcctagaaataattattttaatttctggtgtctgtttctaatacactaaccaagttttcaaaatatatttacaaagatgcatctttacccattattttaaaatgattaaggaggatagttgcttcaggtaacaagctaatttttcaaatattaggcccttacagaactatttagtcaaaaagtaagatattcctttaaaatatataacccaaagctttcagttaaacatgatatatcacaaatactattaaaatgttaaagagaaatgcaaatagcattaaatgatgaccaaaatgtaaaatattgtagatttcaaaagctgtgtctctattaggtgggataccaaatgtaaatgatgtaactgacgttgttttttactttttactttttaaaaaagactaaaaacgttttgatattatacaatgtatttgtttcagataaggtcattgtcatttagtatatataattaatatatgtacaagtttaagtaaattcctgtgagtaaaaatggacttatcacaaaacatagttctaaagaaaggtatatgctcatatacacggtgtccattaatttaatgggaactaggtataacttcaggagaatttggcaaataattcattaatccatgtaaatattcaaaagcttgttctatccacattatttcaagggatcactttatttttcattatactttcacagcacttttctagtaaattctgtaacacagaaattccattttggaatcatttcatgttaccaataattctagacttttataacatttaacatgttgatggaaatagattacatctgctagaaccttttgccttaactattcaccaatatatgctaatattcataaatatggattgactgtttacaaacattagaatcttgtcttggttccattttgatggctaatatttgttatcttaattaagactatttctgaggtcatgattacttgaaaatattgactaaaactgggtccttagaaattccaggtggagctgatttacctatgactgaggggaaaaaaaaatcaaattttactgataatagtaatgctccaaatgaattaatgacacatctgttcaataaataaagagcttaaatatacaaaacataagaaatctgggcaacaaaacttgtggtctttacttttgaatagctacccaagaaaaggttttaaaggtaaaagttatgagtaatgtcatcacaataagctcttgtttaaaattcttttcttttatgtataattaggtttatgtttcatgtctttttaaaaccttataaaagatttaattatcacatctattcttcaatgtggaaatattaaatattgttggttgtaaaataatatttatgtactacttgtgtctg

SEQ ID NO: 52903 - DNA, 755 bp, Homo sapiens
  misc_feature (1)...(755): n = a,t,c or g
ggaccggcgctgagcctagcgcgcgcgctaaccggtccgatctggacgaacgcgaggcttcttgcgagacgaaattcgcggtgaacgggatcgtgcacgatgtggacgtgctgggcgcgggcatccggctggtgaccctgctggtggatcgggacgggctgtacaagatgaaccgcctgtacctcacccccgacggcttcttcttccgagtccacatgttagccctggactcctccagctgcaataagccgtgtccagagtttaaacctggcagcaggtatattgtgatgggccacatctaccataagagacggcagctccctacagctctgctccaggtcctgagaggccgcctccgtccaggggatggactgctaaggagcagcagcagctatgtgaaaaggtttaatcgaaaaagggaagggcagattcaaggtgcaattcatacccaatgcatttgaaacaaccatcctgggcatttctggaccgcaagagacttggacgtcggcaacaagacatgaaaggtctaccttcatgtaatggggtcctccttcagaagagagccctcagctactctgtgaatgacttgcatagctgcaactgtaatctcgaaggtgttcactttgttatttacaagatggcttncttgaaatggggctgctcctggaggttcagtgttcaaggtngatttcaactgttagtggccagacaatggattttacacaggttcagatnaatttggacctgttccagtt

SEQ ID NO: 52904 - DNA, 480 bp, Homo sapiens
ggaaaacatgtagaaagagctctcctagtggaacttaataaaataagtctcaaggaagaaaatgtatgtcaagaaaaaaattcacctgtggatcagtctgattttttttatgaattcagtaaacttatcttcaccaaaggcaagtctcctacggtagtgtgcagcttatgcaaacgagagggtcatctaaagaaggactgtcctgaagacttcaaaagaatccagctagaacctctgccaccattaacacccaagtttttaaatatcttagatcaagtctgtatccagtgttataagggtttttctccaacaattatagaggatcaggctcgtgaacatattcggcaaaacctagaaagtttcataagacaggactttccaggaactaaattgagcctgtttggctcctccaaaaatggatttgggttcaaacagagtgaccttgcgtctgtatgacaattaatggacttgaaactgctg

SEQ ID NO: 52905 - DNA, 1366 bp, Homo sapiens
gtaaattgctacattggcattttctacctccttttctgtcagagtattactttttccagcatttattcttatttgtgagtaaagaggaaatgggaacctgaggttaaaattgacatttttgtttcattgagaatttaagcagtaggtacaggagaagtgacttgtcacattaatttggtgcctaaatctgtaactacaagttgtgatcgacatgtacaaaatgtctaagaaaggtcatatgctgaatattttacttttcctgtatagtctgcatgatttgtttcataaacccagcttatttcctccaaaaagcaaaatggtcctgtaatttttaaagtaaaataaacgtgccattttgtctgcaatctataatttcaggaagttattgaaagttctgacctcagggctttttaacagttcaagcaattgtcagttatattttggaaactccatctgtgtaattctccagtgccttgaaagaattattaacttggcaacactattaaaactttataaaagatggtctttagtgcacgtgtatcattatatacacgttttaaagtcatattgcttagcttgttaataatgattctgcatgtgtgctgggtttgggtaattctttaaaggaagttttctagatttgcacttgatgtttgttttttaaaaactgattatttatggccgtgacactgttaccagaaaagtaattctaattaagttattatgcaaagtcatctataagtagcatctgggaagaggagatcgaggccacagtttgctattttagtatgaaaggaggatctgtttgggaaacatagattgtcttcccctcaaatgaggggaaaaaaaaagaccctttgttcaaatggattctgttgtaaaaaattatttttaaaggaaatcacaaattgtatgtcattcttaatgctagtcttatagaataaatccataaaattgtttttatgttcagtatgtttatgtcattctaaatgcagcaaattcaatgatagcagttcaattgactcatagcagtgttttgtattttttctaattctttagctttcaatattggattaaagtcttgtttgtgaatatagtttccgtatggcaaatgatttcttgcttattagcttttgttaaagaatgcttagtaagagctaagcttttaaaagtaatgcaaacatttatcgttaataaaacctatggtgtaatatcatataatgcttttctttgatctttggagaattattcttttatagtagtatacatgaattttgatttttaaagcatttaaaaacaaatctcaatacattaaaaaacctgttattgttaaaagggaattaccatgcctttaggaacagggtgt

SEQ ID NO: 52906 - DNA, 377 bp, Homo sapiens
tcctcctgagcctctggtggtctccccctgctcgagcggcccctcggccaataagacagtggacatcatgacgaggactccgggtggggacctgaactggtcaccgccctgcacttctagccctcatttaagatttgagggtgaaaccaaagaaaaccccctaagtgagggaatcttttaatatttgtggctttagaggaaagaactaaaggagccatctctctcccctctcctccgttccgagaggaggggtgggtctcagacgtttttcctatggacttatttctttcatgtccaggactttgcacaactttggttttaaaagctgttgaaaaataggaaaacaaaagggcattgttcacagatagggccagtct

SEQ ID NO: 52907 - DNA, 790 bp, Homo sapiens
caaaacaaaacaaaacaaaaaaaaccaaaccactttggaagttactcaggcctctgctctggctggacatagtttagtctataactttcaacccttaatgataattaaattcatctttgtttaatttcataaatttaaaagtagggtccttttcagttagtgattctcagccctgattcacattaaatttttaaacacgggggattctctgcccggctggaagaaaatgactggatgggacaggggtcactatttgaaacattcctctgtgcggccaaggtcgcaaaatgctgtcctcgcaggggaacaaaaagagtttgatttcccataatttgatgctgtgatttggtttcctcaggatgtgaactgtagaacattccagttactggccttgaatggttctgggaatataagaatccctgtctgtcttttcaaatagttttcatggaaccttgtcctgtttgaacttggctgaaaatggaagtaaagatgccctcttgggggcccagagatgacagatgtggctccccctgctgcccccaccccttctccagactgtgggcggctccccttcctgctttagaatccctcagatggaggaggcagtacagtagtcactgtgccatcgtgtctggcactgtgctggcgtggtctgcaggatcccacttatgaactctccagattgggagctgtggcaggataacagcccccaagacagctgtgtcctaaatccccagaacctgtgaccacgctgcctcacgtggcagaagggactcgggcaggtgtgatt

SEQ ID NO: 52908 - DNA, 1204 bp, Homo sapiens
gtcaggtcccgtcaagcagcctggctcatggctgtgtgcggcctggggagccgtcttggcctggggagccgtcttggcctgcgcgggtgcttcggcgccgccaggctcctgtatccccgtttccagagccgcggccctcagggcgtggaagacggggacaggccacagccttcctcgaagacacccaggatccccaagatttacaccaaaacgggagacaaagggttttctagtaccttcacaggagaaaggagacccaaagatgaccaagtgtttgaagccgtgggaactacagatgaattaagttcagctattgggtttgctctggaattagtcacagaaaagggccatacatttgccgaagagcttcagaaaatccagtgcacattgcaggacgtcggctcggccctggcgacaccatgctcctcggcccgggaggctcacttaaagtataccacgttcaaggcggggcccatcctgggagctggagcagtggatcgacaagttacaccagccagctcccaccactcacggccttcatcctgccttgacagacgctgtcctccagttccccaagtccctccaggtcctcaccggtccctcccagccctgcccacttctggagcagcgttcccgtcgggaggcaagatcagctcggcgctgcattttttgccgggccgtgtgccgccgggccgagagacgtgtggtgcctcttgtccagatgggagagaccgatgcgaacgtggccaagttcttaaacagactcagtgactatctcttcacgctagccagatatgcagccatgaaggaggggaatcaagagaaaatatacaagaaaaatgacccatcggccgagtctgagggactctgaaatcacagaaagtgggagctttggaggatccctccatggcgatggccgtggagagaggagcttgcccttctggggtcctggttcctgaagagctcacccagagaggctcaaagcagccttttgtcccagctcagctttgatctacacctcttgccaccttcctcaagggactgtgaccctttggggattctgcccctgaccctgcttccccaagctctcctgggtcttggagggatgtgggaatgaattggcattgcaggaaagacaggtaaagtgattgctgcaatgagaaggagctgtgcggaaaaggaataaaagttggaaaggctggaa

SEQ ID NO: 52909 - DNA, 671 bp, Homo sapiens
atttttaaagcttttttattttcttttttggtcaagcaaacaatagcaagcaaatagctacttgaataaactatcagtgtgcctctctctctttaaagactttgcatttccaaaatcaacttaaggactagaaaatattttcatttgttcctaagattgaattttcatggaaaaaaaaaactgccttgggaattcccccataccctcccaaactgcaccttatctttgttgtccagtagagcagaaatccgaggggcttgaagaggagcgatagatggaagagcctcggtcccttataggttccctggaattggccacctcactcagcatgttgtggctgccagtttttctcagtcccaatctccatgaagaaggagattcatctttgggctcttctggcttgttaaaaaggccagaagagaacctcctagcagaagaggcagagaaggtattttgagctggtgctggtatctgctctgtgatactactcttgctttcagagttggaatgattgacaaaggcttctggctttttatctgcctccttctcagtttctgactcagaagcttcatcttcaccttcctcctcctctgagctggagctactagattctttattttcttcctccatttcttgggacttaggtgtctcctcctcatagagcatcttct

SEQ ID NO: 52910 - DNA, 1144 bp, Homo sapiens
  misc_feature (1)...(1144): n = a,t,c or g
gatggacttgtgattggctgcaggaagaaacttttttattttttaaatcttgaccaacagaaaccttttatttttatttctgactcttattttttaaaaaatttgcgcctcggtatctggcttccctggaagctctccgagctctggtgctttagttaggtcatttttttagaaatgtgaagaggtctgattggctgcttaaactggaaagggactgtgattggctggttaatgggaaacggtttttttctttggctgcaggtgttctgctgatatcaacagcttccctattttgaatgcagaaaacagggtctgggacattagtcgttatatttgacttgaaaagaaagaaaccaagtgcgctttgcaatatttattacacaaagaacttgctgctgccttcacatttggggtttgtgtttgattggctttcgatgcgtgtgtttggtttcccattggttcacctgtgactcctgttgccatggattcacccccctctgctgccggctctgggcctgagggtccacctggagagtacatttgctttaatgagtgcacctgcctccaccagcaaggggaccccgagaaccctgagcagggtccacagctggaaagttgggcccctgaggagctttgtgtcgtcttgaacgagcagcccagggcctagaggtaaccgttaggcgggatttatgtgcactgcctgcatgagctggcaaccagccagcgtcccttggtgagaaagggattgctgaggcaccgtccagggccccaccggccagggccgcgcccagcagaggcgttactacccagctctgtcctcttggccatccttctgtgtaccacttcctgaggcctcattttgggggtcatcttggaaaggggaggagcttctcccagtgtgagaccccaaagactctggaggtcatctgggcggaggtctctggggagcccagaacccacataaaagccccagcttggcttcacaaggcccagggagacctccagcttaaacaccaacccctggaccttaccccagccagggttccttacctgttttgcttgccagcaacagttagggttcccgggccagttcttgggagtttttntttcattcgggagggcccatggcctttncattttncat

SEQ ID NO: 52911 - DNA, 270 bp, Homo sapiens
  misc_feature (1)...(270): n = a,t,c or g
tattttcctgtggacgccggggaagcacagcaccacccccgcacctgccctcggcctttgagagctttgtggtcttcccatcaggaacgctggaaagtgacattgtgtacacactgcagcttgggggttttttctttgtattgctgtttattttatattttaaaaatatttaaaaaaatgtcgagatggggtctcactatgttgtccagactgaatctcaaactcctgggctcaagtgattcanccancttggccttccaagtggtggga

SEQ ID NO: 52912 - DNA, 394 bp, Homo sapiens
ttttttttttttttttttgagctcttgacacctttattggaaggatcctcaaggctgtgggcaccgaggtctggaggcaacagaagcagcatccacccacccaccacagtggcagagcacaccccgtgcaaaaacccatcacagagagaaggaccatggagcccctgcaaagccatcatggagagaaggaaagtccccactgtccatcagccccggccaggcctggtccctcaacccctgtagaaccccaagcaggccgatgtgggaggcatcaccacacgtgggttccaactgcttctccaaaccctgtggtctcacatgaggcagggaggaaatttgaaaatggcagcagcctgggcacggaggctcctgcccataatcccaccactttgga

SEQ ID NO: 52913 - DNA, 545 bp, Homo sapiens
gcagagacagcaggaagaggggagtggaggcagcccattcacctggggaaatgactgggttgtcgatggacggtggcggcagccccaagggggacgtggacccgttctactatgactatgagaccgttcgcaatgggggcctgatcttcgctggactggccttcatcgtggggctcctcatcctcctcagcagaagattccgctgtgggggcaataagaagcgcaggcaaatcaatgaagatgagccgtaacagcaggtatgctaggagggcctggggaaggtgcggggagggcagggcaggcttgggagcaacagggaagaattctggctcctggactcggtaaataagaattttagggtcgtccacacatcagccaggtggtctgtcacccatcgtgtgtttaaaatgatggccaagggcctggcgtggagtgtgtgccgcaggagatcacagaggagccctggagaaaagtgagatggacaagggggaagtaaaaccccaacctctgctgcctcccacccaaccccatcctgcctttgtctt

SEQ ID NO: 52914 - DNA, 575 bp, Homo sapiens
aaaagcagagacagcaggaagaggggagtggaggcagcccattcacctggggaaatgactgggttgtcgatggacggtggcggcagccccaagggggacgtggacccgttctactatgactatgagaccgttcgcaatgggggcctgatcttcgctggactggccttcatcgtggggctcctcatcctcctcagcagaagattccgctgtgggggcaataagaagcgcaggcaaatcaatgaagatgagccgtaacagcagcctcggcggtgccacccactgcactggggccagctgggaagccaagcatggccctgcctctggcgcctccccttcttccctgggctttagacctttgtccccgtcactgccagcgcttgggctgaaggaagctccagactcaatgtgacccccaggtggcatcgccaactcctgcctcgtgccacctcatgcttataataaagccggcgtcagagaccgctgcttccctcacctgcctgcctgtctccctcctctgtcaccaccagcctctccaagctcaagtacaaatacagccgggcccggaattcttttgc

SEQ ID NO: 52915 - DNA, 1114 bp, Homo sapiens
  misc_feature (1)...(1114): n = a,t,c or g
gtttgggcattaattggtagcaggttgtctcaaccaaaaagacaggaaacagcaaaagcctctctgaaattaagaggaaagttactctccccacacccatcagagtctttattggagccaccaggtgagctgtgcagcctggacaggcctgcagctataggccaccttcccagtttaggtcctcagcacaggggagcccaagtcactgggtgccttccgagggctgtcactgggcaggccatatacaagtcagtgtgtgcgtggggcactgcagtgtgtgcatgccgtaggtgttgatgggtgctaggaggggtgtcgtgtgcatgcgcgttgaagaggatctgtattgccgtgacctctgttcatggatgagtgcattgtaatttgttctcaggctgtgctgtgagggccgccttaacccttgctcccttcccttctagagctgccttaagttctccagaacttttcttctgtaaaggatatcttgcctggaagggatatcttgccctgtttctcaaggttttgtgagagttttgactggatgtggccctgcatgaccctccttctcctgtacttcctctttcctttccaaatggggaattagaactgtggggcagcaacagtctcagagccagtgagaggccagcttagagaatgcttctgagttagtggggactctgtgtcacaagtaagcaaatgaatatatgaaagaaattatggagataagttagattcttggtaatacttaaatgtcttgctttctactaaccttttgttactaaaggtaaagggtataactcaaactttttgtggacattcttttcaaaattttttaagaaccctgtactataaaaggttgagtaaaaacaggaaagcgtgctataagttcaaatctgttgtattaccctaaattagataaaccaacctgaattatagtagatttccccaatagatggagggaactggaaaaataccatgtaaaatatccttcccaaatggctttttatactttttttaatttgtaatttggtctatctaaaatgttcgttagcttaacttaatgggcnttattggggntcctatggnctaacgttttncccaggatttgnactgc

SEQ ID NO: 52916 - DNA, 1198 bp, Homo sapiens
tttcatccttttttttttaatgcttaaaggcaaatgtattcagttcctttccatgcagcacacaataaggttatctatgtgcttatttcttttccaaatcaacagtttgggacaacctttcaggatccactcatcctccacggtcagccatcttgtaatgtgttctcataagtgtcttgcatgggggtaaaggaaccttcttgttggcctacagactggccaagtagggggtgtactgggaggagagctaaggactattgtctcttctgccaccatgaagctcatggtgccacattgacttgtaccagcagatgcttagagaagccactcagatttgccatggcagggaagaaggcatgggagaagaggaggagggactcgatgtcctatgatggagtgtagaggctgctggctggaaaaaaccaggaacaatgaacatgaggtcatcttccttaggatgccatgccaagcagaaagcctccgaaaaatcccccagttactagaacattcttcttcacaaatgacaccacctcctcagctttgctcctgacctcagtaggtatctgattgctcttacggatcttcagctgctctttggctttcttcatgtccttctccactcgttgccagtcaactttgatgtacccagtatggtttgcaagctgaaggagaaaaaatccacctcccacagctgttgcagccaactttccaaccttctggaatatgaaacctgtgcaaccatccagtgacacctccaatgaacagctgggttgccacgctatacttttctgctgaaggtccagattcctgcccgaacacgttacgccaccatggctgcttcttagcaaattccgcaaggtccagtgactcaaaatttccctcaaagtttccttgactggacgcggccatttcggtgagcttgtctcgcgaggacacacgtagaggatctgcgcggtaggccgcggagtggcgcgcagttgtcgccaccacttggcttccggcacgtggggcagatgtttccattcccacggaagagggcgcgccgtggctgcttgcagtactccaagcggctacatcacagagctcagcgggcggtgtgagcaccctttcttatttatgtaatatgtcagtaagtttatttttaggctgatggtgaggggtagtacttgtcttggcttttcaaagtacaaattctttc

SEQ ID NO: 52917 - DNA, 412 bp, Homo sapiens
  misc_feature (1)...(412): n = a,t,c or g
caaccagtgagctggagaaggtgctcccccagaccatcctgtataagtactatgagcgaaaagccgaggaggaggttgcggcagctacgccgacgagcttgtcaggtgcccgtcctgtagctttccgactctgttggacagtgatgtgaagaggttcagttgtcctaatcctcactgccgaaaggaaacctgtaggaagtgtcagggactctggaaagaacataatggcctcacctgtgaagagctggctgaaaaagacgacatcaagtaccgtacctcttatttgaagaaaaaatgacttgctgccccgcatttaggaaaatgcccacaagtgtggggacttggccttcatccaancttggaaggcttgcaacccgcntgttttttgccgntgttggttgccccagatgtt

SEQ ID NO: 52918 - DNA, 887 bp, Homo sapiens
aacacgattgttgtttcttggactgcagaaattggaagaaactattccatggcagtatatcttgtaaaacagttgtcctcaacagttcttcttcagaggttacgagcaaagggaataaggaatccggatcattctagagctttaagtacgtatgataaacttatttcacttattcagctattttgttaaaggttagagtagtattttctcaactcaagaaattttagaatttgtttattcactggagcctgttgtgtagttcttagagtagttctgatatctttgtcatgagctatattttataatctatattttactaatcttaaaattaactttgtgaagtcagtgcacaaacatgggagaatattattctacaacttcataaaatcaatgtttaaggaattctgggaaatgggaagggcatcttggcataaatttcaagaaagttattttagattggtggtttatccaggaaaaatgtacagaattatatcatggcctcaccccctgcatttacaaagtgaagagagccagtggggtggtagaaataataattctgccattaatcaattatatgactgtggacaagtaacgctgctcctgagtttcatcttcctcatctgtaacaagaagtttatgccgtctgatttctaatgcttctgcgaagtctgggttcatacgtgtgaattactggatggtttgttttggatacgttgaatttgagattcaaggtcttcaaatggggctgtgctgacctctgtttttaagggttaaggtcagagggtttggcctttccaaagaggtgaactaagttcttcgtttattcttttatttgtgagagccgggggctgcgtggatttaggagtgagggctggggacttagaaac

SEQ ID NO: 52919 - DNA, 345 bp, Homo sapiens
gcggcacgagaggcttcgtccaatcccgttcccgccctggatgaccacgccagctgtgggcctgcctggccgaacgcaggtctccatcaaaggggcccgtctgcatgggggtgcctgctcacctgtcgtgtcgacatcactgaggaccccttgggggctcaggccagcttgagggcctctttgtctcctaaataactgggacagtatctggggcttagatgagcagtcagcatagcaataagtgaccggaaatacagagatgtgtggactaagactgttgaggttgactcggatgtgtgcaaaggccccaaagtgacctccctccacggttgagccgttgctgaa

SEQ ID NO: 52920 - DNA, 451 bp, Homo sapiens
gcggatattccggggtaggaacggccatcgcaacgctgacagaggttgttttttaagaagcaaaactgttggcggcgacctgagcgctggaagccgaaggggaagaggaaggagacgcgaagccagggcggccggcacaaaggcggcggactcgcggcggcagcgcctgcccggccgggagcacaacccacggccctactccaagcgaagtcccgcaccggcttctaggaataaaagtttacgttctcctgaggccgcaccccccacctcccacccaggacggcacatctccgtgtcctcctcccccaaactccacttcgggaccccgagaaccaccccagccttccggccaccacaacaaagagccgcaccgaccggcgaggataaacagcggcggaaggcgaaagggcggcggggcgagcgccttcacgcacaacttccggagtccccg

SEQ ID NO: 52921 - DNA, 677 bp, Homo sapiens
  misc_feature (1)...(677): n = a,t,c or g
ggaaccagaggtttgagaagccctgagtggtagagtaaggcctccagcgctgcctctgggtgcagggcagagtggcagaggagagggggagaggcactgggcaccatgggggccagtgtcccacttcggggatctctctcgcagaaccgagggtccccttcatgggggttagatgcccagggctagctgttgccactgtctgtgtggacctgagtcctggacatgcccgagtgactcaggagtggctgcttgggcgggctctgtcaccctaggatgttatacattctgggaactggacaggagtggctgcttgggcgggctctggcaccctggggatgttatacattctgggaactggacaggagtggctgcttgggtgggctctggcaccctgggatgttatacattctgggaactgcaatcagccactagagaagtcggagctacaggaagtgaccctggggtgggacctggggacatggccaggtcagcatggggacacccggctccagcaggagctctggtctgtcctggggtctttgggggcagggctgcggcctgggcaggcttcctccaggcggaggtcctgnngaagtgnnnnatccnaccnntcttnnnncccntnnnncnttcctctctcnnctnnnnccttanncnccanannctatgttctcccc

SEQ ID NO: 52922 - DNA, 1714 bp, Homo sapiens
aaatgctgcagacatcagtagtttattgtttgtttagtccaaacacattcaatatggaaactcaaagaatactttccacctgaaacaattaaactagattctactagcatataatgcttaacacattacagcaataaagatggtaatccattgtcttctatacctactaaagccaagatggtaaagccaatttggttgcaatagtgtcataaggatagaatattaccatcaaaaaataaaacaaaatcagcaaataacagtaatggtagatgaatatttttactctgtttcactgaaaagaggacaaaatgttaaaactccacagtactgcaggtgaacaatcaccatgtaaacttctccatatgatgttttaatgttttattcatggtatgtaaagactgaagctgaatggctctttgctctacttttctattattacacttaacatttgtcattacttttggtgccagaacagttttcatggatggcagggcaatatcctgaattggaaattttatatatatatatatatatggaaacagaaatacaagaaaatatgcttgggggaaaaaaaacattgacaataaaacaactgcttctttaaaagtagtattaataaaggcttcaaaactccaaagtaattttctggtaagaatttcaagtactatatcagaaagtataaaactgtttcaaacagaaaaaaaaaaaaatccttaagccccccaaaaatggaaactatgaaaatctgtgtccccaaaatatatgcaatagtgcaagactttccctcaaacatggaagacctcattcaaagggggaaaaagggacagattttactcatattgcccagtacatgaaaaacaaaatacatgcatcatttgctagtttactaaatagcaaacagttgcataattcagaacccaatttgcctactatgtcaagtgccatatcttgtctgttttacaaagatagaatggagaagtcttccatgctaacgagcagctttaagtggtcacacttatttaccccactcctgcctgaaacatcagaaactggtatgtactgactgctccaagcataaaattggataagctttgcccatacttgtggtttactggaacttgctataaagacagacaataatccagcagctacaaactttgctcacagaattgtttaaagattcatgtaaaaataaaagatgtcgtcccagacttaaattcaggagccactcgggtgctgacatcagttcaagaattgtgcaaaatgaatgacagttccctgccccccaaatagaaaatgcaaacacttaaagagctgctgttcttttctccgaaaattgcagtatcctcacttcaggcttacttgccatttatagaatctgactgcttttaaaatgtcactaaaaatgtacgtcaagttgactgacttttccaagccctgaagtgatatgtttcaacgtccacattcaggctaagagaaaagtcaactagaggcttactcaaataactgacttcctccttccctctccccacaaacacacaggactccctccctcccacagagaacacaaagttgttaactgaagaacaagataaataatatgctagtccattttactgattttaaagatactgcaatttttatacatttcgatgatttttcaacattttgcagctgtttggctttgcagcacagcaattcatacactatactg

SEQ ID NO: 52923 - DNA, 336 bp, Homo sapiens
gtgagaaggccctgcagctgcttggggacaagagcctccaccctttgctggcaccctttctggaggcccatgtccggctctcctggcgcctgggcctggacaaacgtcaatcagaggctcggctccaagccctgcaggaggcaggccttacccccacaccaccccccagtctcaaagaattgctcatcaaggaggtgctggactaacccttgcctagatttaaggccactgtgaggagaggggttgccccagaaggcaggggaaggacctgatgagaacagaatagctgggaggctgcagagggtgctgggagcccctagaagttccaaaagaaaa

SEQ ID NO: 52924 - DNA, 518 bp, Homo sapiens
  misc_feature (1)...(518): n = a,t,c or g
ccaaagaactttcactaaaatttatatctaagaattctcccctaaagaactttaaaaattaggctccactctgaagccagccagggtcccaccagtttccacttatagtgccacaattccagaacaaaggagaagccattctgatgagaacgactttgtttcaattttgaaaaaccacggatcaggaaatacctgaagtataatttttagaatccgagttgtcacatcaccttcaggatgttttcttattgttaatgccatgtgacaataaaagataacaatttttatataaataatatttctgttaaaattctgatctcaacttaggctattgttagtttacaaataggaaagggtaggatatcattaaattagggtaaggccaaaggcatggccaaatcttaaaggcatcttctattctggaattcctaggattaggcggtttaaaacccattcaccggcaaccaattacctccaacggtntggcctcgtgtggcgggaaggggnggcggntactg

SEQ ID NO: 52925 - DNA, 344 bp, Homo sapiens
gccggtggaattggcccaggatgacagctggagaatggagtcagttttatccaagtatgaagatcagattactattttcactgactacctagaagaatatccagatacagatgagctggtatggatcttagggaagcagcatctccttaaaacagaaaaatctaagctgttgtctgatataagtgctcgtctatggtttacatacagaaggaaattttcaccaattggtggaacgggcccttcatcagatgctggttggggatgtatgctacgctgtggacagatgatgctggctcaagcccttatctgtagacacttgggaagggactggagctgggagaaac

SEQ ID NO: 52926 - DNA, 458 bp, Homo sapiens
actcactttcaatattttatttcatattattatatatgtcatgatagttatcttgatgtaaatatgaagatttttttgtttctgtagatagtaaactctttttttaaaaaaggaaaagggaaacatttttataaagttatattttaatcaccatttttatacattgtagttctctccaagcccagtaagagaatgatgattcatttgcatggaggtcgatggacaaccaatcatctaccttttctaatttaaatgataatctgatatagttttattgccagttaaatgaggatgctgcaaagcatgttttttcactagtaacttttgctaactgaatgaattctgggtccatatctcccagatgaaaaacctgttaaccaataccatattttatagttggtgtccatttctttccaacactgtttgttatgattcttccttcagtacttatatacaga

SEQ ID NO: 52927 - DNA, 560 bp, Homo sapiens
  misc_feature (1)...(560): n = a,t,c or g
cggacgcgtgggcggttatatatctatctaaattaacctttaaaatattggtttccttgataaaagcaccacttttgcttttgttagctgtaatattttttgtcatttagataagacctggtttggctctcaataaaagatgaagacagtagctctgtacagggatatatctatattagtcttcatctgatgaatgaagaaattttctcatattatgttcaagaaagtatttacttcctaaaaatagaattcccgattctgtctattttggttgaataccagaacaaatctttccgttgcaatcccagtaaaacgaaagaaaaggaatatcttacagactgttcatattagatgtatgtagactgttaatttgcagtttccccatatttcctgcctatcttacccagataactttctttgaaggtaaaagctgtgcaaaaggcatgagactcaggcctactctttgtttaaatgatgggaaaatataaattattttctaagtaataaaagtataaaaattatcattataaataaagtctaaagtttgaaatantaaaaaa

SEQ ID NO: 52928 - DNA, 634 bp, Homo sapiens
gagatggtgatggtggtcagggaagacctctctgcagaggtagtgacttgtgatgtgagctgagacctctgtcctgggaagaccaaaagaaaagcatttcaggatgagggaatggcatgcgcaaaggccctgaggctgaaatgtgcccatgtgttctaagaaatgcagcgatgctggtgtgcctggagcagggacggagggggagaatgggaggagacaaggagctgaaggagtagttcccgaaggaccttgtgggtgatatagaggacttcgcttttgctctgagtgaggtgggagccatagaagcttctaagcagaagagggacttgccctaattcaggtgatcacaggtgtcttgtggcctccatgggaggttgaaaaccagagaaggtgaaggggggctgcactgagccacaggaacaatgatggagattccagctaagcccagaccccgtggattctagatagattttagaggcagcagacagaattactgaggaattgagtgtaagagtggaataaagttatcaaggacaatgccaagggtggggcacccccaaatttgactctgggagactcagccaaatcctatctggtaataaaatttcttttttatttttaaaaaaaaaaaaaa

SEQ ID NO: 52929 - DNA, 381 bp, Homo sapiens
  misc_feature (1)...(381): n = a,t,c or g
taccaaaagtgtctgtacagcagccatccaagttgcccctacttagtggcttgcctcatgcctgcctcagctgctgcctgaccggctgggggaggcactggcgggaggctcgggctcccctgggaaggcgctgggctggcgggtcagctggtggttcttaggtttccttctgtttgttaaaaggggacaatgtggccacttctctgtggaaagggaattggttggggggttgaaaatggccccgtgttcataactcaagtttcctgtttttgcacgatgtaaaaaccctgtctttttgcacgataccagccaaaagtattggctgatttcttgctgaagtgccctccttagttgggtgtgttaangtccttggttgggccc

SEQ ID NO: 52930 - DNA, 1765 bp, Homo sapiens
tttttttttttttttttgcaagggctgcgcggcattttattttctgaaccccccacagcaggggcggccagtcctgctgcaggcagagtttcagtcttcggagtttgaccttctggcccaaggtcatcacagccacaggcggaggctctggggaaaggtccagttcctgggatgctggcccctaatgatgggcccatctctccagtgccgcccttccctcccgcctggcacaggagttctggagccacggtcctgagtctacagaacagcccggtcagcctcgtcccgcggtgcaagcgaggcctggcctccctccctgcctgtccttggcccggccacatcactccctgcgtttcttcttcttctccggctcctggacattggccgcctttgctcgggcactggtcaggggccgaggtgtcctccttctctggcgagcccctctctggccacggcccctgggctgatctcggagcagggcccgctcagctgtgcctggctgctcaccagcctctgcccgcgcctcggggtcggcccctacacccctcctcctgctcctcttcctctccatgcccgggctcgggggctccttctcacctttccctctctcctgctgcaacctgagcagacgcttctgcttcttcgtcttcttctgccgcctcccttcaagcaggcgcctgcaggccttctctgggatctcatcttcagggaaaatgcctcctgccaggtcctgcagcttccggatcactttgtagagacgctttctgttctgagaaggggtgctctggcggctggccatttcaaacagtctgttagcaactgcctcgtagtcaaactggagaacggggccgccactgtccctgtcgtcacctgcctgctcctcaccagcctcaggttcagccctgcagatggagcctgcgggcggcttctcagacctcttctgggacagcgcgtctccacgctcaccaccctcagaggactcatcactgtccgacgccacctcctcatcctgtgtgtccagttcattcaggaggtcttcaatggcaagcggggcctgctccacaatcgtctcaaagatgcctcgagtgatgttgttcaaaaccaaggaatccttggtccgggcagcaattctgcagaaggggtcgatgaacttcaggttctggtctgccgtaagctcctcggcgcccactttggtcagctcctccaggaagatctcgatgaagtggctcttcacaccgttgggggcctggctgctggggtgcaggatctcagtcatcagcagctctagcagctcctcgatctgtctttcttcccagccttgcatcttcagaaccttcaaggactcgttcaggaccatccgcatgagcatgtagaatttatccaggcgcagcctgtcaatgcccgtccactcgcgattcatggtctgccagaaggcctgaaggaacaggtgctgcgcctccgtggtcttgaaaagcatgaacgagctgggaaatagtccttcctaattcttcctggaggagtggcttgtcctgcatccacatgcaataaaacagtcctttccacaccttcagcagctcgtcgtgcgtaaaaccacctgcggcccgctgagtcctggcgacgatgtatttccggagcttcctcaccgcccggtcccgggtcacctgctcattccccgccaggcgctgagccagctggatctcaggcgggagctgcacgcgcgaaaccatgacgccgacggccgagaccccctgttcccggagtcgcc

SEQ ID NO: 52931 - DNA, 408 bp, Homo sapiens
cggacgcgtgggcccaaagcaaatgtttgcatctccttgtccataaaggagaaagccaggttataggagaaagagagagaaaggcgcatgtctgtttgcacagagagaggcaattttgtctacctttcgagaatcagttataaacagaagggcctcttaggattttgagctctcctgacaatgaaggaaaagctctcttgagtatacaagttccacactcattacctttcagtggtgacccatcacccactacaatttgttgaaggaagggagtgtcagagatatgctttaaagttgtactttaggctgaaattctctctgtatttggacctgcagatgttgtgtacagaaccgatgcatggcagggtcaggaagctaggagagtgaaggcgcttgtggagacagctc

SEQ ID NO: 52932 - DNA, 854 bp, Homo sapiens
  misc_feature (1)...(854): n = a,t,c or g
ttttttttttttttttagggaaacaagattcatgttttatttccacagagaaactcaaaagtaggaagctcctccttcctggagaactgtcacagtgacttcaggtcaccaaagggaggaggtacagaaagatgctggtgtatgtgacgaggctggtggccactgaagcaccacagtgcagtgggaagaaacaaggagagacaagctgggtccccagcctaggaaacagaggtgtggcagccgggccagggctggcacaggctgggggccaagggggaggagctccctgacgaccagtgcttttcggggcctcggtggtggttgcaagaaattgccttgttcggccttgtggtgcccctcacttttgntcccgcctaccaaaacttcacccactgcagcaggccaggttgcacccgggaagccgaggaagaaggtgagactcccccctttgcaggggtcttgactgagtactttcccaccataggcagtgggatacgcatgctggttgtaattgtagttctgatcggctctgcctgcacgtttctgcagtgatgacgcgtccgcaccctcaataattgctttccagttgaggaaaggagtgttctgtttgaaatcctcccagagtcggctgaagtagaggagggctcgggtgctggggggcgggacctggtccttgtttatggcatcccagttgatgaaacccagcttggatttaaaattcttccagaaagtgtcaaagttaaacatcccaggagacgtctcagagttctatggaaccaaggagatatgggatgagagaagaacccactttgtgagccagagtcgggagatctgagtggcaggaggggaggcga

SEQ ID NO: 52933 - DNA, 1000 bp, Homo sapiens
  misc_feature (1)...(1000): n = a,t,c or g
ttttatggtaaaaagctttaataacagacaatgtgatttcataggcaaccaattagcagattaatggatcatttaactttctttacttaaaaccaatactccactcaagaaagatgaacccaaaatgcatcctctaacactgaccaacataactaagtacaaatgaagtcaatggtgtaccccattagcatgctgcgttgtatgtcaataaaacaagccctcccccaccccgagccctggcccctggcaaaacatagataaatgattgtgcactgcgtgatgataccattaggtgagaactttggttcatgcagtcggctgccgcagagggttgcacccaaaacccgcagccccggcacccaaagtcagtcagcggtggtggctcatggtgtcagccgtgctccttccacaacaccaggtgaatactgtggtcaggcatgctggtggcaaagaccaagcccgtgtcattgtgcccatccagtccattcagccaggatgcttcgcctgccaggaagcctgagcctctctttgaattcctgtactctggcagaggccagcgactaatcaggctctctgtccgcaagtccatgatgtacaggtagcggttgtcaaacagcagggcaaagatatctccaaagccaagcaaggccaagtttgctatctcaggagtcttgatgaccctgagaatatcataactggcaaagtcccactggtagagaccaagtgctgaactacagacaatgtatttgccatcaaaatgaagtcttggctgcaggcagatacttctatcctcagagacagacaatgtctttaagcacttacagttgatttctctcccaattggccaaatcttaatctcatatttgtctgcacttaagaggatgtagtctccaggactgtgcaagagagacttgactttgcacttctgcaaaactaccttggtgacccattccgtgtgcccggtgagtntgttcaggcatgtcccagcagataaagccca

SEQ ID NO: 52934 - DNA, 421 bp, Homo sapiens
atgccatggttaaaccctgaatggctttatccctctttagactatttttcttctctgtagcaatttctctttccttctctctcaggtcctcttcaagtgcctggatcctctcttgaaagctgtttctctccttctgatgctccatttgtgcagcctcagtttctctctccttttcttcccttggagcagcacaaagtcctcggagctctccagatgacacattctcatcaggacatgccatctgagatttctcctctttaaggcactgaattaaagcttctttgctcttcaaagacagcttcaactcctcaatcagtctgtctttctcatccaggaccagagccatcgccaagtccccctcgtgcatcttcttcatctctgaaagcttgctttccaaacgcaaccgaagagccttctccgt

SEQ ID NO: 52935 - DNA, 521 bp, Homo sapiens
gctgtgagcaacaatggcaagcctttagcctggttgggagtggcaatggacacctctctggatcaggagcacagaggacaccctgccggatctggagtggtggacatcagccgcgggtctgcgatgacaaccatcagcagtggtggactgcaagcagaagctcagctagagctgtaaaaaacactgaccagaagagtgtgcagttgcaagatttaatagagtgaaaacagagcttccatacagtgggaggggaaccaaagggggttgccactccctgctcaaatgcctgggtttatatcccaatcattgtccctcctcctgtgctctcagatgatagatgatttgactatttctttacctcctgcttttagcctaatttgtattttagtgagccctctttactacctgattggtcaaggtgtgagctgagttacaagccccatgtttaaaggtaggtgtggtcaccttccccagctaggcttatgaattcttagtcagcctaggaaatccaactagtccta

SEQ ID NO: 52936 - DNA, 760 bp, Homo sapiens
caaaagacgaaagaaaagatttctacaggactatagcatggggtctgaaccggcctttgtttgcagtttatagaagagtgcttcgcatgtatgatgacagaaaccatgtgggaaaatatacacctgaagaaattgagaagctcaaggagctccggataaagcatggcaatgactgggcaacaataggggcggcgctaggaagaagtgcatcttctgtcaaagatcggtgccgactgatgaaggatacttgcaacacagggaagtggacagaagaagaagaaaagagacttgcagaagtggttcatgagtttgacaagcactgagccaggtgacatagtcacacagggtgtgtcttgggcagctgtggctgaacgagtcggtacccgctcagaaaagcaatgtcgttctaaatggctcaactacctgaattggaaacagagtgggggtactgaatggaccaaggaagatgaaatcaatctcatcctcaggatagcagaacttgatgtagctgatgaaaatgacattaactgggatctgttagctgagggatggagtagtgtccgttcaccacaatggctacgaagtaagtggtggaccatcaaaaggcaaattgcaaaccataaggatgtttcgttccctgtcttaataaaaggtcttaaacagttacatgagaaccagaaaaacgacccaacgcttttggagaataaatcaggatctggagattccgacagtaataccaattccagtgtgcagcatgttc

SEQ ID NO: 52937 - DNA, 508 bp, Homo sapiens
  misc_feature (1)...(508): n = a,t,c or g
cggacgcgtgggactttttgggacattgtaagtgttgttttatatcctttctaaatacaatcctgtattctgtgactggaaacttctacagctggcactctatgtgtgacattactagagggagcaatgcaggaggaacattagctgttcccaaatcgaagggaaaaggtacctaaatatatatctcaaatttgttttttgattctagaattgacataagattnnnnnnnnnnnnnnnnnnnnnnnnnnnnnnnnnnnnnnnnnnnnnnnnnnnnnnnnnnnnnnnnnnnnnnnnnnnnnnnnnnnnnnnnnnnnnnnnnnnnnnnnnnnnnnnnnnnnnnnnnnnnnnnnnnngatatttttgtattttttagctgggtgtggtggcgcaccctgtgtcccagctatggggaagggtgcnnnnnnnnnnnnnnnnnnnnnnnnnnnnnnnnnnnnnnnnnnnnnnnnnnnnnnnnnnatgagaccttgtcttaaaaaaaaaaaaaaa

SEQ ID NO: 52938 - DNA, 224 bp, Homo sapiens
acatgtgaaccaaattatacctcccctctcctaagaagagctggcctccctctgtacaccctcttcctccctgcagaggcttgcatcgatctcggccaatccgggcactctgtaggccttttcctctttgctttgtcctcagtgtcctagccactcaccggtcacagcagtgttcttctgtggtcataaatcttttcttaacctcctcaggctttttattctct

SEQ ID NO: 52939 - DNA, 168 bp, Homo sapiens
agaacgctcctaattatggcaaagttattaaatttgagctcatgtattgagaataaaatcagctctttcatgcctctctcaccttgacctttccctcatggtattcaaagtcaatgccggtaagtacagtgcttgtggctttgtgatagcccgattttttactcactt

SEQ ID NO: 52940 - DNA, 356 bp, Homo sapiens
gccacaagctggaggcacccatcagagaccaagccaaggcttgagggctttgcagcaaggacatctttatgtaaagaaaactgtttcacttaatttggagaaaggaagcatatatatttgcatttggagcaaggaaggaacaagcatgctcaggctcaaggacttggtttattcctgggtgactgaaagtccatgccatgaggcatcctctgggaatgtgagcagagtagcagcaagcacatgaagaagggttgtgatgagacggcagtgcagtgagggcactttcagggaagtggaaggacgtggctttgtaagtgtcatttggtcctaaataccatcagattcctgcagtactt

SEQ ID NO: 52941 - DNA, 423 bp, Homo sapiens
aaagatgtcaacagctatctgctacaatacttacagatcatcagtatttggagaggacaccactatgtgccattttgaaacaaaaagctcctcaacaataccgcatccgagcaaaattgaggtcatataagcccagaagactatttcagtctgttaaacttcattgccctaaatgtcatttgctgcaagaagttccacatgagggcgatttggatataatttttcaggatggtgcaactaaaaccccagatgtcaagctacaaaatacatcattatatgattcaaaaatctggaccactaaaaatcaaaaaggacgaaaagtagcagttcattttgtgaaaaataatggtattctcccgctttcaaatgaatgtctacttttgatagaaggaggtcactcagtgaaatttgcaaactctcgaa

SEQ ID NO: 52942 - DNA, 653 bp, Homo sapiens
tttttttttttttttaaatctgaccacttttattaggttgaggtgaaatagagaaatctctactatcctggagagaaacaagcaataaaaccatgtattacaagtttaaagaaatgaatttatcctaaaatcatcagtatcagcaccccaacaaagcaactttgccatttctacttaaagtacactgtagcttgatcagacacttatctcagcagtacttgtttaagcaggtctctttgtacaaaagcaaaacagaaagcaaaacaaaatccatagccattatttaccttgcacccagtaaaagccaagagatttaaggtaaggacattttctaatcccatacccatgctaacatcatcaacattgctgatacaaaactcaggtcaggaaaagaagctcaaacagggaaggtgagtggcaacattttatgtatgctaaattggatggcaatattagattacatcttctgcaactgtggtgtcaaaaatctgatagcaaatttgattatctgttccatttgtgacattgtatgacttgatgaagcattccaaccacggatatgcatcaatttttattcctggaggacaaaacatatccatgatcatatccacacttttctgaaggtcatcatccatcagaacttctgatgctgg

SEQ ID NO: 52943 - DNA, 280 bp, Homo sapiens
tgagccacctcgcccgggccagcatcccttaaatttttaaagaactgtgtatttcaccttctggctatgtttaccttttacatgtgttagggcctagaagctgcaaatacttacaaaaatggtgaaatcttactaaagataaattagaattatgatgaccattatgtggaacattccagatgaataagactgttcatctaagaattgagtttaaaaatgagggcttctgaatcaggccctcctagggatacctattgatgtgcaaaagctccgtgccgaa

SEQ ID NO: 52944 - DNA, 547 bp, Homo sapiens
ttttttttttttttgaaaacatagtttattttctcattcaggcttttgtagtttatttttacaaaatagcagacaaaatttggttctttatattaatagagaatatgtaagacatatcgaaatatatatatagcacttaagttataaacacacagcaaattcagcatcacttaaacagcaaccatattttcacataatcaggattgcataaggagataaacattatttttagcctaaatatataaataatctttgatgctttatgtcaattagtatttataaaagctagtctaaaaactaacaccacctacaaaagtgatgagctttaggctacaaccttgccatcatgccataataaagacttaaaattatagaaagccagagggaactaatcacttcagtgcaactgcagcaggtagaactacctagttatgattttaagatggacactataggaatccagaagggatgtttttgaatcttcagttgttggattctttatggtccaaacatatcttaattttggttagagttatgcccccaaatc

SEQ ID NO: 52945 - DNA, 638 bp, Homo sapiens
tttttttttttttttccttttcatttagatttttttattcatttgcatgagataaattatttttctaaattatttttagtacagttttgctatataccagagcttctgatatatatataccatttttattgtttttgagatattttacaattttagttttgactttggctttggagtgggttgctgagaacatagcagttgtttcactaatcccagtaaaaacctactaggctattgttttcttctactcttcaatgcagttagttaacatatttgacttctgaatctatcttcataatttccagttctttcaggcatcaaggttaacactcataggagctgccatgatcctctggagccagggctgaggatttctgaggtgaggtccaattagctggcatggccacactgggtctcaaccctttttctgtagggtgtctgaagcttggcagtcatctgtgaactcaagcagagctgctctgaagagatgggctggagtctagaggaaaatctggcccaggggctccccagagacacccagaaacctcaaagatttatcggtattggaatatgaaaatactcctgacaccagcggcaaaaaagccttggaagaccacttccacttccccacgcgtccg

SEQ ID NO: 52946 - DNA, 447 bp, Homo sapiens
  misc_feature (1)...(447): n = a,t,c or g
tgcagtaattttttaatctcaaaagtgtcttttttgtcttatttcatcttcacagtttcctgttcttattatataaatatatctccctaatctgagtctatggattggagttttatccaatccattcattccaatgattggaatgattggagtcattcacatttctcaatccatttattttccgtttctttgcctggtctttcttttatgtgatgcagctctccttgaatgtctgatacattttcatcctttaaaatgaagccgatgggtgacaggaagacgtgcttccatgaaaggcagtgtttcactccggaacctcagctcccgcaccgctgggattccagatccacagcatccccagggacctcttctcccctctggggtcctggcccccaatnttcaactgggctcccatntcagattccctggtaaggcctccaggcttgg

SEQ ID NO: 52947 - DNA, 645 bp, Homo sapiens
ggtgattaataaaattttattaagacattaaaaggacttagcaatatatcatgttcatggattgaaaggcccactatgatataaattctcccaaaatagcttatagattcatcgcaactccaatcaaattttcaatgtgttcggctttttttagtgaaacgtgataagctatttctaaaatatataaagaagagcagagaaccaagaagagccacaagctgttgatgaataacaaggatgtgaaaggactttgatattatatatcaaaaatttttttgaagatcatgaagtaatgaagagagtgtacattagcacaggaaaaaaaccaatataataaagagcccataaaagatctttgcatatattgacaatatacaacagaaaaggcacttcaaagcaataggaaaaggaaggttttttgtttttgttttttttcaataaacagtgctggcacaacagactagccctatagcagcaaaaaaattacctcatactatatgttgaagattgttccaagtgggatgaaaccaaaatgtgagaggcaaaactacaaagcatgtaacaagagaatattaactatatttttaacataaccataaaaaaaaccgagctaaccataaaggaaaactattatttgaagatatt

SEQ ID NO: 52948 - DNA, 193 bp, Homo sapiens
caatgcctaccacaactccacccatgctgccgacgtcctgcacgccaccgctttctttcttggaaaggaaagagtaaagggaagcctcgatcagttggatgaggtggcagccctcattgctgccacagtccatgacgtggatcaccccgggaaggaccaactctttcctcctgcaatgcaggcagtgaacttg

SEQ ID NO: 52949 - DNA, 655 bp, Homo sapiens
  misc_feature (1)...(655): n = a,t,c or g
gctgatcgggggaggccgagaaccgcaggagctggccgagaaatctcctttacagacaataggtgaagaacaaacccagaatccctacactgaactgctagtactgaaggctcatcatgatattgtacgatttctggtacagttagatgactacagatttgcatctgctggtgatgatggaattgtagttgtgtggaatgcccagacaggggaaaaacttttagaactgaatggacacactcaaaagataacagctattattacatttccttccttggaatcttgtgaagagaaaaatcaactcatcttgacagcctctgctgatagaacagttattgtgtgggatggtgatactaccagacaagttcagagaatatcatgcttccagtctactgtaaagtgtttaactgttcttcagagactagatgtttggctttctggtgggaatgacctgtgtgtgtggaaccgaaaattagatctcctgtgtaagactagccacctttctgatacaggtattaagtgcctttggttgaaataccctaagaacctgtgttgtggcagcagttggcaaagaactgataattttcaggttgggtagcacccacaggaaggatcnctagaatggggatattccttgaaagttaagcgnctccct

SEQ ID NO: 52950 - DNA, 214 bp, Homo sapiens
gtcagcccagaatactcggtggagcaggcgcagcaggtgcttcaccagtcagtgtccatgtccacggtgtcagcccacccttttcgggaccttcccctcggcagggagcaacactgcaagttgcttccaggcgtggctgacatccgggccagccaagtggcacgttggactgtggatgaggtggctgagtttgtacagtctcttctgggctgtg

SEQ ID NO: 52951 - DNA, 2461 bp, Homo sapiens
ccgtcgccctccctacgggcagcccccgggggttggcgaccgaagtctaggttttcgagaaagccagggtgggaaccctaactggactcttcgggacccccaggaaggatctgaggcctgagccatcctcctttctaccctgtctgccccccaggactgggcagttgcaggaggccctgggggggggcccaggactgtggttgtgccccccccccaaaggccggacaggatgggaccaagttagtctgtccagtctcacccagcacctcccaggcccagagagaacccccggggctctgaaagcttgccctgccgcctgaccgccatggagacgaagctgccccctgcaagcacccccactagcccctcctcccccgggctgtcgcctgtgcccccacccgacaaggtggacggcttctcccgccgttccctccgcagagcccggccccgccgctcccacagctcctctcagttccgctatcagagcaaccagcaagagctcacaccgctgcccctgctcaaagatgtgccggcttccgagctgcacgagctgctgagccggaagctggcccagtgtggggtgatgtttgacttcttggactgtgtggccgacctcaaggggaaggaggtgaagcgggcagccctcaacgagctggtggagtgtgtggggagcacccggggtgtcctcatcgagcccgtctacccagacatcatccgcatgatctcagtgaatatcttccggactctgccgcccagtgagaaccctgaatttgaccctgaagaggatgagcccaatcttgagccttcgtggccacacctgcagctggtatatgagtttttcctgcgtttcttggagagcccagacttccagccctccgtggccaagagatatgtggatcaaaagtttgtcctgatgctcctggagctatttgatagtgaggatccccgggagcgtgagtacctcaagaccatcctgcaccgggtctatggcaagttcctgggtctccgggcctacatccgcaaacagtgcaaccacatcttcctccggttcatctatgaattcgagcacttcaatggtgtggctgagctgctggagatcctaggaagcatcatcaatggctttgcgctgcccctgaagacggagcacaagcagttcctggttcgcgtcctgatccccctgcactctgtcaagtcgctgtctgtcttccatgcccagctggcatactgtgtggtgcagttcctggagaaggatgccactctgacagagcacgtgatccgggggctgctcaaatactggccaaaaacctgcacccagaaggaggtgatgtttctgggggagatggaagagattcttgatgtcatcgagccctcccagtttgtgaagatccagggagcccctttttaagcaggtggctcgctgtgtttccagcccccatttccaggttgcagagcggggctctgtatttctggaacaatgagtatatcctaagcctcattgagggacaactgccacactgtgctgcctgctgtgtttgggaccctctaccaagtctccaaggagcactggaaccaaaccatcgtatcactgatctacaatgtgctcaagaccttcatggagatgaatgggaagctgtttgatgagctcacagcctcctacaagctggaaaagcagcaggagcagcagaaggcccaggagcgtcaggagttatggcaaggtctggaggagctgcggctacgccggctacagggggacccagggggccaaggaggcccccctccagcggcttacaccccaggtggccgccagtgggggtcagagctagacagcacctcagaaggggaaaagctaaacccagagctgtcagtccctctatcccttctcctgtccaggggcccagagagaaacacacctacccctggccttgccagagtggcttctgaggactcccagcccagcccagctttcactggggggagacgaggagaggcaatggtggtcttggcaacagaatgctcagcccctcgtggcaggacttgacaagggcaagcttgaccaggaagctgccatcagggatcttccccctgccccgcaaagctaggctccagctgcaggcgggctcccaccctctgctcctggccttgggcaagggcactcagcgcctcgcctgcccctgccttggccaatgcgaggtccttccttatccccaccatggggtccatggtctatttattctcgcccagctcaccctctacacagacactgtcctgggtgcacactcctcccttccctcgctgtgtacttccttgtcccctttttatttattgggcagggggagggggagggcacaggcaagaagagattcacagtgtcctggggtaagggggggttcacagtaatcatggtctactcctctttccgtggctgggggtagacttaataaagagagaaattcaaaaaaaa

SEQ ID NO: 52952 - DNA, 520 bp, Homo sapiens
  misc_feature (1)...(520): n = a,t,c or g
agcgactccattaagttccagcacaggctggagactagctccgagtcagaagccactctggtgggcagctccccatccactagtcccccgagcgccctgccccctgacgtggaccccggggagcccatgcacgcatcaccccctcgcaaggccagggtccgcattgcttccagctactaccctgaaggagatggggactcctcccacctgccggccaagaaatcctgtgatgaggacctcacctcccagaaggtggatgagctggggcagaagcgtcgccggccaaaatctgctcccagttttcggccgaagcttgctccagtagtgattcctgcttcagttcctgggaggaacaggaagtgtgttcccgggccagtgggagaatttttccccggagcttccagggagttggggcactttatttngctgggggnattttccagnccgggcaacaggnaaaccccccgttattaaccttaggcagggccttttgtggggtattgttttcccccggattttt

SEQ ID NO: 52953 - DNA, 107 bp, Homo sapiens
gaagtatcctcaggtgtcctttaccttcatgattcatggggaatgtaagttctatagagatactagcggccttttgtgagggactgtttgtgactttattctaagtc

SEQ ID NO: 52954 - DNA, 824 bp, Homo sapiens
  misc_feature (1)...(824): n = a,t,c or g
tccagtagagacagaatctcattatgtcatccaggctggtctccaactccctcccagccccnggggaggcncctncctcaccctntcaaagcattaggattataccgtgtgagccatcatgcctctgttaaagtttttaatgtcctgattaatatgtgattcagattagtaagactaaaatctatgatcatatcccatcattttgaagcttttaaaaatagataataatgatttgttacatgcagcttccatctagatgcataacgttatttctggaaatgcgggccacctacaatgtaaagcaggctaaacaaggcagcttgtgatttcattttaatcagaaacacaccaaataggcatcatggcagcagatctggctgctagtgttttaaatacagatggattgttaacatctttattattcataattgtctgtcaatgttctctggatgatcaagaaactctttgtgcctcaccctaatcactgaagtaatgaaaggagatacccgcagcaaggactgcaactgtaaatgctgcaatcacacctatgttttgctgaattttcaataacattgtagttttaattggttgttttggttgttcatcatctgtgttgtccaatgaagcttgactattcatagaagaactcatacaagctgaaagggtataataataataaattccacataaaataaggattaacacatgaaactgagctttaaagaacattataaaaaactatacgatcattaccattttctttctacttgttttttatataacatactgaatttgttcattatcaattgtaggtgaattaaatg

SEQ ID NO: 52955 - DNA, 259 bp, Homo sapiens
aaaaaaagttgtgaatattcatatcctccagctccttgcttagaacactagtaaaattaggtcacagtgaagcaaatgttggagagaaagatagatgaagcattttgctaattattattgccccctttcctgtttttgaaattattgatcagaacaatatacaagggaaatgccatacctctgtttgtgatagataccccagagtagttattacctctttgtgagataagtaatctttgatgaagattgaaatacaatt

SEQ ID NO: 52956 - DNA, 291 bp, Homo sapiens
ctttcatcccttccaggatggatgttgggaaattccctcagagtgtgggtccttcaaacaatgtaaaccaccatcttctattcaaatgaagtgagtcatgtgtgatttaagttcaggcagcacatcaatttctaaatactttttgtttattttatgaaagatatagtgagctgtttattttctagtttcctttagaatattttagccactcaaagtcaacatttgagaatatgttgaattaacataatatatgtaaagtagaattaagccttcaaattataaaccaagggt

SEQ ID NO: 52957 - DNA, 876 bp, Homo sapiens
agaacactaccatatatggcatcagctttggttaccagagaaattttcttagtcattagaccatgtaacagtaatatatcatatgtaaatctttagatatcaatttgaaaatcctccaaaaaaaggagcaaagaatgcataagctatgtgttggcaaaagtaatttatattaaaattttgacctgcctatgtaagattaagtggtaatgtcatagtggtgggtttttaagtcttaaccaatctctaaggtttgtttcatcctgcaagggatggttcatggcctctcttcccactgcaggaagactgcacaaggctgtggattaattgtagcatttcactgatcttcactccagtcactagggacaatagaaacctgcaaaacacagattcattcgtaaatattattaatagcttattaaaggaaatggtctttgttaattccagtcagataatggcattgtacagacatgggaaacaaccaatttttttgtttttcagttgttgctatgaatgattttgagcctttttttttaagcttggcaaacatcccagctaatcaaaatagtcatattcctgagaagtaggaaactaaaacttcttttcatataattgttagaaggtttgtttcccaaactaccatagttacaaaggtgaaaagccaaattttaggaacagaatcaaaagaataaaaatctgtgaagagatcctactactcttccttctatgttttggttttggtttctattgtccctatcatttcagcaagtggaacagcagcaagtttttcagtgcatatgctgcacaagaacaaaatataaatctgtatggcaccaaaaatcaaagtgaaaaccaaaccaaaaacccaaacaccctatg

SEQ ID NO: 52958 - DNA, 213 bp, Homo sapiens
  misc_feature (1)...(213): n = a,t,c or g
ggaattccgtttcatcgcatacgttgcatattattattgacctcaagtgtaaactgatccaaagaaaaccccctgcgttttatatcatatcatctgtacagttttgctttgatatttagagaacatgatcgaggttataggaaattgattgcccattctcacttgaaaaatacttcctaggncgggcacagtggtttatgcctgtaatcccag

SEQ ID NO: 52959 - DNA, 2040 bp, Homo sapiens
  misc_feature (1)...(2040): n = a,t,c or g
gtgtctcctccagtcgcaacggccagacctgacctgccagctccgggcgtggggtgaaatctcttgattcctagtctctcgatatggcacctccgtcagtgctttgccgaggttccgcaggcccagcctgtcctggtcttcaagctcactgccgacttcagggaggatccggacccccgcaagggntaacctggggagtgggagcatatcgcacggatgactgccatccctggggttttgccagtagtgaagaaagtggagcagaagattgctaatgacaatagcctaaatcacgagtatcttgccaatcctgggggcctgggcttgagttccggaagcctgtgcttcttcgtcttgcccttggggggattgacagcccagcacttcaagggagaagcgggtagggaggtgttgcaatcttttggggggaacaggttgcacttcgaattgggagctgatttcttaagcgcgttggtacaatgggaacaaacaacaagaacacacctgtctatgtgtcctcaccaacctgggagaatcacaatgctgtgttttccgctgctggttttaaagacattcggtcctatcgctactgggatgcagagaagagaggattggacctccagggcttcctgaatgatctggagaatgctcctgagttctccattgttgtcctccacgcctgtgcacacaacccaactgggattgacccaactccggagcagtggaagcagattgcttctgtcatgaagcaccggtttctgttccccttctttgactcagcctatcagggcttcgcatctggaaacctgggagagagatgcctgggccattcgctattttgtgtctgaaggcttcgagttcttctgtgcccagtccttctccaagaacttcgggctctacaatgagagagtcgggaatctgactgtggttggaaaagaacctgagagcatcctgcaagtcctttcccagatggagaagatcgtgcggattacttggtccaatccccccgcccagggagcacgaattgtggccagcaccctctctaaccctgagctctttgaggaatggacaggtaatgtgaagacaatggctgaccggattctgaccatgagatctgaactcagggcacgactagaagccctcaaaacccctgggacctggaaccacatcactgatcaaattggcatgttcagcttcactgggttgaaccccaagcaggttgagtatctggtcaatgaaaagcacatctacctgctgccaagtggtcgaatcaacgtgagtggcttaaccaccaaaaatctagattacgtggccacctccatccatgaagcagtcaccaaaatccagtgaagaaacaccacccgtccagtaccaccaaagtagttctctgtcatgtgtgttccctgcctgcacaaacctacatgtacataccatggattagagacacttgcaggactgaaaggctgctctggtgaggcagcctctgtttaaaccggccccacatgaagagaacatcccttgagacgaatttggagactgggattagagcctttggaggtcaaagcaaattaagatttttatttaagaataaaagagtactttgatcatgagacataggtatcttgtccctctcactaaaaaggagtgttgtgtgtggcggccacgtgcttctatgtggtgtttgactctgtacaaattctagtcccaaagatcaagttgtctgaaggagccaaagtgtgaatgtgggtgtcggctgcggcattaaattcatcatctcaacccagagtgtctggtctccctgctctttctgcatggttgtgtccctagtcctaagctttggttctttagggtgactgtggtaagaaggatatttaatcatgacatgcacggacacgtacatatttaactgaaacaagttttaccaaacagtatttactcgtgatgtgcgtagtgcattctgatatttttgagccattctattgtgttctacttcacctaaaaaaataaaataaaaatgttgatcaagaaaaaaaaaaaaaa

SEQ ID NO: 52960 - DNA, 1883 bp, Homo sapiens
ttttttttttttttatgtttaaaatagtgatgtaacagtttttattttaaaataccaatatttacacgacaccagcaaatacatactttgtcaactatttaacttcccatgaaaaattttagataccaacttagataaaattttagatatcaacttagatgggtgagggtatacatgatttttcaaaatacttttgggggcacatgagcagaatactttgtggactactgctttaaaacacgatttctccaagtacagttgagggacaacttacagaatcacctgggaagggcagatgactttttaaaaatgcatattcctgggccccatccccaaatttgggttattaggtttggggtagaccccaaataagttttcaacatgtaccccaggtggctctcatgcaaaccatttaggaagcactacttaaaaaaataaataaaaactagcattttccggtattgtagccgtggctgaagagggaaacaacctcacatatgtttctggactgaggttagaactgaaataaaagcttaaacaggagccggagctcacaaaatagcagcacctgtggagggagcctagacataggaaaaggtcaccaggggcaggaatgcactttcctggggatttcctaggcacggttcaaaggaaggagaaattgggagggccttgggcaggctaagcccaccgtgggctctccactgtggttgcactttggaagaaaacagaagaaagtccttttccgtcttgaaccagcctgaggaaagtccgtgtttaggagggccaaccgtcacaccaaaataaaacatgcgctaatggaagccgattgcaaagcaggtgacagagcacactttgggaagcactgctggagtgggggcagaggggtacttgccatgaaaatgccctggggaccctctgacgacacctgttgggatggctgaggcacctgttcccttttggtcccaccggtggcctaaagtgtggtctcagagtgcttgtcttctgctgctcactgggtggggcttgtgagcatctgttctctcttcctaggatcacagaagaactgcagcttcctggggagcagtttcacctccacaggcatcgcttcatactcctcactgtcaatgctaaaagagccccctgctccctggggagaagagaatattcagaacagctcaaacacatcagtggcctactggagttggaggtctcacagcagcaccagaagaagttcattatggaaaacaacatcctctcttgaggagctatcctaatgttcttttacaaaaaaaaattcagtgcctactacgatgggcacagtgctggttctggaaacatcctaattctaccatccatgaaaaaggatttattttctttttttggcccctatctcctcccagagtattttgggatttgaacaacatggttataattttcaaatatgtattaaaaggcaagggtcctgccatgtcttaaggaactcatatacatagtctttctatattatgctaatccttctcaaataaaaataaagacagctaattctcttatgacatgctattgtatctgctggatcattttcattattctctaagacttgtttagcttgatatacccaaggtgtatcaacattaatatcattacagtctatgaaacccttccataactcatgcatttaattcaatatttatatcgaaactgtgacgccagtcattactggggataccttctgtttacctatagtcttgtctgaatacagtaatatatggccacatgtcttcaaaggctatatgaagagcctcctttttttccgtattgacaattgaataacctcccaattccagattctatttccaatttttttcacttacatagggtat

SEQ ID NO: 52961 - DNA, 1213 bp, Homo sapiens
  misc_feature (1)...(1213): n = a,t,c or g
tggggttaaagatgcataggcccttttctagctcgacagcctagaaagtccaatcaccctgtaataaatatgtgttgaatgaagaaatgggtgaagagccttgtcaagtgattttaaaaaattgactacctggaggaatgattaggaatctaaatgaagccagccctcggtatctgcaggtttctcatccatggaattcaaccaactgcaaatggaaaatacgattttttttaaaaaaaggatggttacatccgtattgaacatgtacagacttttttcttgtcattattctctgaacaatacaagaactctttatgtagcatttacattnnnnnnnnnnnnnnnnnnnnnnnnnnnnnnnnnnnnnnnnnnnnnnnnnnnnnnnnnnnnnnnnnnnnnnnnnnnnnnnnnnnnnnnnnnnnnnnnnnnnnnnnnnnnnnnnnnnnnnnnnnnnnnnnnnnatcctggaaccaaacccctgcagatactaagggctgacgatctaggtaagactggatttaacagttggaaaaaaaaaaaaaaaaaggagagagaagacagttcctttcctgtagaaattaaaacaaaatacaaattgaggaagctctgctacccaggctgtcatggtagagaacttgaagaagacctgtttggatggacacctggtttcaaaagtcaggtgtggagactgttaaatgggagggcctcatccataaatgatttctggcaacgtcttcttcaggtggagcttgacgtctttttaatgttacttggggagggagtgctcattaagggatgccagggccagctctggtggttcctggggaggctgcgtccttccctgcttctgcatgtcatgaggcagcaggaaggtttcccctgcacctgtctgtcctggctccctctgggtagccccctactgttctgtgcttcagcacagcctggtttgtcaagaggcacatagttggggctgggctgcatggcacaggggcttatgtgcctgctggttatttaattttcagccttaagttttctttaatattttcctgttggctatttaaaggttttggttatcttttattccttatctacaatcaagatgacaatgtaattgaattatcttatttataacacggttcgtgattcatgattcatgattacaagtagaaaatatgtcatgttcctcacctccaaataaatatgtgtgtgtctg

SEQ ID NO: 52962 - DNA, 426 bp, Homo sapiens
ttttttttttttttcagtaagaatatagatttttattatacaattaacaaattatatttggcatcacttaatacctaaaactcctctgggagtaataataatgaacatttctcaaagccatactatattcttacactatcctatgatgtatacaaatatactttcagtgaattttcataacaactcttccaattttacagctaagaaaactgaagcacagaaagtcaagaaatttgcccaaaatcccacagctaataaatggcagatctagaattcaactctcaggaaatctgattctagagcccagttctgaattcctatgctatttttcaacatcttccattttctctcccttcttgagtcaattttggtatttttcatcttcatagaaaatcatctatttcatttggatgttaaaatttattg

SEQ ID NO: 52963 - DNA, 843 bp, Homo sapiens
  misc_feature (1)...(843): n = a,t,c or g
gaatgggagtaaaaataaacagtaagaattcaaaggcttttaataccctcagcttctcgcctcttctctcccagctgcccgtcagtccccagctggctcagaggaatgataagggacagagaggcgggaggggaccttgcttccacagtctgagtgctgccccgaatcactgggaacacttctcagcagggtgccgctgacatttcagactgggtgcgtttctgctggagggctgtctgcacattgcagaagctgagagnnnnnnnnnnnnnnnnnnnnnnnnnnnnnnnnnnnnnnnnnnntccagttgtgacaatcgaatcgaatatatcttctgacgttgccatgtgtcccgtaggggacaaaattgccaggtcgagagcactgctttaaagaagcagctgacacgtactctggcttactctgtgccttgcaccattggcaactctcaggtaaagtgaatcattcagtcttcgccacacacgtcccttacagggctttacaaatgggcatgcccatgggtgcacagaggtgacataactcaccctgtcatggccccagctagtcccacatcggagccaggatggaacccagattgttcaaggtctcaaccgctctgccctgttgctctccagtatacaagtaccctgggtaaaaagtcactctgagccagcgagggggacggggggcagaggcctgccgcagctcctgctagagtcccacacaaggtagcacctcaggtcctctagcgacatcaaaaaagggagtgccagagggaatttccacacgctccactctcagtaattaaactgcaacaacctcccnagactctcaggcctcagg

SEQ ID NO: 52964 - DNA, 820 bp, Homo sapiens
agcctggttagcagtcgctttctgatcccggaaaggaccctgagctgggaaatagcgagaggcggggatgttggggattttaaaacttatgtagatcaggcatgtagagctgctgaggagtttgtcaatatttactatgagacaatggataaaagaagacgggcactaaccaggctgtatctggacaaggccaccttaatatggaatggaaatgctgtttcagggctggatgccctaaataatttttttttgacacattgccttctagtgagttccaggtcaatatgttagattgccaaccagttcatgagcaagcaactcagtcccaaactacagttcttgttgtgaccagtggaactgtgaagtttgatggaaacaaacaacatttcttcaaccagaacttcctgctgactgctcagtccactcccaacaatactgtgtggaagattgcaagtgattgcttccgttttcaagattggtctagtagttaaaggggcaaaagtccattctcatttggtccattagttccagcaattgaaatttatgtgaattattttgattgtagaagcactataatatgtgctgaaactaaatttctttaatattttctattcctgtcagcaccttttctagcagctgccagtttggagcattgccctctaagagctttaaaactatttttttacatgccttatatacattccactaatgacattcttataataatattaaacacatgatcttggtactaacatactcactgtgaacccagcctattgcaaaaataaaatctttttataatattatctatgggatgtca

SEQ ID NO: 52965 - DNA, 1135 bp, Homo sapiens
ttcatgaagaatttaggtccaaaaaaaagatgggcattaattctagtcatttaaaaaattctatagatcagaggttacatggccaagattgaaacttagaggagtatagttacataaaagaaggcaaaacgatgtataaatgaaagaaattgagatggtgcacgatgcacagttgaagtgaacttgcggggtttttcagtatctacgattcatagatctggaattcgcggccgcgtcgacgccgcgacgagtaggagggccgctgcggtgagccttgaagcctagggcgcgggcccgggtggagccgccgcaggtgcagatcttggtggtagtagcaaatattcaaacgagaactttgaaggccgaagtggagaagggttccatgtgaacagcagttgaacatgggtcagtcggtcctgagagatgggcgagcgccgttccgaagggacgggcgatggcctccgttgccctcggccgatcgaaagggagtcgggttcagatccccgaatccggagtggcggagatgggcgccgcgaggcgtccagtgcggtaacgcgaccgatcccggagaagccggcgggagccccggggagagttctcttttctttgtgaagggcagggcgccctggaatgggttcgccccgagagaggggcccgtgccttggaaagcgtcgcggttccggcggcgtccggtgagctctcgctggcccttgaaaatccgggggagagggtgtaaatctcgcgccgggccgtacccatatccgcagcaggtctccaaggtgaacagcctctggcatgttggaacaatgtaggtaagggaagtcggcaagccggatccgtaacttcgggataaggattggctctaagggctgggtcgggtcgacgcggccgcgaattccagatctatgaatcgtagatactgaaaaaccccgcaagttcacttcaactgtgcatcgtgcaccatctcaatttctttcatttatacatcgttttgccttcttttatgtaactatactcctctaagtttcaatcttggccatgtaacctctgatctatagaattttttaaatgactagaattaatgcccatcttttttttggacctaaattcttcatgaaaatatattacgagggct

SEQ ID NO: 52966 - DNA, 343 bp, Homo sapiens
  misc_feature (1)...(343): n = a,t,c or g
gtgaatcgtggctggcccggttctccgcttctccctcatcccctactttcctccctccctccctttccctccctcgtcgactgttgcttgctggcctccctcacccntncctaacctnggngcnaccggattgcccttnnttactgttgtccagaccaatcataangtnagggcaggtagcnnngnanaantttgnacaatngcnatcagannannnaanagannactntanaacaaataannnattataatttaanatngnnnnanannananataatataaannaataanataaaatttantaaaaaaatgcatattcaattaancaataaatnaataaaa

SEQ ID NO: 52967 - DNA, 303 bp, Homo sapiens
agccataactgtgcatagaaaaataattatctgtaaaaaatgaaggggataatatatgataaattatgttctgatatcctcctacagtagtttaaattgacagaaaaatttgaatgttttcttcttaacccagtcttaggctggtattccctttttatatatatctatattacttttcacctctttttcactttactttagagaactattaatatactactggcttcatgaccctgtagcatctttggccactttaaatctaggggtgacctagcaaatcctgcagcacagggccagagaggt

SEQ ID NO: 52968 - DNA, 357 bp, Homo sapiens
ggttcccgggtcctgcggctgaggagcccctccgctgtccacggcccctaccggcggggggcggctgggtccctcggcggactcgggagatgtgactgcctgaggcggtggtggtgtcagcgtccggggccgggggagggggtgtctcgggcagagacccccgggcttggggcagctgaggcggccgggcctcctctacacggggcccgccttccgctgtctgggccgcgagaagtccttcgtcccttacagccccgccccggctttgggacactgcgggtggtctgtttcccccagcttgggacaccccgttttctgaggcgtggaagagcgtcgccccggagtaagctgcccgtg

SEQ ID NO: 52969 - DNA, 591 bp, Homo sapiens
catcagtgtgacatctgcgggaaggaagcagcctccttctgtgagatgtgccccagctccttttgtaagcagcatcgagaagggatgcttttcatttccaaactggatgggcgtctgtcttgtactgagcatgacccctgtgggcccaatcctctggaacctggggagatccgtgagtatgtgcctcccccagtaccgctgcctccagggccaagcactcacctgggcagagcaatcaacaggaatggctgctcaggcacccaaaatgtcagataaacctcctggctgacaccaaccagatgctgttcgctcttccaaaaaagctcttgggcagggactttgttcagagggccactgctacctgaaagacctcttgagagaactgactccaggccccagcctttagataaggtcagagaccttcgctgggtcagggaccaaatcccaatccttggtttccagccagaggccactggacaggccaccagcagtggcaggaccaagaccccagctaagcgacaaaccctctccagtgaccagcccaagctcctcaccctcagtcaggtcccaaccactggaaagacctctggg

SEQ ID NO: 52970 - DNA, 375 bp, Homo sapiens
gcaaaaagtagatgttttcatatttattaagttttcagacacgtcctcaacgaggtgctgctcacttcagggaaagatggccagttcaaactgctgatgaaaagtctgcaaccagcaagacccactgctgccagtgtgtcctgagggagcttgccatctgtttgactttacatatacatacttaggtttgtccatcagttgtatcctcttgaaggaggtatgtgagttcatggttttaagcatataaatttaaacgttaaaagaagaaatcagaagtagcccgtttgagtcttacatgagtgaaatgtgttgggtttcagcagcagaatatatagaaggaaatgaaacaatttttattaaagagcatagtttgga

SEQ ID NO: 52971 - DNA, 465 bp, Homo sapiens
gctgcacctggctgctgcagcaccgcgctggacatgagcgcttggtggcagtccgcgggcccggacggaaggctgaggcgacgcctcgacgacagcggaccggagctgcaggggcaacacattcagggcggggtgccccatttaggcctggctgaccggagtaagaaactacaacccccgaagtgccttgcgcctcaaggttacggaggcagtgaccacccaccctggagccatggtccacgccttcctcattcacaccttgagggccccgaatactgaggacacgggcctttgccgagtgctgtactcctgcgtcttcggtgctgagaagtcacctgatgacccacggccgcatggtgccgagagggacaggcttctccggaaggaacagattttagctgtggccagggcaggtagagtcaatgtttcggctgcagcagcaggcatttggccggcccccatgaa

SEQ ID NO: 52972 - DNA, 374 bp, Homo sapiens
gaggagctcacagttcccagcgtctgctcccacggtgtccagcgcccagaatgcggcttctggtcctgctatggggttgcctgctgctcccaggttatgaagccctggagggcccagaggaaatcagcgggttcgaaggggacactgtggggtcgaaaaacggggccccgatgagtctttactgatctctctgttcgtctttccagggagctcccgcccccccatgcagctggactccacctcagcagaggacgccagtccagctctcagcagtggcagctctaagcccagggtgtccatcccgatggtccgcatactggccccagtcctggtgctgctgagccttctgtcagccgcaggcctgatcgccttct

SEQ ID NO: 52973 - DNA, 308 bp, Homo sapiens
gtatctattgaaaaggaagcagtgtgtagctatgattatatctctgatcatcgatatagttttgacatgtagcaacacctctccatcttatcaaggaactcaactcggtctgggtctccccagtgcccagtggtggcctttgacaggtaggaggatgcagtgctgcaggctattttgttttttgttacaaaactgtcttttcccttttcccctccacctgattcagcatgatccctgtgagctggttctcacaatctcctgggactgggctgaggcaggggcttcgctctattctccctaaccatact

SEQ ID NO: 52974 - DNA, 1111 bp, Homo sapiens
ggaatgcctcttgggatatgcattagttggtcttatgtcttttcttggtctaggtggtgtgtgtgtttggcttgtttgggggcacttttagaggctccagctgcacatttccactcctctctgtgtgttcctctctgcatctgctgtttgtgtgtgtacacttttttttctgagcaatctttctccttagccacattgagttctttaacagtttttctgttttcttcttcattaagataattaataatcatactactcacatatcatgttttagaacttcctaagcctttccctttcccaccttttggacctcctaactgaatttcaaagtcttcattccttagattaaaaaaataaatccaaagataaaagaatgtaatgtcttataagtcgtatcagtgtatattttctctgttattgttgttagtgttataataaatcctaagtgacacaattcctttctcctacattaattcatttgcttgtacaacaactatttattgagcactgtgattaacaatattaatcaaattccctgccttggaatttacattccaattcaaagagacaaactgtaacaataaacactatgtccttatattaagtagtaataagtgctgtggagaaacagcagagtaaaggggataaagaacgtattgttaggttgttctaatataaagatgtgtcaggagaggccttggtgacatttaagctgaaacgtgaaaggagcagagggaattaggtggatatgtgggagacgagtggtcgaagcaaaggagcagcacgtgtggaggttccgaaacagtgatgtgcttggtgtgcttgacccaaggaggccagtgtagctggagtgcagtgaacaacagggagaggggctggagattagatcagagtgttaatggggtggtggatcacgtaacaccataaaagccttggtggaaggactctggctgacatcacgccccaagttgccccatactttccagaataccaagtaggtccttgctgttcagaattctgttcaatgtagcagccctcccattgcgtcttcaatgtgtgagagagacattgacagcagagtagtcatggcttgattacagacatgcatggg

SEQ ID NO: 52975 - DNA, 605 bp, Homo sapiens
  misc_feature (1)...(605): n = a,t,c or g
ccgcgtcgactttttttttttttttttgagaaataaaaagctttattattccctctaagggattaatgccagggaatgaatggtccccataccccccacccctgggggagactgacagaacagtgctggacaaggcatggcccccttcagtttgggctgaacttccaacccctgaagccatcactcaagctaaaatgagcagttctggtcctcagggaaacagccacctgggccaggcccaggaatccaagcctccaaagctcttggggaccaggcctgggggccaccacggctgggcaaggttcatccctggccaccagctactctagaggggctgggccccaacccaggagacctctcacacacagtgaaggctgggacagagctgcacgcttgggggtgcctgaaggtccagaaagagctgcaggatcggggtccggaggacccttggctggagtgtctcaagctgagtcgggtccgtggggccagggcaccccctaaggatcagatcagaatccgaggtggagacattccaggtcagggcttgcgccaaagatgggcctacttgtcaatgaggcctccctcctcccncgtgccgaaatttc

SEQ ID NO: 52976 - DNA, 1332 bp, Homo sapiens
  misc_feature (1)...(1332): n = a,t,c or g
ctcgtgccgcggagtttttttttttttttttttttacgatttaaaattttaattgttaccaaacaaaaatatccactcaaaatacaattcaacaatgcaacagtcatcttacagcagagaaatgcagagaaaagcaaaactgcaagtgactgtgaataaagggtgaatgtagtctcaaatcctcaaagagttgtgtttatttcatcgacaaatagattattcgtattcaattctgatgtgttttaaagactaagatgctcattttacgattagcgcacatgtgtatattgtcacctgttctccttagaaaaatgctcttcctcatggttaatgtttccctttggtaccaattttgcctgtttgcataaagtatttcatttttaaaactcagcataaaatatagactgcatctgaaaagatattgaatataacatataaagcagaacacacaagttccacatttcaaaagcctcgataacaaaaaaagaaagatcaaatcccttattagtctctgtaaagtcatttataaagctcctgctgatcctgttaagcatggatataattgatctttcttttaaattaaaatgtaagcttttcccccaagacatgtcaaagtgctaagaatgaattaggaattgtccatgtttttcgcttttgaccacgggcaccatcggaactgaactcacaaatataagaaaaatatcccttcacttttaaaatcctaagacccagaaatcagaatccatgggatttgtttagtaaagaagggaatctgtggctctaggtgtccactaaaggagagccaaaaatgtcccaaataatctcagaacccacagcatccattttgtaattaacaggacccaagtcctcagattgtacagcagattggttcttattgctggaacagggcctaaaccatgcctggaaccccagctgttacagaggaggtggacgggagggactcctgacctgttcacattgcgaaggtgtgcggaaaccaaggtgagcagagaacatgaatgctcacaccctttggcccaggtgcctgtgattcagccttctcattaacaggattcccagatgttcatcctccatgcaatcttcagaatgaatggtcagctagggagcttagtcccttgaccagatttgatgaacacatttctgtacaactttctcaaatccttgggtcggcacatcccacattcttgatggagctgtcatgaggaatcaggttgggggcttctcttgtctctctttagcctaatgggtcagagaccacagggaacacaagaaaaaaacccaggaagggctgtgcancttgacagcttcttt

SEQ ID NO: 52977 - DNA, 570 bp, Homo sapiens
ggcctagagcggcggttgcacttagttgcggctgctgtcaccatgtcccgcgttttggtgccttgccatgtgaaaggctccgtagccctccaggtgggcgacgtgcggacctcccaaggccggcctggcgtgctggtcatcgatgtcaccttccccagcgtcgctcccttcgagttgcaggaaatcacgtttaagaattactacacagcttttttgagcatccgtgtccgtcagtacacctcagcacacacacctgccaagtgggtgacctgcctgcgggactactgcctaatgcctgacccacacagtgaggagggagcccaggagtatgtatcgctgttcaagcatcagatgctgtgtgacatggctagaatatcggagctacgcctggattctggcggcagcattcaccactgtggctgtctttcacagtggaggagcttgcagatctattcagcagggaccaaagagcccctcgtgacctttccaagtggctctccacccagtggcctgtgagcaacctgcactcctccgtgagggttttccaaaccccacaggggtattcttcga

SEQ ID NO: 52978 - DNA, 519 bp, Homo sapiens
  misc_feature (1)...(519): n = a,t,c or g
ggtgtgtgggtaggcacaaatttatgtaaatagtgctccttctctttagtatgtttgctttgggggtagaaaaatggttttaacaaacactggtttccatcaaatgaatgatgtcttctccatcctgtggagacaagaatctgctagaaggatatgtgctaagttccttataagagataatggtgctctgcctatgccagcttggacccgaagatgtgtgagtggacgtgaggctgagtattaccttagtatttttctctgggtctttggaaaaccatagtcaatttttagaacatattgctttcattccccataaactcttcacacatgataactgtttaagctttgaaaacacatactgaagtattgtgagcttaaaaaaactttttaaatatttgcatagttttgaggtgaatttgtttccttacagatctctcctaatcattgagatgtatatttccanaggaggaaattttaccaggttggtcccaaacagccttgctagtaaccggtgatttt

SEQ ID NO: 52979 - DNA, 358 bp, Homo sapiens
caggcaggagaggcccacatggctgcggacggtgagaccaatgggtcttgtgaaaacagcgatgccagcagtcatgcaaatgctgcaaagcacactcaggacagcgcaagggtcaacccccaggatggcaccaacacactaactcggatagcggaaaatggggtttcagaaagagactcagaagcggcgaagcaaaaccacgtcactgccgacgactttgtgcagacttctgtcatcggcagcaacggatacatcttaaataagccggccctacaggcacagcccttgaggactaccagcactctggcctcttcgctgcctggccatgctgcaaaaacccttcctggaggggctggca

SEQ ID NO: 52980 - DNA, 1656 bp, Homo sapiens
  misc_feature (1)...(1656): n = a,t,c or g
gatgccgggagcgcgcagtggcggcagcngcggcgacggcagtaacagcggcagctacagcggggacgcgagcggggcggtgacggtgtgggaggtggtctcactcttgggaaaactgctgggcaccgtcgtcgcgctgaaggtggttctgtacctgctccgagtgtgcttagcgatggcctggaaatccggcggcgccagccacttcggagctaatccacaatctccgcaaaaatggaatcatcaagacagataaagtatttgaagtgatgctggctacagaccgctcccactatgcaaaatgtaacccatacatggattctccacaatcaataggtttccaagcaacaatcagtgctccacacatgcatgcatatgcgctagaacttctatttgatcagttgcatgaaggagctaaagctcttgatgtaggatctggaagtggaatccttactgcatgttttgcacgtatggttggatgtactggaaaagtcatagggaattgatcacattaaagagctagtagatgactcagtaaataatgtcaggaaggacgatccaacacttctgtcttcagggagagtacagcttgttgtgggggatggaagaatgggatatgctgaagaagccccttatgatgccattcatgtgggagctgcagcccctgttgtaccccaggcgctaatagatcagttaaagcccggaggaagattgatattgcctgttggtcctgcaggcggaaaccaaatgttggagcagtatgacaagctacaagatggcagcatcaaaatgaagcctctgatgggggtgatatacgtgcctttaacagataaagaaaagcagtggtccagggatgaattgtaaaagcaacatcagcttgaccagtataaaattacagtggattgctcatctcagtcctcaaagctttttgaaaaccaacaccatcacagcttgttttggactttgttacactgttattttcagcatgaaaatgtgtgtttttttagggtttctgattcttcaaagaggcacagagccaaattggtagaggaaggatgcaaagtataaatttgtgtaatattactttaacatgcccatattttacttggaaatattaaaagaaagggttctgtaaaatggaaaacttagtctgtgaattgattttgaggagtggtttttcttttcttggacacttaattctgttctgatattaatttatcagattgcttttgtgcattggataacaccaccattcacaagttaagattcttggtatttggatatctgttagatgctactaagaaaatagagatgagctttctttttaaagcttttgatgtggtgtcatagaatagcatgttgtagatacaatcagctgctttgttaccttaaaactaggcatttgtaaatattaaaccataagatggcaggtgatgtcctgtaaacactcagctgttcagattggacataactgacttagttcttcccttctctctctctcaaaattataggagacttgtagtttagtgtggttttctgtttctaatttgctgctgataatgtatatgaacttaacatgctgtgtaagctgtgtcctagttcttgaacagtttatgcagtgctgctttgccaaataaagttaaaagtaaaagaggc

SEQ ID NO: 52981 - DNA, 1599 bp, Homo sapiens
gcctcttttacttttaactttatttggcaaagcagcactgcataaactgttcaagaactaggacacagcttacacagcatgttaagttcatatacattatcagcagcaaattagaaacagaaaaccacactaaactacaagtctcctataattttgagagagagagaagggaagaactaagtcagttatgtccaatctgaacagctgagtgtttacaggacatcacctgccatcttaaggtttaatatttacaaatgcctagttttaaggtaacaaagcagctgattgtatctacaacatgctattctatgacaccacatcaaaagctttaaaaagaaagctcatctctattttcttagtagcatctaacagatatccaaataccaagaatcttaacttgtgaatggtggtgttatccaatgcacaaaagcaatctgataaattaatatcagaacagaattaagtgtccaagaaaagaaaaaccactcctcaaaatcaattcacagactaagttttccattttacagaaccctttcttttaatatttccaagtaaaatatgggcatgttaaagtaatattacacaaatttatactttgcatccttcctctaccaatttggctctgtgcctctttgaagaatcagaaaccctaaaaaaacacacattttcatgctgaaaataacagtgtaacaaagtccaaaacaagctgtgatggtgttggttttcaaaaagctttgaggactgagatgagcaatccactgtaattttatactggtcaagctgatgttgcttttacaattcatcccttgcatgtgtggaagaagaaagagcagaagataaaatcacttccacctggaccactgcttttctttatctgttaaaggcacgtatatcacccccatcagaggcttcattttgatgctgccatcttgtagcttgtcatactgctccaacatttggtttccgcctgcaggaccaacaggcaatatcaatcttcctccgggctttaactgatctattagcgcctggggtacaacaggggctgcagctcccacatgaatggcatcataaggggcttcttcagcatatcccattcttccatcccccacaacaagctgtactctccctgaagacagaagtgttggatcgtccttcctgacattatttactgagtcatctactagctctttaatgtgatcaattcctatgacttttccagtacatccaaccatacgtgcaaaacatgcagtaaggattccacttccagatcctacatcaagagctttagctccttcatgcaactgatcaaatagaagttctagcgcatatgcatgcatgtgtggagcactgattgttgcttggaaacctattgattgtggagaatccatgtatgggttacattttgcatagtgggagcggtctgtagccagcatcacttcaaatactttatctgtcttgatgattccatttttgcggagattgtggattagctccgagtggctggcgccgccggatttccaggccatcgctaagcacactcggagcaggtacagaaccaccttcagcgcgacgacggtgcccagcagttttcccaagagt

SEQ ID NO: 52982 - DNA, 2779 bp, Homo sapiens
  misc_feature (1)...(2779): n = a,t,c or g
cctgggccggatgtcccgatgagagagccgcgctgacggccagcgccatggcttaccacccgttccacgcgccacggcccgccgacttccccatgtccgcctttctggcggcggcgcagccctccttcttcccggcactcgcgctgccgcccggcgcgctggccaagccgctgcccgacccgggcctggcgggggcggcggccgcggcggcggcggcggcagcagcggccgaggcggggctgcacgtctcggcactgggcccgcacccgcccgccgcgcatctgcgctccctcaagagcctggagcccgaggacgaggtggaggacgaccccaaggtgacgctggaggccaaggagctgtgggaccagttccacaagctaggcacggagatggtcatcaccaagtccgggaggcggatgttcccccccttcaaggtgcgagtcagcggcctggacaagaaggccaagtatatcctgctgatggacattgtagccgctgacgattgccgctataagttccacaactcgcgctggatggtggcgggcaaggccgaccctgagatgcccaaacgcatgtacatccacccagacagcccagccacgggggagcagtggatggctaagcctgtggccttccacaagctgaagctgaccaacaacatctctgacaagcacggcttcaccatcctaaactccatgcacaagtaccagccgcgcttccacatagtgcgagccaacgacatcctgaagctgccttacagcaccttccgcacctacgtgttcccggagaccgacttcatcgccgtcactgcctaccagaatgacaagatcacacaactgaagatcgacaacaacccgtttgccaagggcttccgggacaccgggaacggccggcgggagaaaaggaagcagctgacgctgccgtctctacgcttgtacgaggagcactgcaaacccgagcgcgatggcgcggagtcagacgcctcgtcgtgcgaccctccccccgcgcgggaaccacccacctccccgggcgcagcgcccagtccgctgcgcctgcaccgggcccgagctgaggagaagtcgtgcgccgcggacagcgacccggagcctgagcggttgagcgaggagcgtgcgcgggcgccgctaggccgcagcccggctccagacagcgccagccccactcgcttgaccgaacccgagcgcgcccgggagcggcgttgtcccgagaggggcaaggagccggccgagagcggcggggacggcccgttcggcctgaggagcctggagaaggagcgccccgaagctcggaggaaggacgaggggcgcaaggaggcggccgagggcaaggagcagggcctggcgccgctggtggtgcagacagacagtgcgtcccccctgggcgccggacacctgcccggcctggccttttccagccacttgcacgggcagcagttctttgggccgctgggagccggccagccgctcttcctgcaccctggacagttcaccatgggccctggcgccttctccgccatgggcatgggtcacctactggcctcggtggcaggcggcggcaacggcggaggtggcgggcctgggaccgccgcggggctggacgcaggcgggctgggtcccgcggccagcgcagcaagcaccgccgcgcccttcccgttccacctctcccagcacatgctggcatctcagggaattccaatgcccactttcggaggcctcttcccctacccctacacctacatggcagcagcagccgcagccgcctcggttntgcccgccactagtgctgcagctgccgccgccgcagccgccggttccctctcccggagccccttcctgggcagtgcccggccccgactgcgtttcagcccctatcagatcccggtcaccatcccgcctagcactagcctcctcaccaccgggctggcctctgagggctccaaggccgctggtggaaacagccgggagcctagccccctgcccgagctggctctccgcaaagtaggggccccatcccgcggtgccctgtcgcccagtggctcggccaaggaggcggccaatgaactgcagagcatccagagactgggtgagtgggctggagagccagcgagccctctccccaggccgggagtcgcccaagtgaggggctgcccagctgctcccctgccacgcaggccacccgggctgcctgcccctgctgcttgggacgtgtacagcacagaatgagtatttatttaaataaaggagaaaagtgggctgcagcagccggaatagagcctcgtctggcaagtcggggcctgggacacttccctgggcctcaacaaggatcaggctgctggaaacacagtcacttgggagctgctgggctaggtccagatccgctccagcgtcaaggtggcatccgaaggtgtctctggtcttccagcgaggtgggagaggcctcatccagggcccagcggtccctgcagaagcccagaaggtgcaggggcccaggggtgggagcatcggagggagtcccagagccctggaccttgggcctagaccgcgtgataaaactgggttgagggatgctggaaccagttacgactgaagtcagtgtagacctgagctgggagggaacctgttagtctccccacctcttccctgaagagacaggcacccctcccagccgtggtcaacggagggagtggcacttctgccttgagtccccaggggaaaaaaaaaaaagatatttatgaaataaatggtaatttgtgtaaataaaa

SEQ ID NO: 52983 - DNA, 387 bp, Homo sapiens
ttttattttctatttttttttccaaatacaaaagtgtttagaagtttattaaacattttattacacacctgtattgcctaaagtttctataacaaacatcttacattggaacgattttcttgtttttattttctacaaaaaaaaaagcggggggacgttaaaattaagcatagaaatggtggaactttgggatttcctgtccagtcacctgcgagtcaggttttattccaattgattcaacgtggcagattaaatgtgaaaagtaaaatggtgggctcctttaggcagcaagtcttgcttctctcctggttacctctgcctacatagatatttggttaagcaagatgtttatacccccacacatattctagatagttctggtcatga

SEQ ID NO: 52984 - DNA, 620 bp, Homo sapiens
tagctatgtatattaacattaaataacttaaaaaaataaccaatacattatattgtagcaaaatagctccattttaaagccatataagtgaaaaaattgagttttcaataatagactagaccttctaaaggtatttttaacaatttttaactaatattaaatgtattttcttttttgactatgccaagtatattcacactgctcttggtactttatgtcagaagtatttttatgtgaaacactaggttgtttcatttgtctgtttttacttgctctataatgaaaagtttactctaaatctaaataagtttgctcccaaatatctccccaaggagaagggggacagcataaccaaaaacacaacaaaaacctaatgatatataggatatccagtgcatgcgacttcatattttctaatagtgggtaggaaaggtaactttcaaggtattcccggtaatccaactggacttacagatagcgatctcataaaatgaacattctagaggaagaaagtcctttgagaaacttgttctttccagaaaacctttgccaaaattcccataggaaacaaaaccatccattcacaaaagaccagagggtacttggtccccagtactgac

SEQ ID NO: 52985 - DNA, 726 bp, Homo sapiens
tttttaagcaattgctgttaaaatcttatttctgcaatttttacaaaagcctgttaccatatgaacacatatccatcgagccctctatattattagagcacaggaagagggccctgtaggtgaggaaccttgaagtctaagtttcagtagtgtcataagtccacccctggatgggactctcaatttccagaataaaatggtaaactagaagcagaataactgagttatgtgaggaaagtaaagcccaaggatcttgaaagaatctaccagggtagaggaagtatgaggcatacaaatgggatgactgcatcccaggagagaagatggcagagagttcgggtgcctagaaaagggagagtttgtaaaattacgtggcaaaaaaaaaaaaaaaaaagtagacagacacaacactgattcccttagggaataatggaggttgtctaggaagtacagaaaaggacctgtcttcttcccaccccatccctgagttgttcttcatcttctgataatgctgcctccaattttaagtcttttaccctaatatgtttccacccccagagctccccttctcaatttttcttagtagaatgtttgatttatttctgagtctttacaataaatcaattatataaggaatggtgagggatgaattctagaagagggtgatgcatggaaatttctaagtttagagaaagggaaaattggagtatttaaacctgaagaagg

SEQ ID NO: 52986 - DNA, 287 bp, Homo sapiens
ccagaggagagaatttcagagctgaagattttagaagcaaagcaaacacattctggatacacgtgagatccaagtggtgactgtgctactgagaagctgaacgaaatggaaagcaaagcctgttggagctgaggtcaaagaatgtgaagccagagtggatactgaatgggaaagttaataacaaggatgtggaagctattgaggagacggagtgcgcctaaagagctgctaagccgcacatctcttgagacccagaagctcgatctgatgacctgaagtgtctgagc

SEQ ID NO: 52987 - DNA, 1153 bp, Homo sapiens
cggccggttttggtaggcccgggccgccgccaggcctccgcctgagcccgcacccgccatggacaactacgcagatctttcggataccgagctgaccaccttgctgcgccggtacaacatcccgcacgggcctgtagtaggatcaactcgtaggctttacgagaagaagatcttcgagtacgagacccagaggcggcggctctcgccccccagctcgtccgccgcctcctcttatagcttctctgacttgaattcgactagaggggatgcagatatgtatgatcttcccaagaaagaggacgctttactctaccagagcaagggctacaatgacgactactatgaagagagctacttcaccaccaggacttatggggagcccgagtctgccggcccgtccagggctgtccgccagtcagtgacttcattcccagatgctgacgctttccatcaccaggtgcatgatgacgatcttttgtcttcttctgaagaggagtgcaaggatagggaacgccccatgtacggccgggacagtgcctaccagagcatcacgcactaccgccctgtttcagcctccaggagctccctggacctgtcctattatcctacttcctcctccacctcttttatgtcctcctcatcatcttcctcttcatggctcacccgccgtgccatccggcctgaaaaccgtgctcctggggctgggctgggccaggatcgccaggtcccgctctggggccagctgctgcttttcctggtctttgtgatcgtcctcttcttcatttaccacttcatgcaggctgaagaaggcaaccccttctagagggagccatgagggtctgggcttcagagctaggtctttggggaagtcctggctgactgccttagcagtgggggtgggggtgggggcaggggcaggggctttatgtgtttttgcttggggggcgctgggcctagcccagagtagtgcttgctccccctgccttgtcccaccagggaggcagcagactcaggccctccatggtcctctttgtcattttgttgacatgcattcctccttttgtcatcttgttggggggaggggattaaccaaaggccaccctgactttgtttttgtggacacacaataaaagccccgtttatttgtaaaaaa

SEQ ID NO: 52988 - DNA, 821 bp, Homo sapiens
agcaggaagcttcctgacatgggctgcagtcttcctgagcacagggcacaccaagaagcaagccataggagcttctgtgagtcaaagaatgggcccccttatccccagggagctggccagttagattatgggtccaaagggattccagacacttctgagccagtcagctaccacaactctggagtaaaatatgctgcatccgggcaagaatctttaagactgaaccacaaagaggtaaggctctccaaagagatggagcgaccctgggttaggcagccttctgccccagagaaacactccagagactgctacaaggaggaagaacacctcactcagtcaatcgtcccaccccctaaaccagagaggagtcatagcctcaaactccatcatacccagaacgtggagagggaccccagtgtgctgtaccagtaccaaccacacggcaagcgccagagcagtgtgactgttgtgtcccagtatgataacctggaagattaccactccctgcctcagcaccagcgaggagtctttggagggggcggcatggggacgtatgtgccccctggctttccccatccacagagcaggacctatgctacagcgttgggtcaaggggccttcctgcccgcagagttgtccttgcagcatcctgaaacacagatccatgcagaatgagccctgcgagcaatagagttgaagcagcctctgctggacagtggactgttctatttttttcaataaccaaaaagattaaacaaaaaatactataaaacccctgaccacatttaaaaaatgataataaaagtaaacaaatcagcaaa

SEQ ID NO: 52989 - DNA, 722 bp, Homo sapiens
ttttttttttttttgagagaaagcaacttttattgaactggtgctacttcttgcagagcagggctaacctataggcagtgtgcccagagtttgtgcctgtgggctactagctagttgtatttagagccactttaaattgcatgccaattaagaggtaggttattcagaactttctgggaaaggggcagggagtttcccagaaccatataaagtaacttccaggccattgccaaggtgtgttgccatgacatttgtaaactggccatggtcccagtggtagtgtctttatgctcataagcagtgagggcaactagaggtcactttcatcatcatctgctggtttcagcaggcttctccactgcaccctgttttgaccagatcctgctctgttcaatggggttgggaatggaaaataagtccttctggtctcctacctcatttccccatcagagattatatactcctccttaatcttaaggggcttgcagaagggcggaggttcatcttctgtaactgcttcctgctgatgttatgggcatagaccctgcctagcactggagaggtaaaatccctggatacctgttctaaaaggctcaaaggtaggatgtctttatcttctgggtcagaagaggggatgggttgaaagccttgtgccagcatcatctttacatggaattattgtaatctggaagacacaaactttacaaggaggttaaacaagc

SEQ ID NO: 52990 - DNA, 884 bp, Homo sapiens
tttttttttttttttgagggtgagcaaagagctttttattcaaagaaagaggcaaattgcacccaatctctctccctgtaagatctcatctggttttgacatcagttgcaatgctttcagtttgaggctaagcagaatgttatgctgtgaatggtcaccacagagagaccactgtgttgctggtgtggggaggcgaggctcagggttggacaggttaattacctacataaccctgggctgtggcccagcccagcacctcccagaacagggactgacatggctgaggtctaccttggagatggggtcagtgaagaggggaggcagggtcagcctctgtgcaagtaaaatgccccctcaccccagccttcctttccagagcaaccaatctgaaaacagaattgcctttggggctggtgttgtacctctgctttcaggccaagatggattccctagaagaggagtttgaagcccaatgtgcaaggacatttctcaagggccatgtggttttgcagacactgctgtcctcaggcctgaactcaccatggaaacccatgtcagcaaacagtgaccagcaaatcctcttcccttattctaactgctgccccctaggagactccagggggcaggcattgcttcctccctagtgtgaactctctggtattccatccaccatcctggcagcccagagctgcttctgggttaggacaacaaatagggggccctacagtcagagcagctcttacccaaagtggtgagcgtcaacttcctgtccagattgcaagttaatggcctttacagctgactcgggctcctatgtcgtcattaataaatattaaagctgataaggaccaagaaagtggcctgcagcctgagtgtggtcgagc

SEQ ID NO: 52991 - DNA, 604 bp, Homo sapiens
gttgaagtccattctagtcattttgtaacttcataactgcagagggaaatgatgcaaggactgtttagtggactgagatggctgagcaggttcttggcctgaattatccagaggagataggtggatctagcttcagaggaagtctacaccccattcccttctgcttacaatgtacccatgatatgtgtttagcacagtaatactgtaacaggacatcacatggaagaatcaaagcagctggctcactgtatttaactgaaaagaatgcctacagattggatatttaatagggaaaattaaggcactttaataacaaacttcattatgtgaaacttgttgaatattaacatacaatataccttgtatattaatgccatagtttttagaaacactaatttaaacaacaaatttaaggggtgctggcatatcccagtgacaccttcagttttattgctgcttagtattttctagtaaattagttttaattattggtagtctgttgggcaccatttgggaaagaaataaattggtctcagtgtagcagacttgtagccaaaaactttgaataaaaaataagtataataaagaatattatttcattttt

SEQ ID NO: 52992 - DNA, 581 bp, Homo sapiens
ttttttttcatggccttaacatttttgaagactacaggccagttattttgcaattcttttgtagaatcctcaatttgggcttgtctgaggtctcctatgattagatccaggcaatgcatttctggaaggaatgttacagaggtgatggtgcatatttctcagtgccatcatatcaggaggtttaaatctgtttcactactggtaattttaatattttttaatactaaaattttcatacagtaaaatgtacacatataaaatatactcaattctatgagtttttaaaatgctaatacctccctaacttctttgaaggattattaacacttccatcaaccagaaagttcccttcataccctttcccagttaatccccactgtggcacaggcaaccataaaaccattctgattttctttcccatcatagattatttggctgttctggaatttcatatatagtttttctacagagtccttaggattttcatttcacctgcaaacacaaagttttatttcctcttgttaaactgtatacatttctttttcttgccttattgtacttgttaggacctctaatacaat

SEQ ID NO: 52993 - DNA, 297 bp, Homo sapiens
gaaaaatacatgcatttaatattttctgtttacaaaagtatatgtgttcattagaaaaaatttaagtacagaatgattaagtaaaattctagaaagtcttagttcacaatacagagataatttaactgccttaaaataattgtgttcacctctatttaatttttatgcacacgtattacaaacaagcttccttttgacacagctgggaccatccttatatagttagttttaaaaatcttgctttttctgtttaatcagatgttatgattctctccctttgcccttattgttgaacaa

SEQ ID NO: 52994 - DNA, 285 bp, Homo sapiens
atcttcaacacgctgcggtctcatctgatcgacaaagggatgctgacatccaccacagaggacgagtaggggccacccagggccaggagaacaggaacagaactgagcaggggcaggtctccaaggcaagcccagctggtgtgacttagacaatgacgaggcttcaactcactgtcttttttttttttttttggagggtattttttatttgtgggttcaaaaaatctgtatatacagtctatgtgtttagaatttgtgttgtaagtaaactacagctttgagttg

SEQ ID NO: 52995 - DNA, 976 bp, Homo sapiens
  misc_feature (1)...(976): n = a,t,c or g
ggcacgaggtggttcccgagcccgaagccgcggagccggtggtgccttcgctcgtggatcgatacttcactcgctggtacaaaccggatgtcaaaggaaaattttgtgaggaccactgtatactacagcactctaaccgaatatgtgtcatcacattggcagaatctcatccagttcttcaaagtggaaaaacaattaaaagcatttcctatcagatcagtaccaactgtagcagacttcagaacaaggtctctgggaaatttaagcggggggcacagtttctaacagagcttgcacctctctgtaagatttactgctcagatggtgaagaatatactgtgtctagttgtgttagaggacgtttgatggaagtgaatgaaaacatcctccataagccatctattcttcaagaaaagccatcttactgaaggctacattgcagttgtgtttacccaaatttgaagaaagtaaaagcataacagaagggttactgacacaaaaacaatatgaagaagtcatggtgaaacgcattaatgccacaacagctacgtcatgaggattgacatggaacaaaaagcaaagtgggattcttgttacctggcctaaaccatcagggtactaaaggagaagaaccagtatatgtaaagcatacctaacagccagccatatgcaggggaggcctagtgcttcacttagttttccctctctgtcttcataatgagccttggttcccatttgtctacagcctgccagatctggcctgcccatgtactcacactgttctcttgcatctctctaacaactggcatgcaaggcatgtttttctgattaaaaacaaacaaagctctttgaagaagatttagaaaatacagaagagttttaagtagccaagtaaaaataatttacccatcatcccataatccaggaagtaaatacatttggcccttggagcaacataggtttggactgcnagggg

SEQ ID NO: 52996 - DNA, 517 bp, Homo sapiens
cttagaagagttgctcattcacacccacgcccttgcccaaggctggcccacttagagcgaaacttaacttttgtctggatgggaagagaagtaagtctaccccgaggttgccatgttgaagagtgagaggtccaagtgattctgtgcattgaaaccaagacaccccacccagaacacttcttccctccctcagcccaaaccaaaggctggggttctcatctccaagtggctgttctccaactttcccaagccgcttgcattccccagactggactactgtggcggttaggttagatttgaagacggggcccaggctgggtatgaacgggtgcagccctcttctcctcttcccccccacatctctcatgagagaggtagtggcatttcccttctcagggagcttcaatgggaaaggtctcgaaagcttcaggaggagcagaataccaacgcagggggatggctgtaacgatctcaccgtctcctaacctcagtcccttttttgagagtgaatggtgga

SEQ ID NO: 52997 - DNA, 497 bp, Homo sapiens
ggttctgaggactgggtttgggtgcagacgttgttgcttgggcgcttctccgctgcgtgtaggtgaagggggcttcctgaccgagacatggatttaggtgctattacaaaatactcagcattacacgccaagcccaatggactgatccttcaatacgggactgctggatttcgaacgaaggcagaacatcttgatcatgtcatgtttcgcatgggattattagctgtcctgaggtcaaaacagacaaaatccactataggagtcatggtaacagcgtcccacaatcctgaggaagacaatggtgtaaaattggttgatcctttgggtgaaatgttggcaccatcctgggaggaacatgccacctgtttagcaaatgctgaggaacaagatatgcagagagtgcttattgacatcagcgagaaagaagctgtgaatctgcaacaagatgcctttgtagttattggtagagataccaggtgatgataagagttactggt

SEQ ID NO: 52998 - DNA, 669 bp, Homo sapiens
  misc_feature (1)...(669): n = a,t,c or g
ttttttttttttacattactcgatttttatgcttactttcttttacatttcaaccntataattaatttttccatgagacagggtaggacacataatcttcttggatacattactgtttattgtttcaagtggatggaatatataaatcccactgagtagtttagtgtggccttgtatcttttataaacaggttaaatggagactttacactgtaatctgtgtatttatctgtctaccataaattgtcttcgtgacaaatgcagaatttcttttattacttggctcaaattaactgttgatccttttcactgataatatacaagggtaaaaaagcaggaagcctttaaaattgaaaaaagaaataagatattttccactaaattactgaaaattgaaatttttatgttgactgttgatgactgaaaagccaatgttaagaatcaatatcatccaatataaaatagtacattgaattatttaataaacagaatattaagagcttgtatatgctgactgggaacagtggtggctttttaaattctcagaaagtttaaacattttataattagaagaaaccactggtgatgatgaagatggtccatctctgtagcagccattacagtgaaaatcttgacagaaccttttcacttatcagaaagataattttac

SEQ ID NO: 52999 - DNA, 372 bp, Homo sapiens
aattcctcagcgcacccatcgccacggatacgatacattagatattctgaacttgctcatcttaggacttcacattggtgtcagtgttttctgacaaatcacgtgtatcaggaatgaatgagggaggtgtggctgggtgaaggcagagagccgaccctacaggtccacatctgcacatacatgcacaggaatgcatgctctcacacacatgcatacacacacgcacacacacagacatgcacatacactcacacgccccaggaaatccaaggaatcactgagcctgctgttggttgaggcatttctgagtatccaccctacctgtagggtcagatgtactgattgacacagaaaattaccctatgtaccact

SEQ ID NO: 53000 - DNA, 2179 bp, Homo sapiens
tagaagtgttaatattaagaaaggacaattacacagttttcaagatttaggaaatcacttgtttagaaacttcaacagccttcacaatctgttttatatgatggacagaaaatttctttgccctccaaaattataatttctttatttttttcttattcttaaactataataattcagtaaggatattatgggttagaattttattatgatttttttcttagacaaaagttatatgctgaagaaggaaaaagttataaggcagtatgttttgataaaaggcatgtgcatcagtgaaatgttaactgtatagcaaataacctttcataatctgtagcaatcagtatttttctgatttaataatattttaataactgacactgcatttaatttttttgccagtttaaaatgtttgtgtgtttttatagatgattttaactggtacatattttgagttaagttgaatgtatgaaagcagcatcttatcagttttgtttattcgatttctaaaatgtgctgatccttttaaaactcctgcttatctctgcaacaaagaaaaatattcaaaaatactgccttcattttcacacacagtgctgaagatgctgcaagcaccaaatcatagctcataaaatcaggtcctgagatagttacccataaagaggaatcctttgagtgtatgccattggtgagccgatgagcatggaccatagaagggctcaatgtagaaggtaaaattggcaaatcataattgagaaatatgaaatgtattcccatacataatatggtatagggtgtaatgtacctgcttttgatcacttttcattttaaagtgctattcacttgatcttaaatgttccatgaactgttaaatttcttaagttacatagttactacaccacatttatgtgtatgttatgttttaatagtcaatgataggtatgtacaattgataatataaaggggctcattgaaacttgagagcctgttgagttttggttagttgtagattgcatttttataaaaaaaaatacagatagattgatgataatagatattggggcattgtttctgtctcatgagaattcttttattcattaccataagccttcactgatactataagcattattttaaatgacgctgatcttaagtctgaaataaatggaaagcagaaaaggtgagccagttgatttgaatgcattggatattagtgttagaaacaatgtatagtttagattgaaactgaactgacttatttagcacttaaacaaaaatttgacaatgtttttagttttttttaagacagcttagtgtggtgatacttagaattctatggtttgatgtttcttttagaaatgagaagtatagttttattttttaatataaaaaatggttttaatactaaaactagtaatttgatactagttgtttataaacattgtaaaatatatcttttaaacaaattatcttggtagttaattcataagggtgggtttgggtaggaatagcagagtactttcagagggaaaggggagtcattcagaagtgatagcattttatttgtttgaatactctgccagtaaaatcagctgtacttagaaagttatctgttgtgtagaataatgatgtagagtttactaatcagtgaggatgtcttgtttttattttctgcaaactctgcctcactttaaaatgcattataacaatacctaattaaagataattttggctctgaaagttaccttattttttgttgagttagtgacttcatttttcttgccacaatataagcttttgagggatttttttaaattggtgcttttaataagcaaataaatcccagggttttattttcttcagtgatacccctatagaaactccttaaatgtatttgcgcatatatatatatatatattttcttatgccatgctcgatgcattttcgtcctgagaaaaatgttctctacagaaactacccgtgtgtaaaaagaagattggcttaaaatggctactgtgatgggaacagtgtcttagggagatgcagcttggacttgaggtaaattgaatactttacaactgtggtttagagtttgctttaatgacattgtatgtaaaaggtcacatgattgctgtaattttgtattcattatggtttcctcaataaatgtacattgatgact

SEQ ID NO: 53001 - DNA, 591 bp, Homo sapiens
caggagtcctcggccagccctgcctgcccaccaggaggatgaaggtctccgtggctgccctctcctgcctcatgcttgttactgcccttggatcccaggcccgggtcacaaaagatgcagagacagagttcatgatgtcaaagcttccattggaaaatccagtacttctggacatgctctggaggagaaagattggtcctcagatgaccctttctcatgctgcaggattccatgctactagtgctgactgctgcatctcctacaccccacgaagcatcccgtgttcactcctggagagttactttgaaacgaacagcgagtgctccaagccgggtgtcatcttcctcaccaagaaggggcgacgtttctgtgccaaccccagtgataagcaagttcaggtttgcatgagaatgctgaagctggacacacggatcaagaccaggaagaattgaacttgtcaaggtgaagggacacaagttgccagccaccaactttcttgcctcaactaccttcctgaattatttttttaagaagcatttattcttgtgttctggatttagagcaattcatctaataaacagtttctcactt

SEQ ID NO: 53002 - DNA, 178 bp, Homo sapiens
  misc_feature (1)...(178): n = a,t,c or g
ctgtaatcccactgtaatcccagtggctgagccactgcgcccagcctgcttttgacttttacgacatcgacccttctatgatacatcactgaaactaaaacaaatggtggaagaattggtatctcatnnnnnnnnnnnnnnnnnnnnnnnnnnnnnnnnnagtcaagacaaattatag

SEQ ID NO: 53003 - DNA, 418 bp, Homo sapiens
tgttatttattccaaggttgtgttttttggcatccttgtccttttctttccctttttctcggtattctatctctggcaaagttgtggagagttttttgttggctgggatacctccattgtggtgtataaggatcgaagaatccatatcaggtaatcctttggctgcttcctcggcctctttttcttgcttctgtagcatctgttgctctggagggagagcttgttgaagaagttgcatgtaaaactcgttctctttttgtacttctttttgcttccttaaccgcattttgtagcttacgtaacttttgaagccaaaccccaaagttaccacagggtacccaatacagtgagcagcaaatggacgacaaaggtctacatgaaagtttttgagatctttaaatctaatggctgcttcaat

SEQ ID NO: 53004 - DNA, 842 bp, Homo sapiens
  misc_feature (1)...(842): n = a,t,c or g
gaactggaggaatcacatacccttcaagcacaaggcatgcttcagggctgaaaacaggggcaatattaaagtctgcataaggagcatttagctaccacgacttctcccaaccctgagcaaccacctcgccttagcctcaagagaaatcaggtgatgtatattctggaaaggttgaggtcctaggctctgaaaatctcagtagagctgaggacagggtggaggtgagaagccacaatgaaaactgggggcttcagtgtacactggtatgctgaacagtgagatttctctatcctccactcctacctgcatcctctcagctctcactctcaagatatggtttaggcaagaactactctccaagcaggaactactctctggaaaagctgaccagcccaagagaacatttctgcagagaatgacaaatgaggatccccatcctatcatcccaggctgaagtctatcagttctcaaactcctctttccaacccaccccaacctgacataccatagcagagagctctaaatatttgaggaaaactcccacatatggtcagcaaaacaaacagggaaggggaaaactcagagaaaaagaaaaaataggaatacagggacaatgcaggaaggataataaaactttaaacatttaaagagaaagaaagatacacggtattacagacacaaataaaatctcaaaaatttatttctatgcttcctttctcaggaagttactggactcagtactcccacaaaatgagggtctannnnnnnnnnnnnnnnnnnnnnnnnnnnnnnnnnnnnnnnnnnnnnnnnnnnnnnnntagtctgggcaacacagcaaggct

SEQ ID NO: 53005 - DNA, 1782 bp, Homo sapiens
ctggcagagccgagccgtcacctgatttttcagtgtttctacctgtgtgctggagctcatgagtattttataaactccatttaggtacttcaggaaacatgcagcattttttaaaaaatgaaaattgtttttctacttcatttttccttttagagtcaaaggatatttatttataggcctttttttttttaatatagaatctgaggctgtttgggctttgacttaaatttccatcaggcctctctccagcaggtaatccctctgcttccgctgggtcccctgggggaggtgtgaactcaagggcctagccccaaaacactttttctgcttttcttaatccttttccagtcccctctttttttataaacgttgggcagtttgatgtttctgtttcggcataacgtaatccatttcactgtagcctaaactccagtccgaggttggatattgttcaaatgagcagggcccgagctgggaagcgcaaagggcagccgccgccgtgccgctcctcccttggccctcaggccaggtccctgctggaagcggctgcatcttcctgtcagccctggtttccatgggtgactggcgtcacgcagccacccgagtatggctgaccttcctgcagagagaggagccgcagtcttttgcttgtggaaggagacgctgggctgtgcggtgcggagggtgatgaggatgtctggtgacagccgtgcggacaccactcctctctgcagcactgcctcccagcgccagggtcgcggggcacatcccactgagagcgggggtcctgccccatcttagagtcaaaggcagaggggcttccaggccctggatggggtattttggtgtcacctgaagtccctctgacatcaccttgtttcatcattttttatgacagaattagaaacccatccttcaagcacaataatcatcacagacttgagtttgcttcctaaagcaaaggctccgggtttgtttggaaaatttttttgatttctgaaatgaattgatttttatatttggggcatctctatagaaagtgaccaccaaggccagtaagtacgggaaaaaatgtttactaacttcctcagagattcgtgatacgcgtttctccactgacagacatttaaaaacaaccttcagctccgtttcaatcaatcacctcgacttgttttttagcatggacactgccagcaggacagacagggatggagtaaaccgaagccaatttcagggctcttggcgtgttggacacagaagaaatcctagtgcagcctttggtagctaacagtcactgattttataattggagaatgcgtaaagattcatttttcaaggagaagagcctgcaaatggccaatgaaggaggtaaataaactaagatattccgagggaagggacccaggccacctcccttccgcaggtcctgcagatgaagggttttttgaatgaaatgccactgtgcattttcagaaaaaaaaaatctctgataaacagactttgaatggatgtttgttcctcctgattctcttttctcttcgtggcgacttagagttggcggatattcggaactgtgaatgtacatagcgttgagttaaaccccttgtgtgtgagacaggacgcagcgggcccctggtggcctgggggccagacccgtgggcaggtggggcatggggccctggctgcggggacctgctggggtgtgagggcagagggagggttgccatgaaggaacttgggattttcaatggaataagtaaaacataaagtctatacttggga

SEQ ID NO: 53006 - DNA, 910 bp, Homo sapiens
  misc_feature (1)...(910): n = a,t,c or g
ccaagtggtcaccacctcaagaactataagaagcgtgtggcagccttggaagccanagcaaaagcccagcacttcccagagccagggactgacacaacagaaagtctgcaagcaatgccatgaggtcctgaccagagggtcttctgccaatgcctccaagtggtcaccacctcagctctgcagaccctgcggtgctgggagccaccatggagagtaggtgctacggctgcgctgtcaagttcaccctcttcaagaaggagtacggctgtaagaattgtggcagggccttctgttcaggctgcctaagcttcagtgcagcagtgcctcggactgggaacacccaacagaaagtctgcaagcaatgccatgaggtcctgaccagagggtcttctgccaatgcctccaagtggtcaccacctcagaactataagaagcgtgtggcagccttggaagccaagcaaaagcccagcacttcccagagccagggactgacacgacaagaccagatgattgctgagcgcctagcacgactccgccaggagaacaagcccaagttagtcccctcacaggcagagatagaggcacggctggctgccctaaaggatgaacgtcagggttccatcccttccacccaggaaatggaggcacgacttgcagcgttgcagggcagagttctaccttctcaaaccccccagccggcacatcacacaccggacaccaggacccaagcccagcagacacaggatctgctaacgcagctggcagctgaggtggctatcgatgaaagctggaaaggaggaggcccagctgcctctctccagaatgatctcaaccagggtggccccaggggagcacttaatttccaagaggcaaggccaactgggtccttggaggaggagaagagcagact

SEQ ID NO: 53007 - DNA, 715 bp, Homo sapiens
tttttttttttttaatttttactcgtttctttattaatatagaaaaggagcccagggcagctggaccagtagtacaaagcaccaggagttaataccattctggtgaaggggatggttttacaaaagtgaaggagcaggcaggagccaccaggttctgaggccaggcccagcctactgcccagaacccctgaaacggctccctgggaaaaagctgacagatgggtcaggggtggattgagctggaaaccatggggacagatggcagggatagagggtcatgcagtgggaaccacccagtggcttgataaggacagggaacttgtggctggaggctccccattgggccatgggcaggggcttgcagatggcctcagctctgggggcaggtagagaaactgcagagactgatgggcatggagaacccagacatggcccctggggctgaagggcctttccaccctctcttcaccaggagccacctttgctctatactacatatggggcttcagggcccaaggcacaggggaggctcagaggcctccagttgggaggaagatggggcaaggaaggaagcacttgagtgtccctagcttaggcagccggggatgagacacaggcaggacaacagcacccccgcatagtggggctagaatgtgggacagggacgggcttatcctcggccagtgactaggaccagccccatggcaatggtgcc

SEQ ID NO: 53008 - DNA, 1077 bp, Homo sapiens
cggacgcgtgggctttttaaaaaatctctgaagacttgctcagtgaaatggttctgattttttgcttcaaatgatttgcactaattgattttctggagagcggagttatgttaacaacaaaattcttttatagttcctttgatactatttcaaataaggattacacattgaaagtttttatagaaattatgaaaattggataatcttaactatggtaaccattactattatccatactactttctccccactgaactttcaaatttgaaaattggggtagcttttgtaggtcactttcttataaagatgctgatggtcacagatctcctaagtatccagaataatatttttatcatgagaaggattccacacaaaattggggtcttgcaccccatatttcagaggatctgaacagaaattgtggcttcattgcacattttaaatctctatagattcttgaaatcacccaacctctcacatttgaaaacccaacggcctggagtattctggtgggcactggagccagcactagctttttggaatccaagtggggagagaaacaaaaatagacttttcaagggactgtcccagactacccagggcaaatgtcttcccttcccttcctgaagccacaggaaagcaccctggagtcctttgtataccactatggaaatttttaaggcaagctctcaagacttgaagagttggaattctcggcatttaaatgatgccctgaagtttgttttgaaaaagcaatatttcattgccccttttcaattgtgaagcaacctgctcagcaaatattacctcatttttttaaaaagttgaattaaagggaaatatatttttaaaaccaaaatagatcaaaatgatcccagttttaagggattttgcctattttggaagaataaaactaaaatgttaaaactgttgaattacagagaacagatgtactctgagacataattttaaacaaatatttaaaataaggcaggttaacatttgcgtttaggcacaataaatctgtattaaagggaagcacatcaaggaaatatatacatgttgaataatgtaact

SEQ ID NO: 53009 - DNA, 466 bp, Homo sapiens
  misc_feature (1)...(466): n = a,t,c or g
ttttttaatttctaaacatttttatttcaaatctcttttcacccctccccaaaaagacatgggtaggtacagcaatcataaaaaggagatacaaacacaagagtcaaatgtctctcgcactgacacttacaaaaaactgggaattgtacatggggtttccaaacaggacctgcagcagctactaacgtccctttacgagagtcaaacatgcctattaatacagtatatacagacaccccattctggaactaatctacagggacatccctaaccccaccccctctatccccagaaaaataccaaaacacacccaaagtgcatttgttttgtttatatcaaaacctctttccttttcgtaggcaccctcagacccntccaccccatttaagattggctgcaagtctattttaccatttagtattttttatagtttatgaaataattaacagcactattttataattag

SEQ ID NO: 53010 - DNA, 839 bp, Homo sapiens
  misc_feature (1)...(839): n = a,t,c or g
tgcgtgtgcagtaacagctttaatctgtggtggcccctgccctcctgcatccaggcaggaagagccgtttctcggggaattaaagcaggagcgtttcccacactgtctcctgggagtccatgcttacagtgacagcactgctgagtggtgccatgtcaccagggctgggcctgggcacagagaggcagggtgccagtctttatannnnnnnnnnnnnnnnnnnnnnnnnnnnnnnnnnnnnnnaggtgtatacacagttttctcttgaaagtattaaaaaattgatcaaccttcaatctataaaaaatacctactctacatgatagaaaaatctctcctccaagtttacactgatttacacccaaggctttccccaaatgtacaataggaggcgacctcttacatcctagcgtggaaggcggcggatgtggggccacacgtgcacgcacgcacacatgcgcgcacacacacgcgcgcgcaccacacacgcagcgggtggccagtcttggtgatggggtctgggcccacccgggaatgctgggggttggggcaggcccgcggtcctgcggggttgacaccgctgtgcctggggtgcagaccccgagaagcgcaggccccctcctgctctgctgtgagtcttccctgccctctccctcctgcaacatgcaccctcggggaagaaccacgatttctaagtgagacacacccagaagaaaacagggttcccgatgtttggattctggcctgggaagtgcgtggggagggtgtggcctttaggaggccgggccaggccgcacctgtggagaagcagcacctgggagccagaggggcctgtggca

SEQ ID NO: 53011 - DNA, 379 bp, Homo sapiens
cccaggggcgggcgggggtacgagggaggaaggggagcaagacttgggctcacaggctggttacctctttgctggctgtgacaacagactgaaaaaggattggcactgtctcacttggccaagtttgcagccttgagccaacacctaaaagggagaggtgggctcttctgccagttctgtcaattgtcagtcagaatttgggccctgtttggcatttgctttatggcacctcctagaggaccagctgtccaggggaggtggtattgaccggcactcagtgggtggagaggaagcatatgtggaaggagcatttccttagaagtcatccagatgcttctggaggaggggcaggagacacttgggctgtttgccttgggtg

SEQ ID NO: 53012 - DNA, 514 bp, Homo sapiens
ttttttttataaagtgattctatccaaattggctttttatttattaataataaagtctactgacacatactgcttgcaaatagtatagacacaaaaattataaaaataaaccagtagatatttagggcagatgcaaaaatttgcacattaggtcattataaactagatatattaagcaaaaaaagcaaggtgcaaaccagcaagtatgatatattaccaattgtgtttttaaaaggagaaagacagatacttttacatatgcatagacgatatctggaagaatacttaagaaaatgctatcagtggttgcctaaagaactgggtggatcagggagtgggcaggaaactcactttcactgaatatcctttggtactattaaaaaaatttttttaaatcacatttatgtacaaatttgtttaaacattttgactagaggttatatttaagactaagcccttggccaggcatagtggctcacccctgatcccagtactttgggaggacgaggcagga

SEQ ID NO: 53013 - DNA, 260 bp, Homo sapiens
ataaaggtgaaagtagctctctagtagcctgtgacagggaggatcatcagacaggtgtttacttccttcctggattacttttccaggagacacccagatgtggcaatagctcttggggttttgggctgacgtacaggagctgaagctgtgatgtcgcgtgtcccgtgtccttaggacaagtgttaaagtggggagctgcccccatcctgcattctcagcagatagcaggcatgtttgccagccggttggttaaacaatct

SEQ ID NO: 53014 - DNA, 1659 bp, Homo sapiens
tcgaatggcaatcttgctagttgcgctacctaacagtaccatcttggatccttcaaaaccaaagacttgccccagcactgctgtggaaccacctggcttatgacccctatggatgatctttaggaaaagcagccctttacttttaatacaggctttaatgaactatacctgttaagttccaaaggtcaaaatggaggcatttgctgtctaatattcaaacatagaaagggagctgcttttaaagaattccctgcaaatactgaaagcagtcatgcaatggagggtgctcttgtgtagctggtcagggacttttttttcttttctcctgaactacatgattctaattggaatgttcatttgcctctttttactcttttaaatgcttgtaggtggcttggggtgtgctatcgtgctgttcctactcagtaaacaggtgtgatgagttaacaagaaataacactgtttgagaactagctttgaataataatttttccctttgtacatgacctgctgaatttcggtacagtgtttttgtagctaacttattttgtcatgcacataatgtatatttgttatgcactacttttgtatatcttgtttttccaacagtgaacatttttaggcacacttttcactgacgggatatctctttatgcaatacctcaatttttcatattgcaaagagtagctttttgtacttttattactgagagatcttcatatacttcattttttaatataaataattttaataaattttattttcttatattctgctttttatacatttcagtgctctgcatacattttaaattatgaatgtcgtgcactggcaatgctattttagagtctgcagagaagagaaagcatgttgcttaaacatccttccccagcaccagctattggtgtacctataatttaagaaatagtctatgtaaagtcacaaattaatgaaaaaaattcgcatgaaaatgacagataacactgtagttcctaaaaaaaaaattaaatgcataagcataaggtagaaattaaaataacaaaattgtctacagcttcttactaagtttttaaaattattcataaaatgcagacatttttggtgaatgtttagccatttttaatattaataaattgatgttaagtgtttgattcagagatgtctgctcttttaaattatatataaggaaaaaaaatagcctgccttgggacaggtgtgtaatgttagtgtgcatgactaatgtaagaaattgttattctactaatatttacttgtgattgtgtgacaagtgtgtttacagattattggttacacttcaatttacagggcataaacaatgattatctattactctgaactttatgattacatgttcttcagattacatgggattgtagttgggagttaccatgtaactcaaacataattaacatgtaattagtttacagattgtagggcatcacttcaattcaccaagcatgtagttctagcgcactagcatggcgccagccatgtacttacaatgtagttacagagtaattacatggtgatttttgcaatgtaaaataaagtgtttctgattattttctatgtaaaaggaaccctctcctttccccttctggtccctgcgctttggtataatatatatacttctccac

SEQ ID NO: 53015 - DNA, 212 bp, Homo sapiens
cctggtcagtctagcagaaggtgtgtcagttttactgatctttttatagaatcaacttttggttgcattgatttttctctacttttcttcactctatttcatttattctcatctaatcttttatatttccttctttctcctggctctaggtttagtttgctcttctttttccagggtcttaaggtgtaaagtgaggttagtgctatgcggac

SEQ ID NO: 53016 - DNA, 459 bp, Homo sapiens
ttttttttctactccaaaaatcagcatgtttaatggggcccctgtgcactgccctctgccccctctgaggttcgcacaccgtgggcacggactcgatacaagcacgtgaaagggggtggccccagttgcttagaatctggatcttcaccttgggaaaggcagctggggggtcattctgcaggtggaaagtctgaatctccgatttctcaacatcgaaggtgaatttccccaaggaaacttcagtttcatcataaacctggaggccaaagaccgcgaaatcgcggagggcgctgttggctcctccggtgtgctccacgctgggggatggatgctgaagagtgatgtcgctcagctgcactcggcccggcagttggatcaccacctggccttggtcgaccttaaaaggcccgcaattcccagggaacacgtggggctccaggataaccgtgggcggccgtg

SEQ ID NO: 53017 - DNA, 382 bp, Homo sapiens
gaaccacgccgcttcccagtctctgtgcgaggcgtgaagcgcggacctttcaacaagggctttattaattctcacgctgcggccctggaaagcgatggaggtggcggctaattgctccctacgggtgaagagacctctgttggatccccgcttcgagggttacaagctctctcttgagccgctgccttgttaccagctggagcttgacgcagctgtggcagaggtaaaacttcgagatgatcaatatacactggaacacatgcatgcttttggaatgtataattacctgcactgtgattcatggtatcaagacagtgtctactatattgatacccttggaagaattatgaatttaacagtaatgctggacactggccttagg

SEQ ID NO: 53018 - DNA, 1051 bp, Homo sapiens
ccttatgagaatacttgggcatttggttaggtgttgctcagggtctgacatgtgactagactcaaattactactggaagggccttaaagataccaactaggccagccctctctggttggataaaattgaaaccatagagaaaaagttaatagagctaaaatagcagcttctaattctgtaccattacctaaagcatctttttgaattatcaaaggaagaaataagcaaatggactgtgggaaatcatcttacaaaactagaatatagtttttccaggggaatttttgtgtaccttacctcagtactggaaataatattacagaagatacagatgaatctgaaatgatacactgataaactttttaaaaatttgtaattagactgaaccataagaaactgttaatagttgatcatttttgagccttacaaaagtggtaatttcctactgttcagtgtaatggacttaaatcagttttaacaccacttgctaacagtctgactttagcagattgcagttactgctttattgcaaaagctcctgaaataaaacccaaatactatcagagattaacatgggttatgagcaactacagtccattcaagtacacgttctaataaagaactaaaattaaaaaaaaaaataaggggctagcaaattcactatagcagacagatattcttaacgaaaaagcgtaagggatccaaatcgtgtagcaaagacaggaagactgagacagtaacaaacatccttttctttgagattttttgccaaaacagtagattcacagttcaaatccaagttccttgaaactttacagaagaaaatccaggtgtaattttcctttactgtaattcttaaccaccaatcatctgtccctggacatagcctgttttccatgtttatctgtccttaggcaacagcccatgagaacactagttggtttgagcctcaaaagcgtaaatctgtttgcagaggatacaaatggtgctgtttcccagtccaagatttagttaacataccaacttctataagaccctccttaggttacaa

SEQ ID NO: 53019 - DNA, 96 bp, Homo sapiens
ttttttttttttttcctaatttatatttatatttaatttatattaatgggtcctaattacatgaccatattttaatgaactgaagatgcctttgtg

SEQ ID NO: 53020 - DNA, 515 bp, Homo sapiens
agcttcttgctgaaaatcgctcgccagcatttttaccaaatacatttcctcgatctggtgtgactaactttaataccagtgtcagtcaagaaggtagtgaaattattaaacaggctttggaaactgctggcattcccagtacatttgagggtgccgaaatgctttctcatgtttcaacaggttgtgtctctgatgcatcacaagtaaatgcaacggtgatgccaaatccaactgtaccacccctgttgcacactgtatgccatccaaacaccttgctgaccaaccagaataggacgtcaaactccaaaacttcctccattgaggaatgtagcagcttgcctgtttttccaacgaatgacttactactgaagactgttgaaaatggtttgtgctctagttcatttcctaattctggtgggccatcacaaaattttaccagtaacagttctcgtgtttctgttataagtggtcctcagaacacaagatcccagtcatttaaataaaaagggaaacag

SEQ ID NO: 53021 - DNA, 2037 bp, Homo sapiens
  misc_feature (1)...(2037): n = a,t,c or g
ggcagaggcggtgcgactgaggcgtggcgtctgctggggcacctgaaggagacttgggggcacccgcgtcgtgcctcctgggttgtgaggagtcgccgctgccgccactgcctgtgccttcatgaggaagatgctcgccgccgtctcccgcgtgctgtctggcgcttctcagaagccggcaagcagagtgctggtagcatcccgtaattttgcaaatgatgctacatttgaaattaagaaatgtgaccttcaccggctggaagaaggccctcctgtcacaacagtgctcaccagggaggatgggctcaaatactacaggatgatgcagactgtacgccgaatggagttgaaagcagatcagctgtataaacagaaaattattcgtggtttctgtcacttgtgtgatggtcagtttctccttcctctaacacaggaagcttgctgtgtgggcctggaggccggcatcaaccccacagaccatctcatcacagcctaccgggctcacggctttactttcacccggggcctttccgtccgagaaattctcgcagagcttacaggacgaaaaggaggttgtgctaaagggaaaggaggatcgatgcacatgtatgccaagaacttctacgggggcaatggcatcgtgggagcgcaggtgcccctgggcgctgggattgctctagcctgtaagtataatggaaaagatgaggtctgcctgactttatatggcgatggtgctgctaaccagggccagatattcgaagcttacaacatggcagctttgtggaaattaccttgtattttcatctgtgagaataatcgctatggaatgggaacgtctgttgagagagcggcagccagcactgattactacaagagaggcgatttcattcctgggctgagagtggatggaatggatatcctgtgcgtccgagaggcaacaaggtttgctgctgcctattgtagatctgggaaggggcccatcctgatggagctgcagacttaccgttaccacggacacagtatgagtgaccctggagtcagttaccgtacacgagaagaaattcaggaagtaagaagtaagagtgaccctattatgcttctcaaggacaggatggtgaacagcaatcttgccagtgtggaagaactaaaggaaattgatgtggaagtgagggaaggagattgaggatgctgcccagttttgccacggccgatcctgagccacctttggaagagctgggctaccacatctactccagcgacccaccttttgaagttcgtggtgccaatcagtggatcaagtttaagtcagtcagttaaggggaggagaaggagaggttataccttcagggggctaccagacagtgttctcaacttggttaaggaggaagaaaacccagtcaatgaaattcaatgaaattcttggaaacttccattaagtgtgtagattgagcaggtagtaattgcatgcagtttgtacattagtgcattaaaagatgaattattgagtgcttaaagattatttttgacttaaaatagtatactttgaacaaatactctaattatgaaaaggaagaacaattccttgtatgcctgtttcccctgcccccagccacctttttgggaggagaccattattgcagggcccctcacagcattctaccaaccatagcacccaccccgagcagcgctggtgctgcagcctgttcgcgctgaccatcatttctctacaagatacaatatttattatcaggcaagaggacagttccattttaaaataagacttttgtaatcattccaattttgtaatcatttcaaaggccacataacttagttttctctacttacacattcagtataaatatgaagctattttctgttcatatcaaacattaactacaaggcacattcgtatcagttttgtgtttctcaaattgaagtaccataccagttctgaggcagtgtcccagcttccatgtttgttaaataccccttgtttgtttcaccattccagcagtnctgaaggtgtacttttttgag

SEQ ID NO: 53022 - DNA, 2091 bp, Homo sapiens
ttttttttttcagatttgttagatttttaataagaacatggaaatcccaatcagcccttcaacaaaattaaaatacagaaagtgaaattaaaagtattctacattaaatgacttttatttaaaaaaaaaaaaaagtaactgtgaacatataaacagcctgcagggcactacagtacagctggagagatatacattttccaatgtacctatgggccaatgaatcccaccattttcaaataaatccttaatcagactccactcagttggaaagttttgctgaaaatatttctggataaaaaacaaaaaacctcatgttggaaatcaactgtccttcccatttggaaacattaagaggagtccccagggaacactggtaataggtgaaaatggttcctggagtcaccagtgttgtacacacacatggggaacacaccacagcttagatgtgacaaagttccttctcatatgactgttccctcaaggtaagactaagatgggagggggagaaaaagaatcctaaaaaagccaatttttaaaaattctgctttggctgattttgtgctataatgggtagctgatttctaaaaatcatatttcttcaaagagttttatatcgaaaggaagactaaatgtaatgtgcctttccttataatccaggaaaacaactgtggtatttcaaaaattctaaaaatatctactttcatgaaatagtaactatttcactacaaacctatttttcactaaatacacacatttcctaatcctggagcctcctgggaaaagcagtgggttctccctgggtcttgcaagactccagtgttcacaggagagtgtggggaatagcttcaccccgtctcctgggatgggctttgtcagaggtcacgtgcagagacgctatcagacttccaccaggcatgtttaagcaattaccccatacttgtaccagttatgtgatttcccctatctccaaacacattcccaacttaacttaggcacaagaggaaaagaaaagaaaggtgtgcccgtgaatctcaaatcaggagaatgtgcaggaaagccccgccatgttcaggcaatttggatttccaaaaggccacaggatagggatgtggcactcttggcttggagtctcaaactgtgtgtgtgaacagtacgactttcctgtgtcaaccttcagtgttgaggcagcgtagaagagagtggctggagagtttggaatactgaccacactggctctgggtgaagggcctctgctccagcaaagagccctgccgttccctgttaagtgttgtgagtgaaagacctgcttcacagaggagcttggagtttctccatgcctaggaccttgccagtttggattcatgagccttgagggtgccaaccgcatctttcactgcatggtaaatgatgttcttcacctgcagtttatcctcatgatttgtatgagtgttagagagatgcctgaattcctgagtcaggcggaaacagtgctttacatgttctggagatacaaagtcttctgctacttttatgcaactgtatagattgtgaacctggtgtggggctccagcaggtatgaaaacagcatcacctaggaactgcacaatagcccagccttgcacgccatactcctcatagagtcgcttacggagggtctggtccaggtaccaactttggtcatgaattgggtcatgatcaggggggttctcttggccttgttcttctccaacctttcggagcagctcccggatcttctctgcatccttggctgcatagatgtgccataaagcacctggcttctcttttccatcatgaatcctctgcttcgtcacctcatcggcatctccctcgtcaattgtcttgagtacctcttcatcatgagcaccctccctcgatgggaatcccaacatacaccatcacattaacagcatcagacacatctaagtgaagatttgttgtaccaactcttctatcttctgctgttatcaacccataggcgttgtacatcttggggcccagatcaggccttacaaagtagctaggtagcctagaggccagattgagcctgccatctcgtttggtatattctgg

SEQ ID NO: 53023 - DNA, 727 bp, Homo sapiens
ggtcagtgagctgccctttgatgctcatgcccacatcctgcccagagcaggcaccgtagccccagtgccctgtacaaccctgctgccctgtcaaaccctgttcctgaccgatgaggagaagcgtctgctggggcaggaaggggtttccctgccctctcacctgcccctcaccaaggcagaggagagggtcctcaagaaggtcaggaggaaaatccgtaacaagcagtcagctcaggacagtcggcggcggaagaaggagtacattgatgggctggagagcagggtggcagcctgttctgcacagaaccaagaattacagaaaaaagtccaggagctggagaggcacaacatctccttggtagctcagctccgccagctgcagacgctaattgctcaaacttccaacaaagctgcccagaccagcacttgtgttttgattcttcttttttccctggctctcatcatcctgcccagcttcagtccattccagagtcgaccagaagctgggtctgaggattaccagcctcacggagtgacttccagaaatatcctgacccacaaggacgtaacagaaaatctggagacccaagtggtagagtccagactgagggagccacctggagccaaggatgcaaatggctcaacaaggacactgcttgagaagatgggagggaagccaagacccagtgggcgcatccggtccgtgctacatgcagatgagatgtga

SEQ ID NO: 53024 - DNA, 357 bp, Homo sapiens
  misc_feature (1)...(357): n = a,t,c or g
gcgcgggtctccgccgcctgggctcctagggactgtggcctcggcgggagcaagctcggctgaaggcccacgtcgtagaccgggacaccgaggcgtggcagcgagaccccgccttctcgggtctgcagagggtcgggggcgttgacgtgtccttcgtgaaaggggacagtgtccgcgcttgtgcttccctggtggtgctcagcttccctgagctcgaggtccttcttgtggatggaaacggggtactccaccaccgaggctttggggtggcctgccaccttggcgtccttacagacctgccgtgtgttggggtggcaagaaacttctgcangtggatgggctgganaacaacnccct

SEQ ID NO: 53025 - DNA, 535 bp, Homo sapiens
ttcttggaaaagcagatccactcaagacctcacagggtcctgacaaaggccacttccagctcagtggagtgagacactggggtgggaagatgtccattttttggatgtgggtcagtctcttgcacaggcagaggtattgcagcatgctgtttgtaatgtgtatcttccttggcagtgtctgttgaaagctggttgcatcagtttgtaatggggtgtaatggcaacaaggtgggcccagccccccccaggaagtggatcactgagcacagcttctacagggccatttgtagagaggtggcagctgggcttcccaggtggctgccacccagggcagagccagtgctgaggctctgacaacctcggcagggtggggagaaggccagactcagggtgtttatgtttgtgggtaatgacagtcagctctgggctccagatgatgcttactccctggcctctgtgttcagattaggaacttgcaacatcttgctgaggaccatgtcaggctcagctctaagtgctgtggctgagaattttc

SEQ ID NO: 53026 - DNA, 576 bp, Homo sapiens
tttttggctggaaattagatgaccaagctcggaacggagcatcagggccctcgtttgtaagcttagttttcttttattcccaacaaattccatccttttatcactgggtattagcaagtcaggtcagaactattcattatttttggccaaagacattcccactaaagaagggacacagtgtggtaaaatacattctagagataagatgaggcagagtgcgagtgagtttgctgaatgtgaagatcacaaacatggtggagtctcggccttccgtggctctgtggctttcactgcagcatctaaaatgtcaccgcctccagttctcgagttgatcaggacacgagagactctcagggatgcgacgtgtcgaaatcgtcgaacgaccttgttttctccaggattcattctccacttttctctcgtccgtttgcaatatctgagaatacatagcaaggaggtaaagctgtcaccacagagcaaccttgggcgagccttggccctctcgagactttagtcatcacatctttgaaatgggtacaattttgcctcccggactcacagcaagccgctggatct

SEQ ID NO: 53027 - DNA, 972 bp, Homo sapiens
tttttttttttttttttccattcctacatatatttatttggtattgatgatgaggaaccccgtcaaaaattcctgtaagggagactactactcgactgttaggggtattgcaacatttacatacatgtagcttatcacatacgtaaacatttacacaaatagtacagcggtgaaccaccaagttctcattccacattcctttcccacactgcgtttacctgcccattcttgaaactggatctcaggggcagcacattgcatttcaacaggcctagtgctgcttctcagaggcagtcaactcaatggtgcaaaagcacaggacagcgacaaggcattcacactacacagacatgtgatctcttactgacagcaggaagggaagagagatggagatcccgggtgggaaagcgacaacatgcatcacaggagccatgtgagatgcggtgaggaccgctggtacgcagcgtcccttgccaaggaatgcctcacagccatccgagaatgacaggcacgaaacatgaggaccttcctcgggtcagtcaagcatcatgctgggaggactcccacgtgtcccggtacacaggtcctggcactcatccgaccacagcttgctgtttggtccccaaaatgggcccacacccaggcgctgccaacacggcggctccgtctgagtcccttcgggtctccatcccatgggggtgcacgtctcagttttcctctaaccactgcttgagcagcctctgaaacattattttgctctcctgctgcctctctcgctggcgcttctcctctgtctcctgtggctggagtgccgcttcaggcagaggcccgggctggttggtgcctaggctgagagtcaagccactgaggccctgcaccagcgtctcccaggaggagggatgtggggccctgttactctccccagggatcccagaaagattcggcctgtggctctggcagtatcgacattcc

SEQ ID NO: 53028 - DNA, 830 bp, Homo sapiens
ctcctggagaagccagccagggtggagctgcatcacatagttctggaaaaccccagcttctcccccttgggagtcctcctgaaaatgatccataatgccctgcgcttcattcccgtcacctctgtggtgttgctttaccaccgcgtccatcctgaggaagtcaccttccacctctacctgatcccaagtgactgctccattcggaaggccatagatgatctagaaatgaaattccagtttgtgcgaatccacaagccacccccgctgaccccactttatatgggctgtcgttacactgtgtctgggtctggttcagggatgctggaaatactccccaaggaactgggagctctgctatcgaagccctggggagaagaccagctgttctcggagttctacgttggccacttgggatcagggatcaggctgcaagtgaaagacaagaaagatgagactctggtgtgggaggccttggtgaaaccaggagatctcatgcctgcaactactctgatccctccagcccgcataggaaggaacaccagccagccgtggaacctcaggtgcaacagagacgccaggagatactagtgcccagcacgtgcggcagtaccaatgaagccagagagggcttggtggatgacaaggaggcctgagtagaccgcaggtgggtctgagaaatgggcttaggtgaggcaggtctttgaaggatttgttcttaatcatatgcgagatgctcaaaaggctggatgcctgcttttgtgggtgaagagcaagaagagaaaacaggttgtacacatacagatgcagatggagagacagagaaaaaaaaa

SEQ ID NO: 53029 - DNA, 362 bp, Homo sapiens
  misc_feature (1)...(362): n = a,t,c or g
cagtgataaagatcagaaatgattgtgttgtcaaggaagtgacctgtgactgcacagaaccccatctttgtganaaagcnacccncttttaagtgcncatcagagaggctttacncagtgactggctgcaagcaggacaaccgtgagcagcattttgcttgttgaaggcncaggtcctngtcatcctgananaggagagtccctgtgtgcgacctttgaaaaactgtcagctgtcataaatntgnctgcagtttcagcctgatcttttttttttgaaagtcccagactcttggggcacccctgaatatcttgatgtgcctactccttctgcaagaagtcagatttccaagcccacgcgtccg

SEQ ID NO: 53030 - DNA, 734 bp, Homo sapiens
tttgaaatcttgccaaaagggttgatttttaattatgtgtatatacaaacttctctattttaacattcaacatattcaggattaattctagaaagatgctatagctgatttataaaacaaaatgatttaggatcagaaagaaaataggggcacacaatttcatgtagtctctccctaactacccccaaccatagcatcacaaggtttttttttttttcctaatgccacaattgaaacctgtattaacttaaaagttgacactaaaggcaggaattaagaagtcattttttatggcttttaagcacttgaatgctttagaacccccttgaaaatgctagtgaacaggtcttattcctttaaatgttgctttgatttgaatcttggtgaaatctagattccctattaaatagctgcatgctaattttggagaaagtacaatttaaaacctttaacaactactctattgactctgaagaaggggactttagcatgtcgctgtttgggctagagaagcatttcaacacctttctgcaaactaagataaaaaacaatgaatgagagctacaaatagaaatctagtaaggcagttctatcatgtaggaaaatggtttcccaaatgttttctacactgacattttttaaaaaagatatgatacccggttcttccacattcagtgtataaaactcaactttagacatgtatgtgcggagaagactcgtatgtccaaaaccat

SEQ ID NO: 53031 - DNA, 179 bp, Homo sapiens
ccctgggacacctttgttccagcctggtttcctgggctgggctcaggaaagctgccaaattcagtcctatgttgggtccaagctgcccctgtgctgtttctgtcaagccaggtgtggacattccaagttcatatgcgtgaacaaaagaaaagaggaacccagtggatgtaacagaaccg

SEQ ID NO: 53032 - DNA, 568 bp, Homo sapiens
aagaggacagcaattcagcttccaggccaaagcagtttagacaaggtgtgcccatcaggactccctctcaggccctggctgtttaccatgtcactgcctactgtgacttcatgcccttttgggataagaaaccacaaaacgcatggaacaactatccatggctcttagccagaaatgtcttgcctctggtctctgaaaagctggggtgagtggttacctcaaagacaattgcctccagtttgggggctcctctcaggggttcaccctgtcaccggggcgtgggaccgacctgggaaatttccactagagttttgccctcagctcctccctgccagcatcccagtcaccaccaggtggcgcttctgacacggtccacgtgcctggctctgaaggcccaactgtcagaccagacccctcactcatggtggggagacttgacttcctcgggctcttcaggagactgagacagagaagacaagtgaaagcgcagcctgtacatgactctctgtggtccacgtcctgcctctccctggggtttacacggccccaataaagcctgctctggcca

SEQ ID NO: 53033 - DNA, 820 bp, Homo sapiens
  misc_feature (1)...(820): n = a,t,c or g
ggtcttttagctgagcaggtgacgccgaaatttgggcttttttattttgtagtaagggttttgagagagcgttccggacttaatctcttcagcagcctcttgcataaatcacattgatactccttttcctgcctccagttgttttcacgtctgtatttttctcctgttatatttacatgttcagtttttatttaacctttgaggaatggaaatgaaggttgtgtctataagtcgaggttccagatataaaattctgtcttcctttttgatcattaacttgtttgtttcagaatatttggtgaatgcaactgtgatgatactagtgtgaataacaacggaagacactcacttggctttggctaggtgtagtgttgactacagaggtgtttaaaaagtggcctgagggccggcctgttagagctcttttggctgtggaagctaatttgtgctgaatgtggtgcctacagaaaaacccttcagaggtcatacagtgtgtactctttctgccggtcagttgaggctccttacctagcttagcaagaggtttctgccctggtcctcaacataaccagagaaagtaaatggggaaactttatcctggaaaattattcaaaagcaggaaataaatcaccttggttagcattttaataatttatccatgagactatttacaagttactactttgtcaattcaacaaatatttattgtctatactcttctaggcagtggggtgaacaacacaggccaagttcctgttttcatggaacttatgttctgatgttgggaggcaaataacaaacaacaaacatanccggngcg

SEQ ID NO: 53034 - DNA, 878 bp, Homo sapiens
gtttatacataacattagaatgagtagctgtagttgtgtggacatttataaaacaagttcctttcctggaacagacacaatatacattctgtagctaaaaaggagggaaaagtctgtgaatgctatttttattattaaagttttccatacaaagcatacattgagctgtagtaaggctgaggaagagtacaactgaataatgatgttctttttcatcaagttcctaagagctgacttggagattttattcccagggctccactgctaggattcttctcactagttctaacaaaatctgtgatgttaaatgactgatgctctcaattgtgatccagagttttaaataaatgaaatcaaggtggattttgggaatatatcctgaagttaacatcttgatgtccttcttgttgtaagatgatatttggcaatttaaaatctatgtgctacccacctgggcttgtctcaatccgtggactttttggtgtggcagtttcacctgaattccacacatcagatttgtttggaaatattgtactgtacagggactatgcattatgcagaaagatatagttttctttgaactgctgtaaccttaaattggaaactgattcttgtgagcctactttccttaatcccgccgcccccctccgcccacttaatgtaaatgtcttgatgagagataatggatgagtattttgtatgatgaaatcaaacgatttaggaatttgtctccctccgttacacagttgatgcctgaaagaatgttgggggggaggactcaacaccctaattgtattttttaagtttcttttgtgaaagattttttaatgcatttttactgtaaaaatacatggaaatgtatgcattccacaaccaaa

SEQ ID NO: 53035 - DNA, 386 bp, Homo sapiens
tctttctgcttaccttttaaactgaacatttcattgtgcaagaagacacttcatcccacattgtgaaaatattggtcactgttatcagatttcatttagtttaggtatcttcatactgtattttgtatcaaaacagcaataaggttttctttatccctctttcctacatcttctcttcacctatcccttgtaaatgtgtttgtgaagcagtataaaatggttgccttttccatgccttcctttctccttgggtgatgtgcaatccatcgtaggctgatcggcccatttcaacactgtgagactgagggtacattaaaggaaatggtgtatatgatccctatgaaacgattctttggcttttgttaaaaacaaaacgggtttggtct

SEQ ID NO: 53036 - DNA, 1917 bp, Homo sapiens
ttttttttttttgcgctggttagatcaggatttctttttattcctcgttggtttaaaatggctaatcagaataaaaaataaaagggcctctttgtggaggctgggatctcccctatttagaggttagaacccaggtatcccctctacccagcaccatagtgaggtgggctgaggggtaacccccaagggacaatcggaggggcctaggcctgccactccttctctctatcccccgtttttggcatgtgatgaaaaatattgctttttggattcttctctcctggccttggattttaaaatcaagttaactgtgtaagctaggggaggctccaaggggccagtaggagcacactctaatccctctcccccaaggaggggattatccaatattgtttgagctaggccaagttattttcctgatctcccaccaccaccagtgtcttgaagttttgacccctttcctaggaaaaaaaatgccaatgagcctagaaaactaattctcctctccaagtccttccctcttgtgaccaaaattccagactcgcctctccccaggcttcttcctaatcacacttagcaccagcagaggatgctatttccgtagttagtaactgggacaaatgagagggaaccacaggaaaaagctgacgtctcccctcttttcctgctggtctgaggaatgggaagagtaagatccccctccgtatatgtatccctccctcattttcccatcccaggatagatatataatttctttgatatttataatatatatatatatatattatatgtacacacacacctggtaacgcagaagaggaaaaaaatagaatccgtaacaataataaaaaaaattatttctggtttaaaaatgatctggttccctccagggcgagcaattgcacaaatgtccactgagtctggtccagggatcaaggaagggaaggtcttaaaagataaaagggggggttgctaccccagtctcagggccccaactctccgactccccaagcctactgcattttagaaaacactcctcatcctcttggaatcggtggtttaaaaaatgtccatgcacgggaggggagccccttgagggaaggaaggtggccacctggggccctttggtgtaggcgcagaggcgttggggaggggaggtccgaaggctcacaccgaaatctcataggtggtaccaccaacccctgacaccttcttgactcctcccctcgtggggctactgagaggtggctgcctgggccaggggaggctgagcctaagctcttgggctgcccgttggatttgctgtaggtggtcttcagctgtacttcatctttgggtgtcagtaatggctgcaaggccacttcttctgtctcagagacaccaggttgggctttttggctgctgtaagacatcgatcggcccaggtatggggctgttgggcctggttcaggggaccctactccccggccccttagcccatctggcttgccaaaacgggggacagctgggcgtcccagtggagtcttgcccaaaggtgatctctttgaatcatctgaggaggaactagtacgaggggcatggcccgagcctggtgttgactgaatgcctgagtcccccaagcctggttcttcctcacggcccgggagtgggggtgactggcgcagcaacttctctcgttcctggagagaggccacaatgtggcgcgacagattgtcgtaacggactggtgagggctctcggtgtgttgggccagttggcaccaaacgtgggtgcctctcagcttcccgttgctgggccagcctggctgacaggaagggagaggtatagcctaaaggtgggtctggctcgccctgcctgcactgactcaaaatcagggctgtctgaaggtgtgagcaagctgtcataagataggcttcc

SEQ ID NO: 53037 - DNA, 2238 bp, Homo sapiens
aatttatactcctggataacggaatttattacatttacatactctaagttcaagaatgatttactcacaatttagtaatgactttggaaagtacagtaaaatgtgtgagcagttttagttacattattatttgttggagtctaaagtactccacaggtgttttgatacatgcctgtttggggttagcaatgtacttttctggttaaacatcaatgggggttacacatttatcttctcaacaaaacaggctcctctaatatatgtaaatatgactggtcacctttttctcttaagctaaatgtgatagttctggctttgcttatttgctttctagcagcctccccatgttagtcttgccacatggtcagtcttctgtttggtaggttttataaatcctaaaagttctagttcagaaacagctctaataaaccgagcatggataatttcattcatttcttctgaggttgcagaatttgcatccattttttcagcagctgtcacaactgttgcaaaagcctctgaccagtccacgaggttgatgagcctgctacactctaggtgcagtttgtatgctatgcagatgtctggggcgatattcggaatgcagccttcttcgcttttcagtgcttcattcttgagataatagtaaggattgttgagtgcagtatggagggcaattcgcggagcagcatttaaatgctcacgaagggcatgggcagcactgaagtacaccacctcatggagaggctgtgtctcaggaggcagaaggtattctctcactagacagtcaatgaagttcacaacattttctctgagtacttcaaatttggtttgcttctaacttcttctaaactccttcatttccaataaggacttctgaagatgatagaggtctgtcttctgaagcccctttggctgtgacccagaagcatcttcttcttctttggtttcatcgaggctctgaaactgggccaggaactcctctattctcttagctgtgctgccaaggtggttttcacaataagacttaaaaaccttgaaacatttctcaagtatggtcatcagttcatcctttgccaacatcctcagcagctgcaagactgatgcatactcctctgaatcccatatgttcttttctaaacatgtacagtacaactctctgatctgtcgacctagtggatacttgggaagagaagaggtgaacttatgaagacatctcaaaaccaggaagtaattcatatgataaacatgcaggttttctagtaataattgtgtttcctccttcaaatatctctcattggtcaagagcgcaacttgcttttctgaagcttgcttttccacgtacctagaattttctccattccatacctcctaaaagatggtagacgtcggatgttttcacattgattatttgataaaaaatttattcttcttttggcttctggaagattacagcacaggacacttaagggctgggaatagaaatgctctaatagagaaagctgaagtccttttataaagttttgaactgagaaatcatgatacaaaaagatgttggtcagaacctgtaatactttttcatttattttaaagggaaactgagttgtaagaagtagcttatcgagtaccgtagtcaggtgctccttacaagacaaagaatggaacagtcctagccacaatagagaggatactgccatgaggaagcaatcggtggatgataataggagatgtggctaatcccaaaaatgagtattagtggaaattcatggagatgttgactgctgataattatgaagtcttgtagtacttttgtgggcaaagctttccatatccttcaagataacgacaacaggaggagactgccattggctagaagtagtcctttttttgccttagcatttttgggtccgtcttctgtgtgacagtcatataccaactggaaagtgaatccattgaataatgtgtctttctttgggtgacgtgaacactttcctcctctttggattttatatctacacagcagtccatcaactgtgagatcaacttttgcaaaaaaatgtttcatatctggacaatctttagcttgcaatgagactacatatggtgtgacattattctgaagggcctctgttagacttccgaatgtcaaatcatgatctgtgacattcacaccaagaacaagagcagcagttggaatttctctgagttttatttgaccgcccaagtctcttgaattct

SEQ ID NO: 53038 - DNA, 1823 bp, Homo sapiens
tttcaatttaaattaaacttcctttaatgaaataaaaaacaaatggtgcattgcataatatttgtggtcacagtataaaacaatacaattagttcatataacattggatatggacaaaaatacacaagatcctttctttgtctacggaaaattctgcagatccttatgtgccacacttaaaaagaaagtcagcgttttctcttctagggatctgcacacatatttatcactgagaatttggtcaaacagtggaggagaacttacccaaatcccaggttcccttcttcctctgttgtcatcggtgaagctaaaaaaaagttttctgaaagtagcaagttgtgtagtattgcttattattcctgccaaaaaggctcagtctttggctcacagatgtcagtgacaaaatcatgggctgcaggcagtctgcaaagcaagaagcaagggccaccggggaaacaaacgaaggtctgggcaggaggggcctcctctaccaagatctcagggagcccctcagatggtgagggtgagggggggaaagacactcaaataaatacatttttaaattaaaatttagcccagttggtgagtcagagttctactgtcccatgaaacatctcaacagttgttaaaaagtcgatttgcattttttttcaaagtgaaaacgtgtatgtaaacatcataaagtaaacaatttacaggaatttcgaggcttctatctgaacatagcttaggctctttctggggctatttttatgattaggaaaaaaaatcccaaacttttataaagttcctttttgttaagaagtgcaattccacctgtgtgagacgcggctgggtctctctttcattcacaccagtgctgctggtaggaacctgttctagaagagcacttgtcgcaggggtggggtggggagccctatttggtacaacaaaagagtgcatctcaccacattaaaaatacacattcctggaaatttatatccctagaaggaactaggtccttggtacaatgccctgggatttctcgccccttcctgccagccctcaggtgacatgcagcttgggcagcccagtggacatggggcaggtgggtggaggtcaatgccttaacaactccagccctgaactgcagcatcagtatgaaaggaaaaggtacagtgtgtaagcacccatcacatttaccaccatcgagtgtctgctgtgactcagtccatggttttacacacacccggtcaggtccaaagctaagcaccctttcttcctactaagaagggcctgtgccaataaaatcctgaatctccttttaatagatgcaagggctgaaagggcactggctgttactaatacagcacctgtttaaatatctgttctctctttaattctcacttgtacaatcacctacaagctgcctcttctgaaatagcagttaggatatgttatgacatgcagaaaatacccaaatctagtgccaacaaggcctcgtcctcttcctctagtcactcaggccctggtggggtatacttgttgcccgtcttcccaccacaggcccgggccaaggaaaggctactgtcaatgcagaatctaatgtttctaccatgtgcatggtccccttggtggggaaaactcaatgggaatctgcttccaggggcgactcggtgataagtgcagaaccggctgtgggggagcagggggaaatggtgagccaggaggagcacaactcatccggcccatggtgacaaagagctgcacatgaatggccatcattttgtattagtttattgctcaaaacaaatgaatctttttttcccctttggaagagagag

SEQ ID NO: 53039 - DNA, 335 bp, Homo sapiens
cgccaggttccgatcctgttgtgtagttaatttctggtgtggtcttgagtaaggtaccccacctttatctgtaaccatctagtcaggtgatctctttagccattccagtgcccgggctctattagagttagttctaaggcattcatacttcttgcttagggcgtttctgcctttgatccctcatccccaggtgctagtgtatgagttgttgggaaagggctttcgagggggtgggggccaatggaaggctctgttgggacggcaccaggcgaggctcaaggcttgagtttggctcggctcaaggttcatcggggtgtgagccggaatgaggacct

SEQ ID NO: 53040 - DNA, 197 bp, Homo sapiens
ggcacgagcacccctatagctgcttaaatactttccaaatccagctgcactcctagccagggaaggtgaagggatgcacagaggtgggggaggggtactgtgcagggtactcagcatccctgaccaccaggtgccaatgatcagcggacgtggtctggggcacacaggaggcaccttggataagctggagtctattc

SEQ ID NO: 53041 - DNA, 392 bp, Homo sapiens
cggagattcagaaagcggtcggagcccagttcggactatgatctgtcaccagccaagcaggagccaaagcccttcgaccgcttgcagcaactgcgtaccagcctcccagtccacacagctgccatgctcaagttcccctcaggagaccacccagtctcgccctatgccgccggaagcacggagacttattgtcaataagaacgctggcgagacccttctgcagcgggcagccaggcttggctatgaggaagtggtcctgtactgcttagagaacaagatttgtgatgtaaatcatcgggacaacgcaggttactgcgcccgtgcatgaagcttgtgctaggggctggctcaacattgtgcgacacctccttgaatatggcgctgatgtcaac

SEQ ID NO: 53042 - DNA, 896 bp, Homo sapiens
cataaataataaatgaaagattttattcatctttgtagataacaagcactcaaaggttaatgagtgaaggagataaccatctcctccaaacaaagaggctcttaataacgcagaagcaaaaatctttccacttttagatgaaaacaaactaaaaaataacttcaggcttcagatatggaaataaagcaccatttttcaaatggtagacttggcttacttaaaataagtaaatagccccagactatctgaaaaagaaaaacatttcaatgccccttgtgagttctaattacatggctacatgttaaggaacatctcagatctctctctgaacctactagtaaacaaaaattatacagatatatatacaaatgtagtcttccatttcatttttcatttgcacaagcttccagctatttaaccaggtgacaaatcaaagtgacaagatgcactaatattcgtgagaactttaaattttaaaagctagtatttaattacccttagtgagctcatttacttacattaaaaattatgcgatcagtcatgatttttctttagaccatttaataatacacatggactaacatttatcatgctttgttcaggacctccttacaatcatatcccttgtatgacttactcttcacataatcccttgccagtaaaagtgaagaccgaagattgacctgacagacaggtccctttactaacctttgcaatcttgtaccacttcataaaataatgcttactctaaaccactacagactagtttggaaataaatggaccttttcctcagaaataatcaatctttcctggtgtagtaattgaacacttgactttaaccttcatttattatcactttattattaatagaacatcccagggaatagactcccaa

SEQ ID NO: 53043 - DNA, 3194 bp, Homo sapiens
cgcccggagtcggagccgggagcgctagcggcagccggatcgcagcctgcggggcccgccgcagccatgggcaaccgcggcatggaagatctcatcccgctggtcaaccggctgcaagacgccttctctgccatcggccagaacgcggacctcgacctgccgcagatcgctgtggtgggcggccagagcgccggcaagagctcggtgctcgagaatttcgtaggcagggacttcttgcctcgaggatctggcattgtcacccgacgtcccctggtcttgcagctggtcaatgcaaccacagaatatgccgagttcctgcactgcaagggaaagaaattcaccgacttcgaggaggtgcgccttgagatcgaggccgagaccgacagggtcaccggcaccaacaagggcatctcgccggtgcctatcaacctccgcgtctactcgccgcacgtgctgaacctgaccctggtggacctgcccggaatgaccaaggtcccggtgggggaccaacctcccgacatcgagttccagatccgagacatgcttatgcagtttgtcaccaaggagaactgcctcatcctggccgtgtcccccgccaactctgacctggccaattctgacgccctcaaggtcgccaaggaggtggacccccagggccagcgcaccatcggggtcatcaccaagctggacctgatggacgagggcacagatgcccgtgatgtgctggagaacaagctgctccccctgcgcagaggctacattggagtggtgaaccggagccagaaggacattgatggcaagaaggacattaccgccgccttggctgctgaacgaaagttcttcctctcccatccatcttatcgccacttggctgaccgtatgggcacgccctacctgcagaaggtcctcaatcagcaactgacgaaccacatccgggacacactgccggggctgcggaacaagctgcagagccagctactgtccattgagaaggaggtggaggaatacaagaacttccgccctgatgacccagctcgcaagaccaaggccctgctgcagatggtccagcagtttgccgtagactttgagaagcgcattgagggctcaggagatcagatcgacacctacgaactgtcagggggagcccgcattaaccgaatcttccacgagcgcttccctttcgagctggtcaagatggagtttgatgagaaggaactccgaagggagatcagctatgctatcaagaatatccatggcattagaacggggctgtttaccccagacatggcctttgagaccattgtgaaaaagcaggtgaagaagatccgagaaccgtgtctcaagtgtgtggacatggttatctcggagctaatcagcaccgttagacagtgcaccaagaagctccagcagtacccgcggctacgggaggagatggagcgcatcgtgaccacccacatccgggagcgcgagggccgcactaaggagcaggtcatgcttctcatcgatatcgagctggcttacatgaacaccaaccatgaggacttcataggctttgccaatgctcagcagaggagcaaccagatgaacaagaagaagacttcagggaaccaggatgagattctggtcatccgcaagggctggctgactatcaataatattggcatcatgaaagggggctccaaggagtactggtttgtgctgactgctgagaatctgtcctggtacaaggatgatgaggagaaagagaagaaatacatgctgtctgtggacaacctcaagctgcgggacgtggagaagggctttatgtcgagcaagcatatctttgccctctttaacacggagcagaggaatgtctacaaggattatcggcagctggagctagcctgtgagacacaggaggaggtggacagctggaaggcctccttcctgagggctggcgtgtaccctgagcgtgttggggacaaagagaaagccagcgagaccgaggagaatggctccgacagcttcatgcattccatggacccacagctggaacggtcaagtgagcaccatgccggaatcttgtggactcatacatggccattgtcaacaagaccgtgagggacctcatgcccaagaccatcatgcacctcatgattaacaataccaaggagttcatcttctcggagctgctggccaacctgtactcgtgtggggaccagaacacgctgatggaggagtcggcggagcaggcacagcggcgcgacgagcatgctgcgcatgtaccacgcactgaaggaggcgctcagcatcatcggcaacatcaacacgaccaccgtcagcacgcccatgcccccgcccgtggacgactcctggctgcaggtgcagagcgtaccggccggacgcaggtcgcccacgtccagccccacgccgcagcgccgagcccccgccgtgcccccagcccggcccgggtcgcggggccctgctcctgggcctccgcctgctgggtccgccctggggggggcgccccccgtgccctccaggccgggggcttcccctgaccctttcggccctccccctcaggtgccctcgcgccccaaccgcgccccgcccggggtccccagccagccgatcgggtcaggcaagtccatcccgtcctgagagccccaggccccccttcgacctctaaacagatccctcctcttctcggagacctccctttccaagcctgcctggacggctgttctgtgacttgacagtggctcccccagccccaaagccagcccccttcatctgtgacttaatctgttgtagtggtgagctgatacattcaggtgtgaccgttggtgaaaacttgtgccccttctgtggtatgcccttgccctgttctataaatatctataaatactcatatatatacacacctacacatggccaaccgcctcgcctctagcgctgggaatcagtcactgtgctatccttgtggagtcttgtggcccaactaccagagaacgctgtcccccgacatcccactccaaagtgtgccacctccagtgagcctccttgtcatgcccggcctgtggacagccagcccccgccatccctcccaccccctaccaagcatgggggtgctgtgcaggcagccgtgtggcctgacagtttctaccagtcctgctgtccctcggctgagaataaaacccatttctggatgatgg

SEQ ID NO: 53044 - DNA, 322 bp, Homo sapiens
caaagctaggttttgggctcagtggctctgtctcttccaaggctcgattacaagaaaagcatacaaaactgaaaggaaaaagaccaaactattggatataaaaaaatatagaaaacagcacagacatctgaccccaagataaactttatttatatataaagaccaagttttatggcttcatgttatatagttggtatttgttcaggtatttattttgaatacagtccatcaagaaaacaaaacttaaaggaaaaagtttgtactgactgctaaaatttataacccactatggaagaacgaaagggtcagcatcaaattttca

SEQ ID NO: 53045 - DNA, 602 bp, Homo sapiens
tttatttggcaaggatgggggatgtgcatcaaatcttcacctctgggatttcctgaggcttggtctacttggctcaccctccacctgcatccccaccccactcctagatattaatacaaatctagccttgacaccgcctactgctccaccaccgcctacgtttttggccatcagagccttggagtttacagagcagaggccatgacattggggagcttgtttaaaaatcaatgatcagaaccccacattttagtttccttttggggagaaagaggagggccgtggaagaaaaggggtgtgcagctggagcgttattatgtctttctcagcgggcaggcatgcccgcctctccaccttctccccgccaggcacaggagccagcagctggagcgtgctctgagtttcaggggaccccccacccagactgactggggcttctgggacttctcataggaagagtcaagacctcctgcgcttctttaaaaggtgatggggctcagtgttcccagtgggcatctgggaggttgaagccggtactgtctcaggagtggaagggcaatggcccactggcctttttctcccccacgtcacagtccccattt

SEQ ID NO: 53046 - DNA, 394 bp, Homo sapiens
gtgtgtctgtgtctgtctgtgtctcgcagcggcgcgcggccccggacaagcgctggggattcccgtttgaggcgtcactactgtcactgccatcaccccacggagccacttctagaggggagtagacccggcccttcgccgggcagagaagatgttgcccctgtccatcaaagacgatgaatacaaaccacccaagttcaatttgttcggcaagatctcgggctggtttaggtctatactgtccgacaagacttcccggaacctgtttttcttcctgtgcctgaacctctctttcgcttttgtggaactactctacggcatctggagcaactgcttaggcttgatttccgactcttttcacatgtttttcgatagcactgccattttggctgga

SEQ ID NO: 53047 - DNA, 343 bp, Homo sapiens
tttttttttttactgcagcatttctcagagtttgcattatgccttgtgcattgtgaatctccaaaaatgggatacatgatactgcatttgtcaacttgaccatagaaacctcttatccaggagcctcttatagaaacactggtttggggagtattgatttgcagtttttgcctagtatctgggaaacagggtggtgattttgctttatgatccagttaatggtgagtcactttataatataaaattatttcacatttggcctttttgtttagatctgttagtcaagtgtattggtgaagaaaccaagtatgaaagcatcagacttctgtttgatggcttacag

SEQ ID NO: 53048 - DNA, 694 bp, Homo sapiens
aatagtttatgccagcaatctttgcttgaatgtttaacgatgccttcagtgtgatgctggccaatagatgattgcagtttaaaatgtcattattgtgcaggcttggataactaacattccatgatgtagcttgtttctgatgagatgattgtaggtacatttttctcattatccaatcatctgtgggatacttagttttctaatgtgccattatctatttttattctgcagttatgttcaaaatacagtacatattttaaaatagaataaattgttaaacataaaattttaaaagtagtagatgtgcgtaagaaactttggtaaaataggtatgaggtcctacccagtagcaacttctggcattcaagcaggattccactatgtaaatatctgtaatgcatttataataagttgtgtagtttgtcctgcatccatactacactatttgctaaagtctcagtgccatctcctaatgagactgacattttaaaagtctgtatggaatatccttgataattcaaggaaatatccctcctgcctaagttccaaactgggaaacattcaaattatataaatgacatttcaggactttaagtatgaagataatgggaattttattgttttgctttttaaaatgagagcatttttatttgataattttttttaaatttttaatttttaactaatttcatta

SEQ ID NO: 53049 - DNA, 332 bp, Homo sapiens
  misc_feature (1)...(332): n = a,t,c or g
attttataattccaaaacgtctagtttcaaatgcttcagagaattttgtaacttaagtttcatatagnnnnnnnnnnnnnnnnnnnnnnnnnnnnnnnnnnnnnnnnnnnnnnnnnnnnnnnnnnnnnnnnnnnnnnnnnnnnnnnnnnnnnnnnnnnnnnnnnnnnnnnnnnnnnnnnnagacatatnnnnnnnnnnnnnnnnnnnnnnnnnnnnnnnnnnnnnnnnnnnnnnnnngcnnnnnnnnnnnnnnnnnnnnnnnnnnnnnnnnnnnnnnnnnnnnnnnnnnnnnnnnnnnnnnnnnnnnnnnncccagtgtatagaggtgtcta

SEQ ID NO: 53050 - DNA, 334 bp, Homo sapiens
tcctgttctgagcattaatgcaaatgcagccaatgcttcaccatcaagaatgatgtttgctgtagttttgtgggaattttccttatctttctagtttgcttggaactttaggaatgagtattgaattttattaaatgctttttggtactcactgagatgatataggtcttttctcttttaaatcagttaataaattacctatcagtctatctaaaatggtgattcatcattacattcttaaggtaaagccttcttggtgatgttaaattttatgtgaatgcactacctaattcagtttactaatacgatgcagtcatatttacacaaatttagg

SEQ ID NO: 53051 - DNA, 968 bp, Homo sapiens
tttttttgtattaaagctatcattccaggctttgatcaaagatccaagaatatttgttctaccaggctggaatgaatgtggtttggaagttcagagtacatttaaaagctgcaacaagatataggtagccaacaatctcagaattttggatcagcccagatggagatagcaatttgaaatgtcttcgatcccttacttaaatgacgaaatgtctatcagcccagatagagcaatttgaaatgttttcgatcccttacttaaatgatgaaatgtatatcatactatctgtaaattggatattccattacagtgataacgtacagaattcccatgcgttattacactttcctgagagtaaagcaattagaataaccttaatcctagcaacaaagttttttttgtaggttttttttttttggtttttttttgtctttttttttgcgtttaaaacatttgggctattccctgacgatctatacatgtaaatttgattgctaaacattgtcactttgaatgtcaaactatttttaatctattgattttgattaaaaatcataatacaaacagagctaaaatcacgctaacaaaataaactaaatatgaaaagttgcattgaaagggcatcacattattcttaataggatcgtgtagaaacattccaatggcagtgttctcaaaataaaacaaaattacattagaagacctccagcctggccacttttgggaccttacctgtaactctggctggtgggtgtctttactcttgtactacatggctcacttacatcagacatcatatttgtataccctgagaaatctgacactgaagtccttactctatggtccacttctccattagagttagtgataaaggtcattggcaccctgctgcccgacttaaactgagaaccaaacgcttgtgcaaagttctcaatctgatacgttgttctaggctctatgtctttctg

SEQ ID NO: 53052 - DNA, 795 bp, Homo sapiens
  misc_feature (1)...(795): n = a,t,c or g
gtcaggctgagacctctctctcgggcattaatgaacagctagtgccctgtccctgccgccaggacccactgaaaggacgggtagccacacacatccctgagtagtcccagcctcatttgtcatttttgactcctgctttctcaaaggtttttgcctctgtcaatacagcatcatgggtggttggaaagaagggaacttcccttctggaccaagaacagcccctaagtcattagggttcaacctcacccttattcccctccccgctacaggagcccctaagtcattagggctcaacctcacccttattcccctccctactacaggagggattttcttgaagggtcagctattgcactgtgctgggaggctggctgtggctcctgtttgtgaagagaactcccagttccttttcacagccgctgagaacacatccacacatctaccccacggccttgtcttggaactgctcctgctatccccacaccctgcttcctcaccccactggctcttgggcaaatgactgttggtaccagggaccctggggggtctcccctacaaagcagaccagcctgggggcagatatacctaccacagggagccccctgtctttcataggccaaggatccacatacccattaggagtttcatgggattttaggagggtctagggaatctcttggaaattgtccctaaaatactggcatgtgtgtggcattacatggcatttttccggggggaaaaagttccatgggnttcttaaaaggaggttccctggattcccccaaaggggccttg

SEQ ID NO: 53053 - DNA, 479 bp, Homo sapiens
attttttgggataaaactgactgataaaactggaaatgttgctcgggctgttaactggcaggaaagatttcagcatctgaatgagtcccagcacaactatttaagaatcactcgtattcttaaaagccttggtgagcttggatatgaaagttttaaatctcctcttgtaaaatttattcttcatgaagctcttgtggagaatactattcccaatattaaggcagagtgctctaggagtattttgtttatacaattagagacagaagagaaaggagaaagctcctgcggttcgcccagaaacactacacgccttcagagaactttatctggggaccgcctcgaaaagaacagtcggagggaagcaaagcccagaaaatgtcttcccctctcgcctccagtcataacagtcaaacttctatgcacaaaaaagccaaggactccaaaaattcctcctcagctgttcatttaaatagcaaaag

SEQ ID NO: 53054 - DNA, 839 bp, Homo sapiens
ggggcctttggagcctacccaaaaacttttgccccagccctacctcttttgaaacctgaagctttggtaaatttagggaaagggatggatttccccagattctactttgaaaatgcttgtccaaaagcaataaaccaatccacactattattctaaaccctcatgtacatctggtaggggatgatgccgcctgcatagcatatattaggctcacacagtacatggatggcagtggaatgccaaagacaatgcagtcagaagagactcgtgtgtgcaccgccgggatggaaagtggcagaatgttcattttcatcgctcggggtcaccaacagtacccatcaactaaatttcaacagtgccacttctgcattctctgttctcaaggcacctggatggtgaccctgggccgtcctctcctcctcttcatgcatgtttctgagtgcatgaagttgtgaaggtcctacatgtaatgcatatgtgatgcatcatcttatcatatattccttcctatacattgtttacacttcaactacggggatgttccacacaaacttaaattactgttggcaaaacaatagggggagattagacaaaaaaaaaaatccacaatattccaagtacaactcttcatcaagtttctctgttaatgccaagatttaacagacttaagaactattgttctctgaatgacagttgtaagagaaatgtaaattttttagaactctttgctgttaatctgttttggtttgtttggtttttttttttctttttttaaggtaaaaaaaaaatacacccttcagtttcccggggggtgatcccggggtaaaatgggtggtttt

SEQ ID NO: 53055 - DNA, 487 bp, Homo sapiens
ctattcggatcttgggaagtctacggctccacagaaaggcaacatgggcttagtcaactatgtggggcgctgcggggccctgggcaagatgagctgcctcctccgaatgctgtccccctttgagctggtgcagttcgacatggaggcggcggagcctgtgagggacaatcagggcttctgcatccctgtagggctaggggagccggggctgctgctgaccaaggtggtaagccagcaacccttcgtgggctaccgcggcccccgagagctgtcggaacggaagctggtgcgcaacgtgcgggcaatcgggcgacgtttactacaacaccggggacgtactggccatggaccgcgaaggcttcctctacttccgcgaccgcctcggggacaccttccggatggaagggtcgagaacgtgtccacgcacgaggttgagggcgtgttgtcgcaggtggacttcttgcaacaggttaacgtgtatgggcgt

SEQ ID NO: 53056 - DNA, 594 bp, Homo sapiens
tttccaccagatcttctttcctttccttgtgctttcctcaagctgcaggcttgatcccagcccacaaatatgagagaattctggaaagtgccctgagaaatgggttctgggtttttttttcatttttatttttttaaatgtcccaggctgccttcctgtcctcccatcctgcatcctgctttctgttccctggataccgtaggatggttttatttcagttcatgcacaaattagtctggacactgtggagtcataacaagagtgggatggaggttccagggccaatcagtttctttggagggaagcttgagaagtaggttagagcaatgcccacaaaagccactgcttctccttcccatccccagcaatgagctaagagccaacctcagccagagagagggtctttgatcacagagggtcagtcagtgggatgtgattagtgggtttggggatggagtcccagggttaaaccagagggcaaagggatcctctgagtcctggcttaagggaatggggtttcaagttgagggttggggacttagggcaggggagcagcaaggtgaggaaaacagaaaggctggcatggcgagcatc

SEQ ID NO: 53057 - DNA, 1055 bp, Homo sapiens
ctgccaggcctccttcgccccgtcccgtccgcgcagcgtccaggcccgcccgcagccagcttctctcgggagcccccacccaggcgcaaggctccatgaagcaggaggaggaggcagagcgcgagaggtcccgtccgccccagccgcgtctgggccaggataaaagcaaaaccatattcctgctgctgtcagttatgatgcactgagaaaacttcagagacctaaactttttccagagaagagaagctttactggtgttccagccctaagaaacctttgttcaagaaaacggcagatgctctgttgaatccactggagattgtcctgatactaaggacaagtatcaaccatctttcctgtgaaaaattccctctcgtactttagttctgtggatccaaaatttatagcattcttctaccaccacaggggctcatatgacattaacagacaagacacttttcagaaagacaggcaacgtgttggaccttccggagcttctcagaagacagagggttttcttttgaggtaaatttgatagtacattttgatagtacgggaaggcgaatacggcatggtgacagaaaagcgccggcttggttagcaggaccacctgggcagggctgcaggctgtgccacttaccaggcaggggaccttgggccagctgcttggcctcactcaccctgtttcctcagctgcaattgggatgaacagactgcctgcttcggggttgcctaaaactcacattgcttaatgatgtgaaatgcttagcgcagtgcctggcatagagagaattctcattagatgatacctcagctgggctttaggagctacagaagaagctgcatctccatgagctcagcgtgtttctagctttcctttttgttttctattcaacctttcacccaactcagcttctcaatccctaaatgacaaaggtttgggaaggaagacttggaccgatgcttgcatttgtttctgagaattaaacgttatgttttcttcaatccaaataggtttgcttgtacagccttgttcaatggtttttttttttttt

SEQ ID NO: 53058 - DNA, 380 bp, Homo sapiens
attcctaggcacaaaattacctcattcttcctaacaagcaatctgggaccctgattttccaccttttttctcttttcttcccttcctttgttttcataagcctttgggtatctttcctgcccttttcctttgtgtactctatactggagttcccttcttcctcttgctgtaggctcaatcccataccgacatctacaactaatctttcccatcaactctgtgtgaaggcaggttgcaactagaaattcagaggggcttggaatagagaaacctaaagaagcatcatcccctccatccccaacttcctcaaagcccaaagccaagggaaggataaatcaaggctcaaggcttccccagcaaagattagggaaagagacttg

SEQ ID NO: 53059 - DNA, 285 bp, Homo sapiens
agaaaatggggctggcattaatacgcattctaatgaattcaaagaaagtgctctaacacttgcttgctacaaaggccatttggatatggttcgctttctacttgaagctggtgcagatcaagagcacaaaacagatgagatgcacactgccttaatggaggcctgcatggatggacatgtagaggtggcacgtttgcttttggatagtggtgctcaagtgaacatgcctgcagattcatttgaatctccattgacgctagctgcctgtggaggacatgttgaatt

SEQ ID NO: 53060 - DNA, 238 bp, Homo sapiens
  misc_feature (1)...(238): n = a,t,c or g
agatgcttccaaacaacaatttatttttgcttggctcatgaggcacctacttattgagttttttcacctttccgatttgcttcaaatgtaggaaagaccataggaatggncaatgttgaattcttcagcaacttctcgtgtaggttgtaagaggaatcagctttgattattgttcttgaggaggtcgctgtcaacttccaatgggtcaggccactatggctcctcatcttcaaggtcc

SEQ ID NO: 53061 - DNA, 739 bp, Homo sapiens
atttgagagggcagcgttttgccagtacctatcttctttctacagaagatagctttttaagaaataagagttccacattgagtggctgtcagacacagatttcactgtgacgtaaaatacactgcagtgagaatatggtatcaccactattcatatttacatcattcccctcacacagaaaaaccaacccttttcccaaaaagtcaagaatactgctatacctttattattctcagcttcctccagcccttcttgtttttcctcacttgaaattgaaccttcattgtcagctaagtatatatacttttgtgttttcctggacagagtgcaagtggctcttatcagccaaggtggtgaaggttcaggaaagctgggcagcactgggccctgctcctctctgcacctgtgtgcgccatgacacacccacatgcagattcccaagtctgtctcccctcccccttagcaagtacaaggctgtgcattaactcacctcggtcctagaggagtatcctagtactgcttggcaacttctaagaccctaacttgtgaaactagggaagtaagaaaccgttcaaatttaacatctgtcttcagtcatctttaaatcgtctctctttataaacactctgctcacttagcagaaggactgaaggaactaaggaacttgctaaagagaagaagaaaacaaaagctagacttagttccagttaattctgttattcttctgaaataaaaatga

SEQ ID NO: 53062 - DNA, 1966 bp, Homo sapiens
ggacttgtggtgcgctgccagggctccgcagcgttgccggttgtattcgctggataccagagggcggaagtgcagcagggttcagctccgacctccgcgccggtgctttttgcggctgcgcgggcttcctggagtcctgctaccgcgtccccgcaggacagtgtgtcaggcgggcagcttgccccgccgccccaccggagcgcggaatctgggcgtccccaccagtgccggggagccggaaggaggagccatagcttggagtaggtttggctttggttgaaataagaatttagcctgtatgtactgctttaactcctggaagaatgacagatgacaaagatgtgcttcgagatgtgtggtttggacgaattccaacttgttttcacgctatatcaggatgagataactgaaagggaagcagaaccatactatttgcttttgccaagagtaagttatttgacgttggtaactgacaaagtgaaaaagcactttcagaaggttatgagacaagaagacattagtgagatatggtttgaatatgaaggcacaccactgaaatggcattatccaattggtttgctatttgatcttcttgcatcaagttcagctcttccttggaacatcacagtacattttaagagttttccagaaaaagaccttctgcactgtccatctaaggatgcaattgaagctcattttatgtcatgtatgaaagaagctgatgctttaaaacataaaagtcaagtaatcaatgaaatgcagaaaaaagatcacaagcaactctggatgggattgcaaaatgacagatttgaccagttttgggccatcaatcggaaactcatggaatatcctgcagaagaaaatggatttcgttatatcccctttagaatatatcagacaacgactgaaagacctttcattcagaagctgtttcgtcctgtggctgcagatggacagttgcacacactaggagatctcctcaaagaagtttgtccttctgctattgatcctgaagatggggaaaaaaagaatcaagtgatgattcatggaattgagccaatgttggaaacacctctgcagtggctgagtgaacatctgagctacccggataattttcttcatattagtatcatcccacagccaacagattgaaggatcaactatttgcctgaacagaatcatccttaaatgggatttatcagagcatgtcacccttttgcttcaatcaggtttggtggaggcaacctgaccagaaacacttcgctgctgcaagccagacaggaaaaagattccatgtcagataaggcaactgggctggtcttactttgcatcacctctgctttcctccactgccatcattaaacctcagctgtgacatgaaagacttaccggaccactgaaggtcttctgtaaaatataatgaagctgaaacctttggcctaagaagaaaatggaagtatgtgccactcgatttgtatttctgattaacaaataaacaggggtatttcctaaggtgaccatggttgaactttagctcatgaaagtggaaacattggtttaattttcaagagaattaagaaagtaaaagagaaattctgttatcaataacttgcaagtaattttttgtaaaagattgaattacagtaaacccatctttccttaacgaaaatttcctatgtttacagtctgtctattggtatgcaatcttgtaactttgataatgaacagtgagagatttttaaataaagcctctaaatatgttttgtcatttaataacatacagttttgtcacttttcaagtactttctgactcacatacagtagatcactttttactctgtgttaccattttgactggtcgtcattggcatggggtggatatagggcataggattacttgtctcagaagctgtcatagaatttcttgctgccaattaaaaaacctgtgttctttacacactaaaaa

SEQ ID NO: 53063 - DNA, 666 bp, Homo sapiens
tgtcgtccccgctttgtacttggcgctccaggcctgggtcacttcacttgagttatcagaggcaaccgtctagtttgacaaactaccggaggctcctgatagagaagggcatgggcgccaatctaggagacaaagcctgagccgctgcgggtgagccaacccaaacccatccgcgggtcttctttccagagacattttcggagccgagggcgcctctgcgagagcgctgcgaacaggttccgacgcgccggagatcgcgcgacgaatctgcgcctcgaaccctcgctttccagcagtcgccggattgctgctccacagggagccaacgcgcttgaggaccagcccagccggggctctctggatcagtaggctgtgcaggctgcgagctcgttgacgcatctcagcccactcccttgtcctcccgcctggcgaagatgtccgccaagcctgaagtcagcttagtgcgcgaggcttctcggcagatcgtggccggtggttctgcaggtaaggacagcccgccctgccccgccggaggctagtcgctttccccaccgcgtgtcctgaaaccgttgcccagacaggtctccttactgaagttctgccctcttcctcaaaattcagcgctcccggagcagtgcttgagcccctagaggcgcgagagcagag

SEQ ID NO: 53064 - DNA, 481 bp, Homo sapiens
ggagatgatctgagaactgataagaagataattctggttgaagatttacctaaccagttttatcgggattctcatactttacatgaagttctaaggaagtatgtgaggattggtcgatgtcctcttatatttataatctcggacagtctcagtggagataataatcaaaggttattgtttcccaaagaaattcaggaagagtgttctatctcaaatattagtttcaaccctgtggcaccaacaattatgatgaaatttcttaatcgaatagtgactatagaagctaacaagaatggaggaaaaattactgtccctgacaaaacttctctagagttgctctgtcagggatgttctggtgatatcagaagtgcaataaacagcctccagttttcttcttcaaaaggagaaaacaacttacggccaaggaaaaaaggaatgtctttaaaatcagatgctgtgctgtcaaaatcaaaacgaagaa

SEQ ID NO: 53065 - DNA, 722 bp, Homo sapiens
tttttttttcgctacaaatcaaaaggctttattccttatataaacccacacttagaaaaaataaatagttaataaattataggcaaaccagttggtctcagccacgcctcccactgaggtccagggcagccgctgcagcagcagacgagcgggaaggtgtggccacagcttggctcaagggcgtggtctggactggggacgaagggacagaggaggaaggcaaggtctgggtgagggcagggatgggggctaaaggtgggttcctgaggcgtgcccaggctctggcccgggcagcaggggtgaggcaggggctcagctcctcctgggcctgggtgatgcggcgtgcgaagcggctgcgatcccgagcaagctgctcccaggggccctggcgggcggcctgggccggccctgcccagacagccaggaaatggacagtgaccttctcggagaagcgcacctttctggcctttaggggagtctcagggtccggatcatgagtaggggtttctgggcgcttgagccgccttttgcagtcggaggggcagcctaggaggagcccagggaggcggtggcttctctccaggtacatagatggccactcggaaggggcagggctcagcttctccccagtcctcagcagcttcctcttcctctgtctcttttccaggtcgatatccccagcccctgaagtggccctctggtccgggtgggagggatgtggg

SEQ ID NO: 53066 - DNA, 1263 bp, Homo sapiens
ttttttttttttcatttaaaaaattttatttaatatttacatttatttttaaaataaaaattagaggaaagcccatgaactcattttccatgaacataatataatagtactcacctatctcctctacccaacttgtgttttagatgagtccttttggatctttttccccataatggcctctctccttttgctttacagtgcaatcagggcagaataacagatatgttgagtagctaatttatatttctgaagatctccataggaactcttaaggttctaaggtcttcataggtctttggcaccttggccaagtttggctttcctttgggggaattctggtcataaccacaaggttattccccagacatgcagtttggggaaattaacccggcagtagtaaacagactggattagaaaaggtggcagtcgtaataaggatattccaataaccggggaaagctacagaaggatcttgagttaggatgatgacagttacaatagaaaggagaccagtacaagagacggtgaaaacagaatggatacaatttagttgaagaattggctgtgggtgaaaagaagaaatcaaagatgcctgaagttgtgagtttcaggtagccctgagtttataatcctagttctgactcgtactatctttggatatactagctgctgactactaactgaacaaggtagtaaccttgtcatcttgtaacttacctaagtctgtttcctcctctataaaacaaactatcaaaataaagccgatgaaaagattgaagtaaaacataaaacccttagcacagtgcctagtatccattaagcagtagataaatgatggcggtcattattagggagtagggtaaaagaacagaaggtttaaaaacatgagttagccagtaaggacttttgggtggggattcggtctttctactacacattacacatacctctaagcagagaaaggggttggaggggagtttgataatgtgactaataatcctcctccccctgggggggatcttgataaaggatagccacccacatggaggcctaatataaactggattgcagaatgcacttgagctgggagcccaagcgggccaggcttcttgattcctattttatcccctttaacctaggatagctaggtctatagtgcagactcagacctaacttacactttcatttgcagctgaagtttcggaacaaagacaaagatagccagatcatattaattacacggataggcaagctgtgccgaat

SEQ ID NO: 53067 - DNA, 210 bp, Homo sapiens
  misc_feature (1)...(210): n = a,t,c or g
aaagaaaaaatttcagacatatttatttgtatttcaatttagaaactatgatctcctaagtgtattgacacagcaacctgacataaagataaagaataataagcatataacaaaatggaaacttgcaaatacctgttttttattaatttttaattatatatatttaaaaattgccaggngcagnggcttaccctgtaatccagcctttgg

SEQ ID NO: 53068 - DNA, 3170 bp, Homo sapiens
ctgtcccactcactctttcccctgccgctcctgccggcagctccaaccatgggaggccgcgtctttctcgcattctgtgtctggctgactctgccgggagctgaaacccaggactccaggggctgtgcccggtggtgccctcagaactcctcgtgtgtcaatgccaccgcctgtcgctgcaatccagggttcagctctttttctgagatcatcaccaccccgacggagacttgtgacgacatcaacgagtgtgcaacaccgtcgaaagtgtcatgcggaaaattctcggactgctggaacacagaggggagctacgactgcgtgtgcagcccgggatatgagcctgtttctgggacaaaaacattcaagaatgagagcgagaacacctgtcaagatgtggacgaatgtcagcagaacccaaggctctgtaaaagctacggcacctgcgtcaacacccttggcagctatacctgccagtgcctgcctggcttcaagttcatacctgaggatccgaaggtctgcacagatgtgaatgaatgcacctccggacaaaatccgtgccacagctccacccactgcctcaacaacgtgggcagctatcagtgtcgctgccgaccgggctggcaaccgattccggggtcccccaatggcccaaacaataccgtctgtcaagatgtggacgagtgcagctccgggcagcatcagtgtgacagctccaccgtctgcttcaacaccgtgggttcatacagctgccgctgcccgcccaggctggaagcccagacacggaatcccgaataaccaaaaggacactgtctgtgaagatatgactttctccacctggaccccgccccctggagtccacagccagacgctttcccgattcttcgacaaagtccaggacctgggcagagactccaagacaagctcagccgaggtcaccatccagaatgtcatcaaattggtggatgaactgatggaagctcctggagacgtagaggccctggcgccacctgtccggcacctcatagccacccagctgctctcaaaccttgaagatatcatgaggatcctggccaagagcctgcctaaaggccccttcacctacatttccccttcgaacacagagctgaccctgatgatccaggagcggggggacaagaacgtcactatgggtcagagcagcgcacgcatgaagctgaattgggctgtggcagctggagccgaggatccaggccccgccgtggcgggcatcctctccatccagaacatgacgacattgctggccaatgcctccttgaacctgcattccaagaagcaagccgaactggaggagatatatgaaagcagcatccgtggtgtccaactcagacgcctctctgccgtcaactccatctttctgagccacaacaacaccaaggaactcaactcccccatccttttcgccttctcccaccttgagtcctccgatggggaggcgggaagagaccctcctgccaaggacgtgatgcctgggccacggcaggagctgctctgtgccttctggaagagtgacagcgacaggggagggcactgggccaccgaggtctgccaggtgctgggcagcaagaacggcagcaccacctgccaatgcagccacctgagcagctttacgatccttatggctcattatgacgtggaggactggaagctgaccctgatcaccagggtgggactggcgctgtcactcttctgcctgctgctgtgcatcctcactttcctgctggtgcggcccatccagggctcgcgcaccaccatacacctgcacctctgcatctgcctcttcgtgggctccaccatcttcctggccggcatcgagaacgaaggcggccaggtggggctgcgctgccgcctggtggccgggctgctgcactactgtttcctggccgccttctgctggatgagcctcgaaggcctggagctctactttcttgtggtgcgcgtgttccaaggccagggcctgagtacgcgctggctctgcctgatcggctatggcgtgcccctgctcatcgtgggcgtctcggctgccatctacagcaagggctacggccgccccagatactgctggttggactttgagcagggcttcctctggagcttcttgggacctgtgaccttcatcattttgtgcaatgctgtcattttcgtgactaccgtctggaagctcactcagaagttttctgaaatcaatccagacatgaagaaattaaagaaggcgagggcgctgaccatcacggccatcgcgcagctcttcctgttgggctgcacctgggtctttggcctgttcatcttcgacgatcggagcttggtgctgacctatgtgtttaccatcctcaactgcctgcagggcgccttcctctacctgctgccactgcctgctcaacaagaaggttcgggaagaataccggaagtgggcctgcctagttgctggggggagcaagtactcagaattcacctccaccacgtctggcactggccacaatcagacccgggccctcagggcatcagagtccggcatatgaaggcgcatggttctggacggcccagcagctcctgtggccacagcagctttgtacacgaagaccatccatcctcccttcgtccaccactctactccctccaccctccctccctgatcccgtgtgccaccaggagggagtggcagctatagtctggcaccaaagtccaggacacccagtggggtggagtcggagccactggtcctgctgctggctgcctctctgctccaccttgtgacccagggtggggacaggggctggcccagggctgcaatgcagcatgttgccctggcacctgtggccagtactcgggacagactaagggcgcttgtcccatcctggacttttcctctcatgtctttgctgcagaactgaagagactaggcgctggggctcagcttccctcttaagctaagactgatgtcagaggccccatggcgaggccccttggggccactgcctgaggctcacggtacagaggcctgccctgcctggccgggcaggaggttctcactgttgtgaaggttgtagacgttgtgtaatgtgtttttatctgttaaaatttttcagtgttgacacttaaaattaaacacatgcatacagaaaaaaaaaaaa

SEQ ID NO: 53069 - DNA, 1918 bp, Homo sapiens
ctgggcccaccacgacgcctgaagtcacagctccttccaaggtttttctggagaagacagcaggagcctctcagttcttttccaggaaggaacgagggtgggagcgagatggagatcctgggtgtgtgcccagtgagccctggggccttgagttacatggaatcacccacagggttttggaggccccgagaagcgtcttcccttgagttggccaagggaataagcaagaggagacatttcctccctgccccagcactctgtcccaatccgagaagttccgaggctttcccaggggcagtctgtgtcacgctggccatttgacataaaggagacagcccctggtcccagcttgtcagctctgctgccgacttgctgacttatcaacttcctctaggtgtttccactccaccctggcctgctcagagcctcagtttacccctgcattaaaatggtggggggactggtcaaaggactcttatgtcactgcagtgtcccattctaggattgtctgaaggccagagtaggggttggggggagtgtggacaaaccccgcaaatcagagtggggaaggtgagtggtagagagggggtctctgaaggcccttggggctgacagggccaggcagcctccccagctgaggcatcattcctgggccagagtcgtgtccaccaagggacagtagccagagctcctcttcctttaccaggcaaggtgcatcccctcagccctcctggcccttcagtcttggtgccacctgggcacaggggcaagcttggtggttgtaagtccattcatctatcagagctggaacctcatccctgcacagatgaggaaaccaaggcatggagcagttcccagagtcgaatctagatctcatctgtcatccgggtcttatcctttgctctgtttttctcttcaggctctggaaaatcagatctgtgacttaatcctctccctggccctcacccacttagtttctttttcattcctgctccctgccttaactcctcctcccactgcccctgatcccaggcccaggcttttacaacctggtgctcagcttccccatcagtgaaaaggggtggctagagtaactaacctcagcaggccgtccagtcctgatagtctgtggatttcggatccttctcaggaagcttcatgtctaatggagactataattataactcctgttctgcatagagcatttgcatcaaaggctttccatacccctccctcccctggtcctcataagatccttgaagcaggttcctattcctcattggcaacatggcaaacagatcacaggagtcaaagggccttgctcaaggtccccagcttcagccccaggccctaagccagcgtcagaacagtcaatctgcatttttcatcagtcattctatagtgacatcatcccagactgccttctgtattcccctgtgtacagtctccttctgtttctaggtttagaagttcagaggtgactgtgtttctccatttccacagccaaatgggggaagaggtgaggctaggggagtgctgtgctgattctccagccatggtcagacaggtcacccaggagcctcgaggaaagccctggagggaatcacatgtgtactttttcatgaagctttttgcaaagcacatctgcgatacactagtttattgaactaatgtccaggagtagacgtgattggtggccaagttatttggggacacctaaacagatcagtgacctgaatgacttctcagaacctttaatatgccaatgtgtgtggcaaacttacaagaagggagctaagtatccagcctctcccaaacctctttgaacaaagcttctgtccctcccacacctctcacctcacaggcacatcaggctgcagaatgcgctttagaaagcattgttttagtccaggcacaa

SEQ ID NO: 53070 - DNA, 200 bp, Homo sapiens
  misc_feature (1)...(200): n = a,t,c or g
atcacatagctttctatttgttaagtataaatttaaatttaaaatcacttttttaacgaatggggggaagggatctatgagaaaggtggtatctaatttttttatggaccataaaggtttaaaagaaaataggggcacagggtgttgaggttttcangnngntnnanacctttttaaattatgttagagatgtnnatagg

SEQ ID NO: 53071 - DNA, 753 bp, Homo sapiens
tgacaccctctgcccgccctgtagctgtagtcctcccattggctagggctcttggggtcgggcaggtttcgggtgcccccagtggcctcgggttccaggcagctcgtgacaagcccctgtgctctctagaaagcccgttttggcctgagtgcggctgaggacatcaccccccggttcagggcagcctgtgagcagcaagctgtggctctgactctgcaggaggacagagcatccctgacgctttcaggggggccctcggcactggcctttgacctctccaaggtaccaggcccagaggcagcccccaggctgcgggcgctgacactgggcctggcaaaacgcgtgtggagcctggagcggcgactggcagctgcagaagagacagctgtcagcccgaggaagagcccccggcctgcagggcctcagctcttcttaccagacccagatccccagagaggtggccctggacctggagtcaggaggcggtgtccaggagagtcgctcatcaaccccgggttcaagagtaagaaaccagctggtggcgtggacttcgatgagacctgaaggtgcagcacaagcgtggccccgcggggagtccgcctatgaggggagaggcagtctttgaggcccccatcagagaccccccgccaccacctccacctgcctgtcctgggccaggactaacacggctcctcaaattccttccctgtcaaataaacagctcccttggttggaaaaaaaaaaaaaaaaaaa

SEQ ID NO: 53072 - DNA, 412 bp, Homo sapiens
  misc_feature (1)...(412): n = a,t,c or g
atttgaagatatcaaataagtcataggtaaagtcaagaaaatgatgtctaagcaaagtggaaatatcaataaagggaaaataataaaaaggaaccaaaaggaaattgtggagctgaaaagtacagtaactaaaataaaaaatttacttggaggatttaaaaacagactgtaacagacagataaatgaattagttactttaagatacaacagttgaaattagtcagtctgggaaacagaaaaaaaaaagattggagggaagagaacagagcctaaagaacctatggaacaccatcaaactgaccagagtntacactgtgggagtctcagaaaaagaagagaaagagcagattgtttgaaaaatatcagctggaaacttctcaaatttgattaaaaacatgaatataaatattc

SEQ ID NO: 53073 - DNA, 296 bp, Homo sapiens
gtaaaatgtagcacagctcataagcaattgttgaagtatggctgcctaagtgtgacaggcaggaaaaaatgctttaaggacacgttgaagcatgtccattgaggcggttagctgggaaaccacagagacaaaccaggctggaaagtaacaatcataactatatttgagacaagtcatcatcagtctaaaaaagaggcccatttcttggtgtaataaggaaattatctttttgaaaccaacaaccaacatcacggtttaatatgggaaacactcagtatttcttaatactgttaagg

SEQ ID NO: 53074 - DNA, 836 bp, Homo sapiens
tttttttttttttatacaaaaaccttttattgactgtatttcttctccccataacctggaacccagccagcatctatggcttcctgctgtctgattcttgaaagtggggccttgggaacatgtttggaggctatggaaggtgggaatctcctcacccaccggctatgcaggttgaaggaagctttcttgcctggctgaagctacggcagcttcccagggtagcccctcaagtctagaggacccatcccccactaaatgggtgtgaggaagagatgatgcatctttcagaggctttgtcactcactgctcctatcccactccagactgaggccctagagctgaaccagtctctcctgtggagatggggcccagcagcgaggggagggggttagaggtgagtgtgtgcagcagctctgggtcctcatcaacaaaaaggaaacgcaaagaggttggcaccgctgaaactgaactgaaatggaacaggagaaggaggatataggagaacaaaagatgggtttggggtagtgccacctattaagagaggacatggcccctgtgggagcaggtccttccagccccacaaacacctgggagaggaatacggtgccctggccctacttagacaaaggactaatgacacagtcaacacttttggactgagactgccaggaaagggcacccatcagcccagaaaacggcagccagccctcatctgccagacataggctaggctgcctccctggccaccaaagcccactctgggaactgtcacctctgcctccaccgttcctgccccaccacaagctctgcataccccctgccccgatggagcagat

SEQ ID NO: 53075 - DNA, 578 bp, Homo sapiens
aaataaataaataaataaattaaattttacatattatatttcatagctagaataaggatttataactaataagtccccctttgtagctggattgtttgtgcagagggaaggaaattgggatggcaatgggaacgtgtaggggttaatacactgataatggaggctaattatattttctgttttaatatctatatgatagattttttcccactttaccaggaattgcaactgcacttgaaataatctttttgtttattatgtgtcttttttcttaggctctggagacaaaattcttgctctggcaagttttgaggttgaaaaaacaaaaaaatgacatggtgcagaagcttgtaacattgatcacattcttaatgtaaatggtgtctttcttctggggttttcagttattgcaaagaaatgaagagattctggaaatgcatcaataacctaagaaaaagcgacataaaaatatacttatggcttgtgtttatgctcttcatcattgtgcgttgtgtgcggttacctgcttgagtgatcctgaacttgttgcgacagagggactcactggactcccgtcc

SEQ ID NO: 53076 - DNA, 373 bp, Homo sapiens
agattcggcatgagaaaaacaataaaaaggcagtatccactaagtgcagctgctatacttctaaagagaggtgaagtattattttttaaaagcttgccattggaggagtattttgtatccacacacacacacccatcctaatttcttatccctaatgggaaagtctatatgtaaaatggattgctttcttctgattctgaaggcaggggagaccgtggttttttgcttgttatgacaatataacacatgctgttaaatgtagttatggctgcagactatgatactgtatatcttttaaaaaggcatagccagcctgttcctatacaagatatttgattatttcaaaataactaagtacttacgagctgctttg

SEQ ID NO: 53077 - DNA, 1549 bp, Homo sapiens
gcgttctggtttcatagcaacttctaggtggtgtgggcgaagtttgggactggtttagggcggggacaagaccaagaacacaagtttccttgtacgggagagagggaggggaggaaattggagaccccagcacccccttgctcactctcttgctcacagtccacgatggcccggtccctggtgtgccttggtgtcatcatcttgctgtctgccttctccggacctggtgtcaggggtggtcctatgcccaagctggctgaccggaagctgtgtgcggaccaggagtgcagccaccctatctccatggctgtggcccttcaggactacatggcccccgactgccgattcctgaccattcaccggggccaagtggtgtatgtcttctccaagctgaagggccgtgggcggctcttctggggaggcagcgttcagggagattactatggagatctggctgctcgcctgggctatttccccagtagcattgtccgagaggaccagaccctgaaacctggcaaagtcgatgtgaagacagacacttcctcttcaaattcctggtgattggcagtgcaggaactggcaaatcatgtctccttcatcagttcattgagaataagttcaaacaggactccaaccacacaatcggcgtggagtttggatcccgggtggtcaacgtgggtgggaagactgtgaagctacagatttgggacacggctggccaggagcggtttcggtcagtgacgcggagttattaccgaggggcggctggagccctgctggtgtacgacatcaccagccgggagacatacaactcactggctgcctggctgacggatgcccgcaccctggccagccccaacatcgtggtcatcctctgtggcaacaagaaggacctggaccctgagcgggaggtcactttcctggaggcctcccgctttgcccaggagaatgagctgatgttcctggagaccagcgctctcacaggcgagaacgtggaggaggcgttcctcaagtgtgcccgcactatcctcaacaagattgactcaggcgagctagacccggagaggatgggctctggcattcagtacggggatgcgtccctccgccagcttcggcagcctcggagtgcccaggccgtggcccctcagccgtgtggctgctgagctctgtggagccagctcacctgttctccaggaccagccctgctggggcccaggcccaggctctgagaggccgtgtcctaacctgccctggccccggagaagctacgttgccacctgtcccccttccctggcctggtggggcctggctttggggcaagactgagccacgggggaagggggaatcccgtacctgctgctgcttcctctgtcttggctaacgtctgtccccctgaacccctaaccatatcccaagagctcccaaagcctgagaccagggtcatttgtccccaactccccatctggccctgctgttgctagtacctgttatttattacctggaggcctgtccagcacccaccctacccccataaagcattgtttacaaa

SEQ ID NO: 53078 - DNA, 539 bp, Homo sapiens
gctcgacactaaaatttaatgtgtcaaatgatctggtgactattataatgaataattgtgacttatttttcattctctcctgggtcatcaggtttcctgacccaactccttaatccgtataaagatgtcaaatactgtagttcacccacgccacagccctgcttcagacttaactgtggtagcctagatgagctatttgtacacagaggaaaaaaagatattttcctcttttagtaataagactttcagtatttttaatgttgacatttccagatgtttcatttagtatccaggggtctgtctggagacttctagagagggacagctcagaagtgagacccttgagctctggtgctgttaagctttttccaattaagtttgaaccagagcctgggaatttctttcctctgcacagtccccttgatatttggaatccaggtctgccccccaaccccttacccacccagtggtctgttaagatgtctcagatggggctggggcttggtgctcatgcctgtactctcaacactttgggaagc

SEQ ID NO: 53079 - DNA, 5351 bp, Homo sapiens
agtcagggttaggggcgccaggacgtggcgtgcaggacgccagagctgggtcagagctcgagccagcggcgcccggagagattcggagatgcaggcggctcggatggccgcgagcttggggcggcagctgctgaggctcgggggcggaaggtctgtgtgtgacaagagggacggtgggcagcggccctgggcaccgggccggcactgaacccccactccccacagctcgcggctcacggcgctcctggggcagccccggcccggccctgcccggcggccctatgccgggggtgccgctcaggtaagtcaccgcagccttggcaagggggtgtgggagcggcggtccgcttcggcgcccgccatcggcagggatctccctcttggtgccaggtacctgcctactgctcagtcgccgaaagtaggggaaagggcaagccagggtcgcctagggcgaaactaggggaaaggtcacccgttcgcggcctccccgcgccggtctcgcctgttctccccttgacacagcggaagtcccttccctgaacttgctaaccgtctcttttcccagctggctctggacaagtcagattcccacccctctgacgctctgaccaggaaaaaaccggccaaggcggtaggtagccccgaggccaggtggaccttagccagacccaaccagagccctgaaatttgcctctctctgcccaggaatctaagtcctttgctgtgggaatgttcaaaggccagctcaccacagatcaggtgttcccatacccgtccggtaagggaagggataatcagagctgggtggggccagggtggtttcccctgccagcctggcctgaccagcctgtcccccaccctctgcagtgctcaacgaagagcagacacagtttcttaaagagctggtggagcctgtgtcccgtttcttcgaggtaaggaatgactcggggcttggtccctggtgaggtgtttggagatgttaagctcaaaaggagcctggatgtgggatcctgtgccttccccaggaagtgaacgatcccgccaagaatgacgctctggagatggtggaggagaccacttggcagggcctcaaggagctgggggcctttggtctgcaagtgcccagtgagctgggtggtgtgggcctttgcaacacccaggtgagggcgccctatcgcacatcccagtatgccataccccagcttggcagactcagctcttttgccatagacctagagactagggctaaggtctcttctaagcacctgccctgggtgcctgtgggatggatgttaactgtccaaacataacacaatttacatgcagtcccctaggcctgagcatgggcctcaccctggttcccaagtccttacaaatctctaagttggggattgcctaacaatagactgactagtagcaagtcaccctcctacctagacctaagacagaccagcattctctgctgtgccctttgcacaccccacttcttttctacacactggggatggcccaggtcagcactgccctaggtcaggaactgccctgttgcccacactctcctgttaaggtcaggtccccctgcagccagtgacaaccccagattcctgcttcccctccagtacgcccgtttggtggagatcgtgggcatgcatgaccttggcgtgggcattaccctgggggcccatcagagcatcggtttcaaaggcatcctgctctttggcacaaaggcccagaaagaaaaatacctccccaagctggcatctggtgaggcaaccctaggagagccagggattgggggggcacactgggctgtgcacagaattaggccagttggcacttagattatcagatggctgagcatttcagttgggggaaggttttggggaggcatcacagtgtgctggttgggacatgcaaaagaactggatactcccaggtgttaagggggaactgcctgctggagggatggggaagtgggccgaggggactttgaagctcatcagaacttggggtaaagtagctgctctccccaacaggggagactgtggccgctttctgtctaaccgagccctcaagcgggtcagatgcagcctccatccgaacctctgctgtgcccagcccctgtggaaaatactataccctcaatggaagcaagctttggatcaggcaacctgcctcccatttctccccttctcctccgcccaattccaggccccactgctccccgtcctccacgccctgaatatcccattcttccacagtaatgggggcctagcagacatcttcacggtctttgccaagacaccagttacagatccagccacaggagccgtgaaggagaagatcacagcttttgtggtggagaggggcttcgggggcattacccagtgagtgaatttgggttgggggagcttaggactgaggggcaggactgggctcctgggcagatggctgttgcaagtcaccctggggacgctgtgcaaaagccaaagcaggtggactgaatgtggcctttgggactaatatgtatgcaactgagctaaagttttggctccagcaaccaagtccaacacaaaataggacatagccaggcctccttagccctcagggcctgaggggaagtggtggctgtagcctctaatagtctagtggtcgtcattcctccctggtgcataaggagcgaaggagcagtttttcccccagtgacaacctgttgaacacacctctgctttcccacactgccctgacacagtgggccccctgagaagaagatgggcatcaaggcttcaaacacagcagaggtgttctttgatggagtacgggtgccatcggagaacgtgctgggtgaggttgggagtggcttcaaggttgccatgcacatcctcaacaatggaaggtttggcatggctgcggccctggcaggtaccatgagaggcatcattgctaaggcggtgagtaccctgcccgagtccctaggtaacccaaacagaagtctcactgtcccccttgccatgtgtccctgatcacttgcaggcactccctacactagaaactcctcccctaccagcagcccgacttgctagcttaggtctccatccagcgtagactgaactctggttgtatgcaaaacccatccctctggcgcaagcccagcccctctcctagggagactgcagaaccacactgaaccacagcgggatgtgtggaccctcttccaggtagatcatgccactaatcgtacccagtttggggagaaaattcacaactttgggctgatccaggagaagctggcacggatggttatgctgcagtatgtaactgaggtgagggcctcccaagcccctctccctggagccctgggcgtttcttcccagtcgggtcagactacaacccccagcagcacctggggcagtgggtctccagctttacaccaatgccctaggggatgcggggaggcatagtcagctcagcttctgcgaagagagacagcaatgatgttctgctcaggtgcctgccagcagtaccagaagttaattctacctcatcccttacatccaccccttttaagaaaacaaatcctggaagcacctgatgaactgacccagaacaagtatctgcctgacctgacaagctaggtcagcccttatcttggagatctgggtgatgaggccaagtctgacaaagccctttgcaattttccttcccatgtcccaactatgcaacctcagtccatggcttacatggtgagtgctaacatggaccagggagccacggacttccagatagaggccgccatcagcaaaatctttggctcggtgaggtcccaggcatgctggagggagtccagtttgggtgctcagctcccaaaaccagtctcatctgttctttgtccctaggaggcagcctggaaggtgacagatgaatgcatccaaatcatggggggtatgggcttcatgaaggtacaggacggtcttctgcagagcctcggctgggccaggggtgggatggcacatctcagcacgggcatataatttgtgtggccctgtgctaggaacctggagtagagcgtgtgctccgagatcttcgcatcttccggatctttgaggggacaaatgacattcttcggctgtttgtggctctgcagggctgtatggtaagacagagaattgggtgggggtagaggtggggaggacagtgagtcctgactgctggaccctcttcccccataggacaaaggaaaggagctctctgggcttggcagtgctctaaagaatccctttgggaatgctggcctcctgctaggagaggcaggcaaacagctgaggcggtaggcttagggccagagccaggggagggcagggtggtgtatggcaactaaccagtcattctccctcttcctctcaggcgggcagggctgggcagcggcctgagtctcagcggacttgtccacccggagttgagtcggagtggcgagctggtaaggcggccaggggtccaggagagcctgcatcagggactgcagccgatggcccctctgagccccgcactgtccccatctcttaaggcagtacgggctctggagcagtttgccactgtggtggaggccaagctgataaaacacaagaaggggattgtcagtaagtgagctctacaccattccgcccctccctttcctctccttgagactaatgcccccacccccacccccaccccacctaccggacagatgaacagtttctgctgcagcggctggcagacggggccatcgacctctatgccatggtggtggttctctcgaggtgaggaggcaggcagggaatgcctgagccgcagggggcctgggcctggatcccagccggcccagatttattttcatctcctgcttcctgccagggcctcaagatccctgagtgagggccaccccacggcccagcatgagaaaatgctctgtgacacctggtgtatcgaggtgagactcggggctgccaagctcaggtgagggctggaggtgcaggcccaacccctccttccctctccccaggctgcagctcggatccgagagggcatggccgccctgcagtctgacccctggcagcaagagctctaccgcaacttcaaaagcatctccaaggccttggtggagcggggtggtgtggtcaccagcaacccacttggcttctgaatactcccggccagggcctgtcccagttatgtgccttccctcaagccaaagccgaagcccctttccttaaggccctggtttgtcccgaaggggcctagtgttcccagcactgtgcctgctctcaagagcacttactgcctcgcaaataataaaaatttctagccagtca

SEQ ID NO: 53080 - DNA, 445 bp, Homo sapiens
  misc_feature (1)...(445): n = a,t,c or g
gggagaggatgatgaggaactggtcgaggccttcctccggcgacaggagaagcagcccagcgcgccgcctgcccgccgccgcgtcaacctgccagtgcccatgtttgaggacaacctggggcctcagctgtccaaagcggacaggtggcgggagtatgtcagccaggtgtcctgggggaagctgaagcggagggtgaagggttgggcgccgagggcgggccccggggtgggcgaggcccggctggcctccaccgcagaggagagcgcaggggtatcatcggcgccagagggcaccagcccgggggatcgcttgggaaacgcgggagatgtttgtttgccccaggcttcccctaggcgatggaggcccaagatcaactnngcctcctttcggcgccgcaggaaggagcagacagcacccacaggtcanggggcagacatcgaggct

SEQ ID NO: 53081 - DNA, 4734 bp, Homo sapiens
  misc_feature (1)...(4734): n = a,t,c or g
tggcttccttgtggttcctcagtggtgcctgcaacccctggttcacctccttccaggttctggctccttccagccatggctctcagagtccttctgttaacagccttgaccttatgtcatgggttcaacttggacactgaaaacgcaatgaccttccaagagaacgcaaggggcttcgggcagagcgtggtccagcttcagggatccagggtggtggttggagccccccaggagatagtggctgccaaccaaaggggcagcctctaccagtgcgactacagcacaggctcatgcgagcccatccgcctgcaggtccccgtggaggccgtgaacatgtccctgggcctgtccctggcagccaccaccagcccccctcagctgctggcctgtggtcccaccgtgcaccagacttgcagtgagaacacgtatgtgaaagggctctgcttcctgtttggatccaacctacggcagcagccccagaagttcccagaggccctccgagggtgtcctcaagaggatagtgacattgccttcttgattgatggctctggtagcatcatcccacatgactttcggcggatgaaggagtttgtctcaactgtgatggagcaattaaaaaagtccaaaaccttgttctctttgatgcagtactctgaagaattccggattcactttaccttcaaagagttccagaacaaccctaacccaagatcactggtgaagccaataacgcagctgcttgggcggacacacacggccacgggcatccgcaaagtggtacgagagctgtttaacatcaccaacggagcccgaaagaatgcctttaagatcctagttgtcatcacggatggagaaaagtttggcgatcccttgggatatgaggatgtcatccctgaggcagacagagagggagtcattcgctacgtcattggggtgggagatgccttccgcagtgagaaatcccgccaagagcttaataccatcgcatccaagccgcctcgtgatcacgtgttccaggtgaataactttgaggctctgaagaccattcagaaccagcttcgggagaagatctttgcgatcgagggtactcagacaggaagtagcagctcctttgagcatgagatgtctcaggaaggcttcagcgctgccatcacctctaatggccccttgctgagcactgtggggagctatgactgggctggtggagtctttctatatacatcaaaggagaaaagcaccttcatcaacatgaccagagtggattcagacatgaatgatgcttacttgggttatgctgccgccatcatcttacggaaccgggtgcaaagcctggttctgggggcacctcgatatcagcacatcggcctggtagcgatgttcaggcagaacactggcatgtgggagtccaacgctaatgtcaagggcacccagatcggcgcctacttcggggcctccctctgctccgtggacgtggacagcaacggcagcaccgacctggtcctcatcggggccccccattactacgagcagacccgagggggccaggtgtccgtgtgccccttgcccagggggcagagggctcggtggcagtgtgatgctgttctctacggggagcagggccaaccctggggccgctttggggcagccctaacagtgctgggggacgtaaatggggacaagctgacggacgtggccattggggccccaggagaggaggacaaccggggtgctgtttacctgtttcacggaacctcaggatctggcatcagcccctcccatagccagcggatagcaggctccaagctctctcccaggctccagtattttggtcagtcactgagtgggggccaggacctcacaatggatggactggtagacctgactgtaggagcccaggggcacgtgctgctgctcaggtcccagccagtactgagagtcaaggcaatcatggagttcaatcccagggaagtggcaaggaatgtatttgagtgtaatgatcaggtggtgaaaggcaaggaagccggagaggtcagagtctgcctccatgtccagaagagcacacgggatcggctaagagaaggacagatccagagtgttgtgacttatgacctggctctggactccggccgcccacattcccgcgccgtcttcaatgagacaaagaacagcacacgcagacagacacaggtcttggggctgacccagacttgtgagaccctgaaactacagttgccgaattgcatcgaggacccagtgagccccattgtgctgcgcctgaacttctctctggtgggaacgccattgtctgctttcgggaacctccggccagtgctggcggaggatgctcagagactcttcacagccttgtttccctttgagaagaattgtggcaatgacaacatctgccaggatgacctcagcatcaccttcagtttcatgagcctggactgcctcgtggtgggtgggccccgggagttcaacgtgacagtgactgtgagaaatgatggtgaggactcctacaggacacaggtcaccttcttcttcccgcttgacctgtcctaccggaaggtgtccacactccagaaccagcgctcacagcgatcctggcgcctggcctgtgagtctgcctcctccaccgaagtgtctggggccttgaagagcaccagctgcagcataaaccaccccatcttcccggaaaactcagaggtcacctttaatatcacgtttgatgtagactctaaggcttcccttggaaacaaactgctcctcaaggccaatgtgaccagtgagaacaacatgcccagaaccaacaaaaccgaattccaactggagctgccggtgaaatatgctgtctacatggtggtcaccagccatggggtctccactaaatatctcaacttcacggcctcagagaataccagtcgggtcatgcagcatcaatatcaggtcagcaacctggggcagaggagcctccccatcagcctggtgttcttggtgcccgtccggctgaaccagactgtcatatgggaccgcccccaggtcaccttctccgagaacctctcgagtacgtgccacaccaaggagcgcttgccctctcactccgactttctggctgagcttcggaaggcccccgtggtgaactgctccatcgctgtctgccagagaatccagtgtgacatcccgttctttggcatccaggaagaattcaatgctaccctcaaaggcaacctctcgtttgactggtacatcaagacctcgcataaccacctcctgatcgtgagcacagctgagatcttgtttaacgattccgtgttcaccctgctgccgggacagggggcgtttgtgaggtcccagacggagaccaaagtggagccgttcgaggtccccaaccccctgccgctcatcgtgggcagctctgtcgggggactgctgctcctggccctcatcaccgccgcgctgtacaagctcggcttcttcaagcggcaatacaaggacatgatgagtgaagggggtcccccgggggccgaaccccagtagcggctccttcccgacagagctgcctctcggtggccagcaggactctgcccagaccacacgtagcccccaggctgctggacacgtcggacagcgaagtatccccgacaggacgggcttgggcttccatttgtgtgtgtgcaagtgtgtatgtgcgtgtgtgcgagtgtgtgcaagtgtctgtgtgcaagtgtgtgcacgtgtgcgtgtgcgtgcatgtgcactcgcacgcccatgtgtgagtgtgtgcaagtatgtgagtgtgtccaagtgtgtgtgcgtgtgtccatgtgtgtgcaagtgtgtgcatgtgtgcgagtgtgtgcatgtgtgtgctcaggggcgtgtggctcacgtgtgtgactcagatgtctctggcgtgtgggtaggtgacggcagcgtagcctctccggcagaagggaactgcctgggctcccttgtgcgtgggtgaagccgctgctgggttttcctccgggagaggggacggtcaatcctgtgggtgaagacagagggaaacacagcagcttctctccactgaaagaagtgggacttcccgtcgcctgcgagcctgcggcctgctggagcctgcgcagcttggatggagactccatgagaagccgtgggtggaaaccaggagcctcctccacaccagcgctgatgcccaataaagatgcccactgaggaatgatgaagcttcctttctggattcatttattatttcaatgtgactttaattttttggatggataagcctgtctatggtacaaaaatcacaaggcattcaagtgtacagtgaaaagtctccctttccagatattcaagtcacctccttaaaggtagtcaagattgtgttttgaggtttccttcagacagattccaggcgatgtgcaagtgtatgcacgtgtgcacacacaccacacatacacacacacaagcttttttacacaaatggtagcatactttatattggtctgtatcttgctttttttcaccaatatttctcagacatcggttcatattaagacataaattacttttnnnnnnnnnnnnnnnnnnnnnnnnnnnnnnnnnnnnnnnnnnnnnnnnnnnnnnnnnnnnnnnnnntcttttgatatactattttcattctcttgttattgcatcaatgctgagttaataaatcaaatatatgtcatttttgcaaaaaaaaaaaaaaaaaaa

SEQ ID NO: 53082 - DNA, 1022 bp, Homo sapiens
caggcgtgcacatcgcgcctggccagaccattttagaattgggaaattttagtgagaaaaaatgcactgtaaatatgctttagttttaattcagttgggatgcactacctagcgaaaattgagaaactatatacttctcagagaaatatctgacatctattgtcattccattgctattttttttccccagagacttccataatttaaaataaaatcctagatccagttcttgttttttggcataaatacttaatctattttaaatttataaaatctgagcttctaggatccagctgtgtcaacctttatttagcatatataactataaatcacttattacagatgctaaatagatcaccttttacagatgctgaaatgtttgggatatgtttgttgacaaggtaaatggaaatgagaaactttatacttcagttttcagatatatggatctagatcccaaataaatgattaatcttcattggtttctcaaattcaggttgaaatacaaattaatagcctttattgattttacttttatgagtcattgtagacatctataaatataaaagggcctgtacccaaaggatgccagaatactagtatttttatttatcgtaaacatccacgagtgctgttgcactaccatctatttgttgtaaataaaagtgttgttttcaaagccatctttaaatagttctttaaaaataggtcttttttttatattttggaaaaggcattgtttttaaagtaaagataaaatggtaagtacctaattgtatttactgtaatatcttataacatgcagatgaatgctttataagttaaatatgatgtattttttcatacttctggattatactataattcatatgaaatcttgatattagtccccacacggaaaaagtgaactgcagttgatatttggtgtttaagatagcaccattgtttaaataccgcctatgtactcccaaatgaataaaacataattcttgtcctctgagagcaaaaaaaagtcgacgcgg

SEQ ID NO: 53083 - DNA, 2249 bp, Homo sapiens
caaacggcccgcccgccggctccacaaacagcccctcgctggtcctccagtcttccagcgagaagaaagaaagagcgtccccggaagccgccgaaactctggggtagagtggcacgcgctttttgcttttccgcgtcttcttcggtggcgatccgcgtcctagaaagggcggtgggctccacctcggcctagaaggcagacgggaccgtaggaagccgtcgcgggaagctcagccgaattggagttggagcccccggattgcgctgaccctgagctctcagactccccagtacaatgactcaagcagaaattaagctctgttctttgttgctgcaagagcattttggagagattgtagaaaaaattggagtccatctgataagaaccggcagccagccactaagagtaattgcccatgacacaggaacatcactggatcaggtgaagaaagccctgtgtgtcctcgtccaacataacctggtgagttatcaagtgcacaaacgtggtgtggtggagtatgaagcccagtgcagccgggtattgcgaatgcttagatatccccggtacatctatactaccaaaactctgtacagtgacactggagagctgattgttgaggagcttctgttgaacggcaaactgacaatgtcagctgttgtgaagaaagtggcagaccggctcacagagaccatggaggatggcaagaccatggactatgctgaagtatcaaacacatttgtgcgactggcagacacacactttgtacaacgctgcccttcggtacctaccactgagaattcagaccctgggccaccaccacctgcccccacacttgtcattaatgaaaaggacatgtacctggttcctaaactcagcttgatagggaaaggtaaaaggaggagatcatctgatgaagatgctgctggggagcccaaggccaagagaccaaaatatactacagataacaaggagcccattccagatgatgggatttattggcaggcccaaccttgacagattccaccaacacttccgtgaccaagccattgtgagcgcagttgctaacaggatggaccagacaagcagcgagattgtgcgaaccatgctccgaatgagtgagattaccacttcctctagtgctcccttcacccagccattgtcttccaatgagatcttcagatccctacctgttggctataacatctctaagcaagttcttgatcagtatctcactctgctggcagatgatccactagagtttgttggaaagtctggcgacagtggtggaggaatgtatgtcatcaacctccataaggcattagcatccctagccacagccactctggagtccgtcgtacaggagagatttgggtctcgctgtgctagaatattccgtctagttttgcagaagaaacacatagagcagaagcaagtggaagactttgcaatgattcctgcaaaggaggcaaaggatatgctatataagatgctctcagaaaatttcatgtcactccaggaaattcccaaaacaccagaccatgccccatccaggaccttctatttatatactgtgaacatcctgtcagctgcccgaatgttgttgcacaggtgctacaagagcatagccaacttgatagaaaggaggcaatttgaaaccaaagagaataagcgtctactagaaaaatctcagagggtagaagccatcattgcatctatgcaggctactggtgcagaggaagcacagttacaagaaatagaggagatgatcacagctcctgaacgtcagcagctagagaccctgaaacgtaatgtcaacaagttggatgccagtgagatccaggtggacgaaaccatcttcctgctggagtcttacattgagtgcaccatgaagagacagtgatccagaagaagcatcttcctcagaagatctggggggatggaaagcaaaataaaggaggtgcctggatgcattatttgcagtgggataagtcgcagagtcttcaactaaacccccctctctatcccctgcagcccaggatacacctgaaagaatttggcatatttagatccattgctgtagtctcccctcatcaaatcttggcagtgggaagaaccttaaatcaacaaggttaatcatctatcagatgcatctgttcccataaagaagttacccacacctatggttacctatatccctggcaataggaaacttcctaagaagttaattttattttcagaaaaaaaaaaaa

SEQ ID NO: 53084 - DNA, 512 bp, Homo sapiens
cagctcgaaagtcgctatttattttattacccattatgaatcagccatctcctgatttatcttttacagttttctatgttttgaattgatatcaattcttagaataaaatgcagtacctgcatctaaaatagaatttatttttcttgagacacgtctttcaggcagaggaaaggtaatgggcacacaaaccttgatcatcttcttataaaacaaggcagcatccacatttcaatactgtagcatatgaaataatttctcaattcctactctgtcatagcttaaatgacttactgattaaaatatgagtaacaataattctggagctgaaagacattctcaagccaaaaggtaacattaaacaatgttttactttaaatttaatgtcatgtagggtcactaaaaacaaaatgtaagggataaatgtaagtgcataaaacagagataataccaatttccacaaatacaacttttattatccaaaatcatctatggaggactttttctaatatgc

SEQ ID NO: 53085 - DNA, 784 bp, Homo sapiens
ctcttcctccctggaataagagtgagcgctcgtgctctctaaacaccacacttgcctctttatgttcaatgcttgatgtgtttcttttctcagcagccaagtcctcagtcccaaggatttatgtggaagcacacgcgtcccctgggctgctgggaaggcactgctggcgagctcatctgtctcttgtgtctggcccccgctgggtggcaccgcctccctctttcctcccatactctcttttctcgtggactcgtaatgaggtggtttccatagccgcccccgggcccgtcatcatcagctttatcgtctaaatttaaacgatgagcattcatccttcatgagttacgagaagccagaactcctcgctttgctccctggctgttcttggcgtgtgtgtttccgtctcacaacccggctcctactttccccatctggcattgtcccctggcaccgcttttggcttgtcctgctcagtcttcgttcagggaacagcttcctcttaaatgtcccttttgcaggtttttagaaaccggttttcttggataaaagttggcagtgaagtggcagtttgcaagtggccagtgattcccccaactccaaagacagatttttacctttctggttatttttgttcatcttttgggcagggcaaaggttacctgagacacaattactttgggaatgtagattaagatacgttacatggaaacttgcaactggcatccgaaagaaaaactgtttttatcctgttgtacaaatacagtttttaaagcattaaaaaaaa

SEQ ID NO: 53086 - DNA, 268 bp, Homo sapiens
ggaagaagttgaaagagattcctatggaggcctgagaaatgttagtgcttactgtctgatgtacattaatgacaaactaccctacttcaatgcagaggcagccccaactgaatcagatcaaatgtcagaagtggaagccctatctgtggaactcaagcattacattcaggaggataactggcggtttgagcaggaagtagaggagtgggaagaagagcagtcttgcaaaatccctcaaatggagtcctccaccaactcctcatcacag

SEQ ID NO: 53087 - DNA, 685 bp, Homo sapiens
  misc_feature (1)...(685): n = a,t,c or g
gctcccttccctgggtgccgcacgtccagcctgtgtccaggcctactccctggtctcacctccgaccacagtcggcggcaccttctcagagtgccccgcactcacctgggggttggggcagtgcgcgctgtgctgcctgtcttcgcgccactgttgtcccaccgaatggacagctttgcaggtgctggcactaacttcattgacacctgagtcacagctgcccagtgggattctccagggggccgggacttccctaggaagtggtgagccaatgctccctgatgagcacaaagcccgctctgttgagggctgggtgggtgcagccagcgtgcgggaaagggcaggcagcctcccgctgccagtcttcgctctaactccctcggtaggtgatgtaggaccaggggcacgtggaacttctgggccttgctggtgatggttaaaacaacctgagatggagaggccaggagagagtataaggggatagcagcaaaccacctatctggccccaacacacctgagagaattcagcagcccagactgagggtctgggatggggtgaaccttccgcaccagagggacactccacagaagccacagcccagtaagtcaggcgcttctgcggcggctccagtntggggtgaggcagtnaggttaggcccagagagctggagttggctcagatgaa

SEQ ID NO: 53088 - DNA, 372 bp, Homo sapiens
ttaatttaattatatacctgctatggtttgaatgtgtcccccaaagtttatgtgttggaaacctaattctcaatgtaatggttgggagttagggcctaataaaatagccttcatgaatgagttaatgttgttattgtggtaatagattagtaatcacagagtgggcttattataaaacagagttcagccccttttgccctcttgctttcttgcactctcttttccttctgccttctgtagtgggatgatgcagcaagaagacctttaccagatgcaggcccctcaaccttggacttcctaacatccagaactgttaagaaataaaatttattcctttcctttccttttcttcctcctttcccttctcttccc

SEQ ID NO: 53089 - DNA, 469 bp, Homo sapiens
tggatgtataataccttggcatcttgtgtgatgttttacacacatgagggctggtgttcattaatactgttttctaatttttccatagttaatctataattaattacttcactatacaaacaaattaagatgttcagataattgaataagtacctttgtgtccttgttcatttatatcgctggccagcattataagcaggtgtatacttttagcttgtagttccatgtactgtaaatatttttcacataaagggaacaaatgtctagttttatttgtataggaaatttccctgaccctaaataatacattttgaaatgaaacaagcttacaaagatataatctattttattatggtttcccttgtatctatttgtggtgaatgtgttttttaaatggaactatctccaaattttttctaagactactatgaacagttttctttttaaatttttgagattagatgccagg

SEQ ID NO: 53090 - DNA, 1842 bp, Homo sapiens
taaaattcacccattttaagggtacgactgaatgattttggggtaaatttaccaagttattgccactcttggccataatccagttttagaatgttttcatcattttgtaggttgaaaccgcaggcctattcatttctttcttccttcctctctctcctgtaagtgttgattgagcatccaccctgtcctagaccctgcttggtgctagggacataccagtgagcagggtggatgaggtcctcacccgtgagctcatatgctgatgggggagacctacagcaagcaaggagataaataaatacatcaaatagaggtaaatgatgtgaagaaaacaaaacgggctgaggaaggatagtgtgagactgtaaggagttttaaattttaaaacttgctactcataattagatattcaagtttctgaaattcgcatagtgcatttcagatgatgagagaggtgacaaccgtagaaagtgggagaagtggttgcggggagatgggtgagcgatggaggtggcgagcaagttggagagatgcagggagagtcaggtgacaagaagagagtgtgctgaggacagatggcggacagacaggccgctgcccccaatttttggtgctctttcattccttgcactcaggcacgaggcacacaggaaagacaggcagtgctgcttcgtaacaggcatctttcttgccctaagtatacatcttagaatgtgtggagaaagtcacgctatgggagcacttgggcaggctcaggtgttcactgtagtagaaggagaatgactctagctgatgttgggaccctttgctgtcaccccgcagtccccacagtgcccggtgtgagttgtaagaaaatggtggtcagtgattgtcttcgcattttatatacgcacaggtcaaagagaatgaactctaaatgtttcccagtttgatttttctgcttctgtttagccacatgaaatgaagatcacctctgcctatctacaggacattgagaatgcctataagaaaacctttctccctgagatgagtgaaaaatgtgaggttttacagtattctgcaagggaagctcaagattcaaaaaaggtggtagaggacattgaatacctgaagttcgataaagggccgtggctcaagcaggacaatcgcactttataccacctgcgattactggttcaggataagtttgaggtgctgaattacacaagcattcctatctttctcccggaagtcaccattggagctcatcagactgaccgtgtcttacatcagttcagagagctgccgggccgcaagtacagccctgggtacaacaccgaggtgggagacaagtggatctggctgaagtgaacgggccgccttctgctccagctgcatcacagtgatggccaagctgcatcagccgcactctcctggacgccatatagctttaagatcgggggagggtaaataatgcaaaaattgcacagtggaagaaggggtctcacaaaaagcaatccatcctgtagtataggtaatggagttgggggaagcagcttccattctggatgtttggaaccctttagctttgttttggaatggcccaccattctcactggaaaacagtggtctgctgtgaaaggccagctctcggcagcccctgtggtttcagcgctgccgctctgtgtcattcaggttgtgcacattgtttttcttctgacttccagaaataaaagtgtttccaaacatccagaatggaagcctgcttcccccaactccattacctatactacaggatggattgctttttgtgagaccccttcttccactgtgcaatttttgcattatttaccctccccggga

SEQ ID NO: 53091 - DNA, 299 bp, Homo sapiens
  misc_feature (1)...(299): n = a,t,c or g
ccagcagcaagcaaggtattgggtgctactcaatccagtgaagtcttgagggtcccttccctctgtgaagcatataatctagtggggtagactgctagctactaactatgaaaacaacatagtctgacttgagagtgggaaaagtggaacaagggagtaatttttatatttttcttcacatttaaaaatattttctaaacaatccaatataatcttttctataatttcccaataccaatccaacatgtattacttggtaaaataatagccataccatntatccgncaggcctgaaggag

SEQ ID NO: 53092 - DNA, 330 bp, Homo sapiens
  misc_feature (1)...(330): n = a,t,c or g
ctgggaggaagcagaaatgtccctagataacagcatgtattgcagatacccaaatgtttattgttttctcagcccttcaattttgcttttctctctcaaatgctacagactcaatttaaatcttacctttgattgttgaaaaaagtcactaagatgtgaatacagaatagacattgagaggttatatatgtccaaaacttcatctgtccagcagtcaccgtcctnttnaaaanggncnccntnggncaaaangggcccagggtgctggtgatgcccctcctgggcaaaacgccccatttgtggcacttccagatactatttatttacttt

SEQ ID NO: 53093 - DNA, 658 bp, Homo sapiens
ctttgtatagcagaggatctcatttgactttgttttgatgagggtgatgccctctcttatgtggtacaataccattaaccaaaggtaggtgtccatgcagattttattggcagctgttttattgccattcaactagggaaatgaagaaatcacgcagccttttggttaaatggcagtcaaaattttcctcagtgtatttagtgtgttcagtgatgatatcactggttcccaactagatgcttgttggccacgggaagggaaatgacttgttctaattctaggttcacagaggtatgagaagcctgaactgaagaccattttcaagagggacggtatttatgaatcagggttaggctccatatttaaagatagagccagtttttttttttaaatagaacccaaattgtgtaaaaatgttaattgggttttttaaacattgttttatcaagtcactgttaagtagaagaaagccatggtaaactgatacataacctaaattataaaagcagaaacctaactcactcgtcaagggaagttaccttttgaggaaagttaaagtacttttttccctatctgtatctatagcaacaacccagaacttacaaacttctccaaagattttattggattgttatatcaaatcagaatgtaaacatgt

SEQ ID NO: 53094 - DNA, 420 bp, Homo sapiens
gccgggagggagccagatcccagtgatcttccccgacggcagagctttacccagaggctgccggcggctcgtagctgggttcagctctgcgtccacgccagcccggagcccggggggcaaggggtctgtcccgggcgcagcgagaggatggtcatccgtcgtgttcatcgcctcttcctcgggcttcgtggcgataaagaagaagcagcaagatgtggttagatttctggaagccaacaagatagagtttgaggaggtggatatcacaatgtcagaagaacagaggcaatggatgtacaaaaacgtccccccggaaaagaaacccactcagggcaaccccctgccacctcagatatttaatggcgaccgatactgtggagattatgacagtttttttgaatccaaggaaagcaacacaag

SEQ ID NO: 53095 - DNA, 462 bp, Homo sapiens
aactacttcagtttgatcacgggcagtcaaatccaacttactacatcaggctggctaatcgtgatctagttctgaggaagaagcccccagggacactccttccatctgcccatgccatagagagggagttcaggattatgaaagcccttgcaaatgctggagtacctgtccctaacgttcttgatctctgtgaagattcaagtgtcattggcacccccttctatgtgatggagtactgcccaggtctcatctacaaagacccttccctgccagggcttgggagcccagccacagacgagccatatacactgccatgaacacagtcctgtgcaaaattcacagtgtgggatcttgcaggctgtgggacttgaagactatggggaagcaaggctcgacaacctgggtgtttcatccagaagagccagaggtgctttgctgttccttgactgggaactttctacg

SEQ ID NO: 53096 - DNA, 337 bp, Homo sapiens
ggtcgactttttttttttttttaattaacaagaccttctaagtttcttctaaatacccaccacccttgcatgaaaaattaggtgtaatcagtgcaaattatattaatatgataaattcacatacatttataaaattcttgctaaatgattttagctgctatttgccactaaaaaaaggtaactatgtgagatgacagatgtcaatttgcttcactataataacctttttattactacgtatcctataacatcattatactttacacaataaaacttattttttaaaaaaaattatatacactatgacatcttataacaaagtcagtgtaaaacaatg

SEQ ID NO: 53097 - DNA, 624 bp, Homo sapiens
ctgcctatgctccagcacatttccaagaacaaggacacaggcacctatgaggacttcgtggaggggctgcgggtcttcgacaaggagggcaatggcactgtcatgggtgctgagcttcgccacgtgctggccacgctgggtgagaggctgacagaagacgaagtggagaagttgatggctgggcaagaggactccaatggctgcatcaactatgaagcatttgtgaagcacatcatgtccagctaaacctcgtgcccaggtaggcacccactccctcctgaacccgctgctgccacctgcccacactccaccagctgcagtgctcacttgacatcctgctgcctccgtctccctcctcctctgtaatctgcactgcctttgctctcaggaagcccagggaaggctgtgcagggacgtctcatctcccatgtgtgatgctgacaccagcggcctggagtcgtgggaaggaggggagccttaccaagactcctgcaaaaacccttggacctctccacgtggttgccgtctctggcccctctcaggctgtgcttacctgtgacagcagctctgtccccaccccatgggcctcatgaataaatggcttcttgccggccaaaaaaaaaa

SEQ ID NO: 53098 - DNA, 1199 bp, Homo sapiens
tttttttttcactatgcccatctgtgtggaggccaggaagtggcaggggaggtgctgctgctccagcgtatgggatgctgggaggagggccagatgtcactgtgacctctcccactggcacggcagaaagtcctaaacttctcttggacttggagtgtcgcttctctttatgcttctccttgtctttcttctttttgctcttctttgacttctttttcttcttgatttctcggtaagaatcatctatcactaactccccagcctctagttccccaccagaggatgagtctgattctaccagaatagggttcaagccctgaaagatcaagggttagcactgtggggactctgcgaactggggaggcgtcagacccacagcccttcagggccaggagatgaatgtgcgtctgaggatgacttgtgctttttccgggctgttttcagaaagctctgtaactcatgtcctaggagtaaagcaccctgctcatcccgagctgatttctttgaggaatttttcacagtcgcttgttgggaagggatattgaaaagactcctcatcaacagagctgcttcccttctcctttggtgacagaataagtttcatttttaaaccatcaggctcccgaagtcaagtgtctctgtgttcacatagagaggtttcatttttttcgatttgtgggagacaccatcctctaggggtagttccccactgcttccactgactttcttcctgtggtgctcctttttactctccgaatggcttgaagagccagaggatttctccccagtctttttggagggcttggagcctgctgccagtggggaagtgatagctttcaacaggtccatagctgtatcagtagactgtgggctggactttttctttttcttctgtgacgattccaaagacgaaatatctccatagtagtaatcatcagaggagtgcttcctcttcttcttgtgtgtgtccgtccccaagaagtaaagttcactatccttcaacttcttcttggaagaattcctgacctgagcagcaatttcttcctcttcccttaaaaaatctttgtaagaacgttttttctctcgttggcttcggccagctgcaagtcctatgtcctcaaaggtatgatcaccatcaaaacaatcttcactcggctcgcccggatcccgcctcaacgccgccgatcgccgccatcttg

SEQ ID NO: 53099 - DNA, 1773 bp, Homo sapiens
  misc_feature (1)...(1773): n = a,t,c or g
atttttttccttcgccagtctcaccgttacccggggcaacagctgagccgtctgggaagggatgcatcttttcttctgtatgcttgagtcaagaactctaagtcatcttggtaataccgggttggatgcttaaagctgcagcaaaaagaccagaactttcaggaaaaaacactatatccaacaactcagatatggcagaagtgaagtcaatgttccgggaagttcttccaaagcaagggccactgtttgtggaagatataatgacaatggtgctgtgtaaacccaaacttttacccttaaaatctctgactctggaaaaactagagaaaatgcatcaagcagcacagaatacaattcgccaacaagaaatggcagaaaaggatcaacggcaaataacccactgaatgataactgagcactttagggaacaacctgccttatctactatttaacaataactagaaaatatgcttctgtgtgctgaaagtagtatgtgttatcaataaaattgatagtattcatagaaatacaaaaatatccaagattgatgaaatttgtattgtgaatgtaaacactctggtttgtattgaacataaacagttaaactatgaaccaagttttatggggtttaagtcatgtttttagaattgcaaattaaattatttgttcaccattcctattgctatcttttatagataacattcttgggatcttttatagcattcttgggcacaagggattaaatacaacttttatatacagaggatctttacatgtttattaaatctgaatttgaagatacattccaatcttgcataaagtgtttgttgggcttttacattacgtaattaaaaaacaaaattttttaaccaattttatgtgccatgtcacgtttaatgctatcttgtgtgaccagatcccaccagtaatgacaaaactgtcttaaacctcattttttttttttttgagacaagagtttcactcttgttgcccaaacnnnnnnnnnnnnnnnnnnnnnnnnnnnnnnnnnnnnnnnnnnnnnnnnnnnnnnnnnnnnnnnnnnnnnnnnnnnnnnnnnnnnnnnnnnnnnnnnnnnnnnnnnnnnnnnnnnnnnnnnnnnnnnnnnnnnnnnnnnnnnnnnnnnnnnnnnnnnnnnnnnnnnnnnnnnnnnnnnnnnnnnnnnnnnnnnnnnnnnnnnnnnnnnnnnnnnnnnnnnnnnnnnnnnnnnnnnnnnnnnnnnnnnnnnnnnnaaatctcatttttaagaaaccctcacctattctgtagtcagctaagcttttaattacattaattttaagcacttgagaataaaatgactgcatttatcatccaagtgtcaaacaattaaaaacctaaaaatggtaactatatataagctgaggtaatatgggcttgataaagcccatgaggtaaatatgaacactaaacttggttttaattctaacagactatatctaaacctgtaagcagtatactcctaacagtaccctcataaattctgaatataattcttgtttgctgcagtcaatatttggcagtttaaattagcacagacgttgaggccttgctgagttattaggctatgtaaaagaggttaaaaatatgatcattctttattgttaattggtaatattttctcatacattaggtaaatgtcaagctttgggtctctggagtataactttttgtaacattagccattatttggtaacagaatttaaggatgatggaatgatggaaggtattacatat

SEQ ID NO: 53100 - DNA, 5983 bp, Homo sapiens
gctttcctttctaaagtagaagaggatgattatccctctgaagaactactagaggatgaaaacgctataaatgcaaaacggtctaaagaaaaaaaccctgggaatcagggcaggcagtttgatgttaatctgcaagtccctgacagagcagttttagggaccattcatccagatccagaaattgaagaaagcaagcaagaaactagtatgattttggatagtgaaaaaacaagtgagactgctgccaaaggggtcaacacaggaggcagggaaccaaatacaatggtggaaaaagaacgccctctggcagataagaaagcacagagaccatttgaacgaagtgacttttctgacagcataaaaattcagactccagaattaggtgaagtgtttcagaataaagattctgattatctgaagaacgacaaccctgaggaacatctgaagacctcagggcttgcaggggagcctgagggagaactctcaaaagaggaccatgggaacacagagaagtacatgggcacagaaagccaggggtctgctgctgcagaacctgaagatgactcgttccactggactccacatacaagtgtagagccagggcatagtgacaagagggaggacttacttatcataagcagcttctttaaagaacaacagtctttgcagcggttccagaagtactttaatgtccatgagctggaagccttgctacaagaaatgtcatcaaaactgaagtcagcgcagcaggagagcctgccctataatatggaaaaagtcctagataaggtcttccgtgcttctgagtcacaaattctgagcatagcagaaaaaatgcttgatactcgtgtggctgaaaatagagatctgggaatgaacgaaaataacatatttgaagaggctgcagtgcttgatgacattcaagacctcatctattttgtcaggtacaagcactccacagcagaggagacagccacactggtgatggcaccacctctagaggaaggcttgggtggagcaatggaagagatgcaaccactgcatgaagataatttctcacgagagaagacagcagaacttaatgtgcaggttcctgaagaacccacccacttggaccaacgtgtgattggggacactcatgcctcagaagtgtcacagaagccaaatactgagaaagacctggacccagggccagttacaacagaagacactcctatggatgctattgatgcaaacaagcaaccagagacagccgccgaagagccggcaagtgtcacacctttggaaaacgcaatccttctaatatattcattcatgttttatttaactaagtcgctagttgctacattgcctgatgatgttcagcctgggcctgatttttatggactgccatggaaacctgtatttatcactgccttcttgggaattgcttcgtttgccattttcttatggagaactgtccttgttgtgaaggatagagtatatcaagtcacggaacagcaaatttctgagaagttgaagactatcatgaaagaaaatacagaacttgtacaaaaattgtcaaattatgaacagaagatcaaggaatcaaagaaacatgttcaggaaaccaggaaacaaaatatgattctctctgatgaagcaattaaatataaggataaaatcaagacacttgaaaaaaatcaggaaattctggatgacacagctaaaaatcttcgtgttatgctagaatctgagagagaacagaatgtcaagaatcaggacttgatatcagaaaacaagaaatctatagagaagttaaaggatgttatttcaatgaatgcctcagaattttcagaggttcagattgcacttaatgaagctaagcttagtgaagagaaggtgaagtctgaatgccatcgggttcaagaagaaaatgctaggcttaagaagaaaaaagagcagttgcagcaggaaatcgaagactggagtaaattacatgctgagctcagtgagcaaatcaaatcatttgagaagtctcagaaagatttggaagtagctcttactcacaaggatgataatattaatgctttgactaactgcattacacagttgaatctgttagagtgtgaatctgaatctgagggtcaaaataaaggtggaaatgattcagatgaattagcaaatggagaagtgggaggtgaccggaatgagaagatgaaaaatcaaattaagcagatgatggatgtctctcggacacagactgcaatatcggtagttgaagaggatctaaagcttttacagcttaagctaagagcctccgtgtccactaaatgtaacctggaagaccaggtaaagaaattggaagatgaccgcaactcactacaagctgccaaagctggactggaagatgaatgcaaaaccttgaggcagaaagtggagattctgaatgagctctatcagcagaaggagatggctttgcaaaagaaactgagtcaagaagagtatgaacggcaagaaagagagcacaggctgtcagctgcagatgaaaaggcagtttcggctgcagaggaagtaaaaacttacaagcggagaattgaagaaatggaggatgaattacagaagacagagcggtcatttaaaaaccagatcgctacccatgagaagaaagctcatgaaaactggctcaaagctcgtgctgcagaaagagctatagctgaagagaaaagggaagctgccaatttgagacacaaattattagaattaacacaaaagatggcaatgctgcaagaagaacctgtgattgtaaaaccaatgccaggaaaaccaaatacacaaaaccctccacggagaggtcctctgagccagaatggctcttttggcccatcccctgtgagtggtggagaatgctcccctccattgacagtggagccacccgtgagacctctctctgctactctcaatcgaagagatatgcctagaagtgaatttggatcagtggacgggcctctacctcatcctcgatggtcagctgaggcatctgggaaaccctctccttctgatccaggatctggtacagctaccatgatgaacagcagctcaagaggctcttcccctaccagggtactcgatgaaggcaaggttaatatggctccaaaagggccccctcctttcccaggagtccctctcatgagcacccccatgggaggccctgtaccaccacccattcgatatggaccaccacctcagctctgcggaccttttgggcctcggccacttcctccaccctttggccctggtatgcgtccaccactaggcttaagagaatttgcaccaggcgttccaccaggaagacgggacctgcctctccaccctcggggatttttacctggacacgcaccatttagacctttaggttcacttggcccaagagagtactttattcctggtacccgattaccacccccaacccatggtccccaggaatacccaccaccacctgctgtaagagacttactgccgtcaggctctagagatgagcctccacctgcctctcagagcactagccaggactgttcacaggctttaaaacagagcccataaaactatgacctctgaggtttcattggaaagaaagtgtactgtgcattatccattacagtaaaggatttcattggcttcaaaatccaaaagtttattttaaaaggtttgttgttagaactaagctgccttggcagtgtgcatttttgagccaaacaattcaaaaatgtcatttcttccctaaataaaaatcaccttttaagctagagcgtccttacaactttgaaatgtgcaataaagaatacctgtgttttagctaatgtagcatatgtaattgcaaaatgatttagaatgtcatgaaaaatatgaacatttcctgtggaaatgctttaagaacatgtatttccattatcctatttttagtgtacaccagctgaatacggagcaatggtgtttataagcgtttttttaaactatctggtcacaaagactgttacgctaaaaatgtttactaaaagatcactaaactatctcccctcttgctgaagttctttgtagtaatagctcataaaaatttgtttattaatatttcccaagtgtctgttgactcattggactgttatgaggcttgtgccatttggggaacatgtaaactcagggctcccagaactgaagatggtggctggtgggcacacttccgggctggctcctccgtcacctgtgaactctacaagtgatgtctttttatttcaaagaagtttatttcccacttgtatagcattcacatgctttctttacgatcctcattgtctatttgagaatggttttcctgagagtgagtttacattagtagcaagagttgtttgacctgatgttcccattgtttttaccattcctgtagaaaaagggtgcacaacagaaaaatgaaaatgatgtgtcatggccgtaaaagtatagaaatctttaaaaattttaaaatgtacagtcccttatctatctttcccattccttgccactgatttttgaggaatataataaaaagattggaagagtataatgccatgagaaagaatgatttaggactgtgagggttataacatgccctaggtcagcaaccaagggttgaaatcagttctgttttagggggaaatggggggggcgacagatattattccaaaattaatattaattaatatttaaacgttggtgtttttatttaaaaatcagtaactaaccatctggaattgcaccatacttaaagtcttatccattactacactgtctttaaaacaatgtttctttaaatactctacaacgtttctaagaacgaacttcagacattttaattacagtaataatagcactccttttaaggagtttcagatccacactaaaactaaaatcataaaaggctgatacttttgtttgctgctaggctatattcttccattctttgaagtcctatgatgtaatatttttgaaacctagtgtatgtcttgtcactgttgtgatatttaatcgattaagaataccttgtaaaaaggagcaaaagcttcaatgtgaaacaattttctctctttatactaaacaactgaagatagatagtttagaaagataaggacctttgaaagaagacaactctgtcaaagttcataaggaatataaaaattcttcaggaaaagagaattcaatctatatgtcctcccgtttaatatcaagaatagaagaaattaagaggaaaactccacagaagagcataggccacttttagccatgtaaaaataagattaagtcacaaatacaacttttgaatttacctgtcaatatctctttaggacacaaaacaatgctgaagttaatataatttctaattttaaatgtcatttaagtgtagattatgccatctaggaaggtaagtaggaaaggtaaattaaatctatttttaaaattcaaaatattagagtatttttcccctctaaagccttttttggtgattattctgtatctgacataattgagaaactggtaagctgtaaagattccagtgtagcttctctgagaagttgtgagccagtccataactgcttcctcacatccatctgattgcaccatttctgcagcaaaccccaaagcagggtgccaatatgcagatggcatagggagtatcatccctcagccaaatcacttttccatctctaaagtttcatctattttgggaagtcatctccaactaattgtgtctggatttagttgctaaaattgtcttatttatttatgaagcagcaatattcagcctgaaagcatttctgccatagttgttgtagttatatcgccaatggctgatttttttcattggaaagtaaatttaagtaattcgtgggatgtggtatattctgtgtcaacttcaagataatcactcattttctcgttatattcaggtctgaattaaagttaagttaatcac

SEQ ID NO: 53101 - DNA, 165 bp, Homo sapiens
gatcgactctatcatccaacgctccgaggacaacccctgtccccacccccgggacccggacccggccagcaggacccactgagaagggctgcccgggtcacctcagctgcccacacccacactctccagcatctggcacaataaacattctctgttttgtagaaa

SEQ ID NO: 53102 - DNA, 390 bp, Homo sapiens
gccacatttgctgcctttctgggagagttagaagcaagccacgtgggtgacttcttttcaaagttctctgcctcagaggaggaagccccatgggtggaggccaggcccgaggccatcctgctctgggccagagcgtgcctgtgtctgatgagcgaggacatgcctcgtctggctgagccttccatttcacaccggcagctcgaaccccccatcacggcttccttttgggctcccctcctcaggggaccgagcttgaaatgtgcttgcccttcatccctaaggcctgcgtcccttcctcagagaggactaagcccctctcccagtcttgatgttctccgaggcccttcttattcacagaacctatctggcttatttattcgcttgcttgct

SEQ ID NO: 53103 - DNA, 243 bp, Homo sapiens
agccgtcgggtctggaggagccaccaggtcctttcgttccggaggccgcccgggcccggatgcgggagccagaggccagggaggactacttcggcacctgtatcaagtgcaacaaaggcatctatgggcagagcaatgcctgccaggccctggacatgcctctaccacacccagtgctttgtttgcctgctcttgtgggcgaactttgcgttgcaaggctttctacacgtgtcaatggctctg

SEQ ID NO: 53104 - DNA, 612 bp, Homo sapiens
ggggccgcctgtatcccgcagaggaaggtcgcggccgtggagcgatgacccgcggcggtccgggcgggcgccggaggctgccacagccgccgccgcttctgctgctgctgctgctgccgctgttgttagtcaccgcggaccgccgaaacctgcaggagtctactatgcaactgcatactggatgcctgctgaaaagacagtacaagtcaaaaatgtaatggacaagaatggggacgcctatggcttttacaataactctgtgaaaaccacaggctggggcatcctggagatcagagctggctatggctctcaaaccctgagcaatgagatcatcatgtttgtggctggctttttggagggttacctcactgccccacacatgaatgaccactacacaaacctctacccacagctgatcacgaaaccttccatcatggataaagtgcaggattttatggagaagcaagataagtggacccggaaaaatatcaaagaatacaagactgattcattttggagacatacaggctatgtgatggcacaaatagatggcctctatgtagggagccaagaagagggctatatttagaagggacaaagcccatgacccct

SEQ ID NO: 53105 - DNA, 598 bp, Homo sapiens
taaagaatgcgttatccatcctatataaaagaaagataaaacacaggtcaccaattttctcatttcaccccatttaccttgtatagaggattgttcattcctttgggactaagttatagttatggtgagtgtgtatttactgtagttttgcctgatctcactcattgcacttcctggagttaaattttccaacagccatgttgaggaatagcactctgcatgtttttgttttgtttttcggggttttttttaattgaagccctaaaccaggaattatttgtgttctaacaggaggatgaacttgctgaaaataaaactttgctatgtatttactcttttttaaaagacaaaagcaaaaccagactttctacgtactactccaaagactgtgattgtgactataatacatttttggtaatttttttatacctaatttgtataggaagtgctatttctcataggctgtttcttgaaattttaagtttattgctttaaaatggcagtgtttctcccactttgatatgctaacatttagtaagcactggctttatgaaagcggctttttataagtatactgcattttttgagcctatcatta

SEQ ID NO: 53106 - DNA, 1490 bp, Homo sapiens
gcagtttgtggaactaaggctaagtgactaataaatatatggaaaattaaataatgcaaatccatatggaaatgcctatcctccctctttgtttctgtactctgaaaatagagagtttgtctatccagacagaaattttagactgacgaaaattggaaatgactgtggttctcaaacttgaccacgtggccaccaaccaggaagttacccggagggatcctatagagtaaccaaataaggcaaatggaagaagtaaagatctcaaaaaagagtaaagttggaattcttccatttgttgctgaatttgaagaatttgctggacttgcagaatcaatcttcaaaaatgctgagcgtcgtggagacctggataaagcatacaccaaacttatcagaggagtatttgttaatgtggagaaagtagcaaatgaaagccagaagacccccagggatgtggttatgatggaaaactttcaccatatttttgcaactctttctcgattgaaaatctcatgtctagaagcagaaaaaaaagaagccaaacaaaaatacacagatcaccttcagtcttatgtcatttactctttaggacaacctcttgaaaaactaaatcatttctttgaaggtgttgaagctcgcgtggcacagggcataagggaggaggaagtaagttaccaacttgcatttaacaaacaagaacttcgtaaagtcattaaggagtaccctggaaaggaagtaaaaaaaggtctagataacctctacaagaaagttgataaacatttatgtgaagaagagaacttacttcaggtggtgtggcactccatgcaagatgaatttatacgccagtataagcactttgaaggtttgatagctcgctgttatcctggatctggtgttacaatggaattcactattcaggacattctggattattgttccagcattgcacagtcccactaaaccttgtgaaagaagaaaagataactgaatgaagcatttgagtataacagacactataccaaaataccaagcaactgttttgagaacccagacttaaaattttatgtattattaaatgttacgataaatgggtagtaccatactacaaatatttaaatgcaaaattaccaaccctatatagcagttttatttgccctataaggttgcatactaacttaagcattcatggtcaccataaaatgcctttagcatttctccaatggactgggatgggaaattttccctttattgcctagctgcttggtggtttgagtgggtggtcctatgagcaatgcatttggagttcttcagctttcactacttctctgttgcttgctaatcatgtaactactaaaatactgtacaaaattgttttttcacactaacaaatgtgtatatggagaagagggctcatgtgatgatcatttgtgaacttagatttttgaggattatgtgactagtaataaatgtgaaataaattttcaaaaaagttg

SEQ ID NO: 53107 - DNA, 464 bp, Homo sapiens
  misc_feature (1)...(464): n = a,t,c or g
aaataacaaatttatttttcacagttctggaggttgccccaaaaagcttttattatctagattaaggttaatgcacttttaaatcataatgttaacannnnnnnnnnnnnnnnnnnnnnnnnnnnnnnnnnnnnnnnnnnnnnnnnnnnnnnnnnnnnnnnnnnnnnnnnnnnnnnnnnnnnnnnnnnnnnnnnnnnnnnnnnnnnnnnnnnnnnnnnnnnnnnnnnnnacgttaacattttttatgaagaataacttccaaaacaatccaaggagaagggtggcattttacagtctctttagtatcttgttataataaacagttgaattcttacagctgcttctacatccaaacttttttgttgaagtaagttgacttcacacagatacgcagttggaaaagtttttaaaatagccttttcagctaattgtggctattctttgataccacaccaagactacaa

SEQ ID NO: 53108 - DNA, 3399 bp, Homo sapiens
  misc_feature (1)...(3399): n = a,t,c or g
gaggcaatggccggcaaccagctgtaagcgaggcacggaagacatatgcttgtgagacaaaggtgtctctgaaactatggatggtacaagaacttcacttgacattgaagagtactcggatactgaggtacagaaaaaccaagtactaactctggaagaatggcaagacaagtgggtgaacggcaagactgcttttcatcaggaacaaggacatcagctattaaagaagcatttagatactttccttaaaggcaagagtggactgagggtattttttcctctttgcggaaaagcggttgagatgaaatggtttgcagaccggggacacagtgtagttggtgtggaaatcagtgaacttgggatacaagaattttttacagagcagaatctttcttactcagaagaaccaatcaccgaaattcctggaaccaaagtatttaagagttcttcggggaacatttcattgtactgttgcagtatttttgatcttcccaggacaaatattggcaaatttgacatgatttgggatagaggagcattagttgccattaatccaggtgatcgcaaatgctatgcagatacaatgttttccctcctgggaaagaagtttcagtatctcctgtgtgttctttcttatgatccaactaaacatccaggtccaccattttatgttccacatgctgaaattgaaaggttgtttggtaaaatatgcaatatacgttgtcttgagaaggttgatgcttttgaagaacgacataaaagttggggaattgactgtctttttgaaaagttatgtctacttacagaaaagtaaatgagacatagataaaataaaatcacactgacatgtttttgaggaattgaaaattatgctaaagcctgaaaatgtaatggatgaatttttaaaattgtttataaatcatatgatagatctttactaaaaatggctttttagtaaagccatttactttttctaaaaaagttttagaagaaaaagatgtaactaaacttttaaagtagctcctttggagaggagattatgatgtgaaagattatgcctatgtgtcttgcagattgcaagatattttaccaatcagcatgtgttacctgtacaattaaaaaaatatttcaaaatgcaatgcatattaaatataatacacacagaaaaactggcatttannnnnnnnnnnnnnnnnnnnnnnnnnnnnnnnnnnnnnnnnnnnnnnnnnnnnnnnnnnnnnnnnnnnnnnnnnnnnnnnnnnnnnnnnnnnnnnnnnnnnnnnnnnnnnnnnnnnnnnnnnnnnnnnnnnnnnnnnnnnnnnnnnnnnnnnnnnnnnnnnnnnnnnnnnnnnnnnnnnnnnnnnnnnnnnnnnnnnnnnnnnnnnnnnnnnnnnnnnnnnnnnnnnnnnnnnnnnnnnnnnnnnnnnnnnnnnnnnnnnnnnnnnnnnnnnnnnnnnnnnnnnnnnnnnnnnnnnnnnnnngacattctttatgaaatttagaattgttgaagaactataacatttcagtagggttcaaggtggtcccaaaagttatataaaagattagtttttactataaacccttgtcttttactcagatcctagcatcccttttcacatggtttctccatgtatataacagaatcaagaaacaaattttaattaaacaatctgtaacagaatcaagaaacaaatacattttaattaaacaatctatatggaacaaacattcccaaattctaagaataaatttttctttaagttttctctgagtttggcaattgttgttttttataatttaatctgtttaaatcatcaggtcttataaaatataatgtacttagagctggattcatggctgtttattatgaaaggttagatttctcagttcttctttaaccacattttgttatatcagacagtcctctataactctgtactacccaacaactaaatggtttagattgtttagctcatgttaataggatggttgtgtattataaaaaacgagttacgtgtgtgtgtgcacgcatgcacgcacatgtgctgggcttaaaggttgttaatgcaaggtttggggtcccctttaacactggtgaaagctacggtactctccccagagatatgtcttgtcagcctctctagttccccttggcctgcatgtacaaacttctaccctagaagctctctgccatcgatgtattctaatagatttgtaaggctattaatttgaagcaactccttgctcacagtgattcttgcttctctgagacctgctcccagtcgatactgtgggcttcagaagccatgactccccaactctgcctgtatcaccggttgaatggacaactaacccgagctggaccaacacaattctctccagagacttttgattttacttttaatgtagagacaggggctcaacnttgttgcccacggctgatgttgaacttgacgtgannnnnnnnnnnnnnnnnnnnnnnnnnnnnnnnnnnnnnnnnnnnnnnnnnnnnnnnnnnnnnnngctggccctcttcataggcttttggacttgggaatagaaaagcnnnnnnnnnnnnnnnnnnnnnnnnnnnnnnnnnnnnnnnnnnnnnnnnnnnnnnnnnnnnnnnnnnnnnnnnnnnnnnnnnnnnnnnnnnnnnnnnnnnnnnnnnnnnnnnnnnnnnnnnnnnnnnnnnnnnnnnnnnnnnnnnnnnnnnnnnnnnnnnnnnnnnnnnnnnnnnnnnnnnnnnnnnnnnnnnnnnnnnnnnnnnnnnnnnnggcaagttgactgctgaaaggggaatctgtgtacgcctgggagctgtggggcagccacattccagcacatggatctgagaaacagaacgctgatctgcagaaagagatgagaaccaaagagaggccacctgcgtcctgggtccattttcatcctccctgaagcccagctgcccagggtggggagaaacaccctgtgtccatgggatagagtcctttccgcttgcagttgtgcccaaagaatcttaaatacaaatgagatatccttaggtagttgatcatttatgtaatatgtgtcttcactggggaatactgacttcctaaaatctcaagatggaagatataccacatgtaaattattttagagcaattaaattgttttcaggattttccaaaaatgcttcttgtttcattttattatttaagtaacagattatctgagcctctgtgccctgcacacagtggtttataaatgccttgccctgcctatgaagcaggcatgaatgctccagtatagacagtgttatcactagcagacaggacaaagtaagaaaggtacgtaataattaatctatttgggtgaatgtggaaagaaaaatacaaagaaatataaccaaagctt

SEQ ID NO: 53109 - DNA, 217 bp, Homo sapiens
aagactatttggagttttcctcgtcttactggatgtcactctcgtccttgccgacctaattttcactgacagcaaactttatattcctttggagtatcgttctatttctctagccattgccttattttttctcatggatgttcttcttcgagtatttgtagaagggtaagtttgattatttttataatgcattaagctattttgtacttttataaga

SEQ ID NO: 53110 - DNA, 1695 bp, Homo sapiens
tttgtaaattttatattggtgtattttaccacaatgaatacatttggaaaaataactattgattttcagagctttttggatttcagaattctagaaatgggatctcagaccaatacttggatataggggctaaccttttaatcctaatgcagttttaaaaataaggtactcaagttttctgtgccttactttcttctatcaaacaaagtatggcatacatcttcaaattagacaataaaatgttcaaattgttacctcctctgttgagtttttttattattcagataacttatcaagaatggttgaacagattatccaaactaattttggtatccaacgggtacgtctctggaaagaatcccttgggttggcactgagcactctgacttttctccgtgatcatgatcttcagcagtaccatgaagacagcagaactcaaagttcaaggaattttcatttttcaaccaatcttcttctgtcttttctccactgacatcttccattgcaagtagatcatctttagtgtcttccagtcaaggggaaccacatcagtcatcaggcaacaaggattccattggaacgcctggagatccaaaaagctttactaattgaaaggcaaacccttgtgataatggtagctcaagggaacggtagtcagtgcttgttaagtcttggctgtcctcagctggtaattccttaggttcttcccatcttttcagctttctatcaaacctttcatttaaaaagtgaaaatcagaagtgactcccaaagagcacgaagtatcaggatgactatgtaaaatttctggagaaataaaccctgcatcatttagtttattacctactcttgtctgagattcgaaagtcaaaaacagtttcttgtttgtaaaagatggcttccaaatactagataaattatgtagcacaaaagaaggaatataatttttgtataaagatgcagagcaccttagtctgttaaatgacaggcaatgagaataacgctgtccatcaatatttaaaggggtagctttgataatatcaaggtaaaaccacaatggatgatgatcaaaggtcataagtttttgtttattctcctcttcactgttcctttctgaaattctatctttttcttctcccaaagtaatttttagtccatggttttttgttaacaggtcacatttctccctttcttttacaccgatacgactctgtcctaataagtcaaaatttggtaccaaattgaaaatccttttcttcctccttttcttattttttgttgattctaaggcattctttggtatatccggttgaggtaagcagcttctgaagaggtttgtttctatgaatgaatccatagtttcaggtggaggtgaaaaatcttcatttcctatcagtagtttgtctgtcaatatttctggattgtttcctggttctgatgctgccaccgaagtgaagatcatttgaatccattgccccctgctgtcaggaccagccaacttacatgctctatctttctttggtctctgttcacatataaacttatgaggtcctgcaggccagctaccaaaatagggctgtctgtcagagcccagctgtaaatcttcatcagataaattggttgtgaaaaaagcccagtgattgattttagttgtatacacttgttcctctcttaaaactttatctgacattctgatt

SEQ ID NO: 53111 - DNA, 492 bp, Homo sapiens
ttttttttttttttacattgtctaataaacttgtttattattttaagctggtaaaaagagacttatgattcatgttgaagaaagagttatttgtgcttgatacattgaagacactgttcaaaagcagtttgtccttataaaaggatgacccctgtagtatttcttaggcaaggagggacaaattcaaccaacgaaaagcacatctcgccccgagttccccatgatttctccacatatagcaaaaaaatacacatcagtaatttatttgaacatgcacatcagtgagtagcatagttctaggctactcaagaaacaaaagggagaatatcagcattacctaaataaaaaagagaggtgaatcacaccattttaattgtcttaaaaacacagataagaagagcaattaaaatatagtcctaaacagtactagctaatgtagattacataagtatacaatatgattcaactaatagtgctctgacaagcataaac

SEQ ID NO: 53112 - DNA, 1298 bp, Homo sapiens
tttttttttttttttttttaaaccatcaatgattatttattgaaatctgaccagttgtacagaagaaaaaaaatggcattatcatgcctctcttaatagtactgtggaaatgcctatttttccctttctaatcacagtttttcccacttgtatgcttcttcctctgatatcccatcccaacacccaacaggcaaatccacagacctggcaatatgccagcattttgggtcttacaaaatatttactgattgatttataaaatgtttggtgtacatgacatgttagttagaaacaacaaatccaagagctgaagcatgagagttaatacaataaagcaatttgggaggtaagcaatctcagtgtttttatactgataataatatcttaattcacggttttcaaactagccttagttacctctaagtgtacatcacctcctctcctgtcctatcccatgccctccatctgtgtagtgtttatggcagttcttggctgccttgtatgatgactctgaactccccatggtcctacacaggctgcagtcacagccctggcatggagccaatgtttggatggtcgtgcgtgtaattctgagaaactggtaggaagcccagtgaggccgtgtgatgtggcggaaaggcagggaacaaaagcagaggcaaacctgaccaccgcagatccaggaagacatttctcatgaagcaccccaggccacccctctctaacctaggagagaacagaaaatgtaccttcatttttggaataattttgtgaatgtttctcagcaaataaaaatgtgagaaatcacagaccagcaatctggaatagctgaaatgaccatactttcaagactttcagtatttattcttgaggttggcaaatgtttttaaaaggctcttccttttgaagatcaaagccatgagacaacctatgttaattatacagaagggaagactatatgggggagcagcatttattaatggaattctaggaaagctagtttcaatattccagactcaaatatttcttctctgttaacatcataaccaaatttgaggttcactgttagtgatttcaagagtcagtgatatcaagcagcgacactgtctcagaataacactctcttcctattgctacccaaagtctgtgataaacaggaccacagaattaacatttacaaaatatactttaaaaatggagacaaagtccactaactttatttttatgagtcaattctaattaagtaaattctgattactagaaagctttgggtataaatgtgatcttttggtttgcta

SEQ ID NO: 53113 - DNA, 447 bp, Homo sapiens
gtcaaatcctttctgctgttccaccttcacatcaccaaagtttttgatggctgtactttacttaaattttggggactgtcttattactgggctttttcaggaaatggggtcctaacttccaggaacaggccactttttctttggggaactcttacgattcctagccccatattcttcattaacatctttataatcttgatctgatgtgacccagtgatacaggaatgctcagatggtttgacagttgcacaaccatcttctggaaggcattcttcatccaaatgatcacccctatcttccaaggaatcattcagagtttcttctgaggtagcagctcctgagttttgttttattacattagcctcagggtctacagcctctccttctgactgtagaaccttcttcgaatcttgctctctttaaattgagattgtttcatctttctgg

SEQ ID NO: 53114 - DNA, 3000 bp, Homo sapiens
ctctttccttcacactcccactaaccgcagtgctgggggaacaaaatgtcctccttctggagcgattaccttttcccttttgtgctttgggggaaactgaagacccagaggggttcgcaaagcaaggtgggccagtaggaagacccctccgctagtccagagagagcacacagctccccaggcagagctcattgccccacctgctctagtggcccagcatgatcccatgacctctctacttctggaggaagagtcttggggtagacggcggggagggggtagggtatcccgttccggtaggggcagggatgagggaggcggggctgagccgagcatctatctggatggtaacagccaacgtagaaaatactaagttgtttacatgcattctctcatttcatattacccgtcgtgaagtctgtgaagtaggtactattgtcccaatttttacataggaggaaacggctcagagagaacttaggtcctttgaccgaggtcctgcaggtggtaagtgaaggagctgagattagaacccagatctgcccccagtggcgcctcctcgtggtctgtgggtggtggagacgactggcctagcctcttagctcctctgtgaatagaaaggcctttttcctggctcagacagcttgggaaggggattgttgctgggtaagagaagcttctcccaccacctccatctctttctctgccccttaccattgattcctttctgtcatcccctctcccccactgcaggacaagatgaagctcatcatcctggagcactattctcaggcgagcgagtgggcggctaaatacatcaggaaccgtatcatccagtttaacccagggccagagaagtacttcaccctggggctccccactgggagtaccccacttggctgctacaagaagctgattgaatactataagaatggggacctgtcctttaaatatgtgaagaccttcaacatggatgagtacgtgggccttcctcgagaccacccggagagttaccactccttcatgtggaacaacttcttcaagcacattgacatccacccagaaaacacccacattctggatgggaatgcagtcgacctacaggcagaatgtgatgcctttgaagagaagatcaaggctgcaggtgggatcgagctatttgttggaggcatcggccctgatggacacattgccttcaacgagccaggctccagtctggtgtccaggacccgtgtgaagacgctggccatggataccatcctggccaatgctaggttcttcgatggagaactcaccaaggtgcccaccatggccttgacggtgggggtgggcactgtcatggatgctagagaggtgatgatccttatcacaggtgctcacaaggcatttgctctgtacaaggccatcgaggagggagtgaaccacatgtggaccgtgtctgccttccagcagcatccccgcaccgtgtttgtgtgtgacgaggatgccaccttggagctgaaagtgaagactgtcaagtatttcaaaggtttaatgcttgttcataacaagttggtggaccccttgtacagtatcaaagagaaagaaactgagaaaagccaatcttcgaagaaaccatacagcgattagcctgtgctgggacctagtgtcaagtacccatagggaaaggcaggtctttctggaaattgtctttagaagaaagaattgtatttctttaatctagtatggttactccagataagtgggtgaacttattgttcttggccatgaggctgggagcctagtcacggagtttagctatagggagaatgtttgtaacttaatcagaaaaaaaatatctgcaaaatgtactccatcattctgatgtctgccaaacccaggttgggagttttaaactttttgttctgcttcagccatggttcacacatatgacacactcccgtcaggaatttctctccttacacgcactgattttcaagtgggagggaattaggggcttatgtatattggataccacctctttgaagagtcttgagagtccttcttgcacaggcctgccccttggttgagaaccattgttccaagtgaaggcacaaactctcaatatctaaaataagtgcaaggaagcagtctctttggtcagtaacaagtgcaatggaaagaaaacgatcccttccttcttccactttgcacagcttttctctgaactaggagaacctgggggtggatttgggtgggtggggccaaagaggaggcttctattgataaatccagagcctcaaggggcccagccacgttcaaacttctctccctcagggactctccagcaccaaaagggcagaaggtggaagccgtttttcccccagagccctgtgtttttgtgaaaggcctcactgtgggctcctctgttttacatactcattagtaagtgggaggtccactggggcaacagacactgccacaatttcagtgttgtgttcagccaaggggacggtctggacaggcagcttaagtgtgagtttagtcacaactcctgagtgtcccgctctcctgcttacctaggaggtgagtgccaggaaaatacaccaaatgcttctagtattgtttccccacttaaaatagtcctgcttaaattcacatggtgtggtctgatgttctgagagcatcaggaaatacaacccttttgcccatttacccttctccccggatcccaaggtggtctgttgctctggcttcctttcattgtcttaggccttcatggagtggatgctgcctcctcctggctgtttttgtgcctgtttgaagctactgctgcctccatttctgggaaagacctttgagagcctagcccaggcctaagggctatgtttggtaccagtattttgtctttagcttttctatgtgattgtgccgtcattctgttttaagctcatggatcaatggatttgtttacaatgtgatattttctattaaatccagtattttcaaaaaaaaaaaaaa

SEQ ID NO: 53115 - DNA, 196 bp, Homo sapiens
ggttgttattttttcatatgcagtttttgttaaattttattttaaaattaacaacagtaaaatcaaattgtaataaaattcttttaattttaacacatatgtaatttttgtaactgtcaccacaccacagtcgagatatagaacagttccattacctaaaaatcatcttcatcacagctagctttttttttttttt

SEQ ID NO: 53116 - DNA, 1188 bp, Homo sapiens
tttttttttacatatcatataaatatatttgttcaaactacaaagggatggatatcagggggaagcttttattgctgtggggggacctggagagggaggggggccttggaaatggggatacctgggaccacttgttccccccattcctcacagaaggcacaaatacattatttctttccatgtgaggagatgcgaggagaggatacagaatacaggaatcctcaaaaatacaaaaaacccctccaaactgaatacctaaggttatggaaaaggctagggtggggcacagaagtcaatgggggaacagaaagaggaaccaatgaaactgagaaccaaaagggacctgagaggccatgatgtccatgctgctgcctctgtgcagaccccagagaaaactcaggtaaaccaacggaaactccaaataagagagggtagggtgccccaggaattggctttggggcatcagacaagggagtgtgagtgtgagtgtgtgtgtgcagtggctgtgtatcagaagcaaccagggctaggagtggacgattctattcccacaggggaaggcctcctccatcccggttcctccaaaaccactttcaggggataaattcagccactgcttccgaacaggacccctccctgggacaaaagagcccaggtaggagaggatgaagtgagaaatcttgggatgaaaacagggcacacagaagcagttcttagggaacagaatatcatggagcccagtgtgatagaaaatgggcatgaaacctaagtgtatgcatgtgtgtgagtgtgtgtgtgcatgagtgtgtatttgtgcatgtacgagggagtaagatcactcaaaggtgaaggggtcctgggtgctgaaaaagaagtgtccatccatgtggtcctccagggcatccttgtcactctcagcaggaaagcgctccttacagataggacactccttccatgtgggggtggcagggcccccagtgctggtttctgacagggtacccactgtaaagccactggccatgtcatagaaggcactgcccagttcaggaagcagtaagttggcctcctcacccccactctgcacagctgccatcaggactgacttctcatcttcagcctccgagtcagagctactgtcctcagctggcccagagaggtgaggagaaatgggagccgctggctgatgac

SEQ ID NO: 53117 - DNA, 427 bp, Homo sapiens
cacaagagcccttcctgcagggaacctcaggcttcagagagccgaaaagttgggaggcgtaaccacttacaggccggaagtgtccggggtggacgcattcgggtagccgaagaagtcccaggattgccgaagaagtcccaggatttccgaagcgagccgaagcatcgcgacagttttcagagacagctgatcggttggagctgttgcgccgagcagtcatggcggcggccagagctactacgccggccgatggcgaggagcccgccccggaggctgaggctctggccgcagcccgggagcggagcagccgcttcttgagcggcctggagctggtgaagcagggtgccgaggcgcgcgtgttccgtggccgcttcagggccgcgcggcggtgatcaagcaccgcttcccaagggctaccggcacccgg

SEQ ID NO: 53118 - DNA, 452 bp, Homo sapiens
  misc_feature (1)...(452): n = a,t,c or g
tcgacagacaattgctggaagctgcaaaggctggagatgtcgaaactgtaaaaaaactgtgtactgttcagagtgtcaactgcagagacattgaagggcgtcagtctacaccacttcattttgcagctgggtataacagagtgtccgtggtggaatatctgctacagcatggagctgatgtgcatgctaaagataaaggaggccttgtacctttgcacaatgcatgttcttatggacattatgaagttgcagaacttcttgttaaacatggagcagtagttaatgtagctgatttatggaaatttacacctttacatgaagcagcagcaaaaggaaaatatgaaatttgcaaacttctgctccagcatggtgcagaccctacaaaaaaaaacagggatggaaatactctttggatcttggtaaaaatggagatcccgatattcaaganctgc

SEQ ID NO: 53119 - DNA, 338 bp, Homo sapiens
ttttatggttattgttttctttttttaatgaaactagatcactgcttacaaaaccctgcacaagccctcctgcccatccccttcacagttcccttggctcagcctctcctgtctcacaggaactgcaacaaaatgggtgtggaacagccaccaccacgtccattgaacgacaggaagggagaggccctgggctccgaccctgggccttaagagggtgacagttcttccttccacatccgttcccatggggcctggagttgcatggatgagggtggtccatgccaccatggttctcaggccaccactcagaccagagtgaaatgatgtgaatggtcgac

SEQ ID NO: 53120 - DNA, 535 bp, Homo sapiens
gcgagtttcaatccactttcctgaccccaaccatcctgcccagtctccgcttccccgtcttgtacacccctaactcctgaggctcctccgaatcacgcgagtggaagcggagaagctcaagtggccgccatgtcagaggcttatttccgagtggagtcgggtgcgctggggcctgaggagaactttctttctttggacgacatcctgatgtcccacgagaagctgccggtgcgcacggagaccgccatgcctcgccttggcgctttcttcctggagcggagcgcaggcgccgagactgacaacgcggtcccacagacttttatcggacgttttcgccgcatcatggactcctcacagaatgcttacaacgaagacacttcagccctggtagccaggctagacgagatggagaggggcttatttcaaacagggcagaaaggactgaatgactttcagtgttgggagaaggggcaggcttctcagatcacagcttccaacctcgttcagaattacaagaagagaaaattcactgatt

SEQ ID NO: 53121 - DNA, 558 bp, Homo sapiens
aacctgtagattttccaaaattcactaaaatatgaaaggattgagtagtttattattcatactgagaatacttaatttatttttatctagagatgtttttatcaaaataagagcaaaaagtaaatacaatttttatccgtaaaaactctaaaatctttcaaaaatctgtttaaatctatatagttttatgttttgtatttcctacttatttagcagaaatgatgaagaaactgttctgatggcctgcttttctgtccttttcctactgctttaaacattgattttcttttgtactaaatcatatagccaaatattgtttaagtaagtcagttttaggaaatgcttgtgttgctgttgaattataaaagctgagtaaatttcaggattaaactttaaatgactgtggaaataagggcataaactagttaatggtaatttgcttaaaatgacttgagattattattggaagtttttattaattgatacaggtaagaattgatatttaataaaatggctcatgcttagactatattacttttcggtagagaaattagtatt

SEQ ID NO: 53122 - DNA, 5107 bp, Homo sapiens
tttttttttttgaaatattttaagtttcattttattattgcttgttagttgattaaagtaattcttcttccacttaatttttaaagacagtaattgctacactgaatgaaaccttaatgaagtttcattataagtatctattatcatttgattattttctacatagaagcatgcaaaaagtttaaaattcagtttcatttgacttagccttgactgtaatggaggactctatgaagaggggacacagtgcttatgggctggagtcccagcaactgcttggtggcagagtcccagtcgttccccagttcaagccgtgggcagatagatgggtactgtccttcagttcttcttacccattcacttgcttgctttattgcctcaaaagcccagggaatattcctggaaatagaagggtcatccattttcatcagtgatttgaacactattccctctttttccaacctggtgcgaataaactgtagtaccagcattgtggcaattaggtccaggagacattctcttccttttacacctagagattgaatgcctttttgtttaagaaagctgtgcaaaccatttgtattaagatttaatataagtcccagttctggtgtaagtttccagaagccatcctctgtctgtagactgaggagttctgtccaaggcacagcatcctgcccagtgttgtgtgcacactatttcatcctcttcttttacttccagaaagcacgggatactgtcatcttttgtatcacattttatttgtaaaaagcagctgtcttgaagtacttctgatagctcatcactttctgtgtcagaactttgaaaagcaaagacaggacatcgacttccttcgagactgcctactgattcttctagaagacagagatctactggggtagtccgggactgactgcaaagagcctcaggtaaagcagaggccattggcagcctaaggttggcagtcaaagaggctgcggaaggttgaaaatgaaaaggagagtaagcagagggatgataagacccaaaacctctgatgggatcagggtctgtaggaagagagaaatgaagctggggagaatcccagctcagggaaggtgccagcagaagccctggtagtaaagccttcccaggatgttgcagtggagcagactgtgcagagcttaatgagctccctgaaaaaacaatgccacaatagggtgcagaaggtgggttctggggaggtcctgtgggaacaagacgccgactgtgggatccagtcagcacaagtgccaggcacagggccttggctgaattgagatgcatcaaactgtctgggaggagcagctgaaccgaaactagctacctgacgatatgaggcaaaagacaaggaagcaggactgtgagcgcgggcagtcgggggaagataggaaccaacggccggagccaaaataggaaaaaagctagaagtagatgtttcccatggactgactttcttaaatagtggttcagttgctgttggtttacatgactctgtccaacttaaatccaatagcttttccacacctccacgttccaaatttgatgtgaaagctggtagtacacctaagccatcctcttcaaaatcttcagaaacttctggctgagataattccatttttcttttggaaaatggaattttcctatgttttcgtttggataaacgtaattctggccactcagaggatgctaaaagagactggttcctgacggcttcttggggttccccctgccagctcatgtagggcaggaagtctacatcttctttggcaataagttcagaaacttttggaatatcaggaaaaggtgactcattctcatcccttttctcaactgccacaaagcttgtaaattgtgttatgagagagttttctttactgagtttaataatcagagatttcaaggtttgttttttcatctcatgactggtttcattttcgtgaagaatgccatcttcataatctctgattagagctcgggctgccagcttgtggatcatagttccagttgtcttctgaagctcagtagtcgacaccattgtacaaaattctttctcttgaattagtgcacacagagttgcctgtgtgcagtgaggaatgaatccatagacaaggagtcgatcattgcgaaacaaggatggcacctgggctggggcctgcagggcctcgggcgcaatctggattgagttgctgccatttgacggagacagagtggcaactcggagaacatagcctggtcatttggtcttctatctgttttctccaactatgcttggattttgcattaaaatattcaaatactccggcaccacactgggacaaaatccttaagacgtgacgatttgctgtagaaccgataccgcaggcgaataacctggtgtgcgggcggctcctcttcacgagctgtaatgtcaggctctcatcctggaggtgcccatcagacaccaggaggatgttccgtgaccctcgagcagggtacaataagctaagatatcggagtgttttccagaagtctgtgttccccatggtaggtgtggcagacatgatgaactctgctgccgtggtattgcttgtgatatgcttaggatacgaaaatagctccttgtaacctgtgccgaactggataatatttactttctgcttctcacccaccaaggacagcgcatgcaaggcgatttccttggcttgcaagaatgtcacaccctccatggaactggagcagtcaagacaaataatcacttcgctctcattggctaggtcagggaggtcgacatcgagatcgggttgaaagacaagcatgcaagcctcgctttctttttctggatgtttttcaacccacattcttgggagataggcagcagacaaaccgatgtggagagaaaatccactgctgtctaaggagctgccttccatggtgctaatgacagctttgcagtctgtgcgcttttgtttcagttcatgagtatcactgaaaatgaattcaatcacgtacggcatctcaatagacatagtcaaagagaagctttgctttgttcctatttcttttatacaaatcttctctactgtatcctgaaggttttcattcaaagccttgtcctgttgccagggtgctacggtggcgggcatgaaaaagacaccaacagtgcccaggatgctgagttctgtgatgtaggtaatttttataagaaccttagccttagggggtaagtttccaacacttacagtaaaaacgtccggagcatcctgactcatcaggtaagcgccatggccctgggtcacggcttctaggtactcttgctgggcttcttccttctctttaatctctccaactatgtgcttcccattgatgaaggcttcgaagccacacacagcggccttgtcatccaaaggaaagatatattttgcctcaatgggcacgtgacttttatttgtgtatgtctgaaaaacaatgacctgggctacagtgtctatgattctccctttgatgtggacatcctccagaggaaccaagttcccagaagcatcctggaggccggccttggtgctgctggaagttttggcatctggtaactggtaatcttcaacctttgaaaaatttgaaaactcaggtctgtattcctctaattcagtatgatcactaggatgaaagtcctttatctgatctccaggcatggaaaatttaataatatatttcattttaacctgattggttttatagacaacaaattcatcatcctcaaagtctgtggtgacagaggctgtttgtgaaactccatgcacactgtcgtagcctggtggtgcttcagttaaggaaaagtccttctcatgtaagtccatacactttccgagggctacgtcacaaatgagcaggagtctggtgccatctgtctctcccgggtgtgagtacttgatacttgtactgagcgaatcactgaaataaatcccacttccaaggtttccgacgtctgttctttgcacaccacgatcttccactactttgggtaaaagcaaccctcgacacaagattcccacgatgttttgtacaggagaaccatgcaacaagggcctcacattaccaagtttgctcaaaaactctgtggtttcattcactctgccaactctaaatatctgcaagacatccactgggctcttactgtgatgattctgcaaaacctcttttctaaccctgagaaattcttcagtattctgttcaacatgctcaattttgcacctcaaagctcggtatttggccagggatggtgggttgggtttggacaaattagtttcacagacattaaccatgtctcttattagctggcagaggtctgctttcttagccaatagtcccaggttcacttctttgggcattgtgcctttgtgaggtatcagtctgtaaaactctgtcatcatcttttgcaattgctctgctgtttctccatttttcagtgctgcctttactagaaggagaatcccctctgccttgctcacatcgttgaggctaatcctgttcactggcttgagaagcatgtgttccaggtggcccagggcctctgcccaaatcatctctactaaatcgctcacctcttggctcagagtgcttgaattcatgacttcctccaaaagcaatgcttgcaattgttcagatgctaattgggttgcttcaggtgtgaaatgttctcttagtagaaatccttgtttcttcagttcttcaatgtaattttcaaagtattcacttgcatcttcagaggttttctttatagcaaactgtcttctagtctccatgccatcatccaggaggaagtgtgaggatatcaggaaaggacagtccctggagtcccgcgaacactgaagctccaccaccacagcttcctggcctccctccattcccactttctccaaggtgttatattttgcaacttcaaaatcttgaggaagatgaggaatttcaacattctgcataccaaactcagtgagttccacagtgtcttcctcctctgtggcactgtccgggcatagaccttctgttttcacttcagaactgctcgccttctgatcaggaggtggtgtgatgtccaggggcttataaggat

SEQ ID NO: 53123 - DNA, 990 bp, Homo sapiens
cagaattagaagaagctttgacaagtgcttctgatacagaattgtgtgacctcgcagcaattcttgggatgcacaatttgataacgaatacaaagttctgtaatataatgggaagtagtaatggtgttgaccaagaacatttttcaaatgtggtcaaaggtgaaaagattcttccggtatttgatgagccaccaaatccaaccaatgtagaagagagtttgaagagaactaaagaaaacgatgctcatcttgttgaagttaatttgaataatataaagaatatcccaattccaaccctaaaagattttgcaaaggctttggaaaccaacacacatgtgaaatgtttcagtcttgcagccacccggagcaatgaccctgttgctactgcttttgcagaaatgctgaaagtgaacaaaactttgaagagcttaaatgtggagtccaactttatcacgggagttgggattctggcactgattgatgcgttaagagataatgaaaccctggcagagctcaagattgacaatcagaggcagcagttggggacagctgtagaattggaaatggccaagatgcttgaggaaaatacaaatatccttaaatttggatatcagtttacacagcagggaccacgaaccagagcagctaatgctataacaaaaaacaatgacttagtgcgtaagagacgagttgaaggagatcaccagtaagtctgcaaaggtgtaatctttggaagacttcagaagatcaccaagggctcatgttggtgacatcatgtaaaattttcctgggtagaagggaaaagactggaaaaatttttttagtgacatgcattttttttttagttgttatcaaattgtaaaatcagtaatgtgatattttatattctgaaacatttctactttctgctaaaatcaattttaatttagtttaattgaatgatttatgatgaatcttgggcaaaaaaatacaactgtaaaaaatttcaaa

SEQ ID NO: 53124 - DNA, 1438 bp, Homo sapiens
tttttttttttttaacgttttaattaaatggatttatttaaaaagactataaaatctgacatcaagagagataaaaaaaaaagacccataagatttaaattgacaaatataaaatgattggctacaatgtaaaaatacatttcccagcccccaaacaaaacacaagtatagtaattataaaatttttgtactgtgagttcatttctcttataattcttgagaaccattctaagcaatctatttgtataaaatataaaatttatcataactgttaatttaaaaattattttaaatttgagtttattgaatttgccatttttttgtacataacagtggtttctggtcccaagttccccttgaacttatttactacaatggtctttttactcctatttatttccttctacaatagaaaagaaaggctaaccattcatgggtcccataaaaaacaatgtgaaggaaggttctaagagtgaccaaatataccagtgaacatactatctttctgaaaaagaaagaattaagtgaccaactaagagatccacttttgcaccaatgaaacacatggaggtgaaacctcagaacaagcggagcttaagctcaatgacagtatgttttatatgacaggccagctgagaatgtatctgtcaatcctgactaagcccaatacatgggtggtgaccctgaggtagcccagatgatatgctctgaattttagataggtctaaatcacaatggtacagtctgatgtgaaactttagtctacctaccataaactcgttttctgaatcagtccttattcataattagacccaaaacccagctatttctcctctcttagatgacatgcccaataaaaacagcatccatgattggtttcattatctcccaattaagtagtggtgacaccaccactaacactagtatccaaactctgatacaaatcctaaaggtattgagtcagtaagacagagcagaagctatgttgggccatactgaccaatttctgagaaccacattagccacattcatgcaattaaaacccatctaagacacacaaatggcagatgagaaaaaaaaaaaaggatgaggtcattaaactttatcactggaaacatgattccactgtttcaaataggaaacctaccctgggagacttcccaccaaagtgcagaaggacctgatgcacgggctcatcatcttaacactagagtcccaagtcaaaactctaggaggaggataagaaaggtctagtctgtgaatcacctggacagaaaggtcatatcccaagtgccctgcctatctgtgacagctgctagccaacagacaattctggttatgaagttatctcttgagaatggcttgattctcttatgccaccaacagtattagtctgggcagggttccctggatatttacttttttttttttttttttt

SEQ ID NO: 53125 - DNA, 2645 bp, Homo sapiens
gcgcatcagagctcgggaccggcccaggagcagcgggtggagatggagatgattcgctatacccgatcgcggttttaatcgacgagctccgcaatgaagacgtgcagctccgactcaacagtattaagaagttatcaacaattgccctagcacttggagtagaaaggacccgaagtgaattgttgccatttcttacagatacaatttatgatgaagatgaggtactattagctcttgctgagcagctgggaaatttcactggcctaagtgggaggtcctgactttgcccactgtctgctgcctcctttggaaaatctggcaactgtggaagagactgttgttcgtgacaaggctgtggagtccctgagacagatctcccaggagcatactcctgttgctctggaagcttattttgtacctctggtgaaacgcttagcaagtggggattggttcacctctcgcacatctgcatgtggtttgttcagcgtttgctatcccagggcatcaaatgctgttaaagcagaaaccagacagcaattccgttccttgtgctcagatgacacaccaatggtacgacgtgctgctgcttccaaattgggtgaatttgcaaaagttttggaattagacagtgtgaaaagtgaaattgttccactgttcactagtctagcttcagatgaacaggattcagtgcgcctccttgctgtggaagcttgtgtcagtattgcccagttattgtctcaggatgaccttgagactttggtgatgcctacacttcgacaagcagcagaagataaatcttggcgcgttcgctatatggtggctgacagattttcagagctccagaaagccatgggtcctaaaatcaccctaaatgacctcatccccgcctttcagaacctacttaaagactgtgaagctgaagtccgggcagctgctgcccacaaagtaaaagaacttggtgagaacttgcccattgaagatagagagaccataattatgaatcaaattctgccttatataaaggaattagtatccgataccaatcaacatgtcaaatcggctctagcttctgtaattatgggattgtctactattttgggcaaagaaaataccattgaacatcttctacctcttttcttagctcagttaaaggatgagtgtcctgacgttcgtttgaatatcatctccaatttggattgtgtaaatgaagtgattggaatccgtcggctctctcagtctctccttcctgccatagtggagctggcagaagatgccaaatggagggtccgcctggccatcattgagtatatgccgctgctggcaggccagctgggtgtggaattctttgatgaaaagctgaattctttatgtatggcttggctcgtggaccatgtatacgccatccgagaagctgccaccaacaacctcatgaaactagttcagaagtttggtacagagtgggcccaaaatactattgttcccaaagtgttagtaatggcaaatgatcctaattacttgcatagaatgaccactttattctgcattaatgcactgtctgaggcctgtggtcaggaaataactactaagcaaatgctgcccatcgtattaaaaatggcaggagaccaagtagcaaatgttcgcttcaatgtggccaaatctctacaaaagattggaccaattctagataccaatgctttacagggagaagtgaagccagtactacagaagttaggtcaagatgaagacatggatgtcaaatactttgcacaggaagctataagtgttcttgcattggcataatgaggagcaggagggaaaaggcctttactagattcttgtcacaaatttctagtcaatgtgttcttaactgggtggagaaagaatggaaaaccttcaagatctcatccaagcaaatggcaacaacttagaagaaatcatttagtgacttaattctttctaaagatgaaatgggattgttttttactcgtcttccttgttaaatcattatttaagccgttcttattgaccaattcctgacacttgattgtctcctaatgctttatccatcaccacctgggctcctgcatcctcactgtggaatcaggcaccagccacataatgttccagacaaagcctggaagggtgtggacccagacgtggagtggagtgattctcttgacgtttacatatatctctgtgtctctccatcattccaaagctaaatgtacatgtttagaataacttattttataaactcttcgggagacatgttgagatttgaccgtaatgaaagccacattttcctgaattatgatggtctgcattagtctcatgtgaaaggggaatgtggaagctcaggggttaatgtagtggttgttttggtttttatttgctcaattttgtctgtactcatgtcattcagaaacctgaagtgtggctgcatcttgctgctaatgtgtgatgttgacgcctaactgaatttgaacagctcaccactgtgcctacatttaaaaatacttctctctcttttctaaaaagctttaactgtagtgcctcctaataagcagtatgtttgtttcattgtgagattgcagttctgtatttcgaaatgagtctaagaacccacagggataaatactgtgcaa

SEQ ID NO: 53126 - DNA, 1542 bp, Homo sapiens
ggaggggacataggaggcggccatggcgacccccggcaacctagggtcctctgtcctggcgagcaagaccaagaccaagaagaagcacttcgtagcgcagaaagtgaagctgtttcgggccagcgacccgctgctcagcgtcctcatgtggggggtaaaccactcgatcaatgaactgagccatgttcaaatccctgttatgttgatgccagatgacttcaaagcctattcaaaaataaaggtggacaatcacctttttaacaaagaaaacatgccgagccatttcaagtttaaggaatactgcccgatggtcttccgtaacctgcgggagaggtttggaattgatgatcaagatttccagaattccctgaccaggagcgcacccctccccaacgactcccaggcccgcagtggagctcgttttcacacttcctacgacaaaagatacatcatcaagactattaccagtgaagacgtggccgaaatgcacaacatcctgaagaaataccaccagtacatagtggaatgtcatgggatcacccttcttccccagttcttgggcatgtaccggcttaatgttgatggagttgaaatatatgtgatagttacaagaaatgtattcagccaccgtttgtctgtgtataggaaatacgacttaaagggctctacagtggctagagaagctagtgacaaagaaaaggccaaagaactgccaactctgaaagataatgatttcattaatgagggccaaaagatttatattgatgacaacagcaagaaggtcttcctggaaaaactaaaaaaggatgttgagtttctggcccagctgaagctcatggactacagtctgctggtgggaattcatgatgtggagagagccgaacaggaggaagtggagtgtgaggagaacgatggggaggaggagggcgagagcgatggcacccacccggtgggaacccccccagatagccccgggaatacactgaacagctcaccacccctggctcccggggagttcgatccgaacatcgacgtctatggaattaagtgccatgaaaactcgcctaggaaggaggtgtacttcatggcaattattgacatccttactcattatgatgcaaaaaagaaagctgcccatgctgcaaaaactgttaaacatggctgcgcggagatctccaccgtgaacccagaacagtattcaaagcgctttttggactttattggccacatcttgacgtaacctcctgcgcagcctcggacagacatgaacattggatggacagaggtggcttcggtgtaggaaaaatgaaaaccaaactcagtgaagtactcatcttgcaggaagcaaacctccttgtttacatcttcaggccaagatgactgatttgggggctactcgctttacagctacctgattttcccagcatcgttctagctatttctgactttgtgtatatgtgtgtgtgtgtgtgttgggggggggtgagtgtgtgcccgcgtgtgcatttaaagcataaattaattaaacagccacttcggtca

SEQ ID NO: 53127 - DNA, 469 bp, Homo sapiens
  misc_feature (1)...(469): n = a,t,c or g
aaacatgtgcctagtttgcagcaccaaatactggtcttctcagaagtgtttctgtttttttgtttttgtttttgtttttgtttttgtttttgttttgtttaatttcctcttctggcatcccaatttggatcatttcctctctttctttcctgggagaaacaggatggcaggtgctggagcccagagaggctaaatgacatttagcctccagctaaaatgatttaaatgggaaaggagaatgacagcaaagcctcacgtgaactttaatgaccctatcaatgacctttactaactgactcttgggtacccgggattgttgaggagggtgagtgggggactaaaaagccagggatncaaggatcagggttngcttccacacattttgcaggntcagggaaccccggggaatatggagttaggaccccaggaaagtatttggaactggggacatttgatggaggctttgagg

SEQ ID NO: 53128 - DNA, 412 bp, Homo sapiens
ggggcgcttcacaggcgcagcgacagcgacagcgacagctcgaacctgagtcccaggattccggggactggagggcagcgccggcagccaagatgcaacttctccaggagtgcttatgttacccaaagagaaacagatgcacaaagagaaggaatgagatgctcggggatattttatcaaggaaaccagcaaaccgtctttttcctgaagaccttttaagattaggacaagcagctgtttataaaagcagaacagtgttaagatttgaactgtaaagtaggatcatgctttgaagtatattctagctaaaagcaggggataaactagataaaacttggagactctaagacctgaccctgattaagtgggcctacaagtgaggaatctgaaggaacagctctctggctgaaca

SEQ ID NO: 53129 - DNA, 408 bp, Homo sapiens
cccctgtcagttcccattttgacagcattttgttattgtcattgatgacattattaatatagaagcaggaaaaaagctcaaatagatttctttcatcctctagtctggtctgaaagttcaaataccttcttttgccaacggtagtcaggtgatgtcaccaagcaaagagacccctgagcagccctgagacttccggatatttcctgcacctgcggtattggagaagatgctgtgaatatccagataggcttctctccaaagagtcagagctgaaaataccacggaagtggtttttggatccttcctgggggatcctgccagggacatggcctggctcaagctctagcaggggaagtctggtatcaagtctcacctggcaggaattgagcccagaatggaatatgctac

SEQ ID NO: 53130 - DNA, 4096 bp, Homo sapiens
  misc_feature (1)...(4096): n = a,t,c or g
ggaattcgggggcggcgccgcgggccgggtcgtcccctcctgtagcccacacccttcttaaagcggcggcgggaagatgaggcttcgggagccgctcctgagccggagcgccgcgatgccaggcgcgtccctacagcgggcctgccgcctgctcgtggccgtctgcgctctggcaccttggcgtcaccctcgtttactacctggctggccgcgacctgagccgcctgccccaactggtcggagtctccacaccgctgcagggcggctcgaacagtgccgccgccatcgggcagtcctccggggagctccggaccggaggggcccggccgccgcctcctctaggcgcctcctcccagccgcgcccgggtggcgactccagcccagtcgtggattctggccctggccccgctagcaacttgacctcggtcccagtgccccacaccaccgcactgtcgctgcccgcctgccctgaggagtccccgctgcttgtgggccccatgctgattgagtttaacatgcctgtggacctggagctcgtggcaaagcagaacccaaatgtgaagatgggcggccgctatgcccccagggactgcgtctctcctcacaaggtggccatcatcattccattccgcaaccggcaggagcacctcaagtactggctatattatttgcacccagtcctgcagcgccagcagctggactatggcatctatggcatctatgttatcaaccaggcgggagacactatattcaatcgtgctaagctcctcaatgttggctttcaagaagccttgaaggactatgactacacctgctttgtgtttagtgacgtggacctcattccaatgaatgaccataatgcgtacaggtgtttttcacagccacggcacatttccgttgcaatggataagtttggattcagcctaccttatgttcagtattttggaggtgtctctgctctaagtaaacaacagtttctaaccatcaatggatttcctaataattattggggctggggaggagaagatgatgacatttttaacagattagtttttagaggcatgtctatatctcgcccaaatgctgtggtcgggaggtgtcgcatgatccgccactcaagagacaagaaaaatgaacccaatcctcagaggtttgaccgaattgcacacacaaaggagacaatgctctctgatggtttgaactcactcacctaccaggtgctggatgtacagagatacccattgtatacccaaatcacagtggacatcgggacaccgagctagcgttttggtacacggataagagacctgaaattagccagggacctctgctgtgtgtctctgccaatctgctgggctggtccctctcatttttaccagtctgagtgacaggtccccttcgctcatcattcagatggctttccagatgaccaggacgagtgggatattttgcccccaacttggctcggcatgtgaattcttagctctgcaaggtgtttatgcctttgcgggtttcttgatgtgttcgcagtgtcacccaagagtcagaactgtacacatcccaaaatttggtggccgtggaacacattcccggtgatagaattgctaaattgtcgtgaaataggttagaatttttctttaaattatggttttcttattcgtgaaaattcggagagtgctgctaaaattggattggtgtgatctttttggtagttgtaatttaacagaaaaacacaaaatttcaaccattcttaatgttacgtcctccccccacccccttctttcagtggtatgcaaccactgcaatcactgtgcatatgtcttttcttagcaaaaggattttaaaacttgagccctggaccttttgtcctatgtgtgtggattccagggcaactctagcatcagagcaaaagccttgggtttctcgcattcagtggcctatctccagattgtctgatttctgaatgtaaagttgttgtgtttttttttaaatagtagtttgtagtattttaaagaaagaacagatcgagttctaattatgatctagcttgattttgtgttgatccaaatttgcatagctgtttaatgttaagtcatgacaatttatttttcttggcatgctatgtaaacttgaatttcctatgtatttttattgtggtgttttaaatatggggaggggtattgagcattttttagggagaaaaataaatatatgctgtagtggccacaaataggcctatgatttagctggcaggccaggttttctcaagagcaaaatcaccctctggccccttggcaggtaaggcctcccggtcagcattatcctgccagacctcggggaggatacctgggagacagaagcctctgcacctactgtgcagaactctccacttccccaaccctccccaggtgggcagggcggagggagcctcagcctccttagactgacccctcaggcccctaggctggggggttgtaaataacagcagtcaggttgtttaccagccctttgcacctccccaggcagagggagcctctgttctggtgggggccacctccctcagaggctctgctagccacactccgtggcccaccctttgttaccagttcttcctccttcctcttttcccctgcctttctcattccttccttcgtctccctttttgttcctttgcctcttgcctgtcccctaaaacttgactgtggcactcagggtcaaacagactatccattccccagcatgaatgtgccttttaattagtgatctagaaagaagttcagccgcacccacaccccaactccctcccaagaacttcggtcctaaagcctcctgttccacctcaggttttcacaggtgctcacaccacagttgaggctcacacacaggtctgtctgtcacaaacccacctctgttgggagctattgagccacctgggatgagatgacacaagacactcctaccactgagcgcctttgtccaggtgccagcctgggctcaggttccaagactcagctgcctaatcccagggttgagccttgtgctcgtggcggaccccaaaccactgccctcctgggtaccagccctcagtgtggaggctgagctggtgcctggccccagtcttatctgtgcctttactgctttgcgcatctcagatgctaacttggttctttttccagaagcctttgtattggttaaaaattattttccattgcagaagcagctggactatgcaaaaagtatttctctgtcagttccccactctataccaaggatattattaaaactagaaatgactgcattgagagggagttgtgggaaataagaagaatgaaagcctctctttctgtccgcagatcctgacttttccaaagtgccttaaaagaaatcagacaaatgccctgagtggtaacttctgtgttattttactcttaaaaccaaactctaccnnnnnnnnnnnnnnnnnnnnnnnnnnnnnnnnnnggttaccttctcattcatgtcaagtatgtggttcattcttagaaccaagggaaatactgctccccccatttgctgacgtagtgctctcatgggctcacctgggcccaaggcacagccagggcacagttaggcctgggatgtttgcctggtccgtgagatgccgcgggtcctgtttccttactggggatttcagggctgggggttcagggagcatttccttttcctgggagttatgaccgcgaagttgtcatgtgccgtgcccttttctgtttctgtgtatcctattgctggtgactctgtgtgaactggcctttgggaaagatcagagagggcagaggtggcacaggacagtaaaggagatgctgtgctggccttcagcctggacagggtctctgctgactgccaggggcgggggctctgcatagccaggatgacggctttcatgtcccagagacctgttgtgctgtgtattttgatttcctgtgtatgcaaatgtgtgtatttaccattgtgtagggggctgtgtctgatcttggtgttcaaaacagaactgtatttttgcctttaaaattaaataatataacgtgaataaatgaccctatctttgtaactgcag

SEQ ID NO: 53131 - DNA, 507 bp, Homo sapiens
ggctggtcgcctgcagggatgggggacgagcggccccactactacgggaaacacggaacgccacagaagtatgatcccactttcaaaggacccatttacaataggggctgcacggatatcatatgctgtgtgttcctgctcctggccattgtgggctacgtggctgtaggcatcatagcctggactcatggagaccctcgaaaggtgatctaccccactgatagccggggcgagttctgcgggcagaagggcacaaaaaacgagaacaaaccctatctgttttatttcaacattgtgaaatgtgccagccccctggttctgctggaattccaatgtcccactccccagatctgcgtggaaaaatgccccgaccgctacctcacgtacctgaatgctcgcagctcccgggactttgagtactataagcagttctgtgttcctggggttcaagaacaataaaggagtggctgaggtgttttcgagatgggtgactgccctgctgttcct

SEQ ID NO: 53132 - DNA, 1387 bp, Homo sapiens
ccagcctccagctgggctacatcgaccttcctcctccgaggctgggtgagaatgggctacccatctctgaagaccccgacggcccccgaaagaggagccggaccaggaagcaggtggcttgtgagatctgcggcaagatcttccgtgatgtgtatcatcttaaccggcacaagctgtcccactctggggagaagccctactcctgccctgtgtgtgggttgcggttcaagagaaaagaccgcatgtcctaccatgtgcggtcccatgatggggtccgtgggcaagccttacatctgccagagctgtggggaaaggcttctccaggcctgatcacttgaacggacatatcaagcaggtgcacacttctgagcggcctcacaagtgtcaggtgtgggttgggagcagcagcgtcctgccgcccgtggaacctcttcctagcgacctgccatcatgggactttgcccagcctgctttgtggaggtcgtcccattcggttcctgacaccgccttttccctttctctaaaaaaatcattcccagcccttgaaaacctgggcccagcacactccagcaacactctcttctgcccagccccgccgggatatctgaggcagggctggaccaccccagaggcagcagggcctttacccagtggcctgttggctagcctgggcctccctggagagggttgacagtggaagggaacaggaggggcatttggcctgagacccctgcttttgggagaggctagcagggtggttcctgcccagcatgcccagctcctccctgggtgactcggagtctttcccatgtcagagcccccaaatgggggtagcaaggagcacctttctggaaccccctatagcatccaagtttctttctgggctctcttgccttttcccccctttcacagatggcacccctgggcatctgtccttgcctaggtgattttggaggttggtgccttcctgggaactagccaccagcttatctgcttcccttcccctggcatcacttcccataggcctggggtttctagactggggcctggccacccctttccccactccacgagtgagtcggcctccagagaagactggcacaattccaactagagtcaacccatgctgccctctgcccttcccactcagatctagatcctgctttcatttctggctagtgaagtagacttttgtgtttttgaggtttattagcaggtctgctcaggaaccaaactaatgagtagctttatattgggccaccccaatatatggctttgggggctgaaaaagcagatgtagaccccctccctcggatccttattggtgtgccctttagcactccgcagactctgcggggtgaacaggagtgatgataaaatttttcat

SEQ ID NO: 53133 - DNA, 433 bp, Homo sapiens
agcgcatgccatattacctgaagcctcaacatcccatattgtgcagttccctgaaatacaacacctacttcagcagcccccagatcttcaaccagaaaacactgaacctcaaaaccagcaaattttacaaatgtcatatcaagatattagatcagaagttatgggaagagaccaaaggaatgggaaatctgaggagggaactccattaggaaggaaaatcctcaagacggcattccttaaaccagcaaaccaaaggccttgcaatacttaaggagacattctttagacgtgcaagccaaaggccagaaatcctcaaagaggcattccttagatcagcaaagcaaaggctggcaatctccaaagcagaaatccttagaccagcaaatcaaagactggctatccccaaagaggcctccgtagataagcaagctca

SEQ ID NO: 53134 - DNA, 656 bp, Homo sapiens
tttttttttttttttttttcataatacttttttttattacaatatccaaaaaactgggtatgcaagtttaggggatctcaagaccccttcttcaatcgtaggaatgtgccatctcaagacgttatatttaaactataaagaagttcaaatgtaaaggaaaaagaaaatgcaatttcttcataaacattctgtgtgtctcttactaccaatcacatactcttttgtaaaccctgaaaaatttccctgtaaataatatatatatatagtgtgtgtgtgtgtgtgcacgtgtgtgtgtgtataaagtgttggtagctcccttccccaaagatcagctgttttccttaatcatctgtattagtgtcaacaaacggctacagatacatatttctttgagaattaaatacataattgtgagattcaaacaagccgaagggcaagaggaaaaagcactatgtggatggcacatttggggtaaattaccaaaacatctgtctttctgagtcaccgggttccctcttttgcagactgcctttccaggaaattctttctttattgcaagcacagccccaaaggcactgggcagtctcctcactgccatcgcacccggtggttccagtattgctatcagcaaacgtatcggctccctgcacagtccg

SEQ ID NO: 53135 - DNA, 1576 bp, Homo sapiens
tttagaaaagaatcaatatattttatttggcaaaaagttaaatatcatctcaacacaacaatttggtcagtaggccttgaggtaactattgcaaaatatacagtgtaagttcagtctgatggaaaccccagattcatcaaggatacaaatctacagtagcccaatggcggtttcatagtgtataatttattatcaataaaattaactccgttacaatcagcattcatttcctccgattaaaattaagcataaaccctaggtagtaaccttctgcacatatgtatagctccgaatttcctcactgttcgtctggtgcaaaaacaatattcaagcttgtctgattatgcattacgcttgtctgattatgcatattttctttaatcatatagattatatatacaatagacaagacaggactatatagataatggacagacttaaatgcccgcatttttaaggtggagaaaatgatgaatctatgcatccccgagaacacttaaaatttttttttatttcactgggaaattcttacagctactttacaatcataggttaacagcctagttatacagaagacatattccactacagagctatactctatgcaactgtttttttcccctcataaacaacctgagttcaaattgaattctatcttccacaatcacaatgggtgcatcacccagtacacagaagtttgaatcacaaaacataattaccacaataaaacacagtgttcaagtatcttggcagagcaatctgccgcacaaactgcaaattaaattaactacacagactaaaaactatacagcctaccatcaacagttgtgcattataaaaaggtagtttctttccttttgttttaagtcaggaacaggtagatttttaaaaatatatatacaagctaacacacacagctatcagcactaatgccccccctcaacttttcctttttcttatagaaaatgaaagcttacaatacctcctccatcaaagcggcaggcctacgagccagcctgaacagggtttgccttggaaaagatgtggcctgaggtttagagccgctttgtgcggggatggtggaggctagggtgggggtgagaaaagggagaaggcggaagggggacggacagttctttctttttctctctagcttacccttttttctaaataagcccaaatggcatcactcgtcttttgctcggtctttgttgattttcttcattttcatcctgcggttctggaaccagatcttgacctgcctctcggtgaggttgagcagtcgagccacctcgtacctgcggtccctggtgaggtacatgttgaacagaaactctttctccagttccagggtctggtgttttgtataggggcaccgctttttccgagtggagcgcgcatgaagccagttggctgctgggttatctgctgtgaccaggtggaggtgtgtggtggaaggggaaagccggccggctggcaaagcgctgcggagaaagacacgaggctcctgagcagggaaagccgaggttgccaccgcaggcctggcacgaccagggccgtgatgccccgcgcggcc

SEQ ID NO: 53136 - DNA, 1770 bp, Homo sapiens
ccttaactcttaattattggaaatacccaaacctcaatgccttaccccatatggaaggcaaaatcctgtattcccaattcacacatgaaaattacacgagaggtaagtcaaaaatgcttcctttattacataaagccaatactgctacttctaagttcaactgtttgtgcatctctatatcgttcaaagtgttacgcccgtgatattaacaatgaccgcttccaagtgtcagtgaacagtggctccctgtgagtgtcatcatggtacctctccccattgcacacaagtcaacaaactgctctagaaagttaagttctcccaggcccagagtaaacatatactcaatattcttccatactttattataccataagaagcaaacttctgaaggagatacaattaaagataccacaggtgtcctagcttgtcaatattctgttttatcattttcattaacaaagcagattacaatgtagccctaatttgcattataattagttgttacaagacactgcacattctcctgaagacacacaatgatttccaagatgccaggtcactcttccaatcagtgaatggcgagctcactggcaggtgcagggctacttcctgtattccaatgatgtgcctgaaatagcgctttgcaagatgagcgtggattatgtggacacaattttgaggcaatctccattacacatttggtagaagactgcctaacttaatcttactattagtgtattagtgttgttatattatgaagacatattatattccattattctgcttagctcaaggaagaataaagaatttggaccaaaattataaccagattatgagcaatttcctaagcaaaagaaacaaagtaaatgctgaggttaataaagatgtaataattctcttcacatggcctttactgtttgtgaactgtgtaatttaaaatcctgagcttaacaaaaatctttataaatcaactcatcaaaacaggcatttggccaataagaatttaatttcacatcaataaaactttagactttagatttatttagggctgtttgcatatgtttatagaatagtttactctaaaagatgacaagacagctccccctcagtgagaccctggcctaaatatatttgctttatttatatagcaagaggataacattaaacatggaagctttcaatttgtggcactgaataatctacacagggcatccttcaaaggctacaattaaggatccacctaacttttcagcaatacaagcccgattgagatcttctggtccatttgcttgacattcatgttttatgccttgaaatttctttttaattgcatccttggagcttgcatagatcattttacttttcagaggtgctagttctggtgcccacaaaaaaaacatcaactcttcttttctggattcttttgtttcaaagcttgcatcatacaaagcatagcgacaatctttttcaggaagcattcccacaaaatgcttgaaaggatcagttatggttacaccaacatctccaaccaagatctctttgccttcttctacaatgatgcactttttgtctgcactgagacaaaaaatgacagccttctttcttttcttgatttcttctggtgtggagcatttacgaactttcatgtcataaaaaatgcgacatacttcatcagctacttgcactcctgaggccatcttcgccgcggcggtcgcagggacgcgggggagggagccggcgggcagcgagtatgcagaccgtcctcctcac

SEQ ID NO: 53137 - DNA, 525 bp, Homo sapiens
ttaaagtaaaataccattgggattcacagtttattgaaatttaataaaaattatttccaaagaatgagaatcctggggtagcgaggcaattaattaagcaattcatcttaaaagatggaatacttggaacaccttagccatcattcaatgccaaaatgtttgggtttttttcatatcacatccgtcctatcttttcatcttcagtgaatcattcctcatgtttgtaattaaagccatatttaccatcataatctgcagtcacccgagctcattttgctctgaagccagtgatattaagctgttctatttctaacgtgtcccttaacttgattctagtaaaagcagcaagcagtggtatttaatatacaaactcatcaaattccacataaaacatttaaccacagttttaaaaactcaagtgtcctttacactagctaccttggaagtagtactgcacttttctcaccatgttgtcattgtgttatgcattcttgggaatttcccttttgtaattaccttaagatc

SEQ ID NO: 53138 - DNA, 880 bp, Homo sapiens
catgggtctttctacatcctgttattgtcatggcaacggcgctatgattcttttccatcagaagaggaaaggactaaactgtttcattctccaacactgtattactttagaaacataataataaatattattcatcaaaaaccctgttcatgatgtaggagtctggccaaaaagtttttttttgaggctctttctagctccacaacccaactgcctgtgaatgactttacactcaagatgttacacctagtaaattaacgggagaaaggtaagatgaaatccattcatatattggactgccttttaatcattcacaatgaaagaaatctcaggcattgccaatgtcatttaaattgcattcatatttaaacatgacttaaccatattaccaggcgtttccaactctgagtttacagtatgttttgatttgatcattacagattataaatttgagctggttttaaaatttctggcattgacttaagtttatatacatagcaaatgttgtatgctagcagcaaaataaattttccccaaagagtcaaaacttttactcagaacatacatttagctaataaactcctataattaactaccaaattggctgaaatttagggattagggatctgctacagtaaagggattcatctggggataaatcagtttgcacttggcaacatgactgagtaacgggtgggctctttatgtctatgctgaaaggcctggactgaatagatggtttgagaacatggtggggtccctgggtcttcttacgtccctagtcagtctggaagactaaggtttgagccaggcctttaatgagccccttccctcttccttgcaagcaatactgaggctgactcaggttcaagactactct

SEQ ID NO: 53139 - DNA, 422 bp, Homo sapiens
tttaagttgacatgtgtatttattgcacaaatatcccctagaactgggaggttattataatacaagtgtacatttgagaaatgtatacagaacaagaaacagctatgtacatatccaacatctaagtaacttagaaaaagcagaacaatctcataagacatctaccagaagtaggcattatgtaaaatctgtttttttaagtgatcatccccagagtatgccaattggaacaaaacaaaatctgtactagtatgtttttattgcacttaacattttcaaactcaaaattaagacatattaataaaagccagaaatatttaaaatcaaaccaattagtttatatacaagaaaaaattagttttaattctataatgtaaaagatcccttttttatttcctgtttcaataaacaggttttttttg

SEQ ID NO: 53140 - DNA, 1242 bp, Homo sapiens
  misc_feature (1)...(1242): n = a,t,c or g
gctcgacttttttttttttttatcgtttggagaagtttattaccacccctaccctccagtgggatctcaatgtcacgatgagtccggggctggctttccgccgggaccctcctgtcctggcacatggcccaccccagcacgaagcctggccgggagggctcaggtgggtggctgctaggccaggcctccccagaacgactgccccatgtccagcctgtatctcctgagtgccatgctgcactggggagggacagggctggctcggggctccaggaaagatgcctcacatgtgcctagaaatgtaggcgtcaagggaaggctgtgtgtgggggcacctgaggggctgggcttcccaggcatctgagttcttacggagccctaataggcacatccccaaatggttgtatgaggatgagcacaaaaatagcagatggggtcaccctcaccctccactgacaatggactgggatccgactcatgcaacattccttctcggccgtaggttccacatccatgggttaggtgtgctggcctggagccgccggccccggtccccaccgcacaaggaccccatcacaagtgggtgtcatactcttcctccagaaacggattaagcaaccagcatgtgaaccttacgctctgtttacaggctgagtccccacagctcttccagcttcagccaggccagggtcaccttcagattgaatgtgcagggcccctgaggactcatgtcctgagatggcccttcttcctgggatgggacccccgggttcaggtgagagcaggtgttcccgggccccttcacctggggctcaggtgagagcaggtgttccgggccccttcacctggggctcaggtgagagcaggtgttccgggccccttcacctggggctcaggtgagagcaggtgttccgggccccttcacctggggttcaggtgagagcaggtgttcccgggccccttcacctggggctcaggtgagagcaggtgttccgggccccttcacctggggctcaggtgagagcaggtgttctgggccccttcacctgaggcccgggagttgaccctgacttcctggccccagaaagaaaagggaaaacacagagatcacaggagaagggacacaagcggggagggtcgcaggctgccccaaagcccagctccaggctcaggaaagcccctccccantcacccttccggagggcctgggtctgcggaggaacggggcttagggggtctcct

SEQ ID NO: 53141 - DNA, 591 bp, Homo sapiens
aatggattcactttccttgctataccatatactcttctaaaagttaccaggctttctggaacttatattaagaaattcagataccagcaataatatccaggtaactcagcctctgcccaaattgcttgatgagattacctgtgtctcagcactaggaccacaatttcggtttcttttccccattttcctccccatgcccctgaacacagtgttgggatatcccactacctgtttaaaaataatatgtgcctgaatttgaagttggtccaggtgttgggggtgggatacgacagagaaaatggggtccccagctactgaggacggaacacatgaacagggaaacgggacagatcctcttgggaaaaagccccactggggccaattccggggccttttcctccacagcccgcagagatgcctgtgcacttcccccaagaagctcctccaagttacgtgaccctgatgaaggtcttccttcaccatatgatttgttacaggaaaaataaggaaggaatttggaagcagttaaggtcactttgtgccgagactatcgcactatatcatgttaaataaaatgtcaggtgctagctc

SEQ ID NO: 53142 - DNA, 1433 bp, Homo sapiens
  misc_feature (1)...(1433): n = a,t,c or g
ctgcaggtttttttttttttttcagacttctttgtcgttgttttatttaaaatgttattgtctctgattagaaaatacagtcatgagggctaaaaactgaaatgatgtgaaaaggcatccattaagcagtgttgccccaccaccctttccatcagtcttgtctcatggggatggggaaaatgaagacagaacgctttgccttgctttgcaatccctcctttgaaggccttctgtcccaggaagccaatgttcatttgatgtggaagagggacctgtgtttaaccagaagctgtcctccctcatccctttcccatggcttacacgcagaagggagaggagatgaccagaggagaaatcaggggaagaaaaggcaacaggggaggcaaagggaaaggagaggaatgcttaaaatatacagtgaaatttgagtaggattctctactcaaagacttctctgggaagtgtccagaattgaccacacaggtgctgacggtagaaagaacacagacccaaaaccctgatctagttgcattaactccattagccctgagttcctctgtaaaatgaagactgtggaggcaccaactagaggatttctgtgaccttctcaaactctaaaatttttggcactggactgttccactttgaagggtcaagaaagaaatctggaggttgcagaaatcagggtcaggcgnnnnnnnnnnnnnnnnnnnnnnnnnnnnnnnnnnnnnnnnnnnnnnnnnnnnnnnnnnnnnnnnnnnncagcagcatccttggaacatcctgaagtcaagaaaggcacagcactgtctgccccgatagaaggaattccagaaaacagccacgaggttgggccacagaatttccaaagagagcaatctacaaactgggggttgatttcccagttcctggatctcagcagtcaacacacgagaaggatttttttctgaagctgccacctccaattctgaaataatcccatgtttcagactggggccgggacggtggcaaacctgcagaccctggcagcaagatgagggcaaggaagggaaaggtcagctgggcacagtccagttctcagcagtaatgacagaaatgaaggaaggaagctcagaatgagtgcacgggggaaatgggttttgctgatgcatttccagggccggccgtactctttgttttggcacacttttcctgacaaacagccagtgttctcaacacataaatactagtccacgttaacaacaatagcatatgagaccgctctccgtaaagatgccagattggatgcaaatggactggaaataccttggaggtttcacaaaaataagacaaagggcaaaggaactttgccaaaggagatggagagcaattctttaaagttagtgggagggaggaagtaaagagctcataaatacaagcctcttaaaatggga

SEQ ID NO: 53143 - DNA, 386 bp, Homo sapiens
agcacttggttgagcttgtgtatctagtgagtatggattcagggaccagattcccagccccacgaactgctaagcaaccccacctcctaaacacatgagtgccgattaacttcacagaaaaacacacaaggcaaagttcagcgaggtgaaattctccaagctataaagatcagggaagacttcctggaggaattcacccttgagcaaaatcctaaaggatcaatagtagctggcaaaaagaagcaggaggaagcacattctaggtagaggagacagcctgggacaaaggtctgagggaggaaggaacacaaggagtgcaggacactttcattaactgcatggaactttcataggagatggggatcctttagcatgttctctggcac

SEQ ID NO: 53144 - DNA, 1936 bp, Homo sapiens
tttttttttttttttttaatcattcaataaatacatgctgatttattacagggataagatggtttcttgggggatagattcaagaggagttgagaatgttttattcatttacaatgtccctttcctggaagggtggacagcaagatttaggacaagctaaaatcatcccctatttaaaaaaaaaaaaaaaaaaaaagtcaccagcaagtagtcccgggtgggaggtgggagcagaataaaaaaaaatctgcaatgattcctaattgtttttcaatacagaagcttgggaaggggtttctgccagtttcatgaggaaggcacaacttccaggtagtgttggggaagggtatgaggtcctatgcaggctggcctcttatcccacagatgccaagatgatgtctactggcagctcctccaaacttctggctgtcacctgcattgtcactgtgtccaaaagcagcagccgggagcgcaccaggatgtcatgaccaccccggaacacaccagccaggagcaacgtgtgggtgttcttgttatccggcactttgtctgacctctcacaagggtgcattcccaagaacttcacaatattacccacagcctcttcaagtgtcttgatggtagacaaggtgaacgtttcctccttctcaaattcatccccctacctcatcccaggctgcttcgaagttcagtttcatgaccttttgaatgtgatcagctacagtaacttccagatcttccaggacatactcatcctcatagccttcgtcatcagtctccccagtggtgggatcaccagtccttgacagtgaaacttcatcatgcagctcgaatgtgaggcccaagccttgggggtactctttgggcagtgccaccagtgtgtagcaggtcccgggctggttgtagggcaggctccgggcaggcacgtaacagagcacctcataggcctcagtgggctccatctgcactgtgacattctccaaggtctggtcattgagtgtgtttgtgcagtcaaactgaaaaaccatgtggttggtgaaggtgtgtttggtgcagcggatgacatactccgtctctgactcggtgagggccacgggctcaggcgaggacttgaagaggggcccaagaccgcggaactctggcactgctgccaactgctcctggaagatctcctgcctggtagctgccactttctcaggctgtttgactgctgtgatgggggtactttctgttctctgctctgccatgggcgccgtggccaggggcacagacttgaggtcaaaaggtttttctgatggttctagagtgtactgctgcagagccctctccagaccagggatggacacagtcagaccatttaggatatagcctgcattaagggccttctgcttctgctccaggacatttaggtagaaggtggctcggtcccttacttcattgtcatcatccatcacacacctcttcagcaacaccaagatactgggtaacatctcttcattctgggctccaaacttcgccagagcactcacagcacctgcccggacctcctcatgctccaagaccactcggttatagatgaagcggatgtactttgagggattggtggtcttgggcccctccctggccccaggagattgtagaatacgggtggccagcactgtgaactcgcagtcctcgatgaactcgcacagatgtgacagccctgtctccttgctctctgagttctcttcaatgatgctgatgatgcagtccacgatagcgcgcttatactcaaagccaccctcttcccgcagcatggtgaacaggaagttcataaggacggcgtgtttgcgaggatatttctgacacagggcactgatggcctggacaaccaccaccttgaattcatccgagatttctgacatgaaggaggagatctgcttcatgaggcggtcga

SEQ ID NO: 53145 - DNA, 1042 bp, Homo sapiens
taaacaaaacaacaaatcaacaacagcaacaacaacaacaaaaattaaaaacttttttctaaaaaaaaagtgaaaataaaaaaaattatatgcgcttcatgggactgagtcaccaccttcccttacatacttcagttcagattgtagccatacttaaaaaaaaaaaaaaagccaaaagatgatgacaacatttttatcagtattgtgaataaacttgaacacaaatacacgaagttccatgtcatgtcttcagttgtagaagtttttcctctttaaggtaaagcgaccaacttgaactttctctggcaacacgattcgcagttatataagggaatcagtgttcacgtctctgtatatatttatttatgtgtaatttaatgggaattgtaaatatggtgagtctgttttaagcctttttttttttatttatctgatcttgtttacctcttgtttagtgggttttgaatcttccctattagttcttcatgtggttcatggtactgatttagaaatccagtgtttgggggatttttttctctgggattcatgaatttagccctgttgtagcatgttaaaggtgacaaacagctggacaaatttttaaaaagtaaaataaaattttatctataattagtattattacatttagcttttcattgaaccgaaagaaaaaaagtgatattggaccctggaaagattttgaaacttgagtggtttgataacccttctatgtattgtagggagaaaaaaaaaagtttattttattccactgtcctcccttaaaagcatcatttgagcaataaatgaatattgtctttaaaccaagggttagggaattttcctctctctctctctctcctctctctttctgttcaaagaacttcaaacatttgggaccacctggtattctgtattttcactggccatattggaagcagttctagttgcattgtattgagttgtgctggcagtagtttccatgcctgtcaatgtatcatagtcctttgttgcccagataaataaatatttgatacgctttaaa

SEQ ID NO: 53146 - DNA, 99 bp, Homo sapiens
ggcacgagaaaaataccccctaagcacagtaatgcattttgttattaaggaatagaaatgcaaattttgagtgtgaaaatttgatctagtaaacaaaat

SEQ ID NO: 53147 - DNA, 407 bp, Homo sapiens
  misc_feature (1)...(407): n = a,t,c or g
ggaagaggaggaggaggtggaggaggaggagggagaaaaggatgttttcaccgagaaagcttcacctgatatggatgggtacccagcattaaaggtgggacaaagagaccaacacggagaccccggccccatcccccacagtggtgcgacctaaggaccggagagtgggcaccccgtcccaggggccatttcttcgagggagcaccatcatccgctctaagaccttctccccagggaccccagagccagtacgtgtgccggctgaatcggagtgatagtgacagctccactctgtccaaaaagccaccttttgtttcgaaattcctgggagcgacgcagcgtccggatgaagcggccgtccccacccccacagctttcttcggtcaattgttgggtttccaagnttt

SEQ ID NO: 53148 - DNA, 956 bp, Homo sapiens
gtttccgcctgctgctgaggatgctggagaagcggatggaccgagcggagcacaagggtgagcttcagacagacaagatgatgagggcagctgccaaggatgtgcacaggctccgaggccagagctgtaaggaacccccagaagttcagtctttcagggagaagatggcatttttcacccggcctcggatgaatatcccagctctctctgcagatgacgtctaatcgccagaaaagtatttcctttgttccactgaccaggctgtgaacattgactgtggctaaagttatttatgtggtgttatatgaaggtactgagtcacaagtcctctagtgctcttgttggtttgaagatgaaccgactttttagtttgggtcctactgttgttattaaaaacagaacaaaaacaaaacacacacacacacaaaaacagaaacaaaaaaaaccagcattaaaataataagattgtatagtttgtatatttaggagtgtatttttgggaaagaaaatttaaatgaactaaagcagtattgagttgctgctcttcttaaaatcgtttagattttttttggtttgtacagctccaccttttagaggtcttactgcaataagaagtaatgcctgggggacggtaatcctaataggacgtcccgcacttgtcacagtacagctaatttttcctagttaacatattttgtacaatattaaaaaaatgcacagaaaccattgggggggattcagaggtgcatccacggatcttcttgagctgtgacgtgtttttatgtggctgcccaacgtggagcgggcagtgtgataggctgggtgggctaagcagcctagtctatgtgggtgacaggccacgctggtctcagatgcccagtgaagccactaacatgagtgaggggagggctgtggggaactccattcagttttatctccatcaataaagtggcctt

SEQ ID NO: 53149 - DNA, 1176 bp, Homo sapiens
ttttttatctctgagtggtgacattagaatgggtttttcattctatcctttttactttatttatacattgcttatataacagatatcattcaagagcaatgaagataactgtataatgctatggcgtcaacttaccttagcatacaaccaacttgataataaataatggtcaaatggccaaacctaccaatccacagagatcattcaaatatctaaaatgattatggatcagacatacagaataccaaacataggatacaaacaacaacaacaacaacaacaatttcccatgattaaagccaaggctttaaagaagacacactttcttaggtattttcaactaaatgttatccacctcaaaagtgtttaagctcatggaatgtccatagattccagaaaatttgtgcaattctgtttttttttttgagatggagtctttgctacattgccaggctggctgagtatctcgattctcccacctcagcctcccttataactgagattacaagcacatgtgcccagcttaattctgctttttatataatacttcccactaggcataatctaattgcagtgtgggtcatcttaatataaatcagtaatctaaaaacattttaaacaactaatttggtgacatcctagaaaagtatgcatagtaacacaaatcccagaatatatgactctgatttatataacaaaatttaaccaattagcttttctatttaatgctttaaaataaaatgaggaataatttgaaaattgaataaacctagagaaattgtggcattctatatgtaatcctaatttacaaaaaatgtgagtaaaacagtttttacttttattaaccatgctaccatacctaaataaaatccatacaaccattttgagagtatttatattgaggtttatgaagtatctatatcaagaaaatgagaaattatcaccaattttgactagtatgctttaacaaaaaaaacctttttttagcctaagtggctataatattcctttatattcatatcataaattttattaggtcaagaagctaactagtttgttcaaagtgatgatgaaaaggttagtgaaataaaagagagttatcaatagcagcttttaaagaagcttctctttgttcaaggaaacattttaatgtccaatgtaatgagaactttcgtc

SEQ ID NO: 53150 - DNA, 817 bp, Homo sapiens
ctatctcctctcttctctccttctcatcacccacaacgtgtgagttggggggtgtgcttcagcctgtttgtattacagctctttcagtcccaccattcagtgggtcccaagttcttgtcccatgtccaggaagaatgaggtacacagacaactggagggtaagcaagaagaggtgctttattgagtgacagtacagctctcaggagacccaaaatgggtagctcctttctgcaggcagatcatcccatcgtctgtgcagccctcagaggagaggagacctggagtgggtagctcctatctgcaggcaggttgtcctgatgagtatacagccctcagtggaaaggagacccacagtgggtagcacctctctgcaggcaggttgtcctgttttctgcccaagtctggctgagtctggggtttttataagcttcagaggggaggaagtacatgctgattggtccatgggcaagagacagtgcatgctgattggtccatgggtggccatgggcaggactaaaataagcaccatttaatcggccaaaagtcttaaggaagttctcactccaggttgcggactccacctggaacggacagctgagcccccaggcttcaggccatccctggcttaaaggtagggtttcactagagacccaccccttcctgcctaggaacctgtctgcctccaactgccattaacatgccatccatggaacgcaggctattttcacttaggggcaccacatgcccacggttagttgcctcaattgccccagccttccttccaaatttattattgccgagtcagaagggttaggag

SEQ ID NO: 53151 - DNA, 362 bp, Homo sapiens
cccccaaaagaatattggtttaataatcatcatatttaagaaatgcactgataaaaacatattttccaattttaaatacacctatttaaaatgtaaatacacttatttaaaattcaagtaaatatgtaactatcaaagtaaatgtattcaaaacagaagttgtgcttctgaatgtaaaaatattaaaaggaagagaagacggatgaattgttgtattcatggacatttcagaattcatgcttataaagcaaatccaagttaaaaaacaaaaaaagatttttgtgcctcatgaagattgtgcctcatgcccaataacctcatgtactttgaaggatgtgaaggtttgcaagaggatgcatttg

SEQ ID NO: 53152 - DNA, 495 bp, Homo sapiens
  misc_feature (1)...(495): n = a,t,c or g
taaaaggtatggaacctgctttccccttggctagttcagcgtttgggctccggagtgctgaagatgaggactggacttcgagctggtgtgatcccagtattcagtgtcagtactcagtgacaaaataaatgagagaaacgggaataagaattgtcgcctacacaaaaataccagcaactgttaactcttcccagaagattttcattctgaatgctcctgtagctagggaaccctaaaaagtctttgaagcaactcaagttttaaaaaaggggagggaactcctggggaaatcttcagggtgggggcccaaggtgtgggctnggaggagtgtgtggggtgatgggaggggcgtgttcttttttgcccgaggcacacttcagggggccccacgggggaagccccntaggantttccaagggacattcaagccccccaaggttggttggggnttttttcccccacccattanttttgggccagccttagggnggggaa

SEQ ID NO: 53153 - DNA, 1396 bp, Homo sapiens
ttcaatacctatgacatgattacgaatttaatacgactcactatagggaatttggccctcgaggccaagaattcggcacgagttcggaggtggtgcggagctcctgtttgacggtattaagaaacatcgagtcactttgcctggacaggaggaaccctgggacatccggaacttgctcatctggatcaagaagaatttgctaaaagagcggccagagttgttcatccagggagacagcgtgcggccaggaattctggtgctgattaacgatgccgactgggagctactgggtgagctggactaccagcttcaggaccaggacagcgtcctcttcatctccactctgcacggcggctgagggcccttctctgggcctggggcacccttagaggggagaacgaagcaattcagacatccccttggggccctgcttccaggtctccctgtcccccttgcctgccttcttccctgctctgtcccctaaagcttccctccagggcaggggaaaagaggccagggtgttaaaaatgagcttttttcaagcacgtgagcagcggaaggcagacaggcgccagagcccagcactcccttttccagcagctgtggtgggggagggtttccccttccatttttgtcaagagttgaaggaggctctgtggccaggtgacctggctgccttccactccttgtacctcagtctaaacatggagtggccgctgacaaggcgctccagccccagagccagcgtcttcatggggaagatgaatggacctgagtagctgaaggaaggcccctccctacccaaagactggaggcttctcagcctcaatttccctgtctgtacagctgagggctctgcctgtcccccactgctatcagtatgggaaccccagctggggtcccctattgagtgccgactccccccaccgccagcagctgctcctccagccacacccctcctgctccccccacccctagcccttgaaccctggctggcctgccccgctcccacaggcccaccagatgggctcctgagaccctcccccaggcctgcttacagctcattctgctgggggtagagatgaggggagggagtaagttaaaccttggactagcaagtagaagcctggggggatgcgtgtgcctcagtttcctcctccacaactgaatatagtggctgaaaactggggagatacttgatggcgcgaatgtccgttttctctcccttcccacctcctgcaggaagcaggacggggcaggcagcacctggtaggcacagtgctttgcccctcctccccttcccttctggaagtcttggggcctcagtgcttgcaacagccggccttgggcaaataaaagactaggttgtttactaaaaaaaaaaaaaaaaaaaacc

SEQ ID NO: 53154 - DNA, 385 bp, Homo sapiens
attttttactagtttcaggtcagttattaaaataaacatggaggttttaatgaatgttgtataatattttatagtgaaggaaaattgtggaaagggcaaagactttctctttcccttatgtatttaactgtgccaatctaaatacatactgttttatacaatgagatgcattacaagacttttctgttggagtgctctcgacattttggttttcatacctgaatgatcattgcattttctgtattttctaaaatggctccaattttgtgttttaagcttcagcttaagaggaagtttatgttctaattcttgactgagaatacagtattgagattctctgttttacagataacaactgggttttattactcattaagttcatttg

SEQ ID NO: 53155 - DNA, 1447 bp, Homo sapiens
ggaagggaaggaaggaaacagcaagaagaccatggagaatgtggatagtctggataagctggagtgtagattcaagctgaattcctacaagatggtgtatgtgatcaaatcagaggactatatgtatcggaggaccgccctgctccgggctcatcagtcccatgagcgtgtaagcaagcgtctacatcagagattccaggcctgggtagataaatggaccaaggagcatgtgccccgtgaaatggcagcagagaccagcaagtggctcatgggtgaggggctggagggcctggtgccctgtaccaccacctgtgatacagagaccctgcattttgtgagcattaacaagtatcgtgtcaaatacggcacagtattcaaagccccttaactgcaaagccagagcagataacttggggtgtgtgtggggatgtgtgtgtgggcctatgcactcacacactgaagaaacaaggaagatgcctttcaagcctcactgggcctctctgggacatggccacctgacctgtgtgtggctggtgcagcctggcaccaagtgggctacctgttaggaacatgaataccttacaaagctgaagctggaacttttcccaaagggttttgggtatagcctgccctggaggggaaggaagtccatgcaagcaaagacatgcagtttgcttgcacacaccagcagagctaagactggagtctcctgtggcctaactttcaatgagggaaccggatgctgttcacactttgactggatggagatgcatttacaaaacagactggagaaggacttaatactcagatggattggaactatcatggtcactgctcctctcccctccccacaaaaggaaaaaaaagctggatttgattttttttttctggtcactcgagcacatctaagatcacccattaggttttatctgggacctgcagtttggctttgggattgatcatcttgtggattttattcctgacgattcccttgctgcctacccttttctctcctctggttctcaacctcaacgagttcaaatcagttgtcctttttagctcccgtggaactgttttgtatctgcctctttactagtctaccttagtgccatccaccagctttactctctgacacacacacgcacacacacacacaattttaacttgtttttttgtacataatgtacatactgtcaattttttattaaaagaaatatgctttgatgtgcctagcataactgctctagcttcttgtgtaccatagtactgtggcttcagatttagtacctatgaacagatgtacaagacatttattacactttttaccaaagggagttaccattgtagtacttttgtgtaaaacttgtcttcccctttgcccccaactttttttttttttttttgtaaataaataaagcttggttcttacttaaggaaaaaaaaaaaa

SEQ ID NO: 53156 - DNA, 395 bp, Homo sapiens
  misc_feature (1)...(395): n = a,t,c or g
cagccacggcctcccaatgtgtgggattatgggcgtgagcaccgtgcctggtcacaatccaggaatttttttcttaagagcctaagagtcttgtctttgaaatgtaaacctggaggaaaatagtgtccctatcttcctgttgcctagggagtttagcctaggcaacttaagctgttactacctgcttgtcaaggagatgtgagaagttttattttttcattgaatacaggtaattaactagcatggatggccacgttgatttccaggtgaatttaggatgagtgtttaagaatgcatagcannnnnnnnnnnnnnnnnnnnnnnnnnnnnnnnnnnnnnnnnnnggaggcagagacaggcggatcacttgaagccacacagaaatcgaaagaaga

SEQ ID NO: 53157 - DNA, 431 bp, Homo sapiens
atttgagggcaacgtgtttatgtattatggactgtctaatttctatcaaaaccatcgtcgttacgtgaaatctcgagatgatagtcaactaaatggagattctagtgctttgcttaatcccagtaaggaatgtgaaccttatcgaagaaatgaagacaaaccaattgctccttgtggagctattgccaacagcatgtttaatgatacattagaattgtttctcattggcaatgattcttatcctatacctatcgctttgaaaaagaaaggtattgcttggtggacagataaaaatgtgaaattcagaaatccccctggaggagacaacctggaagaacgatttaaaggtacaacaaagcctgtgaactggcttaaaccagtttacatgctggattctgacccagataataatggattcataaatgaggatt

SEQ ID NO: 53158 - DNA, 296 bp, Homo sapiens
tctctttcagactgaaacgttgcattactgaatccaacatattcattaccagccatcttattcaaaaactgcatgacatagtcaaatttttcatatttactccttgctatatagctttgtttaaaattttaaatattggagttttcctataagcttagtagttaagaatttatgcaacaggctccttctgtccaaattctccttttttccacaatctgctaatccttttgaacatttgctctgcctcttcccccatttcctgaggatcaccaccaatcctacaaggaaaaaatatc

SEQ ID NO: 53159 - DNA, 1134 bp, Homo sapiens
  misc_feature (1)...(1134): n = a,t,c or g
tttttttttttttttttttagagtcaataatgtattatacatcttagatttatacatttcatatatgcttttaaagcttcaattaacagttcaatacaaaatttaaaaacaaatatatgcagcagtggttctcaggcacagaactgaggaggagactggagcaagtcttttccctagcatacatacagtgaatactatgaaccatgagagtggtatgtttccttctgacctagctgcctttttgattgaattttgttacaatgaacagctttaataggtatgatattgctaactggaaacaatgagatttaaaataaattgataacctgtattttcttgaagtctttaagacctaaaatgattacttttctcctaatagagctccagaatcatcccaatgaaaataatattgtccataaagcatctagagtatctgcctaagaaccactgcccagggttattcaatgtcttcaggcctcacaggatgaggtaatgggtatgatggatttcttctcagtatccctggaaagtgctttcctcatatcataagcgtcctcatcaggctccccgttgctggccgaatagtactctatgaccgtcctatatacactgtagcccaactgcttgtacatgttaactgcaacttggttagatactcttaccaaagagatccaccaaaaaaatccaccctttctttctgaaatctcctctagtaactccataagtttagcagccaaaccaaggcgtcgaaattctggggcaacagacagagctgtgacgtgcccgtgccattctttccctagctactgagccttctgctttacccataatataacccattaattctccaccaggtgcctctgcaacaatgaaatactctggccagtgggcgaggtattgtaggtagaaaggaatcccataagtttctgtaagtggatccaagttaatgttgttgaagcggaacaggtcgtcgcaggtaaaggcccgtagcgtggtcatcgcgccgccgccgcttccgaagaccgttcgccaagaccccgcgcccgcctcgtgccgaattcttggcctcgagggccaaattccctatagtgagtcgtattaaattcgtaatcatgtcatagctggtnntccaaa

SEQ ID NO: 53160 - DNA, 180 bp, Homo sapiens
tgctttttctttttcttttttttaagaaagaaagcaagagatttgaatcttgcttctgggggggcctccccgtggccctctattgtcatttctataaataaagcttcccctccccctcttctgcgtttattcgtatataaagtgtgggggagggcagatagatttttccccacgcgtccg

SEQ ID NO: 53161 - DNA, 831 bp, Homo sapiens
cacgttttaacacaaagaaataataagtgttagcatcgtgtgtcttgaagtatacttttgcactgtaacttgggttaccgttaaagagagcttagcaccaaaggtagataatgaagaaatggcataggaaagtggagatgataaaaagttgattgttgaaccaaaaagggtttgaagggaagcttcgactgagtatcagaaattacttaaggcacataggacctgaatcaggaaaccagcacttcttacaactgccagttttaaaagaggaaatgattctgagatgtgctcattttattttaatttggtggttggtggttttccaagtagtctgtaaaatcctgcaagattcacagtctctggtgtgaaacctcagaagtgagtcgttgtgagcctgtgggcagcaccaccaaggcaggctaaggggagggtgcagtaagtggagtttgtgaggctgagtggctgaggagggagcaagtgcaacaaaatagggctagagaagaaccagccaaggagtggaacccactgctgctctcagagattcacggaacacggcagccttctgcaggcagttccatgcatgtgcactcacgctgcaatcacagatgtcccagtaattaacctttctaagtcttgtgaatgctgactgcactttcacctcctcgaaaagccattggaagtttttagagcagcagcagccacagtttgtaagacaaatgtagagggggacgcaaaagaaaagacaccaccaggaggaggattcagtgtgcagtcagcacagaccaacatcaaccaaggcaatggctgccctccactcttggggaagatggg

SEQ ID NO: 53162 - DNA, 607 bp, Homo sapiens
atcatttagttggaaattgttttgtacaaaaattaaagaaaccttttcataaaataggcgttatgtatccttgttatgtagaggattttgatgttaaatgtgtaacaaatgttataaaagtaaatagtctagggatgtcttatttccagataatcactgaaatgtctgggaataacttgaatagcaagccaatatgtagcattttttcagtaaggcatcaagagacatgggtactgtggtattctgatatatattggtttttgtccacagttcctggttcataactcccacagcccttgttacactcttttgttacaacattgggtgtgtcaggcctcaggagacaatcactctaacctcctgcccttccttttacctgcccaagacaggactctaatcttccctacctttctgatggtgggtcataaaactcattccagagacggtcccaccccatatcctgctagaaggaatgctgctgtcatgaagcttccataaaaaccaaggggactggattcagagagcttccagataactgaacatacagaggttctagaagggtggtgcgcccagggagggcacaggaagctccatgcccttccttcat

SEQ ID NO: 53163 - DNA, 367 bp, Homo sapiens
  misc_feature (1)...(367): n = a,t,c or g
agtatgtattataactttctccactactttgtaatggtgtgcttaaaatataattcagatatttttaaatctggctcaatttcttaagtaattgtttataaaataactagtatatctttgagatcttaaaagacctttaggtatcaaaagaaaaaatagataaattgggctacatcaaaattttaaacttttgtgcacgaaagaatacaatcagcaaagtgaaaaggcaacccacagaatgagagaaaatatttgcaaatcatatatctgcttaggggttaatatccaaaatgtataaaaactgctacaactcaacaacaaaaaaacaacccaatttaaaaatgagcanagaaatanaataaacaga

SEQ ID NO: 53164 - DNA, 1381 bp, Homo sapiens
gaaagatgaacacttggagaaagccttcaaatgtttgacttcaggcgaatgggcacggcactattttctcaacaagaataaaatgcaggagaaattattcaaagaacatgtatttatttatttgcgaatgtttgcaactgacagtggatttgaaatattgccatgtaatagatactcatcagaacaaaatggagccaaaatagttgcaacaaaagagtggaaacgaaatgacaaaatagaattactggtgggttgtattgccgaactttcagaaattgaggagaacatgctacttagacatggagaaaacgacttcagtgtcatgtactccacaaggaaaaactgtgctcaactctggctgggtcctgctgcgtttataaaccatgattgcagacctaattgtaagtttgtgtcaactggtcgagatacagcatgtgtgaaggctctaagagacattgaacctggagaagaaatttcttgttattatggagatgggttctttggagaaaataatgagttctgcgagtgttacacttgcgaaagacggggcactggtgcttttaaatccagagtgggactgcctgcgcctgctcctgttatcaatagcaaatatggactcagagaaacagataaacgtttaaataggcttaaaaagttaggtgacagcagcaaaaattcagacagtcaatctgtcagctctaacactgatgcagataccactcaggaaaaaaacaatgcaagtaagtaagggagatttgataagcatatcttttaaaagtattttcacacaatttgctttataaagtgtgcttcagtagttttaaacttttaaatactcagagagactgggacttgtgagctttggctgcacttcaaggctctagacgtgatttgagtagaggcacagtctgtatcccatctctaacttcagtaccgtcctctagactatttttcttgaataccttggtaactggatatgagttcttcatcatatgttccaaggtcatcatatgttttaaacattttcaaggtgttagagactgtgatgatgtcgctaagtcctgcaagaagacaaaaggactgagtagaattaaattagactctatacattccagtgcctagccagtttgttagaaaagatgatggacttggggaattcatagcttctggccttaaggcttccaccttttcattgcttgctgacctttttcaaaacgaactgactcagttcagcagaccaccagtaccagactcaggaattgtgatagagggagcattttgaacagtgccgtattgtggacatgctgtattgggctactccaggaaagtagggagttaaaggtgggaaagggaggaaaggaaggcaacctcttgaggtttc

SEQ ID NO: 53165 - DNA, 436 bp, Homo sapiens
  misc_feature (1)...(436): n = a,t,c or g
ggttcaagcacaggtacctgctctgcgaactggtgtctgacgacccccgctgccgcctaagcctcgatgaccgagttctgagcagcctcgtacgggacacgatcgccagggtgcacggaactttcggcgcagccgcctgctccatcggcttcgcggttcgatatctcaatgcctatactggaatagtgctacttcgatgcagaaaagaattctatcagcttgtgtggtcagctcttcccttcatcacatacttggagaacaaaggacaccgttacccatgctttttcaacacattacatgtgggaggtacaataagaacatgtcagaagttcctaattcagtacaacaggagacagctgttgatcttgttgcagaactgcactgatgaagatatctttcatccctgntatctgccttctccaggagagcgggaagc

SEQ ID NO: 53166 - DNA, 359 bp, Homo sapiens
gaaagatgatggctgcctgcacccactgctggcgaatggtgagaaggtagagcaagggggccaagttgctgctggtgggcacctggggttcaggccggcccaactgtggctgagccgatctgtagctgagctgagtgtcaaccagctgtgtccacaccctgcctgaggcctgccctctcctccctggctggggtgggaccttgaagaggcatatcttcccactaggtgaggaggaacaagagcctcactccccttctccctcttgcctttcacagctgaggcagagcttatgggaggagtcactatgggagtgatggacctgggctttggtctccagtgtttggcaggggcgaccttat

SEQ ID NO: 53167 - DNA, 704 bp, Homo sapiens
tgctggggttcatctttaagtaaaacaggatccacttgctgtaaccgtgcatagtctccctcagaaagctgctctccaactccaacaggagttagtaatcccaggtgttggcaagactgttgctgctgttgctgaagttgaattctttgagctttaacctctagatactgcttttttagctgctgctgagttttcagttgtaactctcgttctactttctgtagttcctccaaaatcttttgtttcttctgaatttgttcctcccttgttttgttgagctcctcgatcttctccttggtaagttggtcagcatgagccagttccaaggactgcagctgtgcattcttttctatggcttcttttatcctctgttccagttctgttaactttccctgagcctcttctacaatgctctctggagactgattggtgatgtaaccctgtacatcctggctgtttgctggcaaatggctgctggacttttgtttagaagcagctttattcctgatgggaagagtggtggcaacattggcaggtggtttgtcaggctcctgaggtggaacaaccatgggcagtgcttgaactggtacacgaggagccctatttaaatcgtgggatgggggagttaactgagtgacatctggtggaggggctgaaagcaagttattaggataatccaagagatagcaaacaacacttgtatg

SEQ ID NO: 53168 - DNA, 645 bp, Homo sapiens
ttttttttttttgtgtattacgggcagttctttattacatgagctcaggccgtctgcacaaagccctgggagctaggcagtcagctctcatttcatggatggggaaactgagactcagagaggcactcttatatctggccccagaggctcggtacagagacgtagagagggaggcgggctgagaccccgtcctgccctgatgcaggccaggattggggcagacccctggcgagggctgtgaaggcgggagccctgtcctcatttgaggccacacatccttccacagccagacccctaagtcaggcctctggggcggctgaggcccccagacaaaggtgttcgtggagggcagaacagggcggatcaggagctggagactgtggttgggcctcctcttctccccctagcttgctgggtgcagggctgctggtctcatcctcagaggattcagctttaccccgataccataggccaaagaaactctgtattttggactccgggggtgggggatggtctcccttgtcatcggagagcaggatccatgggccagcctcatcctcactgctctctgcttcctctggtgtccctaacatcttggccttgatcttcttccgctgcttccggacagccaccttcatggctctc

SEQ ID NO: 53169 - DNA, 1006 bp, Homo sapiens
acctactgtagagtgtgattttattttccactaaaacttgtgcaaaaatcagaatagtagggtttttaccccttgacttctactttgcccagataacaaaaatataatcagaataactattttttttagacaatctaatttacaaaatttttccctcccaataaccaaccatacacatcaaagatacctcacgtttcagttcaaaccaaataatatgaattaactttccagttctgtgacttttgaatgtgggtgctctttgctacttctaaacccccatcacttatcaacaggttggattccagcgagggaatcagaggctatttttagattgttcagtactcagctcaccacccataagaccatttctcctctgcgtgtggcctagttcttagatatactgtaatttctttcttccccaggacacttaagaaacagtttcattttcatgacaggcaagggcttcaggaagagtcgttccacagggtccctgtgaaatgaaacctgaatctgttcgtagctggggtggtctccgtgttaaattcagccactggcacgcccctggcagccacctggggggcaaacatggctgctgggtacaccacagaggaagtgcccaccactagacataaatcacagtgggcgagctctctgtcaacctcctccagaatggcaggatccaggttttctccaaaccacacgacgtgaggtcgcagcaagcccccgcagcctgcctcttcacaccggggaagtttctcaactgggatgctggcatcttgagttccaggttctggagcaccttttcctgataaagctggacaaattggactcttgtaattctcagccacaactccacaagaggtacatcgagttttaaataagctaccatggatctccagaaggttcttggtgccagccttgcggtgcagctcatcgatgttctgggtgatgaccacgactcgccggccctgcttgcccagccgggtctcacactcggctatggcgc

SEQ ID NO: 53170 - DNA, 77 bp, Homo sapiens
ccacacacaacactggaggacaaaaggcaatgaaatggcatattcaaagtgctgaaggtcgacccggcgcgaattcc

SEQ ID NO: 53171 - DNA, 374 bp, Homo sapiens
aaaattacagaagctgtgttcataaggcttattaggtaattggtgataaagccagcagagagaggaaaatgagaatttcagctgaactaaggctaggtcacttttaacaatttgtgatgacccttttctctgcaacagagaagcttaggagcccggcactagatccagcccaccatttgctagattgggccaaatgtattttagattgtttgagaaaatgtccctaaaatgtgatattatggacattcctacactgaagatgaactaagtcttacaataaagaaaacaacatgtatataacccaacatttgactgtcctgcatacctcagctccatacagaatttcctataacttatgcacaaatttaccgcag

SEQ ID NO: 53172 - DNA, 632 bp, Homo sapiens
ccaaaatgaagttaccttccaagttggacacgtcccgtagttgggcatatgtctaactaaaagtttctgacttttagtaaattcagcttaaatataagttgaaatttgggaaataatttccaagctcttggaaggggtaacagtgaaccgccctccatgggctccacatcttttcctttggcttccaaagtcaggtcccgcccaccctgcctaaggaactgcagagaggtggcaaatcagcaaaaaggacaccaggctcttcttggccacttgtaggaagatccctttacaattttgactaaggagattttttttttcacagttgagttagtttgtgaaaataaagaactctgtagctcaccaaggtggagaaacgcaattcagaaaagtaatttctccaaggtcacttctttttttatgtcttgccatcactttaaaggactagccccactcccccatgtgtatacacaaggaaattgcagaccaattagttgtcttggcctgactctaatgccttttgcaagtagctttccagaagtaaaagtcccagtgatgtattcccatagaaatatttttcagttgtttatgtcgtttactacaaaaaaaaagattcagagtgggatgggagtaca

SEQ ID NO: 53173 - DNA, 391 bp, Homo sapiens
gtggggaaaaaagtaggacccctgtcctatattcaggtttttctcacatatatgaacccatctaaattctacgttgttaaaggtagcttaggttaattagtctatacttatttaagaccaatatggggtgagatggatttttttttaaaaatcctacagtaaggctttctactttccttctaatgaggaaaaaggtgacaaaaattcaagtgtcaatgtccccttcctgggaagaggtttagaaaaacaacagctcaccttctgaactctaccagttccttttgaagttaacgaagcattaaaatcagatgtaaaaaaagaaaaaaaaaggcagggaaatatttacaaaactggacattctttacagatatacaatcttgctaatactggg

SEQ ID NO: 53174 - DNA, 397 bp, Homo sapiens
atacaatttaccatgtagtccaagcctttaggcctcacaagacttcagctcaggaccaggtaggctgccagttcgtcccccatatccaaacagccccgggagagagaagggagagaatttttaaaatgacaatcctgggatgtcctacggtttagagcactgggaggtgtacttgtagtcattaaaaagcaactgcagtgacccagcatagtgctagtaatctggctcccaggccgttgagcgcagcagggagcatgacttcaggatcacactgcgtgtggctttaatgtgcacagactgacttcatgctgggaccacagcatccctaatctttccttgctgtttttagacttttaattcagcttaggtctagatgttggattgacatgatattgtc

SEQ ID NO: 53175 - DNA, 741 bp, Homo sapiens
gtcaaaatgataccttatgtattttattccaacaacatttggtttataaaggaatacaaacaggcacaaaacatggttcagaagatttattaagtaaacttgctaaaatatggacagatacacttagcagtcaaacagttgaatattcattgctacctcattaaagtttttgtatctgtattaccaggtccaaacataaaaaccacctctgttcaaaaaataaatgttcagagagctgtatgttctttgttctggtatgtacattttaaaaaaacacctctttccagtcttgctaaccaagaatattagtcatataaaagaacttagaatttttttccccaagtacaagctatcttttgctccaaaacagttctgaaggttttatttatattttatcttatcccgagggaccaacagcaggcatacctttgccaggccttcttgcagaaagacacagagccgtaaaggcaaaaataaaattgcattaaagtatatggtattgggggcagggagaaccagaaaccctcaaagagaaccaatttgtagcacgttcttttttaaggctctacccctgtagaagtaagaaactagcctgcctttttagccatatgagagtttcctccagagccatcttccaaagtagcagacttggccaagttgcccaatgccaaataagtgagttggaagttcgtttgcttcaaacacactgcacttagaaaccagacttgaaataatcgaagc

SEQ ID NO: 53176 - DNA, 1268 bp, Homo sapiens
  misc_feature (1)...(1268): n = a,t,c or g
gttataagctttttcttttttagaatttaagcttatgagtttatctacgcccactatattcataattacagttttatatctgcatacaaaagctatgtaaaaatccatttttcccaaatatacaaattttttttggatagtttaaaacattttgatcacagatttcaacagagttttaggctgaaaaaaatatcaccatctagcaatatcacttaacactgtttgcaaaacacaaatcttccaatgactgtaaatctttttctattctgtagtatttttctgattctcagggcatgaaaacattatgggaaaaaaaaggattttctacgaagaaagcatggagaactaatttggctctatggtcaaattaaaaatgccaagttaataagggagaaccaaaagaaagaagtggcataatgtcacatcagctcattcatgcccggataatttctgtatcaacaatacatatgtaaagtgtctccttttgtcttacattgtgctccataatttacatgagtattatctgcatcctgaggaggacagatttatatttgattgtcttgtgcatagggtgggtcagctttaactgtgcnaacagaaagccacaaacagcngttttacctgcacaatattgctcttgaaggcggcattaattaatgtggnaacacactataaatgcacacntttcgcatttgcaaacatttatacagcacagtaaaaattcngtgataaggccaaaccctttttcccccagtctggtttttntnttntnttntttttttttttttttgagtgtgtttttaatgcattttttttaaagattaaagtaaaatgtctcaattgtaaaaaatacacaccgggcaaatccttacctggataataaatatctacatcacagtacaataaaatttcttctctataaaatttaaatatggattatagtctatcactatcaaaagaaacactatgctaatatttccatattattaaaataacaggaaaaattacgagcttattttaggaacctgatgccatagccgttggaaagggcaaagagattcaaatgtcgatcatcactctccatttgaggaggaactgtggcttggttattcacttaaattcagttcatggaaaaaggtttagccttacaaatgctgggctacatttcaaaaactgtaagactgatttcataatttatgactcatgcagcaaaaggtcaatatgacacgaataggttagagttccatagaataaaaaggtatcactgg

SEQ ID NO: 53177 - DNA, 446 bp, Homo sapiens
gcacgagttttttttttttttttttccattttaaattattttattgtatattaaaaaaccaaataaagcaataactttaaagacctcacacacacacagtataaacacctgggtaaggttttgttcgtgtccatgttgacaccggaactaccgttaaagtgcaagttttgttttgtgttcctttgtgcagtttcactcacatgtaaacaagtcacttggctatgatttgacccacgcccccccgcttagtttcgggagggcagaggctctaccggctgtcacagcaacccggaatcacagacaagataatgccccgtgggtcctgaccctcaagcggggcatgacggtttcttgaagcctagcagaggctggataacttcacatccctcccccaccccgcgctcactcttaggtctttgagaagataaatccaccctcggctgggc

SEQ ID NO: 53178 - DNA, 1824 bp, Homo sapiens
  misc_feature (1)...(1824): n = a,t,c or g
gacctttgtattccttggaattggaagaatggagaagccattaagtaacacagaaatctgttttatttttttaagagataagaaaggaacttaaattaaaaatatttaaatccacaatttgatataacagtattatttacataagaacaaagtttctaactgctgctttaaaagtagacttttttaaaaaaattaatttctgctaggagaggttttatatgccaggcgtggtggctcatgcctgcggnnnnnnnnnnnnnnnnnnnnnnnnnnnnnnnnnnnnnnnnnnnnnnnnnnnnnnnnnnnnnnnnnnnnnnnnnnnnnnnnnnnnnnnnnnnnnnnnnnnnnnnnnnnnnnnnnnnnnnnnnnnnnnnnntaatgataatttaaaataaataagtaactaataaaaagattttatatcccagtcttatgatgttggttgggcaaggctagataaaaagatgttagaatgaaagaacatatttttagtgatatgtaaatgaaggattctacaatagtcatatatttttatatgaatgaatgttgggttgggctggagaggtatgtgtgtgtaaatataaaggtctcacattcagagtatagctctgaaataatggaactcatgtctacaattcaacatgcatctgtatagttacatctcatgtaaatatacacagacatattttgcagccagtaattgacagttaatgtccaaaacaggtgattgataggtaacagaaattagataaccaccaattttgcccaagagaaagactacgaaggactaaaagcagttgaatgtatggtactgacattgtcataagcagtctgataaccagtttattgaaacgtgtgcattaacagagaatttaattttaaacccataatttctcctatccattaaaatattataattgttagtagtatgaaaccaacaggaaatgttttttaatcatttagtgaggtgattcatttgtttcatgggcaaacactatccaggaaaagccttgcttgcctgtttcccaaagagctctaagaaatagaatcaagtgtaaaatggttcagaccattcaggatttcttgtcactcttctcaaccccgatcttcctgttattactgatgtttgaaaccctgtcattagccccggcctggttaaagcccctcagagtcacctctcattcatagcaatagaattcaaccccaagtggttgatggtgtccccagcacagccgagagacctgatctctggattcagtgcttttagctcttcgagtttaccctaagataccttcgggcaatatttttaaccaacccaaaagctcttcaggtcatttctgaagaggacaaggtgaatcttggcttggaacaccatttttgggctcttgctactgaatgaatcagaaaggaattttttctgaagagcattagaaagtaaaggagatgttaaaataagttcttgaagtatgttttatatttatctaaaacactgattttaaaagtttacattcaaatgtgtattcaaaagaagtactgatttgtaattattatagtttgtgtgtatcatcccttttaaccgtgcctaacaactgtacttaaattttgttttctagtgtaacaaatgtttcccataagattttctagagccaaataatgggagtgaaaaattccttaagtgttatataagaaaatatattagaaaatcagctttggattatacgatttctaaaatatactaatacagaatcctcagtaatatgttttgaattggattttttctcagaactgttacataataaataatacatcaaccagaaaaaaaaa

SEQ ID NO: 53179 - DNA, 631 bp, Homo sapiens
  misc_feature (1)...(631): n = a,t,c or g
tttttcatatttagtgctttttattaacagtattactaaggcaactcatcgatgctgaagtcccatccagtatgctatttttcatgcctcaggtctaataaatcttaataaaaccagaatgactagatgctatggtctgaatgtgccccctcccacccaattgatacattgaacccatcactgatgtagtattaagaggtggggtctttgggcaggtgattaagtcatgagagaatatccctcatgaaggggattaatgcccttataaaagaggctgcgggctgggtgcagtgactcatgcctctaatctcagcattnnnnnnnnnnnnnnnnnnnnnnnnnnnnnnactgtgagctgctttttaaatctgcttttaatcaccttgataaataccactgattagtgcctaactatgtgccagagcattatatacttcagtattctcaggtagctcacagaacccctggcacataggtggaaacaccagtaaagatggtagcaccgtgctcctcagttgccatctagcacacgcctggatcgtctgggctgccttccaagtctcttcttcccattccactgctttagtgccaatcagcacatgtaagtgcctctctcaagaaataattctgc

SEQ ID NO: 53180 - DNA, 313 bp, Homo sapiens
cgtgggccaacttcctgtatgatgcctccagccaccagctgaccctgctggactttggtgcaagcgggagtttgggacagagttcacagaccattacatcgaggtggtgaaggctgcagctgatggagacagagactgtgtcctgcagaagtccagggacctcaaattcctcacaggctttgaaaccaaggcattctccgacgcccacgtggaggcagtgatgatcctgggggagcctttcgccacccagggcccttatgactttgggtcgggggaaacggcccgccgaattacaggacctcatcccggtgct

SEQ ID NO: 53181 - DNA, 1665 bp, Homo sapiens
attcggaacaggcggggctccgtctcctagtctccactgctgccgccgtcgccgccacccgagccggagcgggctgggccgccaaggcaagatggtggactacagcgtgtgggaccacattgaggtgtctgatgatgaagacgagacgcaccccaacatcgacacggccagtctcttccgctggcggcatcaggcccgggtggaacgcatggagcagttccagaaggagaaggaggaactggacaggggctgccgcgagtgcaagcgcaaggtggccgagtgccagaggaaactgaaggagctggaggtggccgagggcggcaaggcagagctggagcgcctgcaggccgaggcacagcagctgcgcaaggaggagcggagctgggagcagaagctggaggagatgcgcaagaaggagaagagcatgccctggaacgtggacacgctcagcaaagacggcttcagcaagagcatggtaaataccaagcccgagaagacggaggaggactcagaggaggtgagggagcagaaacacaagaccttcgtggaaaaatacgagaaacagatcaagcactttggcatgcttcgccgctgggatgacagccaaaagtacctgtcagacaacgtccacctggtgtgcgaggagacagccaattacctggtcatttggtgcattgacctagaggtggaggagaaatgtgcactcatggagcaggtggcccaccagacaatcgtcatgcaatttatcctggagctggccaagagcctaaaggtggacccccgggcctgcttccggcagttcttcactaagattaagacagccgatcgccagtacatggagggcttcaacgacgagctggaagccttcaaggagcgtgtgcggggccgtgccaagctgcgcatcgagaaggccatgaaggagtacgaggaggaggagcgcaagaagcggctcggccccggcggcctggaccccgtccgaggtctacgagtccctccctgaggaactccagaagtgcttcgatgtgaaggacgtgcagatgctgcaggacgccatcagcaagatggaccccaccgacgcaaagtaccacatgcagcgctgcattgactctggcctctgggtccccaactctaaggccagcgaggccaaggagggagaggaggcaggtcctggggacccattactggaagctgttcccaagacgggcgatgagaaggatgtcagtgtgtgacctgccccagctaccaccgccacctgcttccaggcccctatgtgccccttttcagaaaacagatagatgccatctcgcccgctcctgacttcctctacttgcgctgctcggcccagcctggggggcccgcccagccctccctggcctctccactgtctccactctccagcgcccattcaagtctctgctttgagtcaaggggcttcactgcctgcagccccccatcagcattatgccaaaggcccgggggtccggggaagggcagaggtcaccaggctggtctaccaggtagttggggagggtccccagccaaggggccggctctcgtcactgggctctgttttcactgttcgtctgctgtctgtgtcttctatttggcaaacagcaatgatcttccaataaaagatttcagatgctcaaaaaaaaaaaaaaaaaa

SEQ ID NO: 53182 - DNA, 391 bp, Homo sapiens
aaaacttttggcagatttctgattgccctaggaagcatcttcgccccagcaaggagcatttccttccattgaacacgcaatctacagggaattaggacatgttcttacgctgtgacttttggagcattttattttcttttttctagttcaaaattttcctggaaaataatgaagtgaactcagacaccacaggctctataattatgagatttttgtggaaaatcctggggacaatttggcttaatgcatatttatttaaatgtcataaaagtcaactcatcaaagttgtagggccactttcaaacttgatgccatattcgaggaagacaggaaatgtagcagagtaagcctatgtcctctggaaattggttttgttacctgaatgtcaggg

SEQ ID NO: 53183 - DNA, 1876 bp, Homo sapiens
ggtcgacttttttttttttttgtagaccaacagaactgtcacagctttattttgtgactcattatattacaacatagaaatatgcattttaatacttcatataaagttattgacatacaaaattttttttcttttttccttttaatgaaaatgatttaacttagaaatctgttgtgaaacttttgtctagttttgcaattctcagatattccagtgcaaaaatagatcccattacagacagcgtaaagtgcttggaatgagggccaatgatgaacaaagagcacaaaaacagcttcatcttagggtataagaagggataatagcatacctaaatccttatggaaatagaaacattctaagggggatgcaacaattttgaaaagaattagagcaatatttctacagtattacattattactagtagataataacaagggtacaaattaatgtctcaatatcaaagtggttcagtattacatgacacatggctctttggaaaatattttacctgatatatacaaccacaagaagaaaacacagacaaatggctttagtcaatgattactatacagtgaatgaatgatgtgcaacatttaatagtcacaaagcatttgctttcagtacagataatgaaatacagtagtgtgaggtttggttgttttttaacaatgaattgtgctgggcatttatgtatagagggcttattattttcttctgtatttctcatattcacagttgttaataagttttctgaggtgtcccaaagatgcaaaagcagaaatttttgaacacgtattttgagaatttctgaaactcacataggtacattccacagggaatatacagaaattttgcttgattgagtatagagttggtaaaaatttctaccacaattaggtttacacaggaaaatgtaaaaaattactattttaaaaggtaacacagtattaatgaagatgtataactatagattgtttctagcttcagaagaggtcctttcaatctgtattaaaatgttgtgttttcttcaaaatagttcacagtgccttttgattttttaaaatatggccttgaaatcagaggaaccgaagtaaggagttgctcatagatttactataatgaagaattagaatacgattttagtaaaatgaggaaaccataactttgattttgaaaaatattaaatgaggagaaattattctataaattctgtatttttgaagatactgtaaaatgcaacgatgccatatcactagttattggaaatatgccttcattacttatatttaaaatcaatattgactttaacttctaaaacaatcatttttttctttttcagcagtgggttatataatattctgtaaatttaaaaaatatagaaagattaatttgaaatctgaagtcttacacctttagcgttaatattcaaattctggaaaaagtggaagaagttagtaatgatattgaaagatcacttgaacttccccaaacaatagttctctcatatttttcttttctctcaagacagttaacagtaagtattagtgaaacagtatttttacaaatgtttactgactagaaaaataagactgggttagaaaacccctggaaaaatgctccatatggaagtatttgttgtttttatatttttcttgactagtgattgaagagatgaaaaatttgagactgtcagatttaatggggtatccaatatctgcaaagccaattatttgaaggtactaaatgccataaacacaagttgtgtttttcagcaagttttcaagctagctgttttccctgttgaagaattcattgtttagacttgtgacccttatactttcttggcttttgcattgttgcaattaaaaaaaaaaa

SEQ ID NO: 53184 - DNA, 289 bp, Homo sapiens
attccaatttattacattgttttacttaactatctggtcctttagaagagatgcatgaagtctggcagcctgttgtaaatttgcatatattagcatgtaaatacataaaataatcattttctattttgttttgtgaggctagaaggtccagcttaaaaaatgtgtccgacctttttgtgatgggaggagctcttgttttagaatctgcagctctcttgcactggctagagagggaaggttacggccctttaggaatgactggaatatccatgggaggacacatggcttc

SEQ ID NO: 53185 - DNA, 1430 bp, Homo sapiens
aaaaaacagcgtgtcacaaagcagtggtgaatgagaaagtgctccacaatattattaagactcttaggggtcctctcagtttgaagtattcctgcccttctgaaagcacatggaaactaggcagtatcctctctcctcagagttctttctattggggctacctgttgcccggcagcatgcttcttctgggaaaatttgacagtatgtgggccagaactagcccattacttttggaaggattttctctttactaaaagcatacctccagataatctctctattcaagagtttcaaagaaatgaaaatattgatgtcgaggtagttcaacttatcagcaatgagatactaccttatgccaattttattcctaaggaatttgttggtcaaataatgacaatgcttaacaagggctcaatacattctcagtcatcttcatttacagaagcagagattgatattcgtttgagagaggaattttctaaaatgtgttttgaaacattactccagttttccttcagtaataaagtcacaacacctcaagaaggctacatctcacgaatggcactctcagtgcttttaaagaggtcccaagatgtactacatcgctatatagaggatgaaagattaagtggtaaatgccctcttccaaggcaacaagtaacagaaattatatttgttttaaaagcagtcagtactcttattgattcacttaagaaaactcagcctgagaatgttgatggaaatacctgggcacaagtaattgccttatacccaactttagtagaatgcatcacctgttcttcttcagaagtctgttctgcacttaaagaggcactagttccttttaaggatttcatgcagccaccagcatccagagttcaaaatggagaatcttgaccggctacaatatatttgaaagcaggaagatagtctaaaaaatgtttgctcctaattgagtcttctgtgagaaggacatttcttactgcaaataattcttggcagctgttgttggcctcctttaaattctacttacctgagttcagtaattcatattacaggcttgcacatcaacaaaggctcctgaatgaacagcagtgtaaggctttaataaattaaactgatgggagggataattaacactacagtatacatgctaccatatctccagttggtgatttaaagtgagcttatgtacagtttgtggtgtatgtgttaatgatgtactttttaaaaagaaagaagagatatttcaattcagtcagatttattagtctggtgtttttgcaccctttttcaagtacaaaatcgtactagaattttatgcaagatggtactgtaacattccatattatctataaccagcctttgttaacaaagggaactgatatacttgtgtgtataataaatggtacagttctgtaaaaaaaaaa

SEQ ID NO: 53186 - DNA, 996 bp, Homo sapiens
  misc_feature (1)...(996): n = a,t,c or g
ttttttttttttttaggaacagaaaatttattattatgcaactagcaagctggggtcaaagggctttcccaaaaaaagttgtgtttccctatattacaggtaccaaaacagagcaaaacatccaggagaaccaaactgaaactcagaaaagagacaatttctgaggcccaccagatcctgattccattttgaaatactctattgcagtacctctgggtaaatattagctggttgctaaagacaggatctgaggctgggccaattcttaaggcaccagctgtcttgaggaggaagatgaagactgtgaatgaaggacagcagacttgcttctaggaaaataatatatgtaagttgggatgcctcttgcagccagatgtttccgaataagtcgctcagtaccataccagttaaaacctttcgtggcatgtccaatacgtggaagatgaacacttgctttcttcttttttgctgctaaaaatatcttcttcaggccctcttctagggctgccatcttaatgccagacaggacattggaacgatcacgatgctgagccacaatcaaggccaacaaatcttgccctttgtttcttgattctttatcatcaacaggaaataaaaggacacctcccaaactcaggtctttcattttcccagccagctcatatatttttcttggctcagcggatcgcttttccagagctgtaaataaaccacctctgccccagtggccagagtcatctacgcagtgcacaatgagagcatcccntcgccccagcctgagggtgggtgacatcaaccactaacgtacttgagggaagtagcatctgggtcttggtaatccagctcagcagagctctcttccccattctcaaggtcctctggctcgctctcctcagagggcaggcagaaggactggtaattgttggattcccaccaggccatctttttcttatgttcagcctcttccttttgcctcttcttctcntctatgagtct

SEQ ID NO: 53187 - DNA, 434 bp, Homo sapiens
cggacgcgtgggggagccaggcccagcctcggtgagcacacacgccctccctgtctctcgccttcgcttccctgcatctgcgctgattgtgctggagaagaaatacatccacccaccctcctttgatgatgtccactgagcaaatgcagccactggaagtctcagaagacagactggacaagctagaccctcgttgcagccacttagatgatctttcagaccagttcattaaggactgtgatctcaaaaagaagcctagaaagggaaaaaatgtacaggccaccctgaatgttgagtcagaccaaaaaaaaccaaggagggaaagatacaccgggcgctgcacatcccacctttcataccaggtgtgttttcagaacatttaattaaaagatacgatgttcaagagagacatccaaagggcaaaatgatccctg

SEQ ID NO: 53188 - DNA, 1099 bp, Homo sapiens
  misc_feature (1)...(1099): n = a,t,c or g
tttttttttttttagtgtttttaaaaacattttttaatgaagaaattattccactccaaaatatagacacacaattaaatagtttaatcacttcaaaatataacatgtccccaggaggttncannnnnnnnnnnnnnnnnnnnnnnnnnnncaatacttaacagcaatacaaaaatccatacaatagtatttttttttttacaataccaatgaatattgtgaaatctttagtgtctctgaattgattatttcaaatggtgtcaaattgcagtagtcataattaaaaatgtcttacagttaattcgcctcaagatgcaacacttctgatttttttttctctttttggttcaaaagtaaaaatgccctttcttctaaggacagtggagttctcacttgtggctccttgcgtggaatcgaaccaaggggaatgcagcaaccaaaggtctggattttacaagatctatctacggttaacagccaagaactaataagggtggacaaagatgatcaaaataaaagcagacatcagtgctaaattatgatgcaacagtttgggctcatgcatataaggaaaatacatagtatatcacaacaaagggccacacactcttaatgcaattcagttcacattactacttacaaatgaaccttccctgccttatagtagatcattcaagaacccatttttcacaatctccagcacaactccctctgaccaaccaaacttaccccaacttccgtcctgaccaaccacaactgtttcctgaatcccatgcagtagatttcaccttcctcccctcctccattaatatggcgctgtggaggagggttggctgtgttagaccagtgcttattaacaggctatcagctctgatggagatggatgtgcaattcattgtggaacaagaaagaaacaacccccgcaagatgtagttgtatctaatggacaggacaagtgaaacttgctggggtttgcacttagaacaggccccaaaagtaaatctggagagccaaggaaagaaacccaccaaaaaacacaaaaccccaaaataacacacgccattttgtctcgcttacaggacaggggtgctcgagtctg

SEQ ID NO: 53189 - DNA, 409 bp, Homo sapiens
ctgacatgttggtgtcagcagttgagtctttggagggccccctgctccaggtggaaggactgagtgaccttcgactagagcttcacagcaagaagatgaaccttcacttggttctcatagatgaactacaccggcacctgtacatcaaatcgactagccgagttgtgcagcgtaacaaggaaaaagggaaaatcagctccctcgtgaaagatgcttctgttcctctgattgatgttacaaacctccctactcctcgaaaattccttgatacctctcactattctactgctggaagctcaagtgtgagggagataaatctgcaggacatcaaggaagatttagaattggatccagaggaaaacagcaccctgtttatgggtatcctcattaagggcttggcgaaactgaa

SEQ ID NO: 53190 - DNA, 6798 bp, Homo sapiens
  misc_feature (1)...(6798): n = a,t,c or g
ggctaccgctcccggcttggcgtcccgcgcgcacttcggcgatggcttttccgccgcggcgacggctgcgcctcggtccccgcggcctcccgcttcttctctcgggactcctgctacctctgtgccgcgccttcaacctagacgtggacagtcctgccgagtactctggccccgagggaagttacttcggcttcgccgtggatttcttcgtgcccagcgcgtcttcccggatgtttcttctcgtgggagctcccaaagcaaacaccacccagcctgggattgtggaaggagggcaggtcctcaaatgtgactggtcttctacccgccggtgccagccaattgaatttgatgcaacaggcaatagagattatgccaaggatgatccattggaatttaagtcccatcagtggtttggagcatctgtgaggtcgaaacaggataaaattttggcctgtgccccattgtaccattggagaactgagatgaaacaggagcgagagcctgttggaacatgctttcttcaagatggaacaaagactgttgagtatgctccatgtagatcacaagatattgatgctgatggacagggattttgtcaaggaggattcagcattgattttactaaagctgacagagtacttcttggtggtcctggtagcttttattggcaaggtcagcttatttcggatcaagtggcagaaatcgtatctaaatacgaccccaatgtttacagcatcaagtataataaccaattagcaactcggactgcacaagctatttttgatgacagctatttgggttattctgtggctgtcggagatttcaatggtgatggcatagatgactttgtttcaggagttccaagagcagcaaggactttgggaatggtttatatttatgatgggaagaacatgtcctccttatacaattttactggcgagcagatggctgcatatttcggattttctgtagctgccactgacattaatggagatgattatgcagatgtgtttattggagcacctctcttcatggatcgtggctctgatggcaaactccaagaggtggggcaggtctcagtgtctctacagagagcttcaggagacttccagacgacaaagctgaatggatttgaggtctttgcacggtttggcagtgccatagctcctttgggagatctggaccaggatggtttcaatgatattgcaattgctgctccatatgggggtgaagataaaaaaggaattgtttatatcttcaatggaagatcaacaggcttgaacgcagtcccatctcaaatccttgaagggcagtgggctgctcgaagcatgccaccaagctttggctattcaatgaaaggagccacagatatagacaaaaatggatatccagacttaattgtaggagcttttggtgtagatcgagctatcttatacagggccagaccagttatcactgtaaatgctggtcttgaagtgtaccctagcattttaaatcaagacaataaaacctgctcactgcctggaacagctctcaaagtttcctgttttaatgttaggttctgcttaaaggcagatggcaaaggagtacttcccaggaaacttaatttccaggtggaacttcttttggataaactcaagcaaaagggagcaattcgacgagcactgtttctctacagcaggtccccaagtcactccaagaacatgactatttcaagggggggactgatgcagtgtgaggaattgatagcgtatctgcgggatgaatctgaatttagagacaaactcactccaattactatttttatggaatatcggttggattatagaacagctgctgatacaacaggcttgcaacccattcttaaccagttcacgcctgctaacattagtcgacaggctcacattctacttgactgtggtgaagacaatgtctgtaaacccaagctggaagtttctgtagatagtgatcaaaagaagatctatattggggatgacaaccctctgacattgattgttaaggctcagaatcaaggagaaggtgcctacgaagctgagctcatcgtttccattccactgcaggctgatttcatcggggttgtccgaaacaatgaagccttagcaagactttcctgtgcatttaagacagaaaaccaaactcgccaggtggtatgtgaccttggaaacccaatgaaggctggaactcaactcttagctggtcttcgtttcagtgtgcaccagcagtcagagatggatacttctgtgaaatttgacttacaaatccaaagctcaaatctatttgacaaagtaagcccagttgtatctcacaaagttgatcttgctgttttagctgcagttgagataagaggagtctcgagtcctgatcatatctttcttccgattccaaactgggagcacaaggagaaccctgagactgaagaagatgttgggccagttgttcagcacatctatgagctgagaaacaatggtccaagttcattcagcaaggcaatgctccatcttcagtggccttacaaatataataataacactctgttgtatatccttcattatgatattgatggaccaatgaactgcacttcagatatggagatcaaccctttgagaattaagatctcatctttgcaaacaactgaaaagaatgacacggttgccgggcaaggtgagcgggaccatctcatcactaagcgggatcttgccctcagtgaaggagatattcacactttgggttgtggagttgctcagtgcttgaagattgtctgccaagttgggagattagacagaggaaagagtgcaatcttgtacgtaaagtcattactgtggactgagacttttatgaataaagaaaatcagaatcattcctattctctgaagtcgtctgcttcatttaatgtcatagagtttccttataagaatcttccaattgaggatatcaccaactccacattggttaccactaatgtcacctggggcattcagccagcgcccatgcctgtgcctgtgtgggtgatcattttagcagttctagcaggattgttgctactggctgttttggtatttgtaatgtacaggatgggcttttttaaacgggtccggccacctcaagaagaacaagaaagggagcagcttcaacctcatgaaaatggtgaaggaaactcagaaacttaactgcagtttttaagttatgctacatcttgacccactagaattagcaactttattatagatttaaactttcttcatgaggagtaaaaatccaaggctttactgctgatagtgctaattggcattaaccacaaaatgagaattatatttgtcaaccttctccttataaataagttcagacatacatttaataacatagggtgacttgtgtttttaggtatttaaataataaaatttcaagggatagtttttattcaatgtatataagacaggtagtgcctgatttactactttatataaaatagtacctccttcagttactgtttctgatttaatgtacggaactttannnnnnnnnnnnnnnnnnnnnnnnnnnnnnnnnnnaaagcagtccaaatttggaccttagcaatcatgtcttttgtataggtacttaatgttaatacatattacactacagtttacttttcagaatactaaagactttataactgcatgaacttggatttttttaatcactcatatggtagaattttataaacacatacatgataccatccaaattcttgcttttaataacaaaggtacaatattttgttttagtatgaaaatctggtagatcctattacacttctgtttatattaaatccacaatattttattacatttttaacttgtataaattttaggtcaaatccttcaagccaacctatactaaaaattagttccataatcacaaatggctcttttgtgtaattgtttaatttcacctgaatatcataatgcttaaagccatatggagttggaaattatttccaaagcatatttattccattgttttagtctggctatttacagtataaaaaaagcattttattaaaatactgtgtagttctttgagatagttgcttatgcatatagtaagtattacattcttagagtagagcagagtttttagttagtattaatttattttcctccattcatgtacttttccttatatttccaaaactgttactgagaatgggtcaagatcagtgagaaatctttacagttgacaggaacctggaccccttaccccaactttatgagtaatgcttggaataaaaactcttaaggcaactcactgatttacttctagcaatagcatgatgttacaggaatattacctctgtttaagcaaggtaatgtgtaaaatcagtctcggctgtcagaataacttctaaaaggtatttttataagcagttcaagttactgaaaaccttttaaacctttctgaagttcgttagtataaattacttttctaggattattaataaaagccacataggtggcaagttgtagttttatatggctctgtagagtggtgaaccttctagaggaatatatgatttattcacagttcctcaaggcctggggatgatgatcagttatacctatttttgtgcaattacatcatgttgtacattagaaatggagagtttaatagctctttaactgctgtcctcattaggtaatgataaatatttcccttaaataattgactattttgctgtgttttaaaaatgattgaaatttatcttgccatatctcataatttcatgcacaagttgactgagctaatcttgagaatatattcgtaaaataggagcacatttagttgaggtatacaaggtaggactctagacaaaaccttctattttagctttagtgaatttcaaaagtaatgggtcttggagtatagatttttattagtagcttgaaagagcttaatcatatgcagtaagtatttttattaccaataaatttaaaattttttaagaaaaatatttttatcctagggccaagtgttgcctgccaccaatcagtaagttagtctataacaaattttaccctaacagttttaccacctagtaacagtcatttctgaaaatatgttggatagaaagtcactctttggcaaaagtgttagaatttgcttttgtgccatctattccttttatggcatctatcttgaaagtaatcttgtattggagattgaaagatgctgtaatttagaaattaacatgatatcttaaattacctttatgaaatatagttttgtataatagcatagattttccttcaaaaaatgaacatttatatatctacaaaaatatggagaagagtaatttgaaagcctactttctgaagaaaatggtgggatttttttttatcatgattaaatatcaaaaaattgccctatgaaaactttaaatctctaaaacatttgaaatactaccatatttgtgatttattgagaataaaaatccattttgaaatgtaaaatttttatgatctgattcagttttaagaaaacatgaatgaactagaagatattaaaaacatttgacattggtaagaaatattgatactgatattgatttttatataggtatttatttcagaattgatattttgagaaaaatacatgtgagtcattttttctgtttctcttttctcttaacgattatcactgtaattctgaatctgaaaggtaaaacaattagtcaaaatattattgccatcattctacctgtgttatgaaactacttattcatagttaattctcattaacacttacatttccataaagaaaactcaagtattaataaaagagactttactggcttaagagggctgtgaaagatttttgatagtgaatcatgaccctaagggagagatttgtgtgataaaagtattgtatataatagatcagcgatttttgtaaggcaaacagaatttgtaagttggcagatcttcctaagttgcaaaatgtaatgatgagcttggtggagaagaatgagtcgttcttggaatacctatgtgcagccactacccatctcaatgtcaccttgtttgcattcttggatagcttgtatatgtagtagtttgatgaataatttaaagaaaaacacctaaaatttgaaaaatgattgtaggatcaaaaaaggcagatgaaattacttaatactcagtgttttggagagtattccttttagtttgttggttggctggtttgaacgatagaaatatgcagcatgcaatatatgcttatatttcattttaatttctgatatataatgaacttcttgggagaggtactgaatctttgatgttttttgtcattgttctcaagtgcaatataacaatgtaaccaaatctagataatttcaaagttgtcattaatttagtaagcctaatataaacaaatatttgtattatttttgttagcaggaaagagtgattaagtgaggttatttacccctaaatggtccattctgcattgtatttcaggctggaaatgaattattctttaccagttttgaaacactttgaaatatcctaaggtaacttggaagctgtgtagtatatcaaattaatttgctacctaataacatagaaagtaaatatctttgtggtcacccacattgggtgagacagaaaatgaatctgttctaaaatttgtaatttgctaacttgatttgagttagtgaaaactggtacagtgttctgcttgatttacaacatgtaacttgtgactgtacaataaacataagcatatggtaaaaaa

SEQ ID NO: 53191 - DNA, 521 bp, Homo sapiens
gggggaccatgcctgaccttgactccttgtcctgtctccagctgatgtataaagagttttgtgctccctgggacgggggtcctgaggtccccacctatgccagcaatcagagaagccctcttgggcatccccagggagcagcttctcctctgatagggtgcagctcacaccagtgaccctgactgtggccacgctgctcgggagagctgagggttttattgtttgcttgcttgaaacctaatctatagacggccccacagctcgtgcacacactgcttccctggacttaaagcccagcccaggtgtcatggtccatcccagctcactgcatacatccatcggctccccatggtgtcttcacaccctgacgatgagccaggcctgagccccacacaggccagggcacattcttggattttccattccttggtcatgctggaatctctcaatgtgacatacttatgtaaatattgttactattatttatttgttccatgttgagggatttggaatttttgtta

SEQ ID NO: 53192 - DNA, 381 bp, Homo sapiens
gcagaggcatactattctgtgaaggattgactgagtttctcctaataccaagcagtatctgagggaacagatgtctagcttaaaatcctccctagcacttgtcatagcactgctacgtattgcctgtgaaggaagtttaataactgctgaaaggctcgattagctttatttcatcaggatttgtttgactttacaaattgatttgggttattttaacttttaggtctagtcttaagtataactggtacatattccttcaagcagccattacacctttcataaatttattacacacctgcatttttataactattatgctttttaattgttggccaccatttttagtgcttctgaattgatatggttctcaagcagcagtct

SEQ ID NO: 53193 - DNA, 442 bp, Homo sapiens
  misc_feature (1)...(442): n = a,t,c or g
aggctctaatcaactaagcagctaataaactcctgcctcatttcatccagccagagccctgatctcaggggatgatagtgaggaaacgatcctttcacatgcctggctcctgcaaaattgtgctaagaggattttcctcaaacattttagcacaaagcgagttttcctaatccagttagcaaatattcttctatttgaactcattgaccctccttcttctgaagatgtattttaaattggatttgcttcactgacacaaatggaaaacttgataagaaaatcggtggggttttgctgcacccactgctgatatcaaaagactcaactctgtattacagcaatgnaaagctctgttctgtaggctacagggtacaagctgagctcccagccaccagccctggccaatgtggttcagcttnggcaccngggccggggnttaggg

SEQ ID NO: 53194 - DNA, 2238 bp, Homo sapiens
ttttttttttttttagatgttttaggactttaatgttctttacatattcaacataaaatactgacaatagataaacaataggggaaagacttttcagcaaagtatcactctcgtagtcatacattacaaagaaaacagtagagaacaaaggatagggtaatttaacagaaatgtttagtttaatggcataattgaaaaacaaccaaccaatcaactttctcttctacctatggaaagaatggtaaaaatgaatcaagaacttctaggtctttttcataaaacagcttaaaaagaggaaggcgaagactggggagggggtacaactcttgctaatggaatgctataatgcacaaggtcaaggatttaataaattctaaaagtgtctacatatatcagtgataactgtattattagaaatataaatgtatagaaatataaagtatatggtattaaaaacagaccttgctaatataaacatatataaagtatgtcacttctcctgtaataacagcataaagatcgatctacagtttgcccttcgcctggcactcttaaaccactcctccaatggtcaatgttgaccttgaatcaacagccgctgaacccaggagaccccacagatgtgtagattccagcaccctagagggccccccctaccctctgtgctgtgtgttcccatgactccagaaataattaatcgcaacttgcattattaagtcccacaggcaagtttgaaatctaactagaaaaagtagcagcaaaggcaaaatacgcgggaatttgttagaaaagcaacaagatttcttaaaatgcttccagttcaagtcagaattaaggtgacattaggtcccaccagctttacagagttgtggatgttttgctgttgttctttcaaaaaagaagaatctgcaataaacatgttcatttgagaaaaatactgtgttaactttttgtagccatccccaagttactttaaactttgtatgttgttcaagaacagagtatatcctggttaggatgtgttcatagctgatgcatctccaaaaattttttcatgaaggcggccagcttctgaacgtcttcaattgtgacagcattatacagagaggcccggatgcctcccacagacctatgccctttcaaggacaacatattgagttcaagagctttatcaagaaatcttttttctaaagcatcatctcctttggcattgccaatgcggaatggaatattcatcttgcttctattttggggctccactggacaaacgtagaatccttgagaattatcaataatctcataaattgtttgagatttgatggagctaagcttctccatggccgcggcacctccattgtttttaatccactccagaaccaagcccatgacgtagatgctgaaacatggaggcgtgttgtacaaggagctgtttccagcctgcaccttgtattcccaggaccgaggggcactctcggagggcaaaccccagcaggtcatcacggacaatcaccacggtgaccccagcagagccaacattcttctgggcaccagcaaaaatcacaccaaacttggaaacatccactggcttggacaggaagtttgaggacatgtcacaaaccagtactgctcccttgacatcgggtataaagtcaaactccacaccatgcaccgtctcatttgcgcaataatacacgtaggaggcatctgggttgaggttccaggtgcttggatctggaatttttgtataactcccaagtttagggtgaacgatatttatagtcccaaacttcttggcttcttctgcggccttagctgaccaagctcctgtcaccacatagtccgcacaccttcctgctttcaagccaatgaggtttaaggggaccagcactgaaactggccgcacccacctccttgcagaaaaatcaccttatagttgtctggaacagctagcaattcccgcacaagattctctgtattgttaataatcttggcaaaatctgatgacctgtgactcatttcaagaacactaatgccaactcctttgtagtctaataattccttttgtatctctaacaacactgagtgcggcagcttggcgggaccaggcccaaagttgaccacctgcctgggggcgtccatggtgcggcggcgagggcggtgagtcagccaaggaggaccgaacgcgtgaacggctggcgttcctggccgctgcggtgagagtctgcagccggccccgaa

SEQ ID NO: 53195 - DNA, 824 bp, Homo sapiens
cggacgcgtgggggccacctgaactgtatgggcactctcagccctggtttttcaatccccagggtcgggtaggacccctactggcagccagcctctgtttctgggaggatgacatgcagaggaactgagatcgacagtgactagtgaccccttgttgaggggtaagccaggctaggggactgcacaattatacactatttatttatttattctccttggggttggtgtcaggggccgagccaaccccacctctatgccctgagccctggtagtccagagaccccaactctgccctggcttctctggttcttccctgtggaaagcccatcctgagacatcttgctggaaccaaggcaatcctggatgtcctggtactgacccacccgtctgtgaatgtgtccactctcttctgcccccagccatatttggggaggatggacaactacaataggtaagaaaatgcagccggagcctcagtccccagcagagcctgtgtctcaccccctcacaggacagagctgtatctgcatagagctggtctcactgtggcgcaggcccccggggggagtgcctgtgctgtcaggaagagggggtgctggtttgagggccaccactgcagttctgctaggtctgcttcctgcccaggaaggtgcctgcacatgagaggagagaaatacacgtctgataagacttcatgaaataataattatagcaaagaacagtttggtggtcttttctcttccactgatttttctgtaatgacattatacctttattacctctttattttattacctctataataaaatgatacctttcatgta

SEQ ID NO: 53196 - DNA, 1603 bp, Homo sapiens
tttttttttttttttttttctgatccatgcatcctttattccattaccaaccactgtgccgcatccaagcaacagtacacaaactggcaatcaaccgcagtccagttgtacaacgatctgaggcttacagtacatttaaggcttttaaatgtggaaaaaaaaattaaaaccaaagaacccccaaatccaaacccctaaccaacacaagtagtatagcaatgttaagcatctcctatttctgatgcttatttggcgcaacttccagtgtcaaaacccaaataattcctaaactaaaaagattagtttagtgaaattttaattacataaattcttcaaagcataaacttggaatttttgtcttggaaatgttataaaatttttaatagcaaaacataggaataaaaacatattaacaaaatgtattcaatcatttacattacaaacaaggaatctgcagttcattgttgtagcctgacaaaagaaatcatatctaccattaagaatctatgcacaatgtgattgcaaatatgtacagtactttaaaaaagcctacaaggaggactttacagaaggaaagtcagctaggctctttgttaaaccaaccagacaatcaaaatagtaaaactctgttggctagtaataaatttacacttaaaaaaacccctagtttctttttgtttaagaatattccagttatatttatatggttacagttgatgaagctgtacacgagagttccagtaaattacccttcagttcatttgtccgggaaagatcagcatgttaacaaaaaataataaaggaattttcaccacactagctttccagttacactatcacagcttcacaaatggattgaacccatgtatccagtggcagaaagagagctgcatgtgaaataccgagaacattggtggcaacagggcaagtcctgcatgaatgtcagaaatgatggataaggttgagaaacagatgcgaggctactttatacagcactagaaaattgtccctacattcagctctcattcccattcctgcaaggtaatgaagctgggaatcacgactgttcagtttaacgtgttgtgtgaattagcagaaccacctctagatacaaaagactgagatttcatcagctctttgattagaacaccctaaaggttgggcacttcttcatggttatcaagcctttacagctacccagttaaagcatgtgcaaaacagaggactcttctgttcacagtaaatgaggtaagatcaagttgttgtcttcaggaattaggaagttcgtgagatatgaactgttttagtctttctaggtattgtgcataaagctctatgtcattatgcccagccccttcaacccaaaggggctccacggctcggggacagcgctcgtacatcgctaggccatgggagaaatcgatgacctcatcctctgtaccatgaatgaccaacacaggagaggtgactttagatatcttgtcaatgctggggaaagcatcaaagcagtatgttttcctggtatccggaaaagccacacgcaaaccagacatcagaggggaatggagaattaccgctgcgcattcatacctcgaggccaagt

SEQ ID NO: 53197 - DNA, 361 bp, Homo sapiens
cttgttccaatcgttcctcttctttacgcttggcttctaattcttcaagccgttttatacgttcttcctcttctctcttctgtctttcttcttcctctttaagcttagccagagcttcttgcatagctttaacagtggctttgctaggtccttttttcttctctttctctttttcttccttttctcctttctttttcttcttatctttcttctttttgtctccttcattgtcatcttctgcagctgtgggagtctctgctttctcttcagaggcaggaattactccagtatcaacagtcactttggattttacagtttcttcttcaaatttcctttgagattccttttgtttactctgatc

SEQ ID NO: 53198 - DNA, 503 bp, Homo sapiens
  misc_feature (1)...(503): n = a,t,c or g
atttaagtatactcagtgtttcaaagattgttgctgggaggcctaaatctgggagctagagtaacctggcacaaaatcagaattcactgtcctacatactaagctcagcagattcaactactttctcatcttccttctttgtatctacagacttaaaagctgtctggattttagttacttgattgaatttttgaagtatataaagtattcgtgttttatctcccaatttaatcccccattaggttatctgtcccgttttccttttgctcagttatatcctatgggactcacagataaacagaagtattttaccccttcttttacttttcaagaggggaaaattgtcagaaggatagtcaagtactaggaaatactccattttgtcttttgtttgttcacgttggcacttcacaccatatatacttttttttggtggctccttncccatggacagactttaactggaccccnttaaataggcagctcngggggccaaggcatgg

SEQ ID NO: 53199 - DNA, 2255 bp, Homo sapiens
gagcccggcagctcaatgacaaatcggtggaggacggctggggtccggccccgggagggcccggggcgcgtttaagagctgcgggccgggtgcggacggcggaggcggcgggactggtccctgcagctcttcagtgggtcatctgtgtgtcacagcctcagaagaccagcgagatggctgccaacaagagtaagggccagagctccttggccctccacaaggtgatcatggttggcagcggaggcgttggcaagtcagccctgacgcttcagttcatgtatgacgagtttgtagaagactatgaacctaccaaagctgacagttatagaaagaaagtggttcttgatggggaagaagttcagatagatattctggacaccgctgggcaagaggactacgcagccattcgagataactactttcggagtggggaagggtttcttcttgtgttctcaatcacagaacatgaatcctttacagcaactgccgaattcagggaacagattctccgtgtgaaggctgaagaagataaaattccactgctcgtcgtgggaaacaagtctgacctagaggagcggaggcaggtgcctgtggaggaggccaggagtaaagccgaagagtggggcgtgcagtacgtggagacgtcagcgaagacccgggccaacgtggacaaggtgttctttgacctaatgagagaaatcagaacaaagaagatgtcagaaaacaaagacaagaatggcaagaaaagcagcaagaacaagaaaagttttaaagaaagatgttgcttactatgagtgtcaaggtgacggatgaagccagctgctcctaaggacacagggctgggttggtaaagagaaggctatggttgacttcttgcttgtgcttcccactctccccgacttcattcactcaaacttctttaaatggggaaaaatatttgtgactcagtggctggcagaagaaataagcccatgcaagtggaagggctgctttgtcaggaggttgtggaatttctttcttctccccttcttccctcccaaaagcttagctatgtataaagtgccacagatagggaaacagctgttaattacaaagagaaagaattgtcatagcatcttattttgttcctagttttataacattaccatccttcgttttgaactacagatgttgtagtgggttttggaggagggagtggagtaagatgccctcccacttttatcagtttagtagtagtactgagaaaaatcccttcagctctaagaacactgaaaaatccaccgattttttgggtaagcttcttggcaataccctgtggatctgaaacagctaaaaaaatgaatttgaattgcgccagataggtcaataccaagcttctgattcctcctcacatatgaaaagtgaaagttgtgagttgttttcctcttatttaaacattggcctattataatctgtgttggttatttttctcctgtaagcatcctgatttttctgtaggaacttttctttggcagaccaagtgaagactcaggaatggtgtgcattataaatgacacacattgccacttgtgtagatatttttaagttctttggctaagtcctctcctaactgcctgtcctctggttaggcccctccctctccactagtggtgaatgcatgtgtctgtctgatcagcatcactgcacacggaggtctagtgagcctcttgctaagtgtcacacacactcttcccaaagacgtgatgagttaaagttgtattctgaaatcatgaagccagagcctgtgccagaccttctgctacctctcatagaattgctctgtaattctaaatttaaaattagaagtagagagagataagccatcgcccctttgcctctgagaattggctgctgtttctaatataattattttctaagatagccagatagttagaaaaagattttcattgatgacatatctttaaactttcttgcatcagtattctaaattgagcaaactgaaagattttcatcaggaaaggagcactgtgggaagagcccagtattcacattttttccccatttttcagaagcgacatttcatatataggtgccaaaagtgaatcggggtgcggagagtgggaaccttttgaatttatgattgtcacagagatggtagaaattatgatctgactggaaaacaatcctgtatcccctcccaaagaatcatgggctttttttttgaattaaaaagcagacaaatagactttctcggg

SEQ ID NO: 53200 - DNA, 908 bp, Homo sapiens
cggacgcgtgggcttgcctcagaataagccaaggcctctcactcaagaagaaattgctcagagacgtgagcgtgcaagacaaaggcatgcagagaagcttgcagcagcacagggacaggcacccttggagcccacccaagatgggagtgccattgaaacatgtccaaaaggagacgagccaagaggtgacgagcaacaggtggaaagtatgacccctaaacctgtgctccaggaagaaaacaaccaagagtcttttattgcatttgctccgggtgttcagtggtgtggctcgaagaggaaagaaaatttttgtcttggggcccaaatacagtcctcttgagtttttaccgaagggtaccattaggcttctcagctccaccagatggcctcccccaaaggtcccccacatggcatacttgtgctctggaaaacctgtatcttcctgatgggaagggaactggaatatctagaggaggtacctccaggaaatgtgctaggaataggaggccttcaagattttgtgctgaaatctgcaacactgtgtagcctgccatcctgcccaccatttataccactcaacttcgaagccactcctgttgtgagagttgctgttgaaccaaaacatccaagtgaaatgcctcagctcgtaaaaggaatgaaactgttaaaccaggctgatccctgtgtccagattttaattcaggaaacgggagagcacgttttagtcacagcaggagaagtccaccttcagcgatgcctggatgacttaaaagaaaggtttgcaaagattcatatcagtgtatctgaacctattattccattcagagaaacaatcacaaaacccccaaaagttgacatgggtcaatgaagaaataggcagacagcaaaaagtttgcaggtcatacacc

SEQ ID NO: 53201 - DNA, 771 bp, Homo sapiens
gttggctgcgttttcggcgggcttcccgggtacaaaaatggctgtggctagcgatttctacctgcgctactacgtagggcacaagggcaagtttgggcacgagtttctggagttcgaatttcggccggacggaaagcttagatatgccaacaacagcaattacaaaaatgatgtcatgatcagaaaagaggcttatgtgcacaagagtgtaatggaagaactgaagagaattattgatgacagtgaaattacaaaagaagatgatgctttgtggcctccccctgatagggttggccgacaggagcttgaaattgtaattggagatgagcacatatcttttaccacatcaaaaataggttctcttattgatgtaaatcagtcaaaggatcctgaaggccttcgagtattttactatttggtacaagacttgaaatgtttagttttcagtcttattggattacacttcaagattaaaccaatttaaattgtatgttttcaggctgtttgtatatttaattaagggatgggaggggttatttgtcatttacagtattggggtttttatgaatgtgaagcaaacaaaaaaaatttgtatgtaaactgaaaataagaaaatacattagcaagcttaatggttatccttacttgagtccacatgggttggacagtccccacacacattaaattctgtaaatgaaagccaccttttgttaaaaatttgctctaataaaacataccaaatcctgaaaaaaaaaaaaaaaaaaaaaataa

SEQ ID NO: 53202 - DNA, 656 bp, Homo sapiens
ttgtctagaaatttattgaacatagttaatctattacagtagaggatctggacaataaaaatagttatttaagctttttattttccctgacctagtagctttcatgtctcttaaaattccctaaattttatttctcaaatcccatatcgtgattggttaaacagacagccaagaatctgagtctattttttgagaatctcaatcacatttctgggaaatgtgacttattgagtacatatttattttctcatttccattcagataaatgacacagctttgctgggaggactgacatcggcctcctacctgctgggcatcctatttctctacctcacctccctcaaactaaaggatctgtaaccacatataaagacccacacccaagatggcagataggaacacaagtcaatgtcattgactcagcattccattgtcctcttcactggcttcctcctgcgctttccacctccctcaatcaccctagaaataagatgtctgatttaaccgtagaaaaattgtgactctccttacatctggagtattcatgaaatttttttgactggataaattttgatgaaaattaatgtagaattgcctaaattgttagaaggatttaaataaaacaatctaactgataagtctaaatactgtcttaa

SEQ ID NO: 53203 - DNA, 398 bp, Homo sapiens
cggacgcgtgggtcatgacccatgatcctcaaaacctataccttctctaaaaccttatctggaaccatggcctccctccactgtggacgaggcatcattctgtaccatacgccagttcctggttgtttcctctggcatcttcttttgtagctcctttaatccttcagactgcttagatcctatgatctgcccccataacacttactaattttatcttgcatttttttacattggcaagtattcgtttacttactcatgcatatttgccaaaagtctgcatttccattcaacaggaatctcattggtaacagagattacttaaccattaatattgatgatcaactggctggctgtttaaattgccactttcctattgaattttgaagggtgcccatggg

SEQ ID NO: 53204 - DNA, 467 bp, Homo sapiens
tcagaaactctcttatggattctcttccctcacaccaccaaccaacgggcacagggtccccagagaccagagccaggagcccctttcagcctggaggcaccctgaggggaggcactggtcttgtgactctctgggttgtccccatccttctctctggcccccgccgaggggcaccaggaattagcacacacccttcttccctcctgggacctgggtgaaggactgcattcttcgcaccacaccttcagtggacttcactgcacctgcaaccaaccaagatccctttgcctttcaggtgtctgggcctcctgcctggatttcgggaacctcccttcccatgtccttacgagtccctgcaaactagtgtgtgcaggaaaccctgagcatacactagtttgcagggcctcctgcctggatttcgggaacctcccttcccatgtccatacgagtccatgcggacgcgtgga

SEQ ID NO: 53205 - DNA, 449 bp, Homo sapiens
tgagcctcatctctacgtgtaatatcgaatcccaagacaagaacctcggaaagctgatagatcggtttgtggctgatttcaaagcccaggggccacctaagcccaacactgatgaagggggtgccgtgctccccaggttgcgccgacctctttgtctactacaagaagtgcatggtgcaatgctctcagctcagtactggggagcccatgatcgccctgaccaccattttccagaagtacctccgagaatacgcctggaaaatcctctctggcaacctgcccaaaaccacaaccagcagtggaggactgactatcagcagcctcctcaaggaaaaggagggctcagaagtagccaagttcactctggaggagctctgcctcatctgtaacatcctgagcacggcagagtactgtctggccaccacccagcagctagaagaaaaactcat

SEQ ID NO: 53206 - DNA, 347 bp, Homo sapiens
gatagaggtctagccagcccttacttcctgaagagagctctgtgggaaactcgaggctacagtagcttcccggctcccagctcctaccctacccccaccaaagcagaaacgggagacggcaacgttctggctgccattagacttacgtctccctcccctacgtcccctagcttcccaagacaggaagaaatgtgcaaaaggcccctccggagaaaactattttgccgttcagctgttctttacagaggatgttattttagtgagacccaggtcctagaccttctgattcctatttatttttttaacagactagtctcaaagtacagcacaaaatctcttctctgcct

SEQ ID NO: 53207 - DNA, 358 bp, Homo sapiens
ccatactcattcctattagtctttgcaaattatacccacatctactgattagggcccaaacattaacgttttactaatccaggcccatatcctattcatgtgctttcttacaaagcaagagtcagacagctggaatgaaaatctaagattcatctaggccctaggctacagataaattaaaaccatatgcatgatatttgtatctgtgcagaaactttttcagtttaagtcccatctatttttggttttgttgcttgtgcttttgaggtcttagtcatgaattctttgcctagaccaatgtccatgagagtttcccccaggtttccctagtttcaggtctcactttgagtcttttttc

SEQ ID NO: 53208 - DNA, 306 bp, Homo sapiens
  misc_feature (1)...(306): n = a,t,c or g
ggtggtatcccattttataggtgtgaaaactgaagcaaaaattcattttcctaagggcacatggatactttgtggtggagtcatatggggatcagaaaagcctttgaggcctttggagttagagggcagaaggcaaggcctgagccgctgtaagccttaggagtttaggaaggctccagaagacaaatggggtctgtagaggctgttaactcagccaggcttcttagagttgcatttcactaacnnnnnnnnnnnnnnnnnnnnnnnnnnnnnnnnnnnnnnnnnnnnnnnnnnnaatccccaagt

SEQ ID NO: 53209 - DNA, 851 bp, Homo sapiens
ttttttttttggcgtggaaatgctttattcctaggatgagagtagagggaaaagacggaggggttcccaggtggtgtaagtgcttcctaaggactgccctctggggtcttggggtattgcaggcttctcacaccccaccacccatggggccaaccgctcggccagccacactgtcctcagagtgttcccagcaaggtcagcagagacccagcaggtggaggaaataatgggagaaaagagttgaaggtgggagtggggaatgggttcacaatgcatttgttcagggatctttactcattctgtgatgaagagaaggtgacagttcactggctccctgggggtctaggagacttgggcttggctgaagagggacagacactcagggcagggctccatgccatcagcttatcagacagccacctttctccttgaagggattcttgtcctcagggatgcctttgagaaaaggatcgtttcctgcttgggcctccacgtactccttgatttcctttcccgctttggaaatcggaattcttgtgtttttcacttctttcttcagctgctccacctccatcttcaacaggtccttctcgctgagatcctgggccatcctgccctagacagacctgatcctgccacagaagagcacactctccaagtcacttgtcctggactcaggtaagatagtgtttgagcctcctagttcttcatcagctgaaaatcttcagataaagcagatggccagtttcctctccaggaccagggagcaatcacagctgccccgaccttggcttcctctgctgggtgggattgggggctgggcccccaaatgggcccctggcttccccctt

SEQ ID NO: 53210 - DNA, 718 bp, Homo sapiens
  misc_feature (1)...(718): n = a,t,c or g
ttttttttttggctgtatatagctttatttttagaaattaattcacacaattgttggggttggcaaacttcaaatccatagggcagactagcaggctggaaactcaggcaggagtcgatggctatagtcttgaggcaaagtttcttcttttccaggaaactgcagtgtttgttcttgaggcctttcaactaatcaggtgcagctcacccaaattatttaagtaatctctttcacttaaagtcaactgattgtagatggttaatcccatctacaanataccttnaaaagcnacacntaagattactgtttgattaaataactgtgtgctatagcccaaccaaactgacaaataaaaccaaccatcacatccaccaaatcaaaactccaggaacaaatgtttaaattacaagcattaagattcttcactctgaagaagctttcttgggggcatttagcctggttccctttgcaaaactttcatgtgcagttgtcaatactaagcaaagtctacctaatctaggcacttgcatttaagagaggaatacctctggaacccatcccatccttccaccctcaaagcccttcccctagccccagctgccatcagctcctggttggaccacggctgcagcctcctccgttctgccagcttcctgtccttcctgctctgccctgtcatccacccttctcgagggtactctttccaaaacacttgtct

SEQ ID NO: 53211 - DNA, 940 bp, Homo sapiens
gttactcagtactacagaggagatgcacacgtccccactatgttctgtcttgagaaggggacaagagaaagaggaaaggagccactgtactttattttgcacctacagcgtgccttggcactgggctagagaggcaccttcctgcgtgaatcctgtgcggcaggtcttattgccataataagtcacatcaaagacactgctggtcataaaacactggtttacataccatagggaaaaacgctgccaatcttaactaagatgctacaactgtacagttccttccaatcagagatgttcacgtgtgaaaaaaaaactgtgctacttacaatctatgaaagctggtattatcccacttggcaggtaaggaaactgaggtcctgtgagtgaagtgacctcatgatcacacaacaggagatggcagggctgggattcaaacccgggagtgtctgctgccacatcccacactcccactgcctggctccaagtcccaggaagctcgagactgtgagttttctcccttgaaactcacctgggagagagtccgggcacctgtgcctatgtggagggttccagccccagccagggcccctccgctgcccacaccctgggagggagaagcggcctcccttccaggctcatctgctcactgccggcattctcctgggcagagctgaggtctgagagatctggactccaacccaagggccctctcttgttattcaggggtgtccacagttaggaagggacctggggccttgtcccaccaccttcctaggccccgtgatcaccaccccctcaagcggggccccagccccctgagcaccccctcacgtgacccagccctcggctgtttccaggctcactgccagtggtgtgctcttctgggccacagcagccagggtccagggcgaggacaggggacaactgaaaacaacccgtt

SEQ ID NO: 53212 - DNA, 117 bp, Homo sapiens
ccaggatcttgctatcatactttgcctgcaatacctagagatttggatgaattctccttttgttaagattctccaaatatcctgatgttcctggtcctgtcaggaagtgacaattcc

SEQ ID NO: 53213 - DNA, 396 bp, Homo sapiens
aaacaattcatcaaagttgcagcatgcaaagtcaatatggagaaatcagttgctagtgtaaaaaatagaaaaggaaattttggaaacaatccaatttaacagcatcaaaagaataaactacttaggaatcagcttaaccaagcaggtggaagacttgtagagtgaaaacttcaaacaccctttaaagaaattatagatgacataagttattagaaagacatcctgtgtttatggattggaagacttaatattcttaagatgtcactactacccaaagtgatgtacaggtttgatataatccctaccaacattccaattactttgtataaatagaaaaatccaccataaatttcatatgaaatttccagagatcccctaattataaaaataaaaagg

SEQ ID NO: 53214 - DNA, 511 bp, Homo sapiens
  misc_feature (1)...(511): n = a,t,c or g
catacttgatcctaaattcctgtacttcctcaggccatccgagcatgaaacgctgtcacctacccacatccgctggctgtgacgcttgtcaaagtgttctctatcggctgcatgcctagaccaccaaagcgttctgacccggacagtgtcacttggagaaggcggcgccgacatgtccagggcgcaagatctgggcctctggtgtcctgggtggttccgggaaggggtttttgggnagnctcctccgtttggcttggcttaccccaacggttcccaaattggaagttggggaaaaaggtnggaccccaaccgcccgaaggccccttcccntccgggggggaattaaaccaaggccccancttttggggggtttttaaccccaggggggttcntggtggggnattgnaaancttggcggccaagggttaaaccgnccggtttgggggtnttccttttttcccantttggccccgaaccccgccaatttttttnaccttaattcntttccaaa

SEQ ID NO: 53215 - DNA, 522 bp, Homo sapiens
  misc_feature (1)...(522): n = a,t,c or g
cggacgcgtgggggtttctgccgtgtaatacctcctcgaggcagaaaaattctactttccatctgcttggctgcggaggaccttggggtgggctcagcgtgggggctgcaggcagaaatgggtccagaaggcaaggtcgaggttagagccaagcctgtgggcagggctacggtcagggggcggggaggaatgtggttccaggcccagaggaaaaggttgaagttatagccaggcctgtgggcgaggccgcagcagggcggccataggggaaggagccaatgtgttatgcatgtagaaaatagatggcctggagcaactgaagaaccacaaaagaagtgaaacagccagttcctgccttaactgatgacgttccaccattgtgatttgttgctgccccaccccaactgatctcttgaccttgtgacattcttcttctggacgagtctcaggagtttccccaccgagcaacttgttgacccccggncctgccaggaaaagataaccacnttaacttttccatta

SEQ ID NO: 53216 - DNA, 695 bp, Homo sapiens
  misc_feature (1)...(695): n = a,t,c or g
gtgggaagaaaaagatggaggtgaaatatgtccatactcaaataagcatgaaagacaagcgtgctgcaagttaacccctaaatatcagagtattagtacattctgaaatgggttctgactaaattatcctctcctgtggagtggagttaaatggaaaaacacaagaagttccttaataagctgtaattttttagtttggtatttctcagtgatagagcataaaacttaacagtagagtttattatcagtcatgacttagttatatgctttgtcatttattaaatggatttaaatctattagtgttgcatagtttttctgtgctttgccctaggttgattccatttgttggatgctcttaatttgtccaatgtaaatataaaaagagagggcattaaaccgttttgccctataatgggggaaagatgctggttagatgtttattttagtgagcttgcatttncttacacgtgcaaagcagttcatagaattcatagttttacacttactatgtctttcctaaagacacccaggatgctttatttttaactcttgagccactagtgactcttgaataaattgaggtcagaaatgttgcaaaagtggtaagtttctggcagtgtggagacaggggaataatctcaacagtaggtttttactgaatccaattattttaatttaggctgtgtctatatga

SEQ ID NO: 53217 - DNA, 503 bp, Homo sapiens
tttttttttttcgttttttttttttttaaacaattgatttaaatccatgtcattttactttatatgtactggtctctcatctgactttaggcgttttctgcggggctgtataaagtcttcatcagagtcctcagttacctcaccatcatcctcttcctgctcaaactctggcaaaggtgcgaaggtcctgtctgagtagatctctgtgagtttatcttcaaagtacaatgcaactgctttccctgcctgagctacttctgaatcagcttcattaaacctttcacagttcttgaagatcaaacggacatcggccacaaagtcatccggggatttgggtaggtgttgggggaatgttttttctgaagcttctttttcacggtggataaatccattgggtttctttataattttatagtaggttgggtatcgaagcaggaacaggctcctggaattcaatactttaattcatgggcaatagaggtaaagcagaagacgttcacatt

SEQ ID NO: 53218 - DNA, 512 bp, Homo sapiens
agagagtcaaactgagaggcaactctctttaccctttatgcctgcctacctctgttgttagagatgagaatagagaccagctgtttccattgcaaatgtcactatttgaaaagaagttgttaatggaaatctctgcaagtatcgtactgtgtttagtctctcatggtagagatttcaaaagaagaaatgtatgtatcctaaatatgctgaaagcagtctgatgaaaggtttttaaatttcaggtgttaacttggtcaactctttgttaggaggttgtctgtactttaagtaaaattattctttggtttactggttattttggtttgctaaaattatgtcacttataattttgatttatatacaagagtgaagaattgaaggaaatactgaggagagacgtatgaactattttcttcatctcaattcctattttatcaaatgcaaaatgtaatcctaaccagttgattttctataattggtatcttagtactggggaggagtatcacatgagg

SEQ ID NO: 53219 - DNA, 481 bp, Homo sapiens
cacagcagtgagctctttattttaggctgggtgggggcagcatgtgacagtcaagagggctgacccttgggcctgcacggacctagataagatgcccagggtcccggaatgttcacagcccacagccaaggtgagcaaggggcagggaatgtcctgggctcagagcccgagaccctgcaggggtgtccctgcccatcagcaaacagcataccctgacaccagctgcaccccaggccccagccggcccttgttcctgacccagacaagaaactagttcatggggctacaactccccttctaggggtcagaggggagagaaactggactgccgtctccactgctggccggctcatggccccctcttccctgatgctccccaggagctgccccagccagatgttcatcgctgagcctgcacccaccgaagcccaaagcttcccttcttgggcctctctgaggcctacacaggagagcagggcct

SEQ ID NO: 53220 - DNA, 463 bp, Homo sapiens
tccttttaaaatatatttattgaaatacaaagagtcaatataaagaaaaatagaggtcaccatacttggccacagttagaccgctcataggcccatggctgctgcaaccatgggcaggacacagagggagtccagcctctactgataaatctgggcaggttcaccttcgcaggccaagccaggggccatccctggtatgcgaaacctggaggttttccaggaagccggctgctccagagctagctgtcaagtctttagccccacaggctggtgcccagagccacttccacaggagcagcctcgggcttcacccacacccaaggagcttccgaggcaggaggcaagcaaggtgaagggagggttcagggtcccacaacagcagtgagcagggtccagccatcaggcctcagagcctctgtcatgccacctgcgagacgggctcctcctgtccccactgtgtccc

SEQ ID NO: 53221 - DNA, 161 bp, Homo sapiens
gtaaaagagtttatactggaagttaaaaatcatcaaattattagatactgggaatggagtagtaaagcagacagagcagggaaggaataaagtatgaattttcaagctggttacccatctgggcaactggagctcagttttgatgggaaagtctggaagac

SEQ ID NO: 53222 - DNA, 786 bp, Homo sapiens
cacagtcccttgaactcctcgagggacccacagaaccccagccaccgagaaccacttctgccccaaaagagtgcagttctcaccaaccatgccagggtggaccttgggtgacaggaacttctgccgtcccaccttctgagcccattctcagctatgagaacattttaaagtgtgcttttcaagaaataacagtccagcaggcagctgaagacggtttccaccatagaccatttcctagaaataagcagtgaagaaaaacctggcgttgaacgtgtacataaattgtgtaacgaatccagaaaactctggagagcccttcagagcatacacaccacgtctacttctcagcgcctctggagcgagtcccgttgccaggagaacttctttcttgttctcggaatagatgctgcgcagaagaacctttctggaggccagggccacatcatggaagattgtgacctcaaagagcctgaaggactcctcactgtcagcagcttctgtctccagcattgcaaagccctgatccagaccaagcaccagtctaacagagcagcgcaggcgtttctcatccagcagcaatgctacttcctcacccagggcaggtgcatgggctgaccctgatgggagcctccaggaacactgccttgagaaggcaccaccgaggggctatgaggtccctgaagaccaactggtgcctgtgatctacaaacagacaaatatttgacctttgtcttcaatgacatttacatataaatagacataaataaaatcctccataatttaaaa

SEQ ID NO: 53223 - DNA, 857 bp, Homo sapiens
ttttttttttttttgtttgctggataattttttaataaagtgaggtttacatcactgatatttaagaatggctatatgcacaaaagaaaacacacctttttggttaaggggtgaggaagttagagaaagcatgagaaacagggagcatgtggggtgaggcggggcaggagtggaaggctgcaggcacccccagctcactccctgcctgcggcagcacccatgacactacagatcaaggggttatgaatgacatggattcagatttctttcattctagacttcaacctagccttaaccttttgtttcagcaccagtctaacagagcagcgcaggcgtttctcatccagcagcaatgctacttcctcacccagggcaggtgcatgggctgaccctgacgggagcctcccaggaacactgccttgagaaggcaccaccgaggggctatgaggtccctgaagaccaactggtgcctgtgatctacaaacagacaaatatttgacctttgtcttcaatgacatttacatataaatagacataaataaaatcctccataatttactcttaggtctaggaagatgtggctgtgtgcggttcctgattttcacccaggtctcactgcagcgcaggacataatgaagaagtatcacacacacatttaaagtaaaacatgatacattcacactgttgactgagactgtagtgatgctcactgcaaaaaacaaaacaaaacaaaaaacccttatttaaaccttaaaaaaatgaaacacaccaactgcaattgtttaggctataaaagttctaatgtagcagcaaaggatgtttatagaaaaaatatacttttaagaaaatagctgaaa

SEQ ID NO: 53224 - DNA, 436 bp, Homo sapiens
  misc_feature (1)...(436): n = a,t,c or g
ggttagagcttgggagcacaggatttaataagtgaactagatgtacctctgcaattaaataactggatattctggagccagctagattccctgacattttaggctgccaaagagcagaacctgatttgaatgtagattgagtccatacgttatataaataagaatgtaagacatttatcaactgtaccgtgtctcagagagtttctacagaaagtcaacccttgaaaataaatcttttccttttattttgggatgtttaaaattttacaggtgaaaaaaattctttgaaatattaatttcagggccgggcacggtaggcttcacggccagttaatccccaggcactttggggaggcccaggccgggtnggganccactttnaggggtcacggttttttttaggacccacccctgaccccatttttttgcgggaact

SEQ ID NO: 53225 - DNA, 398 bp, Homo sapiens
gctggattgcagggagcaggagcagttggagcgggagctggccccagagccatgggtggagagggccacacccacctgaggcccctgcagccggacaccagctccagggtcccctttgccaggctttctcagaccaggccttcctgcagctgtctgcaggccccctgggtccccttgttcagagactgtgctcttctgagaagcagagctacgcttaggctccagtaaggattggaggcactttccagccctgtgcagtgttgctaccagcaagaatgaaggttgtgcagagcagtactgtgaggtaggcaccgtgactcggctgcctgtgcagaaggtggaggtggcaggcggatggccagggagccatgagaagactcttcctgggcacggcgtgg

SEQ ID NO: 53226 - DNA, 377 bp, Homo sapiens
tcaaacaatcagctttctattgctacttttactgtaggcctgactctcaatacagaaacttcaaaatgggcgcctattcaatcagaatttgaaatttctattttatcctgcctcgtgaattaatgagcacaagttctttataggattccagctaatagatgcagaaggaatgacaagatatcactggttggcaacctctaatggaatcccagatgtgggcaaatatcattaatgatggctaaatccatcaggggaaaagctgatagagaacttttgtaatgaatggagtgggctgggcagcatccaaacccactatcaatcttaatgttacaagatgagagccattatgtgccatgatgtgatacaacatggagcat

SEQ ID NO: 53227 - DNA, 6073 bp, Homo sapiens
aagggagctcagtaagtcacttctgggcgactgttgttttatttccggtctatgggacccggctgcgatttgctgctgcggacagcagctaccatcactgctgccgccatcatgtcagacacggacagcgacgaagattccgctggaggcggcccattttctttagcgggtttccttttcggcaacatcaatggagccgggcagctggagggggaaagcgtcttggatgatgaatgtaagaagcacttggcaggcttgggggctttggggctgggcagcctgatcactgaactcacggcaaatgaagaattgaccgggactgacggtgccttggtaaatgatgaagggtgggttaggagtacagaagatgctgtggactattcagacatcaatgaggtggcagaagatgaaagccgaagataccagcagacgatggggagcttgcagcccctttgccactcagattatgatgaagatgactatgatgctgattgtgaagacattgattgcaagttgatgcctcctccacctccacccccgggaccaatgaagaaggataaggaccaggattctattactggtgagaaagtggacttcagtagttcctctgactcagaatctgagatgggacctcaggaagcaacacaggcagaatctgaagatggaaagctgacccttccattggctgggattatgcagcatgatgccaccaagctgttgccaagtgtcacagaactttttccagaatttcgacctggaaaggtgttacgttttctacgtctttttggaccagggaagaatgtcccatctgtttggcggagtgctcggagaaagaggaagaagaagcaccgtgagctgatacaggaagagcagatccaggaggtggagtgctcagtagaatcagaagtcagccagaagtctttgtggaactacgactacgctccaccaccacctccagagcagtgtctctctgatgatgaaatcacgatgatggctcctgtggagtccaaattttcccaatcaactggagatatagataaagtgacagataccaaaccaagagtggctgagtggcgttatgggcctgcccgactgtggtatgatatgctgggtgtccctgaagatggcagtgggtttgactatggcttcaaactgagaaagacagaacatgaacctgtgataaaatctagaatgatagaggaatttaggaaacttgaggaaaacaatggcactgatcttctggctgatgaaaacttcctgatggtgacacagctgcattgggaggatgatatcatctgggatggggaggatgtcaaacacaaagggacaaaacctcagcgtgcaagcctggcaggctggcttccttctagcatgactaggaatgcgatggcttacaatgttcagcaaggttttgcagccactcttgatgatgacaaaccttggtactccatttttcccattgacaatgaggatctggtatatggacgctgggaggacaatatcatttgggatgctcaggccatgccccggctgttggaacctcctgttttgacacttgatcccaatgatgagaacctcattttggaaattcctgatgagaaggaagaggccacctctaactccccctccaaggagagtaagaaggaatcatctctgaagaagagtcgaattctcttagggaaaacaggagtcatcaaggaggaaccacagcagaacatgtctcagccagaagtgaaagatccatggaatctctccaatgatgagtattattatcccaagcaacagggtcttcgaggcacctttggagggaatattatccagcattcaattcctgctgtggaattacggcagcccttctttcccacccacatggggcccatcaaactccggcagttccatcgcccacctctgaaaaagtactcatttggtgcactttctcagccaggtccccactcagtccaacctttgctaaagcacatcaaaaaaaaggccaagatgagagaacaagagaggcaagcttcaggtggtggagagatgttttttatgcgcacacctcaggacctcacaggcaaagatggtgatcttattcttgcagaatatagtgaggaaaatggacccttaatgatgcaggttggcatggcaaccaagataaagaactattataaacggaaacctggaaaagatcctggagcaccagattgtaaatatggggaaactgtttactgccatacatctcctttcctgggttctctccatcctggccaattgctgcaagcatttgagaacaacctttttcgtgctccaatttatcttcataagatgccagaaactgatttcttgatcattcggacaagacagggttactatattcgggaattagtggatatttttgtggttggccagcagtgtcccttgtttgaagttcctgggcctaactccaaaagggccaatacgcatattcgagactttctacaggtttttatttaccgccttttctggaaaagtaaagatcggccacggaggatacgaatggaagatataaaaaaagcctttccttcccattcagaaagcagcatccggaagaggctaaagctctgcgctgacttcaaacgcacagggatggactcaaactggtgggtgcttaagtctgattttcgtttaccaacggaagaagagatcagagctatggtgtcaccagagcagtgctgtgcttattatagcatgatagctgcagagcaacgactgaaggatgctggctatggtgagaaatccttttttgctccagaagaagaaaatgaggaagatttccagatgaagattgatgatgaagttcgcactgccccttggaacaccacaagggccttcattgctgccatgaagggcaagtgtctgctagaggtgactggggtggcagatcccacggggtgtggtgaaggattctcctatgtgaagattccaaacaaaccaacacagcagaaggatgataaagaaccgcagccagtgaagaagacagtgacaggaacagatgcagaccttcgtcgcctttccctgaaaaatgccaagcaacttctacgtaaatttggtgtgcctgaggaagagattaaaaagttgtcccgctgggaagtgattgatgtggtgcgcacaatgtcaacagaacaggctcgttctggagaggggcccatgagtaaatttgcccgtggatcaaggttttctgtggctgagcatcaagagcgttacaaagaggaatgtcagcgcatctttgacctacagaacaaggttctgtcatcaactgaagtcttatcaactgacacagacagcagctcagctgaagatagtgactttgaagaaatgggaaagaacattgagaacatgttgcagaacaagaaaaccagctctcagctttcacgtgaacgggaggaacaggagcggaaggaactacagcgaatgctactggcagcaggctcagcagcatccggaaacaatcacagagatgatgacacagcttccgtgactagccttaactcttctgccactggacgctgtctcaagatttatcgcacgtttcgagatgaagaggggaaagagtatgttcgctgtgagacagtccgaaaaccagctgtcattgatgcctatgtgcgcatacggactacaaaagatgaggaattcattcgaaaatttgccctttttgatgaacaacatcgggaagagatgcgaaaagaacggcggaggattcaagagcaactgaggcggcttaagaggaaccaggaaaaggagaagcttaagggtcctcctgagaagaagcccaagaaaatgaaggagcgtcctgacctaaaactgaaatgtggggcatgtggtgccattggacacatgaggactaacaaattctgccccctctattatcaaacaaatgcgccaccttccaaccctgttgccatgacagaagaacaggaggaggagttggaaaagacagtcattcataatgataatgaagaacttatcaaggttgaagggaccaaaattgtcttggggaaacagctaattgagagtgcggatgaggttcgcagaaaatctctggttctcaagtttcctaaacagcagcttcctccaaagaagaaacggcgagttggaaccactgttcactgtgactatttgaatagacctcataagtccatccaccggcgccgcacagaccctatggtgacgctgtcgtccatcttggagtctatcatcaatgacatgagagatcttccaaatacataccctttccacactccagtcaatgcaaaggttgtaaaggactactacaaaatcatcactcggccaatggacctacaaacactccgcgaaaacgtgcgtaaacgcctctacccatctcgggaagagttcagagagcatctggagctaattgtgaaaaatagtgcaacctacaatgggccaaaacactcattgactcagatctctcaatccatgctggatctctgtgatgaaaaactcaaagagaaagaagacaaattagctcgcttagagaaagctatcaaccccttgctggatgatgatgaccaagtggcgttttctttcattctggacaacattgtcacccagaaaatgatggcagttccagattcttggccatttcatcacccagttaataagaaatttgttccagattattacaaagtgattgtcaatccaatggatttagagaccatacgtaagaacatctccaagcacaagtatcagagtcgggagagctttctggatgatgtaaaccttattctggccaacagtgttaagtataatggacctgagagtcagtatactaagactgcccaggagattgtgaacgtctgttaccagacattgactgagtatgatgaacatttgactcaacttgagaaggatatttgtactgctaaagaagcagctttggaggaagcagaattagaaagcctggacccaatgaccccagggccctacacgcctcagcctcctgatttgtatgataccaacacatccctcagtatgtctcgagatgcctctgtatttcaagatgagagcaatatgtctgtcttggatattcccagtgccactccagaaaagcaggtaacacaggaaggtgaagatggagatggtgatcttgcagatgaagaggaaggaactgtacaacagcctcaagccagtgtcctgtatgaggatttgcttatgtctgaaggagaagatgatgaggaagatgctgggagtgatgaagaaggagacaatcctttctctgctatccagctgagtgaaagtggaagtgactctgatgtgggatctggtggaataagacccaaacaaccccgcatgcttcaggagaacacaaggatggacatggaaaatgaagaaagcatgatgtcctatgagggagacggtggggaggcttccccatggtttggaggatagcaacatcagttatgggagctatgaggagcctgatcccaagtcgaacacccaagacacaagcttcagcagcatcggtgggtatgaggtatcagaggaggaagaagatgaggaggaggaagagcagcgctctgggccgagcgtactaagccaggtccacctgtcagaggacgaggaggacagtgaggatttccactccattgctggggacagtgacttggactctgatgaatgaggcttcctttgggcctccttggtcagccttccctgttctccagcctaggtggttcacctttccccaatttgttcatatttgtacagtatctgatcctgaaatcatgaaattaactaacaccttagcctttttaaaagtagtaagtaaatgataataaatcacctctcctaatcttcctggggcaatgtcaccctttgatttaaaacaaagcaaccccctttcccctaccactacggaaaagagcaagctcatttttccgtgtcctcctttatttaactccatttattgcttttggtataatttttccctggggaaggaggggaaattatgaaagaactagtaactttatgtcctcttgatgtattaggaaatttccggccaggcgtgggtgggctcacacct

SEQ ID NO: 53228 - DNA, 474 bp, Homo sapiens
ttttttttttttttcatgtttaaagcagtaatttattctgagatttacttttgtctgttttctttccagtccaggtatcaatattttcaagaatattaaagtataataatcaaacattcaattcataacatatatgcttatcagaagcttttacaaaatggaaattttatgttagaagatttgggctaccagtaatattcactgtgcatattttaaaaaaaaaggtgaacagagttcattgtttagggaaaatgattatggagaaactaaaatcaagagcaattttaatgtggatattaatgacagtgatcactttcatatccatgactttatctgttcctaaggactaaagggatgaaggcagattatgtaccttactgtcaagaacagggtcagacaaggtcaacaatattaatttaagaaatgtttattaagcatctactatgtggcacgtactccactaggtgttgagga

SEQ ID NO: 53229 - DNA, 289 bp, Homo sapiens
ggagcaggactgaccaatgtggaatatgcacatctgtgtgagctcatgggcacgtccctgtatgcccccgaggtatgtaactgctctgcgcctgacacgggcaacatggagctgctggtgaggtatggcaccgaagcgcagaaggctcgctggctgattcctctgctggaggggaaagcccgctcctgttttgctatgaccgagccccaggttgcctcttcagatgccaccaacattgaggcttccatcagagaggaggacagcttctatgtcataaacggtcacaaat

SEQ ID NO: 53230 - DNA, 906 bp, Homo sapiens
tttttttttttttttttttgcctccgagatgtgtttacttattcttctgtgtccccaaaacccctttccaaaataacatttaaatgattgttctgtgctgtgtgttcaaatggagataatcagatgccagtggctttacaatgtgggttgcattccattttcccagggcgcccaggtcctgggtctctaggccaccgcccgccgtggccgcccctctgctcaccagggaggccagacagggaaccctgcagctgccagagcaaggcacgttcccacagccttggggaggcctcccaaaatgtgtccagattcccacaggcagagagagagggactgaaaggctgaagtgaagtgaccgtgcctgcccagcctgggactgagagcctgaagaccagctttccagactctgtcccagaacccccttggccctcagcaaatcccctcctcctggcctgaaacagactccaggcttcttgcagagacgtcttctgtggagaaccagaaagattgagtccaccctgactgtcccgggacagagctgctgagcagggtgcaggagccacaaacaccggatctttcgaggcacatcagtgacagatctgggcacagctggaccagccaggacattgagccactgcagccccaaggctctaaatgcggtgcttcagctctagcttggccaccgtggcccggtgcacctcgtcagggccgtcggcaaagcgcagggctcgggcccaggtgaagaactgagccagtgggtagtcgctgctcaggcctgctgctccaaaggcctggcagacacagagtggagggaggcggccctgggtcagcccttgtctccgagagccccaggaatgatagcctgctcttgatggcccataacaaccatcttcccggacttccctg

SEQ ID NO: 53231 - DNA, 871 bp, Homo sapiens
  misc_feature (1)...(871): n = a,t,c or g
tgtggggaaaagtgagtgattcgtgttgtttccagtcagccccgctccgagtctcagggggactgccccgcacacagactgttcaccagggcctgcagcctctcggacagcaccacctgcagggagcagaggacaggagcggtgggcagggtgagggcgggggcgcacagggcagaatgacagggtgggcctccccccaacctggtactgtgcagggctccgcagccgcctgtgctcagggctgagtcggctcagggacagctgggccaaggctctagactctgccagggatgggagcggctcacacagctgtccctgctggaggcagagcgcaagttagtggctccacctgggcctggcctcacggtgcagggctcctggggcccctgggaggccacaccctcagctcctgcccagcctgtggacttggctcttctgctaactgcagcatgtccatgagtggagacccgtcagagcccaggagccggaaagcagccttgctcccaggcaacgtctgcttctcggggtcctcggtcagcttcattcgtggctggcccccacggccaccagcttatagacgccacccagggaaggctgttgggggcaggtgaccacactggtgccaatgccaatgacattcacngtcgagcgtcntccttggccagtcggccagcgcctcctcgtcaatgttgttgctgactacgatgaggactgactccagccaggcacctggaactgggctgcagcagctcggaagaccttgcggatctcctgaggctgctgtagcaggtcaccactgtccagcctcacgcccactgcccggtagcccagctctcccaggccaaggcgactgctaggaagttggggagac

SEQ ID NO: 53232 - DNA, 360 bp, Homo sapiens
cgcaaatcagggggcccgtgaaaggcaactgagcagggatccatgggaaagacaccctcagaggcacaagattctctcgttacctttcagtttgctgatacttcagttaaagtctcctgggaaacgtctgcattaggttcttccctctgtagttcttcttaccttgcctgtaaaacaaaacctatctagtgtctgcagaggtttccacttcttgtccccacctgaggaatggaaagcaacggcacagcccttggtcatgttttggagtgaaaggagcttggaaggtcatgtgagctttggcaagggtttctcctggcctcatgtcagatacagctcctaactcccaagcagctaccatag

SEQ ID NO: 53233 - DNA, 2958 bp, Homo sapiens
caagtttcttctttaaatgaatatgcttagaattcacatatgttctggatgtactggaattaaaaggatttaagagatcatggtgtgcatgttctaggataaataggatttaccaatccttggatgaagtgcttgggaagtctttaagtgccataatcaactgccatttcaaagaatatagatggttttgaaaagttcatgctgtcccttcattgaattttagaatgattgaagatagtgggaaaagaggaaataccatggcagaaagaagacagctgtttgcagagatgagggctcaagatctggatcgcatccgactctccacctacagaacagcatgcaagcttaggtttgttcagaagaaatgcaatttgcacctggtggacatatggaatgtcatagaagcattgcgggaaaatgctctgaacaacctggacccaaacactgaactcaacgtgtcccgcttagaggctgtgctctccactattttttaccagctcaacaaacggatgccaaccactcaccaaatccatgtggagcagtccatcagcctcctccttaacttcctgcttgcagcgtttgatccggaaggccatggtaaaatttcagtatttgctgtcaaaatggctttagccacattgtgtggagggaagatcatggacaaattaagatatattttctcaatgatttctgactccagtggggtgatggtttatggacgatatgaccaattccttcgggaagttctcaaactacccacggcagtttttgaaggtccttcatttggttacacagaacagtcagccagatcctgtttctcccaacagaaaaaagtcacgttaaatggtttcttggacacgcttatgtcagatcctcccccgcagtgtctggtctggttgcctcttctgcatcgactagcaaatgtggaaaatgtcttccatccggttgagtgttcctactgccacagtgagagtatgatgggatttcgctaccgatgccaacagtgtcacaattaccagctctgtcaggactgcttctggaggggacatgccggtggttctcatagcaaccagcaccaaatgaaagagtacacgtcatggaaatcacctgctaagaagctgactaatgcattaagcaagtccctgagctgtgcttccagccgtgaacctttgcaccccatgttcccagatcagcctgagaagccactcaacttggctcacatcgtgcctcccagacctgtaaccagcatgaacgacaccctgttctcccactctgttccctcctcaggaagtccttttattaccaggagcatgcttgagagttcaaaccggcttgatgaagaacacaggctaattgccaggtatgcggcaaggctggcagcagagtcctcttcgtctcagccacctcagcagagaagtgctcctgacatctctttcaccatcgatgcgaataagcagcaaaggcagctgattgctgagctagaaaacaagaacagagaaatcttacaggagatccagagacttcggctagagcatgaacaagcttctcagcccacgccagagaaggcacagcaaaaccccaccctgctgggcagaactccggctcctcagacagcgcaaagatgagctggaacagagaatgtctgctctccaggagagccggagagagctaatggtccagttggagggtctcatgaagctactaaaggaagaagaactgaagcagggagtaagttatgtcccctactgcaggtcttaactaacagtggaggggcctgccgacctgcggttttctcattgcttttgctctaatgtatgttcatgcttcagtttggaaagagaaaaaagtcatactaatttgcttctttttcaatgtagtgcttgaattgagatatataaatttagcattttttataactatcactactatccacatcaaaagaagaactatgacatcttttagaaaagggaaccgaattgtcatttattggaaacattttagatccccagaggtataagtttcaaaccagtcttagcttttcaagttgttgatcagacccttctcttaacagagagataccacagtcactagagataccctgaggttcatgtcatcccaaaacccacagcactcagaagctaacctctacacccactcacactgtgagtattcagttcggtttcattttactgaaaacctgtgaaacctctttttataaaaatcaggcaattaaatcccttttcatcacacaattattgagccttgttccccatggctcaccaaaatgtgctcaattttgtgagagaaagactgtactccataactgactattcacgtcccatctttttggctcttccccaaagcagaatccttactgttggttgacagtaatctctttttaaaaagtaactctcagctttttccttagcaccagagcctttcggctccgggagacgagagggtcattacatacttttttttttttctggaaataggggcattgtgactttatagcctaaactggagctgtctgaacctgtggtcaggctcaagagccagcagggggagcagcaaactccaaacaaaaaacaaattaaattaaattaaattaaattaaatagaagcaaaataaaagcagctttaatttcaagtgcatgtaccacgctatgtatgacaatatatccccactcactagcattatttaaaagtttcacattatttcccatggatcaattagaaccacaacctgtccaatttcaacgtatctttcatttcttctgtatgctcttttctattattcattatgtgtgtttgtgtgtaacaaagaatgtttggaaaatgctggacacatttttacccttcattcccatggtctgtaaaaaaggaaagtgtaaaatcaatctgtaatgtcagacaataaagataatgtattacaaaaaaaaataaaaaaaaaaaaaa

SEQ ID NO: 53234 - DNA, 585 bp, Homo sapiens
ttttttttttttacatgataagattatcttttattagagatcttatattacatattcccaaaaagatataaaatcttccaagagaaaatatcaaaacctgttgattccaaggtgaacaaaatgatcaaaatgaaagcaaacattttcttccagacaaaggaatatcaaaacacttcggcacaagtacaacaaaggcatgggaagatcatgataatgttttacatcacattttacagcattttattttaatcagtatttgtagaaaacaaggatgctgagttcttgaacactgcagtcacaaactcaaactaaaatttccaaaaaaaggaaagaaaacactgaactacttggtcaactgaacatctgtaataataaatgtaacgaaacctaaccaaataaatatgccactgagatcacaactgaagtgtatggtttttagtgtgtgccagagacattaaattatttaatcagtttttgactacaacccaaagcaaagcatcctctctgtttccctgatgatttattctaaaagtaaccttaaaaaggcaggaacttgctggttaaagagaatttctgctttacctg

SEQ ID NO: 53235 - DNA, 1082 bp, Homo sapiens
  misc_feature (1)...(1082): n = a,t,c or g
acttgatgtgatcccatttgttcatttttgctttcattgcctatgcttgtggggtattacctaagaaatctttgcctactccaatgtcctggagacgttcctcaatgttttatttcagtagtttcatgcttgaggtcttgggtttaaacctttaatcattttgatttgatttttgtatatgatgagagataggggtctagtttcattcttctgcatatgaatatccagttttcccagcaccatttattgaagagactgtcctttccccaatgtacattcttggcacttttgtcaaaaatgagttcactgtaaatgtatagatttatttctgggttctctattctgttccattggtctatgtgtctgtttttatgccagtaccatgctgttttggttactgtaaccttatagtatagtttgaagtcaggtagcgtgatgcctccagctttgttctttttgcttaggatgactttggctatgcaggctcttttttggttccatatgaattttaggattgttttttctatttctgtgaagaatgtcattggtattttgatagggattgcattgaatctgtagattgctttgggcagtatggtcattttcacaatattgattcttccaatctatgaacatggaatatcttttcatttgtttgtgtcatctgtgatttctttcagcagtgttttatagttttcattgtagagatctttcacttccttggttaggtatattcctaggtatttaattttatttgtagctattgtaaaaggggttgagttcttgatttgattctcagcttggtcattgttggtgtatagcagtgctactgatttttgtatgttgattttgtatcctgcaactttactgaatttatcagttctaatagttttttggtggagtctttaggtttttccaaatataagatcacctgcaaacaaggataatttgacttcttcctttccgattttgatgttctctcgtgccgaattcttggcctcgagggccaaattccctatagtgagtcgtattaaattcgtaatcatgtcatancggntntccaaatnncaannnnnnncacc

SEQ ID NO: 53236 - DNA, 439 bp, Homo sapiens
  misc_feature (1)...(439): n = a,t,c or g
catttaagaaaattgatgttaaaataacccaaataagcctgtgtcttaagatagacaaaagaaacaatatattgcttttgtatttaaagtagtttatttttactagagtttactaatttgtcgtattgtacatcctttgtatatgtggaaggtattcattattctaatgtaaccataaagcagaaaatctgtaaaagagtaatatggaaagctctttcctcattatgtttgtaaataggggaccctaaagtaagaataacaatgaaaataagactcctaatctgaacgtaaattaagaaatgatactggcttccttcctaaccttaatttcttaaatttgaaggcttatacttttctcccttaccccaataccaagancaactgggcatagagccaactgnggtaaatgctatttaaattaagnggtatttaatgataa

SEQ ID NO: 53237 - DNA, 1709 bp, Homo sapiens
ctctttgacttattctgccctattttccttcaaaaggctttaccaatttacactgccaaaaaaaagggcatggcggtgcacacttccccacaacctcagcatcgggagcatcagatattagaggattgctcagccaacttcccaggtcaaaactattacagttactttcaaattgttggtggcattgaacaacgttcaagctcctggcctctggcatttctctgcctttctagtccctgctcaccttccatgaggttacctttatcttatgcttttcttattgcaactctttacgtcacacaattctttagctgcaattctttagttgcatttaccatttaatagtttttagctgtgctaatgtatgaaggggaattttttgtcaagtattttatttgacagcttcattatgaacttggttcttagaaaaacctttcccatcctaacaacaaataaacttgtagcaatttttttgtttcctccttttcttaaatatttaactcttgagcccatctgaggtttattttagcagatggtgtgaagaagggcctcttttctccaaatcagtcgttccagcaccatctctgaacaactacatgcccttgctgcactgactgaaagctgcccctcctatgctaaacgcacatgcactcttctctgtcttcagacttttactacatgtcagcgtcagagtaggaagatgggccaggagagatgaaggcctgagggctgaggggctctgagaacaggcagacagcaggcaaggaggacatgaagagggacagacgcacaggtgcaggggagaggcagacagcaggccaggaggacgtgaagagggccagacgcacaggtgcaggggagaatgcggcagctcaggagaggcgcagccagcaggcaggtccccatccactcagacaccagcacgtccaccttctcgggcagcaccacatcctccaccttctgctggtacacggtgatgatgtcagcaaagccgttctgcaggaccagctgccccgtgtgctgtgccatctcactggcctccaccgcgtacaccgctctaggccgcgcatagtgtgcacagaagagactgatgatcccagtcccacagcccacgtccaggatgactttatccgtcagggattctttattctgcaggatgacactgtggtatttagttgttcgtggctggtctgccaacatctccaagtggagtttcagagttccatagctgccgaagtactcttcatcctgccacgtgtcctcggggtcgtactcatccacgtgcttccccacatggtttgccggaatgtacccacagcagcccgcacgctcaccccaccaccaatctgcagtggtttgtctcaggataagaattttttctcctctcaaaaaactgagctgggtctcatcggtggcagcgtagtccgcgatggccacaaactcctctggctgtactccctcctgcaggagacccgcctcactgcactcagcaggctcttctccctgcgattcacttctgggacagtcacctgatgttgccatagttctcttaggctctgcctcataactgctgatttatttcattttcttttccatttctcaatcgcgtttctccgctgagttccgcgtccacaccgccagcgcggaggggtggacggtcctttccaggagactgagccaccgccctcaacccgcgcaagcgcagtgca

SEQ ID NO: 53238 - DNA, 1094 bp, Homo sapiens
ttttttttttttttgaaatagcaaataaaagtgaatgttttaataaagattccactatatttacacatttatttttctgataaaaaattacaaatttaaaaattggaaactatggacaagtataaagaaaagcttaaattccccatatgcctgtcttagcattgtgatatacttatttttatcccccagacatatttatataaatttatttatgcaagcaaacatccattctgtatacacggtttattctgccaagctttactgtctcttaaaccctttctaaatatcattacatatccctaaaaacctatggtttcttttttaacagacacacagcagtgctccaccagatggatatacagcaattcaatcacggttcctctggacggccactggcttccagtgccgggaggaacactcaggtgggaggctctggcagtgactggggtgggcagcctgatgccaacctctaaggccctggcagccacacctccctgccactgccaggcaagcctgggctactattttaatttactctttgcttgtctggtagggaaaacagcatgtattttaattcgcattttaactactaacaacattataatttttcatgtatttattggtaattttatttattttttgcggtttgcctgttcacatgattgggctgcaattccatctggctagtcatctctttctaattgattccaagacctgacagcacgtgatttctctaattacttgtttgcttttacaatcgtgtttttgctgatttctgccacatagactgccagattctatctagcccagggtccattccatccattgttgctgctcatttctccacctaagatggtgcacacaggcccccatggatgtctcgcctgacgctgattccatgcagaattaagttttcacgtatggcgtgagagaacaagggctaatcaactgctccagaataatttgctgacttggccctcactccctcctaatcgtaatgccacctttttcacatacgaaaatttttgttccttgcattctaccctgctctgcccatctgtcttgttatagcaccatactgctttaattactcc

SEQ ID NO: 53239 - DNA, 665 bp, Homo sapiens; identical to SEQ ID NO: 12797

SEQ ID NO: 53240 - DNA, 2111 bp, Homo sapiens
ggcacgagctgcactgcgcttgcgcgggttgagggcggtggctcagtctcctggaaaggaccgtccacccctccgcgctggcggtgtggacgcggaactcagcggagaaacgcgattgagaaatggaaaagaaaatgaaataaatcagcagttatgaggcagagcctaagagaactatggcaacatcaggtgactgtcccagaagtgaatcgcagggagaagagcctgctgagtgcagtgaggcgggtctcctgcaggaggggagtacagccagaggagtttgtggccatcgcggactacgctgccaccgatgagacccagctcagttttttgagaggagaaaaaattcttatcctgagacaaaccactgcagattggtggtggggtgagcgtgcggggctgctgtgggtacattccggcaaaccatgtggggaagcacgtggatgagtacgaccccgaggacacgtggcaggatgaagagtacttcggcagctatggaactctgaaactccacttggagatgttggcagaccagccacgaacaactaaataccacagtgtcatcctgcagaataaagaatccctgacggataaagtcatcctggacgtgggctgtgggactgggatcatcagtctcttctgtgcacactatgcgcggcctagagcggtgtacgcggtggaggccagtgagatggcacagcacacggggcagctggtcctgcagaacggctttgctgacatcatcaccgtgtaccagcagaaggtggaggatgtggtgctgcccgagaaggtggacgtgctggtgtctgagtggatggggacctgcctgctgtttgagttcatgatcgagtccatcctgtatgcccgggatgcctgggctgaaggaggacggggtcatttggcccaccatggctgcgttgcaccttgtgccctgcagtgcctgataaggattatcgtagcaaggtgctcttctgggacaacgcgtacgagttcaacctcagcgctctgaaatctttagcagttaaggagtttttttcaaagcccaagtataaccacattttgaaaccagaagactgtctctctgaaccgtgcactatattgcagttggacatgagaaccgtgcaaatttctgatctagagaccctgaggggcgaagctgcgcttcgacatcaggaaggcggggaccctgcacggcttcacggcctggtttagcgtccacttccagagcctgcaggaggggcagccgccgcaggtgctcagcacggggcccttccaccccaccacacactggaagcagacgctgtttcatgatggacgacccagtccctgtccatacaggagacgtggtcacgggttcagttgtgttgcagagaaacccagtgtggagaaggcacatgtctgtggctctgagctgggctgtcacttccagacaagaccccacatctcaaaaagttggagaaaaagtcttccccatctggagatgacagttgatgctttatttggaaagcagtgtgcatatcttgaggggtgatgaacacaagcaaaccaagttgcacctgggcttctgcacactcctgcgaaagtcggtgaacattcactccacattgacccctccctagcctggcaggtgacgtcagggtccttcacagacaaacacgcttgggctcggcaggagctgccgtggccacccccgctgcccagtgtctgccctctagaagtaggctgtgtttccaggtgttcacccgtggtgcccacagtgccgacccgtggctgggtcggagctccatgttcctaagctaggtctaggtctacactcctaggacgcacgcatatcagcccgtgtaccctgtgacagtgactgtccccacctcctgtgttagtggtgcccttactgccgtcgctcatccactcgtgtgggacgtaggattgcacagggctgtgccagtggcgtgtagggaacactgccctggctcagcgtgcgagctaaggtggcgatgtatgcgatgggactctgcatgggatagtacagttgtgtagacgtcttccaaataaattatgtgttggtgcatcgcacatgctcaataaatatttttaaatgagtgaaaaaaaaa

SEQ ID NO: 53241 - DNA, 166 bp, Homo sapiens
gaatgagtcttgaagtacaaataaaaattcatttgagggtactgtgttataatctttgatctttaatttctgttttccttttttcttggtttcccctcttgttatcttcctgtcttatccctaacgttaataaatattttaaattaacatttaaaaaaaaaaaaaa

SEQ ID NO: 53242 - DNA, 388 bp, Homo sapiens
gaggctgcttagcagttttgaatagtttaatctataaattttcctcagcctgtgttgcacatcaagcctccgttctccctccactggaatgcatgtgttcattgccttgtccctttctctcccctgctccttgcacattatcatcctaatgaaaatttcactgacaggggccgaccattacaagggaactttgttctgacgatggttccttgatgtgaaaacaatattaatttaaacgtcttagcccccccccccataatattattcagaaaaacaaaataccaaggcgattagttttgtctaataacccatttaaatgccaagtaaaaataaaactcctagtgttgggtcagaagcatatttgattgaaattagctttttgaaaaca

SEQ ID NO: 53243 - DNA, 429 bp, Homo sapiens
tgtatggctgttgtgaataatatgctgttatgaacacgggcacactaaacaccattcaacttaaaaaaataatcaaagccttaagaactgaaccaaaatggcttaggtgaaaataaaataccaaactctgctctaagaaaaggaaagaacattcactgaattataccttcagcaataagcacttaatggaacttgtttcatttaaaatgcaccacaatcctgtaaattgataatcatcataccccaattttatagatgagcatggtattaggcgggacctttttcaaaaggtcatacagctagtgaccgaaatatttccaaatttttcataacatttctttttttgagacggagcttggctctgtgggcccaggctggaagtgcagtggtgcaatctcggctcactggaaggccttggcctcccaggtg

SEQ ID NO: 53244 - DNA, 3737 bp, Homo sapiens
  misc_feature (1)...(3737): n = a,t,c or g
gtactagtcatgttttatgacacagatgatgcgagtttcaagtggtttgataattcaaatatgacatttgataagtggacagaccaagatgatgatgaggatttagttgacacctgtgcttttctgcacatcaagacaggtgaatggaaaaaaggaaattgtgaagtttcttctgtggaaggaacactatgcaaaacagctatcccatacaaaaggaaatatttatcagataaccacattttaatatcagcattggtgattgctagcacggtaattttgacagttttgggagcaatcatttggttcctgtacaaaaaacattctgattctcgtttcaccacagttttttcaaccgcaccccaatcaccttataatgaagactgtgttttggtagttggagaagaaaatgaatatcctgttcaatttgactaagtttttggtaatcttgcactaagacatcaacaaaatgccctggcagagataacttgggaaagattttaatataaaacttgacattggatattagagctttaatggtattccttattccagtaacatttttatgtactcatctgctgtgaaaagtctttaggttcattaaaaaaacaggttttagaaatgatcttagatctaatatagtgattttaagcatcccgtcaaaggcagaatctgtcacttgaatgaaggaaagcttaaagcccaagcagataaaaataaaagcccagcctatttgtcttgcctgctgtatcttccctatttagttgacccactttagtttatatgtttattagtaaacatgaaatggggaataagtgattttaagtacatcccatacatttaaatatctttgataattgttatttttttggcagataattcctctagaatgtgtatctttttatgatttagatgaagaaaattttacaacttttaacaccccacaccaattttagtttcattacttttacacacaccattttatcacaaatgactcaagttttaatgaatgtttataaattatttgaaacaaaatatgatcgctgtgtccaggatggcatagagaaagctggcaattaggttaacacttacatattatagtgcccctttaaggatttctctcttgccaccataccttttgtactttcccctatacaagatgtatctcattctcctcaagcatttataaatttttccttcaatgacatgaaaactgtgcaagcaaaaaccgaagaaaaacacttaagtacaactgtagtgacagtgatcaaagttttcagtgcatttattgtacattttaagaaaaaggtgaaaatcatttggggagtaaaaaaatgaaaaagctgaaacgagtaattttcctcaccatcaataaaccaaaaacaggaaagataaagaatgtataaatttcacgtaaattagtcacgtatcacttatcaatggggatacgttctaagaaatgcatagttagggaatcttgtgtgaaaatcagcttgtatttacacaaacccagatggtagagcctattttgtccnnnnnnnnnnnnnnnnnnnnnnnnnnnnnnnnnnnnnnnnnnnnnnnnnnnnnnnnnnnnnnnnnnnnnnnnnnnnnnnnnnnnnnnnnnnnnnnnnctactaaggaaacactgttctatatgtggtccattactgactgaagtatactgtctagaagtctgaggctcaaagaaaagtaatccctcttctgaatccacaccccatcaattatcttactttcttctggggagatagatagatatactatctcactagcttgactaatggcaacaaagttccagcttgtgtagtctctttttattgaccacatgaatcgaaaacactcatcacaattaatggcactatcattaatgagacatgagtaactaaaaagtgatagaaaactattaacagtgcggctacatggtactgaaaatgcaggcattacaccagctgttacacaagcacaagcatggctctgtaagagcttcnacatttctgagattttgtatagtgattgagatgtctattttattattgatagactattactaatgtcaatattgaacactaccctggaattcctgcctggttttcctacccaaattgtaccactccttgaagaactacaggcacagtaaaaaaaatatggcgtattatgtgaactaaaagagttctaaaggagttcttaaaggagtggtagaatttgggtaggaaagtgattaagtccaacttaaaaccaacagtctcaaacgtctacaactacaatgtccaatgagccactagccacatgaggctatttaagtaaatttagtttaaaatccagttttcgaattacattaggccacattgtcaagtgttcaaatcacaggtggttagtggctactgtactggggcaacatacattataggaacattttcattatagggaagttttattggggcagtgctgctcttaaatcctaccttccactcaactcccatacaactttcttttgtacattttgatactttctacctaatggcagctcttccaaaatagctgctttaaactctgatttaattttcaatatttggtttcatttttcaacagggccaagaggcctctggtaatgaagtgctatatatatatatatatnnnnnnnnnnnnnnnnnnnnnnnnnnnnnnnnnnnnnnnnnnnnnnnnnnnnnnnnnnnnnnnnnnnnnnnnnnnnnnnnnnnnnnnnnnnnnnnnnnnnnnnnnnnnnnnnnnnnnnnnnnnnnnnnnnnnnnnnnnnnnnnnnnnnnnnnnnnnnnnnnnnnnnnnnnnnnnnnnnnnnnnnnnnnnnnnnnnnnnnnnnnnnnnnnnnnnnnnnnnnnnnnnnnnnnnnnnnnnnnnnnnnnnnnnnnnnnnnnnnnnnnnnnnnnnnnnnnnnnnnnnntacattttttctttatataccagaacatctataacaggcaccttatctactcattagtgaagagataattggattacacaggcaggcttgtttactacatccagaatgtagaaactgctttcttcaacatcttggttctagctagtaataacaatataattctttggcagatattcagaataacattttaaactacattttcttagaaaattgcattcttgtagtgagcagtgtatggtctcttttgttcagaatttaaaactgataaccaatgaaagccttttctcttattcctctaccgtcatttacatgataatctgaagctaatatgacaatatttaaatactaagtggtactagggaactacaagaatactgtaaagcttaagccattgttatcactgtcatttagcatttaataacaaaactatacagaattatgtgcataccaatgaatgttttgtaccatctagttaaattttttaaataaagttttatgggttaagcagaagacaactgtcatactgaattttattaaaagtatatatacttcaaattcaaagcatcccttaggacccacagaatatattaaaactaccacccttaaattttatatttttgctttaagacagacaatgcaaaggtaactggcaagaggtgagcaaatgttttagaacatttatattattgcttaaaatgagatttgaaattgtaataaaattctcggttatgaagtctgatgtcttctctgagcaccagtttaaaaggaaacatttcaacagtaaataatcagtgtgtactttatt

SEQ ID NO: 53245 - DNA, 892 bp, Homo sapiens
  misc_feature (1)...(892): n = a,t,c or g
ttttttttttaactgttccatctttattagaaaagcaaccaaaaaaagggtgaggggtgagcctggccctaaaggacccctccactgtgacacaggcagagccggctcatcccggcgtcgaggggtggatatggccagctgggtgtgggcagatttacaaagtcaacacttcatagaaaaggatgccgcctggcgtgcagatggcgaccaatccaccttcacatggctaaggcgggcccctcctcctctgggctcccatgtggtgtggacagcctgacctgggtacagggaggatgccatgaggaggtgggctgggcaggcctgggggctgtgtggggagtggcatccatgtgggcctctggtcctgcccagggtcctgcccagggggcattccaggcctggctggtcccctggggcgtggcggtggggctgcagtggcccctcaaatgtccatgtagtcgtcgtcctcgtctgtctcgctctccagcgaggactcctggctggatgtctccaggacctccagggctggctggcataggctctccttcctcacgttggcagcagactgggcagaaaggatggctgacttcagcttctgcttggtctcctccgagatgctgcctttgggggaagagcagggttggggtgggtgnccgtgacggtgatctcaggggggaacttggtggcggcggaggggatgaccagctttggcatgttgggcagggggcgggaactntaaccggctgggctcaggcttgcctgggtgaccctctggtggctgggcactcccactgctgggggccttggagctggcagctgttgggggagagctcaggggctgagtctnactcgcagcctcctgagcctccccancccntncncgctcaggcct

SEQ ID NO: 53246 - DNA, 513 bp, Homo sapiens
  misc_feature (1)...(513): n = a,t,c or g
cgcaagatgtcatcctcctgctctgtatctttcattttaacgggaacgtgaagcaggccactccttacatcgctgtattggtgtcttcttggttcatccttgccctgcagaagtggatcatagacctggccatgaatctatgtactttcatcagcgcggccagtaagtttgcacagctccagtgtctgtggaagacgagagactcaggaactgtgagtgcgctgacttggagcctctcttcctatacctgtgcaattcttctacgttttgtgatcatgctggctttaaatatatgggtaacagtgacagtacttcgctaccggaagaccgctataaaggctgaatgatggatacattattccttcacacagtggattttgagtaactgaaccaaaggaaaaagaactctttgctaaattaaggtcgtttataaatntaagaaatcagcttataatccttaaagcccaagggtttttagacctgaagaaagagcccttaaatcttgntaaaatc

SEQ ID NO: 53247 - DNA, 483 bp, Homo sapiens
cacaactatattttattctaatttataaaacaaaaaatggttagacaagcacatgatatcaagagtcttcaacacagtggattccattttattaagaaaaaaaatagaaaacaagtagtccttaaattgtcttagctctccatagcatacgttatataaaattaaagttttgcttccaaaaatatgtttccatgtggtcgtggtgttgtccagtgctattagggccaaagcaccaaagacatgagaagtttaaccatcgacttgtcatttttcataaaaactaaacatttccttataggtctggagtaaaatcttctaggcattttagtgctaaaagtcactttaaattaaatgtgaaataaaagctacaaaaagtatgagttctttcaatacaaaaagttgtgtagctgaagttgtgggctcctttgacatacataagcagtttcaataaaatatttgctcaggtaagaaaatagaaatttg

SEQ ID NO: 53248 - DNA, 148 bp, Homo sapiens
caaatgggttgctgtttttacagttgaatgcaaaggcttttataagaaactgatgagggctgggtatctcatttgcataaaggcacaaacctctggtagctccccaccccattctcctaatgcacatgcagccccttagcttgagctc

SEQ ID NO: 53249 - DNA, 1758 bp, Homo sapiens
gaattcggggggagaacagagtggacggagagtaggagagaccgaaaaggctgggggtgggagtagcggatttgaagcacttgttggcctacagaggtgtggcaagcagagcacctcagaactcaggcgtactgcccgccgcccgagccctgcgagggccgatagcgagggtgtggcccttatctgcacccagcagagcgccggcggggtacggtcttaggacctcgatctccttctccctcattttctctcatccctacctattgtgggtttccgcatgggccggaccgtggtcgtgctgggcggaggcatcagcggcttggccgccagttaccacctgagccgggccccctgcccccctaaggtggtcctagtggagagcagtgagcgtctgggaggctggattcgctccgttcgaggccctaatggtgctatctttgagcttggacctcggggaattaggccagcgggagccctaggggcccggaccttgctcctggtttctgagcttggcttggattcagaagtgctgcctgtccggggagaccacccagctgcccagaacaggttcctctacgtgggcggtgccctgcatgccctacccactggcctcagggggctactccgcccttcaccccccttctccaaacctctgttttgggctgggctgagggagctgaccaagccccggggcaaagagcctgatgagactgtgcacagttttgcccagcgccgccttggacctgaggtggcgtctctagccatggacagtctctgccgtggagtgtttgcaggcaacagccgtgagctcagcatcaggtcctgctttcccagtctcttccaagctgagcaaacccatcgttccatattactgggcctgttgctgggggcagggcggaccccacagccagactcagcactcattcgccaggccttggctgagcgctggagccagtggtcacttcgtggaggtctagagatgttgcctcaggcccttgaaacccacctgactagtaggggggtcagtgttctcagaggccagccggtctgtgggctcagcctccaggcagaagggcgctggaaggtatctctaagggacagcagtctggaggctgaccacgttattagtgccattccagcttcagtgctcagtgagctgctccctgctgaggctgcccctctggctcgtgccctgagtgccatcactgcagtgtctgtagctgtggtgaatctgcagtaccaaggagcccatctgcctgtccagggatttggacatttggtgccatcttcagaagatccaggagtcctgggaatcgtgtatgactcagttgctttccctgagcaggacgggagcccccctggcctcagagtgactgtgatgctgggaggttcctggttacagacactggaggctagtggctgtgtcttatctcaggagctgtttcaacagcgggcccaggaagcagctgctacacaattaggactgaaggagatgccgagccactgcttggtccatctacacaagaactgcattccccagtatacactaggtcactggcaaaaactagagtcagctaggcaattcctgactgctcacaggttgcccctgactctggctggagcctcctatgagggagttgctgttaatgactgtatagagagtgggcgccaggcagcagtcagtgtcctgggcacagaacctaacagctgatccccaactctcattcatgaaaataaaaattgctggagcttgaaaaa

SEQ ID NO: 53250 - DNA, 884 bp, Homo sapiens
gtaagtacatgaatagatctggaactttggaagagataaaaatttgcaagtgtatgtatggaattgccaagggagagtatatagtataagaaatgccttctttaagtatattagtaaaattaattaaacacaacacaatcagacgttaaacacagtgttttgttttgttttaattaggagtctatggtgatgtacatcgagtgaagattatgtttaataagaaagaaaatgccttggttcagatggcggatgcaaatcaagctcagctagcaatgaaccatctaagtggtcagagactttatgggaaagtgcttcgtgctacactgtccaaacatcaagcagtacagcttcctcgagagggacaagaagaccaaggtctgactaaggatttcagcaatagtcctttgcatcgctttaaaaagccgggctctaaaaacttccagaatatctttccaccatcagccactctgcatctttccaacattcccccttgtgttacagtggatgatctgaagaaccttttcatagaagctggatgttcagtgaaggcttttaaattctttcagaaagatcgcaaaatggcgctcattcaattgggatctgtggaagaagcaattcaggccctcattgagcttcataaccatgaccttggagaaaatcaccacctcagagtttccttctcaaaatctacaatctgacttttctgtgaatttttctcctaaaactggaccataatttcagtaaaaccttcagacatagactgaagcagctcaagaccaattttgcctctttcacaaaaataactctttctgagtttgatattcaagtatattttaaaaatcaagggattttttttttttgtattccccctgcaaaaaaaaaaa

SEQ ID NO: 53251 - DNA, 249 bp, Homo sapiens
tgccaatatgccagatgctcaaagttggggaaagtattttgatcttccagaaactgtagtagcacctccacatttgatgttctgtatatgttaattcctatagctaccactgacagctgaaaagcaaaatatttatattttattacagtgttttagaaatatgaaacttaccttaatatgactagtatatttttcttcaccaatgtattaattataagggctcaccattatacttacccgatgtcattc

SEQ ID NO: 53252 - DNA, 698 bp, Homo sapiens
  misc_feature (1)...(698): n = a,t,c or g
cctcaaactccctgggctcaaatgatgcttccacatctgcctccccaaagtgttgggatttacaggcgtgagccaccacacgtatccggatccagtgtggttttaatgtagcataagagttgaacactgattaaaacctttttcatactcatcaataatcaacagcattcattagatttttttctggtacagtgtctctggtactgaatagagttggtgtacacactaaaggttttctcacattcatcacattttgactgtcttctccacaatggacttcctcatgaatagtaagttcagagagttggctacaacttctgctgcactgaacacactggtagggtttctcctcagcatgggttttctggtgttcaataagatcagtacatgtgctgaaggctttcccacatgcatcacacttatacggcttttcaccagtgtgtattttttgatggttaatgagatcagaacgccgactaaagcttttgccacactcatcacatggatttggtttcttcccagtgtggattctctggtgtagggtaagagctgagcactgactgaaagccttcctgcactcactgcatttatatggtttttccccagtgtggattctctggtgtttaatgaggtctgagatctgactgaaacttttgctgcactgtgtgcacagataatagttttcacgagtgggngaa

SEQ ID NO: 53253 - DNA, 489 bp, Homo sapiens
gcattcacatggaacaaattgctgccgtgggaggatgacaaagaagcatgagtcaccctgctggataaacttagacttcaggctttatcatttttcaatctgttaatcataatctggtcactgggatgttcaaccttaaactaagttttgaaagtaaggttatttaaaagatttatcagtagtatcctaaatgcaaacattttcatttaaatgtcaagcccatgtttgtttttatcattaacagaaaatatattcatgtcattcttaattgcaggttttggcttgttcattataatgttcataaacacctttgattcaactgttagaaatgtgggctaaacacaaatttctataatatttttgtagttaaaaattagaaggactactaacctccagttatatcatggattgtctggcaacgttttttaaaagatttagaaactggtactttccccccaggtaacgattttctgttcaggcaacttcagt

SEQ ID NO: 53254 - DNA, 1693 bp, Homo sapiens
tggttcacaattaaaattgtcttgaaagtatttattgtttaataattctttctcccctcagccccatccggccactctctctttctgcttttctgatcatcctaaaggctgaatacatcctcctcctgtgtggaggacacgaagcaatactaaaatcaatacactcgatcaggtcttcatcagataccacgtcactgtgggtagagtgctagttttcaacaaatgtggtgttcttagggctccacaaggtagtcctttctcaaggtcgctggggccactcatggagttgaaatgccgctgccccatctaagtacaacatggactctccatatgtttttgggaaaaccaatggcacttctttttccgacatgaacgtgaaatgaaagacattggtggttgtatgctgcttctcctgcagggaggccacttcactgtgtactctgacttgaatataattattctgagtaaagcatacctgtgaagaaagaaagagcaatgagccaacctcaacaggtttctgaaacatgatgtcatctactgctaccacaaacggtcgagaaccaccaaagctacaagcagtagcccacgcaagttcatatgccttcctcataaggaaaccaccaaagatccgattgaaaatgttccgctcctgagggtggcaaatttccaaactcttcagttttgaattctccatccacactgcattagagggtaaaactcgactccgaaaacttatagtctttggatccagtgtgctgagaaacatctcatgtatggtggtcctctcctcagcgctgggggccattttcagtaacgacgtggagctgaaggcaattcttctccccttgttcaattccccttgtctaaagagctcctcttcctctgggctttcagggatgagtggatttacaaatgccggccctttattttcagaatcacgagccaccattacaaatgttgcatccaaaacaggacaaaattcatcaccatgtaactggaacatttgcatcttcacttccatggatgtcttcccgacccagctaacatggccactgaacttaatgtcctgttctgggctcaagctcttcttacacatatcaatcttatccaccagggctgtaactatcgataaaggagacatcttggcggagtggattttgttgtgcatgtaacaaataagaactcccaagctgtcaagatcctcaagaatcctgccaaatcttacggtgttttgaacagtcaaatatttctctcgtaattcaggctcactgcccaaaggcaagagaacttcaatataactgtccttcattctcctaggaggcagtccatcctgtgatttagccaagaaactatgaagtaatttcctttcttccattgccttcacatggtctctccagtttgtggatgctcctactatctcccgcaacttatctcgaacatgattcacatgtatagatgaacatgcttcatgaatgtggaagattccctgtttcttggggttctggggtccttgagtcagtcctcttccaggagtaagctgccctttgcccaaggcacaaagccgcagtgctgcccgcctcattgcgctaggctgccgtgcgcgcgatggagaaccgggccccgcgcgctagtcggcggagggaaactgaggcgataaaagacgcacgagtaccagaccgcgcccttgctgagg

SEQ ID NO: 53255 - DNA, 1402 bp, Homo sapiens
attacagacagcaggtcgctttctacggacagacgttagggcaggcgcaggcccacagccaggagcagtaggacagcgtcctcgtggccaactctcccctcaaaatcattgtcaaagaaaacctatttgtaacagaggtttttacatttgcaaaccttttgatgaagaactgttgttttgttctgtgaaacactatatttagattaacggaatttttctaaaaatcaggaaaattagttactaaaaattgctgatcatttttgtttcattatttttgttatttcaaatgtataagctctgggattctttttggagcaatacctacaaagtcaggcaccagaatgtgcctcagagctgtgacatttcaacatgatggttttggtttggtttggttttgtgtcctttttatttgcagttttttctgttgcaacagaaagtggcttggaagtcttaggtggtatgtaacaaattctttttaaaaattttaaagcagtatttaagtattcttaaatgtgtaaattcatttaatgttttacttctaatttcttgtatcttggctgtctggttttattgcatttttaaaaaaactgaactattatgtattgtaatgaatgatgtgaattctgaactgagacagataattgtattgctgtccaacaggggttgggaggggcattttgtagggtttgtataatttctagagttcgaaaggggtaatataaaaatgtgctcgtgtgtttagcctacgtttttctcatgcctccattaccagttgcaattgtgtatctaagacctccaagcttgtttttaaaacaaaacaaaaaacctttctctattatctcagaaatataaatactgttatttttaatattaagaaattcaatataacttttaacacacactgtgggaacattaaaccgtataaaaatgtagttataactatttttaattccaaggtgttgtttgcttttttcttttaaatattttcttaatattttgtcagattaactagatgaataaataaatctagtattaaccgcattatgaattaaataattttgatttaatgaaagggataatatgatttccagtgtttactgtagtgtatcttgtacagataacatgtatttttaaaggaaaaaaaacggaattgaagctattttttcttgcatttctaattgacctgagggacattccgtttgaaatgtactgaagttacagtttctggttttttctccttatttttcttataatgcttgaaatgtctaactattaaaaaagacaattggaaaatgttatgcatggggtttttaagaaaacaaagtgttctttttatttgactgacaattcattttacactctatataataaaatctccacaaggcatcttgtgggcaaagtc

SEQ ID NO: 53256 - DNA, 489 bp, Homo sapiens
aagagattagccatttttccagatgggactcacaatgacacatggcagtgccaaggctatttcactgcacttgaacagttcatcaaagaagtcgtaaagagccattctcctgaagaaatggcaaaaacttcatctaatgtaacaattatataatgtttccctttttgattattgcattgtattttaatttgtgcagaatgataaagaatgttccttttagaagtgtgttatgtctgtacctgtctgaagagtgacattaaactttgaaaggacttcactgctcctttacgatattccaaatagttttttacattggaaaaactaattcttgggattctttcatacattttcatcaaaactttcagtgtgattatgtattcatatcttcagtttaatatgtcagtataatagatattgttcaaaagtttcttgttgctaaagtggtgtaatctgttacacagatgaatagctagatgtggaaagagatat

SEQ ID NO: 53257 - DNA, 440 bp, Homo sapiens
ttttttttttgtttttggaactcatcacagaattttatatataatgaaccatattataaatcgtaatacaacaaatatttaagtgccaatggcagaccaggcatcttgcaaaagttacatgctgaaagtctttaactttacaaccagaggttagagaaagggatgcaatttattagacacatttcacatttttcccatgaatcattaaatatttaagcaccataaaattcaagcatttcacatggatgtggcagccagccttggtggtttaaaatgcattatgcagagtttctagcagataataacagtgacaattgcagagtactgatttttaatgtcaattgtttgttccctgcagaacttactgataatgtccctgcaggaaattgtgatattttctgtgctacagtaactttgaggattgaaatgaaacagcattc

SEQ ID NO: 53258 - DNA, 919 bp, Homo sapiens
  misc_feature (1)...(919): n = a,t,c or g
agatgaacaccgttttctcttgtttatttaaatttgggagccaaatggtatggagaaggtaatgatggttttcaaaatacagtaagtcttcatttaacattgttaatagaacaatgaaaactccaacttttacgtgaaacagtgtatagccagtcctcaaataactgccttttgttcaacatcctttccttgtaacaactgatgagaaaaagtatggttttgttatacatcatttcncttgaagtacaagttttcaagaacctattgacaaggttaagtgtgggcttacagtttaccaatcttagcctcagattgggctagggcagggatgacaaaccaggctcttgcatgggtctttaaatggactgggcaataaatgaagaccttggcctgtaaattccnaaatagcttctttgcctttggtccnttaggaatgcacagcctcattgctacaggccatcttatgtcagtagatccagacagaatggtcatcaagagagttgttctgagtggtcatcctttcaaaatttttactaagatggcagtagtacgttacatgttcttcaacagaggtgggtatgaaggaggaggatgggatctgattgcctttgtggtataaaggttgggtttacattttgtgggtaaatgtttcatcttggtctttaatgtgtttgattctaagaggatgtgctgtggtttaaaccagtggaactgagaacgaagtggggccggagaggacatatcaaggaacctttaggtaaggaaacacgggatttgagaccatgtctgcatttctgcagtgttgctaaatgactgttgggttggaagtcattgctttaaaattttctacttttaatttgaccgacttgttctgatgtctttctaggtacccatggccacatgaaatgcagctttgatg

SEQ ID NO: 53259 - DNA, 515 bp, Homo sapiens
gttcatgtacctgctgagctggctgtcgctcttcatccaggtggccttcatcacgctggctgtcgcggctggactctattacctggcagaactgatagaagaatacacagtggccaccagcaggatcataaaatacatgatctggttctccaccgctgtactgattggcctctacgtctttgagcgcttccccaccagcatgattggagtgggcctattcaccaacctcgtctactttggcctcctccagaccttccccttcatcatgctgacctcgcctaacttcatcctgtcgtgtggactagtggtggtgaatcattacctagcatttcagttttttgcagaagaatattatccctttcttagaggtcctggcctatttcactttctgcctgtggataattccgtttgcgttttttgtgtcactttcggccggggagaacgtcctgccctctaccatgcagccaggagatgatgtcgtctccaattatttcaccaaaggcaagcggggcaaa

SEQ ID NO: 53260 - DNA, 1514 bp, Homo sapiens
tgccttgagtaccttgcctccagtccagcttcctcctccaccacccatatcctgagatactgatgcagcagttcttaggaagaccccttgtgaaagaatctttctttagacccatacttactgttcctcaaatgcctgcagtttgcccgggagtcgtctctgcaactggccaacctagagcccccctgatgactggcatagcctgggctctgcagcgcctgtgggagacgctgtgcctcccagtgcaggtctgcggagtgatccctccatcatgaattgggagagaattacagacaggctgaaaactgcctttccacagcaaaccagaaaggaacttacagatttcttacggaaattgaaggatgcttatggaaaatccttgtctgaactgacatttgatgaaattgtttgcaagatttcccagtttattgaccccaaaaagtctcagagtcaaggaaaatcagtgtcaaatgttaattgtgtttcacctagtcattctccatcacagcctgatgctgcccagcccccaaaaccagcctggcaggccactcacttcacagggtcctgccacatgggaaggagccagtaatccagatgaggaagaggaagaagaagagccttgtgtgatctgtcatgagaatctgtctccagaaaatctttcagttttgccttgcgctcacaaattccatgctcagtgcattagaccatggttgatgcaacaggggacatgtccaacgtgcagactccacgttttgctaccagaagaattccctggtcaccccagccggcagttgcccaagatctgatacaaggtacccatgaagagattatgaactacttgaaggtggagactgtacggtggtgtgttggagctggcttgtaatgtcttatgagtgacaatcgttagtttgaggaattttgtgagacagttgtcaaattgttgctaggcttgaaatctgcggcaattggagtatttacaccatagaaatgctataagtgaagacctacctttcccttaagagctagttgttaaacctttaccagcataccactggaccttgtctaaaatttctttgtgttcccagtgtcttgcccagtagatacaagataaatattgccagaatcagatatcaggaagtagtaagaaaaggagttaatatgcaaactaaatcactcgctcaattgaataattgagatcttctgttcatttgttccttggaccttaatcatttgcattttggagaaaattttttctgctttaaaagtctgtaatttcagtttttgtgtcggggagagggaaaaactatttgtctgtagttgctttttgtgacaaagtgaatacccactgggctaagtttcatatctaaagcttgtcactaagaattttcatttttaggggtcaaaaacctattttgaaaatagtgttgtgtgaatgctgtaagtgttgtacatgtctctggtttcagaattaaaagaattcagagttaccttgtggtataaaaaaaaaaaaaaaa

SEQ ID NO: 53261 - DNA, 454 bp, Homo sapiens
cttggctcactgcaacctctgccctactgggttccagtgattctccagaagaactcggtttcaccatcctgaggtgatcagacttcttactcacagaacttaaagtgggatcacttgtaaaatagttttactaggaatcagtctctaaaaagtcggtcaccatttaggaagtcagagttacacagagtggctggcaaaagtctgcctcatgagaaatacgtccaagccaggagcagctgcccagaggtgaccctggacactgcggcagggacaatctgtcaactttgtgcaccatattaaaaacaaaggatatcttaagaaccaaattcctttgacaacttaaatgttatttttcaaaagcctctaagacccatgactcaaacctttttttaaacatatgaaaagcctgaggttttgaaaatctccttataataaagtcttaaaagttctgatc

SEQ ID NO: 53262 - DNA, 2669 bp, Homo sapiens
ggacgggcgaggagactcgtggtctggttctgggacttccctaacagcatggcccctaaacgccagtctccactcccgcctcaaaagaagaaaccaagaccacctcctgctctgggaccggaggagacatcggcctctgcaggcttgccgaagaagggagaaaaagaacagcaagaagcgattgaacacattgatgaagtacaaaatgaaatagacagacttaatgaacaagccagtgaggagattttgaaagtagaacagaaatataacaaactccgccaaccattttttcagaagaggtcagaattgatcgccaaaatcccaaatttttgggtaacaacatttgtcaaccatccacaagtgtctgcactgcttggggaggaagatgaagaggcactgcattatttgaccagagttgaagtgacagaatttgaagatattaaatcaggttacagaatagatttttattttgatgaaaatccttactttgaaaataaagttctctccaaagaatttcatctgaatgagagtggtgatccatcttcgaagtccaccgaaatcaaatggaaatctggaaaggatttgacgaaacgttcgagtcaaacgcagaataaagccagcaggaagaggcagcatgaggaaccagagagcttctttacctggtttactgaccattctgatgcaggtgctgatgagttaggagaggtcatcaaagatgatatttggccaaacccattacagtactacttggttcccgatatggatgatgaagaaggagaaggagaagaagatgatgatgatgatgaagaggaggaaggattagaagatattgacgaagaaggggatgaggatgaaggtgaagaagatgaagatgatgatgaaggggaggaaggagaggaggatgaaggagaagatgactaaatagaacactgatggattccaaccttcctttttttaaattttctccagtccctgggagcaagttgcagtctttttttttttttttttttttttccctcttgtgctcagtcgccctgttcttgaggtctcttttctctactccatggttctcaatttatttggggggaaataccttgagcagaatacaatgggaaaagagtctctacccctttctgttcgaagttcatttttatcccttcctgtctgaacaaaaactgtatggaatcaacaccaccgagctctgtgggaaaaaagaaaaacctgctccctttgctctgctggaagctggagggtgctaggcccctgtgtagtagtgcatagaattctagcttttttcctcctttctctgtatattgggctcagagagtacactgtgtctctatgtgaatatggacagttagcatttaccaacatgtatctgtctactttctcttgtttaaaaaaagaaaaaaaaacttaaaaaaatggggttatagaaggtcagcaaagggtgggtttgagatgtttgggtgggttaagtgggcattttgacaacatggcttctcctttggcatgtttaattgtgatatttgacagacatccttgcagtttaagatgacacttttaaaataaattctctcctaatgatgacttgagccctgccactcaatgggagaatcagcagaacctgtaggatcttatttggaattgacattctctattgtaattttgttcctgtttatttttaaattttctttttgtttcactggaaaggaaagatgatgctcagttttaaacgttaaaagtgtacaagttgctttgttacaataaaactaaatgtgtacacaaaggatttgatgctttctctcagcataggtatgcttactatgaccttccaagtttgacttgtataacatcactgtcaaactttgtcaccctaacttcgtattttttgatacgcactttgcaggatgacctcagggctatgtggattgagtaatgggatttgaatcaatgtattaatatctccatagctgggaaacgtgggttcaatttgccattggtttctgaaagtattcacatcatttgggataccagatagctcaatactctctgagtacattgtgcccttgatttttatctccaagtggcagtttttaaaattggccttttacctggatataaattaattgtgcctgccaccaccatccaacagacctggtgctctaatgccaagttatacacgggacagttgctggcatgtcttcattggctatataaaatgtggccaagaagataggctctcagtaagaagtctgatggtgagcagtaactgtccctgctttctggtataaagctctcaaatgtgaccatgtgaatcctggggtggggataatggactcagctctgtctgctcaatgccattgtgcagagaagcaccctaatgcataagctttttaatgctgtaaaatatagtcgctgaaattaaatgccactttttcagaggtgaattaatggacagtctggtgaacttcaaaagctttttgatgtataaaacttgataaatggaactattccatcaataggcaaaagtgtaacaacctatctagatggatagtatgtaatttctgcacaggtctctgtttagtaaatacatcactgtataccgatcaggaatcttgctccaataaaggaacataaagatttaaaaaaaaaaaaaaaaaagtttt

SEQ ID NO: 53263 - DNA, 720 bp, Homo sapiens
gggcggcgactgtggatctggagctggacgcgctggaggggaaggagttgatgcaggacggcgcgtccctgagcgacacgaccgaggacgaggaggagggggcgagcctgggcgacggcagcggggcggaaggcggcactgcagcagcagcagggcggtcgggcggcgatggcggggacgaagtggagggcagcggtgtgggagctggcgaaggagagactgtccagcacttcccgctcgcgcggcccaagtctctaatgcagaagctccaatgctccttccagacctcctggctcaaggactttccctggctgcgctattccaaggatactggtcttatgtcttgcggctggtgccaaaagacccctgcagatgggggaagcgtggaccttcccccagtggggcatgatgagctttcgcgagggacccgcaactacaagaaaaccctcctcctgaggcaccacgtctctaccgagcacaaactccacgaagccaacgccccaggagtcagaaataccatcagaggaggggtactgtgactttaatagtaggccaaatgagaactcttattgctatcaacttctgcgacaactaaatgaacagagaaagaaaggtattctttgtgatgtcagcattgtggtaagcggaaaaatcttcaaagctcataagaacatcctggttgcaggcagccgtttctttaagactttatattgcttttca

SEQ ID NO: 53264 - DNA, 1050 bp, Homo sapiens
attcggcacgacggtgagagactgcagaaggtatgaataccaggaaacagataactcagaagcatctgggaaatttgccatggaattaatgaagaaaagccctcagcacatcatccttctactctaatcaatatgaaatagcattcagtaactcctattaattcactctgaagagaaaccttttgaggacaatctgtatggtaaagctctcagctcgaattctcaccttcatgggcccagaagattatgtactgagagaatcctgaagaatggaacagctgtagaaagccttcagtgctatcagcagggattcatgtgacagctcacactaagggagaaaacctgtgaaggtctcagaaggcttcagtgacagtcatcccttaagacacactggaaatcacacaatggaacaacactcagaaatgcggaataccctgcagcaaaagtgttcacattactgagcaaactatagtgtggtattctgcagtgactatgggaaagccttgaatgttctatcggtttttaagggacttgagaattaattctggagagaatgccccattgaacatcatcaatattggagagctttctgtttttctacatttgttaggaaacttgtgagcattcacactacagagaaacttgaaatataaagaagaagagaaagccttcagtgatgcctctgtgttagggaaaatatggaacttctccctggatgcaaaacctatgagtatattaatattggaaaatttttcagtgattcttctctttcttgtatatgagagaacttatatggagaaacccctaggaatgtaatcagtgttaggatgcctcagcctgaactcttcactgagtggccacaattttcactgggaacaaaaagtataatcactgttttgagtgtgggatatcctttatcagtgtctcatctgtagattggactgctggctcattaatttttttagtctttttttcttgctattataaacatttgtgtatagctgttccctaaaataaacattaacatatttcataattttacaaacaaaa

SEQ ID NO: 53265 - DNA, 249 bp, Homo sapiens
  misc_feature (1)...(249): n = a,t,c or g
tattgtatttttttcaggttatattgaaatctactaccaggaatgtcggaatgggttttggtatgtataatggaaatagatagagtggttaagtctaaaaacacatacattaattgtattgaaatgttatatcaatacatcatttatgatgttgtgtgtggtcccagacctcatgggccaccagtttnttttaagcatttgtgaatggntttttaatagcattcattaggctttaattggaggggggtt

SEQ ID NO: 53266 - DNA, 2045 bp, Homo sapiens
ttttttttttttgcaggtttagaaaataaagtttgttgggatcttaaacattttggataaaactaacaaaaaaatatgaacacacattcaggttgtggtgctatgaggagtagcgtcatcttatttagttccttgagatacacgcacggctgctcggtgatcggtgccgccctgggaaaggttggtcaggaggtgacaggggtctccaggaggagctcgggaggtgacaagggtctccaggagggagcaggggctgctcggccaggctgccctggagcttgaggataaggtcaaggttggtatgtgttgctccgacttgagaatgaattaggtgtgtgactgtgtggcatcgtgaacatcagtagtgacgcagccgtggcctgggctttgcctgcagcgcacttaggttacacggagcgggatcagaagcaagcgattcggcacacaggcgtttggccacagcaattaggaaatacatattctgcggcagggacacgatcatattttggcgtgaagaagagggcaagagaagcagaaggagaatgggtcggtaggtgtgaaaagtgtttggcatgcatgggattaaacagaaaaggtgtggctgagatttcccagtggtgctcacagtgcatggacagcgcggggtggggcacggcgggcttcacacagttctgtccgtccctgagtgcttcctcaccaccttgcctccgtttaacctggtcgaccgccagggtcttcacctcgggcttggctgcggcggggtggcgtggtggatccgatgtgccaccccgacgtgggccttgtgcggcttttcgcgggccgggctgtgctgctcgccgcttcggtcggaggcgatgggggggatgacgaggggcctctctttgatgaggtggacctcggcggactccctagccagcagaaatggggtggggtcgggcatagcatccactggttcccgcaaaaggagtttcctgctctctgccccgaatctgtagacctcttcaaattccgggtgcaagggggctgagaggctctttttcatgcggcggcgaggcgtttcgggtagcttgtctttggggggcgctggcttgtagctggccagcacggggcctcctgacgggctggcatctgaggtcccgctggagctcatgagcttcttcttggcggcgtgcagctgggaggtcaggtaggcgatggtgctggcccgctgctccagctcgctagacagccagggtcaagcttgtgactcttggccttcagctcctccaggtacttcttctctcggctccttgatggtgttctccagcactgtgatcatcgcgtttttctgctccagttctttcaacaactcagcattttcgttctctttcactttcagttgggttccagctcttcacatcttttctttaattcactgcttttagaagtcccgtctcctgtctgttccgaacttttgactgtcagctcatatgttaaatctgtgcagtgctgctgcagccgcctgatctcggagtgcagccccttgagcgtgctggcattgtcccgctgaaggaacaggaggttcttctgtgcgctgtgcagctggttctccaggtttgtggctgccatgctgacatccagaggaccttcatcgtaactcgagaaatgtggtgaagtcatgggtctttctggaaaagctaccagagtaattcaagacgcttgtacagcactgaaaaataactttcatcacacgaaaacacttcctgggcgctgctccggtggaaagccacagactccactccaagggcaacctggaggctgaatcccgaagagctgaaaggggtttggaagtgggaactctagcagagatgctttcaaaggacagactcaaatccaggattctgttggggaaaggctaccaggacgggaggcgatacaacttgtcagggagggtctctaaggttccccgggtggtaacaagcatttaaaaaggcgatgtggattcagacggcctcctccccacagcatcccagacaaagccgggctaggccaccggggcgctcctg

SEQ ID NO: 53267 - DNA, 180 bp, Homo sapiens
tgatttataatgtgtgtatatagccacacataaaaagctagtaatagtagggctctcagaaaatactttccagttgtctaaccttgaatgttattaactcttctatattacaggagatacaactcgtcaacgaatcaaattcagtgatgacagagcgagactccagctctcaaaacaaaa

SEQ ID NO: 53268 - DNA, 411 bp, Homo sapiens
cagccatcttgtcatgtacctgggaaccaccacagggtcgctccacaaggctgtggtaagtggggacagcagtgctcatctggtggaagagattcagctgttccctgaccctgaacctgttcgcaacctgcagctggcccccacccagggtgcagtgtttgtaggcttctcaggaggtgtctggagggtgccccgagccaactgtagtggctatgagagctgtgtggactgtgtcttgcccgggacccccactgtgcctgggaccctgagtcccgaacctgttgcctcctgtctgcccccaacctgaactcctggaagcaggacatggagcgggggaacccagagtgggcatgtgccagtggccccatgagcaggagccttcggcctcagagccgcccgcaaatcattaaa

SEQ ID NO: 53269 - DNA, 373 bp, Homo sapiens
gtggaatacaaagaatgctataattattttaacaacctatagagtaagatcactctacctacttttctacctaggcataaaaaatattttttaaatcatttgttgctcttgttttttttttttttaaagattcagttcttaaattatgcaatttcatatggagtgaagggaaaacagaaatgcacgggtactcaacaccagatttaacttcatatcctctttgtaaagaaataaaatataaatacctttgaagttctactcctcttaactcattcccttctttcccagagaggttttctctatttttaccacatgtgaatgtaagtgtgtgtgtgtgtttatgaaatgtgtatatattctttcagggggtttt

SEQ ID NO: 53270 - DNA, 854 bp, Homo sapiens
caaaacatgagtgctttgcccatcactgaatggaatggaccaatgaggtggtatcaatgaatatagttccatagaacattttccagaagttcttctgttgtagaaagcagtacagtatcttaagtgtcaaccagttatatacctaatctggttttttataacttctgtaagagcataatcaaacaggaattttcttttctcagtggataatacaacagagaaaacagagttgcccaaatatttaaaagaagttattccttgagaagttcatattttgtgacatctgcattgatttcagtattactgatggtactgttattcataagtcatattaacattctctccgtgaaatcatggtacagtcactgcccagaggtactgaggaaaaagcaatatgggttcggcagatggtggtggtaaaatgaatcttaaggagtgtggtaaatatgtgctccgcttttgttgcatcactatgtgaagtactgtgttgcagaagtggcaaaagcgcttatttttaaaaatgcaaaatatttgtacaatgtaactttatgcttccaaataataatgtatgttagacagcaagaaatgaatactttaaaaagtgatatatgttggagttataaagaaatacactaaggagaggtagtaaatgtgaaccttgttgcagtgtataaggtggaagcctaaagaaatctcaccgaaacttactgctgaatgattacattctcccttaagcagaaaactttggatgtgccatgcaatggtgtctgtgtaattattttgctctttgattaaaaaaaagacccccagcaataaaaagtgggtcactctatgccctctgtgcacattaaaaa

SEQ ID NO: 53271 - DNA, 291 bp, Homo sapiens
acgctcagtttatgatcttcacacaatctagtgaaaaaacagcagtaagttgtctttctcaaaatgactggaagttagatgttgcaacagataattttttccaaaatccttgaactttatatacgagagagtgtaaaaggatcattggacaggaagaagttagaacagctgtacaatagatacaaagaccctcaagatgagaataaaattggaatagatggcatacagcagttctgtgatgacctggcactcgatccagccagcattagtgtgttgattattgcattgaag

SEQ ID NO: 53272 - DNA, 4537 bp, Homo sapiens
gtcgacctgcaggtcaacggatctttggctgcctggcatgcttcctcacttcatatggtatcagcaatttagcaccacaaacgtcctttagagaaccagccctttctcattcttggttctagtggcttgagtagactgaccccagcctacccaaagtggatttgactcctagcaattcattaatctagcccaataaaatgtcaagtacaggacttttattgaaagcattcagaaaagaggtggactctcacactaaacatttgtaactaaataagggatgttagaaattctctagaaaggaagctatgataataaatgggttgctagatgggtctagtagatggtggccatgctttgttactgccttgtgtattgtgctaccatagccctccccaaactgtactctggctcctggcatttccgtctcttcaaccagatggtcagctctctaagtgaaggagacacatctccaacatgcttggttctagcacaacagaagggctcaaacacatacctgctaaagaaactatcctgatggatttagcagcatggccatgaggcattggcggttctatcactgggaactcaggtttctggtgctccagtacctctactggctgataccacatcctacagttcacttcataggcttgggttcctgctctgggctgaataggtggtccactctgagtcatcagctgtgggtgatgatgtggtcactgcatgattctcacacaagcacccagaggacgtcatcaggcagaggcagtgggggtgggcagcatttacagaaaatctgtgatgagacaccacaaaaccagaggggaacatgaagtcactgagcctgctccacctctttcctctcccaagagctaaaagagagcaaggaggaaacaacagcagctccaaccagggcagccttcctgagaagatgcaaccaatcctgcttctgctggccttcctcctgctgcccagggcagatgcaggtgagtgaccgtctccaccctcgggggcccaacccgatcccacaggtctcctgccctttctccacattcctgatccatctatctaccaggaatgttctgaactccagctcccattctaccaagaccccccaagtgtgatgctggataagctatcagcaggaatggcagagcagcaggccattctcaagaagagccagtgggtactatcccttccccagagcccacctttgtcacctggagagtaggactttcctagaagtaaatggcagaggatgggaaactagaaaagagaaatattaaattattctagagtaggcctggcttctgtttctgggataagacaggtgcttctctcactgtctacttaggagagaaacccagagctcagctgacagcagaattggtacaatcactgtcctcagaacactgttaatgtgtttgctcagtcccattctccaactctgcttttcttccctggcctttggtggctcccctctttccaaggatgaggcactacggcaggccccagcttccctgctttctagaattccaccagcactgctctaccagccctcatccagaggctaactggagccagtccatcatgcagccatgaacatttactgggcacccactacatgtcaggctctaggaaacaggatatgacagtatctagatccctccacttacaccctggccattagaaagcagcactatcctagacaccacaggactcataagggtcttggaaactcacctgaaacaaagcaaagtcaggagaggaatgatcaggagcctctgggatttcactgtccctaagacaggtatgctcgccttcaactacatatggaagaaagatttacagaccaaagtctgctgttcttccctttttcagagcaggaaattgaagccccttcctccaggccactcccaactccaggctatcccaggctcccaaatgcccaggagttctggagccactaagcaggtgcccacccagcagattccatgggtgcccacaagcagacagacttttccttcaggggagatcatcgggggacatgaggccaagccccactcccgcccctacatggcttatcttatgatctgggatcagaagtctctgaagaggtgcggtggcttcctgatacaagacgacttcgtgctgacagctgctcactgttggggaaggtgaggagcagaaaacagcccacaccctcctggaaacactccacagagacccctgccttcttcccaaggagctccctgggctcctgtgaacacacatgccaggaggtctccttagagggtgagaaaagggcagttaagtttgtggagagaggggaaggttggttccagaggtgctgctgaagtaagaaacagcagagtgaccaagcctgccatatttagaactgggggcatactttggcatagaatacaaactgaagcaattccacctgtgtttctagggggaaccgaaccctgagaaacctggtgcaattaccagaattccaattcctggggaccgactgtccccttaatttcccctcagctgcagccctgccccagctgtcacctgctcttcactgctcttcactgtctctgggctgtataccctgtgactccacccccatcctcactctgctctctgtgcagctccataaatgtcaccttgggggcccacaatatcaaagaacaggagccgacccagcagtttatccctgtgaaaagacccatcccccatccagcctataatcctaagaacttctccaacgacatcatgctactgcaggtgaggcacactcctgccactcttgctcttcttggtccagttggttccactccccctggaatgccggcccttccctcctttccatcctggcctcttggttagttcctatgcctcagaggagagggaagattgtgcagccccatcactgtgtcggggcccagaagttcgttggctgacctggactttcttgcctcttccccaccagctggagagaaaggccaagcggaccagagctgtgcagcccctcaggctacctagcaacaaggcccaggtgaagccagggcagacatgcagtgtggccggctgggggcagacggcccccctgggaaaacactcacacacactacaagaggtgaagatgacagtgcaggaagatcgaaagtgcgaatctgacttacgccattattacgacagtaccattgagttgtgcgtgggggacccagagattaaaaagacttcctttaaggtaagactatgcacctgcctggattggctcttgggagaaagatgtttggggaatatctgagacctggagactcaagtagtgggggactccttcacccactagactgtgatatttctctctggaaagagaagaggggactagactgagctggggagaaattagggcctctgcaaacttaccaggaggcttatggtggatggtgcttctttggaaggatgaatttgcaacactccacccactccaggtcacagatattaggaaactgtgcccactgggggtgcagtaattataaccaggtgtgtcttcagaggctggtacccaacgtggttaatgggctggtcctccatggtggacatcagccctccttgcccacttctgggtccttaaacagccaacggtcccacatacctccgatctcaggatctgggggacatgacggaggctggcccctgggatgaggtgaagcagtaacaatgtccagggccagagcttggcagctgggggccaccagcggcctgccctgccctctggtctcccacatgtaggctgtgcaagttggccttttctaaaagggggcttgagatggaagagagggcaggacccggaggagcatcagctcagtccttccactctctattcacagggggactctggaggccctcttgtgtgtaacaaggtggcccagggcattgtctcctatggacgaaacaatggcatgcctccacgagcctgcaccaaagtctcaagctttgtacactggataaagaaaaccatgaaacgctactaactacaggaagcaaactaagcccccgctgtaatgaaacaccttctctggagccaagtccagatttacactgggagaggtgccagcaactgaataaatacctcttagctgagtggaaaagctggtttcttgtttattcattgaccctcattctcaggcaccacatctgcgctatgcaggccaatgacacaattttgctgttttctgctttctcctctcccctcaccccttgccacctccccaaacccccacatgaagctgatactcagctccttcctatccacaccagtttctccagggcctgcccttctgccaaggctgaagctgagcaccatcaggagacaacatggaccactttggtcctggggctttgggtaaacttcttacctccttctccagtgttacatgacagagaaaaaagggataataccatgggacctaactcctcatcccccactggggctcctcattctcccctgggcttagtttctctaccctcctctgagctc

SEQ ID NO: 53273 - DNA, 384 bp, Homo sapiens
aaaataggagaattcaaaaaacacaaatctgtaaaagggtcccctcttctcagtttcgaagcgagggtgggctccttatagttcacgctggctgtgcacctacgtttaggcagagccactgctgggcttgctttattcttttttggagaaagagaaagtcttctgattttcacaacaggatacaaggagacattggtgatatccttcaggctaagatgaggtgactgctgagtttcaggtggtgtagctgaatcaaaatcaactcccagtgtgtcttgaggaatagtaggtatctgatcttctatttgaaatgattctccttgtcctggaagttcagtttcttcaagaggaatttgcggtaaatccttcacaaataaatttctg

SEQ ID NO: 53274 - DNA, 908 bp, Homo sapiens
cctcttcaggcacccgccaccctgatggtgacagagggggacagccagcacccatctgtccccgtcagggctcttgctctcacagccccctggagcatgccccatgccccaaccttgggcctggctcctggcccagatggcacctggcctcttgagtctgctgggggaccccaaagttggtggtcccatagcctgccctcctgggtctccacctcatgcctggacaggacgctgtggcctgtccgggccttggccagccctgcagctgcacccccgatcctcatccctcaccccattccctgccagcatcctaaggctcctggcgggcatcctctctgctcaaaattattgacctgtctcccggccacacctgctgtgccctctcagccaggccatcatcaccccctgttcattatgtcaggcctcatgggagcctggccttctccagaagctggccccggcgtcctcccaagctggaccacgtaggccccagatcacacctgggggtccagatgtaggggtccccgtgtgcacgcccaatcagaccgagcacttgtgacactaccccaacacctctcccagggctgaatgaggaacgcgccactggacacatgaggaagaggctgccctgggagctactgatgctgtgacctcacctctctggctttgggcggcaggtccctgcacctaggatgcctgcctggaaatgtccttgcattcgtggcctccttcacagcctcctcctcagagaagcctctgcgagtgcacagggagtgtgtgcagccttgtgaagggctgggaccacttgcccagactggggcccctcaggcacaggcgtggggtcctactgacctgtctccccagctcccacacagaaagcatctaaaataaacacacgtggatggaaa

SEQ ID NO: 53275 - DNA, 1221 bp, Homo sapiens
ttacagataaatttgtttttaataaaggagttaattttctttcaatcctatataaaacaatagcaattaaaaacttcatttctgaaagtaaaatatttacatatgaacaagtaactgtgcaaaatttacatgaaaaaatggaaagacagggatttcctaaaagacaaaataaaaggtgtaacagttctcaggtgttgataaaaaatactgatcagcgttcagttcacacgcgctcgaattaaagtctaatgtgagaattcacacggagaaagccagagtatttacagtcataaaagtactatcaatagacaatttcatacaataacctctgaaaatagaaagaaccaattagtatatttgtaataaaaaaataggtacaaagaaggggctttgctctggacgtctgtaaagtcggcccaaggcttgcatacagtctcttagcaaaataattatagtttacatagccatttctatgtcatgtgccaaaagttatgtacaattactgacaaaatacaccaaccatttttcaacacttgattcacaccgagaaacagtcttttgatgattcttctcaactttgattttatttaatctaggttttcacttttagctaaaaaacacagtgcaagtaaaatatatttatgctgaaaaggttttcatctcttttaactttacagctttacaaactatagcaaataaaatgcatttgtacagatgctgaccacacattcagaaggagccacctttgctgggctcggcctctaccaagcagaaatgcgattacactctgaggtgggggtgcaacgatgaattgtgtattcctccaggattctcagcggagtggaggggaagggaggggaggggagggcagggggcagagaaagagagcggggtgggaggggaagggaaggaagataaatagtctaaaaaatcagtttgctttgcccaactgactattacaaaaataaaataaacgaaatgaggtcatcggctgtagacatacacctacatagtaagttaggtagaactaaaccaaaatgcacaaataatgcagaaactgctatgagttgacagagggcagctaattatttgctaacgattccatcagtctttatatatggcttgtttggcaggaaggccactcaatcaagatgagttaagatttaattgtcctttaagagtatccacaggcctttgtgttctctctgttacagaaacgtg

SEQ ID NO: 53276 - DNA, 653 bp, Homo sapiens
tttgataatacccatggttaatttcaaaaccagggacgagaagccttcttgtcgtcattcacgggctgataggagtctacttttagctaggaacggccaacggaagataattgtgccattttaaatgccacataatgttcttaatcagcaaccaagtgtagaagggagtctgtaaagggcctgaggtcctgattcaatttcttcagcttcccaagcccgctcccaaagagcaggcaggccacccaaatcctgcagcttgtgaaaccggctctggccccagaagggatttatgagcgcttcacttcaaggaataccacccaggctggctggctgcaaatgcgggctgcctattagttctccttcatttcccaggaagtgtgagtgagagagctccccacctcccgataggcgacaatcccagcctcttgacatctctcgcgctgagcaaacttttcactggaggatcccagctgttcgccacctccccgcttgcttgccggcagtctggtgtacaaggcagaaggggcgagacacacagagaagaaccaaggggcttttggaggcttgcttttgcctgaaaacaaatactggatcctttccatgttgctctagagactgtcttttcctgcttcaaagtctgtgcgctcttggcg

SEQ ID NO: 53277 - DNA, 413 bp, Homo sapiens
cggacgcgtgggttaagagactgttcatttgtgaaaaccacacctggaaattgaattccagagcctactaacctcctgtatctcttcttctggcacaaccctacccttcattttagaagaaaaacacaatagtggtttaattctcatattcattatgagtaagggaggaaaaaggggatgcccacagtgtaataaggaatggaggcaccctgcgggttcctttacctagacattaacctgagagtccggtgttgatgtttacacttctaaaaactgtattattactgccttgatgtgaaaattcgtgggtattctaccagagtatagccagattatcatgaaaccacagaaaaatatctcccaacagtttccttaaagtccataattttgggccaggcacggtggctgatgcc

SEQ ID NO: 53278 - DNA, 288 bp, Homo sapiens
tgaaatctttaaagccgttttttcccctaaaaaagggggaaataataacacctcagaaggtttttgtgaagatcaaagaagctaaatatatgtggcatgatttgtaaagtgttatgcatatgtatgttattctccctactgtcttctaaccttcccttgcctgctatgacttatctgagagccatgttcccatttatctttttgccaactatgttactgttgtcacacctgaaatggctttgtttttatcaataaatacttgttgattgtggtaaacagcaacagaaa

SEQ ID NO: 53279 - DNA, 495 bp, Homo sapiens
  misc_feature (1)...(495): n = a,t,c or g
gggtgaacgagctgctcgtctatggcatcacgtcaccatgctgctggtcgggggcctgggctggtgcttcatggtcttcgtggacatgtgagggccgtgggtgcgagcttgatgtatcgtcccggcctgtggctgtgttctctccatgggtggggtcggccagcgccttcccttcgcccatcccccaggcagtcgctgctgcccggcgcccacggagagaaaagaaagggctgagacttctgtgatgggggcgcggacaccacccctaggctggcttcctggacccaccctccccgtatgcactctcaggggcagcgcccacctgccggtggcttcctgctcacatgtcttcgggtcgtactgcggggtgggccctccgttccgcctctctgtgggcctctctccagggaccacagctgccaggggactttagacatcaccctggggaggcccctgggacanagagggttgttttgcccagggagcaatttccgg

SEQ ID NO: 53280 - DNA, 604 bp, Homo sapiens
gatgacaggcctgtggcggtacctcaagaacgcctatgcccgtgaatgagttcaccaacacctgtgcagctgacagtgagatcgagttggcctacgctgatgtcgccaaacgcctcagccgatcctgagcacagccattttgccccatccccgctgcagaaggactcaaccactcccctaagactccagcttcatagactcctctgtatcactgccttgaggcgcactttttataatcaagcctcatcttgctggtatcatgggaactccagcctgctatctttcatgaaggtcagcaccatccctggcctcctcacatagggaatctaggcaggaaatgataggacacagtccacctttcggccggccagcctgatctggggctcagcatgttttgggggtcagtcagtgttggagagcccacatatgggattgccactagcttcttctgccaatatcaaaataccttctcagatgctttagaaacatgcaacaccaactccttttctaccctcctctccgtccatacctacaaggccaaggacaaacgccatcttcatccttcttagaaagagatctattaccccattaggggagacagaga

SEQ ID NO: 53281 - DNA, 220 bp, Homo sapiens
cttttaatagatgaaaactgatgaaacagtgactagtaggtcaaaacagagtttgcaagaatatacaatatggtacggacaattacctggccacttccttagtttatgatgctttagcatatgtaaacagctttaatagatccctcaaagtcaaagcctgacacccaacaaacattaaaaatccctttgcttgttcagtaagagaagtaaaaattaaatt

SEQ ID NO: 53282 - DNA, 509 bp, Homo sapiens
  misc_feature (1)...(509): n = a,t,c or g
tggaaaactccaagctgctaccaggaactgctgagccggggccangcccgcgaagcaccctgctgcccgccagattgagctggacctgaaccggaccttccccaacaacaaacacttcacctgccccacctccagcttccccgacaagctccgccgggtgctgctggccttctcctggcagaaccccaccatcggctactgccagggcctgaacaggctggcggccattgccctgctggtcctagaggaggaggagagcgccttctggtgcctggtggccattgtggagaccatcatgcccgctgattactactgcaacacgctgacggcatcccaggtggaccagcgggtgctccaggacctgctctcggagaagctgccaggctgatggcccatctggggcaagcaccacgtggatctctccctcgtcaccttcaactggttcctcgtggtctttgcggacagtctcattacaacatctccttcgggtctgggatgcctttctgtac

SEQ ID NO: 53283 - DNA, 446 bp, Homo sapiens
ttttttttctcagtttttatttagaaagtttagtgaaacaaacatagcatcacagtttagtaatactttaatctcactataatttaacatggtaaaaaatctactaatttttgatttccaacaataaaatttataaaaataattatacatttataaaatgaattatttcacaataaattattcacttctattacctgaaaaaagttgaatactatataaaagtaatgacttcccttatcaatattttgaaaatatgctgaaaacatcagttccttttttccagcatctatggcagttcagtatataaaaatataatattataaattccctgaccatagttattgaagcagaatcattactaacaatttcaaagatacagctgtttagtaaatatacacgaataaattacagggttcactaaaaatgaattttatcttttatacttc

SEQ ID NO: 53284 - DNA, 750 bp, Homo sapiens
acggcgcctggttgcccccagccccctccctcctcccaccttcactgtgtcccacccttcctagctttgtgcccggggtgctgagcccttccccgtcagccgggccgctggaggagggagccgccaccgaggagctgccgctcgctgccccgggcaggggcacagggcttcatccagtgaatactagagggatcgaacagttgcaaccaaggcaatgtcttactacctcagctcagaaaaccacctggacccagggcccatctacatgcgagaaaatgggcagctgcacatggtcaatctggctctggatggtgtcaggagtagcctgcagaagccaaggcctttcagactgttccccaaaggcttttctgtggagctttgcatgaacagggaagacgacactgcacggaaagagaagactgatcatttcatcttcacatacacccgagaggggaatcttcggtactccgccaaatccctcttcagccttgtcctgggtttcatctccgacaatgtggatcacattgattcccttattggctttcctgagcagattgctgaaaagctgttctctgctgctgaagccagacagaaattcactgagccagggtgcagggctgagggctttacagaaattcactgagggcctatgggaagtttgggtgctttgctccctgtgttttgcggaaacaggtatctcgtgatttcagaaaagcttttaggggagatttaagtcttttcccgggagct

SEQ ID NO: 53285 - DNA, 921 bp, Homo sapiens
  misc_feature (1)...(921): n = a,t,c or g
cagaggagcagtgtccggccagagcgcgcgcgcagcttgggagctaggcgaggccctggcgctggggtcgggctngcgtcatgcgtgccacgctctcctctacgcgccggaccctgggatgctcttcggccgcatcccgctgcgctacgccatactgatgcagatgcgcttcgatggacgcctgggcttccccggcggattcgtggacacgcaggacagaagcctagaggacgggctgaaccgcgagctgcgcgaggagctgggcgaagcggctgccgctttccgcgtggagcgcactgactaccgcagctcccacgtcgggtcagggccacgcgttgtggcccacttctatgccaagccgtctgacgctcgaggagctgttggctgtggaggccggcgcaacacgcgccaaggaccacgggctggaggtgctgggcctggtgcgagtgcccctgtataccctgcgggatggtgtaggaggcctgcctacctttctggagaattcctttattggctctgcgcgggagcagttacttgaagctcttcaggacttgggagtggtggaagctggtgctttctcaggacttcagatcccagttcgtctgaggcaaccctctgtggactcagggaacctgagctgaggactttggtacaaggaagggaatgttttctcttccggacctaaagacgataccaaattaaaagaagacatgtatatcatatgttttgagcagaggaccctccaattcatgggatcaggggcaaaaatccacagctcatcccaggggccctggcaggttctcagagcctacctcttccttgnatatttgcatacagcctggtaacccccaggcatgcatatgtacaatgtgaccacacacagcctgacatctttcacctgtcaagtccaatttaaccagg

SEQ ID NO: 53286 - DNA, 1191 bp, Homo sapiens
  misc_feature (1)...(1191): n = a,t,c or g
ttttttttttttcatagaccaaaatagagatttttatttccaaacacaaagcagatacatttttaaaaacataaaacaacagcaaaaacgtcaaaccatcttttagaacactgctacttccaacttgcacaaaaggaaggggaggaaaacgtcaatgcaactttaaaatatagcactaagaagaaactccggggtcctggtgttcctccctggatggcggggaaggctccattagctttggacttgatatgaaccgagataacacacacatgttccgagacagtcgtttggctccaatactgcttgccttcccagaaagcttaatttattggcaaatgcatgttttaccatcacaaataatatggaccaagagtagatatggtccctctgcgtattgtttacataatagaatatttaaaacaatggaatgtgtttgtctttgacatcaaaaatcatttatgcagcatctacatgcacatatacacacacaagtgtgnnnnnnnnnnnnnnnnnnnnnnnnnnnnnnnnnnnnnnnnnnnnnnncccatgccattgcttggtccacactgcatgaaacacaccattccagctacatgaacaggtcagtatcaggttagtgtaaccaggtctccaggtacaaaggatgaagtgggtttgctcacatagacttagcttagggtagagtgaacttgtttatgagaacctcgtttatgcagaggttggactcaaggcgatcgcagcactcaatctggtgtgatcatcagcgtcatctgggagcagcttcaaaaacattctcagcatcgccccagacatccttgttcacaatctcaggggtggaggtcatgagcaggccaaactcactctacccgacctgctgcctccaggatgggttctgaggagacatggggccctcccatgggacggatgacaaatgaaacgaaaaaatccatctgggtggggggctttggaatgagggctctggtctttcggacttgaaatggagggaaaacgtaatcgttcctccaaagctggtattggaaacttgccattttcccaacacacacacacagaaagagagagagaaaggagaaaatttaggacccacagaattaagccctctttcaaagcaggttatctgctatcctgagaaaaagagggcatcgtgtctaaaccagcccatgntaattccca

SEQ ID NO: 53287 - DNA, 822 bp, Homo sapiens
ttttttttttttttaaggttttcacagagatttattttaaaccgtggcggcaactccgcattgagagttgtacattggtaatggctacacgtatattttggttagaggaaagcacagtgggaaagtgagcggagtaaaaacattcacaatattcagcagcatttgattgggggcctggatacagatgtttcaacatcctaggaaattcttgctcattaccacctaatcacattcaggaagtcaatgtcaggactggcagggagtgtggcaaatgccggaggggtccagctagaccacacgggagaaatctgttccaatgtcaggcttattacattctcagcctgaccccctgaagaatctcctcactttaaaaaaagaaagaaaaagatatccatacggtaatatgcccactgcagccaggtccagacttgggctgcagtccggtggatgtagagaatggaagatccgtgtccctggttagaagtagagcggtgggcaggcactaatgtggggccagcaccttccctgttgtccagttagtaacggtttttgtacatttcatataaagatttccttttgcaaaatgacagcaccttgaaaaacaaagtcatttaaaaagcaaggcaaatggtgtaagacacaaatccataagagtacaatggttacaagtgacgctagggttttggccatacttcatagtggcatatactactgacgtaaggctgccatccactaaaatgataaaaagtgtatatgtgaaacatttttcaaatcattttccctttttttgtgagtgacagctcaccttctcatgcatccccg

SEQ ID NO: 53288 - DNA, 235 bp, Homo sapiens; identical to SEQ ID NO: 12799
  misc_feature (1)...(235): n = a,t,c or g

SEQ ID NO: 53289 - DNA, 1201 bp, Homo sapiens
tttttttttttttttttttcctgtctgtaaccatcagatttatttttatatttattaagcagtaagcaaacagagttgggggagatgacctaaaatggttttcttttggaataatattttttaaaaaatcaaataactgttatcactttaagttgcatgaggctgaagctgcacctggagaggaatttaattttcatgacatgcaaaactgattaggcagtgaactctttcctcccgcttcccctgaacacatttataaacttcaacgggggtgaattccatctaatactctgaaaaccatttctcatctcacagtttacccaaatcatgtgcatgactgcaagaggaaataaacaagaaatctttaagcatagataagccacaatggatagttaatcttgtacagacaatccagcattaaggctaatttgatcttttaaacattttatgggaaacagctgttgagttttctctagaaaagcccacaaggttccataaccccataggcatacagcctcgacaggcagggctccatcaggctcctcttgaactgggcactccttcacggaaggcaggaatgcacgtgtcttcacttcctgctgctctgcacgcacgtcacgatatctggcagaaggtggtttctgttttccttggtgacattaaacaccttcacatcctttctgtttctgatttcttctacaagagccagtggctttcctttaggaactgggattgtgccaaggattatagtccctggggtagacagcgtctgacgaacagcttgaatgaaaagctgactgaagagctccatcttcccaatctcatcgatgacgcacactctttgccctgggccactgctgcagtcggcattcctcaagacgggtagtgccaactgctcaaaagaagtcaggtcgaccacatactgcccaactcggcattcacgttttccaggtggaggctctaacccaactctcgataaaggcccccgggtgccggacaacgtgacgacatcgaatcctattcttctccctccctgtctgacttcttcggtataaaatccatcaacaggcacaccagaggattttaaaacctcactggctttatggatcaatgttgtttttccaactcctgggggccccgttaggaacacgtgccgggccatgctggtgggcgggggtaggggttgcggtcaggggagcag

SEQ ID NO: 53290 - DNA, 397 bp, Homo sapiens
  misc_feature (1)...(397): n = a,t,c or g
attgacacgcacagatagaacccaaagaaaggcaaagagtcctgcccggcaccggcgccgcgtgggccaaacctgcgcccgtggagggcntcatgaggccaccgggcgccgggagcaggcggcgcagcaccagcattgtgttagtgccgggaggccactgtgtcagcaagctgagagggaaactgaagcaagatgtcgggccggagtgggaagaagaaaatgtccaagctgtcccgttcagctagggcaggtgtcatctttccagtggggaggctgatgcgttatctgaagaaagggacgttcaagtaccggatcaagcgtgggcgcccctgtctacatggcggcagtcattgagtacctgggcagcggaaattctagaattngccggcaatgcccg

SEQ ID NO: 53291 - DNA, 469 bp, Homo sapiens
tttttttttaaaaaaaaattaagctctttaattatgtgcacacagattttagaaaaggtagccttttgtatatagatacctttacattctttaggctgacttttaaattgtcatcttttttcaactacagtttttgtatatagtaaaccagaagatgtgtatggaccctgttatggccaagcatctcaaagatgaagagagaattaatgatagttatatttcactcaaaatgccaaaaaaaaaaattcaacaaagtaaaaattttaaaacttgactctaactagttcctttttgttttacattctcaaaccattgtcaaatattctaaatatctctgagaatttctcttttaatgcttcacttgtataatcttaaaatcctggacagtcatacaatacagcatgtagtaggtaccttttcttgaggcacattcaagtgttttggcaaacagtaaaaagtatctaaatgc

SEQ ID NO: 53292 - DNA, 427 bp, Homo sapiens
attcggcacagagaaaggtttaaagacaaaaaacatctggataaattctcttcttatcatgtgaaaactgccttctttcacgtatgtacccagaaccctcaagacagtcagtgggaccgcaaagacctgggcctctgctttgataactgcgtgacatactttcttcagtgcctcaggacagaaaaacttgagaattattttattcctgaattcaatctattctctagcaacttaattgacaaaagaagtaaggaatttctgacaaagcaaattgaatatgaaagaaacaatgagtttccagtttttgatgaattttgagattgtatttttaggaaagatctaagaactagagtcaccctaaatcctgggagaatacaagaaaaatttgaaaaggggccagacgctgtggcttcacacctgttagttc

SEQ ID NO: 53293 - DNA, 707 bp, Homo sapiens
  misc_feature (1)...(707): n = a,t,c or g
acagtcagctcagttacagtctttattgtaaagaaggtgcagtcggaacatgggacactgaaaatacacaatctctggtctttcaggagagggagagagtgatatatacaaaaattgtaaacatgttcacttaaatatccacacagaattggtctaggctacaatgtaacaaggttgtcactcaactgcatctccagagggaggtgtctgtctgatgaaatgtggcaaccacgtttggtgttgacttaatgtgaaaagccagctttgagcaatgcatgagtagtcagctatgccagagggactccaacctgggactgggccaggaagcagggtgcaggtggagaggcagggactgggccaggaagccaaggtaaagggaaccacacaggggccatcttgtggggcacggtggccagctggagcctctgggcctctctcctgctgaggggcttgtcttgncctggcacccaggcatccttctcctctcctggcaaggtcttactgaagggctaggacagggctggtgtcttggcccacagctaccttgtgccttcctggccagaaccacccacacctgggcaggggccggggccacagagagaggagcagcttgtggagtactaggaggtgaaacccgaagactggaccatgatcacaacactgacagggctgggctgttctagcagcctgtgagagaaagtggagag

SEQ ID NO: 53294 - DNA, 869 bp, Homo sapiens
ttttttttttttttatattttttgctctagcagcatttttatttacaaacagcaatgtccattgactttatttataccataaaaaagccatttacaagcaagaaacaagaattcagaacaaaattaagcagcactgaaatattcatgtcacaaatctaaaacaaagtgaatacaagagtaaaatatcatttggaataaatagtcttaaattcatggctattaaaataatccttaatggcaagttactagttgatacaggcatccgcttagctagcttcatttacttcatatggtgatgaagtgtggagttgtgaggttaccagtttatattgcaagataatgacactgtgttaagtcattcaaattgctcaaccatttataacggaaaaaaatgttagccctactaataaaagtggtgagagagatggttttcacattaggaaaatggtcattctcaaacaaaccaggtaagtttacctcttacaatagtcagggcagcaacccaaaggcttgggcagcaagtccaaaggttgaattcacagcatacttgtcactgaggggcagcaagaggtctgtggactgaatctgctacaaggagagcccaggcaaggctgactccaggacttgatcaagaactacaatagccccgtctgtgccagactcaggaaggaaaccagagaaagcaggttctcttccgggccgagaagtcaagcactgggcagaaacagtgggaacactctggcacttactgaaaaagacgcatgtgacatgtgacaaccattacaaatttggaacaatgtgaatgacttttctgaacttttagttcagttgcactgagtaatatgaaatctatgatttatgaactagat

SEQ ID NO: 53295 - DNA, 455 bp, Homo sapiens
  misc_feature (1)...(455): n = a,t,c or g
cggatcccctcggagtacgccgcaccatgcagctcaggctcttccggcgcctccttctcgccgctttgctgctggtgatcgtctggaccctcttcgggccttcggggttgggggaggagctgctgagcctctcactagcctccctgctcccagcccccgcctcaccggggccgcccctggccctgccccgcctcttgatccccaaccaggaagcttgcagtggtcccggggcccctcccttcctgctcatcctgggtgtgcacggctccggagaacctgaaccagagaaacgccattcgggcttcgtggggcgggctgcgcgagggcccgggggctcagggtacagacgctattcttgctgggagagccgaacgcacagcaccccgtgtggggtttcccagggggagtgaactgggccttcggagtcagcagcccagggggattatttttncaag

SEQ ID NO: 53296 - DNA, 722 bp, Homo sapiens
ttttttttttttttttttgaagtggagacaagtttattgaggagcttgacacccctcttctgccctagcttgagagaacaactgcagcatttttttctttttctcttcccgatgaccatcttttgggctggcgggccaggccctgggtgtctcccatatcgctgtctttagtgagactgaggatctggtataaggaaacagatcagctgcagccagtgagggcccctgcgttgggcctggggagagagaaggtcctgttcctgcctttcctgtggccccaggcactctcagctctgaagccagggctattgcttcgacaccgcaggatgcccaggactccctgggaaccagggagcaaaagggcgcagtcctttccccgtcagagccacccaccagcttccaggcttcctgcatcttccaggggtccagcctgtgggacgtcagcaggaatttcccatagcagcaccggtctagcgggtagtgggtggcaccagccagcttgacacactgtgttggggcgaggcctcctcgtcgggcacttacccccacaaagacatcctctaatgggagaaggggtgcccggctggccaccttgagaatgagctgcacagcagacgctgacagcacataccccgtgcctgaggcatagggtggaaaggggccccaggtgtgaggccactgctcctctgatacgcggtgcctgccccccgcccacgcgtccg

SEQ ID NO: 53297 - DNA, 409 bp, Homo sapiens
cctagaaattctaatacaataagattagggtggagtccaatagtctgcaattttaatatgcaactcaggtgattccgatacaggtggtctaggagttcattcgttttcagagcactcacaaactccctgaaatacataaacaagcccatacaaaattttttatacaagacatcctaccccccaaatctaatgatttcatcagattttcaaagggagctaagacctaaaaaagggtaaaggctacattgcctcagggaagccctaattcccagggaaaattaaacccgactaggtaccagatcgatccctttatttgtaaaatttctttcagcaacactggttaggtcctttttctcctttttcagatgtacaggtagtaactctgcagtctttatacaattaccaaatg

SEQ ID NO: 53298 - DNA, 3790 bp, Homo sapiens
  misc_feature (1)...(3790): n = a,t,c or g
acgctcctttcgtcatcacctggtctaggagggacgcccggggagaccgtacgtcactgctctgcgccggaagaccctattttcagggttctcttccctccattcctaccccttccccggtaccataaaatcccgggatatgagctggaagaggcatcacctgatcccggagacctttggagttaagaggcggcggaagcgagggcctgtggagtcggatcctcttcggggtgagccaggtaaccatggcaaccccgggggtggggcctcgcttccggtagccgagagttttgttagaaccgcgtccccgccccagttccctgtccgtgagccgatttatctgcccagggtcggcgcgcgcggctgtctcagaactcatgcagctgttcccgcgaggcctgtttgaggacgcgctgccgcccatcgtgctgaggagccaggtgtacagccttgtgcctgacaggaccgtggccgaccggcagctgaaggagcttcaagagcagggggagatcagaatcgtccagctgggcttcgacttggatgcccatggaattatcttcactgaggactacaggaccagagtatgtgactgtgtgcntcaggggtgctggggggagggcacaggttgggggagacagggaacttgggaaacagaaataaaaacaaaagaaagaatttccctgcccccacatcccatggagagggcacagggccctggtaaatagtaatatgagggagagagacaggagggaaagagggaggagtgagagggtaaagagggggggagaggagggggaggaggaggaaggaaggagggggaggaggagggggggaggaagagggggaggaggatgaagaggaggaggaagaagaagggtatgagaggtggaaggatctgagcaagaggtaagacaggaagagaaatnctttcctgggggtggaggttggtagagagtgagggtggggatggaccatgtctctcatctctgcttgtaggtcctcaaggcctgtgatggccgaccgtatgctggggcagtgcagaaatttctagcttcagtacttccagcctgtggggaccttagtttccagcaggaccaaatgacacagacctttggcttcagggactcagaaatcacgtgagacttgtggaaccaaccaaagtcaggcatctggtgcttccctgcctccctccagttccatccagcctgtcctcctgtttttttggtgaacctgccagaaatggtgccaaaaagctgactcttcttgttaataaaatgacccaagtttgtattcctccccacaagagaggaggcctatcttacctgggccttagaaagagccctgaaatagaattcagttcttggtggcttatcaaaagcacacaggggcctggcaggaagtgtaaaagcttgatgttaatcatactgggactaagaggatagagaatggtaggagctgggatacccctaaacattcacattaaaacaaaaaaaacccaaagctaaaaaacaactgggcaggagctaaataaaaatctaattttgagaggctgtatctggctcaggcctcctactttgtaacccatggaatatgtgaaagcatttgaaaaactatagcactgatctcacatgggcagacacactctcagagagatgtggtgggagccatggcgcagtctgcctaggcagtggcaggagcgcagaagactctgattcctctcctcggtcctaagaccgaatgtgtgtcaggacaggtggtcagggaagagaagctatttaactgaaccagtaatagtagcaggaaaagaaaaagtggagggagggcagtcaaggtagggggcctggaacaagcaactgcaccaacagaggcagttggttgcgagcacagaaccaccccaggctgggattttgttatccagtctctcttgcatggttgcccgtgtttctggagacttgtgtaaacattaatggatgaggaggagagatggttctcagagcccagccctcatctctgctggcttcccactgccctcaggcatctggtgaatgctggagtcctcaccgtccgagatgctgggagctggtggctagctgtgcctggagctgggagattcatcaagtactttgttaaaggtatcccatctgcagctcaagcctgcagcccctcaccttttggtggctcctcaggcctctaggccttattcacctttcccctttcctgtgccacttctcctctagggcgccaggctgtccttagcatggtccggaaggcaaagtaccgggaactgctcctatcagagctcctgggccggcgggcgcctgtcgtggtgcggcttggcctcacctaccatgtgcacgacctcattggggcccagctagtggactggtgagtctttccctggcctctggcagattatggagcaatgacccaaagtgggatttcctcccagctcatgcttagtttcctagtgaaggccagtggctctcattcttctctggaacccgggagcaccccttcccaagttctaagttctcctcacagcttgagcctaggcgtctggctccagccttgtctttctcctgcacagcatctctaccacttcaggaaccctcctccgcctgccagagacatgaagattctgctcatcattgctcagctcctcagagtgggccgggaggggactagaagagctgcatgatggtggctgagacagggtcaccttgggaaggcttgggagccaggatgagtgtcgggctctcgtgtgtgcaaaaggtcagatgtgactgctgctgtttgcctggtttctgacccagtggtggggtttgagcaatgcttctctgcccttccatggaaagtggaaccagaaatggtgccaaggctgtggctgttccctttcgtgtaaaatggtgctgttattactctgtcttgaaataggaaggtgggatttctggggaggctggtgaaggagggcagggttcttttctctacgtgtcatgttaaaattgccaaataaagtacctctgcctgtgatattttctggatgtcctttatttactgtgacgtgtgtttgggtgccttgtttatggggtagaggtgaagtctgagctttgcctcattcagagaggaaaggggtcaggggttcactctgacgttcaggccattctccctcgtggagtggtgagggtgtacctaatctcctaaaccacggaatttctgttagggcctaaaaaagcaaaagcctagtatagttcaatttgtgttggaatgaaagtaagagacaagtgtcttagaagcctgtcattgttttgtgagggcctttaaatatcctgtactcgtgggccatgttgggcccttgtacgcccaggtatacatgagcttgtgtgcacctataccctgatacagatatacctggtagggggaggtgctcaggcactggaatgagaggagttaacggggaaggacagggttatttctgggccaagattcagagtttcccatggacacccaggtgtccggggtgcccccacaactctgggcctgaggccagttgcacttcttggctgtcacgtggtttcccagcttagctgggctgggggaggagcaaggtccagagtcaactctgccccgaggcctagcttggccagaaggtagcagacagacagacggatctaacctctcttggatcctccagccatgaggctgctctgggggctgatctgggcatccagcttcttcaccttatctctgcagaagcccaggtcctggaggcgggatgctgggtgcttggatt

SEQ ID NO: 53299 - DNA, 777 bp, Homo sapiens
gccggcggggtcttcagggtaccgggctggttacagcagctctacccctcacgacgcagacatggcagcgcagaaggaccagcagaaagatgccgaggcggaagggctgagcggcacgaccctgctgccgaagactgattccctccggtgcaggccgggagtggctggagcggcgccgcgcgaccatccggccctggagcaccttcgtggaccagcagcgcttctcacggccccgcaacctgggagagctgtgccagcgcctcgtacgcaacgtggagtactaccagagcaactatgtgttcgtgttcctgggcctcatcctgtactgtgtggtgacgtcccctatgttgctggtggctctggctgtctttttcggcgcctgttacattctctatctgcgcaccttggagtccaaagcttgtgctctttggccgagaggtgagcccagcgcatcagtatgctctggctggaggcatctccttccccttcttctggctggctggtgcgggctcggccgtcttctgggtgctgggagccaccctggtggtcatcggctcccacgctgccttccaccagattgaggctgtggacggggaggagctgcagatggaacccgtgtgaggtgtcttctgggacctgccggcctcccgggccaggctgccccacccctgcccatgcctgtcctgcacggctctgctgctcgggcccacagcgccgtcccatcacaagcccggggagggatcccgcctttgaaaataaagctgttatgggtgtcat

SEQ ID NO: 53300 - DNA, 280 bp, Homo sapiens
aaatattagtgacatcattgtctgcagtttaaccctagaagagtagtatctaaggacacagagtacttgccagctacttgaatgcattatttcagctgatgtgatttatattttgaaatatgagccagactgatggaattgactgacctatcttacagctataggactgtaattgagatcaagttctgttaagtttctgaaggcatgggtatgcggtttgctcaagagcattttttcacatttgtgttaggatagtaaattaccttgaaaactggaaacc

SEQ ID NO: 53301 - DNA, 700 bp, Homo sapiens
acgactgttgtgtctccctcacagtgccctagagtccatccagagtgcccgtgctgcccaggccccgcactggaagagcctccagcagcaaggtcagtgtggccgggtgctaggctgcaggatcccacctcgggctcctgtgcagtggctatgactccgaactgtccctagatgtgaccgctgtgccgatgagccccagcagccactccccagaggggaggcctccacctctgctgcctgggggtccagtgtgtaaggcagctgcatctgcaccgagctccctcctggaccagccgtgcctctgccccgcaccctctgtccgcaccgctgttgccctgacaacgccggatatcacattggttctgccccctgacgtcatccaacaggaagcgtcagccctgagggaggaggtaagctgggcagggtggaggtgctgcggggtgtgacgaggggaaggaccagtgactgcttccgtcttcgcccctggtccagaactccacaccccagctagcagggatcctggcccgggtgctgaatggagaggcacctcctagcctaggcccttcctctgtggcctccccagaggacgtccaggccctgatgtacctgagagggcagctggagcctcagtggaagatgttggagtgccatcctcacctggtggcttgaaatcggccaaggtgggagcatttacaccgca

SEQ ID NO: 53302 - DNA, 453 bp, Homo sapiens
ctggaactgggagtgatgtcagctcccagctcggtgcctgcccggattcctgacatggtgtagtgcaggcagggtggggaaaggacggggaaggactcgtgtgctgcgagctggcggccgggccggagtgctggggctttgaactccgagaggaggtggaccagaacttttggaactagtgccggcggctctccaccccccagtataaaagaacgtgtggatcactttgctgagtacatccaagatttgaagaactgaaataaatcagctttaaacctgctttttaaaaatatctgggttggaatttgcccctgacaaataataaaatgatgagtgatgcaagtgacatgttggctgcagcgttggagcagatggatggtatcatagcaggttctaaggctctggaatattccaatgggatttttgattgccaatctcccacctctccattca

SEQ ID NO: 53303 - DNA, 98 bp, Homo sapiens
aaaaaaaaaaaaaaggaaaaccaaaacccagaatgcagaaactgcattggtattttgagctagttacaggcagtaacacttctactaggaaggaaaat

SEQ ID NO: 53304 - DNA, 374 bp, Homo sapiens
acaggtttgtagcctgggagcaatatgctatataccacatagtgcaggtgtgttgtaggctctaatcatttaggtttgtataagtacgctctatgatgtgtgcacaatgatgacatagtctaatgatgcatttctcagaatatatccctgtcattaataggtggatgatatataaagaggaaatagctattgggtttggcatccaggttattggagaccttctgaaaaggagttttgatagagtaatcagtaatagcaatcctattagaatcagttaaggactgaaagtgggaaaacagcaactggagaaaactctttaaagaaatttgctgggaaaatttttatgtaaatatagacaagcttatcctagtatt

SEQ ID NO: 53305 - DNA, 1997 bp, Homo sapiens
aaaaaatttatctatgtaaacacatcttaatactaatttgagttactacttttattctttattgtcacattttccaagttttgcgcattcaaacttggcaaacatcatggagatttgtacaaacatacatatacatatatacacacatatttatagccccagcttcctcattaaaccttgtgctcaggctcctgttaaaagaggtaaaatggtgagaagataaaaatcagggaaaacatgaataaatgctgactgacaaatcttgttgttatgaatttgtaaggcagacattttaaagcaaaatccattaccttgctaaaatttccactaagctacagcttcagatatttacaagaaaaataaatatcttttaacagacttcaatgtggtttaacagcaagctagctgaggagttgtattttgttgttatttcaggtaactttttattaagaaacagttaatatttcagtgattacaatttcaggtgttcaaaactcaagaagggtcatcattatactctgaagcagaattcttcaggtactcatctttaaattactacccaaatctatcacagtcacattcaggctttcaatttttaaaaacatttaatgtttggtaactaaagggtagatgcgattagtgtactctaggtcgtttgattttatttttttctgtaggagctttcctcttttgtgataatccagtcccaagttccttattattctgaataaatgaaatagcttctggtagacagtaattttctacatgaggaggtgattcctgcatgagataatcagcaatgtattctgttctcaagcagtacacgttctgggcagcagcttctgctatattaactcctgagtcatctggtttcagtttattcaagtcagaaaaaagatgtgtggcctctttaaataaaggtacagaatgaccaggtagcacctttgctcctcctgactgaagaaggcgtttgaagcctgcttctcgagactgatccacatgtaaaataaccttccacccactaaatgctccctcaacaatgccagattcttgtctttgctggattttttttctccatctcattgctgcaagtgctagtcttcgttgctgtacattgattccagtcaaaacatcaagtatggaactacttccccattcatagtcttcttcctgcacgaagtgtccagcagtcctgcaggcttcaaggtaggagcgatgaagcacccacttcccagctgccactgaggctaaatacttctcgtttcgaagtggatgtcccacaacaatgtgtgtacaggtgggatcaaagcactgcttttctatcaccaatccacctagtttctcaatcagatgacaatagtcaatacgttcttgaggattcagagatgataactgaaatatgtactgtttttttaattcttcatgagtctcctctatcgttataatcttttctctagggtgcggagccacaggggggttggcgagtggaaaggcaatactgggggcttgaggcgtagggatcaggtggctgtcttttatgggagtttccagttcttcagagattgggtgtttgggagcttcagtcacacgtatgtttccaggatcacagacagctgaggacaataaaatgctgcagtgtgacaggatccaaataagactaaaaacaaattctaggaaatattctcatctgtcttagtcaagatgaagtcaagcacaaactctggaatgtaaaaagtacaggcaaaaaagtatcctatccccagaacttataaataaatgcatcccatctgcatgtgacaataataacaataaagaaaaaatgcaatttattagcattaaacagagcaagtgtgttatctgtgggcttctcccaacattttccttaaataccaagttttcattgataagtgtaacccaaatttgtaacatgagagcaattctacacttggagaaaagcagaagcagaaataattctttatatctaatgggaggtcatc

SEQ ID NO: 53306 - DNA, 322 bp, Homo sapiens
  misc_feature (1)...(322): n = a,t,c or g
tccccaacttttaatttatcaaagagtttcctttaaaccttctctcttaagactttcattgctcaagttttacaaaagacataaggtcagcagttttgaataatataaatactccaaaatcaatgtctactgctaaatgcagaaaattctccttggttaaagttttacaaacatttcaagtcttaaaaattaggatctatgttttaaatattactttgagttaatacagatgtccaaattaatcataaggnaatctgctgggtcctcgggccgggcgcggtgggctcacacctgtaatcccaggcactttggggaggccgta

SEQ ID NO: 53307 - DNA, 1421 bp, Homo sapiens
  misc_feature (1)...(1421): n = a,t,c or g
tttttttttttttttaaggaaaaatagctttatttttaaaagaaataaattctctatttaaagcatacatgagatagtatctttcatttagtcctaagcttgattatttatgctcattgtaatattccagtgacattctggacataaatttcaagtatatcaccatatacttattgttaaatatcaaacaaagctactgactgtgagggaaaaatttcagtgattttttttgtttgtttttttgttacttaccctgagatactcatcccacagtatatctgagatttagctgaacatttacaaattttaacaaattttttttctttccattgcatgcatcgatatgccaaattctgcacttcaatccaggtaaaataatgatagtgtttgtaaaccagatagtgaaaaccagtgtgttttctaatactgcccatgatagacagagtgaaatcacagcataaacagtagccaggaacctatactgcaaacatttggcttcaagtatcttgcaacaaatagctactaatatgaccatacacggcacatagaacaccacagtcctggattgtagcatgcctgtaaaaccccattaaagcatttttttctcaaactttttgttcattattaccctccttcccaattacagaaattaaattcaaattatattagttttaactacaaatttcttcccaatgagataaattaatactaaggaataagattttgttggataggatgatattggaagtccacaagccatatctaatattttttcaccccaagaaccaatttttgtccccaattgagaatgtaatgcttaaagttgattaaataaattaaatagcctttaacattattagaaaaaaacctagtgggtaacaatggaggttgagatagttgacttctagatcatcttttttccatacttgctgtatgaacagagaataagtcatgtctttttattttcttgttttggagaacacaggaatagcataaaacctcatagcctgcaaaaatcacttaatctcactggactcaatgttcttgactattaattgaaagaactggtatagatcagttggttttcaattctggttgtactttcctagggcatataaaagataacaaaagataacaacgctcagccatatttacccagaccaattaagccaagtctctggaggatatgttctagccagtgggtctcaaactgtactgtaaatcaggaatcacctgacgggcttgttaaaccagattggtaggccttactctcagagcttctgattcagcaggttttgcgtggggcctgccaaatatgcattatcaagttctcaggtaatgctatgctattaggtctatgggatcacactttgagganccactgggactagggcatatgtgtaaggngtgactgtgcgtgt

SEQ ID NO: 53308 - DNA, 1213 bp, Homo sapiens
taattcggaacgagggagatttcattgattctttttaatgatattggaaaatatttatgcaattttattttttaaccttttctccatttcattagttatactattaactttgataatcacaaaactatgtggaagaaatcattctgattatattttatgaaagagaggggtagagtaaattttttaattagacaatgttgatatgcagaaatctctcaaaagaaattgcaaaggaaaaattacgttgagatgaaatgttgagaaataaggagtatcttaaaaacctaatttcttacactttttagggcaatcaacttatttccaaattattatttcatgctgttgtttccatgaattgtgtttttagcatagtatatacttttctaccacgttagcatttacactctaattactgaaaataaaggaagaagttggtgaataaaagccagggaaactgggtttattctcattttccaatagcactaatgtataatccctttaaccttccatatggtgctttgtgtgatgagtatataacattcatatacgttattagtgccttatttttttcacttgactttatttcttatctaaagagccatatattttttgtggagtgttctttggtccctctatttaaagtgctaaggaggaaagccatatctttagggatgtatataggctgcgtttgctaccttaatctactgtattatctctaaaacaggttagccaatgtatttttcttaaattcattgttcatttttaagctaacctatacaaatggatattaaacaccagaaattaaagccattaaaattgaattgtactttaaaaccataaaaaatgctaattaagtttagaacaggagttgaaatgactctcagttttatctatagctccaattaggacaaaattactttacaaaaagcattaaaaataaaagtaactgtatggtacttcaggaatttgaccagttccttacaacttattcctggcaatattttgtcagtaatatactttcatacagatgctagagaaccatggtgtctgctatttacatgttatttgttcccagtgagctttatcaacatcaaccctgtttatataatatgttattttgctcttcttgatctgtgccttttgttttagctttatacaaaatgctaggtttgttatattctttatgtatcataatatataattcaacttttcc

SEQ ID NO: 53309 - DNA, 403 bp, Homo sapiens
ctcagatattacaatagtttctggccatagtacttaaacagatatatggtatatctgtggtattaaattttcatgggggtgggggataattaggaactaaaatgtctataaaggcttcttaggggagcaagagaaaaaaaggttagaaacactgctttagtatgacagtagacacataaatttaatctctccacgtggtctccaaaaatccatacaaattaacaagtaaggcaagtaaaataacctatagtccatgcctacagtgtaactaagaggcagaatattaaacatttgtatttgcatataagtcaggaaataaaaatttaggaccagcgcagtcagcttcagagcctacaccaaagaggaaactcaggccagacatggtggctcatgcctgtaatct

SEQ ID NO: 53310 - DNA, 1275 bp, Homo sapiens
taacatattccattagatctaattagctatttatttcaacatctttatatcttttcacctgtactcatgaccacctttagaagtaaatggggttacaatctgctggctgaaaaataggtcataagtgatttttcttgaggttagtagcaaacataggcagaactagaattagaattctggtatctagggctgtttctttaagtcctaaggttgttaaaagcagagactctggagctagactacctgaatctaaatctcagcctttctgcttatcagccatgtcattttcttccatttgtacaaagcaggcaatactgagcaactaccttataggaataactgagttaatatctaaggggctttcagcagtacctgaaatatagtaagtgttacatatatgtttactctttttattttatttggaattgtgaactgataataattgaagcctacctgctagtggccatctctgctgccaggtgaaaagagcctgacttagaatgaagtcagcgaaggaaagcagagtggagagaaaaagagagactgagtcctgatgacatcatttatttacctagacctagctgcttgtgaatagagccctactgtgctgaatagcttctgtctgctcttttctattctgctccctgctctgtgaggtaggttcctttgctctcttgcttttggttgggttcaacaaatgggaagcaccagtgggagattagaagttgagaggaaaatgaaatgatgttatttatttccctggctcctttcctgccatgtcatcatcagttggctgtgttcctctactaaaatagtaccttatcaggaatcctatctcttctgttcccaagcagttaccccagttacctcactaggtttagttcctgctccctccctttaccccttttcacttagggttggtaatagcttacagttattactagccccagtatagttcactacaacttgttgctttacctaaaccctgctcatacatttgtaaatactgtagttgttttattacactcttctcaaatgtccccacttgaaatagccttctatttcttttggggactctgataaattcacctgtttgggtgaaataatagcacatttcctgaagtatatacagtgggacacatgatgttttatgggggaaagagttcttggtgaaattagtttgctgtacattacgttgtttccctcccagggattcagaaggcaaaacatattaaaggttctgaaaagtcctgaaataaacattttgaactttaa

SEQ ID NO: 53311 - DNA, 382 bp, Homo sapiens
tgttcttttgctattacagtgataacttcaatcctaatgttattaagcatatcgattcagggtatagctataagatgaagtcctaaaagtataatttagactaaatacaaatacccatttcgctagctgttttgtttcagaggacttgttgagcagcttcactaataatgccatttttgaagacatggcaggttcagaatcaataaactggaagaattgttcagagcatcttttttcagacagtgatgacattgattctgtatatgataaagtgattctgcttctctttgacaacttgcatctctcctacatggaagtaagttttattcctgtcaatgttgtctttgtgtgtgacagattaggattaaattatggtttgact

SEQ ID NO: 53312 - DNA, 233 bp, Homo sapiens
cccacccaagaaaaataataaattttatattttataaaagcaacattgctttcttttaaaattcattaaacttcctatcagggcaagattagattcatttttctcatatactatcacagaaaaagtgagaacaccaatgccaagtttagagggggagtttatagctctttgacttgttctttcatgttgacaatagagttttgttcaagtgtggaaaaggggatttgagagca

SEQ ID NO: 53313 - DNA, 637 bp, Homo sapiens
  misc_feature (1)...(637): n = a,t,c or g
ctgtgtgatgttttcaaccaatagccaaataattattgaacttacatgaaaaagagtgctaactataattttatttagattactttattctttgaaagtgactacaaggctattaagtacataatcattcattttatttactcagaagttgcctctccattactgttaacttgtttagtaatttatataattgcagtacttttaagtgttggacactgggattcaggttgtatacaaagtagtagctgacgaaaaatatgtatatttttgtgaaatgtatcaagccctaaagttcattttagagaaaggcccagaaaaacgtatctgtgtttaaaaacaaaggacaggtcattcgtcaatttgaatcatttttacttttgccactacaaactttttaattggcaatatccatcatccaactggatcttcatgtcagtgtcagggatgccaggttgacaaagtatttaacagatcctttcagtttttgttttgtttttttaattctaaaaaaaacaaatgttaggccaaacagatccctagatcccactcattggattctgggcggtattcctaaagtgggtggcttagggggtcagaattttctggatctttgccaatccaagctttangatttaat

SEQ ID NO: 53314 - DNA, 649 bp, Homo sapiens
tttttttttttttatgtaatttaaagaaatttattctttaaaaatattttcatgtacactttcatgactattttgaggggaacaaggagattatcctacagtcaatattagcttaaaaacataagtgacatgtataacaatacattttggaaataactggcataataaaaatgcaaatgtttgtagtgatttaaggctgcaagatatttaagatctcagattaaatgaacccacattagagtaatgcaaaccaaaacttgcaattttatgatttcttcatactataacccttaatactatgcataaagaagttaccccattcccaagtcataactagaaaggacaaagggaaagtctgtcagaaaaaacagtgataaatttgaatgcatagtacaatatgcatcctcctcctacttcaatgtttaacatactgacaacaaccccatttaataaaagaaaaccatgagttactatttaagcaaaaattatttttatggaaaaaaaaagttgagcttcttgcctagaaaaatcctttaatatctatgttacctaatacagtaaagccttttaaaatgtgttaatgaagattcaatttgcatgggaaatccactttcttcaatgtggataaatatttttcactggatcattt

SEQ ID NO: 53315 - DNA, 582 bp, Homo sapiens
ctacctttcaaaaaggctacaggaaacattttatgagcagcaaatattaggaagagagcagatacagaatttagtgcctttgagaagaatataattaagtggaattaagaggggttagaaaaaaggcaatttagaaaaatattcttgtaaaactttattgtttctatatgtgaacagaagattagacaaattccttactcttaagtattttttttaagctgaaaaaaaattattttgagcaaataaccaataagagacatttgtctattttatattaatttaaatttgttagctctaggtttcaataagtcatgattggctagaatccattttagctaccatctaaagatatggtaaagataatttagtaaaacaaaagttcatatttgccatgatttcagatatgtttgtcatggggacaatattagagttttagagatactataaaatagcttgaatttctttctgcactacatacttttgatagaaacacatttactacattgataagatgttatgtcacacctgtgaaaatgggagttgggcattcaggatatgctatagttaggagcccagctcatc

SEQ ID NO: 53316 - DNA, 400 bp, Homo sapiens
gggagtggtgtgattcccgaccaagatggcggccgtggggcgagtcggctccttcggttcttctccgccgggattatcctcgacttacactggcggccccttgggcaacgagatagcgtcgggcaacggtggcgccgcggcaggcgacgacgaggacgggcagaacctttggtcctgcatcctcagcgaggtctccacccgctcgcgcctccaagctccctgcggggaagaacgtgctactgctgggtgaagatggagctggaaaaacaagcttaataagaaaaattcagggaatagaggagtataagaaaggaagaggattggaatatttgtacttaaatgtgcatgatgaagacagggatgatcaaacaagatgtaatggtttggatcttaagatggt

SEQ ID NO: 53317 - DNA, 1938 bp, Homo sapiens
  misc_feature (1)...(1938): n = a,t,c or g
gcttggactgctttggattctttacagaaatgggcaagtgttgttagagaacatgttgacaaactgaaaatccctcctgaagaaatgaaacaaatggaacaaaagttgattagagacttccaagaatatgtagagccaggagaagacttcccggcttctccccagagaagaaatactgcgtcacaagaagacaaagatgacagtgtagttttacctctgggtgcggatacacttacacataacttgggcattccagtactagtagtttgcacaaagtgtgatgccattagtgtattggagaaagaacatgactacagagatgaacattttgattttattcagtcacatatccggaagttttgtttacagtatggtgcagcacttatttacacttcagtaaaagaaaacaaaaatatagacttagtatataaatacatcgttcagaaactatatggatttccctataagattcctgctgttgttgtggaaaaggatgcagtatttattccagcagggtgggataatgataagaaaataggaatattacatgaaaattttcaaacattaaaagcagaagataattttgaagacatcataactaaaccacctgttcgaaagtttgtacatgagaaggaaattatggcagaagatgatcaggtgtttcttatgaagctacagtcccttttagcaaagcaaccaccaactgcagctggaaggcctgtggatgcctcaccaagagtcccaggaggctccccacgaacaccaaatagatctgtatcatctaatgttgccagcgtgtcacccattcctgctgggtcaaaaaaaattgatccaaacatgaaagctggagctacaagtgaaggcgttctggcaaatttcttcaacagtttgttgagtaaaaagactggctctccaggaggccctggtgtgagtggtggtagccctgcaggtggggctggaggtggaagcagtggtttaccaccatccaccaaaaagtcaggccagaagcctgtcttagatgttcatgcagaactagacagaattacacgaaaaccagttacagtttctcccacaacacctacatctcctacggaaggagaagcttcttgaagataccaaataaagccatttattctgttttctgggataatgtaaacatgcctctgccttttccttcaaaagtgggaattagaaagctggagtgcttcttcagatggactaaatttatgtcgtgtgtgtntntntntntgtgntgtggntacccattttttagnaggagccgtacagaagaaaaattattctacattatgtaggattgctgtttgcattgccattttgcataaganagtaatttttgattttgaaaatctcaaaacttttagatctgaaatacagccatgtgatcgatcatattctaaaggctatttaaaacatgtaaaaggatttggggaaccggcagaaaacatgcagtttgggcatttgactgacttggaagtctaagcttattttagttataactattaaaatcatttttaaaaatttgttagttttgctgacagagaaaaatcgtcagttgtcagattttgcacaccacaataaatgtaccaccacacacggaatatgctaagaaaactatcagatagcgtttgatacactagtcattgtctcaatcactgatcctgtaagttgtcatcaaaatatgatttagaaatattggccaaggtgttgctttaactgaggagaaaagaaagcacactgcctaaatgtgtaaaagaaaaatgcagaggttattaaaatgtaaagaagtaacaatctttggatttgtctatacatatatatatatatatatggctttgccttaatatacccccttttttgtttgtgactttcaactgtaatcagttaataaagtatttattctctgcattcaggttcaaa

SEQ ID NO: 53318 - DNA, 4386 bp, Homo sapiens
ctgatatgtaaaattttacctctatttcagatagaagccaaagtaaaacatgaggaataaaaacatttatctatgtattcagaatcacacacaagttacctttacagttcaatttactatatagaaatcattgggttttatatttgcagttaacttttgaactgagattacaatattataacaaaaaactttacattaattcagaactttttagcataccaaattgaaatacataggttcaaatttcagatttatggcaaacagtcttcaaatacaatacagacatttcttaaaagttaccgtatcattcacatgtgatatttgcaactctgagctatttcatatagaacagctctcctgcagatatggcaaagttgatatgccatgaagttcaaggcctgtatagtcaagccaaggactcaaagttgcaccatctttaaaaaggtttggcatttctggaccacaacaatgcacaacatgtaaagaaggtaggaaacagttccccctccttgttaaatggttaaaaaaagttacatggtagcttggaattttgcataaaaccccataatataccttggaaaagtccaagggcaatttgatggcaatggattggggccctatatatatatttttttaatagaacccatgagatttaaatgggcattaatcaaatcaaaaaatattaagcacctactggtttaagagatttaaatttattagagattcatgatcaatttctttccacctcgaaatcaaggtgtaaaaaccagctattaagtgcattccaaacttctcctatgtagcacaggtagaattttctgtccattggcaccaaagtgaagtcacatttcctcttgggagacagaaattccacacctgaacacagagtaagttaggaaaaaatgacccctgttgtttattactattgtgattctgagatctaggatttctaatatactagcagtaaacaaagcaaattcctggcaacaactgtcaggttagtgatgctaactcccttcccccaaccaccataaaattttagtaagaaaagaattaaaagtaatgactaagcagaacaaattggaaataacaagaaactaaggggacagttcaaaccaacaacaaaaaatcctaaatttgaaatcactgcaactgaagataataagtgtgcttcaccccaacccccatcccaactctgaatttaaacattcccgtgcaaaagagcaacaggtttctggataaagatgtagcccttctttaagttttagtgctctgcagttttctgcaattttatttccctccccccaagtttattcaaagtatttaacagaatcttccatttcagccaaaagattgtgattcaaagatttactaaggtactctatgcattctatctatacagaaacacctatttattattacagttgatttatgcaggattaacatttttggtgttaaaattgttaaacatcatgcttactgcacatcaactctccataatgaatctgaacttcacaatgatttaccaaacactttacttaaattactaattaaataaatgaaaaatgcaccgagccaaacaaaacttaactgggctataaagaaaaaaacccttcaaaacagtccatatacacatctatttcaaaactacctttgctagctagcccctttcccaaagttttagcctgaaaaaacagtaaaatctacacaaaattttattgcaatcatacaagggttacattaggtcaacaaatactatgatgcaattttacatttattaaactacagttcaaagcacaaatttacacattctaaatacactaaacgttatctaatgaagtcacactggtcttctaacatttgatatatctgggtgaaagacatgaactttacaagactttaaacacaaatccttagtataaaaactgtgttcttgtatgtaaacgatttaatggggaacccaattaatgggcttccatctccactaagtcatccattttgttgcatattttattttaaacgcttaaggggtaggacaaactggtaggtttaaatctggatacattatctaaatctcccattatccccaatgaattatagatgaaagctgattttgtctggtcccaaatagctattactaatagtttttgttgccaaaagaattaagagaataagattgtttaaattatttttccacactggaatgttgaccagacaagcttaacctgcaacttcagatctaaagaagcgttaatgcctgtttaagcttcagcggaaaagctgtcttcttggctcagctgaatgcaagaaggcacaaagaagaagttcttcatcattgagtctgaagtaattccagcatcttgcatctcataccaatcactgaatgacatcatgtaataaatggctggcctctgaaaatcattaaaagcagatggttcatgggaaagaatctgctcccatgttatcaaagataagccaatctcccacattcagctcaggaagaagacagctttcccacaatttgatcaagctcatcacaggatggaccccaaaggctgcttgtaaacagaggctcatcttccttgtatttcttgtgaacctctggaatggtatttaagtcctcagacagtttacttgcaaaagaaccataaacaccatcattcatataatacatgaaggctggttcatcacttccggttttttctactccagagggaaatttatcattttcaacaactttctttgctatgatattaactgcgagtgtaaatgcagaagacacatagtagcttccgggttctgaaattatcttaacaccagatccttcaggaaagtagatatccaacagagggctgataacatgattaacctcttccaattgaaattcagttcccgtgaatcctccaccaatgtctaacatgttcatcgtaaagccaatttctccagccatgtcaaacacacatcgagcatcagatagagcatgtacatatacttgagattctttgcaagcactcgaaacatgaaatttaaccccaattatttggacatcaagttccttagcacattccaagagatgcctacagttcttcagggtagtgccaaacttcatgttaccctcttcacctccaatattatcttctgttgcaatatgtagtaagaccttggcatttgggtgattacgtgcaattttcttcaattcaatttcattgtcacatgtcaggatattcactccaacttttgctgcatactttatctgagacacttgcttgcaaggacttatgtaaataatgttttctggaggtacacccaactcttgcactaaagccatttcatttttactggaacaagcaaatccggttccaagagctgccaaaatctcaagtacagctggagcagagttgcacttcactgtgtagaatggctttatctgagccactacattctgccattgactgtgtttcttcacaatctttccaagatctcccacaaaaaatgcatttttccctgtcagggtatgttcataaacatagttatcaataacatttccaaggtttgttccttcatccaacaggccaacggagtagtttgcatcatcaataaatcctttcatctcagccgtattccacaaagccgaaagtcataaaccaggaaagacaagagacgggccaccaagcctatgtctgggtccttagaatatgcaacaaactgctacaaaggcttctacagttgattgtacttcagaagaaactgatacatctctcaaataatcacaagataattctggcagcaacagccccacttgacaccaagctggatgaatatgagtcttggatttctgaagtgaagacctccatggacaagttgggagatggaacccccctatcatcagctaggttcccaaggtggcctcagcgttgaagtcgaactgctctctatacagcacttctcctaggccctctgggtagttgtatacttggtcagaaagttcgccgtgagataacggccaaagagtcgggtaaagcgtcttctctttttcggcggaatttttaaagagggatgtggttaccttgagcagaaatacccaaggcggcctgggccataggctgcgggaacgacttgggggtaaaagcgcggcaccgacaccagctgtgtgcagcagctggcggcggcggccgaaggagaaatagaacagcgcaggcaaaagaagaaaggcgcgggctgggtgggaagaggattcggactcgtcacactgcagagcagcagagcgagaaaggatgagaagaggcagagaaggcgacggcagaagaaaaaaggaaaaactgcggccgctcgtgccgaattctttggatccactagtgtcgacctgcaggcgcgcgagctccagct

SEQ ID NO: 53319 - DNA, 569 bp, Homo sapiens
tcagaattgaaagtaattttttattgataaacatttacactagaattagaaatgtcagtagaaaaataaaatttaaataattttctattgtacaaagatttgatcattttgactgtagcagttagtgaaataacataatataaaaagttaagctgatctgagtcacaaccagccttatagagtgcacaaaaaagaaatgcaagtacacgacatttctgcatatggtctgctaatggcaccgatgcttcacattccaggaaatggttacttagggaaggttgatatgtgctgcagcataataggaacttaattcaaaccagagcaaccagaaaggatactggaggcaaaagccaaaatacaatttaaaatcttaaaaaaaataaggaacggtttaaaggtaattaatgaacttttcctcacctagtgtaaacatttcataagaagtaatattttgtggtcacaaaaaaagcacagatacctcttttagaatattcatgatgctcttgtgtatgaacttaagttttcatgaaatgctttcacctcaaaaccccgtattcaagaatcaagaa

SEQ ID NO: 53320 - DNA, 1063 bp, Homo sapiens
tttttttttttttttttatggtatcaagttaaaaactctttaatatctcaaaatatcttatcagattgaattatatccaatatcaatttgatggctatattcaacacatattaagaacctactgtgtaccaggcatagttttaagtgctagtgatatattggtaagcaaagaccttgctctcatggagctgtggtctggtgggagagacagataacaaaaacaaacacgtatataaatctgtgagaagtgttataaagaaaattgagcagggttatgagaataaagctacagaatgggggatatctcacacaggatggttaggcaatggctctgcggctccaggccctgccctactctctcacttttcctcagtttctccagatgtctcaagctcatttatgcctcaagatctttgcaaatgtttcttgtctgggatccccttcctcttcctgtcaactttttcccctagttacctcttacaatccttcagaactcagatgcaaatcactttctcaaggcctcaaggaagccttctgtggcctccggaacagatcaagttcaggttcctgcttatttaccccactgagctccttcattgtactgatcacatatataattatatgagtattgtttaagcctttgtcccctccagactgtaagctccatgaaagcaaacactgtgtctcattaacttattgttgagtccttaaaactttgtagtttgcggagtaggtaaccaaaaataattgtcaagtatctgaataattttcaatatcccagaatattcaattaagtaagtatggaaggcccctttcaaagcttgcttagaaaacaccatgcttaatcttataggccatctaagtaattttggtaatttttaatgtagcaaaattactcaagttggctttatttggttatgaatatcagtactaacttatgatgtcactatcctttcatttcaaccacgttcagtatcctaaacgacatgctgattgaactataatttaaaatgaataatcttttatttgtaaaagattgagtcataaataggcagaatcaacc

SEQ ID NO: 53321 - DNA, 357 bp, Homo sapiens
agtttttaggttgttaagttggatggaatacaatttccaatagtgtctaggccgacacccctccaccctcctttgcctgtcattcaagtcaataccctggagaaaagaggctgtgggggaggccatgttcgattaggaggtttaagagtccatcaaagtgtcatatgtgttaggtgtgaaatggcgacactgggaattactgttaataaggggtggctgcagcacggtgattgttatgagaacatccccaccgccccacttttgtttgaagactttcgtactgaactacatgttgtttactttcaacaacgtatacactacagttgacaaaagttaatctcggtgataagaatatgc

SEQ ID NO: 53322 - DNA, 3750 bp, Homo sapiens
ggcaggagtggtgtacctggtcttaaaggtgatgatggcttgcagggtcagccaggacttcctggccctacaggagaaaaaggtagtaaaggagagcctggccttccaggccctcctggaccaatggatccaaatcttctgggctcaaaaggagagaagggggaacctggcttaccaggtatacctggagtttcagggccaaaaggttatcagggtttgcctggagacccagggcaacctggactgagtggacaacctggattaccaggaccaccaggtcccaaaggtaaccctggtctccctggacagccaggtcttataggacctcctggacttaaaggaaccatcggtgatatgggttttccagggcctcagggtgtggaagggcctcctggaccttctggagttcctggacaacctggctccccaggattacctggacagaaaggcgacaaaggtgatcctggtatttcaagcattggtcttccaggtcttcctggtccaaagggtgagcctggtctgcctggatacccagggaaccctggtatcaaaggttctgtgggagatcctggtttgcccggattaccaggaacccctggagcaaaaggacaaccaggccttcctggattcccaggaaccccaggccctcctggaccaaaaggtattagtggccctcctgggaaccccggccttccaggagaacctggtcctgtaggtggtggaggtcatcctgggcaaccagggcctccaggcgaaaaaggcaaacccggtcaagatggtattcctggaccagctggacagaagggtgaaccaggtcaaccaggctttggaaacccaggaccccctggacttccaggactttctggccaaaagggtgatggaggattacctgggattccaggaaatcctggccttccaggtccaaagggcgaaccaggctttcacggtttccctggtgtgcagggtcccccaggccctcctggttctccgggtccagctctggaaggacctaaaggcaaccctgggccccaaggtcctcctgggagaccaggtctaccaggtccagaaggtcctccaggtctccctggaaatggaggtattaaaggagagaagggaaatccaggccaacctgggctacctggcttgcctggtttgaaaggagatcaaggaccaccaggactccagggtaatcctggccggccgggtctcaatggaatgaaaggagatcctggtctccctggtgttccaggattcccaggcatgaaaggacccagtggagtacctggatcagctggccctgagggggaaccgggacttattggtcctccaggtcctcctggattacctggtccttcaggacagagtatcataattaaaggagatgctggtcctccaggaatccctggccagcctgggctaaagggtctaccaggaccccaaggacctcaaggcttaccaggtccaactggccctccaggagatcctggacgcaatggactccctggctttgatggtgcaggagggcgcaaaggagacccaggtctgccaggacagccaggtacccgtggtttggatggtccccctggtccagatggattgcaaggtcccccaggtccccctggaacctcctctgttgcacatggatttcttattacacgccacagccagacaacggatgcaccacaatgcccacagggaacacttcaggtctatgaaggcttttctctcctgtatgtacaaggaaataaaagagcccacggtcaagacttggggacggctggcagctgccttcgtcgctttagtaccatgcctttcatgttctgcaacatcaataatgtttgcaactttgcttcaagaaatgactattcttactggctctctaccccagagcccatgccaatgagcatgcaacccctaaagggccagagcatccagccattcattagtcgatgtgcagtatgtgaagctccagctgtggtgatcgcagttcacagtcagacgatccagattccccattgtcctcagggatgggattctctgtggattggttattccttcatgatgcatacaagtgcaggggcagaaggctcaggtcaagccctagcctcccctggttcctgcttggaagagtttcgttcagctcccttcatcgaatgtcatgggaggggtacctgtaactactatgccaactcctacagcttttggctggcaactgtagatgtgtcagacatgttcagtaaacctcagtcagaaacgctgaaagcaggagacttgaggacacgaattagccgatgtcaagtgtgcatgaagaggacataacattttgaagaattccttttgtgttttaaaatgtgatatatatatatataaaattcctaggatgcagtgtctcattggtccccaactttactactgctgccgtcaatggtgctactatatatgatcaagataacatgctgactagtaaccatgaagattcagatgtacctcagcaatgcgccagagcaaagtctctattatttttctactaaagaaataaggaagtgaatttactttttgggtccagaatgactttctccaagaattataagatgaaaattatatattttgcccagttactaaaatggtacattaaaaattcaattaagagaagagtcacattgagtaaaataaaagactgcagtttgtgggaagaattatttttcacggtgctactaatcctgctgtatcccgggtttttaatataaaggtgttaagcttattttgctttgtaagtaaagaatgtgtatattgtgaacagccttttagctcaaaatgttgagtcatttacatatgacatagcatgaatcactctttacagaaaatgtaggaaaccctagaatacagacagcaatattttatattcatgtttatcaaagtgagaggacttatattcctacatcaagttactactgagagtaaatttattttgagttttatcccgtaagttctgttttgattttttttaaaaaacaaacccttttagtcactttaatcagaattttaaatgttcatgttacataccaaattataatatctaatggagcaatttgtcttttgctatattctccaagattatctcttaagaccatatgccccctgttttaatgtttcttacatcttgtttttactcatttctgactggacaaagttcttccaaacaattctgagaaacaaaaacacacacgcagaattaacaattcttttccctgtgcttcttatgtaagaatcctcctgtggcctctgcttgtacagaactgggaaacaacacttggttagtctcttttaagttacaaaaagccaattgatgtttcttattctttttaaattttaaatattttgttataaatactcacaggataccttatttccctagctatcatctcctgacttaatgttttttaaacccaccaatataaatttaattaaagatatatgttgtaaggatggtctgttgtgtatctcttcagcctgtgtggaaaaaacccctgctcatttacagatgattaccaatctgcacatcaacaagtatctcttcccagggaatcagtttctccacgctttgatcactctgttagtagatagaaaacatatagtaatgtaaactttttccaatgaagaaaactacctattggaagacatttccaagataataaatttcttgacaacattgtgttaatggctaagaaaggaaacaactggcttctattt

SEQ ID NO: 53323 - DNA, 1938 bp, Homo sapiens
ccctggggccgtagtaggccgcagcgaggaggtagagggggcgggggtcgcactagggtgtccctagagaacgaggactctgaaggcgggacatttgggcgacccccgggcggggccagccattaaacagtcccacttctgtgccagacactgaactgggctcttgacgggcatcatctcttaatcctcagaacatcccagggagctccacaggatccccatatcctgggccatgagtgagttgaaagactgccccttgcagttccacgacttcaagtctgtggatcacctgaaggtctgtccccgctacacggcagtgctggcacgctctgaggatgatggcatcggcatcgaggagctggacaccctgcagctggagctggagaccctgctgtcttctgccagccggcgcctgcgtgtgcttgaggccgaaacccagatcctcaccgactggcaggataagaaaggtgacagacgattcctgaagctgggtcgagaccatgaacttggagctccccccaaacatgggaagcccaagaagcagaaactggaagggaaggcaggacatgggccgggccctggcccagggacggcccaaatccaaaaaccttcagcccaagatccaggaatatgaattcactgatgaccctatcgacgtgccacggatccccaaaaatgatgcccccaacaggttctgggcttcagtggagccctactgtgctgacatcaccagcgaggaggtccgcacacttgaggagttactgaagcccccagaagatgaggctgagcattacaagatcccacccctggggaagcactactcccagcgctgggcccaggaggacctgctggaggagcagaaggatggggcccgggcagcggcttgtggctgacaaagaagaaaggcctcattggggccactgaccgaacttggacactaaagatgtggatgccctgctgaagaagtctgaggcccagcatgaacagccggaagatggatgcccctttggtgccctgacgcagcgcctcctgcaggccctggtggaggaaaatattatttcccctatggaggattctcctattcctgacatgtctgggaaagaatcaggggctgacggggcaagcacctcccctcgcaatcagaacaagcccttcagtgtgccgcatactaagtccctggagagccgcatcaaggaggagctaattgcccagggccttttggagtctgaggaccgccccgcagaggactccgaggatgaggtccttgctgagcttcgcaaacggcaggctgagctgaaggcacttagtgcccacaaccgcaccaagaagcacgacctgctgaggctggcaaaggaggaggtgagccggcaggagctgaggcagcgggtgcgcatggctgacaacgaggtcatggacgcctttcgcaagatcatggctgcccggcagaagaagcggactcccaccaagaaagaaaaggaccaggcctggaagactctgaaggagcgtgagagcatcctgaagctgctggatgggtagccctcacccctgcctcaggctgattatctggcctaggggaggggaagggaggcccacttccttctttgggcacaggaaacattggcctgtggctgtccctcaaatggcggcagtctctagagggccgtggcccttcccctgaggtcttttggcctagctctgtacaaccaggacacaggaagccctgctgggctagcctgaggcctagtctctgcttggtccccgagatggggttggaggggacttcgtttctgggtcttcctcttcccctctttaccatcccccactccctaatcccctacccctgtctccccttcaaggacttctcccttgtggttttgtaaagtgcaaacttaagaataaagtgactgctgtggtttttcaaaaaaacaaaaaaaaaaa

SEQ ID NO: 53324 - DNA, 456 bp, Homo sapiens
agaagttaaacattagaattttcttacatgaattgaattatcagaaaataatttgtattgtcaaaattccacagctgtgccaacttacagaaaaaattagtgcatttggtattaaacatttaccattatataattattgtcttgatactaaattcaggcaaaaccagatcagttacttagagaatgagatatccaaaataggatttaataattcttcaaatctttatatggatccaacactccagtctcttttctctgcttagtaaatattgctgattgttttagggggaattgaccagtgaacacttagaagcttttgttttctgattttaaaagataaaacgtattggaaaggttactgcttatcaaagtaggaaagctaactgtcctctagcgcccaaaggtatatactgaggaattgagtgggaaatccccacccaggttttcccattggca

SEQ ID NO: 53325 - DNA, 1205 bp, Homo sapiens
caggttgctccactgtgcctaggaagagctggagcttgtgttgtgactgtaaaattataatttagtgccctgttttctacatgaagacaccgtcttcctttattaatttagtataattattctatcaatggatacatttttagtaaatgtgcattgtcacaatcctgggcacaaagtgcctgatgtcaaaatgaagatagtaaaacaagggaggaagcagtggatggaccaggattaattcctttcatttcttagtaaattaaaacctgcagctggtggattgtgaacacacattcccgaagtaataagtgaggacgaatgcactgctctggaacataacccagtgctaactggggggtttcatttattcagtcaagcacatcttactcacatccagatttattttcctacagtgcaaacacaccagatgaaactttaaaatgttactttttgtaagcttatcataaatgagttgcagtaatttgtttgcttgtttgtttaaccacaaccactattttaatgatatactaaagataacactatttagttttttcagaaacatctgcattatatgtgtgttggttgtggattttgtttctaaaattggcttagtccaataaataaagaaaagcattaaggacttaaagcaacaataaccaaataaaaacttgataggatctttgaagtctatttaaatattcattccattacatctagactcaccaagaactacatgttatgatgttaagttgaagttgaaacatgatgttttgcattaaatttaagatatgcaaatttatgtagagaaaataaatgttatataccctataatctttcacctaattagtatttaattatatggatttgttttatattataaaagatgttttgattttgtcttttgatattgacaaaattgtttggatatccttatgttctcaagtctgtatctgcctcccctgccttatttcttatgttttgccacagttaacccattgtgcttctttgtaatcaaacagtttgtgggagaatgggcttattgaatgtctaaaaaataagtttaaagtgtttgttaccctaagttttttacatttttaaactctaattacatatgtgaatgttattactctcagtgaattgttattgtttgcaaaaatgcactgggcagtaacattttgtgataaatcctataagatataagtcaa

SEQ ID NO: 53326 - DNA, 503 bp, Homo sapiens
  misc_feature (1)...(503): n = a,t,c or g
tggagatgtaattcttacaacaacagttctgatcatggccatggtgatgactttccaggtctcgtgttcaagtggtgccagaatgcaggagccggtgggcagccctgaggggttgccttggccgcagcctctgtgcacgctcttcctggtgtcctcttacccggtagctgtgcgcttgttcccgtgagaacagcctgcttccagagtgcccaggagtgctggtcagggacagtgcccgtgaggctgcagaggaggtggggtccatggcccacccatctctccctcgccagcagccctggccagtgtcatcctggtgtagaaagggttgcgcacaggataggagggagccacagttcttgcttagctgtgctcacgaccggcttgcagtcctgtgtttcttaagattgtatttggaatggtaatatccttagaattttgggatattgagcttcatggattttntctccaaaacaagccagcacaactaactgtagcagaattgt

SEQ ID NO: 53327 - DNA, 742 bp, Homo sapiens
gcggcacagagcaggaggcggtctgtcacctcggccactgctgacctgggctggcctcccccagccctcccgtggcggacggcaagcgatgctacaggcctaagttattgtttgcataaaaagaatcatgttccctgtgtacatttaagaaaaaaacaaaaaaacggaaatgtcagaattgtatggaaataaaacttgtttgaaaatttggaatagtgctgctgcccagcttatttttctggtacttgtattttcacatgttaaatgatctttatatatgttgaattaacaaatattttgagtttctgagaaaaaacaaaacatattaatggtattgaaatgtgttagtagtctggctgtgtgcccaaaattctgtttcgcagcaaaagtgaagacctgtatgtaaagaaagtataacaattatttctttgtattttaggggctttaaccggaacatcgtctagctggtgttaggaatgtttgcttaatttccagacttttttttaaaaacacatcgtgggttttttgaggctccaacctgattagtgcatggtcagccctcaatgaaggctgaggcatctctgactgaggtgtttttgtttggttttgttttttaaaatcatgtatttgctacaaagtattgtacttgtctcaatgggaatggtgtaaaaaacaaaaggccttatgtgatctgtatcatagttaataaatgaatcttgtaaaaaaccaaaaaaaaaaaaaa

SEQ ID NO: 53328 - DNA, 233 bp, Homo sapiens
atgctgctgcagcttcagcaatggtgtcttcatccgccccgtcggtgtacagcgtgcaagccctctctctcctggcagaggtactggcttccctcctggacatggtttatcgaagtgatgagaaggagaaagctgtgccgttaatctcccgtctgctttactatgtttttccatacttacgcaaccacagtgcctacaatgctcccagcttccgggctggcgctcagctgctg

SEQ ID NO: 53329 - DNA, 1255 bp, Homo sapiens
  misc_feature (1)...(1255): n = a,t,c or g
ttttttttcactgtttctcatagagctctattgtggcatataataataggtactctatataaattaaattaaaaataaagctccagcaggttgcacaggttggctgttaataaatatatctctgggtaattgtgccccaagaccagctcacgaccactctccctcatccagagaattatacaaaaataaatacaggctcggggggtaggcggaggacatgcccagttccactctaaaagttcccctcactcacaccatctacccgttccctcatctccactggtgtcaccacagggagccctgtgttgactggagagcttggggatgagaaggcctctctttcagttgagcattctcagaagcaaaggacccaggtcccctcactgcacaggccatgtatcccatcttaagcctctgctgatcccacaagcagagcctatgagaaccaagccagagagaggcacagcgcaagcaccaggagggacacaccgctgttcagagccacagggaccaccactagcccggccaggacccccagagtctgggtcaagggcccccggagctgaggaggcagtgcacacacacattctgcagggactgctagggtgggagacttctttgggggttcaaggcttgggcctgcatccttttcatcctgggagctcacatgaggcctggctacactagaganacagacttcggcccccaagggactgaggagggtgggattttgcccctgcagaaggacgggagaggctggctccttgccagatatgggatccaagctgcctgcccactcactggtgacctctatctgggcttctgtcccggcctcccccagggactcagtcaccccagctatcaccctattcatgtgcaaagagctggtgtccttgcccatccctttctcaggatccccaatgaactgaccctctgtacccagaaccacagggccgtcacatcctgagccctctgcccatgggagccacacatctcccatcgtggctaccacagaacgggccccggagaggatttctggaggcgattccttggggctgtccccttctgggctggagggtgtgaacagagagcccctcttcaccctccccttcatcatcagggtcttcggtgtccttgatgagctccacgccacgccccagccgggcatagtgcagcgtgatctcctcagccagggcgctgttcaggcccgctcagggccaggccacttcaagatcaggtcgcctcatgccgaatc

SEQ ID NO: 53330 - DNA, 89 bp, Homo sapiens
ttttttttttttttgtgttgagcagaccttattttcattacagtaccagcaagttcattctcaattcccttcgaacgcagagattctgc

SEQ ID NO: 53331 - DNA, 739 bp, Homo sapiens
gcccggacagctcaacaccaaagctttcgcgggcacagcggccgcagtcgtgcacgtcagttggcagggtcactgtccacagcaccccggttagacgctcatctgggccagcaccacaaagcctgctgagcgcacggcgtgtgtcagccttgcccacacccgccagccggcgctgctctggccttccaccgatgacccccaaaacgatgcccagggccgtgggctctcccctgtgtgtgccagctcggagacgttcctctgagccccgcaagaactctgcaatgagaactgaaccaacaagggagagcaacagaaagacagattccaggctggtggatgtgtcccctgacaggggttctcctccttcccgtgtgcctcaggcacttaacttttctccagaggaaagcgattctactttctccaaaagtactgccacagaagtagctcgggaggaagccaagccgggtggagatgcagcccctagtgaggctcttcttgtagatatcaaactggaaccactcgcggtcactccagatgctgcaagccagcccctcattgaccttcctctcatcgacttctgcgataccccagaagcacacgtggctgtaggatctgaaagcaggcctctgatcgacctcatgacaaacactccagacatgaataaaaatgtggccaaaccttcaccggtggtgggacagctcatagacctgagctcccctctgatccagctgagccctga

SEQ ID NO: 53332 - DNA, 302 bp, Homo sapiens
agattttcctccaccatcccaagtcttaccatgagttgcttaaagagaaccagacccatgtttatccctttgaaagaaacctgaaccaagccattcctctggactgttcttccatccactggaccaataactcatagtttgaaggatttttacttaatggaagtgagaaaacagccagatcaaaagaatttccaggagccaagacagaaaacatgcagagcattagacagcctaaatggagctggctagatatgactccagttgtgaccaagccatagtgccccctaagcttgggtgaagag

SEQ ID NO: 53333 - DNA, 620 bp, Homo sapiens
ttttttttttccatttttagttctttatttcctgatcctggcaatatctggtacacattaaatgttcaacaaatgtttgctgaatgaataaattaatgaacaaataaaacagtattgattccacatgttgtaactttgtaataagtaatttgttacttaaaactatctttaatatcatgccccctctaaaaaagaaagaaaactagtatctcagcctattttcaacagttcgttaatcctcatgttcatttattcatattcatttacatggtactaatatacactggcacaatgtaggattaacttgcagcacctactcttcattcatattcactattgtgcctatagattagcaccaaaaaaccaatttctaacaaaatatacctatgaagtatcaatagtatgaacattgcgtgatcaatttttctcatctaagcctatctctaccttcaaatcaggcccttttcatgataacagcaaagtttaacctctgatttctctttgatacaaaaacatgccataaagcaacattttctgctagttttcctaagagaaccactttatgtttcttccccctttatgttattagaggcaaaattccattacagcccacgcgtccg

SEQ ID NO: 53334 - DNA, 358 bp, Homo sapiens
aacctggggaaagaatttttatttatagttacattaaacctcccccaagaggtgaattagatacacatttttacacactcatatttactacattcaagctaggggaatttagataaggctatcaaacagaaaaggaaaatcaaatattgaccacaattttcccaaatcctgatcttcttcataactttggctctaaaagattactatgtaattattatgggaaattcccttttatacccaaaacatcttcaatggtatatacagtttaacaaatggttactctattttcaaaaaggtaaatacttctaggttgctcttttaaaaaggcggggaggtttcttttccatggttccatggc

SEQ ID NO: 53335 - DNA, 689 bp, Homo sapiens
tttgctacggagtgcatcggacgtcgaagcctagagtctctgcgtctttccctcttccgctgcctcattcctttccttcctagccttggtcgtcgccgccaccatgaacaagaagaagaaaccgttcctagggatgcccgcgcccctcggctacgtgccggggctgggccggggcgccactggcttcaccacgcggtcagacattgggcccgcccgtgatgcaaatgaccctgtggatgatcgccatgcacccccaggcaagagaaccgttggggaccagatgaagaaaaatcaggctgctgacgatgacgacgaggatctaaatgacaccaattacgatgagtttaatggctatgctgggagcctcttctcaagtggaccctacgagaaagatgatgaggaagcagatgctatctatgcagccctggataaaaggatggatgaaagaagaaaagaaagacgggagcaaagggagaaagaagaaatagagaaatatcgtatggaacgccccaaaatccaacagcagttctcagacctcaagaggaagttggcagaagtcacagaagaagagtggctgagcatccccgaggttggcgatgccagaaataaacgtcagcggaacccacgctatgagaagctgaccccatgttcctgacagtttctttgccaaacatttacagaccggagag

SEQ ID NO: 53336 - DNA, 164 bp, Homo sapiens
taaaaatagctatttttttaaaaattggtgagaagaatgacattgttttacatttttgcagatctctttaatgtctgacttcataaaggatagctgaattctcatatctgcatatgtctgttacaatatactgtttgggttaaagtatatgaagaaaatctggt

SEQ ID NO: 53337 - DNA, 407 bp, Homo sapiens
gtctagtgagccttttctcctgtctttatgtttgcctgtctgattatctgtatgagtgtcagactgaacacattcggatattttctcagccttattgttgccattgcacactctgataatggacacatagtgtctaatttttcctccctgtccaatgacaggtattatcttcacattttgttgtatattatctccgtttttctttttggcatagtaaattccttgccactccttgcctatcctgatgcatgaatttatagtatcgagcaagtcagcctttttttcatttataggcacttctcctaactccttccctattaattcacctgactgatagcccattgttgtttcaaatgcaggatttgcatactgtataaaacggtcttcgcttgtaatttcaattgcat

SEQ ID NO: 53338 - DNA, 480 bp, Homo sapiens
ttttttcagtttgctgaagctgatttgtaatgattggcactcttcagccaggggagtgggtaggccatagccaaggatcgattccccaaccacagcaaaggcaacactcttcctccagagatcaccaagcccctcttacctccctccctccttcccaaggctggcactaaccaggtaccacattcattgttaaggaatggctgatgactgctacacgtgttgggaacctggttggggctgtgcagtttgggctggaaggagagatgccagccctcgtgctgcctctggtccctgaagtgtcacctctctcaggacctctcctctggcctgtggggttataagtgatggatagcagaaagggagaactgactcctgtcccaaatagctcctctgccacctgtcctgcagtggggcctgtgtggggttatggattctagatcctagacagaggctggggtcagctgtggatgggggtgggtt

SEQ ID NO: 53339 - DNA, 709 bp, Homo sapiens
tgcttaattctttaaagtaaactcttattgacttggatctaaatagtttgtgaatacaaagtctgaggaaaaaagtgtttgctaaaaataaaaacaacacttgaatgatgtttgtaaggcagttttaatttcttagaaaagctgaacaaatggcacaatgcaaagagcagaagttttggaataaatagattgaagccattaaattattggataaaaatagtttcaggttgcttttggcctaggttctcccctccccccatcactatccacttcaggaataaacattctgaaagttaattttacccattcaggtagcacttatttctagacagttgccttatcaaataccatatatgttgtgccatttaatctcacagttacctgtgcattagagattagcatcaccacttgatatatcctaatattggtacaggataaacactttaagtaatcagcccacaattactcaccaagaccttaagcctcccaaagtataaaccattcttatgttcctcagtgtacatccatagagtctaagggatgtaaggccttgttaaagccagttttgaccagaagcagcaatgagcctattcctgtttgttctccatgttaatggggcattgaaaattcactgattaatcaatccctagtctgaccccagtgttatctatgcaggttcacaaaacttttagattactttacaccccct

SEQ ID NO: 53340 - DNA, 511 bp, Homo sapiens
cggacgcgtgggacaaagatcattaatttgataatggaacttaacagaccattctttccttttatacattttagtatcatattcaaaatgccctcccattctgtccccaagttattttaaaacatctccagtcttgctttttttcccctttagctcataaatgaatagtgctggaagatatctcaggagcattctccctgagatgatgtcttcagtaatgatcgcacgtattggtgttgattccatccttgaagttactttcctttatctttcacagtggtgtttcttcactagaggttttgctgtctgattaacttctctgccaaataaatggacttttgcttcataggtacacaaacatttctaaaactttttttggaaaatatatttctttcttaaaaaaacaaatagtgcatgcacatttttaaaaaaataaataaaaaataatctaccccaaaatgaccagttaagatttactttcagacaactctgtgcatatttacatatgctt

SEQ ID NO: 53341 - DNA, 633 bp, Homo sapiens
gacaaattacactgcctgaagttgcagttcccctttccctggggagccccaagaacagagtcaggcaaggggtggggagtccagggatcttggggacccctcctaggagagctgcagtctcttccctcaggggaacatcccagaatgcatatcgatcagctctcagccaggcttcgacaatctcgcagcccccactaggtggacacattaatgatttggtttctcccctgggcagccaacctgccccagaggcaccagacctgggctttcagctttgggaccaggctgcccaaaggtactcctttatacacccggcaccttccacgaaagatggtacttcccaagcaagcccctatgatttgtcactatagatggaaatgtgtggcatgcacatgagttgaaattcttttatgcatttttttgaagaaaaaaaaaaaaaaacaactctgaggacataggggatgtcagtttcctatggaagagacacctctgacccgttattcttataatcaaaatctgaagggaaaaaaatgttttagttctttccccactcgttgggttcaactagattaaaaggctgattttcagaaaaaaaaaaaacaaacaaacaaaaaaaacacaacaacaaaacaa

SEQ ID NO: 53342 - DNA, 1554 bp, Homo sapiens
tttttttttttttttctgaaaatcagccttttaatctagttgaacccaacgagtggggaaagaactaaaacatttttttcccttcagattttgattataagaataacgggtcagaggtgtctcttccataggaaactgacatcccctatgtcctcagagttgtttttttttttttttcttcaaaaaaatgcataaaagaatttcaactcatgtgcatgccacacatttccatccccaccccaccctgccccaccctctacaggcacacatattcacacaccaaagggactccttcctgtaactggggaacagaatgtaaaaaaatccatccaagtggccaccgataccagaaataaccaaatgcatttacactcacaacatcagtcaactcacatgcacaaggagaagcggtctccaatcggagcttagagccaaaaattacaaatggcagagacttgagctatccataagataattttaaaaatccttccactggacactccccttcattacaaaagtatgcaaacaatcttgctataaatggaaaacaggcgtgtggctctctccctgggacatgagggcatagctaaaattccctgggtggaattaatgcctggaccattgctcctccctttcaggacaaaagggaaaggatgaagaggagcagcagggtagggacccacctcaggagcaggtggggcaccctggagctgcctcaggggctgggaacgtgttggcatgtgaccagctgatggaggagcacagtgtcaagtgggccacgatggctgtagagaaacccaagtgctctgcacccgtaggagtccagaaggtagaggtccacggacaggacaggcctggcctgctttgcttcctccacctaaggccttgggaccgatggcgtccgtctgagaggctgcatgattattttagggttgcaggaaggatgcttccccatctggaccgtaagtgcacaaaccatgtctatctggatctcaaaagatgacttcccctttacacaacccccactcccctgccactgcagatccccagcagagtggtgggagatcttggcaagtgggaaccagaatgctgttgccacacagcacacagtctgaggcacattggtggagggttcagaggaacgaggagaagagaggaagaggaatctgtgacccgccttgtgactggtgggcagattcaaagtctctaaccgctgctgctgagcaactgggcatctgcttcttggaagaacaagaaaggggtggggtaaagacttgaggcctgggttctaggttgggcaggaagggatggggcagaagtcagggttccatctatagtgacaaatcataggggcttgcttgggaagtaccatctttcgtggaaggtgccgggtgtataaaggagtacctttgggcagcctggtcccaaagctgaaagcccaggtctggtgcctctggggcaggttggctgcccaggggagaaaccaaatcattaatgtgtccacctagtgggggctgcgagattgtcgaagcctggctgagagctgatcgatat

SEQ ID NO: 53343 - DNA, 679 bp, Homo sapiens
tttttgttttttttttttttgtagaaaagaatattttattgaaacagtttctcaattaacaatggagcaaagtacaatttgactcaaacctgtccaaccagcatcaacagctactgaaagaattcaaacatacagaagaggtgggggtgggggctgagagccatcctccactggggcctcagcttcctccttgagctccacctgctccccaggctcgtccttgctcccctctgcagggctctcctcttcctcctgggaaacaccacaggcgccccagggaacgatcaggagcagagcctccaggcaggcctggctcggcaccggcacacccatggggtgtccatacaggtgactgctgtatggaaacggtcaatggcctgcttggactgtggcaatctagctggacaaaggaagagcatctgcaatgaggggaatgggccttgggagcaccagtcaagaaacagctcagagcccagaggatcctggggagtgaatggttaacacaacaggggcaggggtggcctaccctcacccccttcctctgcggttactacctgcatcccccaccgtcctccatgcttccctggctccatcctgaactcacctggacagtatcagtaccattctccttggcatctggtgtggtaccgcctccaaacaggctggaaatggtgttgcc

SEQ ID NO: 53344 - DNA, 423 bp, Homo sapiens
ggttttagtcagcctgtggtttaatttaaaggaagacctaataggaagaagattaaaggaagcttttagtcagcctgtggctagatttattgatttggtgatcaaacctgtgctatttcctgaatttcagctaatggccaactgtggtcaaagaatggctttcagttaaagttttgacttcttattataaataatataaagaatgtctcagtaattagaaatcccttaataagtagaacaaatgtggcaagtaggactcctatcggtatacaaattccatttctttttataagaaaaacacataaaccattatcatttattcatgagccaaagccattaagaagataaatccagttatcaagcttcctgctctgaagtttggatcattttatagatccacgcaatagagagcttccttcctat

SEQ ID NO: 53345 - DNA, 430 bp, Homo sapiens
gaaacaaacaaacaaacccacgagggagatcagtgtgaagggcattgccaaagtggaatcagtaaggcttggcagttgaccttgtttgttggagagaagggataagattttaaagctacatgtctgaaagaatgatgctgctgattgaaataaaggaagaaaggatgcatttcgggctccaacctgtcctaggaaggcctagacctcaaacaccaacacctccatgcatttcctctttggctactaatgtcttttccctgacttctgcctctccagctctctgggctgctgcttccacctgttcatctgacttaggaccctccctgctggggtccttgttcacctactcatttgggtgcttcgtctgccatcagtacctccattggcagctgggtggggatgtcagtcaccatctcttattatttgcttt

SEQ ID NO: 53346 - DNA, 369 bp, Homo sapiens
ggcattttagaatttctagtgcatcacatgtttatgtctaaaaaattaaatctcttttctactggtgttgtccataactaatgcataattaagccatagcagcgagaagttgagcagaaatgaaagcaccatacctgagccaacagactcttccaatgtgagacccagtttacctctggtcacttgatatggttaaaatgtgagcactagaagcctttacggagcatctagtctggtcactttaaagaccacagatgattggcccaaggttatccagctgcttcatgacactaagaatatgatccacctttttcttgatgataattaacctactagtttgtgtctgtcaatctgcatgaattggggttg

SEQ ID NO: 53347 - DNA, 596 bp, Homo sapiens
cctggctctcagatgtgcccaagagctgcttctggccaacaactgggtgggagcccaggaagccctgcagctgcattgaaagtctacagggtcagagattggtgttttgccttctggagctactgtccaggcatctggaggaaaagcagctttcatagggcaaaagctcctcctcttaccacacttggaacacgggcaccgaaggcatgttcgtggagagggtgactgcagtgtggaagagcatcttcagccttgacacccctgagcagtatcaggaagcctttcagaagctgcagaacatcaagtacccatctgctacaaataacacacctgccaaacagctcctgcttcacatttgccatgacttgaccctggcagtgctgagccaacagatggcctcctgggacgaggctgtgcaggcgctccttcgggcggtggtccggagctatgactcagggagcttcaccatcatgcaggaagtgtactcagcctttctccctgatggctgtgaccacctaagagacaagttgggggaccattcaatcccctgccacaccagctttcaaaagtttggaggccttttttcttttatgggc

SEQ ID NO: 53348 - DNA, 1036 bp, Homo sapiens
caacctcagctgcttccatccagctgacatctttggtactagtgaccctggtggcctggccagctggacccacagctattctggctgtagcttcacatcaggcgtcctggatgagaatgccaacctggatgccagctgcttcctaaatggtggccttgaagggtcaagggaaggcagccttcctggcacctcagtgccacccagcatggacgctggccggagtagctcagtggatctcagcttgtcttcttgtgactcctttgagttactccaggctctgccagattatagtctggggcctcactacacatcacagaaggtgtctgacagcctggacaacatcgaggcacctcacttccccctgcctggcctgtctccacctggggatgccagcagttgcttcctggagtccctcatgggcttctccgagccagccgccgaagccctagatccctttattgacagccagtttgaggacactgtcccagcatctctaatggagcctgtgccggtgtgaggaccaggatgtcttttcccagccccaagagacctgttgctgctttcttgtaattatggggctccccagagtctgcgtaacagtctcccactggctggctcacccacaggtgccatgtgcacactcctggttttcaaacaattctctggatttatttatttgttttaacttttctgtgctgaagagaggactagggggagggggcttcccctttcagctgcccggccccccacacccacagcttgctcttctatctccacaacgtgagcctggaagaggagaaaatgtggctcctctggagcttggcagaccacttttcggtctttgcgtgatgttccttagcccaaagacggtgagacagggctgaaatcaggtggcttctgccaccctgagccctagacccatgggtggctaaatccactggactgtgaagactataatttatttccataatttatttggagattgaggaggctttggttgcacttctttggctggtgggtaatgccaggggtgggg

SEQ ID NO: 53349 - DNA, 732 bp, Homo sapiens
aaaacatctgttgcagcgagccccagattattgcccagagacaatggttgaaatttggaattgtatgaattcatctttgccaggtgtgtttaagaagtctgatggctgggttggcttaggctgctgtgaactggctattgccttggagtgtcgacaggcatgcaagcaggcatcttcaaagaatgatatttccaaagtttgcagaaaagaatatgagaatgctcttttcagttgcattagcagaaatgaaatgggctcggtttgttgcagttatgcaggtcatcacacaaactgccgagaatactgtcaagccatttttcgaacagactcttctcctggtccatctcagataaaagcagtggaaaattattgcgcctctattagtccacaattaatacattgtgtgaacaattatactcaatcttatccaatgagggaacccaacggatagcagatctgtgctctctgacatttagtctatacgagatactgctggagctaaggagatggcagctcaataaaaaagcagaaagaggttttaagggtagaacaaccgtctccatctttgccaatacagaggaatctggaaaagaaggcgccaaacagatatgcacagatttcttccaaagtcagagaaaactacttcaaagaagcccttctgaattctgtaatatggttgaaagtgtttttttatttctgattctttgagaaaattaaagcagagccaaactg

SEQ ID NO: 53350 - DNA, 553 bp, Homo sapiens
gggtccgctgcagggcaggttcagcagcaacagcagcggcgacaccagcagggaaaagtgacagtgaaatacgatcgtaaggagcttcggaagcggctggtgctggaggaatggatcgtggagcagctgggtcagctctacggctgcgaggaagaagaaatgccagaggtagaaattgacattgatgatcttcttgatgcagacagtgatgaagagagagcttcaaaattacaggaagctcttgtagactgctacaaaccaacagaggaatttatcaaagagctgctttctcggataagaggcatgaggaaactgagccctccgcagaagaagagtgtatgattctggaacagggtgaaactctcccagagacgaagaaagagtcctgggatttgtacttcatgaagacttttgtgaaagaataggtgtccttatgaacaacgtttttgtttttttttttttcttttttggtgtgaaggtgggggggtctattagacatttattcaagagcgttctttttttggttttaaaggtttttgttaatgtaatattt

SEQ ID NO: 53351 - DNA, 440 bp, Homo sapiens
  misc_feature (1)...(440): n = a,t,c or g
gcagctaggctatgcctctcatgatcatgacacgtagtggaaattttcctggcttctatacatcatcatctctgcctgattggtttgccatggctctttgaaacagttactcttgtcctcattgtagagatggcgatactaaggcagaatatggctagcctggacttctttttgtggagactggattccaagattgaaagtagaagctacatgttttctccaagcagggctttcagacttcacttctgcaacattttattgatgaaagcaagtcacaagaccagactgattcaaggggtggagaaatagaccctacttcttgatggagggaggagtagagttacattgcaaagggatctggacaaaaaaaggngtgatttattaggnatcatgtttaacaatttaccacactccccagcgcaactgcctgttagctggat

SEQ ID NO: 53352 - DNA, 458 bp, Homo sapiens
ggaacacttcagcaaatttggaactattgttaatatccaggttgcttttaagggtgacccagaagcagccctaatccaatatcttaccaatgaggaggccaggaaagccatttctagcacagaagcagttctaaacaaccgattcattcgagtcttgtggcatagggaaaataatgagcaaccgacactacagtcctcagcacagctgctccctgcaacaacagcaaacacttagtcacctctcacagcagcaccatcacctgccacagcatctacatcagcagcaggtgctagtggcccagtctgctccttcaacagtgcacggaggtatccagaagatgatgagcaaaccacagacatcaggtgcatatgttcttaacaaagttcctgttaaacatcgtcttggacatgcaggtggtaaccagagtgatgcatcacatttggttgaatcagtctgg

SEQ ID NO: 53353 - DNA, 884 bp, Homo sapiens
  misc_feature (1)...(884): n = a,t,c or g
gttagtccatcttattcagtccatggaaggggtgggtagcacagctgggtcccgggtctgttgtgtcccagcatctgaggggccacgcagnccgttctagaccactcaaggaagggcagaaccttggacctgaatacagctctgcagccctagctgcaccagaagacaggtaggtgctttctcaaagacagacacagtttatttataaaccaaagaggccaggagcctactagccacccccatccccttccctcttcctgagcacagacatggctcccccacctcctcacaaggtttttggtacaaactgtggtttggcctagagcatccctaaggaccctggtggggcagggtaccctctgctcccaccacctgggatgtgctggggaacgtggagtggggcagcctgatattgatatcccgcggccccggccagggctctggagctgctcttccctgggctctgcagcttgggggtcctgggccacctcagacgcaggcccgaggttgggctggggaggagggggtcacccgtccacatcccagctgaagaggtggtgcttcaccagcatgtcccggacgccctccttcaggggctgctgcgcctctctcttcgcagggagctcccagtcctgggagaggctgaaggcaaagcagcagaggactcggagctcacacttgatctggacccagcccgggctgcgcaggaaggaccagggctggtaccacttctccacggtgggcaggctggagcagagcacctccagccacaggtgcagcacctgctcactggggacatggccaggagtggggagcagggtcagctccaggcccttctggctgcagccacggtggaagcctctgacctgtctctcagcagctcc

SEQ ID NO: 53354 - DNA, 694 bp, Homo sapiens
cgttttgtttgtacagcatactgtgtcttgtaatgacacatccttgtcctgctttccttttttgagttttttttttttttttacacaacatgcagaggcactgaagtgaccatgtcattttcaagtgtcaagaatgtagacagtgtttcagtaccaaagtctaaaataaactaaaattatgaattttttataggtgatacatttggattcttctcaactttgaaactgtttagcacagttccattgtattatataagaagacactgtatccaacaagactggctgtacattgaaaagctttatgtaccagccaacttatttaaccatattcagcctgttccgtgggggctgttctgtggttccaggtattttcaagcctgtgattaacttctcatggcttgtcacttaaaagtccctaaatttgagagacttaaagggcaccttgaaatacatttgtggagttttgatccaacttatggtggaagagccccataggaagactgttttgagtggccaaccattcccacccactgcataattcagcagaaactagaggagcagggcgtgtactgattggaattgacacgcttattctgtctacctatcagctaactcattagcagccaagcccttaggcagcttagtgtgaaaatacaatgttaactgtttgtttctctgtgaggttagtgggaac

SEQ ID NO: 53355 - DNA, 630 bp, Homo sapiens
tttttttttttgtgatttttcagattctttaattctggatgctagggactaatttcagaggattgggtaaaatactcaggtttcacaatctctctaaatattcattttacaatgtaagctttaattacttatttgaacaaattgtattattattttatattttaatttataagccaagtttacctgacattttcagatataatatatgctttcaagtctgtttatcttttattattacaattcaaaggtagaagctttatttttttatatccctggaaattattatagtctataaatttttttctataaccttgtaattcctgaaacatttatgaactatatgaaatattgaaagctgctatctaatgttttcccattttacttgtattttttcaccataatatttattactgtttttaattaggatattctatttgttcaatactaagcattttagaaggaaagtagaaaattacaaaaaacaagcacatcaaccatttcagtcagaaaaaaatagttaagatgtaaaatactaggatgaggattagcataaaaagatgtagattccatgcaaaaactgacagcaaattaaagaaagtgtactggaaacaattcttttttggatttaac

SEQ ID NO: 53356 - DNA, 1420 bp, Homo sapiens
ccagaacatctcatccaatgtgctagaggagtccgccatctccgacgacatcctgtcgcccgacgaggagggcttctgctccgggaagcacttcactgagctggggctggtagggttgctggaacaggcagccggctacttcaccatgggcgggctctacgaggcggtgaatgaggtctacaagaacctcatccccatcctggaagcccaccgtgactacaagaagctggccgcggtgcacggcaaactgcaggaggccttcaccaagatcatgcaccagagttccggctgggagcgcgtgttcgggacgtatttccgcgtgggcttctacggcgcccacttcggtgacctggatgagcaggagtttgtgtacaaggagccatcgatcacgaagctggcagagatctcacaccggctggaggagttctacacggagagatttggcgacgacgtcgttgagattatcaaagactctaaccctgtggacaagtccaagcttgactcacaaaaggcctacatccagatcacgtatgtggaaccgtactttgatacctacgagctcaaggaccgggtgacctactttgaccgcaactatggggcttcgcacattcctgttctgcacgccgtttcacggccggatggggcgcacacggggagctgcccgagcaacacaagcgtaagacgctgctcagcaccgaccacgccttcccctacatcaagactcgcatccgtgtgtgccaccgggaggacgacggtgctgacgccagtggaggtggccatcgaggacatgcagaagaagacacgggagctggcctttgccaccgagcaggacccaccagatgctaagatgctacagatggtgcttcagggctctgtagggcccaccgtgaaccagggtcccctgggatgtggcccaggtgtttttagcagagatcccggaagaccccaagctcttccggcatcacaacaaattgcggctctgcttcaaggacttctgcaagaaatgtgaggatgcgctgcggaaaaataaggccctgattgggccggaccagaaggagtaccaccgtgagctggagcgcaactactgccgcctgcgggaggctctgcagcccctgcttacccagcgcctgccccagctgatggcacccaccccacccggcctcaggaactccttgaacagagcaagtttccgaaaggcagacctctgagcccacaaggaccaaagctgtacctagaggaaccagcacccgggcctcagctgtctgtgctgcgaggggagtctgccctggtgcccactggcgtgtggggtgaccacactgtacttggggctgggccctctgcccctgtgtccccatctgtgtgcactgatgcttcctcccttttttaatttaaaatggtttttataagcaaaaaaaaaaaa

SEQ ID NO: 53357 - DNA, 412 bp, Homo sapiens
cccttcaaggacgagggcgatcctcaggagggaaaagatcttcgccgagatcgtcaatcccgaagaggaaggcgatttagctgacatcaagtcttccttggtgaacgagtctgaaatcatcccggccagcaacggacacgaggtggccagacaagcacaaacctctcaggagccctaccacgacaaggccagagaacaccccgatgacggaaagcatccagatggaggcctctacaacaagggaccctcctactcgagttattccgggtacataatgatgccaaatatgaataacgacccatacatgtcaaatggatctctttctccacccatcccgagaacatcaaataaagtgcccgtggtgcagccatcccatgcggtccatcctctcacccccctcatcacttacagt

SEQ ID NO: 53358 - DNA, 1060 bp, Homo sapiens
atcagcctgaccaaaatattgcaaagagttttctaagtctctgaagatttttttctccttgaacactgagtctatagcagtcagcactgtaccttagccgatccctgggaatggttatggaacagtagggcttgtttccatcctttttagagtgaagagatagaaaattagggctacctagtgtgggttctttttcagaactatgtattttctcctcactgcatgatgggtaaaaatgccctgggttgaaacaagaaacattatctttccacaccactgactaaaacacctgccagtggtttctttaggctccaccttttgctccgtaaactgtagactttcagactgaaatctaatcttaagtgacctcaattaaggtattttcacaaaaggctacttatagtgtagcattattgccttaaatcagaaagccctgggaagaggataaaagatatagaaatgagaaggctctgaagttataggcatttcttgctgtttaatagttacattatcacaaaaacaagccctattcatgattgaggactatggaaatagtgacttcttgaggaggcaccaaactttcctagaactgggtactctcagatagtggctgctatttcctattctatttcagtgacgtaggttggggctgaatgtaaaatagacatcatattactaaatagaatcctataaaatgcaatcacaggtgcccgggagtactagttttaaacatttccttaacaaggagaacaatccagcaaaaagctttctttctctatacagtgtatatctctaaactttttttcctcagttttagagaacatctgttttatctggtggttctttgtttgaatgcaaactcataactttcaagtctccggtgcaagagcataatctacagatcatgggcaaaatctagccacagtcctgagagtccaggcttctgggatgcccagctgggtataaaagtccctactaaccctgtttcaaattcagaggtttctttggtttagaatgcctcaatgagattttgatacatccaagagagaaaaaaaaaaaa

SEQ ID NO: 53359 - DNA, 484 bp, Homo sapiens
aaaaaaacggaaggaaacatcagccttgggggccacagactcaacatgtgtgtgtggtggggttccagcccaacatagagtaacattatttgtacctcccaggctagctcagtccatgggaggctctcctgtccctgaaagctgacacccacctttcaccacttcgccccatgctacagttcagtttcctcgtctgtaaaatggggatgataatggtacctaccttgcagtgttgttataaggattaaaggagacagtgcaagaaaaggccttggttggtgaagagcccaacctcggaggggagctgctgggatcctccttatcttgactgggatgtccctgtctccccctccccttgctccttgaacatggccaaggaaagtgaaaaacaaaaattattcactctgctagcacccttccccttgatgcctgggaataggttttgccaataaacgtatctgtgttggagtggcaaaaaaaaaaa

SEQ ID NO: 53360 - DNA, 235 bp, Homo sapiens
ggaccatttctttctgagtgggaataaatctcgagagcttagaactatttgggcacaacatttttaggataagcatggagaaataagctgtgactcagaaaataaactgttggtgcagactgaaatggactccttcagggtgaaaaggcgacttgaagtcttatcacaagctgaaaggggccttggaggatttttagcccaacccccactttagagatgagaaaaatgagaccca

SEQ ID NO: 53361 - DNA, 426 bp, Homo sapiens
cgggcaagcactaccaggctgtgggtctgcacctctggaaggtagagaagcggcgggtcaatctgcctagggtcctgtccatgccccccgtggctggcaccgcgtgccatggcatacgaccgggaggtccacctgcgttgtgagctctcaccgggctactacctggctgtccccagcaccttcctgaaggacgcgccaggggagttcctgctccgagtcttctctaccgggcgagtctcccttagcgccatcagggcagtggccaagaacaccacccccggggcagccctgcctgcgggggagtgggggaccgtgcagctacggggttcttggagagtcggccagacggcggggggcagcaggaactttgctcataccccaccaacccctgcttcccttctcggtccccgagggccctggcccccg

SEQ ID NO: 53362 - DNA, 386 bp, Homo sapiens
ttaacacgtaacacaaaagcttttacttggaaactggcaaatactggactagaatactgacatgctcacgctctggcgggagctcggatgcagaagctattgcacaaagcccctctgattgccttgctcctctttggcatgtatcagcagagccccaagggccaattgcccacaggtggggactgttctccatcaaggtatggggacccctacttccttgttttgttaaaaagtgcaggtaggcgaagaagcccaggcagttgacccagtctttgaaacagctgactccccagcacccagtgtccactgggcagatgagaggtttgcacctataccagcccttgtttccttgggtaggggctcaagttgtcagtgtccagggtacc

SEQ ID NO: 53363 - DNA, 4163 bp, Homo sapiens
  misc_feature (1)...(4163): n = a,t,c or g
ttccaaggatgaaatttccacatttatttttcttttatgtgaatagaaaatggcagtgaagtgtcctatgaatgaggcgaggaatgggcatggcgctgcggtaccagcctggacgttgtgcttccaaagtacactatgtgtggtggagacaaagggtgtcgcggtttgcttttaattgctcacagttccttgggcttctcatttgtttttgaagttgtcagtttcttcaaatctcttttcaagtgacacattgcattacaaatgatggcacttaaccaatgtggcatttccatatttacaccaacaaaagaaatttacaagacataatagcatacaatcttgacatttagtaatagcaataaaacatgggcatccattttattttttctgtacaaactatcagaacataactttattcacattaaaaaaatcatctttaatttgatttgacctacatatcccccatttcatttcacccatttctcaaacctctcatcacgtcacccacaccttcaccagactacagaatctataagtaattagatctaacacctaaatagagcttagaaagtcctctcccaaacatttcctcacttccctgataattcctcaaaaaagaaaaaaaaaacacacttcattcattccttccacttcactttcacatttcaatcatcaaatcagcaagatggacttttcacctcaatctgaacaaggttagaaagaaagagttcctctgttgggcatcttgatgctacacccatgagtctggggaccctgggtactgttctgctctataagaaggtcgtttagtggaataaaagtctacataatttgtggtcgatttcagtccatactgtgttgagtaatcagtagaagctggaaagtgaactcggtcatnaaaataaggatcttcatagctatgaggagactgcaaatacaatctgtatgcatcaaagttctttctgttggagtcatcttgactataatacagctgttgatgctgtagccgtctattttgttctcttgctggtgaggaataggaactgatgtaaattggtgaaggtttgctggagccagggtacaggcctttatgtgtggcatccccttggctattgtaatactgcataggtggctgggtcctatcgtattcagagcgagggtctctgattcctaacagtgctggtgaggaagaggtgctgccgactgactgaatgatgggtgacatctgttggttggtggtagacaaggaaggatgtgatttgaatcggtctcgctccaatgtcgacacaggtgtaataaaatggttctgattccacccatcctttttataaatgctccggaggtcccgatattgccataatgtattcaagacctgggctgctgccttcaccactttcagagatgatctgtcgcccctgcctttggttatgttcaccagcttctctatgcctcctgagtcggccagggcttttgcgttctccatgtttttgctggtgacctcgtgcagagcacagcagatggctgccatggtctcatcagacaagacactggggccattgccgccggggagccggttgaccaggtctcgcatggcgtatttgcctatgagctccttgttgcgaacatctagtgccatattcctcaaggctgttgcaccggaagaaacaactctatcggttatccattctcagaagctccacaaggatggggagccccttttcttttcggacgggccgcccgggatatatgctgcaaacttccagttgccagcagagaggttctggagagaccctgcagagccttccaaggtggctgggttggaactttctgctagaagagtcagatatggttttaccaccgatgggtgccacagcatctcaacccctttgggggacttcgacagtcctgggataggaccaactccatcccattgatcttcttgcggagtcctctttttctttttcttcttcttcccccagcaacttggctcagagtctttgctgggagactcttttcctagtaagtcatccaattcgttcagtcccagtaaccgggcctggggcacctccagctccagccgataggacaggttcctcagggtgcacacgcagttctccaccgtcttgctgtcgtaatcggatgtgttcacacacgtgtggatcacatacaacagtgagtctaccagcccctcgcaggaccgcatttgcttccgagcttcttcccccgcggacgtgaggttccttaggcaacctgtcgtgttacgcagaactagtgaagtctgaaatttaattttatgatcatcatcaaaagaagagttattccatccagaatgtggaacaatcacagtgtttgttaaggttgagagagcatctcgaatgattgtcatttttacagcatcacatgaggataaattccaaagaactcctgtaacaagctcccttacttctgcatcaaatagatttttctcaacagccgcaacaaggcaggtatccccaccaacattcttcattgctattttattttcatctgtagacttgccaaaaacgaggtttcgaagggcaccacaagcattcttctgaacttccaaaactctgtggtccagaaggtcaaccagatgcttgattccccctaacctacacacctccatcttcactttgttgtcaccaaagcacaggtgctgcaggtaggccgctgcatttgccctgaacagatgggaactggtgctgaagcatgtgaatgacctcaggcaactcaggatcacgcccaggcaaactccctggggtccttctgaatgctgtctattgatggggatcttgtggtgccatcatcagccggcactgcatgctgaagcctgttataattgcactcttgcactcggtattgtataggcctgtagggctccgcgtaggtagctgttgtgttcagagcataattatttctttggtatgtaagggtacttcgttggctggatgtcctttgtagatttccaatacctgatacacctgtgcgatacaacgccgtctgcgatccttggagctccacagttccatggtttgggctgcggtacactgggctgtaataggtcctcccctcatatataggagtaatgtgcaagtcgggagacacggcagaacgaaggtcttgcccaagctgactatgctgactagcataggaactccgtaagcctgtcaggctgtctggcctgggtggaaccatcctctcataaatgtcatactgctgctgtccgaattgctccatgtcatgaacagtcctttgcagtgaaggtcccagatgctgtggtacggcggtcatccctgagcgtttgggggacgacgaccccacctggccttgggatggggaagctactcgagtctgtgcatccgtcagggtcagtggggaccccactctggggggtggtttggtattgaggggttggtccgttgggattggaggtctgccgggaggtgactgacccaatccgccgtatagctgttggggaggcgggtctctgtgagtacggagaggctgcccgtgcagcaggtaatgtggtggaggaatatgcactggggttcagaggtcgggggtcggtcactgacggagagccaaatccactacccagagaagttctcagagacccccttgaaggagacacgcctgtgctgataacataagaaggagactgtgctctagatggaactgaactaactcttctcatggcccgattggctactgatggctgaaccagtgtttgtccttcagctcttgaattcctcaccacatggttgttagttgatcctatgaatgaatgctgctgtctgttgtctgccttgctcacgttctggctgttgtggaaactccctgcttcctggtatccactgtcggaataagaattcatttgtgttgaacttcttgagttacccaatgatctttcatggagagatgtctgttctggtgaatagacgggttccttgttctggctctgtcctgatgagatagttgttgggctggacagcgtcagaaactctaggtttgcttacaccagtatttggcacgtctgttgatctccaaggaaatgacttctcagttgagctggtgctggcgatgcttggtgattctgctccaagcctacatctttctagctgactggcaacaatctgcctttc

SEQ ID NO: 53364 - DNA, 414 bp, Homo sapiens
gttggttaaataagtaaatttattgcatgtttccttattcaagcaccactcagcaatgtaataaatgacaaatgaattcagtaagctttacagagtttgcagaaattcttgccattgggccttttctcgtgctgacccttgctaacaccaagtgtttaacaataaaatggaaaacatctttagggggtttagttaacgaaacccaagtaaacacctttttagtgattaaccttaatacaagaaaatctcaactactcatgaagtgtacagaaaacatgtaccattgaatgtctttctcaaatattaagtttttcacaggagctggacaatggtccattcaaggctggaggatttatgctcctgaagaatacttgtgctgtggctatcaaatgcacaggtgacaacactgacatt

SEQ ID NO: 53365 - DNA, 1863 bp, Homo sapiens
cccagagccaaggcacagaggaggtttgaaatgtccaggataaaaagatgcgcacgggaatggagaaaagccagctccatcccactcttaaaaacatcgcattggcaccaaaaatatattaacatctgtacatttgtcatctttaaaaaataaaaggaaataaaaccttcttggcaccttgtagtttatttcttagaaatgaggtgatatgtggaaaggcttcctgtgcgtgcacacacacacagcagtgcacacacacaagcacacgcacacacacggctgggcacacatgtgtgcctctccttgccggaaggacagagccctccagaaccctgagcattagaagccctgccaggtggggggtctgctgccagcccccaccacagttgtttgcaggggtaccctttgccagtgcttttgactctgatgtccactggggacctgcagcccctgccctgtgctgagaggcgggggcagtgggatcctagctcgaacctcctctgggtaggaagtcctgctgccaggcacacagtgtgtctctgtgggcggctgcttctaattgaaggcagccttgcctcatcccttctcttgacataggtacatcttcccaggctcagaacagcctcggcccataagtcaaaaatgcaaaaatgagcagaggtcattgctgggcctgagtgagcacgtgtgcccaggggggagaccaaggcacgggggctccagtcctgatcactggtgttcgggtgagaggttgcaggagggtgggctggccaggcagctgggaggcaatcctggatgctcttggggcttccaggagcacccccagggctcgagccactcacaggtgggggctgccctgcagcagggaagtgacagtgttctgtagtgccacggccaccttcttggaggtcttgcgcagcagcgggctgtcagggtggtgctccttcaggtgcaggacgtggccctcctggctctcagatgtgcagccgcactcctcacacacgtacagcttggcccgccgctccttgtacgcgtacttctgctgcacaccatggatcttcttgaggtgagactccagagagcagcgctgcgtgaaggccttgtcacacaggctgcacttgtagggccgcacgccagtgtgagttcggacgtgtctcttgaggtcgaaggtgtcattgaagcccttcccgcagcccgtgcagaggtgcctcttgacgtcgttgtgacacttcatgtggcggttcagcatgcgctggtaggtgaaggccttctggcagacacggcaggtgaacaggtctccactgggactgtccccaagggtcaccttcatcttggtgcgcaggaagccatggtctctgctctgggggtctgtcaagtggcccatgtcttcagagggcagctgggccaccacacaggcccgggggccatgctgtagctagagtctcgaaggctcatgttcaaagccagcgggcaggaagggggttcggccacagagggttccggctcccggtagggctgtggtggcagaagcccaggctgactggggagagaacagacaggtgagaggcttggtggagaagagagggtccagcgggtttctggaaacttccctagccatgagacggctggaacctggagactccgtccctcccatcgcaggcatgcagcagagcggggctgccccgaccaccactgctgcaccgccttcccgccctattaaggtaattgcaggtgatgccagccaagcgccactgcccgctgagtaatttgtgtcttagcggaaactgggaggaccgaactgccctgccaattatccctccggagttttctgcctgccccacctgggctggtccctctgaattc

SEQ ID NO: 53366 - DNA, 1434 bp, Homo sapiens
cggcagggaataaaggctcagggaccggcagttctactctagagcccaccagcctctcagagcctccggtgactggcctgtgtctccccctggatggacatgtggacggcgctgctcatcctgcaagccttgttgctaccctccctggctgatggtgccacccctgccctgcgctttgtagccgtgggtgactggggaggggtccccaatgccccattccacacggcccgggaaatgggccaatgccaaggagatcgctcggactgtgcagatcctgggtgcagacttcatcctgtctctaggggacaatttttacttcactggtgtgcaagacatcaatgacaagaggttccaggagacctttgaggacgtattctctgaccgctcccttcgcaaagtgccctggtacgtgctagccggaaaccatgaccaccttggcaatgtctctgcccagattgcatactctaagatctccaagcgctggaacttccccagccctttctaccgcctgcacttcaagatcccacagaccaatgtgtctgtggccatttttatgctggacacagtgacactatgtggcaactcagatgacttcctcagccaggcagcctgagaggccccgagacgtgaagctgggcccgcacacagctgtcctggctcaagaaacagctggcggcggccagggaggactacgtgctggtggctggccactaccccgtgtggtccatagccgagcacgggcctacccactgcctggtcaagcagctacggccactgctggccacatacggggtcactgcctacctgtgcggccacgatcacaatctgcagtacctgcaagatgagaatggcgtgggctacgtgctgagtggggctgggaatttcatggacccctcaaagcggcaccagcgcaaggtccccaacggctatctgcgcttccactatgggactgaagactcactgggtggctttgcctatgtggagatcagctccaaagagatgactgtcacttacatcgaggcctcgggcaagtccctctttaagaccaggctgccgaggcgagccaggccctgaactcccatgactgcccagctctgaggcccgatctccactgttgggtgggtggcctgccgggaccctgctcacaggcaggcttttcctccaacctgtggcgctgcagcagggcaggaaggggaaacacagctgatgaactgtggtgccacatgacccttgtggcacagatgcccacgtatgtgaaacacacatggacatgtgtcccagccacagtgttatgctctgtggctggctcacctttgctgagttccggggtgcaatgggggagggagggagggaaagcttcctcctaaatcaagcatctttctgttactgatgttcaataaaagaatagttgccaaggctgaaaaaaaaaaaaaa

SEQ ID NO: 53367 - DNA, 566 bp, Homo sapiens
attcggcacagaaaatggcggtagttggtgtgtcctcggtttctcggctgctgggtcggtcccgcccacagctggggcggcctatgtcgagtggcgcccatggcgaagagggctcagctcgcatgtggaagactctcaccttcttcgtcgcgctccccggggtggcagtcagcatgctgaatgtgtacctgaagtcgcaccacgggagagcacgagagaccccgagttcatcgcctacccccatctccgcatcaggaccaagcccgtttcccctggggagatggtaaccatactctattccataaccctcatgtgaatccacttccaactggctacgaagatgaataaagagaatctggaccactacccgggcaccaggggaccacagcactggtttggaccgttactctgcacatggaccagaaaaagtatatgggaccttaagctcaccttctttacttgtatcaaatgatgactggtatactggtctcccatccctttgcttgtggcaggagatggcttaaataaataacttaaatttagattggtcatgaaaaaaaaaaaaa

SEQ ID NO: 53368 - DNA, 258 bp, Homo sapiens
ctattgctctttttaacttcatttgatgccttgcttataatatcatatgcttgaggctcactgttgatgtagagtatggcaaatctgtgtgtgtatgtcattaaaaaaattctaccatctttctttatcatctggtgtggggcgcactctacagtgacttcagtctgctcagaacgaatgtggaggccggccgaaactgatgctgcccacagtcccagtgaagttaggtgggttaattactgccattcctttctaagg

SEQ ID NO: 53369 - DNA, 427 bp, Homo sapiens
tttttttttttttccctgtaggagaaggcagttggtgatgatttattagccagacaagaatcaacaaacaagttctaacatctgttctcaccaaaccattcctcagacaacagcagcattggaccagggcccagactcaaaaggctcagagggccaaggaaattagactccaggaggagaaaccaggacagtgggagctaacagggccctccttgcacacttctttgctgtcttagatcaccaaggactgagccattggattcttgggatcttcttaggagggagcaggctccgcatttgcttctctgacctccaggcttctttgttgggggtcagccagaccgcctactgaggaggcccaaggggaagccatgcctgtcctctgtcctgaagcacctgtctagaaagattgtgggggagggtgtgt

SEQ ID NO: 53370 - DNA, 708 bp, Homo sapiens
cggctgctcatcccgctcggcctcctgtgcgcgctgctgcctcagcaccatggtgcgccaggtcccgacggctccgcgccagatcccgcccactacagggagcgagtcaaggccatgttctaccacgcctacgacagctacctggagaatgcctttcccttcgatgagctgcgacctctcacctgtgacgggcacgacacctggggcagtttttctctgactctaattgatgcactggacaccttgctgattttggggaatgtctcagaattccaaagagtggttgaagtgctccaggacagcgtggactttgatattgatgtgaacgcctctgtgtttgaaacaaacattcgagtggtaggaggactcctgtctgctcatctgctctccaagaaggctggggtggaagtagaggctggatggccctgttccgggcctctcctgagaatggctgaggaggcggcccgaaaactcctcccagcctttcagacccccactggcatgccatatggaacagtgaacttacttcatggcgtgaacccaggagagacccctgtcacctgtacggcagggattgggaccttcattgttgaatttgccaccctgagcagcctcactggtgacccggtgttcgaagatgtggccagagtggctttgatgcgcctctgggagacccggtcagatatcgggctggtcggcaaccacatt

SEQ ID NO: 53371 - DNA, 711 bp, Homo sapiens
ttttttttttttttttttaaattttaaaaaatagtttattttttaaaaccattaaggcaaaactgtaccctgaaattaactctgtacattcatcagtcttacagtaggacatcccaaacacagaagttcccatatattcaggatataaatcaatacatgtggtcagttcagtctcctaataggaaaacgaagacccaagatttttttttaaaattaaggttattttatagccattttctaattgcctggaaccaatcagttcatgtgactagaaaaattactttcgctcttctctgcacatccttgattccggaggtcctggatgcccgctccccccaccaggggagagaggtatgaagttggagagaggatgctggggcctgtgtggcagttcctactttggaactgcacctttttagcacaaataagaagctgtaagccccaaaatactgagagtataaggcactcactagtagagcacatgtggagagtctgggcccagtccttgctctgggatctgcctcattctcgcgtgtgtttctgtcaaccctctctcttagggttttagcctaatggcattatgaatcccagagggtgtaaccaatatgcaccaagaagttttgccaagttattggaaacaaggtatggggagactcacggggtctgtggtttctgctttctgctttgggttgggccacctggaggatgccc

SEQ ID NO: 53372 - DNA, 956 bp, Homo sapiens
  misc_feature (1)...(956): n = a,t,c or g
ttggcttctctggtgctttatttagcatgagactgtttagaatgtttatttttggctcagttttgggggacagttttcacaaatagaatgacagctatgatcttctctctaaaaaaagagctcgtacaatccaccgttgggcattcagtttcaagagcttcactgtcccatggtctccattctgggacctctcctccactggaagaccctctcctttaatcaaaacatgacacaagatgacagtgactccccatggcaagtcccattggcagtgctgagccagcgaggcgngggcccggtcagggtccctgaaggaaagagatgttactctccaaactgaagagactgtacaaagagattctttataaggaaaactaacaagggaggtgctatgcacaggggctggccacagccaggaagctgtcaccaccctggggcctgaaggggagggagtgttgttcctggaccacggagacagtagctgcagccacgggagaggcagccccacagcagctgtggccttgctaggggtacagacacagccaacccatggaaaccctcatctcatctcttcccaccttcctatctcctaccagttcctctacttggccaaagcaaagaaaagtccttgctgatgaaacccatcaaggttagcctctggaggcccagagaagaaaggagaggggtggagantggatctggggctggggcttgcgggggaagaagacacccaacatgtttcatcttgctaacacccaacatggagacagcaggaggaggcacaaagagggcgtgcggggctgtggatcttccacgctgagcctccacctcccactatccctgagcagcagaggaatcctggtttgctactgagctgctgaacgactgggcaaattgttcagcagctctgggtcctggtttccttccatgtcaagtataaagatggaacccaacag

SEQ ID NO: 53373 - DNA, 701 bp, Homo sapiens
gcaggctgtacgaaatttattcaaattggcatagaaagacccccatcaccactaccatctttttaaaaaagcagataacatgaactgtcagacctccagtttttttatacacagcttacaagcttgaaacaatattccattgagagtaacaccaacattctttaagatttacaatttcttcttaacctgaaattttgctttgaaccataatactcagaccttcctgaaacaattctctaatacataaacaaataaccccaaacacttgaagaaaatttactaaaataaaattgagatgtttattacttttctactgacagcagtgaaaatcactggaaattatacttttgtcctttttaaatgatttacattaaaatcatactttctcaaataactggtatagcagataaaattcagttttaaaatcctcaaaacacttagatatcaaagatagaaatactgattttttttccgttaatgatgagaagaaataagacaaccagtttaatcaagatctgacaattgcaaattttaagtatttaaattacagataaggaatatcgtttgtgcattttctagcttcatatggtagttagacaaccagaaaactaacagttgtcagactcaatgtcaaataatggaatttgggaaagcattcttaatatcactttcatttaatatgcactacatgcacatgatgc

SEQ ID NO: 53374 - DNA, 223 bp, Homo sapiens
  misc_feature (1)...(223): n = a,t,c or g
gtggattacaacctggagcccttcgcgggcctcaccccagagtacatggaaatgatcatccagtttggcttcgtcaccctgtttgtngcctccttccccctggccccactgtttgcgctgctgaacaacatcatcgagatccgcctggacgncaaaaagtttgtnactgagctncgaagccggtagctgtcagagccaaagacatcggaatctggtacaatat

SEQ ID NO: 53375 - DNA, 446 bp, Homo sapiens
tggggcgaacccctgagcagagaatcttactaggctttgggttatcaccaaaacaacctccagtatataccaaagctttgacttgtttgagctcttgagcttagaagttgattttgcacttatttttttggggggtgggaatgtactgcagtcagtaaacattattgactgtttaacttaaacagatgctttatggcacctgctcaagcccgtgactgtacagaaggatcctggttgctaccagtgggtgctgattcagcatcacaagtgactgaaattggctgtggatctgttctttgtgaaagaattcctgatttctccatggagcatgtacacaacaattttgatcatattaactgtacttcagttttgcatttttattcaaatgttatctctttttttctttgagaaataaactgtcactgatgtgacagcgttctttcttt

SEQ ID NO: 53376 - DNA, 1550 bp, Homo sapiens
  misc_feature (1)...(1550): n = a,t,c or g
tttttttaaacaaggagtttagttttattttctctgtgcatttgcaaaatactcaggaccaacataaaaaagaaatacctcctgtggaaaaagttacattaaaaaggggaatggagtgggggtgctgaaagggattagtacctttgccccaaggagctacagcatctctgattggtccaaggaatagaaaagatattgggaaaatgtaacaggaggaaggaaaatgtgaatttactgagggagagggcctcgaagtgggcctcgagggggaactggtggccggggagtgggtctgggtggagggagaggcccccgctggtagccatagggtgggggtcgtggagggccagtgtatccatgggggggcatcagtggaggaggtccacgcataccatgcggaggcataggacctgggtgacccatgggagatccgaatggaggccctcgggggggcatgcccattggaggaggtccaggatgaggcattccaggtggtggtcggggcggtggctggccccccaaagcctgggggtccagcgtggggatgtcctaagccatgagggccatggtgtgcaagctgcatctgagacatccctggatggggcatcccacccggtgggaatgggtgaggatgtgagtgtccatgaccaggatgtcctgcccctggggttcctgccgatggggggccatgtcctgcagccccaggaggcataggtggtgggggcatggctgggggtatcccaggtgggagggctccaggaggtggcactgggggtgggaaggagccaggaggaggcatgcctggtggaggaagcccagaccccaatgatgataccacaggattgggagcagagggtggaggaggtgcatctgcaaacagctgatgagggcgatcagcctgggagagcgggttctgagctgccagaagtcgttcggctgctgagccatggcgctcacccttggagtccttcttgaaggcataagatacggtgataggacggttacagaggtactgcccattcatggcttcaattgctgcatccgaagcatcaaatgaagcaaaattaataaaggcataacctttggagttgccctgtgtcagggtcccgcataattttgggggtttgtaagatgaccccaaaggcgctgaaagtatcataaagcaacttctcatcaatctcagggtcccaggttccccaatgaaaatgttggcccctacatcccaggtttttgttgtgagctgatgctttgttcacccgtattggcttcccatagagtttgatcatgttcatgatcttaatggcatagtcagcatcttcctcactcaagaattccacaaagccatagccttggtgctggccagtgactctatcctttggcatgtgggtgttgactactggtccagcctggagaaacagttcccacagcagcggttcactaaccttctcatccaggccccccacgtacacagtggcatcctgattccgctcggagatcggcccggcagccatggcgaaagagatcccgccgtctcccagtcanggttccgc

SEQ ID NO: 53377 - DNA, 1217 bp, Homo sapiens
cccacgcgtccgatcgcatgtttatgttaagatttggtcccatcctttaaactgaaatatgtcatgtgaaattattttaaaaatgtaaaaacaaaactttctgctaacaaaatacatacagtatctgccagtatattctgtaaaaccttctatttgatgtcattccatttataatcagaaaaaaaacttatttcttaatcaaaaggcagtacaaaaaaagtaataatgttttataagattgtagagttaagtaaaagttaagcttttgcaaagttgtcaaaagttcaaacaaaagtctagttgggattttttaccaaagcagcataatatgtgttatataaacataataatactcagatatccaaatgttcagatagcatttttcataatgaatgttctcttttttttggtaatagtgtagaagtgatctggttcttacaatgggagatgaagaacatttattattgggttactactaaccctgtcccaagaatagtaatatcacctctagttataagccagcaacaggaacttttgtgaagacacattcatctctacagaacttcagattaaatataatctagattaatgactgagaataagatccacatttgaactcattcctaagtgaacatggacgtacccagttatacaaagtacttctgttggtcacagaaacatgaccagattttgcatatctccaggtagggaactaagtagactaccttatcaccggctaagaaaacttgctactaaactattaggccatcaatggcttgaataaaaaccagagaaggtttttcccaggacgtctcatgtttggccctttagaattggggtagaaatcagaaatgagatgaggggaagaagcaaggagtctaaggccctagcgatttgggcatctgccacattggttcatattcagaaagtgttatctcattgattatattcttgttaagcaaatctccttaagtaattattattcaaataagattatactcatacatctatatgtcactgttttaaagagatatttaatttttaatgtgtgttacatggtctgtaaatatttgtatttaaaaatgccatgcattaggctttggaaatttaatgttagttgaaatgtaaaatgtgaaaactttagatcatttgtagtaataaatatttttaacttcattcatacagttaagtttatctgacaataaaagctctgactg

SEQ ID NO: 53378 - DNA, 707 bp, Homo sapiens
gcccaacccctggcttaagtgaccactttcactctgaggagactgaagaggaagaaacttctccccaggaagaatctgtttccccaactcccaggtcccagccatcctcatctgtcccttcctcatacatccgaaaccttcaagaagggttacagtccaaaggaaggccggtatcgccacagagcagggcaggaatcggcaagtccctgatagagcctgtgccacagcaaggctgctcctgcagctctcaagcaggcccagatcgtgataaccagccagcacctgggctctggccagtcggcagttgaggaatgcagtatgaaagttcagatgtcttctcagaaccgtcatcaaggtccattgcaacggagaatcgctgcactcctggtggggcggaaccagcattttgagggacaggtacttcctaaagaggtggttcagccatgtggatcgctggcccgcgaaattccgcttcatgtgggagatgcgctggacgtgtcaattcacgaaccaaggggtttgttagtccgcgattgcggcctcaaaagtgtggccctgatggtcagccctccgggggttttgtcgtggagaagagagcgcagagggctcgttgagtaggacgcaaaaagcggtgggtacccgctttgtgagtctaacacccccgaggaatgtggaacatgcacattggcggcttgccggaccgggag

SEQ ID NO: 53379 - DNA, 943 bp, Homo sapiens
ttttttttttatgaaacaaaaccttcagacgaacgtttatttctcatcatatggaactggtagcaaagccaaagatttctgcacttgaacactggataccactccctacccacccagtgaacatttacagtcatcacatgccctctagaacccagatccccatgccggggcctcttctctcctgcacaccttcttgcagggagggctttcaggccggaagggggtgccggttgcttctccgcgccttgcacgggtatttaatgtggcacactggccaggctcctctcctgccccgcccagcagcagcacggcccttgcctttcttcagtgccctccaaactgggtcagagaggaggcacagactgctagaagaagggcaagagaagtcgtaattcacagtcatttgctacagaaagtgcctggaatcggtccttggctgcttctggcctggaagcaacccacttaagccccaggagaggggacagatgagatactgggatgggggtgggagtcctcagaaggcacccaggagacactggctgcagaaatgggggtccctgatcttgcaagaaaatccgcttgctgttggcaggttggcctgagaatcccaggggcagcttcagacattgtggggactcagacccaccctctcagtctgcagctgtggcagtcagaggtttggcaatgtagccatggtcagcctggccatggcccaggggcagggtccaaacaagaaccctggtgcctcccgcccctcctgctgagccatggtgccacctaagccatctagaaaggctcaactttttgggagacatctgcggcagggccactggaggcaggagagtggggtgccttgtctctgcgaggcaggtgcagctctgggagaacagaattctccctctcctcctcctctcacacactgtggctccaggttggaacctca

SEQ ID NO: 53380 - DNA, 6496 bp, Homo sapiens
  misc_feature (1)...(6496): n = a,t,c or g
gagatcagcgctgggacggaacccgggttcctctcgaaccgggattgtgacgcttttggcctggctggccgctgttttctgtcccactttttactcgggcctgcgtccgctgccgccgtccctcagtttgcccccggaggaggcagggcggccgtgccttctgccgtgcgcccgcgtggctgccaccgcccctccgaatcctccggggccgcagaggggttcgctacggagggaggtgggggccttcgggaggaggaggcggaggaggcggaggaggagggaaggaagatggcggccgtggaactagagtggatcccagagactctctataacaccgccatctccgctgtcgtggacaactacatccgctcccgccgagacatccgctccttgcccgagaacatccagtttgatgtttactacaagctttaccaacagggacgcttatgtcaactgggcagtgaattttgtgaattggaagtttttgctaaagtactgagagctttggataaaagacatttgcttcatcattgttttcaggctttgatggatcatggtgttaaagttgcttcagtcttggcctactcattcagtaggcggtgctcttatatagcagaatcagatgctgcagtaaaggaaaaagccattcaggttggctttgttttaggtggctttctttcagatgcaggctggtacagtgatgctgagaaagtttttctgtcctgccttcagttgtgtactctacacgatgagatgcttcattggtttcgtgcagtagaatgttgtgtgaggttgcttcatgtgcgaaatggaaactgcaaatatcatttgggtgaagaaacatttaaattagctcagacatatatggataaactatcaaaacatggccagcaagcaaataaagctgcactctatggagaactgtgtgcactcctatttgcaaaaagtcactatgatgaggcatacaaatggtgcatcgaggcaatgaaagaaattacagcaggcttaccagtgaaagttgtggtggatgtcttaagacaagcttctaaggcttgtgtagtaaaacgtgaatttaagaaggcagaacagttaattaaacatgcagtgtatttggcacgggatcattttggatccaaacacccaaaatattctgatacactgctagattatgggttctacttactcaatgtagataatatctgtcagtctgttgcaatttatcaggcagcccttgacattagacagtcagtgtttggtggcaaaaatatccacgtagcaacagctcatgaagatttggcctactcttcttatgtccaccagtatagctctgggaaatttgacaatgcactatttcatgcagaaagagctattggtatcattacccacatcctacctgaagatcatcttcttttggcttcttcaaagagggtgaaagcacttattttagaggagattgcaattgattgtcataataaggaaactgaacagaggctgcttcaagaagctcatgatttgcacctgtcttcactccaactagctaaaaaagcttttggggaatttaatgtacagactgcaaaacactatggaaaccttggaagactttatcagtcaatgagaaaatttaaggaagctgaagaaatgcacatcaaagcaattcagattaaagaacaacttcttggtcaagaagattatgaagtagccctttcagtgggacatctggcttctttatataattatgacatgaatcagtatgaaaatgctgagaaactttatttgccgatctatagcaattgggaagaaactttttggtgagggctacagtggactagaatatgattatcgaggtctcattaaactttacaactccattggaaattacgagaaagtgtttgaatatcacaatgttctgtctaactggaaccggttgcgagatcggcaatattcagtgacagatgctcttgaagatgtcagcaccagcccccagtccactgaagaagtggtgcagtccttcctgatttctcagaatgtcgagggaccgagctgctgagggaggacctcagttaaccaattaccttttcccggattccagggaattcatactgtgaaatcaaaaccatgttgttttggggggctggaatttgcattgaaacactggtccagtccattgaagaccctattttgggtgatccctatcttgcagaatgtctgtaggaataagcatatattcagttatattcagcatgtaccgcatgtgtaagtagtctggcccacattttcaacctagtagaacaaacaacaggaaatcttttttttgttgtttttaaaaaattcattttgcagaaagcctgaaagaaaaaaaatacccctaaataaaactatttaagagtttaaaagagttgcattcttattatgtaaggatgattttaacaactttttaatatgtaattcttccatgtgggaggtattcaatactgtagtgtaaaggaaattttatgcgggaaaatctttatatgcagtataggaaaagttaacacaagtacttaattaaaggggggacatccccgacttacgtttttctaccttggccccggttagtggatacaaccactctatattacaaggaaaggactgtcagattcatctgaactggaccagtgttgatctgtaatgtaatagaaaatctgatagaccagcacttctgacttttttttttggtacaacaatgcaagatgctctgatagcatttgctaacaggaccaggaggatctaaaaaggaccagcctaatgtagaaggtggttatttggaccagaggctttagattattattttagatcctacatatacttttatcagtagaatgatttcatttagatgtataatgaaaaaggataatgcaaaaattatgtaatagataccaaattagggaagtttggcaatttcaatggcatatttttagtcaaggtacacagatggcagtgccataagcaagtctataaatatcggctgcagccatccccctcattttaaatgttgccctaataatcaatgcagttaacaagtatattggctgtgtgtcatgaaatagttcatgttcagatggaaatgttaggttactgtatggtttatggagattaatgaaaatgaatgcccaaaaataagtcttagaaaatcctccatttttatggtaaatagtaatacaactaggtcatttcatttgaaatctaggagtcaaatggaaagatcccctaataatacacctatttcactaacttgtctttctgtttattgggttttgatttgattttttgtaagccagtcaggttatttaatgatgaggtaataatcaaatttaagaatttgtgacatgtagcaattcaagaaacaaaaaggtattttgctgttacctcaattcttactgtagtagcccatctgatgcttctatagttaagaatctgggttccccccctattttcaggggttcatgacttggctgttaaagatgttgctcctagctaatgcttggagtagtctgtgggtgaatggatgtgtgttgaattttagttttcttttaacatgcatgttgggtgagaggggaaaaaaatctaagctgtctgccacattgagtacagaaaagttgtagatttcaaattttattaatattttaagcacttttttgaacttcccaaccttgtttgaagctgttatttgcagtcctattagttttgagccattgcatttaagttccctaggagggggttggttgggggatgtactgaaagagatgaagcaaacccacaccctaagatggtaactgtgtgatttagaaacctgagtttactcctcaaatcgaattattttctttttaaattttggaaagagtaaattgacgtacttgcagtttatgaagctgccccccacccctcagttaattgcagtctaatgtcaagaggcacttctttattaattaccaaatagtctttgtgaccaaggactaacatttttaagttactcagctctatcctcatgggcctatatatttaatacctccaaagatattttcaggataggctttgtatacttttattggttatttagaatccagtggtatgtttgtggtataggaatgtcatggtaaattgtttttcaataaatattttgaaacatgtttccatatgaagtttttttttcaatctgtattttttggttttgtgcacatacagcatttcctaggataaaaataaacaaatgacttacagcctcatcctccctaactccatttgaactcaacttagctcacactcagtgataaaacaacatggtatgtagaagcctaggatcacagggtgataatgtcaattggcagccagttgtgtttttttgaaacatcattattggcagtttctccttatcaccactgctttaatgtagtttttttgtaaatccatatactttaatgcatacactctagcttaagaaaacattgccattttggttagggatatgacttaatgtgctattatttctggttctaatgaagaataataccctatgactttaagtgtaagattcatcctttaagtagggatgtttaggataagttagatgtgtgccactatgatttattgggtttcttaaaaatcttgaagaaaataataaaatttatctcacaataagttaacttgcgcaaactttttacatatggtgaggtgcgtaaggaagccctggccaacttaaagatttttctggaggttcagcaaagttatgttaaattaggggcctttggtctcatccttctctgactcttctacccagtcttttcctaaagttcggtgctactccagttgggtgcatcagggagctccgtcagcactcgcatgtgtcgctcaggtggccactcatgcctgcattccatttaatagagtcaattggaatttttagagcataatctttatggatcctcaaagctgactttgccaaagggattgagacccttactaccatcaaatctctgtctctgcttggttaaaaattggctcactattgctttgtagtaacccctgcccaggtattttttcacttgtgaaaataatttgagaaagacctttgttcctagcctgttgggaaaagtttataattttatgaaaattaagtacagaggctgcgatcttaggaaataatgaaggtgccatttggctgctccttaatagtgcagacagaaaactgcagtgaacacatgccaaaacatgattgaagcctttggctgaaactttatacatagaaataatgatttgctcataacaggtatcattaactgccactttttatgttttccctagaatttgtagccttgctgcttgcttttcttctgggtggcaaagttactactggaaaaacactataagtacaaagtttttggggttttatctttgctttagaagtggatgtgtacttcacctcttggctgtggaggaacttagttgccaggaaannnnnnnnnnnnnnnnnnnnnnnnnnnnnnnnnnnnnnnnnnnnnnnnnnnnnnnnnnnnnnnnnnnnnnnnnnnnnnnnnnnnnnnnnnnnnnnnnnnnnnnnnnnnnnnnnnnnnnnnnnnnnnnnnnnnnnnnnnnnnnnnnnnnnnnnnnnnnnnnnnnnnnnngaaattttttgttgttaatatgacatttggattaatctccagcttcaacagtacttcttttgtccataaatctcaggaatgttttaggcagaaaactggttttaccctgttgataatcagaaggagtgtgctttaggatttattgcataatactattctttaattgcaatcctaggtatctatagcatgagtggccttagtgagtttgttgaagtgcacatgtttttcaagagtaaaatttaagattaaaaatatatcctatatatagatatctagaaaacttggtttgtggtgcacagttaagtgttggatcactaaataaccattgcaggtaccgtttgtgtaacattactcatttctgtatattccttttatgggaagatattttgccatggtaactaaaacttttcagttctacttttatgatgtgaatgaatgctacgttttattaaatattaccaggtcagtactatttttatactttattaagcaacaggggattttagtttaataggctcaaaataaaaagttcttaatggaacagttaaaaacaaaacactaacaatctttacgtgaaaatccccactaatagtgccacaataatttctatagaaatatctaaggtcattaaatagatttttgaagacggttcttcattgtgtcaggatgacctttcatatcattctcaccaacttgtagtgcccaccgttatttgtaactattaaaccatactaagtatgtttgtaaccagcattgtgatatattctgtacttgtattgctaaaaatgaattattgacctaataaatatagtgttcctgcattcatagtgaaaaaaaaa

SEQ ID NO: 53381 - DNA, 2091 bp, Homo sapiens
ccgcgcagtcgtcacccgcccgggatcaggaggccgggggcgcccgccggtcgggcctgggcggccgccatgaagctgacgcggaagatggttctgacccgagccaaggcctcggagctgcacagcgtgcgcaagctcaactgctggggcagccgcctcacagatatctccatttgccaggagatgcccagcctggaggtgatcacgctcagtgtcaacagcatctccaccctggagcctgtgagccggtgccagcgcctgagtgagctgtacctgcggaggaaccgcatccccagcctggctgagctcttctacctgaaggggctgccgcgtctgcgggtgctgtggctggccgagaacccgtgctgcggcaccagcccccacgcctaccgcatgaccgtgctgcgcaccctgccgcgcctacagaagctggacaaccaggctgtgacggaggaggagctgtcccgtgcactgagtgagggagaggagatcactgcggccccagagagagagggcacaggccacggcggccccaagctatgctgcacactgagctccctcagctccgctgctgagactggccgggacccgctggacagcgaggaggaggcaaccggcgcccaggatgaacgtggcctgaagccgccttcccggggccagtttccttccctctcagccagggatgcctcgagcagccacaggggcaggaacgtcctgactgccatcctgctgctgctgcgggagctggatgcagaggggctggaggccgtgcagcagactgtgggcagccggctgcaggccctgcgtggggaagaggtgcaggagcacgccgagtgaccgcaggacctgaacgccgctccagcctccacggggaccccagcgtcttccccagcccccgggagctggagggtggctgccatggccgcagccccggccccacacaaaagcctccccggtttgccacatcggccgagggcaggagtgggtgttaggtactggctaaccggggcggtggagatgcctgtctacaccagtcctgtccccaggactccccttctgtggtctggaggttctaggctggcctgggctcttaaagggaggattttgcaggctgtcctccctaataaaagattttcccaaggttgatctggaggtgacgtttcccaaggcatggttgtgacagtcttcctgaaagcaagggccgtttctccacagaatgaggaggtcttcacggatggctttgccgattccagcccttggtccttggatagatttctgttgggcaagggagacttcgagaatgctggcacccatagcgacatctgccctgagctgctcagcaggcaggcagcagcctcccgcacccatgggagagagttttgttttcttggccgggctgggcaggtgcgccttcctttctctctcctgtgaagaactgcaggagggccctcagctgtgaggttgtggatgaacaggcctgttcgccctggggtccgggcctggcacaggaagcagctagactaggggagtccttggagcatctgagaggggttttctttcctctgggaagagtcgcaagtcttatgaggatgccacaatctgggcagtgacccgtggccctggggaccttcctagtgccccccaaaaccaaggaagcattcacgtgagatggggagtcagccttccagctggtgtgtaggaaagccaggtccctgggcccttgtcccatgtggggttgagatccagatctccatgagatattcccatcctccgccgagcggtgatgcgtgaccgtgtgtgcaggccgctgttctcccaagctcggggccatgccgtgccaccgtcaccagagccagctgcagcactggggcagccactgtcgccggacttggggaagcccagggtgaagacagtcactcatccgtgcaagctctccagaagggatgcaagctctccagaaggggtgtgatctctgagcagtggggagtggagtcaccactcgggacatagagggtggacagttcaggcctgtgtctgcctccttgggactgtggagtgggtgccctcagtaaagcgctttgttggaatggt

SEQ ID NO: 53382 - DNA, 184 bp, Homo sapiens
ccgggctgggcgccgccgccggttcgtctactctttccttcagccgcctcctttcaaccttgtcaacccgtcggcgcggcctctggtgcagcggcggcggctcctgttcctgccgcagctctctccctttcttacctccccaccagatcccggagatcgcccgccatggctttacttactgcgg

SEQ ID NO: 53383 - DNA, 171 bp, Homo sapiens
cagacgcccatccttattaaagggcaaagacttctcatacacctaggatggatcttatattcttggcgggactgcagagaaggtcgccgtgtcctgagtcctcatgtcagggcacaggtttccagccagttctacctgggttatgtttatctcaattccctggtggttttg

SEQ ID NO: 53384 - DNA, 371 bp, Homo sapiens
gtgcagtgtcatcacagttattcagattattgccaatggcatcatggaatgaagtgcaggtagaggacaaggccttgagagatgaagtgtctgaggcacttaagtcagtatgacaacaataatgattattaaaactgaggccacctgtttcttatagccctcttgagcatattttgggaataggagaaataaaagttaagagcatacaattaagacaggcatggagaaccagaaggcctccatggtagctttgaaggagtcccttatctcttggaatcacagagcaggtaagggtgaggagcctctggtagacacattcttctaccacctacctggtgacaggttgactatattcagtctcttgtcatgga

SEQ ID NO: 53385 - DNA, 416 bp, Homo sapiens
  misc_feature (1)...(416): n = a,t,c or g
attaaatttgccaatcttgcaaactattgtttacttgtattgcataattagatactcatattaacatattgaattcagaaaaagttagcaagccaagatgacattctctgtagcactattttaaattataatgaatgatcacataaaactctttagtatttatctaaagtaattattactctacttcatttgtttatctaaatcagtgatcattgatgtttgaactttttggcttaaatgtttattttgtttatactacttgctagagtaaaataaatttaatacatgaaaaactctacacaatttaaaataggttataatttgtcaatacttatgttttaaaatattttgagangggggagtgctgtatattattaanacanttttctgaaattgtttaatattatctgtgattt

SEQ ID NO: 53386 - DNA, 424 bp, Homo sapiens
cggacgcgtgggctcgtgcagaatctttctgtttgccctgaagatgaatcaatcatcatgtcctcttttgttaacactatgacttccctaagtgtaaaacaagttgaagatggggaagtatttgatttcagaggaatgagattagattggtttaggttacaggcatatactagtgtctcaaaggcttcacttggccttgcagatcacagagaacttggaaagatgatgaatacaataatttttcatacaaaaatggtagattccttggtggaaatgttggtggaaacatcagatctctccatattttgtttttatagtcgtgcttttgagaagatgtttcaacagtgtttggagttaccctctcaatcaagatactcaattgcatttccactactttgcactcattttatgagttgcacgcatg

SEQ ID NO: 53387 - DNA, 742 bp, Homo sapiens
gaattccaatatggcgaagacctacgattacctgttcaagctgctgctgatcggggactcgggggtggggaagacctgtgtcctgttccgcttctccgaggacgccttcaactccacttttatctccaccataggaattgactttaaaattaggaccatagagctcgatggcaagagaattaaactgcagatatgggacacagccggtcaggaacggtttcggacgatcacaacggcctactacaggggtgcaatgggcatcatgcctggtctacgacatcaccaaccgagaagtccttcgacaacatccggaacttggattcgcaacattgaggagcacgcctctgcagacgtcgaaaagatgatactcgggaacaagtgtgatgtgaatgacaagagacaagtttccaaggaacggggagaaaagctggccctcgactatggaatcaagttcatggagaccagcgcgaaggccaacatcaatgtggaaaatgcatttttcactctcgccagagatatcaaagcaaaaatggacaaaaaattggaaggcaacagcccccaggggagcaaccagggagtcaaaatcacaccggaccagcagaagaggagcagctttttccgatgtgttcttctgtgaggaacaccgccttactctgagcctcgctcagcccagctgactgtgcctgttctgagtgagcccctcactcagccggggccctcccacctccaacggcccgcccac

SEQ ID NO: 53388 - DNA, 1409 bp, Homo sapiens
cgactgccgccccgagtgtccgcagcgctcgtggtgcagctcgcacctgcggccagtgcctactgccctctcttgccgcccgcacctgcagccccgcacctgccgcttgcacctgcagccccgcgctctacccggttcaagcatggctgaccaggcgcccttcgacacggacgtcaacaccctgacccgcttcgtcatggaggagggcaggaaggcccgcggcacgggcgagttgacccagctgctcaactcgctctgcacagcagtcaaagccatctcttcggccgctgcgcaaggcgggcatcgcgcacctctatggcattgctggttctaccaacgtgacaggtgatcaagttaagaagctggacgtcctctccaacgacctggttatgaacatgttaaagtcatcctttgccacgtgtgttctcgtgtcagaagaagataaacacgccatcatagtggaacccggagaaaaggggtaaatatgtggtctgttttgatccccttgatggatcttccaacatcgattgccttgtgtccgttggaaccatttttggcatctatagaaagaaatcaactgatgagccttctgagaaggatgctctgcaaccaggccggaacctggtggcagccggctacgcactgtatggcagtgccaccatgctggtccttgccatggactgtggggtcaactgcttcatgctggacccggccatcggggagttcattttggtggacaaggatgtgaagataaaaaagaaaggtaaaatctacagccttaacgagggctacgccaaggactttgaccctgccgtcactgagtacatccagaggaagaagttccccccagataattcagctccttatggggcccggtatgtgggctccatggtggctgatgttcatcgcactctggtctacggagggatatttctgtaccccgctaacaagaagagccccaatggaaagctgagactgctgtacgaatgcaaccccatggcctacgtcatggagaaggctgggggaatggccaccactgggaaggaggccgtgttagacgtcattcccacagacattcaccagagggcgccggtgatcttggggtcccccgacgacgtgctcgagttcctgaaggtgtatgagaagcactctgcccagtgagcacctgccctgcctgcatctggagaattgcctctacctggaccttttgtctcacacagcagtaccctgacctgctgtgcaccttacattcctagagagcagaaataaaaagcatgactatttccaccatcaaatgctgtagaatgcttggcactccctaaccaaatgctgtctccataatgccactggtgttaagatatattttgagtggatggaggagaaataaacttattcctccttaaaaaaaa

SEQ ID NO: 53389 - DNA, 942 bp, Homo sapiens
tcttccgccgcacgtggattcagcgcgatgcccaaatccaagcgcgacaagaaagtctccttaaccaaaactgccaagaaaggcttggaattgaaacaaaacctgatagaagagcttcggaaatgtgtggacacctacaagtaccttttcatcttctctgtggccaacatgaggaacagcaagctgaaggacatccggaacgcctggaagcacagccggatgttctttggcaaaaacaaggtgatgatggtggccttgggtcggagcccatctgatgaatacaaagacaacctgcaccaggtcagcaaaaggttgaggggtgaggtgggtctcctgttcaccaaccgcacaaaggaggaggtgaatgagtggttcacgaaatacacagaaatggactacgcccgagctggtaacaaagcagctttcactgtgagcctggatccagggcccctggagcagttcccccactccatggagccacagctcaggcagctgggcctgcccaccgccctcaagagaggtgtggtgactctgctgtctgactacgaggtgtgcaaggagggcgatgtgctgaccccagagcaggctcgcgtcctgaagctttttgggtatgagatggctgaattcaaggtgaccatcaaatacatgtgggattcacagtcgggaaggttccagcagatgggagacgacttgccagagagcgcatctgagtccacagaagagtcagactcagaagatgatgactgaaagggactcgggactgaaggtctcctggaagcttctgggtctcactggaccatcaggactgctgccgcccctctggagagagcagctttttatttgtctgtagacagggaacatgatgggcactgacctcctgtaaagaataaaactgtgggccgggcgcgggtgtcacgcctggaatcccagcactttgggaaa

SEQ ID NO: 53390 - DNA, 719 bp, Homo sapiens
gcctatctcagagtcgtggcccacaggtgaccagcctctcagggaaagagtatgatgtgctctacctggggacatgaggatggacacctccaccgagcagtgcggatcggagctcagctcagcgttcttgaagatctggccttattcccagagccacagccagttgagaacatgaaattgtaccacagctggctcctggttggctcccgtactgaggtgacacaagtgaatacaaccaactgtggccgtctccagagctgctcagagtgcatcctggcccaggacccagtctgtgcctggagcttccggctggatgagtgtgtggcccatgccggggagcaccgagggttggtccaagacatagagtcagcagatgtctcctctttgtgtcctaaagagcctggagaacgtccagtagtgtttgaagttcccgtggctacagctgcgcatgtggtcttgccatgttctccaagctcagcatgggcatcctgtgtgtggcaccagcccagtggagtgactgcactcaccccccggcgggatggactggaggtggtggtgaccccaggggccatgggcgcttatgcctgtgaatgtcaggagggtggggcagcccatgtggtagcagcttacagcttggtatggggcagccagcgagatgctccgagccgggcccacacagtgggggcggactggctggcttcttcttggggattctcgca

SEQ ID NO: 53391 - DNA, 1672 bp, Homo sapiens
  misc_feature (1)...(1672): n = a,t,c or g
taactgcatcggcaatcatttattagtaccccaaaatgcaacagttgtctcaaaagtaagcctttttgtaaaactctaatacatggagtgggaaaaatagctacccacttcctacatgtctgcagagaaagctctggctgacactactgatctgagcatgagaacatgacttaacagtaaattaataaaaacggaatgacttacttttaaatcattttactgtttataccacagtcgcatttaaattggcagaatggctcccatgacagacaagacaggaacctgtcatgcaaggaaaagtgcaggttttcacaaagtttgagaagtaccatggtaacaagaatggctgcagcaatctcagacaacagcgccaaggtttgcaagtgggtaggaatgaaagctgctccacagtaattggcctgagaccgctaatgcttcctaagaggtatttcctaatatgcttggtaagcagatcacgtgtaacacagatgtaaatggagtatgataacgcttctgcaaagtaaattctgtaaagttcctgggcaggttttacagatctctttcatccatgataaatggttgctaaattatgattctgcaaaagtaatcccataaatagacatctaggtaaattttacaaccagtgaaattcttaggccaaaaaataaatagccacacaaatcaaacctacacactgtgaattaaaatgaagccagtgttagggtttctcaaagaaccagaacaggaaagattattcaaatagaagatcctcgtccttctcttcagccagaagattagcaggctccaacacctctccagctgctctcctttgctccaagtccttctcagatttttcctttagaatctttttcttctcttgtattttctttaacctatagaactcttctcgctctctctcatccagctctgtgatgatataagcaagagtacgttcaatccggggaatgatgacatgttcaatggcatttacacgcctgttggttatcttaatagcttcatccaaagtaacaaaagaagtctgcagagaagctagttccaccagtagttccactgctttggcataattcctctttaatttagccaactggttcccccacctctggctaaaccagtcagttcataactgtcagttccttcatggtaatgttcaaatactggcaaaagtaaacacctgctacattatcttttcttcgctcgaatcttcacttgcgctttattggacattttggaataactgtagtgcctgaaagtcacctgctgtgaaacttggcttcagctagtgaaaaggcagcttctctcatcacttcgcccatcaacattttagtctctattatcttctttaggatctgtcgaaatcgaagagttaaggcatcagattttttcttcaggaggtttcgacctgtctgtgctccctttaaacgagccttcatgatggtctgtgccattcgcgagggaaagatttcaattcggtctttgcccgacattctgacgataacttttcggctcgggtccccggccgggcaaccgaggctgcaatagctccagaactggcctccacagtgtcttcctctacgggagtcagctggttgtgtcacttgacccctcttgttgctaagaggcagcagggacacccattttcacttnccttccg

SEQ ID NO: 53392 - DNA, 404 bp, Homo sapiens
tgctcaaggtgctgctctgggtggcctctgccttgctgtactttgaaagcaaacaggccgcccgccttctgggcagcccctgcttacggcgcctctaccatgcctggctggcagcagtggtcatctttgggccgcttctgcagttccatgtcaaccctcggactatcttcgccagccacggcaacttcttcaacataaaatttgtgaattcagcctggggctggacatgcactttcttagggggctttgtgttgctggtggtgttcctggctacacggggcgtggcagtaactgccatacacctgagccgactggtagtacgggcagccgtgtggcggtgagccggccggccttcctgtcatcgaggacctgactgggtctgcttcaccactgcccaaggctgt

SEQ ID NO: 53393 - DNA, 1357 bp, Homo sapiens
tgccataactgatagggtgctactgcatctagtgtataatggtcagggatgctcttaaacattctgtaatgcacaggtcagctcccacccgcacccccaccccctaccaagaattatttggctgaaaataccaataatcaggtgaagaaaccatgaactagaggtagccaaataaaaaagttgagttctcctttatgtgttcagtagtcttaagtttttaaggtagtgttgaaaaaagtctgtctttcagagatgatggatttgcttacaatgatacctgtctgcaagcattttttcccccaaaagtgcttaatagtaaaattagatcttgtagtagccgagattattgtatcatttatctgaaccacagcttttataaaatctttaaaggaaacaaatagggcccacatctttatgaataatttagaaacatttttgtatatatatgacaaatgaactgttttttttaggctaaagaagaaaagaagaaaatcaacttcttcttcaagtgtttcttctgctgatgaatcagtgtcttcatcatcatcctcttcctcttctggtcacaaaaggcataagaaacataagaggaaccgttcagagtcttctcgcagttccagaaggcattcatctagggcatcctcaaatcagatagatcagaataggaaagatgagtgctacccagttccagctaatacttcagcatcttttcttaaccataaacaagaagtggagaaactactggggaagcaggataggttacagtatgaaaagacacagataaaagagaaagatagatgccctctctcttcatcttcacttgaaataccggatgattttggaggtaggtctgaagatccaagagatttttataacagctataaaacccaagcaggtagtagcaaaacagaaaagccatataaatcagaaagacatttttccagtagaagaaattcctcagattccttctgtaggaattcagaggacaagatttatggttataggagatttgaaaaggatatagagggaagaaaagagcactatagaaggtgggaaccaggttctgtgaggcattctacctcaccagcaagctcagaatactcttggaagtcagttgagaaatacaaaaaatacgctcactctggatcacgtgatttcagtagacatgagcaaagataccgtttaaatacaaatcaaggagaatatgaaagagaggacaattatggggaggatatcaaaacagaggttccagaagaagatgcactaagtagcaaagaacactcagaaagcagtgttaagaaaaatttacctcagaatttactgaatatatttaatcagatagctgaatttgaaaaaa

SEQ ID NO: 53394 - DNA, 344 bp, Homo sapiens
  misc_feature (1)...(344): n = a,t,c or g
ttcggcacagctggaagaaggaactgagggtcccatctgtagctatttggcaagtggatcataggcccagaaggaagtaagtctatccaaactctccccctctctcttcctccaagatcctgccctggcctatgtggctctggcccatgatttaggacttcaggtgtgtggtttttttacacttggtccggttgggttggcggacagggagaaaagaaactggaataatggattggctgtttaaccaggaaagctgtgacaaactgcagctgacagtgcagcatgttttacctgttgncctttgnactgnccggcaaacaggcaatggaggcagatgacagttt

SEQ ID NO: 53395 - DNA, 413 bp, Homo sapiens
ttttttttgcccggccagaagttttatttccaaaccccaggaaggcattacaaataagagatagaaacccaaattaagctctgaaacaactggagacaggcctgcctaggtgatcaggagcatccaggcagcagggatgggaagcagaagagatgcattctggatagggacctcaccccagagcctcagtctgtacatacgtgtgactattcagggaccgggagttgagaaccagaaacccaccaatcctagtgttgccctgggtgggaggcagagaaggcagcagcacgtgaggtcaaggacattaccaagtctgaccttggcatttgttgcctgctctcatccccaacagtccataaataagttatccagcacatctcaggggtggaggcgggggagcaagccaactagcc

SEQ ID NO: 53396 - DNA, 611 bp, Homo sapiens
tcaatgaggcgaggcatttgtccattatggggatgaatcgtgctctcagaagagaatcctgtcattgaggttttgtttcaatagtcctctttttctccagagaactgttgtctcattgttaataatagcagcgtggctttttcagatgctggttggtggctgctgtacattttaaaaatggaatctcatggttgtgtctcttaaggaagcttttcaagaactttactggcaccagaggttatcagagtttgaagtttggggtgcctagtgtctcacagtgtttaagcactaatgttctgggtcagttaggtgtgagtacaaatcccatctcagctcattctgagagggaccttggctaattgctttctcctctccaagcctcagtttccacatctctaaaatcggcctgcaagtagtgtgtgcctaaggttgttgtaagtttcaatgaactcgaatgcggctgagtgcctgagagcacctgttgctgtgggtatcatcaccgtgtgtgttttctgtcttctcatccacttttctttgtgcagtctgcacacacaccattaaaggctgatgacagcatttttacgaattgcaaacagaggccagcgcggtgg

SEQ ID NO: 53397 - DNA, 433 bp, Homo sapiens
  misc_feature (1)...(433): n = a,t,c or g
gagaaactaacttgcctaagttcacacagctagtaaaaggtgcttgtcattgaacacttatctattactttctgtgtgtcagggactcttctgggtgctttactcatttaactcattttaccctaacaggtagggtatctgttagcannnnnnnnnnnnnnnnnnnnnnnnnnnnnnnnnnnnnnnnnnnnnnnnnnnnnnnnnnnnnnnnnnnnnnnnnattggactagtgtgcaaacccaggtgtgaagggcctagcacagacctggttcagagtagacatttggaggctccctgatctttgatcctccgctcggatatggcctgggatctacttggatagccaggttccccggccccccgatgattttccaggatgttcttggatcacactcgaggaaagctccagctgggcccagatttggggcttctg

SEQ ID NO: 53398 - DNA, 363 bp, Homo sapiens
tttttcagactcttccctctactacttactctgtatttctgtctcttctaatgactaggaaaggcagtttctcaaaatcatcttctatttagttggcaaatgtgataatgtgggtagtgttcctaccttcctgctgtatgtgttctactgaaatgagatataatagccatctggctacaattttgatttctaagaagttcttatgtcattttaaattcaaaaactaagtatttcaacatttggtctctcatatcttaagttttattttctttggtccagctgttcagagatagtgtgttctaatatctccacaatcaagatttttgactaaaatggatcagtacatgaaaaagagggactagg

SEQ ID NO: 53399 - DNA, 401 bp, Homo sapiens
  misc_feature (1)...(401): n = a,t,c or g
gaaagtgatggcaaagaaacattggaaacaatttctaatgaagaacaaacacctcttcttaaaaagattaacccaaccgaatctacttccaaagcagaagaaaatgaaaaagttgattcaaaagtgaaagctttcaagaaaccattgagtgtatttaaaggccccttactacacatcagcccagcagaagaactgtactttggaagtacagaatccggagagaagaaaaccttaatagtgttgacaaatgtaactaaaaatatagtggcatttaaggtgagaacaacagctccagaaaaatacagagtcaagccaagcaatagcagctgtgacccgggtgcatcagtggatatagttgggctccccatggggggttaacagnctctgcccagaaccgtttt

SEQ ID NO: 53400 - DNA, 918 bp, Homo sapiens
  misc_feature (1)...(918): n = a,t,c or g
tgccgagtgccgagcactgttctaaaagactggccttggctgaaaagtctaaggaagcattgacagaagaaatgaaacttgccagtcagaacatcagcagacttcaggatgagctgacaactaccaagaggagttacgaggatcagttaagtatgatgagtgaccacctgtgcagcatgaatgagacattatctaaacagagagaagagattgacacactaaagatgtccagtaaggggaattctaaaaagaacaagagtcgatagttttgaaatagctggttggcgactgttctttccagacctgctcctgctgcacagagccgcagggctgagaccacgtccatgctggctgccttcaggaagctaaagtattgttggacctagtaaactagtcagtgttggaaacggccttgaaatatttaaaacatatttgtaaccagtgaggcaaatacagaagttgatgtcggcagtaaatggaaaacaatacgtatgtcatggatattgtaggtttccttatgctgtttttactgtgcactttttaaaattaggttttaatttcagtatgtaagaacaaatattttgtatactttcaaactcaattatatggtaatcgatttggtatctatggaatagatatatgtttctggaaaaaaatgcctaaattgtcaaactgtcattacttcttatagttgaaggcattctccagattctttttaaaagatttgttcatannnnnnnnnnnnnnnnnnnnnnnnnnnnnnnnnnatctttctctctgagggagagggagccctccaaacttcagatcctgtgggtttagtatcattatcttcagctctttgataccctgtgttagagtaatagctaaaggaagttcatgtcaataaattcatacttatatcacactttcaaaaaa

SEQ ID NO: 53401 - DNA, 659 bp, Homo sapiens
cgggactccagtgatcgccgcggctcgctcgcgccccggaaactgccccttctcgggggtcatgatgggcagcaagatggcgtctgctagtagggtcgttcaggtagtcaaaccacacactccattaataaggtttcctgacagaagagacaatcctaaacccaatgtatcagaagctttgagatcagcagggctaccatctcactcttctgtaatttcacaacattctaaaggaagtaaatcaccagatttgctgatgtatcagggtccaccagacactgcagaaataataaaaacattacctcagaaatacagaaggaaacttgtgtctcaagaagaaatggaatttatccaacgtggaggtcctgaataaccatggtggctgctgtttgtcatcagacaatagaattgtctttacaataaaggacttccaaaatgacagatgagaaactgtatattaaacacctttaataaatattatgaaaaaaatgaaatatagaaaatttagatggacacttgtatttcctaatttatgtatcttggtcagcttctccacaagcttacctaattgtttatatactttatacttattaaagtatacatttttaaatgttagcctattaatttactcttgattatcaacattaccagtgttgagc

SEQ ID NO: 53402 - DNA, 938 bp, Homo sapiens
aaggatcttgacactggaattcaaaaatttacagccctctttactccgaagagttttttttgttgttgtttgttttttctttttaaatcacttccctataagccctcagcaattatttctagttttgttttggaagaaattttaatgacattcactgcaactcccaagccccatcccacagcttgtgaggggctggattctcatccactggacttggcaccaatgccctgtaagcatgtgccactctacgatctttcagtgggttttctctgctgccaaggggatattcagtgccattttgccacctgcagatcaagagctctcccagactgacaggttcccaggacggaaaagccttaatacaggcacagccttggtagaaacagtgagcccttcacatggagatgaagtcttaaaggtttgagcaccatcttctggtcagtttttggcttctgaggccgactctgctttagaaacttcatttatttcagaatggcagaaccctaattgacaagctcaagtgatctgcgtatcaaaatgtggacaggaccagaagcaggtgtagtccggctgggatgagctgtcccaggctggcccggagctggcgctcgctgtggaaacccgtcggggctgcctgcacaaagccggcagatgccagtcagtgggcgtgctggtcagtaaggctgtgccttctgcgcttcaagcagggtgagacctgaccatgtgggagcaataaaagcttccatggtgaccaaacgtgactcctgcctctgtacatggcaatgtgagatgtgcctggaaggaaggggtggccccatctctgccagtgtgggatccaaccaggcactcccctccacagggggtcaagccacacaaggtggcagacagccctggcctggtgtgtaaacaccgcaccagcagactccaacctttggcat

SEQ ID NO: 53403 - DNA, 426 bp, Homo sapiens
ggacagtgtgggagtcatgaatttggcagggatgtaggatttaagatggataagaaacaataaggaactgaacactaaaataagctaatcttaataaaatgagatgaaaaaaggtagggcaaaaaatctcctttcaaaagaagaagacttaactctagatatgtatggaaattccatttaggataagaatcaggacaggaaacagccagaagggactatttgtactgaaatacaagccattaacttgagccaagctaacagcaaatgactgcagtggcaactgctggccacagataattagtttagaacctatttgaacatgaatattttatcatgcagcacaaaactcattatggagaagaattagagagcttaggacgtctgaaggctcctgggaagaggtgatctgtcaggtcccaataaaga

SEQ ID NO: 53404 - DNA, 1741 bp, Homo sapiens
ttttttttttttaaaagcaagaataatctttattccttggaaacacatttgtaaaaatgctatcaataagatgaaaagattcagaacacatttatttgtatgcagcacatacactgagcatcagaacgtctgctaaaatggaatacacctgtaaacaaatgccttagggagagtttataggtagtcagctccactgtgcaaggtatgcagctgataccttcttgctgaatagatttttgcagtagcccaaaaaagatcagattttagtaataaaatatctcaaaggatgtcaaacattttttagagggcctaacatgggcaaaattacaattacatatacaaaaatggcacaagaatcaactgatttcacagaaatactaataaaacatttcaggtctattattaagagaaaaaaatgtttgactcagggcttgaaatgggggaaataaatattttggtacaagctttaacctaaaagacaacatattgatttctggttctaccaacagactagggcaacaaccatctcatcctactctacagaatgctttggcacaacttcaagaaaaccttatatgctttcatttgagccataaatgatcttgattgcacgttgctttttaagagtgaagtctagggtaaaaaccaatcccccaattctgacagtgtgtattcacaattatgtcttctgaaatcacgcaagttagcagcaccaatcattaagacattaaaaattattcccatacttgagcagcaaattcgatcaaaacaaatgctatgcaatttaagattagtacgactgcttaaattcaaagtagctcaactgctttaagatgtgaaattcaaagtccccctgtatctatataacatctaataagttatatactttatttagcttctgaaaggagtaactctgtcaaggaagtgggtattgcagttttccttgtgataaaattagtttgaatgtatgtcctcaacctaaacaaaatgaaatgttaacaaattgcagaattttagagttggaaaggaccttggagatcacttagtccaaccctctcttttcagatggggaaaatgaggtcaatgaaggggaaatgactcgtccaggccacactagggaaactggaccctagcaatctcaacttctacgacaggaatatatgctgagcaatcttcccaagctcttctggttttatttgctcccattaattaaataacaaagaacatcaggaacatagtaaaatgataaacatagactttgactccaattttaaaatcagaacatcaatatgattcctgagcctttaccttcattttaatgagaatgcagtcaacagtaaattatgacaagctatagtggttttatcttcaaatatttacatggacaccaaaaacacctttcaggactactccttaaagacactcgtccaaacacatccatccatctgaggccaagacacttttcatggaatgcaatgaaactatgaaggtgaatggaagagagatgcttcagtctctcaaagtgcagtcatgagtttatctcgatacatcatactttgcatccctcctaagttcttctggttctggtcgtggacataatcaaaatggctgtcatctccactggccgatgctttccaatgcgacctgtcatcctgaaagggatggcctgacatttggagagtgaggatgccaccgggggctgggctgggaatggatattaggatggatattggaggctggt

SEQ ID NO: 53405 - DNA, 352 bp, Homo sapiens
gcagaagtaaaaaataatttttcctatgaatcgttttataccaaatgcaatagttatttttcagtaaaagcaaaataattgttctacatagcatactagaaacattgagagcaaaagtaaggaccactttttgtccagcagcatttactttttcatttttatgagctcgtgaaatctacctctgtcaattggcttattttcttctgggctccacagtatttttctttgaaagtgttttactgcatttcccttcggttagtcttattgattgtatagtcaatttgtaattgttttttctaagtaaaatctttcatacattgtactttgttagtcccatgcttatttagatctg

SEQ ID NO: 53406 - DNA, 1202 bp, Homo sapiens
ccctcggagagcctttaaaagatgacctatgctaaatactcatgtgtagtttttatactacatgccctacttgaacacttattgcacttttatttattgttaactgtgaaaagtacgtcctttattgggtttccttttatattcttggtttgttaagaagaatggtttgtttttatagcaaaactgttaagctgctcgagtctcctgttgaagaatgggaacactgaaaagtaggggcatttatttttagagtaaaaagattattggatagcctttaaaaaacctgcacccatttcatgggtgagttacttaagacatcagctttatagcctctatgagtctatcttctgtataagttttgtaatatttaacataaggcttaatgggagatgttcttttgtcttgtattcagatattgccaactaaagcaataaccatcaaaaaacacaagaacttgtcaatgctagcagtaatttttgagtgtttgtggctctcggaatgattgacttcgttcagtgactactattaagattttccaaggactgactcatcccaaatttttgttgtattaccaaaaaaacagattccttatcagaatttggaatagaatgtgatctctattgcaacaagtaattttaaaagaaagctacatttattttagagtagtgctcctaacatgtattatcaactttgtggattacattggaggaaaatttaaaactggggccttgaatatttattttttgaaactaccatgttaaatactgaagtataatttgggggagttataaagttatgataaacattcatctgattattttaaacaatagttgtggtagataaacatactggaggtgagtcaaattgaattcatatagtaacatgcagtctgaagtcctagttacttaataggtactcagcctggagtgaaaatcctgggtactgactttgagaggagtgagtgtgcatgttgtcaaagtttctgaacacagttcacatagccttattagcaaaagttttaagaaatggctctatcaaagaagcaattgcagctttattcagaaatataaaagtggaatttatgtacatgtcataagtggtacccacttcccctttttactgtagggtggataactcttaggatttaactctttgaatattatctcttgaataaagcatgtgttaatgttaacaaacctaaa

SEQ ID NO: 53407 - DNA, 681 bp, Homo sapiens
tgaaattatttccactccaaggtcatgaagatagtctcttagattatattctgaaatccttataaatgtaaatttcatatttaggcctttaattcacctagatttggtttttttgcatatggtgtgaggtaaggattcactttcatttttttctctccatagggttacacacctgtcctatcattgtttgtaatctaactttctgcgcccatctgcaatgccacctctgtcatatgtccacatatgacatatgtaaatctgttgttggattctttcctctgttccattagtctgtctgttcttgtgccaatatcaagctgtcttcattattatcaattatgtattgagatctgataaagtaagtcttttccaccttatttttcttctttgagagtgtcttgactattctggctctttgtattttcatgtaaggtttttctcccatataagttttaaaatcagcttgtcaattccaacaacaatgatgcacttgatagtttgggaatttattatagctatcaatcagttttgggaaaattgacgtctttacaatattgagttttctgattcatgaacatggtttacctctctttccatttgggtcttctttaaggtttaccaataggattttatatttttgcccattgtggtcttgcttatcttaagtttgaccacaatgga

SEQ ID NO: 53408 - DNA, 340 bp, Homo sapiens
tacttaaatcctccataaagtatacaaaatcctccttgataatctgagagatctacaaatccttcaatatttctatagtcataggaacagagtactctgttggttgcaggattaatttggtcaaagcctcctggagttacttccaaaattacaggttttcttgagtcactccagtgatgcttatagcagttgtatctctaaagacagaatcagtattacttttaggttcataaaataaaatcatataaaataaaatttaatgtatcacagtcactattgaaacgaccaaaaatctaactgtcatcgtaaatatttagagctactatccaaattgttaaaa

SEQ ID NO: 53409 - DNA, 5415 bp, Homo sapiens
ggctggcggcggtagctgtcgcccgcttggttgcgtgaccgcggggtccgcgtccgctccctccacccttcgcccttcgcccttcgcctcgtcccggcctccgcggcccagcaacggccgtcatggtgccgtcggcgctccctgcgcggccccgctgagcctcggtgcggcggcgagcgcggtcgagatcgccatgcctacccgagtatgctgctgctgttccgctttgcgtcctcgctacaaacgcctggtggacaacatattccctgaagatccaaaagatggccttgtgaaaactgatatggagaaattgacattttatgcagtatctgctccagagaaactggatcgaattggttcttacctggcagaaaggttgagcagggatgttgtcagacatcgttctgggtatgttttgattgctatggaggcactggaccaacttctcatggcttgccattctcaaagcattaagccatttgtagaaagctttcttcatatggtggcaaagctgctggaatcgggggaaccaaagcttcaagttcttggaacaaattcttttgtcaaatttgcaaatattgaagaagacacaccatcctatcacagacgttatgacttttttgtgtctcgattcagtgccatgtgccattcctgtcatagtgatccagaaatacgaacagagatacgaattgctggaattagaggtattcaaggtgtggttcgcaaaacagtcaacgatgaacttcgggccaccatttgggaacctcagcatatggataagattgttccatccctcctgtttaacatgcaaaagatagaagaagttgacagtcgcataggccctccttcttctccttctgcaactgacaaagaagagaatcctgctgtgctggctgaaaactgtttcagagaactgctgggtcgagcaacttttgggaatatgaataatgctgttagaccagtttttgcgcatttagatcatcacaaactgtgggatcccaatgaatttgcagttcactgctttaaaattataatgtattccattcaggctcagtattctcaccatgtgatccaggagattctaggacaccttgatgctcgtaaaaaagatgctccccgggttcgagcaggtattattcaggttctgttagaggctgttgccattgctgctaaaggttccataggtccgacagtgctggaagtcttcaatacccttttgaaacatctgcgtctcagcgttgaattcgaagcaaatgatttacaggggggatctgtaggcagtgtcgacttaaatacaagttccaaagacaatgatgagaagattgtgcagaatgctatcatccaaacaataggattttttggaagtaacctaccagattatcagaggtcagaaatcatgatgttcattatggggaaagtacctgtctttggaacatctacccatactttggatatcagtcaactaggggatttgggaaccaggagaattcagataatgttgctgagatctttgcttatggtgacctctggatataaagcgaagacgattgttactgcactgccagggtctttcctggatcctttgttatcaccatctctcatggaggactacgaactgagacagttggtcttggaagtaatgcataatctcatggatcgtcatgacaatagggcaaagcttcgagggatcagaataataccggatgtagctgacctaaagataaaaagagaaaaaatttgcagacaagacacaagtttcatgaaaaagaatgggcaacagctgtatcggcacatatatttgggttgtaaagaggaagacaacgttcagaaaaactatgaactactttatacttctcttgctcttataactattgaactggctaatgaagaagtagttattgatctcattcgactggccattgctttacaggacagtgcaattatcaatgaggataatttgccaatgttccatcgttgtggaatcatggcactggttgcagcatacctcaactttgtaagtcagatgatagctgtccctgcattttgccagcatgttagcaaggttattgaaattcgaactatggaagccccttattttctaccagagcatatcttcagagataagtgcatgcttccaaaatctttagagaagcatgaaaaagatttgtactttctgaccaacaagattgcagagtcgctaggtgggaagtgggatatagtgttgagagattgtcagttccgtatgttaccacaagtaacagatgaagatcgactttctagaagaaaaagcattgtggacaccgtatccattcaggtggatattttatccaacaatgttccttctgatgatgtggttagtaacactgaagaaatcacttttgaagcattgaagaaagcaattgataccagtggaatggaagaacaggaaaaggaaaagaggcgtcttgtgatagagaaatttcagaaagcaccttttgaagaaatagcagcacagtgtgaatccaaagcaaatttgcttcatgatagacttgcccaaatattggaactcaccatacgtcctcctcccagtccatcaggaacactgaccattacttctgggcatgcccaataccaatctgtcccagtctatgagatgaagtttccagatctgtgtgtgtactgatcggcgcatgaagacctcagcatatgatttgtaaagcctaaaaattaaggccaagctgagctttcagggtttacttaatgtgtattaacatacttcttgaaaataatgatggaacatatctttaaccaaatgtttggcataccatattagaagttttggagctatatataatttcgagtactttcaaagatagatttatgccatgttaatttgctttgaggttcctgttgcctttttaagttgaacatgttttggtttcactttattccactgttaagtagtatgttttaaacttttcacaaatgtaatgttttttaaaaagtaagccttcagaggattgaaactgtataaattgtttatctcttaaacatctacacagccgcttagatgtagaatttttgttgttgttttctgcaaaggcagatacatttaaatatattcctagtcctgggggctgcaaaactgttcggtggctttttgtccccatgctttagataagctgggataggcaccttgctattcagttactataataatatgtgataggcattcctcatcttcttcacaataataggacatctgttgaatagcattcctcgaatataaccctaaaaacgccatactttaaattgtctggttcttgtaatattgtgtttcctgccaagagtttgaccattctgcttgagaagtgtagagcttactcttggagtaccaaactgtgcaatatttttacatcataagatgtattagtttacaggctgtgctttgaaattatagtagtattttgctgtggctccattaattaaatgagatatatatttagtgcagaaaaaagacatttaaaacagctattagttcacctgtgaaggagtctgtacattttgatttctattaagagcacatttatttacatttgtatattattttaaatcctcatagtcaaaaaattctccagatggacttttaatttgtaagatttgaactgtgacttgtatacatctgtttagaatcaattatatttgaaaagctgcctgtgttttaacagtcaagtgtgctaaagtttggtcaatttaagctgcttttgatttcagctaccaagatcacaggtgcactctacacataacactgacagacccataacattacatacatcttagtgaattctatcacatgggtaaaatgaacagctttctttggtaactcataaaattctcttaggacatttttataaagtcacctgtttatagttctatcttttcagattccatttctttttacataaaacagcatacatatcaaaaactgtagcctagaatacagtttaatttttggcttttgtttttgtttaaaaaattgcagtgaagaatggggatgtttgtgtttatggctatttgggcacctttagtagaaacagacaaaagtaaggaaacgataataggacaagcatacttgaaaatttctgaatacttaaacaaaagcgcaacatcttgaaaaccagtctagtcattgaaacctatgaaatgacactgaaagatcctgggctgcttcttaaataagtagatcagcaagacttgtttcagagtgacagtggagtcgttaccgctggaggactaaagggccctgtggcagctgtcactggaactttgcctcttgatcaggaaaaatgcttcaccagtccgtaaagccaagttgtattttttttattgcccttttttccttctgtatttttaaagaaggatgttaatttttgactatatattttaaaaaaatctaagcagggggacatgcaaaaacaatcatcatccacttggatgtcattttatagattaacactgtgtgcttttgtatggaaaaaatatatataatttaatagtataaaaaataaaatatatattcatttgcacttacgtgaaacacaaactttgctctacaaaatttcgtgtttcttagtgattttaaaatgcatgtattgcatgtaaaggaaaaccattacaattaatgtttatcacacctttatcttggtctttgttgatttgggttttgttggggtttttgttactgtttttaaattacagtaggcttctatatatcctggatttctgaactggtcttgttgacaaggattcccaagaaatggatcttttcactggctgactctcccatatctgcaagagattctgcaggaactgggtgtgcacacggtgttgtagccagttcaggtactgaatatttaggatttggtgaagttcactgtattgctatatttttgtagataaataaaactcaataaattgttaatcattctctttttgctgtatagaattgcttatatcactctttctttcatgacattggttaacatttaaatgttcctcctgtacttgtgttgtctgtgaccgcttatagagttttattgttattggtgtttacctgaatacctatgcgtacacacacacatatttccttaatacttctgaactcattatcttttagaataataatactactacactttaccagcaattaacttctccctacccaaaatgtttttcttcctgtctgaaaatggaactaatttgtcttattcgtgcttatatctgtattaaatgcaataaagttagtttttgaaatgtaaaaattcactgtgcaattcatatgtcagcaataaaacatagattatttgtatataagttcatttttatagctattgttacatttaattaaatttattcaatatttgcttaaattaaaaa

SEQ ID NO: 53410 - DNA, 1203 bp, Homo sapiens
ttttttttttttttgagaccgttgatttttaatattttcttaaaaaaatacaaaggaaattaactctgtaggtcaatacaactcagggaaagagggaaaaatggaatttcagagcaaaggttgtttaggttatcacattcccacactcctaatacccacaaaacaagaatttcactccatgacacagaggaacattgaatggtagctcagaaatgttgatagctgaggtactgaaactaacaaaaggattttggttgtccttgattattctgtcctgtgatgaataaaatctacactaaaggacaggtaaggaaaacttatagcagaaaaaagactagatgtaccaaacacagcagtacaaaccactccttggcagacatgtgcttctaaaagaatggggcagtaatcaggtagctgaactactaggctactgtcactcccagcccatccccaaataaatagtgtggaagtgtaatagtgtagtagtatttgatccaacaaagaaaggctttcacccccattcaaggcaaacattgccatggctagatgagccctggcaggtaataagatgactgtaaaatcacaggttcttctagtttatccccagttatactggaactcccacattgatgtcatcttctctcatcccaacatttgttcactcttttatgctgtctccagtgcgaaagacctcggggaaataaaaagatccttcaaataatatacccttctcagtcttccaggttatgtaatacttcagtgctgttctaggttcactcacaatcaaattcagtttaattcacttaattctaacttcaattctgatatacaaatcctgacctccaaaagaagtgtcagatgagtctctctctcccttgtccccaaagttttgtggggctctcccttttgtttccctctagaatggaactgtgttgcccctagctacctgtatatgagaaaatgtagttgttcctggaaaaaaaaaaaaaaaagacttggattttaccaagtttacttaaactggtatctttccaatcatctaggctggatattgcccatatctagtaggctatactcaccttagttctttgcaacatatgaggcacaacgtacatatagtacaccaagcatgtggtaagttagaaatgacaggaaagtgctccccaaagcagtgggagaggcaatgtggtctctcacatccat

SEQ ID NO: 53411 - DNA, 360 bp, Homo sapiens
  misc_feature (1)...(360): n = a,t,c or g
gagcttttggagcaagaaagagtttcaggtgtgccttcttcctgctcctcctcctcactggaaaacatgcttttgtttaacagtccttctgttggccctgatgctcccaagatagaggacttgaagtggcattctgcattcttcagaaaacaaatgggtacttccttggttcattcgctgaaaaagccccataagcgagatcctttgcagaatagccctggaagtgaaggcaaaaccctgctgaagcagccagacctgtgtggtagaagggagggggatgnggatncataaaannccttgtcgatgctnacnaggnnngcagngagangtcctgataccctttcnacttgcattttgtgc

SEQ ID NO: 53412 - DNA, 497 bp, Homo sapiens
gttttttttttgctttttttcatttctttttaatacaaacttggatctttgggtgtgtcctgccaacagaaaacaacaacaacaacaacagaagagaaaacccaaaagagtgaaaaataagaaagaaaaaaaaagctcccgcaagaggttcttctccctcccccccaccatgcgaatttgcacaccacgggaccacagcaggtttacagaatgcaatatacaatccacgatttataataaaacagtatatacaataaataggatattgttcatttttgtcaaacgacctgtagataaatttctcagtgcatacttgcaggggctctggacacctcggggccccgctcgcaacctcttgcacacgctcgctctctcgctctctctctctcttttttttttttgtctttttctaaaactgtgttttgtttttaagttttgtacatttttaaaaagtatttacaattgctggttttgtgcagaaagggcttcaccattgc

SEQ ID NO: 53413 - DNA, 508 bp, Homo sapiens
cttttttttttttttttgccttcgcagcagcagcactttaattccacaaaaactcagaaagccaaaactgattagaacactccacaacaggtgagcttcaaaaccagcaacattctacctgaaccctgagagcagtgagacgcctcccacctcaccccctccgccgtgcaacccattcctcctagctgcacgccggttctggctggggaagtggtatggtagagggccagagggcagaagcagaaggctctccatcagcaggggtgcatctttgcctgcggggtgtttggccaaggacggcacaagctcccacagcccctggcacctgagatgtggccactggagtcaggatagccacagtgggggctggggcttcctctgtccctttctcctgattacatgtgggagtcacgtcctcaccttcaagcagacctaaagccccgtgttcccagggctggtgctctagctagggaggagagttgggaagaacagggtagctacagatggc

SEQ ID NO: 53414 - DNA, 119 bp, Homo sapiens
ggagattgtgtgggtttctaccgtcacattacttgctttttaaaaaaaacacacacaaaaaactttttttttggctttctaaattctctgttcttttcactctgatttttttttttttt

SEQ ID NO: 53415 - DNA, 717 bp, Homo sapiens
cagcggtcgatgacagggcctggcgcggttcgcttttcctgggtgactgtgttcgtggggctgaggccctcgaggtgcccacttccagctttccaccaattactgcactgtctttccgtttcctgccccgctgacgcgtacacctatttcagactcagcgcagctccgcggggagaaaagtgcgggcctccctctcggctccacaccagactccggagtagttcgaactgcgctggggtcgccaagacgcgcgctgcccttctcccagcactgccctccccagcgtctttgaccactcttaatacccacaaacttgatcggacaatttctggtgtgtccagccatgtgtcacgtactgggaatacaaaataggatgaggcaagcttccctgacctcaaagatttcagagttcaagttggagaaatcgacagaatctggtacttttaaaactaaacatgatgaatgaatgtggtgagaacagcggcagaaaatggcactgaattccatagaaatatctggaaaggtcatttcaaaaggggagaaaaggtgcgtagtttagccagctttcagggcaagggagtgaggggcgctgaagctccttgaagttgaaacccaggctagaatgagtaagaatgcgccagtcagggtgcttgtttgagcgggttggttgcagggcgggcagttacgagggataataaagacaaaagcgtgaaacag

SEQ ID NO: 53416 - DNA, 551 bp, Homo sapiens
ttttttttttttttgaggaacaatctggtcaggtgaagtttatttacagtaggttaagaaattaataaaaagtcagaaatcctaagtcagttggaaaacccaagctgtaatgtacccaaaccttctgagtttttcgctgagttgcttgcttctgattttcacccaaggcagttgtcacaaattattcagatcatcaggttgtctttattggccaggaacactgccagtgctgcagcaatcaccaccatcagcactgggagccatcgcccacattgccttctgggaggcagctgctggctctggttcagctcttctcgacagtgctgcagcttacgcaggcaggagagatactcgtcactgaggttgtctaattctgaatgcagttctctgcactccttttccttggcctggagctgcaaagtcttcttttgcagctggtctctgagatcccagtctttctccttccctgtaccctcaggctccacttcgttagggaaggactttggactccacacgggcaaagcctgatctttctttgttaagagtttctc

SEQ ID NO: 53417 - DNA, 534 bp, Homo sapiens
cgaacccggaagtgagatgcaaggcggcgattttcccttctgtcagatcttgatgaacaaagcagtcataattcatctctagaaagatttatatcctggcatttgaaatgctttttatttagaatagtagtaaaaaatggaaaaagaaaaaggaaatgatgatggaataccagaccaagagaattccttggatttttctgaacactttaaccaacttgaattgttggaaacacatggacaccttattcctactggtactcaaagtctttgggtaggcaattctgatgaagatgaggagcaagatgacaaaaatgaagagtggtatcgattgcaagaaaaaaaaatggaaaaagacccaagcagattgcttctttgggctgctgaaaaaaatcggcttaccacagtgcggagactgctttctgaaaaggccactcacgtgaacactagggatgaaggtggagtattaccccttcttcatcgagcagccctacagtgggacactttaggatattggttccagggagcttccattgg

SEQ ID NO: 53418 - DNA, 1033 bp, Homo sapiens
caaataattttaccaaaaactacattttattcaagaaacagaaaaggagtcatttggtgccatgcttttattcaaatgaaaggggaaaaactacactgtaccaggaaatagcaagtatgacagtattttacagcacagcatcttaaaaaacaaaaaacctgtaagcaatgctctagagtggacaggtaagcacaccatacactgtacattgctcaacagtgtccatgaaaccataattaaatagctgaatttggctttaaacagccaaataaaactgtaacagtcattctaatacaaaacggaaaaaccaagaactaaatctttccaaagctgtgtcaaatagcagaatttgacaggctgcactggtaaccacgacaaatgtttggcaaacttaatggaatagttatcataataatttgacctctgatgatgaaagcaccagtgtgtttcagtaaggttgacgaaaatcctcagactttatgaaatggcatatttttcaactgtataattttaaaaacataattaaaaaaaagctgcaccataataaaaaaatctgcagacttaaagaaatatatccatattccttctgcattaataaagtaaaatcttatactgagagcaatgaactctgtggcaatattcacattctacctttagaccttatagacattcaattcaactgttggacacacacaaatttaagaataaagggtggtcctgtttagttttaaagtttctccattgtcttgcatccaattttctttatttaatagcgaagtaatatcacaaagattgctttgatgagggaaatttagttaatattgaaatgaacaaatttagtaacgtaaaatgcttattaaattatccttttgactactattcacattttgattagattcatttataattttttaaactagttttaatctaaacgtgtatttgactatcatttccttctaactgtgatagaaattactgtccaaaaggtaaaatgtgcaattccccatttttaatatccatatgttatatacac

SEQ ID NO: 53419 - DNA, 332 bp, Homo sapiens
ctgctgctcatgttcgaagtcctggtctgcgacagggtggagaggggcacccacttctggctgctggtcttcatgcctctcttcttcgtgtcccccgtgtccgtggctgcctgcgtctggggctttcgacacgataggtcgctggagctggagatcctgtgctcggtcaacatcctgcagttcatcttcatcgccctaaagctggacaggattattcactggccgtggctggtggtgtttgtgcccctgtggatcctcatgtcgttcctttgcctggtcgtcctctattacatcgtctggtccctcctgttcctgcggtccctggatgtggt

SEQ ID NO: 53420 - DNA, 7747 bp, Homo sapiens
  misc_feature (1)...(7747): n = a,t,c or g
gccaataataagtccatcagtgtttccataaaaagtaaaatcatctacaagttaaatttctcttcctaaaaaggccacaccccttataaacaatttactttttataaaaagacaaatgtacatatttacacacgtccttatgtgttcacacatgacttaatggttagatgacatttccaattttaagtcataccaaggcgctcacacttccctccctgggcctgttgagggctgctggggcttgagggggtggtgggcgccgagcaaggcactgtataaataaatgcaaaggccaagagctcgggggaaatgttagtgtacacctctgatcagaaatgtggcaagatccacacgaaaaagtgccaagtttttttcccaagcccctcagccaaagcagggagcagggtagagctcctctgaggctgagggagcatcgccccgaaggaccccactttccttcacatttcactggctttggaacagtccccagggctcagctgaaaaggggggtagttctttgggaacgagattcatttagtgcaattttctcttagtgcagagccagccctgggattggtgttatgcttttctggggtcactggtctgttcccctaggagccagccagtgacagcgagaccctctccaggcagctgggctcagaggaaaaagccagacactgactcctgtccaagtccctgacctgatacactggtctcagaacctcatcttcccaggaggcagggcccagctttacaccacaagaaaaacccagacactggcctgccaggccctgagaggtcaatgacccaaggagggaggccccatccccacttggcagtggggtcacacttggctgttgaggggcccacagaagtccagcttctctgcaccatatccaccatgatgccaggtcctgcttgcctagaggaataagaggggcccaggggccctgctacggtgcacagggaatggcctggatggagggcaaccggactggggtcagcaggctgtccagccaggtggcatccatgttcttcagatctgtgaagacacgctgtagactcagcccaatatcccctagaagatgtgaagaaggttgtatgagggtaggggacggtggcatcaggtgtgcttccccctacccctgaaggccatagacatggcctctgctcttcccagcacagcagtaaacatccactcagcttcaggcaaaccttaaggcatggcagccgtagctaattcacaatgtgtcagtaccccagatgctttaccgccctgctccctggccctgcccccaagctttctccatccctacgtggttctccctcatctaagaagccataaggatccagggccttcttaccccctgggctgtcaatttctggctcctccttacagctaaagtctccatagacagaggtgggctggactccaggttcattgagtaggtaccccttcccatccacgtttgttggctgccactccgactgctccaagagctggggacagaagagcaagaggctatcaactcccttccagtgcagactcaccctgtggccctgcctcaatgagccagctcctctcagccagtatcacacccttggccattttcacaatctcagataggatgcagaagtgcactgcagtcaggacaagggcccgggagaggaggcagaaatgcatgttggcactggtcctcaattcattttcccacccctctcacacccactctctggtatagcatctccacgacttccctctcaactgtgtaaggacatagtaagagggaatgtggcttaaaacaaaggttagcataataaatcaagaaaagatgactagaaaagctagagataaggaacgacatccatgtctcaattttttgggctaatggaacagctggcgtacaactactgcaaaaannnnnnnnnnnnnnnnnnnnnnnnnnnnnnnnnnnnnnnnnnnnnnnnnnnnnnnnnnnnnnnnnnnnnnnnnnnnnnnnnnnnnnnnnnnnnnnnnnnnnnnnnnnnnnnnnnnnnnnnnnnnnnnnnnnnnnnnnnnnnnnnnnnnnnnnnnnnnnnnnnnnnnnnnnnnnnnnnnnnnnnnnnnnnnnnnnnnnnnnnnnnnnnnnnnnnnnnnnnnnnnnnnnnnnnnnnnnnnnnnnnnnnnnnnnnnnnnnnnnnnnnnnnnnnnnnnnnnnnnnnnnnnnntgcaaaaactatattcactttcaaaactgaagcagaaaaaaaaacctggaggataatttgctaactttttctataaagccatcatcatattaacggatcctaaaggctgattattgaagcctgatgtgcatttcccgaactagcagggctggggcatgttggggcagaggatgcaggccagggacccatcgctgatagtgcctgactcacagagctgtctgatgccccaaggcttgcttcaggacgctgtcagaggccaggcctcccacctgccttcccatggtgggtttcccaccagtcaagccacgtgaatgtggcacttgtgggacaatgcaagcagccaggtgacaacagcagctacccatcctctgatttggaacgcttcactggttctctctcctcactgagaaacggtcacttcaagagtgcccaggtaggaaggggctttaccttcatgatgtcctcaggtaatttcccttcctcatcctcatctgttgtagctgtggatggggaaagcagagaggttggctggcagtcagcacactcaccctgcagttccagttccagcccaccagatccccctgccctttctctgtctctctgtctctctgacacacacacacacacacacaccctcccggtggacctatctgccatagagattccagaacaggaccctggcctggtgactcagcctctcaaaccctgaagccacgccgcttcccacccctaccctacttccttcctcaccctccacgatgctgggctacagaggaggaaggagaaccagcacacccaaaatgcacccctggcccccttccctcctctcaccagcccccactgtactgcagcccactctgaactgccttcctagtgtccccgtcgcttgcctccccctatggtggctaagactgcaatgcccaactcaatcaattcagtgccaggtggagttctgatcatcttttctctctcaggaagcccttcacagacccagacagtcaagcagcaggccaggccccaggagcaccaaccttcagaggtggagggcatgggtgacacctggaagttgtacagatcactggtgctgtccggcacaacttccactgggatgtgccagtcggggagagtgctgctgacagcacatggcgacagtgctggggaacagcagaagccacaggtcaaggttgtgtgctttcttagtttgcaagacatcgagcgccctccgaccaaccctgcagcctgcactaatgggccaccatgtgccagcaccatgcctccaagagaaagagtcatcccactgacctgtggggtctcctgccagacctggaccagctcacctggagtcagggcctgctccacctccaagtcctgcatgtagcctggaactgtgtagctgctgtggtcatcaggcagagtggagctgctgagtccatcagagaaggtatcagggctggaatccccacatgactgtcgagggagaaagcagcttaggcccaggccaccttagcatttcttccactgctcaccctggcccacaggtgaccaaaggcctggctgcttaggaccacactcaccttcctcttggccttgctcttagcatctcggctggacttcgactttctttctgtggggcagacgggctgtcagccttggtgcaggctctccagccccagctgacctccttctaccctccctccctgagggcttcccaaggacccagagtccttggataccttttctctggttcttggtgagaggtggaagcatccggtacactcgcacagctgagctgcccttgttcctgctctggtctttcacctcctcgatatctggcagggagttcatggcacagcgaaagttggccttccacgtcttgggatctggctccttttcccctgctttgtatcggcctagagggcaggagaaaaaagaggatcgtcagggccatgggtagggatcctcagctgcccctggctgaaggaggaaggcaaggtacccctgacctcttatgctaccagagagccacagtggtcaaaccagcaggtactcccggtgacactctgcaggtcctaggccctgggccttctcaaatgcccaggcttggcttaaacacatctagcggcctcagtgaagggcccagccagaagcactagagtccccatatccccaaagtgtactatctgtgtctcagactatgcccagtcttcctccttgggctatcagcagccagagggtagagtgggcacagactgggcagcagagaacagttactaaatgggtgggctgactgttctgagatgggcctagagctccatctctcaaggataaggaggccaccaaccacatgaggcttggaccaagggccttggtcaacacgaagaaaaaggcagacctgggtctctttcagtgccctggcttacagctgcttttcacagatgcttttgccagggagaactttcatctagccacaaaccccctgaagccacacactttctaagatcttggcttttccctttgagaatttgctgagatgatcgactctcttctccagaaacacaagtctgccaccagcccctcttcccagtaattctgcatgttgtctcagggagctcagggaccccagtgaagagcctctgtgttaacgtgagtgcctcctcttgtctctaccctgggcttcctaggcctgagtcccaggcacacacctgtgtgaatggcccagctccggaacaaacaggcatccttgttgatgtcccagccatgcttggcagcatgcttccatgggatctggaagatcatctcctcctgaacaatacacacatacacataaggctgtgtcaggtcagagaccacagactttggggctgagtctgagacccaggcctgcccagccagacaggtctgagaaaaggctgacttccccttttttcccctgacatctggcttggacacccatcttgaggctggcttaaacagaccactctggatctctcaggaggacacctagtttggatgagctgcagcattattagctcacaaagacctccctctgcctgttacacatgtgctaggacccacacagggcaccctcccccaaagccctggttttgaagctctgggatgtttctctctggcttgtaagcacccacatggaagtaagaacttcttccattagaaaggactcctcaggacacctgggagcatgggctcttacacagggggtcctggtcataccactgagggagctctgggctagacttggatggtgaacactgtgtaaccctggcattgtcactgtatctctttgcccctcagttttctcttctcggaaatgagaaaacatatccaacaaaattttgaggattaaaaaccagaggatgtgtagggacacagtgacaaatatgaagtctaaggtcttactgttattatatcacttatggttaacagtaaagatttctgagtcgagccgttcaagttcaaatcttggcttcatcacttcttgtgtgatcttatgatctacctctcagtgcctctgtttacttatctgaaaatgatgacattagtaagatctaacccacaggactactgcgaggattaaatgacacaatgtaaataacatacttagcaggtgccaggcacacagggagtgttcagtaagcattagctattattatgatactatcattgctactaagtctatagggtctatgttgccccaagtgcaccagctataggcttcttgggccagagtgactggtgcaagattaactcgtttgtcctctgctaagccagcacgtttctgcccagcagcatccacttctcagtcttctatttgttcgattggagccctgcagagtgctgtgtatgtttgtaagggtctcgcttagaggagagcagaactccagctctgcagatgctggaaagtcttgctgctggaaactggaagtgccttcaggtgggtgccctacctcaagaagggaagaaggcaggagtcatgcaagtgaggcccaggctgggccgtgcacactccctgcatgcaggacccactgggagaaacacctgcttgtcccgttatcacttccctttttgagctgcatctgaagctttggtccctccagaagtacatgggttaaaacagtggcaggaaaacccaaagagttacactcactttattaatccagatgagccccgggatttggttggaattaatctgcatctctagccagggtctcatgcgcatccgagtgatgggcatgttggctgtaaagagaacacagaggctccagtctggaatctgttgaacagtacctgggcagtgacctgcccacccgaggtcacttagttaccctcccctcacctcagccagctgctaggtactacactcagtgcggaggggagctgcgctggaataaaactgctctccaaattttttcagcatcttaggcaaaaatgcttttgccccttccttcagcccctcccagccagtctctggaggagacaggcatgcaagtgatggcttcaggattcatatgcaggaaaagagacaaaatgcacagataccctaatttcagaacttttcgctcaaaattcaaatcctttgggaagggagggacttcttttgcttgatgccaagaagaaattcccttgacttgagttgtaaccactagctagcaaagggctagccgtcaccctgaacagccccctcccgcgcccctgaatccattctacgccttcctgacagccacagcgcccacaacgctaagaccaggacgctaacccttccggcccggtttcccctcctctggagaagtggcccaaggaacacctgtggcgcctcttcccgcagtctccgtagtcacgattccctccagccacctgggcagtaagcagcccttgccaccagcacagggagcccaaaacctgtcgcctggggccggacgtgggaccgccgaaagccgggagcactgggcgcccacgcgtgggctgacactcggtccccggcacggcgtgtggatgcgcgggacgaacatagcgggccacctacaggcccctggcggctgcgcgcacgcagatctgcgaaagctgccgggcgccggcagcctcgtccgggtgggcggtccacgcccggtcccgccctccccgcgccgcggcccgcggctcgcagctcctccggcgccccccggagcccgcgcggaggcccgggcgacacgccgcgcgccggcgagtctccagcctggagctttcgaccccccacttcctggtgccccgcgcgccttttattcgacgccgccggtgccccggcctcaaaggcgtactcacctctgctgcaggagcgattcggcggtcgcgcgcgagggtcccggcgacgcaggggctgcagtgagggcggagcgcgactccgagtggaagagggaagaaggcagaggttgccgggttcttaaggcgcgggcacggccggcgtggactgggcacggctccgggtggcctcggttcggcggggctcgggcgcacgtcttgcctcgactaaggagtggcgagctct

SEQ ID NO: 53421 - DNA, 504 bp, Homo sapiens
gaagggcgagcggcgacggctgcgatgagtgcctctgcggccaccggggtcttcgtgctgtccctctcggccatcccggtcacctatgtcttcaaccacctggcggcccagcatgattcctggactattgtaggggttgctgccctcatcctgttcctggtagcactgctggctcgtgtcctcgtcaaaagaaaaccaccccgggacccactgttctatgtgtatgcagtttttggatttaccagcgtggtgaacctcatcataggactggagcaagatggaatcattgacgggttcatgacacactacttgagagagggtgaaccgtatctgaacaccgcatatgggcacatgatctgctactgggatgggctctgcttcattatctgatgtacctgggtgatggtggcagccattagcatggggaggaaacttatagaaccattggcctatattgggttggatctattattatgagtgttgttgtttttgtgccagggaaca

SEQ ID NO: 53422 - DNA, 53 bp, Homo sapiens
ctccaaaaggcacctctgatgtttaagtgtttttcgtttctttttttgagaca

SEQ ID NO: 53423 - DNA, 316 bp, Homo sapiens
tttgaattcaggtgcagtcatcagttctttaggggctgcaatgttttaaaaaaaataagtcatcagattttaagaaaaaagtgatgatttcttattgatatttttgtaacagaatatagctcttaactgaaaatccagaaccagaaacataaatcttgagtttcttttcatgtacataaaaagcaatagccttttagtatagatagccctgagccaaaaagtaatagaattttctctagatatttaatacagagagtgtatagactgactcttaaggttaataatgtgcaaaatatcttaaacatccctcccctta

SEQ ID NO: 53424 - DNA, 406 bp, Homo sapiens
ggcgcggctcgaggcatccctgcagggcgctcctccgagtccctcggcgctctgagcccacagggaagaaggaggggccggcgtcagtgacgtcagcgagaccgaggtgagcgtgggcgttgccagtggtgctctgtcagtgcctatggattatggcagggaaagtaaaatgggtcactgatatcgagaagtcagtgctgatcaataactttgaaaagagaggatgggtccaagtgacagaaaacgaggactggaatttttactggatgagtgtgcaaaccatccgaaatgtgttcagcgttgaagctggatatcggctctcagatgaccaaatagtcaaccattttccaaaccactatgaactgacccggaaggacctgatggtgaagaacatcaaaagatcagg

SEQ ID NO: 53425 - DNA, 3837 bp, Homo sapiens
tatgggctcgagcggccgcccgggcaggtgcccgagcgagggcgcttcgctcccagccaggacatggccgcacctctccgcatcaggagcgccggctcacggacttctcgcccaactccctgagcgctccctcgtttcgatctttagaaaaccccgctttctttctggggccgtgacgaggggcagggagcggcgagcaaggatgcgttgaggaccgcgagggcgcgcgtctcgggtgccgccgtgggtcccgacgcggaagccgagccgcctccgcctgcctcgacttccccacagcgcttccgccgccgcctgccgtgcttgatgtgcagaaagaagccggacaccatgatcctaacacaaattgaagccaaggaagcttgtgattggcctacgggcaactggtttcccccagtatgcacagctttatgaagatttcctgttccccatcgatatttccttggtcaagagagagcatgattttttggacagagatgccattgaggctctatgcaggcgtctaaatactttaaacaaatgtgcagtgatgaagctagaaattagtcctcatcggaaacgaagtgacgattcagacgaggatgagccttgtgccatcagtggcaaatggactttccaaagggacagcaagaggtggtcccggcttgaagagtttgatgtcttttctccaaaacaagacctggtccctgggtccccagacgactcccacccgaaggacgggccccagccccggaggcacgctgatggacctcaggcgaggcgccaggaggtgtcttccgtccgcaggcctcagcagcactggcagcctccccagccacgcgccccccagcgaggatgctgccaccccccggactaactccgtcatcagcgtttgctcctccagcaacttggcaggcaatgacgactctttcggcagcctgccctctcccaaggaactgtccagcttcagcttcagcatgaaaggccacgaaaaaactgccaagtccaagacgcgcagtctgctgaaacggatggagagcctgaagctcaagagctcccatcacagcaagcacaaagcgccctcaaagctggggttgatcatcagcgggcccatcttgcaagaggggatggatgaggagaagctgaagcagctcagctgcgtggagatctccgccctcaatggcaaccgcatcaacgtccccatggtacgaaagaggagcgtttccaactccacgcagaccagcagcagcagcagccagtcggagaccagcagcgcggtcagcacgcccagccctgttacgaggacccggagcctcagtgcgtgcaacaagcgggtgggcatgtacttagagggcttcgatcctttcaatcagtcaacatttaacaacgtgatggagcagaactttaagaaccgcgagagctacccagaggacacggtgttctacatccctgaagatcacaagcctggcactttccccaaagctctcaccaatggcagtttctccccctcggggaataacggctctgtgaactggaggacgggaagcttccacggccctggccacatcagcctcaggagggaaaacagtagcgacagccccaaggaactgaagagacgcaattcttccagctccatgagcagccgcctgagcatctacgacaacgtgccgggctccatcctctactccagttcaggggacctggcggatctggagaacgaggacatcttccccgagctggacgacatcctctaccacgtgaaggggatgcagcggatagtcaatcagtggtcggagaagttttctgatgagggagattcggactcagccctggactcggtctctccctgcccgtcctctccaaaacagatacacctggatgtggacaacgaccgaaccacacccagcgacctggacagcacaggcaactccctgaatgaaccggaagagccctccgagatcccggaaagaagggattctggggttggggcttccctaaccaggtccaacaggcaccgactgagatggcacagtttccagagctcacatcggccaagcctcaactctgtatcactacagattaactgccagtctgtggcccagatgaacctgctgcagaaatactcactcctaaagctaacggccctgctggagaaatacacaccttctaacaagcatggttttagctgggccgtgcccaagttcatgaagaggatcaaggttccagactacaaggaccggagtgtgtttggggtcccactgacggtcaacgtgcagcgcacaggacaaccgttgcctcagagcatccagcaggccatgcgatacctccggaaccattgtttggatcaggttgggctcttcagaaaatcgggggtcaagtcccggattcaggctctgcgccagatgaatgaaggtgccatagactgtgtcaactacgaaggacagtctgcttatgacgtggcagacatgctgaagcagtattttcgagatcttcctgagccactaatgacgaacaaactctcggaaacctttctacagatctaccaatatgtgcccaaggaccagcgcctgcaggccatcaaggctgccatcatgctgctgcctgacgagaaccgggaggttctgcagaccctgctttatttcctgagcgatgtcacagcagccgtaaaagaaaaccagatgaccccaaccaacctggccgtgtgcttagcgccttccctcttccatctcaacaccctgaagagagagaattcctctcccagggtaatgcaaagaaaacaaagtttgggcaaaccagatcagaaagatttgaatgaaaacctagctgccactcaagggctggcccatatgatcgccgagtgcaagaagcttttccaggttcccgaggaaatgagccgatgtcgtaattcctataccgaacaagagctgaagcccctcactctggaagcactcgggcacctgggtaatgatgactcagctgactaccaacacttcctccaggactgtgtggatggcctgtttaaagaagtcaaagagaagtttaaaggctgggtcagctactccacttcggagcaggctgagctgtcctataagaaggtgagcgaaggaccccctctgaggctttggaggtcagtcattgaagtccctgctgtgccagaggaaatcttaaagcgcctacttaaagaacagcacctctgggatgtagacctgttggattcaaaagtgatcgaaattctggacagccaaactgaaatttaccagtatgtccaaaacagtatggcacctcatcctgctcgagactacgttgttttaagaacctggaggactaatttacccaaaggagcctgtgcccttttactaacctctgtggatcacgatcgcgcacctgtggtgggtgtgagggttaatgtgctcttgtccaggtatttgattgaaccctgtgggccaggaaaatccaaactcacctacatgtgcagagttgacttaaggggccacatgccagaatggtacacaaaatcttttggacatttgtgtgcagctgaagttgtaaagatccgggattccttcagtaaccagaacactgaaaccaaagacaccaaatctaggtgatcactgaagcaacgcaaccgcttccaccaccatggtgtttgtttctagaacttttgccagtccttgaagaatgggttctgtgtctaatcctgaaacaaagaaaactacaagctggagtgtaggaattgactatagcaatttgatacatttttaaagctgcttcctgtttgttgagggtctgtattcatagaccttgactggaatatgtaagactgtgcaaaaaaaaaaaaaa

SEQ ID NO: 53426 - DNA, 521 bp, Homo sapiens
ttttttttttttttcctttttcttaaggaatccattcatgttggaagcccagattccctaacatatgcactagtggttggctctgggaagtaacagtcaccagagtctggaagttcttcgcttgaacttgagtagccactgtactattggaagccagatggccaggtattggcaatggccagggaaatcccaagctggctcaagagccagtggttagggaagaagaaggtcaagtggactggtaaaaattctacttcaactgcccttattcatagatacaactttcctaacagtctcactctccaccagtcccatatccacaacccactcacaggcttcaagcagcaggaccttgccatattaccctaaatctccatattgcagcagctctaccctgtcccctcagcttcttcaataatgaccttttttaaaattctcttccctgactgctatatttacacataaatttcttagtgttactgaagcttcagagctgctgcctatatgctataatgtcgacc

SEQ ID NO: 53427 - DNA, 1008 bp, Homo sapiens
  misc_feature (1)...(1008): n = a,t,c or g
cgaatttaatacgactcactatagggaatttggccctcgaggccaagaattcggcacgaggcggtgtgccgctacgtgcgggctctcaaggagctcagcctcccggacggagccggcggctgcggggcgaggacggcggcggaccggggcagccccgcgccctggccagctctactgagatgaagaaagaaaaagaatacctgctcagctccagagacacgtaaagggacagagattgggggacagaaggaagtgcattaattccttccacgacccctgaagagcagcggtgggtctgagcatcctatctccaggaagcaggccagcaggcaagccagctgccacctcgtcctgtgcaaagcacagccggccgtccccaaaagatttccaaagatgatgttaaacccagccacggttctgatctccaggaaagcaattgctgtggtacaaaaggacaagggttaaaagagaacagtgggagctctctttcccaactaactcacgcagtgtgacgcagaggctttcagcacagcccagggtgcccgggactgaaaactccttcaccagccccctccacaggatatagaagacttagatcactacgagatgaaagcagagcccattagtgggaaaaagttggaggatgaaggaattgaaaaagaaaatttggcaatattagagaaattaggaagactgaaagacaagagcatttaactgcaaactgttgtcgttgtcaactgggttgtcttcctgaagtatgaatccggtatgtattgtgtggaggagcattacgtactggaacttctcacaaaacagggctgaagcagtgcctactcgacagaaccggtcatcgtaccaagaaatgccacgtgactcaaaggcaaagccagagtgcagcttggagccaagaagatgatgtctcaatctgtcaccccagattgagtgcnatggccgnttttcagccactgnaactctggctnccagggtgactggacgtttnattaaccc

SEQ ID NO: 53428 - DNA, 1617 bp, Homo sapiens
ttttttttttttttttttatgtatagaaaccattaagacatttatttatataaatgaacaaagtatacagataaatcacataaaagcaaatcagaaaaactttgatttctctcctatgtttactaaattagcaacaacatataaaacccctactcaaatggtaacactgtaaaatgttacaactctttgggaatgcaataaggcaaacataagtcataaagttcttcatattatttcactaaataatccccctcccaggaatttatcataataaaatttaaaactacttaagtattcagcaatagagaaatactctaaataaattaagagtataaagtaatataattaaaataatcattatcacaactacatacatatagataatatcaaatgaaaaagtcaatttaaaagtataggtgccttaagactatgtgaacaacaaaaaggaaaatagtaatataaaaatttaaattctaaagttactacattaagatggtagaggtaacaggtaattttcccatttggcaaaacttcagttttaaacataaaagaaaaagagtggctatcggttttttaaaaatggtcaacaatctctactcctctattagtaaactctgtgtcaatttttaaggtgaaaaatacagcagaaatacctctgatgtgttctaaaacctaagtatttctctatttggactttaatttgcaatggaagaggacatattgtaacctgtaccagtccaacaggcagatgtagccactgccacctttggttgacacacactgtggggcactagatatgaacaggtaaaactgtaaattttccattttaatgactttgtgtgtttgatattttatgttaatgccatcatggtattaacactccttttccttacagttttgtctcatactaagaattgttttagtgttttcatttaaaatatgttgccaatatgttgaaaatgctgtactgatgcatatataacattttacattgagtttaaattgggttaagcacaaataaaaccactttagtttacatattttaaatttcagagttagagactacaaagcaggaaaacacctttaaaaagaaaggcaaagcataaacatctaaaaacttgtattttatgaaatttctcatgagtcttccttttgaaactgtatttgagtaaaggaagagggatctgaatgtttctacagactggctgcataatatattgctttcccataacaaaaatatgaagcactcattatatatgaagtttactattacaatgtggctacatttaaaaaattatggtaaagagggatagggaactttcagaaagctatctgaatgaaaatgtttgagaagaactgtttttaaatatttagagcagaagagattagctggaaatgcagggcagccatctcaacatctgtaagtatctcttgaaagagcaaactaaagagacaatgtcacagggataacaccctacagagaaatataaataaatgctaaagaataaagtttttagttgaagacacattctttaaattttaaaaattatgttacttaataacttggtacaaagtgcttgaccatgttgacattaccatgaaaatatctcatagctg

SEQ ID NO: 53429 - DNA, 518 bp, Homo sapiens
ttctttacaatcttgttctccttgtccatggaccatcaatagttgacttgccaggtttaattctttcattgcttgagaagaaaggaatcaaaggactgtgtgtagtaagctgacggtaaagttaagattaaattaagacagagagagaatacatatcactgccaggcctgataggaaaaatctgctcttccttttaataacagtgatgaattgtcaggaccttatttaggaaaccctgacctacccataactccctgctaggctaagtagaaaccaggttatttctccctgcttatggctccccgcaaagggacttgcagcgtgtcctgcaactttgtcttcagatagtgcttcctacaaaactaggtcttgttttgtaatcttttctcgtgttgaatcagatctgcttacttatttaggtttggttatgagcttgtatctcactgtatttctcatgctttgttcttttaaacaaatcctttaaactgtgtcattttgtatacacatgtgaggtttga

SEQ ID NO: 53430 - DNA, 506 bp, Homo sapiens
gggagcaaatttaactctatagttacctgttcttcaaagaaaaaagaaacttagaaggtagtgtttctgaggtcataactgtgaggggttgtatacaaagaatgagtcactttttaagccatttggaaaattagatctgtttctaattagatgacattttctccattctctgatttcctgaagattgccaagcatttgcttgataatctaccaggactgataattttgcagaatatgaggcaaatatatgaaattcagttgtgtatctatatcctagcaacaaacacttgaaaatataacgttaaaatatgccatttgtaatagcatcaaataagtcaaacttctaagtaggaagaaagttaacaacaagacctctactctgaaaactacaaaacagtgctgggaagaattatagagcaccagaataaatggctattctatgctcatggattgaaagactgcataatggtaagatgtcagttccccacaaatttgttaatctagat

SEQ ID NO: 53431 - DNA, 355 bp, Homo sapiens
  misc_feature (1)...(355): n = a,t,c or g
tctttctttggcttcttgctcttggagtgagtttctctgttgcagacaagtcctgcatttgcttaaaagctcttgcagagttggaattagagctgggtttaactgtttgggagtgtgtactgacaggagcaaagcgagtgccctcaggtcctacaaaaacccagataggaacatttcaaattctaaagccaacactttgatgcagttgtttacagttaattgcagatgtttattttcccaggaatccattctttcctaagaataccctggtttctctgggattcttagaatgataaaaccagaaagccagtgttaagatactacagcatttcattagttgttttttttttngttt

SEQ ID NO: 53432 - DNA, 408 bp, Homo sapiens
ctgcaggctccctcgggagtggtccttgggccgtggccctctgggaggcctgagggagctcaatcctggtagcaacacccctgaattcctggtggtgaaaggatgtggccccaggacccatcccggaaggaggtgctgaggtttgcagtcagctgccgtatcctgactctgatgctgcaggccctcttcaatgccatcatcccagatcaccatgcagaagccttctctcctcctcgcctggccccctcaggctttgtggaccaactcgtggaagtattatgcctacacccaattctgtctgccaggctcagcccgccccattcctgagcctttggtacagttagctgtagacaagggctaccggattgcagagggaaatgaaccgccttggtgcttctgggatgttcc

SEQ ID NO: 53433 - DNA, 170 bp, Homo sapiens
aataaatctaagtcaaagaatgcaaaggatttacccaaattaaatcaggggcagttcattgaactgtgtaagacaatgtataacatgttcagcgaagaccccaatgagcaggagctgtaccatgccacggcagcagtgaccagcctcctgctggagattggggaggtcgg

SEQ ID NO: 53434 - DNA, 460 bp, Homo sapiens
ggctgttggatggggatgatgtatataactatctattcgatgatgaagataccccaccaaacccaaaaaaagagatctctcgaggatccgaattcgcggccgcgaattccagatctatgaatcgtagatactgaaaaaccccgcaagttcacttcaactgtgcatcgtgcaccatctcaatttctttcatttatacatcgttttgccttcttttatgtaactatactcctctaagtttcaatcttggccatgtaacctctgatctatagaattttttaaatgactagaattaatgcccatcttttttttggacctaaattcttcatgaaaatatattacgagggcttattcagaagctttggacttcttcgccagaggtttgtttttattcatatacttttaatgacatcattgccaatacatacattattttctttaactttatttttacaataagccc

SEQ ID NO: 53435 - DNA, 644 bp, Homo sapiens
cagtgaaaccaacaatatgcagaaggaggactgacttatgggtgaaggaggacaatggagttacaatgttgacctagaactctctctgctcatgggtcctccccatcggtcaggccgcactgaaaccaaatagctcattttgcacacaggtgtgtttttctcttcttttctccccctgtgcctgccccatctgaagtgacaccctcctccaccctccacagcgctcacattcttccgtggcactcttgatcaatcaagcaaacaagaactttccctagacctttcttcagagagcataaagaacatccaagtcaatattacctattctttgagatccagggactgtgctaattttgacattttatatgatattataccattttaaatgtttgcagatatataccaccttcaaaattaggaaaaacaagctgagttcattttctaacactacaaaatcagcattcttgctgctactgtgtcctaatgatatctggcaatcttaaccaaaagcaggtagctgttccacggtctcatcaccctgctcactgtagggtgtgctgtgaagccaatagtaagtctcgaattagcagttgcttgtccatgccactgctggccacaaaggggccaggccacagccaggatgc

SEQ ID NO: 53436 - DNA, 713 bp, Homo sapiens
aatggcccccatttagaagaggtgtgcttcttgaaacctgaggacaaggtcatctgctgccagaaaatgtaaacctgagttgactagagtggtggtattcattattgtaaagacagcttgaagaatcggggaccactaggaaagcttttcttgcatactcagcttgctttatcatttttgctggtccttttaacatttgcgaggagtaggggcctggtcctgaatgacttggaggctttcattatttatcctgtctgtattgaccggtttttgttttttcagaaggcagtgatgatgaaaacttaggaagaaggtattttgcaataagcttggctgagtgtccatgggaagaatactttccctaaagagagagaagcactcacagaggctgcctttctcctgagctcggggagaaggcagcacatcacaacctgtcacattgaaataggcgctcattctgctatttcaccttccgtcctgagcagagcctgaattacgtttttgggcaatttcatggtgtttcaccagagggcgctagagactcaaacgaaatgtccatctggaaagattcgggagacactttgccgaggggatgaagctgagatgatgcttgtatggaaagtttgatatttttatcagtcacatggcttttgaaaaatgatgtatatattttaaattaactattttcaataaaatatttcactcaaaaaaaa

SEQ ID NO: 53437 - DNA, 338 bp, Homo sapiens
cggcatcggaactggaggccgcactgcacagccaccagcacgacattgaacaggaggacccccgcgggcggaccccactggagctggccagtgtctctgggaaacctggagtctgtgagagtgctccttcgacacaatgccaacgtgggcaaagagaaccgccagggctgggcagtcctgcaggaggcagtcagcactggagaccccgagatggtgcagctggtgctccagtatcgggactaccagagggccacgcagaggctggcgggcattccggaactgctcaacaaacttcgccagcccagggtcacgtaggaaagagagacggccaagctcac

SEQ ID NO: 53438 - DNA, 789 bp, Homo sapiens
gcatatagtcaaagttgccacttctttttcttcatatcatcgatctctgctcttaaagataatcttggttttgcctcaaactgtttgtcactacaaactttccccatgttcctaagtaaaacaggtaactgcctctcaactatatcaagtagactaaaatattgtgtctctaatatcagaaattcagctttaatatattgggtttaactctttgaaatttagagtctccttgaaatacacatgggggtgatttcctaaactttatttcttgtaaggatttatctcaggggtaacacacaaaccagcatcctgaacctctaagtatgaggacagtaagccttaagaatataaaataaactgttcttctctctgccggtgggaagtgtgccctgtctattcctgaaattgcttgtttgagacgcatgagacgtgcagcacatgagacacgtgcagcagccctgtggaatattgtcagtgaagaatgtcctttgccctgattagatataaagacaagttaaacacagcattagactatagatcaagcctgtgccagacacaaatgacctaatgcccagcacgggccacggaatctcctatcctcttgcttgaacagagcagcacacttctcccccaacactattagatgttctggcataattttgtagatatgtaggatttgacatggactattgttcaatgattcagaggaaatctcctttgttcagataagtacactgactactaaatggattaaaaaacacagtaataaaacccagttttccccttaaa

SEQ ID NO: 53439 - DNA, 740 bp, Homo sapiens
ggcacctcgggcaggacctccctggtcggaagtggccgtgagcccaagccgcggtccccgggtgagtacggggcggggcggaggcatgtgcgaggctctctgcctgtacgctggaaagtggggattgcaactcggggagggatggagcacgcgtcgtcgcctgggaaacgggtcgacccgcggaaggcgagcgggtgggacttccggagcagttaatggtggggaaactttctagtggatgtgggaggaggcgggacttcctgcagcaaatttgggctgtgcgccgctcaagcccgtttacctgctccccaggccggcacccaggatgggcgaggtggaggccccgggccgcttgtggctcgagagcccccctgggggagcgccccccatcttcctgccctcggacgggcaagccctggtcctgggcaggggacccctgacccaggttacggaccggaagtgctccagaactcaagtggagctggtcgcagatcctgagacccggacagtggcagtgaaacagctcccggtgggggcggagccagtcccagctcctccctctctttctgcagctgggagttaacccctcaactaccgggacccaggagttgaagccggggttggagggctctctgggggtgggggacacactgtatttggtcaatggcctccacccactgaccctgcgctgggaagaacccgcacaccaaaatcccagccagatacttcgctggcacccc

SEQ ID NO: 53440 - DNA, 2973 bp, Homo sapiens
tggagatttccatcatggcggcgtccatttcgggctacaccttcagtgctgtgtgtttccacagcgccaacagcaacgcggaccacgaaggatttttactgggagaggtaagacaagaggaaacgtttagcatcagtgactcacaaatcagcaacacagaatttctgcaagtaattgaaatccataaccatcagccttgttcaaaactttttagtttttatgactacgcaagcaaagtgaatgaggagagtttggacaggattcttaaagatcggagaaagaaagtcattgggtggtacagattccggcgcaatacgcagcagcagatgtcctacagagagcaggttcttcacaagcagctcaccccgcatcctcggcgtgcccgacctcgtctttcttctcttcagcttcatctccactgccaacaattccactcacgctttagaatatgtgctcttcagaccaaatagaaggtataatcagaggatatcactcgctattcccaatctaggaaatactagccagcaagagtacaaagtgtcttcagtgccaaatacttctcagagttatgccaaagtgattaaagaacatggtactgacttttttgacaaggatggagtaatgaaagacatcagggcgatttatcaggtttataatgcacttcaggagaaagttcaggcagtgtgtgcagatgttgaaaagagtgagcgagttgttgaatcttgtcaggcagaagtgaacaaattaagaagacaaatcactcagaggaaaaatgaaaaggaacaagaaagaagattgcagcaggcagtgttaagcagacagatgccgtctgaaagcttggacccagcgttcagtcctcggatgccgtcctctgggtttgcagctgaaggcagaagtacacttggagatgcagaggcctcggatcctcctcccccttactctgattttcacccaaacaatcaagaaagtactttgagccactctcgcatggaaaggagtgtctttatgcctcgacctcaagctgtggggctcttccaattatgcttccaccagtgccggactgaagtatcctggaagtggggctgaccttcctcctccccaaagagcagctggagacagtggtgaggattcagacgacagtgattatgaaaatttgattgaccctacagagccttctaatagtgaatactcacattcaaaggattctcgacccatggcacatcccgacgaggaccccaggaacactcagacctcccagatttaactaaacaaaagaaactctccacctagcactgtttttcttcattgcttactgagagggtttttgagaacttaatctggggggagaactgctttctcagataccttaactcccgagaagagagtccttgtgcacagaacttgtgggagcctccatccgctgctctttacctttggatacagtgtgcaagtttcatgacagaatcattaagataatcaaattgtcctaattctggtgcgattcatggatatactggtaaatttaggcaaagtgaaacttatcagcgtagtttctgttctttaaaataaattggaaattagagactaagcacaattagtctataaatgttctataaatcaaaaacttacctcttgcactatcatgccttgaaatttactttttcaaagggaaacaagtttagcagcagccttcaaagaacttctttctatgatgagccaaattcatctttgccagaaaagaaattttgataattccaagaagcctgattagaacaaatcagatataccttctcttgtctgcatgactttgtgagataaaagagagggcttccaacttttttctactagcttgatatgtattatcacttaaaatggttgcctttaaaaaaaaaaagtagagatactaattaccagtaagtaatcatccaaataaatacgtcataaaataaattaattattttttctttgatggattacagtgactactgtgttgcactggcacatttatggtctctgttctggaatcttggaggacacacagcagtggagaacagaaggagtgagttttataatgaacagattccagacacggtaggtttagctgagttcatacagaggagatataactcatttagatcttctgacaaatcctagtgttagttttatctgtggaggaaagacatttaataataaactgtttgggaatcttggtgaataaagattcattttcaagctgaataaccatacttattttattttaagttgccatttggggaataattgcagtatgtgtagagactctcttgggatgcacttatatttttatttaatgactacttgttttctagttttgcccacaacgtctgaaaccactaagacattcaggagcatgttgagcttctggtttggaaacagcaagacccaccatttatgacaaggacagccatgaggttaatacttggagtttaactgccttccctttgaactagttaaaatctgtaagaataaggaagttgttgaaggcttaaaatctgggttctgaaaaagtagtttcagtttataggatacacatttactcactgagctccagttccaatactaaattagacagtatcatatagacggaaaatgaaatgctagactgccgttctttggatcgccactctatgggggtctgtcttttaactactctcctggttatgttggccttacaccactgccatttgatttaaaacgctgcagacactttatctgcaaatgtgttccagttgttatcagctacctactacgcagcttcagcgccagtgtgaatttatttttttttaagtgccattaccgtctcctctgttcagattttgacattcaggaaaatatttttattttgatgccatactgaaatctacaatgtatatctgacaaagcagttaaatgtgacaataaaaaacttatttaatcatggtaaaaaaaaaaaaa

SEQ ID NO: 53441 - DNA, 1703 bp, Homo sapiens
tttttttttaatcttgaataagtagtaacaactttattttaactcaatgtgttgaaatgcaaaaaatattttcagcaacaagatacatgtattatgtatcttatcattaacatcagctaattaaaaacgaggctgaaaagttcaatataagtttttatacacttgaatcttgaaaatcaatttccccaagaactaatttttaaataatttttgcagaatttcattttcaaaaatgagactcaggtaagttacatcttcattttttaaaactgaatgcaaaatttactgggttacagtatacaatgataaactctgacaacaaaaaaatttaaatataataatttcttttcaaacataaagttcacatactgcaaacagaagacactgtgtgatttcattcctagtaaggagttagtcttgcatatgataggcactcaatatttgttcaactggacctaaaatttacatcattccatgaacacttaaataaagtagagctcattaatttgtataaaaaaggtttgtaaaatacactttgtgtgcggaaagtgctgtctttatagctgtctttataatctgagaacactaaaacgaacccactcacccacccaccttcttttgtaagaataaattgaatatttttattttatccatcaaagagcatgcatgtccaagtcagaataattcacctcttcaagtatacttggctctaagccaagtatacttaagtatgttgagctggattttcacaatccctgttctattttagtaacactgggtcatatctatgacccacattttataaagaattctgattaagattttaaatttatgaacaaaatttaaatgggtatattattaattctaattttggccatctaagctcttatttagatccagtttaaaaataaatgaataatgttcatgacaactttttgagatctttgttaatattttaaaacaattttattataattgatgtcctaaaaaggcactgttttcacatttcatcatgcagtaaattgatcacatttttgaaaattatcatttcctctgttaatcaattgtcctccaaagtaaagcatatttaaatgaaatatttctgctaacctgaactttcaacatttaactgatttctatttccagaaattcactctttgtaacataccacacacaagccccaagcaaatacaggtatgtacacaaacacacaggacacacacggcggcatacacacacacacacacggatccacatatttcatgcaaggttctccaattaccaattcaagacaatgacacatgactattcaaggaggtaacattggcaagccatattatggcaccttcattatttgtgctccaaatatcaacacacattaaaattaaaaatgaaaaggcacaaatatagtatttctaagtgttggtctaaacaacagttacccaatgattattcttatagtatgcaacatttgaaaccattcactaccttctcagaaaaagccttgcttaggtgacaaagggaaacaggaacaggctaatagctcaaaaggcgggacagaatatctatacctattttgaaagtaatgtatgcagtttaaaaatgaggagaaggaggctattagagcactcatgtcagaatacattaagtgtttttatcattgcctcaagaacccacaataccaaaaatatacataataaata

SEQ ID NO: 53442 - DNA, 557 bp, Homo sapiens
  misc_feature (1)...(557): n = a,t,c or g
ctgaaacaatgtctcattaagaatttagggttcttccatgggcttactgacagttgcccagatctgaaggggaaagggtcttgagaaagaccatcactggctcaactttagggcactgttcagngtcaacatgatgtggtttagcagtgatcacatctaaacaaagtttaggtaaatgaattatcgcagagaaaaaccacatgagaaaatttttgtactccaaatttacttcccaataaatattcagcaaagtagtaaaatgaccttaaagataaaaatgattagggaatagccttagaaaatttataggtataaaaaattcaaggacaaactgtgcatttaatggacacaagaattgactctaactccatgtctgtggtttctttgaacccatatcaaatgtatgactatttagagtgtttataagagataatggaactgaactttcactcaattaattgggcattaacaaccttcttttatgtttgttcctgatatagtctgaatcttaggaagaaggtaaaagaaaggaggcaagagaatagttatgatgaata

SEQ ID NO: 53443 - DNA, 2167 bp, Homo sapiens
  misc_feature (1)...(2167): n = a,t,c or g
actgggaagaatggtgatgctgttcaagtaataaggacaaaggggaaccaggcactgtgagcctctgtggggtgtgttactcttttagctcatgtgtttcaagtcattctaccccttgccgtctccacatccaaacctaactactttggattttaattgcagctcctccacccccaccacctgtgatccgaaatggtgccaggggatgctccccctcccccaccaccataccgaatgcatggggtcaggaacccccgaggccgagggaaaggcccccacctccaccctcaagggacgccagctggggccaccccttccttccttccaccgcccctgaggaatggccacagagatttttattcaccactgttccggtctttcttggatgattttgagtcaaagtattccttccatccagtagaagactttcctgctccagaagaatataaacactttcagaggatatatcccagcaaaacaaaccgagctgcccgtgggagccccacctctgccacccattctcaggtgaagcctggcttggtcccgttcctcaggaaaaggatggaccttctcttcttctcagatggtcccttccattcccctgaaacctgcatgagagctcctaacatgtttctccaatgcaatcaagccctagactccaaatgtcctcccagctcacctccatctatgcatctcatctctggatttggtgatcagactctatattgacagtaggatctcaaaccctgcatccatccttcctccagcaagccctgctagccacatgagggaacaagtttccgtgtcttctgccttcctcttggggaaaggtgccttgttgtgatgaattaactcactgttagggcagggtggagaatggtactccttccttctcctgtccactgtgggggaagcttggcaggtatattatatttcatcatttaggaggctgggcatgaccaggacttatgggtgggaggggagcatttttagtgaagcaagaaaggagtttgccaagaagtgatctgttttaaaggtcatatttggagaaagggcaaggaattgggtctgctttatttttgggggtattttgtttttgttctcacctgctgcccccccaccccaccaccccagggataaattggatataaacactaaatactaatcagttgaacttaacatttaataaaaagaaagggtgaaataaactgaagaccattttagaactagtcagttctctgcagcaaagggaacaggagccatttgaaccctctgggacccctcaccccactgcttcagggtgctaggctgagggatgtttttcctcccccttaccgcccatgcccttgaaagaaaagtcactttttgtggagggcatcattcattcctgattcacaaaccccaaaaacctctggtgggagataggaagataggggcgtgggcctgggccttaacctcaatcttgtgtctgcctcagtcttttctgactggccctgaagttgtcagtggctctttctgtccttcagcccctggaaggtgctccaggataacaaagaagggcaggttgaagcccctcatggaaggagctggctttgtggggctgcaaaggacttttaagtcctgcctgtactgaagttcacagcccacctgactgagcagactcttcctgttcctttctctaccacccttgccttcccaggactgcacggtttaacacagcagagtacagaagggtgaagaagtgagcagaggcttatgaagatattcagatactcttctatgccaggaagcacaaagactttgttgagatttgcctcagttcagtagatcttccttggcagccagccataggttgtttctttgtcttccgggtcctaaagagcacagagaaaatggaggtccccagtctaggtaggaagctgattggatgaggacttctttttttttccgacagcaggatggggctcttgggctccacacaccagatgctttggttttctacaactgttgctatgtgtagagggtgctcagagcgtggcatgagagcaaggagaccatggctactctttgaaatggatggggaaaattagcttaaaaatttaatcacgagattgcgccacntgcactccagcctgggtgacagagcttagctccgtctcaaaaaaaa

SEQ ID NO: 53444 - DNA, 465 bp, Homo sapiens
ttttttttttggaaagcactgtctccttggctctagtctaaaggaacgtaagcaatatgaaggaccctagaggccaaggaaattgaagagaagtcagaggaagggatataaaatggaatgtattaatggattttagcccctttaagcttgtacttttgtgagagggttcaatggagagctttaatgcagatgagacttgaagcttctgaagaagatctaagtcttgatgaggttattcaaactcaaatcttgaatgcataatgatgataggccatggtcttcaaaaacgtggtacttgatgctctcccagagtgctaggatttgaatgccacaatacatattgactcatgtttttgtccattaatggtccgtgggtttctttaaatgaagtccattttagagtccatagatttcagtgttctgcaaaactgtcggggatcctaggctcccagcgcatcccagacg

SEQ ID NO: 53445 - DNA, 5300 bp, Homo sapiens
ggaaattgttcctcgtctgataagacaacagtggagaaaggacgcatgctgtttcttagggacacggctggcttccagatatgaccatgtatttgtggcttaaactcttggcatttggctttgcctttctggacacagaagtatttgtgacagggcaaagcccaacaccttcccccactggattgactacagcaaagatgcccagtgttccactttcaagtgaccccttacctactcacaccactgcattctcacccgcaagcacctttgaaagagaaaatgacttctcagagaccacaacttctcttagtccagacaatacttccacccaagtatccccggactctttggataatgctagtgcttttaataccacaggtgtttcatcagtacagacgcctcaccttcccacgcacgcagactcgcagacgccctctgctggaactgacacgcagacattcagcggctccgccgccaatgcaaaactcaaccctaccccaggcagcaatgctatctcagatgtcccaggagagaggagtacagccagcacctttcctacagacccagtttccccattgacaaccaccctcagccttgcacaccacagctctgctgccttacctgcacgcacctccaacaccaccatcacagcgaacacctcagatgcctaccttaatgcctctgaaacaaccactctgagcccttctggaagcgctgtcatttcaaccacaacaatagctactactccatctaagccaacatgtgatgaaaaatatgcaaacatcactgtggattacttatataacaaggaaactaaattatttacagcaaagctaaatgttaatgagaatgtggaatgtggaaacaatacttgcacaaacaatgaggtgcataaccttacagaatgtaaaaatgcgtctgtttccatatctcataattcatgtactgctcctgataagacattaatattagatgtgccaccaggggttgaaaagtttcagttacatgattgtacacaagttgaaaaagcagatactactatttgtttaaaatggaaaaatattgaaacctttacttgtgatacacagaatattacctacagatttcagtgtggtaatatgatatttgataataaagaaattaaattagaaaaccttgaacccgaacatgagtataagtgtgactcagaaatactctataataaccacaagtttactaacgcaagtaaaattattaaaacagattttgggagtccaggagagcctcagattattttttgtagaagtgaagctgcacatcaaggagtaattacctggaatccccctcaaagatcatttcataattttaccctctgttatataaaagagacagaaaaagattgcctcaatctggataaaaacctgatcaaatatgatttgcaaaatttaaaaccttatacgaaatatgttttatcattacatgcctacatcattgcaaaagtgcaacgtaatggaagtgctgcaatgtgtcatttcacaactaaaagtgctcctccaagccaggtctggaacatgactgtctccatgacatcagataatagtatgcatgtcaagtgtaggcctcccagggaccgtaatggcccccatgaacgttaccatttggaagttgaagctggaaatactctggttagaaatgagtcgcataagaattgcgatttccgtgtaaaagatcttcaatattcaacagactacacttttaaggcctattttcacaatggagactatcctggagaaccctttattttacatcattcaacatcttataattctaaggcactgatagcatttctggcatttctgattattgtgacatcaatagccctgcttgttgttctctacaaaatctatgatctacataagaaaagatcctgcaatttagatgaacagcaggagcttgttgaaagggatgatgaaaaacaactgatgaatgtggagccaatccatgcagatattttgttggaaacttataagaggaagattgctgatgaaggaagactttttctggctgaatttcagagcatcccgcgggtgttcagcaagtttcctataaaggaagctcgaaagccctttaaccagaataaaaaccgttatgttgacattcttccttatgattataaccgtgttgaactctctgagataaacggagatgcagggtcaaactacataaatgccagctatattgatggtttcaaagaacccaggaaatacattgctgcacaaggtcccagggatgaaactgttgatgatttctggaggatgatttgggaacagaaagccacagttattgtcatggtcactcgatgtgaagaaggaaacaggaacaagtgtgcagaatactggccgtcaatggaagagggcactcgggcttttggagatgttgttgtaaagatcaaccagcacaaaagatgtccagattacatcattcagaaattgaacattgtaaataaaaaagaaaaagcaactggaagagaggtgactcacattcagttcaccagctggccagaccacggggtgcctgaggatcctcacttgctcctcaaactgagaaggagagtgaatgccttcagcaatttcttcagtggtcccattgtggtgcactgcagtgctggtgttgggcgcacaggaacctatatcggaattgatgccatgctagaaggcctggaagccgagaacaaagtggatgtttatggttatgttgtcaagctaaggcgacagagatgcctgatggttcaagtagaggcccagtacatcttgatccatcaggctttggtggaatacaatcagtttggagaaacagaagtgaatttgtctgaattacatccatatctacataacatgaagaaaagggatccacccagtgagccgtctccactagaggctgaattccagagacttccttcatataggagctggaggacacagcacattggaaatcaagaagaaaataaaagtaaaaacaggaattctaatgtcatcccatatgactataacagagtgccacttaaacatgagctggaaatgagtaaagagagtgagcatgattcagatgaatcctctgatgatgacagtgattcagaggaaccaagcaaatacatcaatgcatcttttataatgagctactggaaacctgaagtgatgattgctgctcagggaccactgaaggagaccattggtgacttttggcagatgatcttccaaagaaaagtcaaagttattgttatgctgacagaactgaaacatggagaccaggaaatctgtgctcagtactggggagaaggaaagcaaacatatggagatattgaagttgacctgaaagacacagacaaatcttcaacttatacccttcgtgtctttgaactgagacattccaagaggaaagactctcgaactgtgtaccagtaccaatatacaaactggagtgtggagcagcttcctgcagaacccaaggaattaatctctatgattcaggtcgtcaaacaaaaacttccccagaagaattcctctgaagggaacaagcatcacaagagtacacctctactcattcactgcagggatggatctcagcaaacgggaatattttgtgctttgttaaatctcttagaaagtgcggaaacagaagaggtagtggatatttttcaagtggtaaaagctctacggcaaagcctaggccaggcatggtttccacattcgagcaatatcaattcctatatgacgtcattgcccagcacctaccctgctcagaatggacaagtaaagaaaaacaaccatcaagaagataaaattgaatttgataatgaagtggacaaagtaaagcaggatgctaattgtgttaatccacttggtgccccagaaaagctccctgaagcaaaggaacaggctgaaggttctgaacccacgagtggcactgaggggccagaacattctgtcaatggtcctgcaagtccagctttaaatcaaggttcataggaaaagacataaatgaggaaactccaaacctcctgttagctgttatttctatttttgtagaagtaggaagtgaaaataggtatacagtggattaattaaatgcagcgaaccaatatttgtagaagggttatattttactactgtggaaaaatatttaagatagttttgccagaacagtttgtacagacgtatgcttattttaaaattttatctcttattcagtaaaaaacaacttctttgtaatcgttatgtgtgtatatgtatgtgtgtatgggtgtgtgtttgtgtgagagacagagaaagagagagaattctttcaagtgaatctaaaagcttttgcttttcctttgtttttatgaagaaaaaatacattttatattagaagtgttaacttagcttgaaggatctgtttttaaaaatcataaactgtgtgcagactcaataaaatcatgtacatttctgaaatgacctcaagatgtcctccttgttctactcatatatatctatcttatatacttactattttacttctagagatagtacataaaggtggtatgtgtgtgtatgctactacaaaaaagttgttaactaaattaacattgggaaatcttatattccatatattagcatttagtccaatgtctttttaagcttatttaattaaaaaatttccagtgagcttatcatgctgtctttacatggggttttcaattttgcatgctcgattattccctgtacaatatttaaaatttattgcttgatacttttgacaacaaattaggttttgtacaattgaacttaaataaatgtcattaaaataaataaatgcaatatgtattaatattcattgtataaaaatagaagaatacaaacatatttgttaaatatttacatatgaaatttaatatagctatttttatggaatttttcattgatatgaaaaatatgatattgcatatgcatagttcccatgttaaatcccattcataactttcattaaagcatttactttgaatttctccaatgcttagaatgtttttaccaggaatggatgtcgctaatcataataaaattcaaccattatttttttcttgtttataatacattgtgttatatgttcaaatatgaaatgtgtatgcacctattgaaatatgtttaatgcatttattaacatttgcaggacacttttacaggccccaattatccaatagtctaataattgtttaagatctagaaaaaaaaaatcaagaatagtggtatttttcatgaagtaataaaaactcgttttggtgaaaa

SEQ ID NO: 53446 - DNA, 334 bp, Homo sapiens
gcactggcatgctgtgcctcgaatgtcactttcctgcccttcttgagccacctgccacctcgcttcttacggtcattcttcctggggtcaaggcctgagtgccctgctgccctgcgtgctggccctagtgcagggtgtgggccgcctcgagtgcccgccagcccccatcaacggcacccctggccccccgctcgacttccttgagcgttttcccgccagcaccttcttctgggcactgactgcccttctggtcgcttcagctgctgccttccagggtcttctgctgctgttgccgccaccaccatctgtacccacaggggagttaggatcaggc

SEQ ID NO: 53447 - DNA, 477 bp, Homo sapiens
  misc_feature (1)...(477): n = a,t,c or g
ggcgctccagaacagaacgatccctgaggctcccttgctcgaactgtgggacttaccctactatggtccgagcctaccctatttcattatactcaagtaacgccccagaaattccagagaatctcacacaaagaggttgagtcttgccgtggtgccttcaggggaatgtcatcccgggctagaagagctgcaaaaggctgtcaggcttctcagaactttgcttctccagcagaataatcctgcggaagactgagcagttcttgtgagtgtaaaaccatggcccatgtttgttatccaggcataagaccacgaaattatcttcanaaaaggacattcatgaaatcagtntatccanagagagtatanttnanaaangtaaaactctncnctganaggatccatttttagaaatgantgcngaacaaaagngagttganggtcaacagggacttaaaganagatctatcagtcaaaaga

SEQ ID NO: 53448 - DNA, 389 bp, Homo sapiens
gctggcatcctttagtagttaataatactaacatttcttcatagtttaaggtcaatttaaggaactgtgtctgttaggacaaatataataatcagttgggaggctgacaacttacaaagcacaatggacactgcttttgggtttagctttatttcccttcataaaagttctcttggtgatagctctatctacctaccttcccactctctgtttggactcttggatgtgccacatggacttgtagaacttctacattccaaatctatctgttcttgtctctgccgctgctcctccaggagtgctgactcatgcattgctttaatgtgtcgctggtagagagcatagcccgctcactggggttccaattggtatgttacatggggtgcagg

SEQ ID NO: 53449 - DNA, 1885 bp, Homo sapiens
gcagtgcggcggtcacaggctgagtgctgcggcgcgatccttgcttccctgagcgttggcccgggaggaaagaagatggtgctggatctggatttgtttcgggtggataaaggaggggacccagccctcatccgagagacgcaggagaagcgcttcaaggacccgggactagtggaccagctggtgaaggcagacagcgagtggcgacgatgtagatttcgggcagacaacttgaacaagctgaagaacctatgcagcaagacaatcggagagaaaatgaagaaaaaagagccagtgggagatgatgagtctgtcccagagaatgtgctgagtttcgatgaccttactgcagacgctttagctaacctgaaagtctcacaaatcaaaaaagtccgactcctcattgatgaagccatcctgaagtgtgacgcggagcggataaagttggaagcagagcggtttgagaacctccgagagattgggaaccttctgcacccttctgtacccatcagtaacgatgaggatgtggacaacaaagtagagaggatttggggtgattgtacagtcaggaagaagtactctcatgtggacctggtggtgatggtagatggctttgaaggcgaaaagggggccgtggtggctgggagtcgagggtacttcttgaagggggtcctggtgttccctggaacaggctctcatccagtatgcccttcgcaccttgggaagtcggggctacattcccatttataccccctttttcatgaggaaggaggtcatgcaggaggtggcacagctcagccagtttgatgaagaactttataaggtgattggcaaaggcagtgaaaagtctgatgacaactcctatgatgagaagtacctgattgccacctcagagcagcccattgctgccctgcaccgggatgagtggctccggccggaggaccttgcccatcaagtatgctggcctgtctacctgcttccgtcaggaggtggggctcccatggccgtgacacccgtgggcatcttccgagtccatcagtttgagaagattgaacagtttgtgtactcatcaccccatgacaacaagtcatgggagatgtttgaagagatgattaccaccgcaggaggagttctaccagtccctgggggattccttaccacattgtgaatattgtctcaggttctttgaatcatgctgccagtaagaagcttgacctgggaggcctggtttccgggctcaggagccttccgtgagttggtctcctgttctaattgcacggattaccaggctcgccggctttcgaatccgatatgggcaaaccaagaagatgatggacaaggtggagtttgtccatatgctcaatgctaccatgtgcgccactacccgtaccatctgcgccatcctggagaactaccagacagagaagggcatcactgtgcctgagaaattgaaggagttcatgcccgccaggactgcaagaactgatcccctttgtgaagcctgcgcccattgagcaggagccatcaaagaagcagaagaagcaacatgagggcagcaaaaagaaagcagcagcaagagacgtcaccctagaaaacaggctgcagaacatggaggtcaccgatgcttgaacattcctgcctccctatttgccaggctttcatttctgtctgctgagatctcagagcctgcccaacagcagggaagccaagcacccattcatccccctgcccccatctgactgcgtagctgagaggggaacagtgccatgtaccacacagatgttcctgtctcctcgcatgggcatagggacccatcattgatgactgatgaaaccatgtaataaagcatctctggggagggcttaggactcttcctcagtcttct

SEQ ID NO: 53450 - DNA, 345 bp, Homo sapiens
atttcatgccagtaaatgtggcaaagagaagaaaggcccaagagcgagacaagaagaatggagaagggggcagccaagaagaacttctgggttcagggtactgtttatttgctccttctcttcatgcctgtggctggatgtcccacaacactataagaaatataagtcaagccctttgtgttaagcaagaactacagactccatcttttcacccaaatcatgaatgaccaataaaaagcaagttattccagaggaagaagcagcccttgaaatgttaaggcttaggcttgaaaggtgaagagcaggaattctctctttcaaatcctagagcataaacccatgtgt

SEQ ID NO: 53451 - DNA, 404 bp, Homo sapiens
  misc_feature (1)...(404): n = a,t,c or g
gtatgtgtcgtcttcccaactgcactcgaagctacgttgtaaacttgagagcagcagctccattccatttactagtataggcgaggtcccagttagggttgccgtagatgtttgtatgtggcttcagtgagcgtgtgtctttgtgtacgtgggggtgaagtgaaggcgtgtttgtgggctggtttcccagctgcccagcctgactttctacagtcagcaggatgggacctgggagatgtcagggctgaagaccctggggagcatgtgggcagtgacagtcttccatcacttcaccccacggcgtggccagctttnggagctgaaagctgtttcttgcccccagttggcatggatgttccctncatccggcgccccccgcagcatgggatttcgtaatnttacaa

SEQ ID NO: 53452 - DNA, 542 bp, Homo sapiens
taaatgtcaactttaagaagcatttattatcagatgagtattagcataccattaagtcatttaaaataattttgcttgcttgtatattacagattttaaaagtctgatgtacaatttaaaatttataaaaatgatatatactttccacctttcctactttttcaggagtttactaagaaaaactggtgaaaggaaattatttgttttaaacatgcttgaatgaaatagtaaactattcagttattttaatctggcatattaatttttaaagcattttatcataattttcccaatattaaaaaatgttggacaacctacaatcaactggcccaaatacaaatatagcagaacgtaagataactcttctggcaggaaaagatcagttagacctcaaatggtcatttatcctcaatgcttcaaattggagaaggaacataatttattttgattcaaagttgtcctacaaatatttgaaaagaatatcctaaaatgcatgtgaaagatatttaagggcaagagaactaagtgaaaatgtactagga

SEQ ID NO: 53453 - DNA, 705 bp, Homo sapiens
aaaccttctgaagggaggtctcctgccccccatggctgctttgcttcccacgcccagttcagatcgggaccccaggtagcagacagagaccctggccaacagcaagtgccccactcacccacagcaaggatttgtttcctcatttcctaccttggaccacagggatggggcagctgaaagaaagggctgtgtcagggtgtctttctcccttttctccctcatttttctagatgcttttttgccttgtagttctttctctttttctttgctttctctttcctttttctgtctgtctcctatacctccccatctctcccttgcccctgccccatcttgcctttttctctttatcctccttttcctttcttattcctttgcctctcctcttcctgagccccacctgctcatctccctgccccaacatcctgtgccatccctgtggtgtgtttgggtcttggccaacgccagacctggcagaactgatggatacctggtgaggcagcggagcccctgggctcccaccccattccctcctcccggggctgcacaggtgagtaggtggaaggtaaggggggcagggaggggaaagaggtcctgggcttaaagcctgggcttggagtactgctccttgacactcagggtcaggcagagagaaaagagacagccttcaaggcagtccatgtcttggtgccccgggtcaaggtt

SEQ ID NO: 53454 - DNA, 330 bp, Homo sapiens
tggggaggaggaaggagggaggtccaggcccttcttccatcccacgtcctccacttcccaaggtgcaagaagaaaagaggtacagaacacccagaggtgccctcgattccgtcttgcacttgcccttctcccaccgtccagcaataaagcgagagaaacaagtgcaggaaactggccggcagtcatgggagaagccaaaaagacaggtgagcagcgcgtccgcctcccgcgcacaggtgagggctcacttctcgtgtcggcggcggcacacacaggaaagagccaagcgcgtgcacgcgggcccgcccctagcgttgcggcggcttcagc

SEQ ID NO: 53455 - DNA, 651 bp, Homo sapiens
  misc_feature (1)...(651): n = a,t,c or g
gggtaatgttggcttcatagaatgactcagaaagggttctgtttctcaactttttggaggagttcgagaaggattagtgttaattcatttctaaacgtttggtagaattcaccagcgaagtcatcagttcctgggcttttctttgttaggagagttttggttgctgattcaatcagaattgaatatcattactttttatagatctattcagatttattctttgttcttgagtcaactttgttggtttgtatgtttctaggaatttgtctgtttcatctaggttatccaattttttgacatatagctcttatacgaattctcttacaatcctttttattcctataaatcagtagtagtgtttttcatttctgattttagtagttgagtattctttttccttaatctagttaaagctttgtcaactttgttgatctcttcaaagaactaattttttgtttcattgattctattgttttnctattctctatttcatttatttttgctctaatccttattattnccttcctctttatggcttcaaactcaattgaacataaagtattaagaaattngactttnttnctcaaatgtctaaaatgtaagaggaaatatgtctagagtcatcaaaaagcagcctgtttgtcagattta

SEQ ID NO: 53456 - DNA, 814 bp, Homo sapiens
cctcaggaggatcaaacattatctatgtggccagcaatcattttgtttggagactcatccctgtccccatggcaacccaaatccaacaacttctccaggacaagcagtttgaattggctctgcagctcgcagaaatgaaagatgattctgacagtgaaaagcagcaacaaattcatcacatcaagaacttgtatgccttcaacctcttctgccagaagcgttttgatgagtccatgcaggtctttgctaaacttggcacagatcccacccatgtgatgggcctgtaccctgacctgctgcccacagactacagaaagcagttgcagtatcccaacccattgcctgtgctctccggggctgaattggagaaggctcacttagctctgattgactacctgacacagaaacgaagtcaattggtaaagaagctgaatgactctgatcaccagtcaagcacctcaccgctcatggaaggcactcccaccatcaaatccaagaagaagctgctacaaatcatcgacaccaccctgctcaagtgctatctccatacaaatgtggccctggtggcccccttgctacgcctggagaacaatcactgccacatcgaggagagcgagcacgtgctaaagaaggctcacaagtacagtgagcttatcatcctgtatgagaagaaggggctccacgagaaagctctgcaggtgctcgtggaccagtccaagaaagccaactcccctctgaaaggccacgagaggacagtgcagtatctgcagcatctggggcacagaaaacctgcattttgattttctcctactca

SEQ ID NO: 53457 - DNA, 521 bp, Homo sapiens
ttttttttttcctaaaaaaggcttatatttacttgatttgaattttgctagcatgctttttcttctgaattcaagtgactagaactgaaattattccacctggggagaagagacagctgaaaccaatttagtattggttttcaaatacatgaagggtactcagagagaggatgattgccaaagaaaatggtctttgaaccatagaaagaatctgagcttgctctaaagttaaatttcctgacttacagagtttatgacattaaactgagagaccaagggatcctttttggagacttcaaaaataggatagatccttaaatgcctgagatggcttgggatgtggctttgtctgaagtcaggaggataaatcttaccactgatggtcccttcaggcgtgtgaatctatgggtttgactggcatgtcagaagctagaatgccagcccaggacatctagagagtcatctctccaatgctgggtagcagtctatcaatcgctctcactgcctcaacatctctcagc

SEQ ID NO: 53458 - DNA, 2274 bp, Homo sapiens
ggcacgagaagaaatgaaaaatacaaacttcctattccatttccagaaggcaaggttctggatgatatggaaggcaatcagtgggtactgggcaagaagattggctctggaggatttggattgatatatttagctttccccacaaataaaccagagaaagatgcaagacatgtagtaaaagtggaatatcaagaaaatggcccgttattttcagaacttaaattttatcagagagttgcaaaaaaagactgtatcaaaaagtggatagaacgcaaacaacttgattatttaggaattcctctgttttatggatctggtctgactgaattcaagggaagaagttacagatttatggtaatggaaagactaggaatagatttacagaagatctcaggccagaatggtacctttaaaaagtcaactgtcctgcaattaggtatccgaatgttggatgtactggaatatatacatgaaaatgaatatgttcatggtgatataaaagcagcaaatctacttttgggttacaaaaatccagaccaggtttatcttgcagattatggactttcctacagatattgtcccaatgggaaccacaaacagtatcaggaaaatcctagaaaaggccataatgggacaatagagtttaccagcttggatgcccacaagggagtagccttgtccagacgaagtgacgttgagatcctcggctactgcatgctgcggtggttgtgtggggaaacttccctgggaacagaacctgaaggaccctgtgggctgtgcagactgctaaaacaaatctgttggacgagctcccccagtcagtgcttaaatgggctccttctggaagcagttgctgtgaaatagcccaatttttggtatgtgctcatagtttagcatatgatgaaaagccaaactatcaagccctcaagaaaattttgaaccctcatggaatacctttaggaccactggacttttccacaaaaggacagagtataaatgtccatactccaaacagtcaaaaagttgattcacaaaaggctgcaacaaagcaagtcaacaaggcacacaataggttaatcgaaaaaaaagtccacagtgagagaagcgctgagtcctgtgcaacatggaaagtgcagaaagaggagaaactgattggattgatgaacaatgaagcagctcaggaaagcacaaggagaagacagaaatatcaagagtctcaagaacctttgaatgaagtaaacagtttcccacaaaaaatcagctatacacaattcccaaactcattttatgagcctcatcaagattttaccagtccagatatattcaagaagtcaagatctccatcttggtataaatacacttccacagtcagcacggggatcacagacttagaaagttcaactggactttggcctacaatttcccagtttactcttagtgaagagacaaacgcagatgtttattattatcgcatcatcatacctgtccttttgatgttagtatttcttgctttattttttctctgaagatgataccaaaattccttttgataattttttaagtttccagctcttcaccgaaatgttgtattcttatttcagtgtttccttccagacatttttaaggtaattggcttactacaatatggacattcaccaaatatgatgttaaaactctgtctactagttagtagtcctctcagccactcatataagcatatttgatggaaaggttgtccacactgggaattatcacacacttgatcaggaatggtaccgtcaagttgataagcataacaaattccacaatccatagtaaaatcagatttttccaggatagcacgagctggaaaatcaatttctaaaacatctttcaaattttgtaacacactattttctggatccccacaaatgtatgttcctgctcagcttaattcccaggggttttaccacatggtcagctccaagaaagaagcactcaggaagcatagtaggatgcctggggtctacctctatatttatggaaacattattacctaatgcaattctgcgtgctgttgcactccgtggaggtttttctggctcaagtacccaggtcttctcatcgatttcatccataacatcccagaatgcctttagtgattctattgctgccaaaaactgactataaatgcttattaaggagctctgagccgagatgaatccctcatacacggttttcgaccggttctggggcagaagcagggggcactggcgcaacaggctcgcttccgtc
